(19) United States
(12) Patent Application Publication
(10) Pub. No.: US 2016/0078168 A1
(43) Pub. Date: Mar. 17, 2016

(54) FUSION TRANSCRIPT DETECTION METHODS AND FUSION TRANSCRIPTS IDENTIFIED THEREBY

(71) Applicant: SPLICINGCODES.COM, Palmetto Bay, FL (US)

(72) Inventors: Degen ZHUO, Palmetto Bay, FL (US); Xiaoyan YANG, Zionsville, IN (US)

(73) Assignee: SPLICINGCODES.COM, Palmetto Bay, FL (US)

(21) Appl. No.: 14/792,613

(22) Filed: Jul. 7, 2015

Related U.S. Application Data
(63) Continuation-in-part of application No. 13/372,180, filed on Feb. 13, 2012.

(51) Int. Cl. G06F 19/22; C12Q 1/68

(52) U.S. Cl. CPC G06F 19/22; C12Q 1/6886; C12Q 2600/156

(57) ABSTRACT

This present disclosure generally relates to compositions and methods for cancer diagnosis, research and therapy, including but not limited to, cancer markers. In particular, the present disclosure provides a computerized method for detecting fusion transcripts from RNA-seq data and provides the fusion transcripts identified thereby in human cancers. Compositions and methods for identifying the fusion transcripts are also provided.

### CROSS-REFERENCE TO RELATED APPLICATIONS

[0001] The present application is a continuation-in-part of U.S. patent application Ser. No. 13/372,180, filed Feb. 13, 2012, the contents of which are hereby incorporated by reference in its entirety.

### REFERENCE TO SEQUENCE LISTING SUBMITTED ELECTRONICALLY

[0002] The content of the electronically submitted sequence listing, file name Human_Cancer_Fusion_Transcripts20150705.txt, size 176,469,241 bytes; and date of creation Jul. 5, 2015, filed herewith, is incorporated herein by reference in its entirety.

### BACKGROUND OF THE INVENTION

[0003] Cancer is one of the leading causes of deaths in the world and a class of heterogeneous complex diseases with multiple genes in diverse pathways involved in its initiation, uncontrolled growth, invasion, and metastasis. One of the cancer hallmarks is genetic instabilities that can result in chromosomal translocation, insertion, duplication, deletion, and inversion. These genetic alternations often cause fusion genes, which in turn are transcribed into fusion mRNAs or fusion transcripts (Mitelman, et al. 2007). Numerous methods have been developed to characterize the cancer genomic aberrations. Introduction of molecular cytogenetic technologies such as chromosomal fluorescence in situ hybridization (FISH) and multicolor FISH into the repertoire of clinical testing and genetic investigation has led to an explosion of information about chromosomal aberrations in cancers, which has greatly improved our understanding of the prevalence and variety of these genomic rearrangements. Comparative genomic hybridization (CGH) and—array CGH are developed to detect chromosomal aberration and copy-number variations in cancers. Applications of these technologies in clinical and genetic investigations have accumulated an abundance of information about chromosomal aberrations, which is stored in NCI's Cancer Chromosomes database (Mitelman, et al. 2015).

[0004] Next-generation sequencing of transcriptomes (RNA-seq) is one of the most recent technological advances and provides one of the most important tools to unbiasedly profile gene expression and to uncover the novel splice sites. However, RNA-Seq faces several bioinformatics challenges from developing efficient methods to storing, retrieving and processing large amounts of RNA-Seq data, which disproportionally accumulate highly expressed mRNA sequences. Existence of spliceosomal introns in gene sequences, especially in the mammalian genes makes analyses of these short sequences more problematic and computationally expensive. To overcome these challenges, a number of softwares have been developed to profile gene expression and to identify novel alternatively-spliced splice sites and fusion transcripts. The software to be able to detect fusion transcripts include TopHat-Fusion, SOAPfusion, SnowShoes-FTD, ShortFuse, BreakFusion, ChimeraScan, Comrad, FusionAnalyser, deFuse, FusionMap, FusionHunter, FusionSeq, R-SAP, Trans-ABySS and Trinity.

[0005] These technological advances have led to the identification of multiple novel fusion transcripts (Klijn, et al. 2015, Robinson, et al. 2011, Sakarya, et al. 2012). More recently, transcriptome sequencing and RNA-seq have been used to identify the fusion genes (Maher, et al. 2009, Zhao, et al. 2009). Using paired-end RNA sequencing, Maher et al. has identified 12 novel chimeric transcripts of fusion genes in 4 cancer cell line (Maher, et al. 2009). Edgren et al. have applied paired-end RNA-seq to identify 24 novel and 3 previously known fusion genes in breast cancer cells (Edgren, et al. 2011). The software improvement has led to the identification of more fusion transcripts (Kim and Salzberg 2011). Recently, Sakarya et al. have used next-generation sequencing to analyze MCF-7 breast cancers and have identified 40 novel fusion genes (Sakarya, et al. 2012). More recently, Klijn et al have performed comprehensive RNA-seq analysis of 675 human cancer cell lines and have identified 2,200 unique pairs of fusion genes, 1,435 of which had been previously not found (Klijn, et al. 2015). Many of these chimeric transcripts have shown to have multiple isoforms (Robinson, et al. 2011). The read-though fusion transcripts have been shown to be associated with breast cancer (Varley, et al. 2014).

[0006] However, current approaches are inefficient to analyze large RNA-seq datasets. Majority of them often are very slow and require large memories and powerful computation systems. They are effective to uncover highly-expressed fusion transcripts and may be unable to discover lowly-expressed fusion transcripts. Because some algorithms used may be unintentional to remove some fusion transcripts from considerations. A large amounts of RNA-seq datasets have been accumulated in ENCODE (ENCODE 2015), ENA (ENA 2014) and NCBI (NCBI 2014). However, the numbers of fusion transcripts identified so far remain small considering cancer extreme heterogeneities and complexities.

### SUMMARY OF THE INVENTION

[0007] This application generally relates to a method for identifying fusion transcripts in cancers, and more specifically to a computerized method for identifying fusion transcripts from RNA sequencing data obtained from cancer cells. The application also relates to sequences of fusion transcripts identified by the above method.

[0008] Previously, the applicant had disclosed a method of identifying exons and introns from predetermined genome data including nucleotide sequence data, predetermined 5′ and 3′ splicing junction data, and exon and intron data (U.S. Pat. No. 8,185,323). The contents of the above patent are hereby incorporated by reference in its entirety.

[0009] The applicant had observed that recently-gained human spliceosomal introns had identical 5′ and 3′ splice sites (Zhuo, et al. 2007). Based on this finding, the applicant had found that both 5′ exonic sequences (E5) immediately upstream of introns and 3′ intronic sequences (13) were dynamically conserved and appears rather reminiscent of self-splicing group II ribozymes and of constraints imposed by base pairing between intronic-binding sites (IBSs) and exonic-binding sites (EBSs) (Zhuo, et al. 2012). Therefore, the applicant has proposed that both E5 and I3 sequences constitute splicing codes, which are deciphered by splicer proteins/RNAs via specific base-pairing (Zhuo, et al. 2012). This splicing code model suggested that a yet-to-be characterized splicer proteins/RNA would decode identical sequences in all pre-mRNAs in conjugation with U snRNAs and spliceosomes, regardless whether the E5 and I3 sequences are in the one molecule or two different molecules.

[0010] Based on this splicing code model, the applicant has developed a simple, accurate and fast computation system to analyze RNA-seq data for the discovery of fusion transcripts, and has identified a large number of novel fusion transcripts, some of which can be used for early detection and prognosis of cancer.

[0011] Disclosed herein includes a method of detecting alternatively spliced transcripts or fusion transcripts in at least one RNA sequence obtained from biochemical analysis of a biological sample from a species or from a database, comprising the steps of:

[0012] (a) providing a computer for data identification, aligning, and comparison purposes, wherein the computer has access to predetermined genome data of said species, comprising data of predetermined genomic nucleotide sequences, predetermined splicing junctions, predetermined exons, predetermined introns, and annotated genes;

[0013] (b) generating a splicing code table using the predetermined genome data, the splicing code table comprising ordered E5 keys, I5 keys, E3 keys and I3 keys, wherein the E5 keys, the I5 keys, the E3 keys and the I3 keys are subsequences of predetermined 5′ exonic (E5), 5′ intronic (I5), 3′ exonic (E3), and 3′ intronic (I3) splicing sequences for each of the predetermined splicing junctions respectively;

[0014] (c) aligning the at least one RNA sequence with each of the E5 keys and each of the E3 keys in the splicing code table; and

[0015] (d) determining that the at least one RNA sequence is an alternatively spliced transcript if: the at least one RNA sequence contains a first subsequence substantially identical to an E5 key of a first splicing junction and a second subsequence substantially identical to an E3 key of a second splicing junction of the same gene; or the at least RNA sequence contains a subsequence substantially identical to an E5 key of an annotated gene, but an immediate downstream sequence of said subsequence is mapped to an intron region of the same annotated gene; or the at least one RNA sequence contains a subsequence substantially identical to an E3 key of a splicing junction, but an immediate upstream sequence of said subsequence is mapped to an intron region of the same annotated gene; or determining that the at least one RNA sequence is a fusion transcript if: the at least one RNA sequence contains a subsequence substantially identical to an E5 key of a first annotated gene, and an immediate downstream sequence of said subsequence is substantially identical to an E3 key of a second annotated gene; or the at least RNA sequence contains a subsequence substantially identical to an E5 key of a first annotated gene, and an immediate downstream sequence of said subsequence is mapped to a second annotated gene; or the at least one RNA sequence contains a subsequence substantially identical to an E3 key of a first annotated gene, and an immediate upstream sequence of said subsequence is mapped to a second annotated gene.

[0016] In some embodiments of the method, the E5 keys, the I5 keys, the E3 keys and the I3 keys in the splicing code table in step (b) have a length of about 20-50 bp.

[0017] In some embodiments of the method, the at least one RNA sequence is obtained from a biochemical analysis such as RT-PCR followed by direct sequencing, RNA sequencing, and transcriptome sequencing (whole-genome RNA sequencing). In some embodiments, the at least one RNA sequence may be retrieved from an online database in which a set of predetermined RNA sequences are deposited.

[0018] In some embodiments, the method for detecting alternatively spliced transcripts or fusion transcripts in RNA sequences may further comprising a quality control step between step (b) and step c), wherein the quality control step comprises removing reads from the at least one RNA sequence, wherein the reads have substantially same sequences as at least one of mitochondrial gene sequences, mitochondrial ribosomal RNA sequences, ribosomal RNA sequences, poly (A) sequences, GC-repetitive sequences, AT-rich sequences, and simple and contaminant sequence reads.

[0019] This method of analyzing RNA sequences for detecting alternatively spliced transcripts or fusion transcripts as disclosed above can be applied to any eukaryotic organism where RNA splicing occurs. Examples of such applications in mammals includes human, mouse or rat. The at least one RNA sequences can be obtained from a biological sample, such as a cell line, a tissue, or a cell-free plasma sample.

[0020] Disclosed herein also includes a method of utilizing knowledge of predetermined fusion transcripts to identify one or more such fusion transcripts from a transcriptome RNA sequencing data obtained from a biological sample, and to then quantitatively determine the expression level of the fusion transcripts in the biological sample. Such a qualitative and quantitative method to characterize at least one RNA sequence read in a transcriptome dataset for fusion transcripts is disclosed, comprising the steps of:

[0021] (a) providing a computer for data identification, aligning, comparison and computation purposes, wherein: the computer has access to the transcriptome dataset, the transcriptome dataset comprising data of genome-wide RNA sequence reads and counts thereof and; and the computer has access to a predetermined fusion transcript table, the predetermined fusion transcript table comprising data of predetermined E5-E3 keys, wherein: each of the predetermined E5-E3 keys corresponds to junction sequence of a predetermined fusion transcript, comprising an E5 key and an E3 key, wherein the E5 key corresponds to a 5′-end subsequence of the predetermined fusion transcript and is mapped to a first annotated gene; the E3 key corresponds to a 3′-end subsequence of the predetermined fusion transcript and is mapped to a second annotated gene; and the E5 key and the E3 key is connected at a junction of the predetermined fusion transcript;

[0022] (b) aligning the at least one RNA sequence read with each of the E5-E3 keys in the predetermined fusion transcript table; and

[0023] (c) determining that the at least one RNA sequence read is mapped to a predetermined fusion transcript if the at least one RNA sequence read contains a subsequence substantially identical to an E5-E3 key in the predetermined fusion transcript table.

[0024] Optionally in some embodiments, the method may further comprise, following step (c), a step of determining expression level of the predetermined fusion transcript to which the at least one RNA sequence read is mapped in the biological sample, the step comprising: (i) determining that E5 key and E3 key of the E5-E3 key, which corresponds to the predetermined fusion transcript, are unique in the transcriptome dataset; and (ii) determining the expression level of the predetermined fusion transcript in the biological sample, by dividing the count of the at least one RNA sequence read by sum of the counts of the genome-wide RNA sequence reads in the transcriptome dataset.

[0025] This disclosure also provides all the fusion transcripts identified by the above mentioned method applied in human cancer cells, with their junction sequences specifically disclosed herein.

[0026] A set of isolated, cloned recombinant or synthetic polynucleotides, is provided herein, comprising at least one polynucleotide, wherein each of the at least one polynucleotide encodes a fusion transcript, the fusion transcript comprising a 5′ portion from a first gene and a 3′ portion from a second gene, wherein the 5′ portion from the first gene and the 3′ portion from the second gene is connected at a junction; the junction has a flanking sequence, comprising a sequence selected from the group of nucleotide sequences as set forth in SEQ ID NOs: 1-258,853, or from complementary sequences thereof.

[0027] Disclosed herein also includes compositions and methods for detecting the presence of the fusion transcripts as disclosed above, based substantially on approaches to detect the above disclosed junction sequences of these fusion transcripts.

[0028] As such, this disclosure provides a composition for detecting, from a biological sample from a subject, the set of polynucleotides which correspond to the above disclosed junction sequences of the fusion genes.

[0029] In some embodiments, the composition may comprise at least one probe, wherein each of the at least one probe comprises a sequence that hybridizes specifically to a junction of a fusion transcript encoded by one of the set of polynucleotides. One such example may include one or more polynucleotide probes for Northern blot analysis to detect the presence of fusion transcripts. Another example may include a plurality of probes, which are immobilized on a substrate and used for microarray analysis to detect the presence of fusion transcripts.

[0030] Yet in some other embodiments, the composition may comprise at least one pair of probes, wherein each of the at least one pair of probes comprises: a first probe comprising a sequence that hybridizes specifically to a first gene of a fusion transcript encoded by one of the set of polynucleotides; and a second probe comprising a sequence that hybridizes specifically to a second gene of the fusion transcript. One example may include one or more pairs of hybridizing probes used in an in situ hybridization (ISH) assay to detect the presence of fusion transcripts.

[0031] Yet in some other embodiments, the composition may comprise at least one pair of amplification primers, wherein each of the at least one pair of amplification primers comprise a first amplification primer comprising a sequence that hybridizes specifically to a first gene of a fusion transcript encoded by one of the set of polynucleotides; a second amplification primer comprising a sequence that hybridizes specifically to a second gene of the fusion transcript; and a means for detecting an amplified product generated between the first amplification primer and the second amplification primer. One example may include a pair of amplification primers used for RT-PCR analysis to detect the presence of fusion transcripts. The composition as such may also comprise a means for generating cDNA molecules from mRNA molecules in the biological sample, such as a reverse transcriptase.

[0032] This disclosure further provides a method for detecting, from a biological sample from a subject, the presence of at least one of the set of polynucleotides which correspond to the above disclosed junction sequences of the fusion genes, comprising: (a) performing a biochemical assay on the biological sample, using at least one gene fusion informative composition for detection of the at least one of the set of polynucleotides; and (b) determining the presence, or absence, of the at least one of the set of polynucleotides in the biological sample.

[0033] In some embodiments of the method, the biochemical assay in step (a) comprises a nucleic acid hybridization technique, such as in situ hybridization (ISH), microarray analysis, and Northern blot analysis. In the embodiment where the biochemical assay in step (a) is a microarray analysis, the biochemical assay may comprise the sub-steps of: (i) isolating mRNA molecules from the biological sample; (ii) converting the mRNA molecules into cDNA molecules, and optionally amplifying the cDNA molecules; (iii) labeling the cDNA molecules; (iv) hybridizing the labeled cDNA molecules to a microarray chip, wherein the microarray chip comprises a plurality of probes and a substrate; the plurality of probes are immobilized on the substrate; and each of the plurality of probes comprises an oligonucleotide sequence that hybridizes specifically to a junction of a fusion transcript encoded by one of the set of polynucleotides; and (v) detecting a pattern of hybridization for each of the plurality of probes.

[0034] Yet in some other embodiments of the method, the biochemical assay in step (a) comprises a nucleic acid amplification technique, selected from the group consisting of: polymerase chain reaction (PCR), reverse transcription polymerase chain reaction (RT-PCR), transcription-mediated amplification (TMA), ligase chain reaction (LCR), strand displacement amplification (SDA), and nucleic acid sequence based amplification (NASBA). In the embodiment where the biochemical assay is reverse transcription polymerase chain reaction (RT-PCR), the biochemical assay in step (a) comprises the sub-steps of: (i) isolating mRNA molecules from the biological sample; (ii) converting the mRNA molecules into cDNA molecules; (iii) performing at least one PCR on the cDNA molecules, using at least one pair of amplification primers, wherein each of the at least one pair of amplification primers comprise a first amplification primer comprising a sequence that hybridizes specifically to a first gene of a fusion transcript encoded by one of the set of polynucleotides; a second amplification primer comprising a sequence that hybridizes specifically to a second gene of said fusion transcript encoded by one of the set of polynucleotides; and (iv) detecting amplification products from the at least one PCR.

[0035] In some embodiments of the method, the biochemical assay in step (a) comprises a nucleic acid hybridization technique, such as in situ hybridization (ISH), microarray analysis, Northern blot analysis, and RNA CaptureSeq. In the embodiment where the biochemical assay is RNA CaptureSeq, the biochemical assay in step (a) comprises the sub-steps of: (i) isolating mRNA molecules from the biological sample; (ii) designing DNA oligonucleotide probes specific to splicing junctions of fusion transcripts; (iii) propagating cDNA libraries; (iv) hybridizing libraries to probes; (v) washing and removing no targeted cDNA; (vi) eluting targeted cDNA for sequencing; and (vi) analyzing captureseq data described above.

### BRIEF DESCRIPTION OF THE DRAWINGS

[0036] FIG. 1 shows schematic diagram of classification of different types of alternatively-spliced isoforms and fusion transcripts. 1 and 2, 3 are upstream, middle and downstream introns. The white, gray and black squares represent upstream, middle and downstream exons, respectively. Reference (REF) is a verified annotated sequence and is used to generate splicing code table. Horizontal arrows indicate alternative splice sites. Vertical arrows indicate junctions of pre-mRNA splicing. A) The sequence is identical to the reference sequence. B) The sequence has no middle exon to form a novel intron. C) The sequence has identical 3′ splice site, but 5′ splice is different from the reference. Splicing generates a 5′ alternatively-spliced isoform. D) The sequence has identical 5′ splice site, but 3′ splice is different from the reference. Pre-mRNA splicing forms a 3′ alternatively-spliced isoform. E) The sequence has both different 5′ and 3′ splice sites. This is a novel intron. F) Two different transcriptional units are originally transcribed separately into different molecules. Genetic alternations have brought two genes together to form a new transcriptional unit and to generate fusion transcripts. Alternatively, trans-splicing generates a fusion transcript.

[0037] FIG. 2 shows schematic procedure of using the splicingcode model to analyze RNA-seq data. The splicingcode program can generate three different tables, which are E5-E3 table, E5 table and E3 table. Using these three tables, we can obtain the most important information of RNA-seq data. The black arrows indicate directions. Horizontal arrows represent two pathways: identification of novel splicing isoforms and discovery of fusion transcripts.

[0038] FIG. 3 shows a detailed description of the method to identify fusion transcripts from RNA-seq reads, shown in the right pathway in FIG. 2.

[0039] FIG. 4 shows detailed characterization of the 16,570 fusion transcripts with canonical splice junctions identified from ENCODE from thirty-nine cancer cell line datasets (ECD39). FT and PFG represent fusion transcripts and putative fusion genes supported fusion transcripts, reprehensively. a) Characterization of the fusion transcripts identified from ENCODE thirty-nine cancer cell lines (ECD39). White bar represents total 16,570 fusion transcripts. Some of fusion transcripts are alternatively spliced from the two same putative fusion genes indicated by gray bar. Black bar and gray doted bar represent numbers of 5′ unique genes and 3′ unique genes, respectively. The numbers reduced from total PFG's numbers indicate 5′ and 3′ gene redundancies, which suggest the numbers of genes can be fused two or more different genes. Dark doted gray bar shows the total numbers of unique genes of both 5′ and 3′ genes, reduction of which indicates a gene can be used as a donor or as an acceptor. Black and gray bars in the Insert of FIG. 1a represent average numbers of sequence reads across splice junctions and average lengths of fusion transcripts, respectively. b) Distribution of fusion transcripts in 39 cancer cell lines. Gray, black, and white bars represent the putative fusion genes, fusion transcripts and the millions of sequence reads used to identify fusion transcripts; c). Type distributions of fusion transcripts. Gray and black bars indicate the putative fusion genes and fusion transcripts, respectively; d). Distributions of cancer cell lines in which fusion transcripts have been identified. Gray, dark gray and black bars represent percentages of fusion transcripts that are detected in 1, 2 and ≧3 cancer cell lines, respectively.

[0040] FIG. 5 shows a Van diagram of overlapped fusion transcripts between different datasets. In this paper, “overlapped” means “identical”. Gray and white circles represent the ECD39's MCF7 fusion transcripts we have identified and those fusion transcripts validated by Sakarya et al. (Sakarya, et al. 2012).

[0041] FIG. 6 shows Van diagrams of overlapped fusion genes between ECD39 and GCD. a). Van diagram showing identical (overlapped) fusion genes between the ECD39 MCF7 fusion transcripts (dark gray) and the GCD MCF7 fusion transcripts (light gray); b). Van diagram showing identical (overlapped) fusion genes between the total ECD39 fusion transcripts (white circle) and the total GCD fusion transcripts (light gray).

[0042] FIG. 7 shows analysis and characterization of HMGA2|LUM fusion transcripts in osteosarcoma SJSA1 cell line, a multipotential sarcoma. a). Structures of HMGA2 and LUM genes, which are represented by black and gray arrows, respectively. Both genes are on chromosome 12 and separated by 25 Mb. They are brought together by deletions or translocations, which are indicated a pair of paralleled lines. Dashed white box indicates unknown regions between two gens. Black and gray squares represent exons of two different genes while triangle lines represent introns, respectively. Dashed line are omitted exons and introns. Dashed arrow indicates that two genes are close enough to be transcribed into a single molecule pre-mRNA; b) There are two fusion transcripts that differ by two nucleotides (isoform 1 vs isoform 2). c) Expression levels of these two isoforms (isoform 1 vs isoform 2) differ by 4200 folds.

[0043] FIG. 8 shows illustrations and experimental verification of the lowly-expressed CPSF6|CACNA1E fusion transcripts in lymphoblastoid cells GM12878. a). CPSF6 gene on the chromosome 12 and CACNA1E gene on the chromosome 1 have been brought together via translocation indicated by arrows. Black and gray squares represent exons to demonstrate where breakpoints are located on the genes. The numbers indicate exon positions. Solid angle lines and dashed dots represent introns and gaps, respectively. b). RNA-splicing has removed intronic sequences of the putative CPSF6|CACNA1E fusion gene. Black and gray capital letters represent 5′ and 3′ exonic sequences, respectively. Gray and black italic letters represent 5′ and 3′ intronic sequences, respectively. The numbers indicate sequence gaps. c). Diagrams show that the CPSF6|CACNA1E fusion transcript is amplified by RT-PCR. cDNA fragments are then cloned into pCR4-TOPO clone vector. The positive clones are sequenced. The fusion transcripts are verified by blast and visual inspections. Arrow indicates splice junction of the CPSF6|CACNA1E fusion transcripts. Black and gray squares represent CPSF6 exons and CACNA1E exons, respectively.

[0044] FIG. 9 shows analysis and characterization of MTG1|SCART1 (LOC609217) read-through fusion transcripts. a). Schematic diagram of structures of MTG1 and SCART1 genes on the chromosome 10q26.3. The black and dark gray arrows represent MTG1 and SCART1 genes, respectively. Other genes around MTG1 and SCART1 genes are indicated by white and light gray arrows. Dashed lines represent omitted exons and introns. Dashed arrow indicates read-through transcription of a single pre-mRNA molecule, which is spliced into fusion transcript; b) There are eight MTG1|SCART1 fusion transcripts identified, which are shown to be alternatively spliced; The black and gray boxes represent MTG1 and SCART1 exon, respectively. The numbers above the boxes are exon numbers. The numbers in the sequence indicate numbers of omitted nucleotides; c) Distribution of eight MTG1|SCART1 fusion transcripts. Black bars represent the numbers of eight MTG1|SCART1 fusion transcripts detected, respectively. d). Distribution of the total MTG1|SCART1 fusion transcripts detected among different cancer cell lines; and e). Distribution of the normalized MTG1-SCART1 fusion transcripts among different cancer cell lines. Y-axe unit is numbers of transcripts per million sequence reads (NSJMR).

[0045] FIG. 10 shows differential expression of read-through C19orf47|AKT2 fusion transcripts. a). The C19orf47|AKT2 fusion transcripts have been detected in nine normal tissues, which include bone marrow (b. marrow), colon, duodenum, fallopian tubes (f. tube), fat gall bladder (g. bladder), testis, thyroid, tonsil and not found in 20 other tissues including breast and HMEC; b). The C19orf47|AKT2 fusion transcripts have been observed in 9 samples out of 168 HIBCD breast cancer samples. The expressional levels of the C19orf47|AKT2 fusion transcripts are expressed in NSJMR (numbers of splice junctions per million reads).

[0046] FIG. 11 shows analysis of read-through GAL3ST2|NEU4 fusion transcripts. The GAL3ST2|NEU4 fusion transcripts have been found to be expressed only in normal colon tissues, but absent in 26 other tissues and HMEC. This demonstrates that GAL3ST2|NEU4 are differentially expressed. The GAL3ST2|NEU4 fusion transcripts have been detected in 5 different individual cancer tissues. The expressional levels of the GAL3ST2|NEU4 fusion transcripts are expressed in NSJMR (numbers of splice junctions per million reads).

[0047] FIG. 12 shows analysis and characterization of KANSL1 (KIAA1267)|ARL17A fusion transcripts. a). Schematic diagram of structures of ARL17A and KANSL1 genes on the chromosome 17. A potential inversion results in KANSL1-ARL17A gene structure. The gray and black arrows represent the KANSL1 and ARL17A genes, respectively. Dashes arrow indicate potential fusion pre-mRNA; b) there are six KANSL1|ARL17A fusion transcripts identified from cancer cell lines. Black and gray capital letters represent 5′ and 3′ exonic sequences, respectively. The numbers within the sequences indicate the omitted nucleotides; c) Distribution of six KANSL1|ARL17A fusion transcripts detected; d). Distribution of the total KANSL1|ARL17A fusion transcripts among different cancer cell lines; and e). Expression of the normalized KANSL1|ARL17A fusion transcripts among different cancer cell lines. Y-axe unit is numbers of splice junctions per million of sequence-reads (NSJMR). The black and gray boxes represent KANSL1 and ARL17A exons, respectively. Dashed lines indicate omitted exons and introns. The numbers above the boxes are exon numbers.

[0048] FIG. 13 shows an example of using the fusion transcripts' hit maps of fusion transcripts to identify genetic rearrangement hotspots. a). Distribution of total fusion transcripts and inversion fusion transcripts along the chromosome 17. b). Distribution of total fusion transcripts and inversion fusion transcripts found in ≧2 cancer cell lines along the chromosome 17. Each X-axe unit represents 5M bp. Arrows indicate the locations of KANSL1|ARL17A fusion transcripts. The gray triangles and black squares represent total fusion transcripts and inversion fusion transcripts, respectively.

[0049] FIG. 14 shows genome-wide hit maps of fusion transcripts. Relationship between total putative fusion genes (gray triangles) and putative inversion fusion genes whose transcripts existed in two or more cancer cell lines (black squares). a, b, c, d, e, f, g, h, i, j, k, l, m, n, o, p, q, r, s, t, u, v and x represent human chromosome 1, 2, 3, 4, 5, 6, 7, 8, 9, 10, 11, 12, 13, 14, 15, 16, 17, 18, 19, 20, 21, 22, and X. Each of X-axe units represents 5 Mb.

[0050] FIG. 15 shows results of comparative analyses of numbers of KANSL1|ARL17A samples between HIBCD and SKBCP datasets. Gray and black squares represent total numbers of samples and the numbers of samples that are found to have KANSL1|ARL17A, respectively. The difference of KANSL1|ARL17A samples between HIBCD and SKBCP is found to be statically significant (p<0.001).

[0051] FIG. 16 shows expressions of KANSL1|ARL17A fusion transcripts in the 168 HIBCD breast cancer samples. X-axe indicates samples' IDs. Y-axe is numbers of splice junctions per million reads (NSJMR).

[0052] FIG. 17 shows results of analysis of the 168 HIBCD (a) and SKBCP (b) breast cancer samples and identification of GABBR1andUBD|PSPH fusion transcripts. a). The GABBR1andUBD|PSPH fusion transcripts have been found in 31 HIBCD samples. b). The GABBR1andUBD|PSPH fusion transcripts have been detected in 7 SKBCP samples. Y-axe is NSJMR.

[0053] FIG. 18 shows verification results of the low-level expressed GABBR1andUBD|PSPH fusion transcripts in breast cancer cell line BT-474. a) GABBR1andUBD gene is located on chromosome 6 and has 24 exons while PSPH genes is on chromosome 7 and has 8 exons. Black and gray squares represent GABBR1andUBD exons demonstrate where breakpoints are located on the genes. Dark and light gray boxes represent PSPH exons to demonstrate where breakpoints are located on the genes. A potential translocation results in putative GABBR1andUBD|PSPH fusion gene, which is represented by black and light gray boxes; b). Black Capital and dark italic gray letters represent exonic and intronic sequences of GABBR1andUBD 5′ splice junction sequences. The light gray italic and gray Capital letters are intronic and exonic sequences of the PSPH 3′ fusion junction; c). These GABBR1andUBD|PSPH fusion transcripts are amplified by RT-PCR. d). RT-PCR fragments are then cloned into pCR4-TOPO clone vector. The positive clones are isolated and sequenced. The arrow indicates splice junctions of the GABBR1andUBD|PSPH fusion transcripts. The black and light gray boxes represent GABBR1andUBD and PSPH exons, respectively.

[0054] FIG. 19 illustrates complex fusion transcripts between non-coding RNA oncogene PVT1 and protein-coding EXOC4 genes. a). A rod-like structure shows that EXOC4 gene is located on Chromosome 7. Gray boxes and black line triangles represent exons and introns, respectively; b). A rod-like structure shows that non-coding RNA PVT1 gene is located on chromosome 8q24 and has been shown to be an non-coding RNA oncogene. The black boxes and triangle lines indicate PVT1 gene structure; c) PVT1|EXOC4 fusion transcripts. 9 fusion transcripts have been identified have been identified in SH-N-SK cancer cell line, a human neuroblastoma. The black and gray rectangle boxes represent the PVT1 and EXOC4 exons, respectively. d) Differential Expression of PVT1|EXOC4 fusion transcripts; e). EXOC4|PVT1 fusion transcripts have been detected in SH—N-SK cancer cell lines. The black and gray rectangle boxes represent the PVT1 and EXOC4 exons, respectively; f) Differential Expression of EXOC4|PVT1 fusion transcripts; g). Expression comparison between EXOC4|PVT1 and EXOC4|PVT1 fusion genes. The gray and black bars represent the PVT1|EXOC4 fusion gene and EXOC4|PVT1 fusion gene, respectively. Y-axe unit is numbers of fusion transcripts. Since these fusion transcripts come from the same dataset, they reflect the differences of these fusion transcript expressions.

[0055] FIG. 20 shows analysis and characterization of non-coding RNA-RNA fusion transcripts. a). The gray and black arrows MEG8 and SNORD114-1 genes respectively. The dashed arrow shows potential inversions or regional duplications of chromosomal 14q32.31 have resulted in inversion of MEG8 and SNORD114-1 gene orders to generate putative SNORD114-1|MEG8 fusion genes; b) Five SNORD114-1|MEG8 fusion transcripts have been detected; c) Distribution of total SNORD114-1|MEG8 fusion transcripts. SNORD114-1|MEG8 fusion transcripts have been detected in seven cancer lines; and d) Distribution of normalized SNORD114-1|MEG8 fusion transcripts in seven cancer lines. Y-axe unit is numbers of transcripts per million sequence reads (NSJMR). The black and gray rectangle boxes represent SNORD114-1 and MEG8 exons, respectively. Here, SNORD114-1 and MEG8 represent abbreviated SNORD114-1andSNORD114-2andSNORD114-3 gene and MEG8andSNORD112andSNORD113-3 gene, respectively.

[0056] FIG. 21 shows results of analysis and characterization of non-coding RNA fusion transcripts. a). Distribution of non-coding RNA fusion transcripts (gray) and PFG (black) among different classes of non-coding RNA fusion transcripts. b) Distribution of -coding RNA fusion transcripts (gray bars) and PFG (black bars) among different cancer cell lines; c) Distribution of different SNHG fusion transcripts. d). Distribution of SNHG3 fusion transcripts among different cancer cell lines; e). Comparison of upstream (gray bars) and downstream (black bars) SNHG fusion transcripts; and f). Comparison of upstream (gray bars) and downstream (black bars) natural networks formed by fusion transcripts.

[0057] FIG. 22 shows diagrams of verification of the lowly-expressed ncRNA00188|GNAI3 fusion transcripts in lymphoblastoid cells GM12878. a). ncRNA00188 gene is located on the chromosome 17 and codes for a non-coding RNA. GNAI3 gene is on the chromosome 1 and a protein-coding gene. Two genes have been brought together via translocation indicated by arrows. Black and gray boxes represent ncRNA00188 exons to demonstrate where breakpoints are located on the ncRNA00188 gene. Black and white boxes represent GNAI3 exons to demonstrate where breakpoints are located on the GNAI3 gene. The numbers indicate above the boxes exon positions. Solid angle lines and dashed dots represent introns and gaps, respectively. b). RNA-splicing has removed intronic sequences of the putative ncRNA00188|GNAI3 fusion gene. Black italic letters and Capital gray letters represent 3′ intronic and 3′ exonic sequences of the GNAI3 splice junction, respectively. The numbers within the sequence indicate sequence gaps. c). Diagrams show that the ncRNA00188|GNAI3 fusion transcript is amplified by RT-PCR. cDNA fragments are then cloned into pCR4-TOPO clone vector. The positive clones are sequenced. The fusion transcripts are verified by blast and visual inspections. Arrow indicates splice junction of the ncRNA00188|GNAI3 fusion transcripts. RT is RT-PCR amplification of GM12878 cDNAs. No products have been detected in other cancer cell lines. M represents DNA markers.

### BRIEF DESCRIPTION OF THE SEQUENCE LISTING

[0058] The instant disclosure includes a plurality of nucleotide sequences. Throughout the disclosure and the accompanying sequence listing, the WIPO Standard ST.25 (1998; hereinafter the “ST.25 Standard”) is employed to identify nucleotides. The sequences of SEQ ID NOs: 1-258,077 are novel fusion transcripts. The sequences of SEQ ID NOs: 258,078-258,853 may have overlapped with Gene IDs of Mitelman Database of Chromosome Aberrations and Gene Fusions in Cancer (Mitelman, et al. 2015). The sequences from SEQ ID NOs: 258,854-259,170 have identical splice junctions to those of the fusion transcripts that have been published.

### DETAILED DESCRIPTION

[0059] Previously, we have observed that recently-gained human spliceosomal introns have identical 5′ and 3′ splice sites (Zhuo, et al. 2007). Based on this finding, we have found that both 5′ exonic sequences (E5) immediately upstream of introns and 3′ intronic sequences (13) are dynamically conserved and appears rather reminiscent of self-splicing group II ribozymes and of constraints imposed by base pairing between intronic-binding sites (IBSs) and exonic-binding sites (EBSs) (Zhuo, et al. 2012). Therefore, we have proposed that both E5 and 13 sequences constitute splicing codes, which are deciphered by splicer proteins/RNAs via specific base-pairing (Zhuo, et al. 2012). Our splicing code model suggested that a yet-to-be characterized splicer proteins/RNA would decode identical sequences in all pre-mRNAs in conjugation with U snRNAs and spliceosomes, regardless whether the E5 and 13 sequences are in the one molecule or two different molecules.

[0060] In order to generate splicingcode tables, we first and 2010 exons/introns coordinates file are downloaded from the NCBI AceView (ACEVIEW 2010) and the human hg19 genome sequences from UCSC (UCSC 2014). The sequences from the splicing sites have been parsed out by a software program. Generating the human splicing codes have been described in details in U.S. patent application Ser. No. 13/372,180 filed on Feb. 13, 2012 and titled SYSTEM AND METHOD FOR ANALYZING SPLICING CODES OF SPLICEOSOMAL INTRONS. Briefly, we divided 5′ splice site and 3′ splice sites. Starting from the splicing junctions, 5′ splice site are further divided into its 5′ exonic sequence (E5) and 5′ intronic sequence (I5). Similarly, 3′ splice site is divided into 3′ intronic sequence (13) and 3′ exonic sequence (E3). Starting from the splice junction, we scored the length of identical nucleotides (LIN) in an uninterrupted stretch independently for the E5-I3 and I5-E3 alignments. The total LIN of splice sites is sum of the LINs of the E5-I3 and I5-E3 alignments. To increase the quality of fusion transcripts, we removed the introns with LIN≧10 from the splicing codes. Furthermore, we arbitrarily removed all introns with lower-case letters to further improve the quality of fusion transcripts in this study. These two steps reduce to unique introns to 308,854, which are used to measure gene expression. To further reduce redundant E5 and E3 sequences, we only retained introns whose E5 splice sites or E3 splice sites can have maximum of 20 isoforms. Consequently, we reduced the unique E5 sequences to 229,170 and unique E3 sequences to 213,327.

[0061] For the program convenience and clarity, we use the human splicing codes to generate E5-E3 hash tables. Then we use E5-E3 table to generate an E5 table and an E3 table. These three tables have different types of keys, but are associated with a unique ordered value. Selecting the key lengths of the E5-E3 table depends on length of RNA-seq reads. If key lengths are too short, it will put multiple sequences from different genes into on one exon-exon junction. It will increase error if these exon-exon junctions are used to evaluate gene expression patterns. If it is too long, it will increase the quality of the expression data. It may result in less of data points and loss of information especially if lengths of RNA-seq reads are variable. Generally, we have used 20 bp unless they are specified in the context. We have used this E5-E3 table to generate an E5 table and an E3 table.

[0062] In order to be more efficient and accurate to get the most important information of the entire transcriptome, we must correctly identify their splicing junctions. RNA-Seq reads without splicing junctions are less important and contribute a little to their reconstructing genes. Therefore, we will evaluate these RNA-Seq reads further if necessary. In order to get more accurate identification of different classes of splice junctions in RNA-seq datasets, we have selected a well-annotated mRNAs from each gene as reference sequences (REF) shown in FIG. 1. RNA-seq sequences are then searched to see whether they have identical E5-E3 junctions or E5 sequences or E3 portions. If they have either E5 or E3 portions, they may be potential novel isoforms or fusion transcripts. Splicing of uncharacterized introns marked by vertical arrows in FIG. 1 can be classified into following five types of splicing junctions: A) identical introns; B) cassette introns; C) 5′ alternative introns; D) 3′ alternative introns; and E) novel introns. In FIG. 1F, two transcriptional units or genes may be located on different chromosomes or on different regions of the same chromosome. Inter-chromosomal or intra-chromosomal translocations have brought two transcriptional units close each other to generate a fusion gene, which in turn are transcribed into fusion transcripts. In some other cases, two transcriptional units may be separated by relatively short stretches of sequences (30 Kb-1,000 kb). However, under certain conditions and/or in some tissues, the two transcriptional units are transcribed into one unit to generate fusion transcripts. In other cases, two RNAs from two different molecules are trans-spliced to generate fusion transcripts.

[0063] Since our goal is to generate high-quality data, novel isoforms and fusion transcripts, we have to reduce the most noises first. As shown in FIG. 2, in the first step, we have used Quality Control Table to remove mitochondrial gene sequences, mitochondrial ribosomal RNAs, ribosomal RNA sequences, simple sequences, such as poly (A) sequences, GC-repetitive sequences and AT-rich sequences found in the human genomes, and another other sequences, which are thought to be contaminants. To generate Quality Control Table, the selected sequences are used to generate continuous ordered keys. Each key is associated with upstream and downstream sequences, which are used to confirm whether the key is in correct context of the associated sequences. Even though all samples have been rRNA-depleted, we have found that the samples contains up to 20% of ribosomal rRNA sequences and mitochondrial gene sequences. More importantly, we can use this table to remove poor-quality RNA-Seq reads, simple repeat sequences and adaptor sequences.

[0064] If a sequence is found to have a substring present in this E5-E3 hash table, the read's remaining sequence will be aligned to the corresponding E5 and E3 exonic sequences perfectly or with errors or gaps set by users such as one nucleotide. If the sequence reads match both E5 and E3 sequences from the same splice junctions, these reads will be accounted for gene expression profiling. Otherwise, they are treated as poor-quality reads or as novel transcripts for further analysis. Then we have used both E5 table and E3 table to identify novel alternatively-expressed transcripts and fusion transcripts.

[0065] If RNA-seq reads are mapped into both E5 table and E3 table, but not from the same splice junctions, then they have two different pathways as shown in FIG. 2. If both E5 key and E3 key are from the same gene or transcriptional unit (the identical gene ID), they are novel alternative splicing. If both E5 key and E3 key are associated with different gene IDs or transcriptional units, they are potentially fusion transcripts and will be described in detail later.

[0066] If both E5 and E3 keys have the same gene ID and from the same transcription units, then we can check the orders of both E5 key and E3 key to determine types of alternative splicing.

[0067] If a RNA-seq read has been mapped on the same transcriptional unit, there are two or more gaps between the E5 ID value and the E3 ID value. Two more exons have been removed from transcripts. This RNA-seq read is cassette introns as shown by vertical arrow (Type B in FIG. 1).

[0068] The sequence has a subsequence in the E5 table and its immediate downstream sequences are mapped to an E3 key associated with a different value. The transcript sequence is thought to have identical 5′ splice site, but has different 3′ splice site. This sequence is thought to have 3′ alternative splicing as the intron 1 shown in Type C in FIG. 1.

[0069] If the transcript is present in the E5 table and length of its downstream sequence is more than the key length, these sequences will be searched by blast to determine the sequence location. If the sequences are located within the downstream gene or downstream sequences of the transcription unit, this sequence is thought to be 3′ alternative splicing. If the sequences are located in another transcription unit, this sequence is thought to be a fusion transcript.

[0070] If the transcript is present in the E3 table and its immediately upstream sequence is more than the key length, these sequences will be searched by blast to determine the sequence location. If the sequences are located within the upstream gene or upstream sequences of the transcription unit, this sequence is thought to be 5′ alternative splicing. If the sequences are located in another transcription unit, this sequence is thought to be a fusion transcript.

[0071] If a RNA-seq read has been mapped to the E3 key, its immediately upstream sequence is mapped to the E5 key with different value. That is, a sequence has identical 3′ splice site with the REF sequence, but has different 5′ splice site, this sequence is thought to have 3′ alternative splicing as shown in Type D in FIG. 1.

[0072] If the transcript is present in the E3 table and the length of its upstream sequence is more than the key length, these sequences will be searched by blast to determine the sequence location. If the sequences are located within the upstream gene or upstream sequences of the transcription unit, this sequence is thought to be 5′ alternative splicing. If the sequences are located in another transcription unit, this sequence is thought to be a fusion transcript.

[0073] If the E5 key and E3 key are mapped to keys with different values compared to their REF sequences, this transcript has different 5′ and 3′ splice sites compared to the reference sequence (REF in FIG. 1). The intron 1 of the Type E has been shown to be a novel intron in FIG. 1. If the transcript is present in the E3 table and the length of its upstream sequence is more than the key length, these sequences will be searched by blast to determine the sequence location. If the sequences are located within the upstream gene or upstream sequences of the transcription unit, this sequence is thought to be 5′ alternative splicing. If the sequences are located in another transcription unit, this sequence is thought to be a fusion transcript.

[0074] In order to assemble the transcriptome and to characterize novel and unpredictable transcriptional events, we have added middle exon table in this RNA-seq analysis program. To generate the middle exon table, we have adopted one of two strategies deepening on the computer system memories and lengths of RNA-seq reads: continuous non-redundant and unique keys or gapped (normally less than half of the key length) non-redundant and unique keys. RNA-seq reads are mapped into the middle exon table.

[0075] To measure the gene expression, we have adopted splice junction centered strategy. That is, we would count the sequence reads covering splice junctions and ignore all other parts of mRNA sequences. We first selected the human 308,854 splice junctions from human Aceview 37 genes from 382,279 distinct exon/intron junction sequences as described above. As described above, we removed the introns with LIN ≧10 from the splicing codes. We arbitrarily removed all introns with lower-case letters to further improve the quality of fusion transcripts in this study. These two steps reduce to unique introns to 308,854, which are used to measure gene expression. We have combined 20 bp E5 and 20 bp E3 key sequences as unique splice junction database. RNA-seq reads are searched against this human splice junction database. If a sequence read contain sequences in the splice junction database, this splice junction is counted. To be consistent with identification of fusion transcripts, we allow no mismatches. To quantify gene expression levels, we summed the total numbers of sequence reads per gene. The numbers of the splice junctions we have identified are divided by the sums of sequence reads. The results are expressed in Numbers of Splice Junction per Million mapped Reads (NSJMR).

[0076] In order to measure expression of the fusion transcripts identified so far, we have adopted a strategy similar to measure gene expression described above. We have divided the fusion transcripts into E5 and E3 sequences from fusion junctions as described above. We have taken a substring of an E5 sequence as the E5 key and a substring of an E3 sequence as E3 key. Both E5 and E3 keys of the same fusion transcripts are combined together to form a join key of a fusion transcript. The length of each of both E5 and E3 keys are at least 20 bp to make sure that the joint key will be unique in a transcriptome. If a sequence contains this joint key, this sequence is counted as a fusion transcript, the numbers of this fusion transcript are summed together in a dataset. The numbers of the fusion junctions we have identified are divided by the sums of sequence reads of the dataset. The results are expressed in Numbers of Splice Junction per Million mapped Reads (NSJMR).

[0077] As shown in FIG. 2, when a sequence read is mapped to E5 table and its immediately downstream key is mapped to an E3 key of different gene, this sequence read is thought to be a putative fusion transcript. Due to enormous importance of fusion transcripts, we have given more detailed description to discover fusion transcripts in FIG. 3. After we have found that a sequence have both E5 and E3 keys on different genes, we will further check whether 5′ RNA-seq read sequences have identical sequences upstream of the E5 key sequence and if 3′ remaining read sequence match an identical sequence downstream of the E3 key sequences. If a read sequence has identical E5 and E3 sequences from two different genes, this read sequence are further checked by BLAST against the mRNA database to see if they come from pseudogenes or from gene duplications or from alternative splicing. If the RNA-seq read doesn't originate from one single transcription unit, this fusion sequence is searched against E5 and E3 gene sequences via gene hash tables to rule out whether the fusion transcript comes from alternative splicing. The entire identification process of fusion transcripts has used zero tolerance of errors in this study. The fusion transcripts have been randomly selected and verified by manual inspections. In addition, the fusion transcripts are systematically BLASTed against AceView mRNA sequences and BLASTed against human genes parsed from human hg19 genome sequences to make sure that each of the fusion transcripts originates from two different genes.

[0078] To use the splicing code to identify fusion transcripts, a computation system used three steps: 1) mapping a sequence read to 20 bp 5′ (E5) and 20 bp 3′ (E3) exonic sequences of canonical splice-sites of two different transcription units; 2) aligning remaining sequences to corresponding upstream and downstream regions; and 3) removing alternatively-spliced false positive sequences from one transcription unit by blast against mRNA and gene databases. These steps have shown that splicing code table is the key to determine qualities of fusion transcripts. We have downloaded AceView-NCBI-37 genes, which contain 382, 279 distinct introns (Thierry-Mieg and Thierry-Mieg 2006). After removing introns from intergenic regions and E5 or E3 sequences whose frequencies are larger than 20, the table contained 221,970 E5 sequences and 213,327 E3 sequences, respectively. A sequence is mapped to E5 and E3 keys from two different genes. Then, the upstream sequence of the E5 key and the downstream of the E3 key are aligned to the corresponding genomic regions, respectively. If they are identical, this sequence is thought to be a fusion transcript. Consequently, our system would greatly reduce randomly generated false positive sequences, but also remove some true fusion transcripts. The maximum random error to generate a fusion transcript is 1.2×10⁻²⁴ and the medium error is 1×10⁻⁵⁹.

[0079] Using this computation system, first we have analyzed 37,208 millions of RNA-seq reads from thirty-nine cancer lines, majorities of which are downloaded from ENCODE project (ENCODE 2015). RNAs data sizes range from 31 millions of MDA-MB-231 to 6945 millions of MCF-7. For convenience, we have assigned these 16,570 fusion transcripts as Encode Cancer 39 Datasets (ECD39 Dataset) (ENCODE 2015). After we have analyzed ECD39 fusion transcripts and obtained summary information of the total fusion transcripts.

[0080] We have further downloaded four colon cancer datasets, two breast cancer datasets, two lung cancer data and normal tissues and primary cell lines (ENCODE 2015, SCILIFELAB 2015).

[0081] After we completed analyses of ECD39, we have continued analyzing the other cancer datasets downloaded from NCBI (ENA 2014) and ENA (ENA 2014). So far, we have identified total of 259, 170 fusion transcripts with unique canonical splice sites and represent 242,578 putative fusion genes. Then, we have downloaded the information from four large fusion transcripts, which include TCGA Fusion genes (Yoshihara, et al. 2014), Genentech's cancer fusion genes (Klijn, et al. 2015), Life Technology′ breast cancer fusion transcripts (Sakarya, et al. 2012) and Mayo Clinic Rochester's breast cancer fusion genes (Asmann, et al. 2012). We have parsed out >14,000 fusion transcripts from these fusion gene data. We have shown that 317 transcripts out of 253,747 fusion transcripts have identical fusion junctions. Next, we have compared our unique IDs with Mitelman Cancer Fusion Gene Database (Mitelman, et al. 2015), which contains 10,004 fusion genes so far. We have identified 776 fusion transcripts, whose Gene IDs are overlapped with those from Mitelman Cancer Fusion Gene Databases (Mitelman, et al. 2015). These have demonstrated that most of the fusion transcripts are novel and unique. Since the majorities of 39 cancer cell lines are from ENCODE projects (Table 1), their data handling and experimental error controls are uniforms. Because of these properties and characteristics of ENCODE datasets, it has made us much easier to remove mistakes and errors. The conclusions have been much reliable and reproducible. Therefore, our discussion will focus on this subset of datasets.

[0082] After we have performed analyses of the ENCODE RNA-seq datasets, we have discovered 92,817 fusion transcripts from these thirty-nine RNA-seq data, which represents 36.6% of the total fusion transcripts. In order to be more efficient to characterize the fusion transcripts, we have used them to analyze and dissect characteristics of fusion transcripts in more details and the other fusion transcripts are presented in the context of discussions, we have indentified 16,570 subset of fusion transcripts, which are supported by at least three sequences across the splice junction by minimum 40 bp (at least 20 bp at each of fusion transcripts) or by at least two alternatively-spliced fusion transcripts of the same two genes. For convenience, we have assigned these 16,570 fusion transcripts as Encode Cancer 39 Fusion Transcript Data (ECD39).

[0083] Table 1 has shown list of the thirty-nine cancer cell lines in the ECD39 datasets, the numbers of fusion transcripts (FT), the numbers of putative fusion genes (PFG), and the numbers of RNA-seq reads used for analyses.

TABLE 1
The information of the thirty-nine cancer cell lines (ECD39)
and their fusion transcripts identified. FT and PFG represent
fusion transcripts and putative fusion genes, respectively.

| Cancer Cell Lines | # of FT | # of PFG | # of Million Reads |
|---|---|---|---|
| A172 | 190 | 186 | 393 |
| A375 | 375 | 362 | 445 |
| A431 | 263 | 244 | 409 |
| A549 | 2053 | 1765 | 1933 |
| Caki2 | 146 | 142 | 447 |
| CUTLL | 554 | 455 | 462 |
| Daoy | 226 | 219 | 393 |
| G401 | 91 | 90 | 398 |
| H4 | 216 | 213 | 390 |
| H460 | 378 | 357 | 849 |
| HCC1599 | 442 | 387 | 230 |
| HCT116 | 422 | 403 | 498 |
| Hela-3 | 1177 | 1025 | 1977 |
| HepG2 | 2377 | 1886 | 5116 |
| HT1080 | 446 | 441 | 391 |
| HT29 | 392 | 382 | 465 |
| K562 | 3374 | 2572 | 3683 |
| Karpas422 | 211 | 205 | 293 |
| KATOIII | 128 | 111 | 186 |
| LHCN-M2 | 860 | 768 | 1391 |
| LIM1899 | 327 | 283 | 216 |
| LIM2405 | 87 | 76 | 248 |
| M059J | 206 | 203 | 327 |
| MCF7 | 2315 | 1763 | 6945 |
| MDA-MB | 114 | 105 | 31 |
| MG63 | 149 | 147 | 304 |
| OCI-Ly7 | 342 | 332 | 309 |
| PC3 | 317 | 311 | 437 |
| REC1 | 465 | 403 | 258 |
| RPMI-7951 | 420 | 406 | 345 |
| SJCRH30 | 565 | 530 | 380 |
| SJSA1 | 251 | 242 | 388 |
| SK-Mel-5 | 300 | 294 | 413 |
| SK-N-DZ | 826 | 799 | 1131 |
| SK-N-SH | 1731 | 1445 | 4622 |
| SUN16 | 55 | 47 | 138 |
| U251 | 33 | 33 | 110 |
| U2OS | 21 | 20 | 102 |
| U87 | 148 | 130 | 158 |

[0084] The ECD39 fusion transcripts have 16,570 fusion transcripts with canonical splice junctions which, on average, are supported by 8.9 copies of sequence reads and are 98 bp long (FIG. 4a Insert). These fusion transcripts represent 11,488 unique combinations of putative fusion genes (PFGs) (FIG. 1a). On average each PFG have 1.44 fusion transcript isoforms. This suggests that PFGs are similar to annotated genes, which have complex alternatively-spliced isoforms. FIG. 4a shows that 11,488 PFGs have 5705 unique 5 ‘-genes and 5606 unique 3’-genes, respectively, which indicate that each 5′ or 3′ gene could form two different PFGs (FIG. 4a). The total 11488 PFGs have 8229 unique genes, 39% of which are involved in both 5′ and 3′ gene fusion (FIG. 4a). These data are consistent with previous findings that fusion events are recurrent in cancer. To evaluate origins of the fusion transcripts, we have analyzed distributions of the fusion transcripts among 39 cell lines. The numbers of fusion transcripts identified range from 21 in U2OS to 3374 in K562, lymphoblast of chronic myelogenous leukemia (FIG. 4b). Even though larger data result in more numbers of fusion transcripts, there is no direct correlation among them. Among eight cell lines that have >1,000 million RNA-seq reads, A549, adenocarcinomic human lung epithelial cells, have 1.06 numbers of splice sites per million reads (NSJMR) while MCF-7 and SK-N-SH have 0.33 and 0.38 NSJMR, which may partly reflect characteristics of cancer types.

[0085] To systematically characterize properties of these ECD39 fusion transcripts, we have arbitrarily classified these fusion events into five groups based on locations, orientations and distances between two genes: inter-chromosomal translocations, intra-chromosomal translocations, inversions, deletions, and read-through. These five genetic types of the fusion transcripts are defined as below. If 5′ and 3′ regions of a fusion transcript originate from two different chromosomes, this fusion transcript is thought to be inter-chromosomal translocation. If 5′ and 3′ regions of a fusion transcript are from the same chromosome and the distances between two regions are more than 1 million by in length, this fusion transcript is defined as the intra-chromosomal translocation. If 5′ and 3′ regions of a fusion transcript come from the same chromosome and the distances between two regions are larger than 1 million by in length and the both 5′ and 3′ regions are on the same strands, this fusion transcript is defined as the deletion. If 5′ and 3′ regions of a fusion transcript come from the same chromosome and the distances between two regions are less than 1 million by in length but 5′ and 3′ regions are the opposite strands, this fusion transcript is an inversion. If 5′ and 3′ regions of a fusion transcript come from the same chromosome and the distances between two regions are less than 1 million by in length and 5′ and 3′ regions are the same strands, this fusion transcript is thought to be read-through.

[0086] FIG. 4c shows that inter-chromosomal transcripts and FPGs are the highest among the five groups and accounted for 40% and 51%, while the deletion transcripts and PFGs are the lowest and count for 4.6% and 4.1% respectively. As Table 2 shows, inter-chromosomal translocation, intra-chromosomal translocation and deletion transcripts, whose gaps between two genes are ≧1 million bp, have very low fusion transcripts per PFG and ranged from 1.13 to 1.31. On the other hand, FIG. 4c has shown that the read-through and inversion transcripts, whose gaps between two genes are ≦1 million bp, have the most fusion transcripts per PFG, which are 2.22 and 1.86, respectively. That the fusion transcripts per PFG of read-though and inversion are much larger than those of inter-chromosomal translocation, intra-chromosomal translocation and deletion suggests that numbers of transcripts per PFG are associated with the gap sizes between two genes. Since the read-through genes are more like traditional genes, inter-chromosomal, intra-chromosomal and deletion fusion genes may have some mechanisms different from the “traditional” ones to generate fusion transcripts. Because identification of recurrent fusion transcripts among different types of cancer is extremely important for cancer diagnosis, therapy and prognosis, we have analyzed the recurrent fusion transcripts among the different groups of cancer cell lines.

[0087] To characterize the differences between the splicingcode method and other methods to identify fusion transcripts, we use the human multiple cancer types dataset (named as HMCT) from Stanford University (Giacomini, et al.). The HMCT dataset has seven samples, which have been generated by two types of sequence machines: Illuminia HiSeq 2000 and Genome Analyzer II. The four samples analyzed by Genome Analyzer II have 35 bp RNA-seq reads in length and three samples by Illuminia HiSeq 2000 have 100 bp RNA-seq reads. Due to short sequences lacking specificities, we have to discard four samples with shorter 35 bp sequences from further analysis. We have performed data analysis of three samples by Illuminia HiSeq 2000 and have identified 2205 fusion transcripts, four of which have been validated by Giacomini et al (Giacomini, et al. 2013).

[0088] Compared to other methods, we have less copy numbers of supporting RNA-seq reads per fusion transcript. We have analyzed the numbers of supporting sequence reads. Table 2 shows differences of supported sequence reads among the four genes uncovered by splicingcodes and validated by Giacomini et al (Giacomini, et al. 2013). From Table 2, the four genes have an average of the HMCT 54.7 sequence reads while they are supported by 7.5 sequence reads in our splicingcodes model, which are 7.5 folds less than the former. Table 2 shows that the BCL6|RAF1 fusion transcript has been supported by 39 HMCT reads and 2 SplicingCodes reads, respectively. This is almost 20 fold differences. This has demonstrated that splicingcodes model has used

TABLE 2
Differences of numbers of supported reads

| 5′ Genes | 3′ Genes | HMCT | SplicingCodes |
|---|---|---|---|
| BCL6 | RAF1 | 39 | 2 |
| FAM133B | CDK6 | 30 | 10 |
| EWSR1 | CREM | 120 | 14 |
| ABL1 | CBFB | 30 | 4 |

| | | |
|---|---|---|
| Average | 54.75 | 7.5 |

much stringent conditions.

[0089] As shown in Table 1 and FIG. 4b, we have identified 2315 fusion transcripts with unique canonical splice sites, which represent 1763 unique putative fusion genes. Since MCF7 has been well-studied in transcriptional studies, it is natural for the MCF7 fusion transcripts from two different studies should have common identical fusion transcripts. Sakarya et al. have used a suffix array algorithm to analyze a MCF7 RNA-seq dataset and identified 40 and validated novel fusion genes (Sakarya, et al. 2012). FIG. 5 has shown the Van diagram between our fusion transcripts and those identified and validated by Sakarya et al (Sakarya, et al. 2012). Even though our datasets contain no MCF-7 RNA-seq datasets used by Sakarya et al., we have found that 31 (75%) of fusion transcripts are identical with those identified by Sakarya et al. (Sakarya, et al. 2012).

[0090] To further evaluate the quality of our fusion gene detection method, we have performed analysis on our ECD39 MCF7 fusion transcripts, which have MCF-7 2315 fusion transcripts representing 1763 fusion genes. Then, we parse out 132 GCD MCF7 fusion transcripts from the GCD datasets (Klijn, et al. 2015). FIG. 6a has shown that the ECD39's MCF7 fusion transcripts have been shown to have 49 (39.9%) genes overlapped with GCD MCF-7 132 fusion genes. Based on numbers of supporting reads, we can conclude that the fusion transcripts majorities of which are highly expressed. This strongly supports that our method is highly accurate.

[0091] To further characterize fusion transcripts, we have compared our data with large scale identification of 5451 fusion transcripts from 675 human cancer cell lines by Klijin et al. (referred as Genetech Cancer Data (GCD)) (Klijn, et al. 2015). Compared to the total GCD fusion transcripts, FIG. 6b shows that our ECD39 fusion transcripts have been found to have only identified 276 fusion transcripts, whose gene IDs are overlapped with GCD fusion genes, which count for 1.7%. Since the GCD fusion transcripts originated from 675 human cancer cell lines (Klijn, et al. 2015), there are eight cell lines overlapped between two datasets. Only small numbers of overlapped transcripts between two datasets of fusion transcripts have further confirmed that cancer is heterogeneous.

[0092] Reviewing identical fusion transcripts have shown that these fusion genes have been highly expressed based on the numbers of supporting sequence reads. It seems that all methods of identification of fusion transcripts are able to identify the highly-expressed fusion transcripts. However, our method identifies highly-expressed fusion transcripts, but also very lowly-expressed fusion transcripts.

[0093] In FIG. 4b, we have classified the fusion transcripts based on the ECD39 cell line types. Table 3 shows lists of the top ten fusion transcripts of the thirty-nine cancer cell lines.

TABLE 3
The top ten highly-expressed fusion transcripts in each of the
ECD39 thirty-nine cancer cell lines. Underlined gene symbols
represent a transcriptional unit of multiple gene complexes.

| | | | |
|---|---|---|---|
| Cell Lines | 5 Gene | 3 Gene | Counts |

Table 3a Top ten highly-expressed fusion
transcripts of A172, A375, A431 and A562

| | | | |
|---|---|---|---|
| A172 | CNOT1 | ARHGAP17 | 137 |
| A172 | SNTB2andVPS4A | IL34 | 130 |
| A172 | NSD1 | DHX15 | 85 |
| A172 | PIKFYVE | ACTL6A | 77 |
| A172 | URB1 | SLC27A1 | 70 |
| A172 | SMC4 | TAF9 | 69 |
| A172 | ABL1 | CBFB | 64 |
| A172 | DUSP14 | DDX52 | 60 |
| A172 | ALPK2 | ARID4BandRBM34 | 56 |
| A172 | METTL9 | SDK1 | 52 |
| A375 | KIAA1267 | ARL17AandARL17B | 60 |
| A375 | ST3GAL2 | COG4 | 48 |
| A375 | ALDH1A3 | CALM2andC2orf61 | 36 |
| A375 | HIF1AandSNAPC1 | PRKCH | 31 |
| A375 | ETV5 | TRA2B | 28 |
| A375 | C5orf30 | SYNCRIP | 26 |
| A375 | TPM4 | SUN1andGET4 | 25 |
| A375 | PPP3CA | HDGFRP3 | 24 |
| A375 | BAGE | BAGE3_{—} | 24 |
| A375 | MAP2K5 | SKOR1andPIAS1 | 23 |
| A431 | TPX2 | C20orf112 | 24 |
| A431 | PRIM1 | NACA | 21 |
| A431 | ZNF782 | ZNF510 | 19 |
| A431 | EGFR | PPARGC1A | 14 |
| A431 | LOC283299 | OVCH2 | 10 |
| A431 | EXOC4 | CHCHD3 | 10 |
| A431 | NRIP1 | LOC100128341 | 8 |
| A431 | SLC38A1 | SRSF2IP | 8 |
| A431 | FAM18B2andCDRT4 | TEKT3 | 8 |
| A431 | CLTC | TMEM49 | 8 |
| A549 | MFGE8 | HAPLN3 | 468 |
| A549 | SCAMP2 | WDR72 | 411 |
| A549 | KIAA1267 | ARL17AandARL17B | 212 |
| A549 | C19orf47 | AKT2 | 139 |
| A549 | UBA2 | WTIP | 133 |
| A549 | P2RY6 | ARHGEF17 | 112 |
| A549 | NCEH1 | MUC13 | 78 |
| A549 | ACCS | EXT2 | 73 |
| A549 | MFGE8 | HAPLN3 | 64 |
| A549 | ST6GALNAC4 | ST6GALNAC6andAK1 | 53 |

Table 3b Top ten highly-expressed fusion
transcripts of CUTLL, Caki2, Daoy and G401

| | | | |
|---|---|---|---|
| CUTLL | TRBV_{—} | NOTCH1 | 534 |
| CUTLL | LZTFL1 | SLC6A20 | 200 |
| CUTLL | THEMIS | PTPRK | 41 |
| CUTLL | C6orf106 | LOC100132288 | 34 |
| CUTLL | SLC35A3 | HIAT1 | 32 |
| CUTLL | TRBV_{—} | NOTCH1 | 30 |
| CUTLL | UBA2 | WTIP | 24 |
| CUTLL | ZNF782 | ZNF510 | 24 |
| CUTLL | ERBB2IP | SFRS12 | 19 |
| CUTLL | PSMA4 | CHRNA5 | 17 |
| Caki2 | MICALL1 | POLR2F | 524 |
| Caki2 | PKD1 | NTHL1 | 201 |
| Caki2 | DLG5 | TPH1andSERGEF | 158 |
| Caki2 | TSSC1 | KIDINS220 | 145 |
| Caki2 | TUSC3 | EXOC6B | 135 |
| Caki2 | PCMT1 | PDSS2 | 127 |
| Caki2 | MED26_{—} | ZBTB1 | 115 |
| Caki2 | C6orf105 | ZCCHC11 | 103 |
| Caki2 | CELSR1 | TMCO3 | 82 |
| Caki2 | AGPS | VAPA | 76 |
| Daoy | TM7SF3 | C12orf11 | 164 |
| Daoy | KIF5B | ZEB1 | 132 |
| Daoy | ALCAM | ACTR3 | 69 |
| Daoy | GNB2L1_{—} | ADPRHL2 | 65 |
| Daoy | ZNF782 | ZNF510 | 64 |
| Daoy | RC3H2 | KATNA1 | 62 |
| Daoy | YIPF4 | DYM | 60 |
| Daoy | G3BP1 | ANXA2 | 58 |
| Daoy | LEPROTL1 | INTS9 | 56 |
| Daoy | FNBP1 | GTF2IRD2B | 53 |
| G401 | LOC283299 | OVCH2 | 74 |
| G401 | HRSP12 | GDI2 | 69 |
| G401 | CLN6andCALML4 | GABRA5 | 55 |
| G401 | MLL3 | BAGE3_{—} | 45 |
| G401 | MTHFD2 | MOBKL1B | 44 |
| G401 | GDPD5 | CHD8 | 38 |
| G401 | PRDX2 | GNAS | 37 |
| G401 | LOC728190 | GLUD1 | 36 |
| G401 | TBC1D30 | MSRB3 | 32 |
| G401 | DCUN1D2 | LAMP1 | 26 |

Table 3c Top ten highly-expressed fusion
transcripts of H4, H460, HCC1599 and HCT116

| | | | |
|---|---|---|---|
| LHCN-M2 | ZNF782 | ZNF510 | 91 |
| LHCN-M2 | EEF1DP3 | FRY | 69 |
| LHCN-M2 | TBC1D23 | NIT2 | 30 |
| LHCN-M2 | MICAL3 | BCL2L13 | 28 |
| LHCN-M2 | ADAM9 | ADAM32 | 27 |
| LHCN-M2 | ZBED5_{—} | KIAA0319L | 25 |
| LHCN-M2 | SLC7A5P2 | LOC641298 | 25 |
| LHCN-M2 | NRIP1 | LOC100128341 | 23 |
| LHCN-M2 | CTNNA1 | SIL1 | 21 |
| LHCN-M2 | WLS | DIRAS3 | 19 |
| LIM2405 | VAX2 | ATP6V1B1 | 5 |
| LIM2405 | SUMO2 | HN1 | 3 |
| LIM2405 | ACCS | EXT2 | 3 |
| LIM2405 | CHCHD2 | PHKG1 | 3 |
| LIM2405 | NRIP1 | LOC100128341 | 2 |
| LIM2405 | XK | CYBB | 2 |
| LIM2405 | ACCS | EXT2 | 2 |
| LIM2405 | SLC35A3 | HIAT1 | 2 |
| LIM2405 | XK | CYBB | 1 |
| LIM2405 | ZW10 | TMPRSS5 | 1 |
| LIM1899 | UHRF1BP1L | ANKS1B | 102 |
| LIM1899 | CDK13 | C7orf10 | 14 |
| LIM1899 | MIR17HG | GPC5 | 12 |
| LIM1899 | ARNTL | MICAL2 | 9 |
| LIM1899 | UHRF1BP1L | ANKS1B | 9 |
| LIM1899 | SLC35A3 | HIAT1 | 8 |
| LIM1899 | LOC389641 | CHMP7 | 7 |
| LIM1899 | ZNF619andZNF620 | ZNF621 | 6 |
| LIM1899 | PLEKHM1P | LOC146880 | 5 |
| LIM1899 | UBA2 | WTIP | 5 |
| M059J | SLC23A2 | RNF130 | 51 |
| M059J | NLGN1 | IFI6 | 46 |
| M059J | PRSS23 | PSMB2 | 41 |
| M059J | CPSF6 | ZNF532 | 35 |
| M059J | CYLD | PHKB | 34 |
| M059J | CCBL2 | MYO19 | 33 |
| M059J | KIAA1267 | ARL17AandARL17B | 31 |
| M059J | HDAC8 | CITED1 | 30 |
| M059J | SIKE1andCSDE1andNRAS | ZNF148andSLC12A8 | 29 |
| M059J | FLJ34690 | MYOCD | 26 |

Table 3d Top ten highly-expressed fusion
transcripts of HT1080, HT29, Karpas422 and KATOIII

| | | | |
|---|---|---|---|
| HT1080 | YWHAQ | LPIN1 | 36 |
| HT1080 | WDFY1andAP1S3 | SERPINE2 | 32 |
| HT1080 | FBXO34 | FOXN3 | 27 |
| HT1080 | GAS6 | TFDP1 | 26 |
| HT1080 | KCNH5 | HIF1AandSNAPC1 | 26 |
| HT1080 | UBE2S | ACTN4 | 25 |
| HT1080 | BRIX1 | DPY19L4 | 25 |
| HT1080 | DYNC1H1 | PPP2R5C | 25 |
| HT1080 | CALN1 | HS3ST3B1 | 24 |
| HT1080 | ECSITandZNF653 | PRKCSH | 23 |
| HT29 | MTMR3 | APOH | 488 |
| HT29 | USP6NL | UPF2 | 269 |
| HT29 | KIAA1267 | ARL17AandARL17B | 194 |
| HT29 | UBA2 | WTIP | 79 |
| HT29 | RPL23AP5 | NME4andDECR2 | 78 |
| HT29 | EEF1DP3 | FRY | 60 |
| HT29 | C11orf9 | FAM132A | 53 |
| HT29 | PAWR | NAP1L1 | 53 |
| HT29 | TRA2B | RABGAP1andGPR21 | 45 |
| HT29 | PAOXandMTG1 | LOC619207 | 44 |
| Karpas422 | KIAA1267 | ARL17AandARL17B | 271 |
| Karpas422 | HNRNPA1L2 | EXOC4 | 82 |
| Karpas422 | DCAF16andFAM184B | PHF14 | 66 |
| Karpas422 | LOC100288132 | TRMT1 | 41 |
| Karpas422 | RPL23AP5 | NME4andDECR2 | 40 |
| Karpas422 | PLEKHM1P | LOC146880 | 36 |
| Karpas422 | EPN1 | BPTF | 30 |
| Karpas422 | MKNK2 | AGXT2L2 | 27 |
| Karpas422 | TRA2A | IGF2BP3 | 27 |
| Karpas422 | CDKL3andPPP2CA | SKP1 | 26 |
| KATOIII | PAFAH1B2 | SIK3 | 60 |
| KATOIII | FGFR2 | ULK4 | 18 |
| KATOIII | FOXA2 | NCRNA00261 | 7 |
| KATOIII | UBA2 | WTIP | 6 |
| KATOIII | CECR7andIL17RA | LOC100132288 | 3 |
| KATOIII | NRIP1 | LOC100128341 | 3 |
| KATOIII | ZNF782 | ZNF510 | 3 |
| KATOIII | HDAC4 | ILKAP | 3 |
| KATOIII | PLEKHM1P | LOC146880 | 3 |
| KATOIII | CTNNB1 | ULK4 | 3 |

Table 3e Top ten highly-expressed fusion
transcripts of LHCN-M2, LIM2405, LIM1899 and M059J.

| | | | |
|---|---|---|---|
| LHCN-M2 | ZNF782 | ZNF510 | 91 |
| LHCN-M2 | EEF1DP3 | FRY | 69 |
| LHCN-M2 | TBC1D23 | NIT2 | 30 |
| LHCN-M2 | MICAL3 | BCL2L13 | 28 |
| LHCN-M2 | ADAM9 | ADAM32 | 27 |
| LHCN-M2 | ZBED5_{—} | KIAA0319L | 25 |
| LHCN-M2 | SLC7A5P2 | LOC641298 | 25 |
| LHCN-M2 | NRIP1 | LOC100128341 | 23 |
| LHCN-M2 | CTNNA1 | SIL1 | 21 |
| LHCN-M2 | WLS | DIRAS3 | 19 |
| LIM2405 | VAX2 | ATP6V1B1 | 5 |
| LIM2405 | SUMO2 | HN1 | 3 |
| LIM2405 | ACCS | EXT2 | 3 |
| LIM2405 | CHCHD2 | PHKG1 | 3 |
| LIM2405 | NRIP1 | LOC100128341 | 2 |
| LIM2405 | XK | CYBB | 2 |
| LIM2405 | ACCS | EXT2 | 2 |
| LIM2405 | SLC35A3 | HIAT1 | 2 |
| LIM2405 | XK | CYBB | 1 |
| LIM2405 | ZW10 | TMPRSS5 | 1 |
| LIM1899 | UHRF1BP1L | ANKS1B | 102 |
| LIM1899 | CDK13 | C7orf10 | 14 |
| LIM1899 | MIR17HG | GPC5 | 12 |
| LIM1899 | ARNTL | MICAL2 | 9 |
| LIM1899 | UHRF1BP1L | ANKS1B | 9 |
| LIM1899 | SLC35A3 | HIAT1 | 8 |
| LIM1899 | LOC389641 | CHMP7 | 7 |
| LIM1899 | ZNF619andZNF620 | ZNF621 | 6 |
| LIM1899 | PLEKHM1P | LOC146880 | 5 |
| LIM1899 | UBA2 | WTIP | 5 |
| M059J | SLC23A2 | RNF130 | 51 |
| M059J | NLGN1 | IFI6 | 46 |
| M059J | PRSS23 | PSMB2 | 41 |
| M059J | CPSF6 | ZNF532 | 35 |
| M059J | CYLD | PHKB | 34 |
| M059J | CCBL2 | MYO19 | 33 |
| M059J | KIAA1267 | ARL17AandARL17B | 31 |
| M059J | HDAC8 | CITED1 | 30 |
| M059J | SIKE1andCSDE1andNRAS | ZNF148andSLC12A8 | 29 |
| M059J | FLJ34690 | MYOCD | 26 |

Table 3f Top ten highly-expressed fusion
transcripts of MDA-MB-231, MG63, OCI-Ly7 and PC3

| | | | |
|---|---|---|---|
| MDA-MB-231 | SLC29A1 | HSP90AB1 | 19 |
| MDA-MB-231 | REV1 | SUPT3H | 13 |
| MDA-MB-231 | HARS | TTC27 | 7 |
| MDA-MB-231 | SLC35A3 | HIAT1 | 5 |
| MDA-MB-231 | LOC283299 | OVCH2 | 4 |
| MDA-MB-231 | HARS | TTC27 | 4 |
| MDA-MB-231 | SLC35A3 | HIAT1 | 4 |
| MDA-MB-231 | PDPK2 | TCEB2 | 4 |
| MDA-MB-231 | TRIB3 | RBCK1 | 3 |
| MDA-MB-231 | RPS6KB1 | TMEM49 | 3 |
| MG63 | TFG | GPR128 | 495 |
| MG63 | DNER | ELL2 | 136 |
| MG63 | MTAPandCDKN2BAS | BNC2 | 121 |
| MG63 | THSD4 | LRRC49 | 108 |
| MG63 | PSMD8 | ATF7andNPFF | 107 |
| MG63 | ELL2 | TRIP12 | 78 |
| MG63 | HEATR7A | PARP10 | 76 |
| MG63 | TP53 | VAV1 | 64 |
| MG63 | CLIP4 | EPHB4 | 63 |
| MG63 | GAS6 | COMMD3andBMI1 | 57 |
| OCI-Ly7 | IGL_{—} | GRAPL | 69 |
| OCI-Ly7 | PIK3C2_{—} | UBE2D2 | 41 |
| OCI-Ly7 | SIT1 | CD72 | 38 |
| OCI-Ly7 | HIPK2 | NDUFA5 | 38 |
| OCI-Ly7 | ZC3HAV1 | UBN2 | 34 |
| OCI-Ly7 | LOC389641 | CHMP7 | 33 |
| OCI-Ly7 | UBA2 | WTIP | 30 |
| OCI-Ly7 | AVL9 | SP4 | 28 |
| OCI-Ly7 | PPFIA1 | RTN3 | 27 |
| OCI-Ly7 | DNAJB1 | PKM2 | 24 |
| PC3 | C12orf51 | RPL6 | 53 |
| PC3 | SAMD8 | ADKandMRPL35P3 | 41 |
| PC3 | PAAF1 | RPL141 | 36 |
| PC3 | AGAP6 | FRMPD2 | 29 |
| PC3 | ZMIZ1 | CTNNA3 | 26 |
| PC3 | FAF1 | AGBL4 | 25 |
| PC3 | MPP5 | FUT8 | 25 |
| PC3 | C1orf55 | ENAH | 25 |
| PC3 | MAD1L1 | CHFRandGOLGA3 | 24 |
| PC3 | PTK2 | SKP1 | 24 |

Table 3g Top ten highly-expressed fusion
transcripts of RPMI-7951, SJCRH30, SK-Mel-5 and SK-N-DZ

| | | | |
|---|---|---|---|
| RPMI-7951 | RPS5P1andDSE | FAM26F | 26 |
| RPMI-7951 | RPS11andSNORD35B | LUC7L | 23 |
| RPMI-7951 | MYO19 | ZNHIT3 | 22 |
| RPMI-7951 | LHFP | CREBZF | 22 |
| RPMI-7951 | EEF1DP3 | FRY | 22 |
| RPMI-7951 | ZNF649andZNF577 | TATDN2andGHRLOS | 22 |
| RPMI-7951 | UTRN | NME7 | 20 |
| RPMI-7951 | TRIO | CYBRD1 | 19 |
| RPMI-7951 | CRTC3 | MAPKBP1 | 19 |
| RPMI-7951 | TOPORSandDDX58 | ACO1 | 19 |
| SJCRH30 | MARS | AVIL | 714 |
| SJCRH30 | PAX3 | FOXO1 | 283 |
| SJCRH30 | SNORD114-1 | MEG8- | 135 |
| SJCRH30 | MEGF11 | RPL9P25andTIPIN | 44 |
| SJCRH30 | RPS6KC1 | FLVCR1 | 40 |
| SJCRH30 | FANCD2 | MTHFD1L | 32 |
| SJCRH30 | THSD4 | SERHL2 | 27 |
| SJCRH30 | ZNF782 | ZNF510 | 26 |
| SJCRH30 | NRIP1 | LOC100128341 | 23 |
| SJCRH30 | RAD18 | OXTR | 23 |
| SK-Mel-5 | C1orf43 | SCAMP3 | 1067 |
| SK-Mel-5 | UBE2Q1 | VPS72andTMOD4 | 279 |
| SK-Mel-5 | FSTL5 | MRPL21 | 65 |
| SK-Mel-5 | LOC340357 | LONRF1 | 27 |
| SK-Mel-5 | ZNF782 | ZNF510 | 27 |
| SK-Mel-5 | C1orf43 | SCAMP3 | 21 |
| SK-Mel-5 | CTTN | TRIM37 | 20 |
| SK-Mel-5 | DIXDC1 | SDHD | 17 |
| SK-Mel-5 | TUFT1 | EFNA4andEFNA3 | 17 |
| SK-Mel-5 | LOC729082 | RGS20 | 17 |
| SK-N-DZ | MAP1D | FARSB | 1327 |
| SK-N-DZ | KIAA1267 | ARL17AandARL17B | 682 |
| SK-N-DZ | CTSC | MAML2 | 134 |
| SK-N-DZ | DBI | SPAG16 | 66 |
| SK-N-DZ | AACSL | ZNF354A | 57 |
| SK-N-DZ | C2orf43 | FLJ30838 | 57 |
| SK-N-DZ | KLK4 | KLKP1 | 55 |
| SK-N-DZ | PSMB7 | CKS2 | 55 |
| SK-N-DZ | CAPZA2 | PTTG1 | 54 |
| SK-N-DZ | SNORD114-1 | MEG8 | 53 |

Table 3h Top ten highly-expressed fusion
transcripts of SK-N-SH, SUN-16, Hela-3 and REC1.

| | | | |
|---|---|---|---|
| SK-N-SH | EXOC4 | PVT1 | 235 |
| SK-N-SH | C19orf47 | AKT2 | 225 |
| SK-N-SH | EXOC4 | PVT1 | 142 |
| SK-N-SH | PAOXandMTG1 | LOC619207 | 131 |
| SK-N-SH | ACCS | EXT2 | 116 |
| SK-N-SH | VAX2 | ATP6V1B1 | 111 |
| SK-N-SH | PVT1 | EXOC4 | 107 |
| SK-N-SH | LMAN2 | MXD3andRAB24 | 93 |
| SK-N-SH | MFGE8 | HAPLN3 | 87 |
| SK-N-SH | RPL23AP5 | NME4andDECR2 | 84 |
| SUN16 | PVT1 | SLC1A2 | 22 |
| SUN16 | PVT1 | SLC1A2 | 14 |
| SUN16 | LOC389641 | CHMP7 | 4 |
| SUN16 | STS | VCX | 4 |
| SUN16 | EEF1DP3 | FRY | 4 |
| SUN16 | CTNNBIP1 | CLSTN1 | 4 |
| SUN16 | CENPK | UVRAG | 4 |
| SUN16 | NDUFAF2 | ZSWIM6 | 4 |
| SUN16 | RND3 | RALB | 4 |
| SUN16 | CMIP | DYNLRB2 | 4 |
| Hela-3 | RPS6KB1 | TMEM49 | 256 |
| Hela-3 | HNRNPUL2andBSCL2 | C11orf49 | 253 |
| Hela-3 | GNB1 | NADK | 149 |
| Hela-3 | ST6GALNAC4 | ST6GALNAC6andAK1 | 124 |
| Hela-3 | KIAA1267 | ARL17AandARL17B | 120 |
| Hela-3 | CCDC123 | PEPD | 79 |
| Hela-3 | UBA2 | WTIP | 64 |
| Hela-3 | PAOXandMTG1 | LOC619207 | 49 |
| Hela-3 | GNB1 | NADK | 47 |
| Hela-3 | C19orf47 | AKT2 | 42 |
| REC1 | AKNA | FBXL20 | 98 |
| REC1 | FBXL20 | AKNA | 41 |
| REC1 | MYST3 | PLEKHA5 | 27 |
| REC1 | LOC619207 | CYP2E1 | 20 |
| REC1 | FCRL2 | FCRL3 | 18 |
| REC1 | SLC29A1 | HSP90AB1 | 18 |
| REC1 | ZNF782 | ZNF510 | 14 |
| REC1 | LOC285972 | GIMAP8 | 13 |
| REC1 | PAOXandMTG1 | LOC619207 | 12 |
| REC1 | ST6GALNAC4 | ST6GALNAC6andAK1 | 11 |

Table 3i Top ten highly-expressed fusion
transcripts of U87, U2OS, U251 and MCF7.

| | | | |
|---|---|---|---|
| U87 | BMP7 | TMPRSS15 | 10 |
| U87 | PPP1R13L | ZNF541 | 9 |
| U87 | PPP1R13L | ZNF541 | 5 |
| U87 | ZNF782 | ZNF510 | 5 |
| U87 | CDKL3andPPP2CA | SKP1 | 5 |
| U87 | BMP7 | TMPRSS15 | 4 |
| U87 | UBA2 | WTIP | 3 |
| U87 | SACS | SGCG | 3 |
| U87 | C15orf26 | IL16 | 2 |
| U87 | ATP2C1 | NEK11 | 2 |
| U2OS | ADAM9 | ADAM32 | 33 |
| U2OS | UBA2 | WTIP | 6 |
| U2OS | SLC35A3 | HIAT1 | 4 |
| U2OS | MRPS10 | GUCA1B | 3 |
| U2OS | HDAC8 | CITED1 | 3 |
| U2OS | BAG4 | DDHD2 | 2 |
| U2OS | BAG4 | DDHD2 | 1 |
| U251 | ATP11C | MCF2 | 49 |
| U251 | NRIP1 | LOC100128341 | 6 |
| U251 | RASSF8 | SSPN | 4 |
| U251 | RAB31 | TXNDC2 | 4 |
| U251 | LARP1 | CNOT8 | 4 |
| U251 | ARF3 | FKBP11 | 3 |
| U251 | CORO1C | SELPLG | 3 |
| U251 | PPP1R12A | PAWR | 3 |
| MCF7 | ARFGEF2 | SULF2 | 2176 |
| MCF7 | RPS6KB1 | TMEM49 | 2107 |
| MCF7 | TANC2 | CA4 | 1526 |
| MCF7 | RPS6KB1 | TMEM49 | 1502 |
| MCF7 | PAPOLA | AK7 | 873 |
| MCF7 | SYTL2 | PICALM | 764 |
| MCF7 | ADAMTS19 | SLC27A6 | 685 |
| MCF7 | RPS6KB1 | DIAPH3 | 597 |
| MCF7 | ABCA5 | PPP4R1L | 535 |
| MCF7 | DEPDC1B | ELOVL7 | 532 |

Table 3j Top ten highly-expressed fusion
transcripts of HepG2, K562 and SJSA1.

| | | | |
|---|---|---|---|
| HepG2 | AHSG | GYG2P1andARSFP1 | 308 |
| HepG2 | FOXA2 | NCRNA00261 | 252 |
| HepG2 | ZNF782 | ZNF510 | 142 |
| HepG2 | LMO7 | UCHL3 | 134 |
| HepG2 | LMAN2 | MXD3andRAB24 | 90 |
| HepG2 | NRIP1 | LOC100128341 | 78 |
| HepG2 | PAOXandMTG1 | LOC619207 | 71 |
| HepG2 | VAX2 | ATP6V1B1 | 70 |
| HepG2 | SLC29A1 | HSP90AB1 | 58 |
| HepG2 | NRIP1 | LOC100128341 | 58 |
| K562 | BCR | ABL1 | 4043 |
| K562 | BAT3 | SLC44A4 | 2760 |
| K562 | NUP214 | XKR3 | 2443 |
| K562 | KIAA1267 | ARL17AandARL17B | 781 |
| K562 | C10orf76 | KCNIP2andMGEA5 | 432 |
| K562 | IMMP2L | DOCK4 | 254 |
| K562 | C15orf26 | IL16 | 218 |
| K562 | C16orf87 | ORC6L | 202 |
| K562 | PRIM1 | NACA | 188 |
| K562 | BAT3 | SLC44A4 | 171 |
| SJSA1 | HMGA2 | LUM | 4210 |
| SJSA1 | ARHGEF7 | CPM | 281 |
| SJSA1 | SNORD114-1 | MEG8 | 113 |
| SJSA1 | SLC7A5 | BANP | 107 |
| SJSA1 | SP140L | LCA5 | 96 |
| SJSA1 | KIF5A | STK24 | 94 |
| SJSA1 | KPNA6 | UBAP2L | 69 |
| SJSA1 | KIAA0427 | SMAD2 | 57 |
| SJSA1 | AGRN | TMEM8A | 51 |
| SJSA1 | SLC12A2 | DDX5 | 51 |

[0094] To characterize these large numbers of fusion transcripts, we have analyzed the fusion transcripts based on cancer cell lines and their supporting sequence reads. Table 3 has shown that many fusion transcripts are expressed at very high levels. However, they are often detected only in one type of cancer and are not recurrent in other cancer types. One of the most highly-expressed putative fusion genes is HMGA2-LUM putative fusion gene in osteosarcoma SJSA1 cell, which is a putative fusion gene between HMGA2 gene, encoding high mobility group AT-hook2 and associated with mesenchymoma and LUM gene coding for lumican and associated with corneal dystrophy. FIG. 7a shows that HMGA2 and LUM genes have undergone potential intra-chromosomal translocations and they are brought to close each other on the chromosome 12. FIG. 7b shows that HMGA2-LUM fusion gene has two isoforms (Isoform 1 and Isoform 2). FIG. 7b shows that Isoform 1 and Isoform 2 differ by only two nucleotides at their fusion junctions. Isoform 1 will have the normal LUM's last exon and generate a HMGA2-LUM fusion protein. On the hand, Isoform 2 will result in a truncated HMGA2 protein, which is 50 amino acids shorter than the Isoform 1. FIG. 7c shows that two expression levels differ by 4200 folds. The fact that HMGA2 isoforms similar to Isoform 2 have been observed in normal human tissues and cells has suggested that the Isoform 1 fusion protein may play in important role in SJSA1 cancer development.

[0095] As discussed above, we have adopted much stringent conditions to identify fusion transcripts. As shown in Table 2, our supporting sequence reads are 7.5 folds less than others. Technically, it is much more difficult for us to experimentally verify the lowly-expressed fusion transcripts than those highly-expressed fusion transcripts. Since we have identified large numbers of fusion transcripts, it is not practical for us to use “traditional” RT-PCR approaches and other “traditional” methods to validate these large numbers of fusion transcripts. However, if we can use the traditional RT-PCR methods to validate some lowly-expressed fusion transcripts, it will greatly help us to understand the characteristics of these fusion transcripts and will lay solid foundations for large-scale verification of all fusion transcripts, such as RNA CaptureS eq (Mercer, et al. 2014).

[0096] To verify the lowly-expressed fusion transcripts, we have isolated total RNAs from cancer cell lines MCF-7, Hela-3, HepG2, BT-474, K562, 293T and other cancer cell lines while GM12878 and MCF-10A normal cell line have been used as controls. Total RNAs are isolated by Qiagen RNeasy mini columns with DNase I digestion as suggested by the manufacturer. Briefly, 1×10⁶ cultured cells are harvested by centrifuging for 5 min at 300×g. Supernatants are removed by aspiration. Cell pellets are disrupted for 30 seconds in 350 μl of Buffer RLT. The lysates are pipetted directly into a QIAshredder spin column placed in a 2 ml collection tube, and centrifuge for 2 min at full speed. One volume of 70% ethanol is added to the cleared lysate, and mix well by pipetting. 700 μl of the sample are transferred to RNeasy mini spin columns sitting in a 2-ml collection tube and the columns are centrifuged for 30 seconds at maximum speed and flow-through is discarded. 700 μl Buffer RW1 are added onto the RNeasy column, the RNeasy columns are centrifuged for 30 seconds at maximum speed and flow-through is discarded. 350 μl Buffer RWT are added into the RNeasy Mini spin column and centrifuge for 15 at 8000×g. To remove potential DNA contamination, after 10 μl DNase I stock solution is mixed with 70 μl Buffer RDD by gently inverting tubes, the DNase solution is added into the RNeasy columns and incubated at room temperature for 30 minutes. The columns are washed again by adding 350 μl Buffer RWT. After RNeasy columns are transferred to new 2-ml collection tubes, the columns are washed twice using 500 μl Buffer RPE by centrifuging for 30 seconds at maximum speed. RNAs are eluted from the columns by adding 30 μl of RNase-free water

[0097] The first-strand cDNA synthesis is carried out using oligo(T)15 and/or random hexamers by TaqMan Reverse Transcription Reagents (Applied Biosystems Inc., Foster City, Calif., USA) as suggested by the manufacturer. In brief, to prepare the 2×RT master mix, we pool 10 μl of reaction mixes containing final concentrations of 1×RT Buffer, 1.75 mM MgCl₂, 2 mM dNTP mix (0.5 mM each), 5 mM DTT, 1× random primers, 1.0 U/μl RNase inhibitor and 5.0 U/μl MultiScribe®. The master mixes are prepared, spanned down and placed on ice. 10 μl of 2×RNA mixes containing 2 ug of total RNA are added into 10 μl 2× master mixes and mixed well. The reaction mixes are then placed in a thermal cycler of 25° C., 10 min, 37° C. 120 min, 95° C., 5 min and 4° C., ∞. The resulted cDNAs are diluted by 80 μl of H₂O.

[0098] To identify novel human fusion transcripts, fusion transcript specific primers have been designed to cover the 5′ and 3′ fusion transcripts. The primers are designed using the primer-designing software (SDG 2015). 5 μl of the cDNAs generated above are used to amplify fusion transcripts by PCR. PCR amplifications are carried out by HiFi Taq polymerase (Invitrogen, Carlsbad, Calif., USA). PCR reactions have been carried out by HiFi Taq polymerase (Invitrogen, Carlsbad, Calif., USA) using cycles of 94° C., 15″, 60-68° C., 15″ and 68° C., 2-5 min. The PCR products are separated on 2% agarose gels. The expected products are excised from gels and cloned into pCR4.0 TA vector (Invitrogen, Carlsbad, Calif., USA). Fusion transcripts are then verified by blast and manual inspection.

[0099] As discussed above, many highly-expressed fusion transcripts have been successfully validated in different cancer datasets. In our approach, we have identified majorities of fusion transcripts are expressed at very low levels based on the numbers of supporting sequence reads. After we have performed RNA-seq analysis of different lymphoblastoid cell lines from different individuals, we have found that lowly-expressed fusion transcripts are shown to have strong individuality. That is, these fusion transcripts can be detected only in one lymphoblastoid cell line, but not in any of other lymphoblastoid cell lines. Later, experimental data have confirmed this conclusion. So we have selected numbers of lowly-expressed fusion transcripts for validation and we have validated six of them so far.

[0100] Table 4 shows the list of the validated fusion transcripts expressed at very

TABLE 4
Characteristics of some lowly-expressed fusion transcripts
validated by RT-PCR and following by DNA sequencing.

| Fusion Transcripts | Cell Types | NSJMR |
|---|---|---|
| GABBR1andUBD\|PSPH | BT-474 | 0.001 |
| ncRNA00188_\|GNAI3 | GM12878 | 0.00051 |
| LRRC37A3\|VNN2 | BT-474 | 0.000891 |
| CPSF6\|CACNA1E | GM12878 | 0.000455 |
| FAM164A\|RASA4PandPOLR2J4 | Heart | 0.000394 |
| RRP8\|RAB2A | Heart | 0.00095 |

low levels, which range from 3.94×10⁻⁴ to 1×10⁻³ numbers of splice junctions per million reads (NSJMR).

[0101] Table 5 shows the primers used to validate the fusion transcripts.

TABLE 5
List of primers for validation of fusion transcripts.

| Fusion Transcripts | 5′ Primers | 3′ Primers |
|---|---|---|
| GABBR1andUBD\|PSPH | TGAGTAGCTGAAACTACAGGATGCTT | TCAGTGATATACCATTTGGCGTT, |
| ncRNA00188_\|GNAI3 | CACAGTGGGGGTGTGCAAAC | CGAGACCGTGACCGAGAG |
| LRRC37A3\|VNN2 | TGAGTAGCTGGGATTGCAGTACCA | TCCGGCTTTTCAGGGACATTAA |
| CPSF6\|CACNA1E | CGAGACCGTGACCGAGAG | CGAGACCGTGACCGAGAG |
| FAM164A\|RASA4PandPOLR2I4 | CCTCCCCAACCAAGCTTTCTGTA | CCTTCAATGCCTTTAATATTTCCACC |
| RRP8\|RAB2A | GATGTTCGAACCTTTCTGCGG | ACGACCTTGTGATGGAACGAAA |

[0102] As shown in Table 4, the CPSF6|CACNA1E fusion transcripts have been found to be expressed at very low levels in the lymphoblastoid cell line of GM12878 and its NSJMR is 4.55×10⁻¹⁰. CPSF6 gene, encoding Cleavage And Polyadenylation Specific Factor 6, has been shown to be located on the chromosome 12 while CACNA1E gene, coding for Calcium Channel, R Type, Alpha-1 Polypeptide, is locate on the chromosome 1. The CPSF6|CACNA1E fusion transcripts are interchromosomal translocations. FIG. 8 has shown a schematic diagram of procedures to verify CPSF6|CACNA1E fusion transcripts in lymphoblastoid cell line. A potential translocation has brought CPSF6 and CACNA1E genes together. Total RNAs are isolated from the GM12878 cell lines and cDNAs are generated by TaqMan Reverse Transcription Reagents. Pair of primers has been designed to amplify cDNAs. The amplified DNAs are separated on a 2.0% agarose gel. The DNA fragments are isolated by QIAquick Gel Extraction Kit and are cloned into pCR4.0 TA vector (Invitrogen, Carlsbad, Calif., USA). The plasmid DNAs of the positive clones are isolated and sequenced. The sequenced data are used by blast and manual inspection to verify the fusion junctions (FIG. 8). The CPSF6|CACNA1E fusion transcript suggests that the in-frame CPSF6|CACNA1E fusion gene has eight exons of the CPSF6 nine exons and forty-eight exons of the CACNA1E forty-nine exons, which are much larger than both proteins.

[0103] In addition, we have verified two fusion transcripts, RRP8|RAB2A and FAM164A|RASA4PandPOLR2J4 in heart tissues from patients with heart diseases. As we have observed above, the fusion transcripts have been shown to have individuality. The validation of these lowly-expressed fusion transcripts have suggested that the many of the lowly-expressed fusion transcripts may play important roles in cancer initiation, developments, invasion, and metastasis.

[0104] To check whether these three fusion transcripts are expressed in other cancer cell lines, we have used identical conditions to perform individual RT-PCR amplification of cDNAs from these cancer cell lines described above without success. We have tested different experimental conditions without any success. Since we have such large numbers of lowly-expressed fusion transcripts, we need more efficient method to validate these fusion transcripts in varieties of tissues, cells and individuals.

[0105] Table 3 shows that many top fusion transcripts are from read-though and recurrent in many cell lines. FIG. 9a shows MTG1 and SCART1 (LOC609217) on the chromosome 10, which encodes mitochondrial GTPase 1 homolog and a pseudogene of scavenger receptor protein family member, respectively. The read-though has resulted in fusion transcripts between MTG1 and SCART1 genes. Eight isoforms have been identified. Five fusion transcripts are 5′ alternatively-spliced at the MTG1 exon 10 while the remaining 3 fusion transcripts are alternatively-spliced at the MTG1 exon 11. These data have clearly shown that MTG1|SCART1 fusion gene is alternatively spliced and are able to generate in-frame hybrid proteins (FIG. 9b). These data have demonstrated that read-though fusion genes are similar to normal genes. MTG1|SCART1 isoform 1 has been the dominant isoform (FIG. 8c) and could generate a fusion protein containing majority of MTG1 and major part of SCART1 protein. FIG. 9d has shown that MTG1|SCART1 fusion transcripts have been detected in 29 out of 39 cancer cell lines. FIG. 9e shows that the expression levels among different types of cancer are significantly different and the ratios of different isoforms also differed significantly.

[0106] Read-through fusion transcripts are significantly different from the other four fusion transcripts. That is, two parental genes of fusion transcripts are close each other on the same chromosomes with the same orientations. Even though some read-though fusion transcripts may be caused by genetic alternations, majorities of read-though fusion transcripts may be due to failures of fail-safe transcriptional mechanisms (Porrua and Libri 2015). Many aberrant environmental and developmental factors often result in failures of transcriptional terminations and generate read-though fusion transcripts. More importantly, majority of fusion transcripts may be tissues-specifically expressed and have special functions. To verify whether expression of read-through fusion transcripts is tissues-specific, we have performed analysis of RNA-seq datasets of normal human tissues which include tissue samples from 95 human individuals representing 27 different tissues and primary cell lines (ENCODE 2015, SCILIFELAB 2015). Read-though fusion transcripts from different tissues have been used as negative controls to analyze cancer fusion transcripts.

[0107] FIG. 10a shows an example demonstrating differential expression patterns of read-through fusion transcripts in normal tissues. The C19orf47 and AKT2 genes are located the chromosome 19 and are separated by 57 Kb. FIG. 10a has shown that the C19orf47|ATK2 fusion transcripts have been detected in bone marrow, colon, duodenum, Fallopian tube, fat gall bladder, testis, thyroid, tonsil but they are not found in other 18 other tissues as well as breast tissues and HMEC. In addition, FIG. 10a has also demonstrated that C19orf47|AKT2 fusion transcripts are expressed at significantly different levels among these nine tissues.

[0108] To demonstrate how to use read-though fusion transcripts as cancer biomarkers, we have performed analysis of breast cancer data from HudsonAlpha Institute for Biotechnology, AL, USA (designed as HIBCD) (Varley, et al. 2014), which have 168 breast cancer samples. FIG. 10b has shown that 7 (4%) breast cancer samples have been shown to express C19orf471ATK2 fusion transcripts out of the HIBCD 168 breast cancer samples.

[0109] To further demonstrate how to use read-though fusion transcripts as cancer biomarkers, we have performed analysis of both HIBCD and South Korean breast cancer data (designed as SKBCP) (ERP010142 2015). Then we have performed comparative analyses of the fusion transcripts from normal human tissues and the HIBCD breast cancer samples. FIG. 11 has shown that GAL3ST2 gene, encoding galactose-3-O-sulfotransferase 3, and NEU4 gene, coding for N-Acetyl-Alpha-Neuraminidase 4, are located on the chromosome 11 and are separated by 17 Kb. GAL3ST2 gene has been implicated in tumor metastasis processes while NEU4 gene has been associated with NEU4 include galactosialidosis. The GAL3ST2|NEU4 fusion transcripts are expressed only in normal human colon and absent in 26 other human tissues, breast and human mammary epithelial cells (HMEC). As shown in FIG. 11, we have detected GAL3ST2|NEU4 fusion transcripts in 5 (3%) samples out of the 168 HIBCD breast cancer samples, two of which have much significantly higher expression levels than that in colon tissues. On the other hand, we have detected GAL3ST2|NEU4 fusion transcripts in only one (1.3%) sample out of 78 SKBCP breast cancer patients. These data have suggested that GAL3ST2|NEU4 fusion transcripts are far less frequent than what people have expected. This has demonstrated that read-though fusion transcripts can be used to test whether they are expressed in wrong tissues and wrong developmental stages.

[0110] As shown in FIG. 4d, in addition to read-through, inversions have much more recurrent fusion transcripts than those of interchromosomal translocations, intrachromosomal translocations and deletions. So we have examined inversion fusion transcripts and identified large numbers of recurrent fusion transcripts as potential cancer detection biomarkers. Table 3 has shown that many high-expressed fusion transcripts come from inversions or duplications. One of the highly-expressed fusion transcripts is KANSL1 (KIAA1267)|ARL17A reported previously (Kinsella, et al. 2011), which is resulted from a chromosome 17 inversion (FIG. 12a). FIG. 12b has shown that the KANSL1|ARL17A fusion gene generates six fusion transcripts, which can produce potential KANSL1|ARL17A fusion proteins, five of which are novel fusion transcripts. FIG. 9c has shown that fusion transcript 2 is expressed at the highest levels among the six fusion transcripts. FIG. 12d has shown that the KANSL1|ARL17A fusion transcripts have been found in 14 out of 39 cancer cell lines and the largest and the second largest numbers of KANSL1|ARL17A fusion transcripts have been found in K562 and SK-N-DZ cancer cell lines. To rule out the size effects of RNA-seq datasets, we have normalized expression of the KANSL1|ARL17A fusion transcripts. FIG. 12e has shown that the highest expressed fusion transcripts have been found in Karapas-422 cancer cell line. A549, H4, HT29, A375, SK-N-SH, and K562 are among highly-expressed cancer cell lines (FIG. 12e). KANSL1 gene, located in 17q21.31, encodes KAT8 regulatory NSL complex subunit involved with histone acetylation and is associated with koolen de vries syndrome, formerly known as 17q21.31 microdeletion syndrome (Koolen, et al. 2006, de Jong, et al. 2012). Chromosomal band 17q21.31 contains common recurrent inversions in 20% population with European ancestry (Stefansson, et al. 2005). Based on the information of cancer cell lines, the majorities of the ECD39 cancer cell lines are Caucasian, which suggests their European ancestry. Our KANSL1|ARL17A fusion transcript data and genetic data (Koolen, et al. 2006, de Jong, et al. 2012) have suggested that KANSL1|ARL17A fusion transcripts are associated with recurrent inversions of the chromosomal band 17q21.31.

[0111] To explore whether the fusion transcripts can be used to investigate relationships between human evolutionary genetics and fusion transcripts, we have plotted the total fusion transcripts and inversion fusion transcripts along the human chromosome 17. FIG. 13a shows the relationships between the total fusion transcripts and inversion fusion transcripts and chromosome positions, each of which represents 5M bp. FIG. 13a shows that there is peaks of both total and inversion fusion transcripts between 41 Mb and 49 Mb. When we have plotted total fusion transcripts identified in ≧2 cancer cell lines and inversion fusion transcripts detected in ≧2 cancer cell lines along the human chromosome 17, FIG. 13b has shown patterns similar to those in FIG. 13a and locations of KANSL1|ARL17A fusion transcripts are indicated by arrows. These suggest that the region from 41 Mb to 49 Mb of the chromosome 17q21.31 band is associated with numbers of other recurrent fusion transcripts. In addition, we have found that three additional peaks may be associated with human genetic variations on the chromosome 17.

[0112] As we discussed above, we can use the hit maps of fusion transcripts to discover and locate recurrent chromosomal regions associated with cancers. We have plotted the hit maps of total fusion transcripts and inversion fusion transcripts. FIG. 14 shows the genome-wide hit maps of the total fusion transcripts detected in ≧2 cancer cell lines and inversion fusion transcripts detected in ≧2 cancer cell lines. The peaks in each hit map represent variable regions and may be associated with cancer.

[0113] FIG. 13a and FIG. 13b have shown that chromosomal band 17q21.31 contains multiple fusion transcripts. Table 6 shows 18 putative fusion genes from 41 Mb to 49 Mb of the chromosome 17q21.31 region, which are pointed by arrows and are supported by 34 fusion transcripts. Clustering large numbers of fusion transcripts suggests that certain genetic variations make these regions unstable and often result in genetic alternations, which generate fusion transcripts.

TABLE 6
List of fusion transcripts detected between 42 Mb to 48 Mb of
the chromosome 17.

| 5′ Gene | 5′ Positions (Mb) | 3′ Gene | 3′ Positions (Mb) |
|---|---|---|---|
| LRRC37A4 | 43.6 | NSF | 44.7 |
| LRRC37A4 | 43.7 | NMT1 | 43.2 |
| LRRC37A4 | 43.7 | KIAA1267 | 44.2 |
| LRRC37A4 | 43.7 | LRRC37A3 | 62.9 |
| LRRC37A4 | 43.7 | ARSG_{—} | 66.3 |
| C17orf69 | 43.7 | ARHGAP27 | 43.5 |
| KIAA1267 | 44.1 | ARL17A | 44.6 |
| ARL17A | 44.6 | KIAA1267 | 44.2 |
| NSF | 44.8 | LRRC37A3 | 62.9 |
| MRPL45P2 | 45.5 | NPEPPS | 45.6 |
| NPEPPS | 45.7 | ITGB3_{—} | 45.5 |
| MRPL10 | 45.9 | KIAA0100_{—} | 27 |
| HOXB6 | 46.7 | BAIAP2 | 79 |
| ATP5G1 | 47 | UBE2Z | 47 |
| GIP | 47 | SNF8 | 47 |
| SPOP | 47.7 | NME1-NME2 | 49.2 |

[0114] It has been reported that the H2 lineage is rare in Africans, almost absent in East Asians, but found in 20% population with European ancestry (Stefansson, et al. 2005). To further confirm the inversion KANSL1|ARL17A fusion transcript is a cancer-biomarker associated with European genetic backgrounds, we have performed analysis of HIBCD and SKBCP breast cancer data (Varley, et al. 2014, ERP010142 2015). The HIBCD contains 168 breast cancer cell lines and primary breast cancer tissues samples (Varley, et al.). The SKBCP has samples from 22 HRM (high-risk for distant metastasis) and 56 LRM (low-risk for distant metastasis) breast cancer patients (ERP010142 2015). We have performed comparative analyses of HIBCD and SKBCP samples. FIG. 15 has shown that HIBCD has 50 samples that express KANSL1|ARL17A fusion transcripts while the SKBCP has none of the KANSL1|ARL17A samples. The difference between HIBCD and SKBCP has been shown by χ²-test to be statistically significant (p≧0.001). SKBCP has 100 bp RNA-seq reads and has total 1.6×10¹² base counts while HIBCD has 50 bp RNA-seq reads in length and has total 1.2×10¹² base counts. Therefore, the qualities of the SKBCP dataset are better than those of the HIBCD. These data have ruled out that the KANSL1|ARL17A fusion transcripts are caused by experimental errors and random chances. The absence of the SKBCP KANSL1|ARL17A samples not only has further confirmed that any fusion transcript identified by our splicingcodes method are not generated by random chance or experimental errors, but also have shown that KANSL1|ARL17A fusion transcripts are associated with breast cancer patients of European ancestry.

[0115] Since the KANSL1|ARL17A fusion proteins are involved with histone acetylation and may affect the chromosomal stabilities, it is highly unlikely that they directly cause cancer in a short time and may be earlier cancer biomarkers (de Jong, et al. 2012). However, their expression will have tremendous affects on the cancer initiation, developments, invasion, and metastasis. In order to understand their expression, we have analyzed expression levels in the HIBCD 50 cancer samples. FIG. 16 has shown that the KANSL1|ARL17A expression levels of HIBCD 50 samples are significantly different and range from 0.0113 to 0.18 NSJMR. The lowest and highest expression levels differ by 16 folds. FIG. 16 has also shown that the KANSL1|ARL17A fusion transcripts are not detected in the normal breast tissues and HMEC even though their RNA-seq datasets are much larger than individual ones of HIBCD samples.

[0116] Even though we don't know exact compositions of race backgrounds, we can reasonably predict that majority of the HIBCD′ samples have European ancestry due to their USA origins. On the other hand, all most SKBCP patients have Asian ancestry. Since the KANSL1|ARL17A fusion transcripts have been detected in 35.8% of the ECD39's 39 cancer cell lines (FIGS. 9c and 9d) and 30% of the HIBCD's 168 samples, we can conclude that the KANSL1|ARL17A fusion transcripts and other fusion transcripts between 41 Mb and 49 Mb of chromosomal band 17q21.31 band (Table 6) can be used to detect any types of cancer and are cancer biomarkers of patients with European ancestry. Since these fusion transcripts are the consequences of “traditional” human evolutionary studies (Stefansson, et al. 2005, Rao, et al. 2010), further understanding how certain genetic types will result in fusion genes and are associated with cancer initiation, developments, uncontrolled growth, invasion, and metastasis will greatly help us to detect and prevent cancers in these subgroups of populations.

[0117] Like the inversion fusion transcripts, the recurrent fusion transcripts have been observed in the interchromosomal fusion transcripts. One example is the GABBR1andUBD|PSPH fusion transcripts. The GABBR1andUBD transcription unit is located on chromosome 6 while PSPH gene is on chromosome 7. The GABBR1andUBD fusion transcripts are generally expressed at very low levels in some lymphoblastoid cell lines and have one or two copies of GABBR1andUBD|PSPH fusion transcripts. However, we have found that GABBR1andUBD|PSPH fusion transcripts are highly expressed in stem cell lines while they are expressed at various levels in many cancer lines. These data have suggested that GABBR1andUBD|PSPH fusion transcripts may play roles in promoting cell differentiation and growth. Therefore, we have then performed analysis of the 168 HIBCD breast cancer samples and 78 SKBCP breast cancer samples. FIG. 17a has shown that the GABBR1andUBD|PSPH fusion transcripts have been detected in 31 breast cancer samples, which represents 18.4% of HIBCD breast cancer samples. Unlike the KANSL1|ARL17A fusion transcripts, FIG. 17b has shown seven samples have been shown to have GABBR1andUBD|PSPH fusion transcripts, which represent about 10% of the SKBCP samples and are less than that found in HIBCD. The GABBR1andUBD|PSPH fusion transcripts have not been detected in normal human breast tissues and different HMEC cells. The GABBR1andUBD|PSPH expression levels, which are estimated by numbers of splice junctions per million reads (NSJMR), vary significantly among different HIBCD samples and range from 1.15×10⁻² to 8.9×10⁻², which differ by 7.7 folds. In the future, we need to investigate whether expression levels of GABBR1andUBD|PSPH fusion transcripts are associated with cancer prognosis.

[0118] As shown in FIG. 17, the GABBR1andUBD|PSPH fusion transcripts have been detected in many breast cancer samples. As shown in Table 4, GABBR1andUBD-PSPH fusion transcripts are expressed at very low levels. We have isolated total RNAs from BT-474 cancer cell line as described above. To verify GABBR1andUBD-PSPH fusion transcripts, we have designed primers based on the fusion transcripts as shown in Table 5. We have used these primers to amplify cDNAs to detect GABBR1andUBD|PSPH fusion transcripts. The amplified GABBR1andUBD|PSPH cDNA fragments are separated on 2.0% agarose gels. The resulted PCR fragments have been isolated and purified by Qiagen Gel Extraction Kit. The purified cDNA fragments are then cloned into pCR4-TOPO clone vector. FIG. 18a has shown that interchromosomal translocations may have brought GABBR1andUBD gene on the chromosome 6 and PSPH gene of the chromosome 7 together and form a Head-Tail-to-Head structure. The putative GABBR1andUBD|PSPH fusion gene is spliced to remove introns to generate a transcript containing the first two exons of the GABBR1andUBD gene and the last exon of the PSPH gene. The amplified GABBR1andUBD|PSPH cDNA fragments are separated on 2.0% agarose gels. The resulted PCR fragment has been cloned into pCR4-TOPO clone vector and verified by DNA sequencing as shown in FIGS. 18b and 18c. The junction sequences of fusion transcripts are verified by blast and visual inspections (FIG. 18c). Then, we have tested whether the GABBR1andUBD|PSPH fusion transcripts are presents in normal MCF10A cell line and the cancer cell lines described above. It has been negative in MCF10A and cancer cell lines. However, further experiments have shown that the GABBR1andUBD|PSPH fusion transcripts are expressed in some lymphoblastoid cell lines. However, we need to develop much faster and more accurate methods to validate these fusion transcripts. Since the fusion transcripts are shown by blast to have homologous sequences from pseudogenes or other duplications, it has not affected using them as fusion transcript markers. However, if we want to investigate the functions of the fusion transcripts, we have to use RACE PCR to get full-length sequences.

[0119] As shown in Table 4, we have validated the LRRC37A3|VNN2 fusion transcripts in BT-474.

[0120] Table 3 has shown that the most complex fusion events have been observed in neuroblastoma SK-N-SH cells and are ones between PVT1 oncogene and EXOC4 gene. FIG. 19a shows that EXOC4 gene is located on the chromosome 7 and codes for a component of the exocyst complex involved in the docking of exocytic vesicles with fusion sites on the plasma membrane. FIG. 19b shows that PVT1 oncogene is on the chromosome 8 and codes for oncogenic non-coding RNA. FIG. 19c has shown that we have identified 9 PVT1|EXOC4 isoforms in SK-N-SH neuroblastoma cancer cell line. FIG. 19c shows that five PVT1|EXOC4 isoforms are alternatively-spliced at the 8^{th} exon of EXOC4 gene and three isoforms are alternatively-spliced at the 11^{th} exon of EXOC4 gene. FIG. 19d shows that PVT1|EXOC4 isoform 4 is the highest isoform and the second highest isoform is the PVT1|EXOC4 isoform 4. The remaining PVT1|EXOC4 isoforms are expressed at very low levels. Surprisingly, we have also identified EXOC4|PVT1 fusion transcripts. FIG. 19e shows that we have identified four EXOC4|PVT1 fusion transcripts, all of which are alternatively spliced at the 7^{th} exon of the EXOC4 gene. FIG. 19f shows that EXOC4|PVT1 isoform 4 is the highest isoform and the second highest one is the EXOC4|PVT1 isoform 1 (FIG. 19e). FIG. 19e shows that EXOC4|PVT1 isoform 3 and 4 differ by only three nucleotides but their expression levels differed by 11.75 folds (FIG. 190. FIGS. 19c and 19e have shown that PVT1 sequences are highly variable in all PVT1|EXOC4 and EXOC4|PVT1 fusion isoforms. These suggest that all PVT1|EXOC4 and EXOC4|PVT1 fusion isoforms may be regulated differentially. FIG. 19g shows that EXOC4-PVT1 gene (black bar) expression estimated by total sequence copies of supporting sequence reads is two folds of the PVT1-EXOC4 one (gray bar).

[0121] In addition, in gastric cancer cell SUN16, the top two fusion transcripts are from non-coding RNA PVT1 oncogene and SLC1A2, coding for glial high affinity glutamate transporter member 2 (Table 3). These complex fusion transcripts not only provide their fusion complex gene structures, but also suggest that non-coding RNA oncogene PVT1 may play important role in cancer development.

[0122] As shown in Table 3, among the top expression recurrent fusion transcripts is from MEG8 and SNORD114-1, which are located in human chromosome 14q32.2 critical region for uniparental disomy of chromosome 14 (UPD(14)) phenotypes and preferentially regulated with other imprinted genes including SNORD114-1 cluster (Charlier, et al. 2001). FIG. 20a shows that a potential inversions or duplications result in reverse orders of MEG8 and SNORNA114-1 and generated SNORD114-1|MEG8 fusion gene structure. We have identified five alternatively-spliced SNORD114-1|MEG8 fusion transcripts from this genetic aberration (FIG. 20b). FIG. 20c shows that the SNORD114-1|MEG8 isoform 3 is highly expressed and 100 folds higher than the isoform 5 (FIG. 20c). The SNORD114-1|MEG8 fusion transcripts have been found in A549, Daoy, LHCN-M2, M059J, SK-N-DZ, SJCRH30 and SJSA1 (FIG. 20d), the last two of which are highly expressed (FIG. 20e). Unlike all fusion genes reported so far, SNORD114-1|MEG8 fusion transcripts are fusion products between snoRNAs and non-coding RNAs and are differentially expressed in the cells (FIG. 20e). This suggests that SNORD114-1|MEG8 fusion transcripts may play some role in cancer developments. It will be important to know the exact functions of SNORD114-1|MEG8 fusion transcripts.

[0123] Since this is the first time to report non-coding RNA fusion transcripts, we have performed further analysis of non-coding RNA fusion transcripts. Table 7 has shown that additional fifteen fusion transcripts have been identified, which are involved in seven putative non-coding RNA-RNA fusion genes. It is important for us to understand how these non-coding RNA-RNA fusion transcripts affected the cancer.

[0124] As shown in Table 7, from the same genomic regions, we have also detected SNORD114-11|SNORD114-1 inversion fusion transcripts in numbers of cancer cell lines and some normal cell lines. These suggest that this genomic region is prone to genetic instability. Table 7 has shown that additional fifteen fusion transcripts

TABLE 7
Non-coding RNA-RNA fusion transcripts detected in cancer cells lines

| 5′ Genes | 5′ Chr | 5′ End | 3′ Genes | 3′ Chr | 3′ Start |
|---|---|---|---|---|---|
| ncRNA00188 | 17 | 16342728 | SNHG11 | 20 | 37077373 |
| ncRNA00188 | 17 | 16342728 | SNHG7 | 9 | 139619562 |
| ncRNA00188 | 17 | 16344444 | SNHG7 | 9 | 139620868 |
| SNHG3 | 1 | 28835417 | SNHG12 | 1 | 28906099 |
| SNHG3 | 1 | 28834672 | SNHG12 | 1 | 28907158 |
| SNHG3 | 1 | 28843379 | SNHG12 | 1 | 28906493 |
| SNHG3 | 1 | 28834672 | SNORD114-1 | 14 | 101416809 |
| SNHG3 | 1 | 28834672 | SNORD1C | 17 | 74559961 |
| SNHG3 | 1 | 28834672 | SNORD1C | 17 | 74557480 |
| SNORD114-11 | 14 | 101435882 | MEG8 | 14 | 101402336 |
| SNORD114-11 | 14 | 101435061 | MEG8 | 14 | 101402336 |
| SNORD114-11 | 14 | 101435882 | SNORD114-1 | 14 | 101416809 |
| SNORD114-11 | 14 | 101449879 | SNORD114-1 | 14 | 101416809 |
| SNORD114-11 | 14 | 101435882 | SNORD114-1 | 14 | 101420383 |
| SNORD114-11 | 14 | 101435061 | SNORD114-1 | 14 | 101415933 |
| SNORD114-1 | 14 | 101415933 | MEG8 | 14 | 101379858 |
| SNORD114-1 | 14 | 101422286 | MEG8 | 14 | 101379858 |
| SNORD114-1 | 14 | 101417831 | MEG8 | 14 | 101402336 |
| SNORD114-1 | 14 | 101415933 | MEG8 | 14 | 101402336 |
| SNORD114-1 | 14 | 101415933 | MEG8 | 14 | 101365422 |

are involved in seven potential non-coding RNA-RNA fusion genes. It is unclear how these non-coding RNA-RNA fusion transcripts affect the cancer.

[0125] Since FIGS. 19 and 20 have suggested that non-coding RNA fusion transcripts may play an important role in cancer developments, we have further analyzed the fusion transcripts and PFGs involved with known non-coding RNA sequences. We have identified 1074 fusion transcripts, which count for 6.5% of the total ECD39 fusion transcripts and are involved in 617 PFGs.

[0126] Based on non-coding RNA functions, these fusion transcripts have been classified arbitrarily into 10 subtypes: DANCR (differentiation antagonizing non-protein coding RNA), GASS, MALTA1, miRNAs, snoRNAs, NCRNA, PVT1, SCARNA, SNHGs and TRNA (Gutschner and Diederichs 2012). DANCR (differentiation antagonizing non-protein coding RNA) codes for a 855-base-pair IncRNA, which plays in role in maintaining the undifferentiated state in somatic tissue progenitor cells. GASS (Growth Arrest-Specific 5) has played in role in promoting the apoptosis of prostate cells and growth arrest in human T-lymphocytes (Williams, et al. 2011). MALAT1 (Metastasis-associated lung adenocarcinoma transcript 1) has been implicated in implicates the ncRNA MALAT1 in regulating alternative splicing (Tripathi, et al. 2010). PVT1 is a non-coding RNA oncogene, which is the characteristic lesions associated with Burkitt lymphoma (Ghoussaini, et al. 2008). SCARNA (Small Cajal body-specific RNAs) encodes a class of small nucleolar RNAs that specifically localise to the Cajal body (Enwerem, et al. 2014). All of these RNAs has been suggested to play very important roles in various biological functions (An and Song 2011).

[0127] Surprisingly, two miRNAs, MIR17HG and MIR214, have been identified in 20 fusion transcripts. MIR17HG oncogene encodes MIR17-92 cluster, which have a group of at least six miRNAs that may be involved in cell survival, proliferation, differentiation, and angiogenesis (Olive, et al. 2010, Olive, et al. 2013). MIR214 has been found to be involved in intrahepatic cholangiocarcinoma and esophageal squamous cell carcinoma and has been thought to a key hub that controls cancer networks (Penna, et al. 2015). Our analysis has shown that the oncogenic MIR17HG are fused to 9 5′ protein-coding genes while MIR214 have been found to be exclusively spliced to 8 3′ protein-coding genes. Recurrent MIR17HG-GPC5 has been detected in 10 cancer cell lines out of ECD39 cancer cell lines. These data have suggested that MIR17HG and MIR214 have played different roles in regulating these fusion transcripts.

[0128] FIG. 21a has shown that the most abundant transcripts involved in non-coding RNAs are transcripts encoding small nucleolar RNA host (SNHG) genes, which count for 73% and 63.7% of the non-coding RNA transcripts and PFGs, respectively. These non-coding RNA fusion transcripts have been detected in 37 out of the 39 cancer cell lines (FIG. 9b). Only U251 and U2OS cell lines have no non-coding RNA fusion transcripts detected so far. This might be due to their smaller RNA-seq datasets and smaller fusion transcript datasets (FIG. 4a).

[0129] As shown in FIG. 21b, 574 non-coding RNA fusion transcripts have been detected in K562. In contrast, only 58 fusion transcripts have been observed in SK-N-SH. The difference between the two cancer cell lines is 10 folds even though SK-N-SH has larger RNA-seq read dataset than the K562 one. This suggests that these non-coding RNA fusion transcripts are cancer cell-specific and may play important roles in cancer heterogeneity and development.

[0130] As FIG. 21a has shown that the most abundant non-coding RNA fusion transcripts are involved with SNHG genes, we have further analyzed the SNHG fusion transcripts. FIG. 21c has shown that eight SNHG genes are found in fusion transcripts, among which SNHG3 fusion transcripts are the most abundant and count for 87% while the rest 7 SNHG genes count for only 13%. These dominant SNHG3 fusion transcripts are then classified based on the cancer cell lines. FIG. 21d has shown that SNHG3 fusion transcripts have been detected in 30 different cancer lines.

[0131] Consistent with results in FIG. 21b, 86% (573 out of 667) of the SNHG3 fusion transcripts have been found in K562. In contrast, only 6.1% (41 of 667) of them are detected in SK-N-SH and are about 14 folds less than that detected in K562. Such a high frequency of SNHG3 sequence being detected in fusion transcripts in K562 cell line strongly suggested a possibility that these fusion transcripts would constitute a natural network, which could be regulated by factors interacting with SNHG3 sequences.

[0132] SNHG3 is member of the H/ACA-box class of small nucleolar RNAs (snoRNAs) and is located 9 kb upstream of RCC1 locus coding for regulator of chromosome condensation 1, 5-10% of which are read-through and generated fusion SNHG3 transcripts (Pelczar and Filipowicz 1998).

[0133] It has been shown that the SNHG3 gene has been found to interact with a number of chromatin binding proteins/complexes including PRC1, PRC2, JARID1B and SUV39H1 mouse embryonic stem cells (Guttman, et al. 2011). Like most of the SNHG RNA fusion transcripts, >99.99% of SNGH3 sequences are located upstream of the fusion transcripts (FIG. 21e).

[0134] Since these non-coding RNA (such as SNHG3) fusion transcripts originate from one cell line, discoveries that sequences from one non-coding RNA gene are translocated to different upstream and/or downstream sequences of different genes raise possibilities that these non-coding RNA fusion transcripts can be regulated at same time by factors that recognize these non-coding RNAs. Therefore, we have proposed that these fusion transcripts by sequences from one gene constitute a natural network, which are different from those interaction networks or networks formed by protein complexes. Here, we have arbitrarily defined a 5′ natural network as sequences from a gene that have been fused to a group of upstream sequences of ≧5 different fusion transcripts. A 3′ natural network has been defined as sequences from a gene or transcriptional unit is added to downstream ≧5 different gene sequences in a cancer cell line. Since this kind of natural network can exist only within a single cell, we, first, have classified fusion transcripts based on the cell line and then classified fusion transcripts based on transcriptional units.

[0135] First, we have classified the 3′ natural networks in the cancer cells. Table 8 has shown that fusion transcripts form 3′ natural networks in the different cancer cell lines. The NCBI Aceview's gene names of the complex transcriptional units (annotated ≧2 genes form one transcriptional unit) have been abbreviated. Only the first gene name of the ≧2 gene names will be shown in the tables.

TABLE 8
The 3′ natural networks formed by fusion transcripts

| 5′ Genes | 3′ Genes | 5′ Chr | 3′ Chr | Cancer Cells |
|---|---|---|---|---|
| C17orf70 | ACTG1 | 17 | 17 | A549 |
| HSPG2 | ACTG1 | 1 | 17 | A549 |
| P4HTM | ACTG1 | 3 | 17 | A549 |
| PTPRJ | ACTG1 | 11 | 17 | A549 |
| PUM2 | ACTG1 | 2 | 17 | A549 |
| TSPAN4 | ACTG1 | 11 | 17 | A549 |
| ADAT1 | BCAR1 | 16 | 16 | A549 |
| B4GALT1 | BCAR1 | 9 | 16 | A549 |
| EIF5A | BCAR1 | 17 | 16 | A549 |
| SYNCRIP | BCAR1 | 6 | 16 | A549 |
| ZNRF1 | BCAR1 | 16 | 16 | A549 |
| ARL6IP1 | BCAS3 | 16 | 17 | A549 |
| ASPH | C9orf3 | 8 | 9 | A549 |
| ASPH | C9orf3 | 8 | 9 | A549 |
| ATOH8 | C9orf3 | 2 | 9 | A549 |
| BAHD1 | C9orf3 | 15 | 9 | A549 |
| CALM2 | C9orf3 | 2 | 9 | A549 |
| CARS | C9orf3 | 11 | 9 | A549 |
| CLPTM1 | C9orf3 | 19 | 9 | A549 |
| CYP24A1 | C9orf3 | 20 | 9 | A549 |
| EEF1D | C9orf3 | 8 | 9 | A549 |
| EEF1E1 | C9orf3 | 6 | 9 | A549 |
| FANCC | C9orf3 | 9 | 9 | A549 |
| HNRNPA2B1 | C9orf3 | 7 | 9 | A549 |
| HNRNPA2B1 | C9orf3 | 7 | 9 | A549 |
| HUWE1 | C9orf3 | 23 | 9 | A549 |
| HUWE1 | C9orf3 | 23 | 9 | A549 |
| LOC100288778 | C9orf3 | 12 | 9 | A549 |
| MCM7 | C9orf3 | 7 | 9 | A549 |
| MTA1 | C9orf3 | 14 | 9 | A549 |
| PRR13 | C9orf3 | 12 | 9 | A549 |
| PRR13 | C9orf3 | 12 | 9 | A549 |
| RNASEN | C9orf3 | 5 | 9 | A549 |
| RNASEN | C9orf3 | 5 | 9 | A549 |
| RPL23AP79 | C9orf3 | 19 | 9 | A549 |
| TCF25 | C9orf3 | 16 | 9 | A549 |
| TRAM1 | C9orf3 | 8 | 9 | A549 |
| TSSC4 | C9orf3 | 11 | 9 | A549 |
| TXN | C9orf3 | 9 | 9 | A549 |
| VAV2 | C9orf3 | 9 | 9 | A549 |
| VRK2 | C9orf3 | 2 | 9 | A549 |
| C9orf46 | CHMP1A | 9 | 16 | A549 |
| CPSF6 | CHMP1A | 12 | 16 | A549 |
| ETFA | CHMP1A | 15 | 16 | A549 |
| FUBP1 | CHMP1A | 1 | 16 | A549 |
| LOC146880 | CHMP1A | 17 | 16 | A549 |
| SNX1 | CHMP1A | 15 | 16 | A549 |
| ZNF595 | CHMP1A | 4 | 16 | A549 |
| CALM2 | CTBP1 | 2 | 4 | A549 |
| CALM2 | CTBP1 | 2 | 4 | A549 |
| ILF3 | CTBP1 | 19 | 4 | A549 |
| KIAA1530 | CTBP1 | 4 | 4 | A549 |
| KIAA1530 | CTBP1 | 4 | 4 | A549 |
| NOP14 | CTBP1 | 4 | 4 | A549 |
| SBNO2 | CTBP1 | 19 | 4 | A549 |
| HNRNPH1 | DAZAP1 | 5 | 19 | A549 |
| NFIC | DAZAP1 | 19 | 19 | A549 |
| SBNO2 | DAZAP1 | 19 | 19 | A549 |
| SF3A2 | DAZAP1 | 19 | 19 | A549 |
| STK11 | DAZAP1 | 19 | 19 | A549 |
| ZEB1 | DAZAP1 | 10 | 19 | A549 |
| C9orf3 | GNAS | 9 | 20 | A549 |
| HNRNPK | GNAS | 9 | 20 | A549 |
| KYNU | GNAS | 2 | 20 | A549 |
| MTCP1NB | GNAS | 23 | 20 | A549 |
| SNHG4 | GNAS | 5 | 20 | A549 |
| VAPB | GNAS | 20 | 20 | A549 |
| C17orf56 | MAFK | 17 | 7 | A549 |
| CALM2 | MAFK | 2 | 7 | A549 |
| DEAF1 | MAFK | 11 | 7 | A549 |
| MAD1L1 | MAFK | 7 | 7 | A549 |
| MAD1L1 | MAFK | 7 | 7 | A549 |
| MAD1L1 | MAFK | 7 | 7 | A549 |
| MICALL2 | MAFK | 7 | 7 | A549 |
| SLC7A5 | MAFK | 16 | 7 | A549 |
| UBASH3B | MAFK | 11 | 7 | A549 |
| APP | OVOL2 | 21 | 20 | A549 |
| IDH2 | OVOL2 | 15 | 20 | A549 |
| ncRNA00188 | OVOL2 | 17 | 20 | A549 |
| PAQR5 | OVOL2 | 15 | 20 | A549 |
| TBC1D8 | OVOL2 | 2 | 20 | A549 |
| TBC1D8 | OVOL2 | 2 | 20 | A549 |
| TMEM138 | OVOL2 | 11 | 20 | A549 |
| TXNRD1 | OVOL2 | 12 | 20 | A549 |
| TXNRD1 | OVOL2 | 12 | 20 | A549 |
| COX6A1 | GCN1L1 | 12 | 12 | A549 |
| DCI | GCN1L1 | 16 | 12 | A549 |
| MAN2C1 | GCN1L1 | 15 | 12 | A549 |
| PRPF8 | GCN1L1 | 17 | 12 | A549 |
| PXN | GCN1L1 | 12 | 12 | A549 |
| SBNO1 | GCN1L1 | 12 | 12 | A549 |
| 2-Sep | GCN1L1 | 2 | 12 | A549 |
| TLN2 | GCN1L1 | 15 | 12 | A549 |
| TMEM116 | GCN1L1 | 12 | 12 | A549 |
| TMEM116 | GCN1L1 | 12 | 12 | A549 |
| TRAPPC4 | GCN1L1 | 11 | 12 | A549 |
| UBE3A | GCN1L1 | 15 | 12 | A549 |
| ANKRD11 | SLC7A5 | 16 | 16 | A549 |
| ANKRD11 | SLC7A5 | 16 | 16 | A549 |
| BANP | SLC7A5 | 16 | 16 | A549 |
| BANP | SLC7A5 | 16 | 16 | A549 |
| KIAA0182 | SLC7A5 | 16 | 16 | A549 |
| KLHDC4 | SLC7A5 | 16 | 16 | A549 |
| KLHDC4 | SLC7A5 | 16 | 16 | A549 |
| KLHDC4 | SLC7A5 | 16 | 16 | A549 |
| C7orf44 | SUN1 | 7 | 7 | A549 |
| C7orf50 | SUN1 | 7 | 7 | A549 |
| EIF4EBP2 | SUN1 | 10 | 7 | A549 |
| HEATR2 | SUN1 | 7 | 7 | A549 |
| HNRNPF | SUN1 | 10 | 7 | A549 |
| MICALL2 | SUN1 | 7 | 7 | A549 |
| PRKAR1B | SUN1 | 7 | 7 | A549 |
| PRKAR1B | SUN1 | 7 | 7 | A549 |
| AKT1 | TSPAN4 | 14 | 11 | A549 |
| CALM2 | TSPAN4 | 2 | 11 | A549 |
| CHID1 | TSPAN4 | 11 | 11 | A549 |
| COL5A1 | TSPAN4 | 9 | 11 | A549 |
| EEF1D | TSPAN4 | 8 | 11 | A549 |
| FBF1 | TSPAN4 | 17 | 11 | A549 |
| HNRNPC | TSPAN4 | 14 | 11 | A549 |
| MED13L | TSPAN4 | 12 | 11 | A549 |
| PPP1R12C | TSPAN4 | 19 | 11 | A549 |
| PPP6R2 | TSPAN4 | 22 | 11 | A549 |
| RGS20 | TSPAN4 | 8 | 11 | A549 |
| SETD8 | TSPAN4 | 12 | 11 | A549 |
| SHANK3 | TSPAN4 | 22 | 11 | A549 |
| TOB1 | TSPAN4 | 17 | 11 | A549 |
| UCKL1 | TSPAN4 | 20 | 11 | A549 |
| DDX5 | UBC | 17 | 12 | A549 |
| KRT80 | UBC | 12 | 12 | A549 |
| NCOR2 | UBC | 12 | 12 | A549 |
| NCOR2 | UBC | 12 | 12 | A549 |
| NCOR2 | UBC | 12 | 12 | A549 |
| NCOR2 | UBC | 12 | 12 | A549 |
| ORAOV1 | UBC | 11 | 12 | A549 |
| UHRF1BP1L | UBC | 12 | 12 | A549 |
| ZNRD1 | UBC | 6 | 12 | A549 |
| ABCC3 | ZNF598 | 17 | 16 | A549 |
| E4F1 | ZNF598 | 16 | 16 | A549 |
| EEF1D | ZNF598 | 8 | 16 | A549 |
| TECPR1 | ZNF598 | 7 | 16 | A549 |
| SNHG3 | ZNF638 | 1 | 2 | A549 |
| ACAD10 | GNAS | 12 | 20 | CUTLL |
| GEN1 | GNAS | 2 | 20 | CUTLL |
| HNRNPH1 | GNAS | 5 | 20 | CUTLL |
| MYL6B | GNAS | 12 | 20 | CUTLL |
| SLMO2 | GNAS | 20 | 20 | CUTLL |
| HNRNPF | DAZAP1 | 10 | 19 | Hela-3 |
| HNRNPF | DAZAP1 | 10 | 19 | Hela-3 |
| NDUFS7 | DAZAP1 | 19 | 19 | Hela-3 |
| NFIC | DAZAP1 | 19 | 19 | Hela-3 |
| PPP1R12C | DAZAP1 | 19 | 19 | Hela-3 |
| PPP1R12C | DAZAP1 | 19 | 19 | Hela-3 |
| RPL22 | DAZAP1 | 1 | 19 | Hela-3 |
| SBNO2 | DAZAP1 | 19 | 19 | Hela-3 |
| SULT1A1 | DAZAP1 | 16 | 19 | Hela-3 |
| ANKRD11 | FAM156B | 16 | 23 | Hela-3 |
| FAM156A | FAM156B | 23 | 23 | Hela-3 |
| KANK2 | FAM156B | 19 | 23 | Hela-3 |
| RASA4P | FAM156B | 7 | 23 | Hela-3 |
| SLC6A15 | FAM156B | 12 | 23 | Hela-3 |
| PLEKHB2 | FAM168B | 2 | 2 | Hela-3 |
| ASAP1 | GNAS | 8 | 20 | Hela-3 |
| BRCA1P1 | GNAS | 17 | 20 | Hela-3 |
| CBX5 | GNAS | 12 | 20 | Hela-3 |
| GEN1 | GNAS | 2 | 20 | Hela-3 |
| HUWE1 | GNAS | 23 | 20 | Hela-3 |
| KIAA0182 | GNAS | 16 | 20 | Hela-3 |
| KYNU | GNAS | 2 | 20 | Hela-3 |
| SLMO2 | GNAS | 20 | 20 | Hela-3 |
| SNHG3 | GNAS | 1 | 20 | Hela-3 |
| TP53 | GNAS | 17 | 20 | Hela-3 |
| C5 | FN1 | 9 | 2 | HepG2 |
| HNRNPH1 | FN1 | 5 | 2 | HepG2 |
| NAA35 | FN1 | 9 | 2 | HepG2 |
| RPL31 | FN1 | 2 | 2 | HepG2 |
| RPL31 | FN1 | 2 | 2 | HepG2 |
| SNHG3 | FN1 | 1 | 2 | HepG2 |
| SNHG3 | FN1 | 1 | 2 | HepG2 |
| TTC15 | FN1 | 2 | 2 | HepG2 |
| ARF1 | GNAS | 1 | 20 | HepG2 |
| B2M | GNAS | 15 | 20 | HepG2 |
| CBX5 | GNAS | 12 | 20 | HepG2 |
| EEF1D | GNAS | 8 | 20 | HepG2 |
| HNRNPH1 | GNAS | 5 | 20 | HepG2 |
| KPNA6 | GNAS | 1 | 20 | HepG2 |
| MGA | GNAS | 15 | 20 | HepG2 |
| SLMO2 | GNAS | 20 | 20 | HepG2 |
| STAG2 | GNAS | 23 | 20 | HepG2 |
| ANKRD11 | OVOL2 | 16 | 20 | HepG2 |
| APP | OVOL2 | 21 | 20 | HepG2 |
| JUB | OVOL2 | 14 | 20 | HepG2 |
| TASP1 | OVOL2 | 20 | 20 | HepG2 |
| ZNF133 | OVOL2 | 20 | 20 | HepG2 |
| ZNF519 | OVOL2 | 18 | 20 | HepG2 |
| CHD6 | GNAS | 20 | 20 | HT29 |
| CORO7 | GNAS | 16 | 20 | HT29 |
| DNAJB6 | GNAS | 7 | 20 | HT29 |
| RPL12P27 | GNAS | 10 | 20 | HT29 |
| RSU1 | GNAS | 10 | 20 | HT29 |
| C7orf50 | MAD1L1 | 7 | 7 | HT29 |
| NFE2L3 | MAD1L1 | 7 | 7 | HT29 |
| TTYH3 | MAD1L1 | 7 | 7 | HT29 |
| UBAP1 | MAD1L1 | 9 | 7 | HT29 |
| ZNF766 | MAD1L1 | 19 | 7 | HT29 |
| HNRNPH1 | CANX | 5 | 5 | K562 |
| MAPK9 | CANX | 5 | 5 | K562 |
| PPFIA1 | CANX | 11 | 5 | K562 |
| SNHG3 | CANX | 1 | 5 | K562 |
| SNHG3 | CANX | 1 | 5 | K562 |
| SNHG3 | CANX | 1 | 5 | K562 |
| SQSTM1 | CANX | 5 | 5 | K562 |
| SQSTM1 | CANX | 5 | 5 | K562 |
| KIAA1530 | CTBP1 | 4 | 4 | K562 |
| LOC100129917 | CTBP1 | 4 | 4 | K562 |
| MAEA | CTBP1 | 4 | 4 | K562 |
| OAZ1 | CTBP1 | 19 | 4 | K562 |
| PCGF3 | CTBP1 | 4 | 4 | K562 |
| PCGF3 | CTBP1 | 4 | 4 | K562 |
| SPON2 | CTBP1 | 4 | 4 | K562 |
| ASH1L | DAP3 | 1 | 1 | K562 |
| C14orf156 | DAP3 | 14 | 1 | K562 |
| C14orf156 | DAP3 | 14 | 1 | K562 |
| GON4L | DAP3 | 1 | 1 | K562 |
| GON4L | DAP3 | 1 | 1 | K562 |
| SNHG3 | DAP3 | 1 | 1 | K562 |
| SNHG3 | DAP3 | 1 | 1 | K562 |
| SNHG3 | DAP3 | 1 | 1 | K562 |
| SNHG3 | DAP3 | 1 | 1 | K562 |
| SSR2 | DAP3 | 1 | 1 | K562 |
| IVNS1ABP | EIF3E | 1 | 8 | K562 |
| SNHG3 | EIF3E | 1 | 8 | K562 |
| ST3GAL1 | EIF3E | 8 | 8 | K562 |
| ST3GAL1 | EIF3E | 8 | 8 | K562 |
| TTC35 | EIF3E | 8 | 8 | K562 |
| XRCC4 | EIF3E | 5 | 8 | K562 |
| CHCHD3 | FAF1 | 7 | 1 | K562 |
| CHCHD3 | FAF1 | 7 | 1 | K562 |
| KIAA0114 | FAF1 | 4 | 1 | K562 |
| MIR17HG | FAF1 | 13 | 1 | K562 |
| OSBPL9 | FAF1 | 1 | 1 | K562 |
| OSBPL9 | FAF1 | 1 | 1 | K562 |
| RNF11 | FAF1 | 1 | 1 | K562 |
| RNF11 | FAF1 | 1 | 1 | K562 |
| RNF11 | FAF1 | 1 | 1 | K562 |
| SNHG3 | FAF1 | 1 | 1 | K562 |
| SNHG3 | FAF1 | 1 | 1 | K562 |
| SNHG3 | FAF1 | 1 | 1 | K562 |
| SNHG3 | FAF1 | 1 | 1 | K562 |
| SNHG3 | FAF1 | 1 | 1 | K562 |
| SNHG3 | FAF1 | 1 | 1 | K562 |
| SNHG5 | FAF1 | 6 | 1 | K562 |
| SNORD1C | FAF1 | 17 | 1 | K562 |
| TM2D1 | FAF1 | 1 | 1 | K562 |
| C10orf18 | GDI2 | 10 | 10 | K562 |
| C10orf18 | GDI2 | 10 | 10 | K562 |
| NET1 | GDI2 | 10 | 10 | K562 |
| PFKFB3 | GDI2 | 10 | 10 | K562 |
| POLR2D | GDI2 | 2 | 10 | K562 |
| RBM17 | GDI2 | 10 | 10 | K562 |
| SNHG3 | GDI2 | 1 | 10 | K562 |
| SNHG3 | GDI2 | 1 | 10 | K562 |
| WDR37 | GDI2 | 10 | 10 | K562 |
| ABO | GNAS | 9 | 20 | K562 |
| ACAD10 | GNAS | 12 | 20 | K562 |
| ARHGEF2 | GNAS | 1 | 20 | K562 |
| BCOR | GNAS | 23 | 20 | K562 |
| FAM49B | GNAS | 8 | 20 | K562 |
| FAM60A | GNAS | 12 | 20 | K562 |
| HDLBP | GNAS | 2 | 20 | K562 |
| ITCH | GNAS | 20 | 20 | K562 |
| KIAA0182 | GNAS | 16 | 20 | K562 |
| MIPOL1 | GNAS | 14 | 20 | K562 |
| NFYC | GNAS | 1 | 20 | K562 |
| NOC4L | GNAS | 12 | 20 | K562 |
| SHB | GNAS | 9 | 20 | K562 |
| SNHG4 | GNAS | 5 | 20 | K562 |
| TYMS | GNAS | 18 | 20 | K562 |
| ROD1 | KIAA0368 | 9 | 9 | K562 |
| SUSD1 | KIAA0368 | 9 | 9 | K562 |
| SUSD1 | KIAA0368 | 9 | 9 | K562 |
| TXN | KIAA0368 | 9 | 9 | K562 |
| UGCG | KIAA0368 | 9 | 9 | K562 |
| UGCG | KIAA0368 | 9 | 9 | K562 |
| VPS13A | KIAA0368 | 9 | 9 | K562 |
| RCSD1 | PDS5A | 1 | 4 | K562 |
| SNHG3 | PDS5A | 1 | 4 | K562 |
| TMEM165 | PDS5A | 4 | 4 | K562 |
| UBE2K | PDS5A | 4 | 4 | K562 |
| UBE2K | PDS5A | 4 | 4 | K562 |
| USP34 | PDS5A | 2 | 4 | K562 |
| ARL4A | PHF14 | 7 | 7 | K562 |
| KIAA0114 | PHF14 | 4 | 7 | K562 |
| ncRNA00188 | PHF14 | 17 | 7 | K562 |
| ncRNA00188 | PHF14 | 17 | 7 | K562 |
| NDUFA4 | PHF14 | 7 | 7 | K562 |
| SNHG3 | PHF14 | 1 | 7 | K562 |
| VWDE | PHF14 | 7 | 7 | K562 |
| VWDE | PHF14 | 7 | 7 | K562 |
| C11orf73 | PICALM | 11 | 11 | K562 |
| C11orf73 | PICALM | 11 | 11 | K562 |
| COPB2 | PICALM | 3 | 11 | K562 |
| COPB2 | PICALM | 3 | 11 | K562 |
| EED | PICALM | 11 | 11 | K562 |
| FDXACB1 | PICALM | 11 | 11 | K562 |
| KIAA0114 | PICALM | 4 | 11 | K562 |
| KIF2A | PICALM | 5 | 11 | K562 |
| RPS20 | PICALM | 8 | 11 | K562 |
| RPS20 | PICALM | 8 | 11 | K562 |
| SNHG3 | PICALM | 1 | 11 | K562 |
| SNHG3 | PICALM | 1 | 11 | K562 |
| SNHG3 | PICALM | 1 | 11 | K562 |
| SNHG3 | PICALM | 1 | 11 | K562 |
| SNHG3 | PICALM | 1 | 11 | K562 |
| SNHG4 | PICALM | 5 | 11 | K562 |
| SNHG4 | PICALM | 5 | 11 | K562 |
| TAF1 | PICALM | 11 | 11 | K562 |
| TAF1 | PICALM | 11 | 11 | K562 |
| TMEM126B | PICALM | 11 | 11 | K562 |
| ZNF33B | PICALM | 10 | 11 | K562 |
| AGPAT5 | PRKCB | 8 | 16 | K562 |
| AGPAT5 | PRKCB | 8 | 16 | K562 |
| C15orf26 | PRKCB | 15 | 16 | K562 |
| C15orf26 | PRKCB | 15 | 16 | K562 |
| KIAA0114 | PRKCB | 4 | 16 | K562 |
| KIAA0114 | PRKCB | 4 | 16 | K562 |
| SNHG3 | PRKCB | 1 | 16 | K562 |
| SNHG3 | PRKCB | 1 | 16 | K562 |
| ACOX3 | PSMB1 | 4 | 6 | K562 |
| CTBP2 | PSMB1 | 10 | 6 | K562 |
| HGS | PSMB1 | 17 | 6 | K562 |
| MLL5 | PSMB1 | 7 | 6 | K562 |
| PAOX | PSMB1 | 10 | 6 | K562 |
| WDR27 | PSMB1 | 6 | 6 | K562 |
| ZDHHC14 | PSMB1 | 6 | 6 | K562 |
| TWSG1 | RALBP1 | 18 | 18 | K562 |
| ARHGEF18 | RANBP1 | 19 | 22 | K562 |
| BOP1 | RANBP1 | 8 | 22 | K562 |
| C22orf25 | RANBP1 | 22 | 22 | K562 |
| C22orf25 | RANBP1 | 22 | 22 | K562 |
| EIF5A | RANBP1 | 17 | 22 | K562 |
| KLHL22 | RANBP1 | 22 | 22 | K562 |
| MED15 | RANBP1 | 22 | 22 | K562 |
| RPS8 | RANBP1 | 1 | 22 | K562 |
| RPS8 | RANBP1 | 1 | 22 | K562 |
| SNHG3 | RANBP1 | 1 | 22 | K562 |
| SNHG3 | RANBP1 | 1 | 22 | K562 |
| VRK2 | RANBP1 | 2 | 22 | K562 |
| WHSC2 | RANBP1 | 4 | 22 | K562 |
| WHSC2 | RANBP1 | 4 | 22 | K562 |
| VMAC | RANBP3 | 19 | 19 | K562 |
| HIVEP1 | RANBP9 | 6 | 6 | K562 |
| GNL3 | RNF149 | 3 | 2 | K562 |
| RPL10 | RNF149 | 23 | 2 | K562 |
| RPL17A | RNF149 | 9 | 2 | K562 |
| RPL27A | RNF149 | 11 | 2 | K562 |
| RPL3 | RNF149 | 22 | 2 | K562 |
| SCARNA17 | RNF149 | 18 | 2 | K562 |
| SNHG3 | RNF149 | 1 | 2 | K562 |
| SNHG3 | RNF149 | 1 | 2 | K562 |
| LARP4 | GCN1L1 | 12 | 12 | K562 |
| NOP2 | GCN1L1 | 12 | 12 | K562 |
| NUP210 | GCN1L1 | 3 | 12 | K562 |
| SBNO1 | GCN1L1 | 12 | 12 | K562 |
| TMEM138 | GCN1L1 | 11 | 12 | K562 |
| HERC1 | RPS27A | 15 | 2 | K562 |
| KLF1 | RPS27A | 19 | 2 | K562 |
| RPL27A | RPS27A | 11 | 2 | K562 |
| RPL27A | RPS27A | 11 | 2 | K562 |
| RPS3 | RPS27A | 11 | 2 | K562 |
| SNHG4 | RPS27A | 5 | 2 | K562 |
| SNHG4 | RPS27A | 5 | 2 | K562 |
| SPTBN1 | RPS27A | 2 | 2 | K562 |
| SRP9 | RPS27A | 1 | 2 | K562 |
| TOMM20 | RPS27A | 1 | 2 | K562 |
| ncRNA00188 | RPS3 | 17 | 11 | K562 |
| ncRNA00188 | RPS3 | 17 | 11 | K562 |
| RPL27A | RPS3 | 11 | 11 | K562 |
| SNHG3 | RPS3 | 1 | 11 | K562 |
| SNHG3 | RPS3 | 1 | 11 | K562 |
| AFF1 | SIKE1 | 4 | 1 | K562 |
| AK2 | SIKE1 | 1 | 1 | K562 |
| BAZ1A | SIKE1 | 14 | 1 | K562 |
| CAPZA1 | SIKE1 | 1 | 1 | K562 |
| SNHG3 | SIKE1 | 1 | 1 | K562 |
| SNHG3 | SIKE1 | 1 | 1 | K562 |
| TRIM33 | SIKE1 | 1 | 1 | K562 |
| BAHD1 | UBB | 15 | 17 | K562 |
| CAPZA1 | UBB | 1 | 17 | K562 |
| CAPZA2 | UBB | 7 | 17 | K562 |
| EEF1A1 | UBB | 6 | 17 | K562 |
| IL23R | UBB | 1 | 17 | K562 |
| LARP4 | UBB | 12 | 17 | K562 |
| MYL6B | UBB | 12 | 17 | K562 |
| PI4KA | UBB | 22 | 17 | K562 |
| RAI1 | UBB | 17 | 17 | K562 |
| RASA4P | UBB | 7 | 17 | K562 |
| RPL15 | UBB | 3 | 17 | K562 |
| RPL15 | UBB | 3 | 17 | K562 |
| RPS3 | UBB | 11 | 7 | K562 |
| SNHG3 | UBB | 1 | 17 | K562 |
| CRAMP1L | UBE2I | 16 | 16 | K562 |
| LMF1 | UBE2I | 16 | 16 | K562 |
| SNHG3 | UBE2I | 1 | 16 | K562 |
| SNHG3 | UBE2I | 1 | 16 | K562 |
| SOLH | UBE2I | 16 | 16 | K562 |
| SOLH | UBE2I | 16 | 16 | K562 |
| WHSC1 | UBE2I | 4 | 16 | K562 |
| ABCC5 | STAMBP | 3 | 2 | LHCN-M2 |
| ADAMTS2 | STAMBP | 5 | 2 | LHCN-M2 |
| ANKRD11 | STAMBP | 16 | 2 | LHCN-M2 |
| BCL2L11 | STAMBP | 2 | 2 | LHCN-M2 |
| BLCAP | STAMBP | 20 | 2 | LHCN-M2 |
| C7orf13 | STAMBP | 7 | 2 | LHCN-M2 |
| CABLES1 | STAMBP | 18 | 2 | LHCN-M2 |
| CALM2 | STAMBP | 2 | 2 | LHCN-M2 |
| CAPN2 | STAMBP | 1 | 2 | LHCN-M2 |
| CCDC46 | STAMBP | 17 | 2 | LHCN-M2 |
| CCDC55 | STAMBP | 17 | 2 | LHCN-M2 |
| CHFR | STAMBP | 12 | 2 | LHCN-M2 |
| CLK3 | STAMBP | 15 | 2 | LHCN-M2 |
| COL3A1 | STAMBP | 2 | 2 | LHCN-M2 |
| CWC22 | STAMBP | 2 | 2 | LHCN-M2 |
| DECR1 | STAMBP | 8 | 2 | LHCN-M2 |
| ERP44 | STAMBP | 9 | 2 | LHCN-M2 |
| FRYL | STAMBP | 4 | 2 | LHCN-M2 |
| FRYL | STAMBP | 4 | 2 | LHCN-M2 |
| GAS6 | STAMBP | 13 | 2 | LHCN-M2 |
| HDAC5 | STAMBP | 17 | 2 | LHCN-M2 |
| HNRNPK | STAMBP | 9 | 2 | LHCN-M2 |
| KDM6A | STAMBP | 23 | 2 | LHCN-M2 |
| KLF5 | STAMBP | 13 | 2 | LHCN-M2 |
| KLHL29 | STAMBP | 2 | 2 | LHCN-M2 |
| LDLRAD3 | STAMBP | 11 | 2 | LHCN-M2 |
| LOC100129917 | STAMBP | 4 | 2 | LHCN-M2 |
| LRRC28 | STAMBP | 15 | 2 | LHCN-M2 |
| LSP1 | STAMBP | 11 | 2 | LHCN-M2 |
| MAD1L1 | STAMBP | 7 | 2 | LHCN-M2 |
| MBD2 | STAMBP | 18 | 2 | LHCN-M2 |
| MED8 | STAMBP | 1 | 2 | LHCN-M2 |
| MTMR3 | STAMBP | 22 | 2 | LHCN-M2 |
| NAPG | STAMBP | 18 | 2 | LHCN-M2 |
| PCDH9 | STAMBP | 13 | 2 | LHCN-M2 |
| PCDHG | STAMBP | 5 | 2 | LHCN-M2 |
| PCDHG | STAMBP | 5 | 2 | LHCN-M2 |
| PICALM | STAMBP | 11 | 2 | LHCN-M2 |
| POFUT2 | STAMBP | 21 | 2 | LHCN-M2 |
| PRMT2 | STAMBP | 21 | 2 | LHCN-M2 |
| PRMT2 | STAMBP | 21 | 2 | LHCN-M2 |
| RELT | STAMBP | 11 | 2 | LHCN-M2 |
| RGS20 | STAMBP | 8 | 2 | LHCN-M2 |
| RUNX1 | STAMBP | 21 | 2 | LHCN-M2 |
| 11-Sep | STAMBP | 4 | 2 | LHCN-M2 |
| SLC38A10 | STAMBP | 17 | 2 | LHCN-M2 |
| TMEM87B | STAMBP | 2 | 2 | LHCN-M2 |
| TSPAN3 | STAMBP | 15 | 2 | LHCN-M2 |
| TUBA1A | STAMBP | 12 | 2 | LHCN-M2 |
| UAP1 | STAMBP | 1 | 2 | LHCN-M2 |
| UBE3C | STAMBP | 7 | 2 | LHCN-M2 |
| WDR37 | STAMBP | 10 | 2 | LHCN-M2 |
| WHSC2 | STAMBP | 4 | 2 | LHCN-M2 |
| XPO4 | STAMBP | 13 | 2 | LHCN-M2 |
| ZFP106 | STAMBP | 15 | 2 | LHCN-M2 |
| ZNF24 | STAMBP | 18 | 2 | LHCN-M2 |
| ZNF556 | STAMBP | 19 | 2 | LHCN-M2 |
| ZNF571 | STAMBP | 19 | 2 | LHCN-M2 |
| ZNF702P | STAMBP | 19 | 2 | LHCN-M2 |
| CAPRIN1 | CHMP1A | 11 | 16 | MCF7 |
| CYP24A1 | CHMP1A | 20 | 16 | MCF7 |
| DCP1B | CHMP1A | 12 | 16 | MCF7 |
| ING3 | CHMP1A | 7 | 16 | MCF7 |
| LMBR1 | CHMP1A | 7 | 16 | MCF7 |
| POLD3 | CHMP1A | 11 | 16 | MCF7 |
| POLD3 | CHMP1A | 11 | 16 | MCF7 |
| RBL2 | CHMP1A | 16 | 16 | MCF7 |
| ZNF286A | CHMP1A | 17 | 16 | MCF7 |
| ZNF519 | CHMP1A | 18 | 16 | MCF7 |
| CCDC57 | CHMP4B | 17 | 20 | MCF7 |
| RALY | CHMP4B | 20 | 20 | MCF7 |
| DDX5 | GNAI3 | 17 | 1 | MCF7 |
| NR2F2 | GNAI3 | 15 | 1 | MCF7 |
| SYCP2 | GNAI3 | 20 | 1 | MCF7 |
| TANC2 | GNAI3 | 17 | 1 | MCF7 |
| TNS3 | GNAI3 | 7 | 1 | MCF7 |
| CTBP2 | GNAS | 10 | 20 | MCF7 |
| EEF1D | GNAS | 8 | 20 | MCF7 |
| KIAA0114 | GNAS | 4 | 20 | MCF7 |
| MGA | GNAS | 15 | 20 | MCF7 |
| NCOA3 | GNAS | 20 | 20 | MCF7 |
| SNHG3 | GNAS | 1 | 20 | MCF7 |
| TYMS | GNAS | 18 | 20 | MCF7 |
| YWHAE | GNAS | 17 | 20 | MCF7 |
| ATP5I | ZNF595 | 4 | 4 | MCF7 |
| HSPD1 | ZNF595 | 2 | 4 | MCF7 |
| IKBKAP | ZNF595 | 9 | 4 | MCF7 |
| TOM1L2 | ZNF595 | 17 | 4 | MCF7 |
| TRMT2B | ZNF595 | 23 | 4 | MCF7 |
| FSTL5 | MRPL21 | 4 | 11 | SK-Mel-5 |
| ncRNA00188 | MRPL21 | 17 | 11 | SK-Mel-5 |
| NOP56 | MRPL21 | 20 | 11 | SK-Mel-5 |
| RAB38 | MRPL21 | 11 | 11 | SK-Mel-5 |
| TUBD1 | MRPL21 | 17 | 11 | SK-Mel-5 |
| ATP6V1G2 | MRPL52 | 6 | 14 | SK-Mel-5 |
| ASPH | CHMP1A | 8 | 16 | SK-N-DZ |
| CCDC64 | CHMP1A | 12 | 16 | SK-N-DZ |
| HECTD2 | CHMP1A | 10 | 16 | SK-N-DZ |
| ISCA1 | CHMP1A | 9 | 16 | SK-N-DZ |
| RIMBP2 | CHMP1A | 12 | 16 | SK-N-DZ |
| TMEM165 | CHMP1A | 4 | 16 | SK-N-DZ |
| ZNF726 | CHMP1A | 19 | 16 | SK-N-DZ |
| ZNF738 | CHMP1A | 19 | 16 | SK-N-DZ |
| ATP5I | DDX1 | 4 | 2 | SK-N-DZ |
| DCAKD | DDX1 | 17 | 2 | SK-N-DZ |
| EIF3A | DDX1 | 10 | 2 | SK-N-DZ |
| MANEA | DDX1 | 6 | 2 | SK-N-DZ |
| MED28 | DDX1 | 4 | 2 | SK-N-DZ |
| NBAS | DDX1 | 2 | 2 | SK-N-DZ |
| NBAS | DDX1 | 2 | 2 | SK-N-DZ |
| RPS12 | DDX1 | 6 | 2 | SK-N-DZ |
| SRRM1 | DDX1 | 1 | 2 | SK-N-DZ |
| XPO5 | DDX1 | 6 | 2 | SK-N-DZ |
| ZDBF2 | DDX1 | 2 | 2 | SK-N-DZ |
| CHCHD3 | GNAS | 7 | 20 | SK-N-DZ |
| HIPK3 | GNAS | 11 | 20 | SK-N-DZ |
| KDM2A | GNAS | 11 | 20 | SK-N-DZ |
| P4HTM | GNAS | 3 | 20 | SK-N-DZ |
| PLEKHO2 | GNAS | 15 | 20 | SK-N-DZ |
| SERINC3 | GNAS | 20 | 20 | SK-N-DZ |
| STAG2 | GNAS | 23 | 20 | SK-N-DZ |
| FAM165B | NUP107 | 21 | 12 | SK-N-DZ |
| PHF3 | NUP107 | 6 | 12 | SK-N-DZ |
| RAP1B | NUP107 | 12 | 12 | SK-N-DZ |
| SLC35E3 | NUP107 | 12 | 12 | SK-N-DZ |
| TCP1 | NUP107 | 6 | 12 | SK-N-DZ |
| ADAM10 | ANXA2 | 15 | 15 | SK-N-DZ |
| LOC642776 | ANXA2 | 23 | 15 | SK-N-DZ |
| NPTN | ANXA2 | 15 | 15 | SK-N-DZ |
| TUBB6 | ANXA2 | 18 | 15 | SK-N-DZ |
| YWHAH | ANXA2 | 22 | 15 | SK-N-DZ |
| PROSC | FAM120B | 8 | 6 | SK-N-DZ |
| ZNF519 | FAM120B | 18 | 6 | SK-N-DZ |
| ARHGAP39 | FAM156B | 8 | 23 | SK-N-DZ |
| EXD3 | FAM156B | 9 | 23 | SK-N-DZ |
| KANK2 | FAM156B | 19 | 23 | SK-N-DZ |
| TGM2 | FAM156B | 20 | 23 | SK-N-DZ |
| ANAPC16 | GNAS | 10 | 20 | SK-N-DZ |
| APBB2 | GNAS | 4 | 20 | SK-N-DZ |
| ARHGEF10 | GNAS | 8 | 20 | SK-N-DZ |
| ASAP1 | GNAS | 8 | 20 | SK-N-DZ |
| BRCA1P1 | GNAS | 17 | 20 | SK-N-DZ |
| CCAR1 | GNAS | 10 | 20 | SK-N-DZ |
| CCDC101 | GNAS | 16 | 20 | SK-N-DZ |
| FAM119B | GNAS | 12 | 20 | SK-N-DZ |
| ITCH | GNAS | 20 | 20 | SK-N-DZ |
| NAP1L1 | GNAS | 12 | 20 | SK-N-DZ |
| RBM14 | GNAS | 11 | 20 | SK-N-DZ |
| RPL31 | GNAS | 2 | 20 | SK-N-DZ |
| SFRS18 | GNAS | 6 | 20 | SK-N-DZ |
| TCF4 | GNAS | 18 | 20 | SK-N-DZ |
| TRAF3 | GNAS | 14 | 20 | SK-N-DZ |
| VAPB | GNAS | 20 | 20 | SK-N-DZ |
| ZMYND8 | GNAS | 20 | 20 | SK-N-DZ |
| C7orf50 | SUN1 | 7 | 7 | SK-N-DZ |
| HEATR2 | SUN1 | 7 | 7 | SK-N-DZ |
| MAD1L1 | SUN1 | 7 | 7 | SK-N-DZ |
| PRKAR1B | SUN1 | 7 | 7 | SK-N-DZ |
| PRKAR1B | SUN1 | 7 | 7 | SK-N-DZ |
| TRA2A | SUN1 | 7 | 7 | SK-N-DZ |

[0136] Table 9 shows the lists of 5′ networks of fusion transcripts.

TABLE 9
Identification of 5′ natural networks of the fusion
transcripts in different cancer cell lines. Gene names
have been abbreviated to reduce space. If the complex
gene names adopted by NCBI's Aceview contain two more
names connected by “and”, we have used the first
gene name as Gene IDs.
The 5′ natural networks formed by fusion transcripts.

| 5′ Genes | 3′ Genes | 5′ Chr | 3′ Chr | Cancer Cells |
|---|---|---|---|---|
| ABCC3 | KRT8 | 17 | 12 | A549 |
| ABCC3 | SDCCAG3 | 17 | 9 | A549 |
| ABCC3 | 2-Sep | 17 | 2 | A549 |
| ABCC3 | TBCD | 17 | 17 | A549 |
| ABCC3 | ZNF598 | 17 | 16 | A549 |
| ASPH | C9orf3 | 8 | 9 | A549 |
| ASPH | C9orf3 | 8 | 9 | A549 |
| ASPH | FAM120B | 8 | 6 | A549 |
| ASPH | MTCP1NB | 8 | 23 | A549 |
| ASPH | YLPM1 | 8 | 14 | A549 |
| CALM2 | ANKMY1 | 2 | 2 | A549 |
| CALM2 | C9orf3 | 2 | 9 | A549 |
| CALM2 | CRIM1 | 2 | 2 | A549 |
| CALM2 | CTBP1 | 2 | 4 | A549 |
| CALM2 | CTBP1 | 2 | 4 | A549 |
| CALM2 | GNA11 | 2 | 19 | A549 |
| CALM2 | MAFK | 2 | 7 | A549 |
| CALM2 | SBNO2 | 2 | 19 | A549 |
| CALM2 | TSPAN4 | 2 | 11 | A549 |
| CALM2 | TTC7A | 2 | 2 | A549 |
| CALM2 | ZDHHC7 | 2 | 16 | A549 |
| CPSF4 | FSCN1 | 7 | 7 | A549 |
| CPSF6 | CHMP1A | 12 | 16 | A549 |
| CPSF6 | ENY2 | 12 | 8 | A549 |
| CPSF6 | EZH2 | 12 | 7 | A549 |
| CPSF6 | HDAC7 | 12 | 12 | A549 |
| CPSF6 | HNRPDL | 12 | 4 | A549 |
| CPSF6 | NUP107 | 12 | 12 | A549 |
| CPSF6 | PDE4B | 12 | 1 | A549 |
| CPSF6 | RAP1B | 12 | 12 | A549 |
| CPSF6 | RPL3 | 12 | 22 | A549 |
| CPSF6 | SPG7 | 12 | 16 | A549 |
| CPSF6 | TAF1 | 12 | 11 | A549 |
| CYP24A1 | AKR1E2 | 20 | 10 | A549 |
| CYP24A1 | C9orf3 | 20 | 9 | A549 |
| CYP24A1 | CDK12 | 20 | 17 | A549 |
| CYP24A1 | CDK12 | 20 | 17 | A549 |
| CYP24A1 | CLDND2 | 20 | 19 | A549 |
| CYP24A1 | CYHR1 | 20 | 8 | A549 |
| CYP24A1 | CYHR1 | 20 | 8 | A549 |
| CYP24A1 | DAP3 | 20 | 1 | A549 |
| CYP24A1 | DDX5 | 20 | 17 | A549 |
| CYP24A1 | FNIP1 | 20 | 5 | A549 |
| CYP24A1 | HEATR2 | 20 | 7 | A549 |
| CYP24A1 | KAT5 | 20 | 11 | A549 |
| CYP24A1 | LAPTM4B | 20 | 8 | A549 |
| CYP24A1 | LEMD2 | 20 | 6 | A549 |
| CYP24A1 | LMNB2 | 20 | 19 | A549 |
| CYP24A1 | LOC100049716 | 20 | 12 | A549 |
| CYP24A1 | LRP5 | 20 | 11 | A549 |
| CYP24A1 | OTUD3 | 20 | 1 | A549 |
| CYP24A1 | PRKCE | 20 | 2 | A549 |
| CYP24A1 | PRR13 | 20 | 12 | A549 |
| CYP24A1 | PRR13 | 20 | 12 | A549 |
| CYP24A1 | PSMC4 | 20 | 19 | A549 |
| CYP24A1 | SHARPIN | 20 | 8 | A549 |
| CYP24A1 | SLC25A37 | 20 | 8 | A549 |
| CYP24A1 | SPG7 | 20 | 16 | A549 |
| CYP24A1 | SPG7 | 20 | 16 | A549 |
| CYP24A1 | SRSF1 | 20 | 17 | A549 |
| CYP24A1 | STT3A | 20 | 11 | A549 |
| CYP24A1 | TCFL5 | 20 | 20 | A549 |
| CYP24A1 | TRIO | 20 | 5 | A549 |
| CYP24A1 | WDR4 | 20 | 21 | A549 |
| CYP24A1 | WWP2 | 20 | 16 | A549 |
| EEF1D | ARID1A | 8 | 1 | A549 |
| EEF1D | C19orf22 | 8 | 19 | A549 |
| EEF1D | C8orf55 | 8 | 8 | A549 |
| EEF1D | C9orf3 | 8 | 9 | A549 |
| EEF1D | CFL1 | 8 | 11 | A549 |
| EEF1D | GTF3C2 | 8 | 2 | A549 |
| EEF1D | HDAC4 | 8 | 2 | A549 |
| EEF1D | LZTS2 | 8 | 10 | A549 |
| EEF1D | MCOLN1 | 8 | 19 | A549 |
| EEF1D | NME4 | 8 | 16 | A549 |
| EEF1D | TSPAN4 | 8 | 11 | A549 |
| EEF1D | TSSC1 | 8 | 2 | A549 |
| EEF1D | ZC3H3 | 8 | 8 | A549 |
| EEF1D | ZC3H3 | 8 | 8 | A549 |
| EEF1D | ZC3H3 | 8 | 8 | A549 |
| EEF1D | ZNF598 | 8 | 16 | A549 |
| MAD1L1 | CARKD | 7 | 13 | A549 |
| MAD1L1 | EIF3B | 7 | 7 | A549 |
| MAD1L1 | FAM20C | 7 | 7 | A549 |
| MAD1L1 | MAFK | 7 | 7 | A549 |
| MAD1L1 | MAFK | 7 | 7 | A549 |
| MAD1L1 | MAFK | 7 | 7 | A549 |
| ncRNA00188 | ALDH1A1 | 17 | 9 | A549 |
| ncRNA00188 | CKAP5 | 17 | 11 | A549 |
| ncRNA00188 | OVOL2 | 17 | 20 | A549 |
| ncRNA00188 | PCSK5 | 17 | 9 | A549 |
| ncRNA00188 | UBB | 17 | 17 | A549 |
| ncRNA00188 | WHSC1 | 17 | 4 | A549 |
| PLEC | ANKLE2 | 8 | 12 | A549 |
| PLEC | EEF1D | 8 | 8 | A549 |
| PLEC | EEF1D | 8 | 8 | A549 |
| PLEC | HEATR7A | 8 | 8 | A549 |
| PLEC | HEATR7A | 8 | 8 | A549 |
| PLEC | KLHDC2 | 8 | 14 | A549 |
| PLEC | NAT8L | 8 | 4 | A549 |
| PLEC | NUDT14 | 8 | 14 | A549 |
| PLEC | RNF126 | 8 | 19 | A549 |
| PLEC | SDC1 | 8 | 2 | A549 |
| PLEC | SHARPIN | 8 | 8 | A549 |
| PLEC | SHARPIN | 8 | 8 | A549 |
| PLEC | TPP1 | 8 | 11 | A549 |
| PPP1R12C | ALDOA | 19 | 16 | A549 |
| PPP1R12C | ASPSCR1 | 19 | 17 | A549 |
| PPP1R12C | CNN2 | 19 | 19 | A549 |
| PPP1R12C | FOSL1 | 19 | 11 | A549 |
| PPP1R12C | TSPAN4 | 19 | 11 | A549 |
| SNHG3 | ATP6V1G2 | 1 | 6 | A549 |
| SNHG3 | CUL3 | 1 | 2 | A549 |
| SNHG3 | DHRS3 | 1 | 1 | A549 |
| SNHG3 | FEN1 | 1 | 11 | A549 |
| SNHG3 | FLNB | 1 | 3 | A549 |
| SNHG3 | HSP90AA1 | 1 | 14 | A549 |
| SNHG3 | 7-Mar | 1 | 2 | A549 |
| SNHG3 | NUP107 | 1 | 12 | A549 |
| SNHG3 | PHACTR4 | 1 | 1 | A549 |
| SNHG3 | PHACTR4 | 1 | 1 | A549 |
| SNHG3 | PTCD3 | 1 | 2 | A549 |
| SNHG3 | SHPK | 1 | 17 | A549 |
| SNHG3 | STK3 | 1 | 8 | A549 |
| SNHG3 | TRNAU1AP | 1 | 1 | A549 |
| SNHG3 | XPO1 | 1 | 2 | A549 |
| SNHG3 | ZNF638 | 1 | 2 | A549 |
| SNHG3 | ABCE1 | 1 | 4 | CUTLL |
| SNHG3 | CTCF | 1 | 16 | CUTLL |
| SNHG3 | GIGYF2 | 1 | 2 | CUTLL |
| SNHG3 | NFS1 | 1 | 20 | CUTLL |
| SNHG3 | PDXDC1 | 1 | 16 | CUTLL |
| SNHG3 | PKM2 | 1 | 15 | CUTLL |
| SNHG3 | POLE2 | 1 | 14 | CUTLL |
| SNHG3 | AKR1A1 | 1 | 1 | H460 |
| SNHG3 | DAP3 | 1 | 1 | H460 |
| SNHG3 | FDPS | 1 | 1 | H460 |
| SNHG3 | PRR13 | 1 | 12 | H460 |
| SNHG3 | PSMD3 | 1 | 17 | H460 |
| SNHG3 | RPF2 | 1 | 6 | H460 |
| SNHG3 | RRP36 | 1 | 6 | H460 |
| SNHG3 | SETX | 1 | 9 | H460 |
| SNHG3 | SMARCAD1 | 1 | 4 | H460 |
| SNHG3 | VASP | 1 | 19 | H460 |
| SNHG3 | CCT3 | 1 | 1 | HCT116 |
| SNHG3 | CSNK1A1 | 1 | 5 | HCT116 |
| SNHG3 | GNB1 | 1 | 1 | HCT116 |
| SNHG3 | HAUS1 | 1 | 18 | HCT116 |
| SNHG3 | HSPE1 | 1 | 2 | HCT116 |
| SNHG3 | MIIP | 1 | 1 | HCT116 |
| SNHG3 | NFYB | 1 | 12 | HCT116 |
| SNHG3 | PDXDC1 | 1 | 16 | HCT116 |
| SNHG3 | PSMG3 | 1 | 7 | HCT116 |
| SNHG3 | RPLP0 | 1 | 12 | HCT116 |
| SNHG3 | SERINC2 | 1 | 1 | HCT116 |
| SNHG3 | TRNAU1AP | 1 | 1 | HCT116 |
| SNHG3 | ANXA2 | 1 | 15 | Hela-3 |
| SNHG3 | DDX17 | 1 | 22 | Hela-3 |
| SNHG3 | ENO1 | 1 | 1 | Hela-3 |
| SNHG3 | FAF1 | 1 | 1 | Hela-3 |
| SNHG3 | FIP1L1 | 1 | 4 | Hela-3 |
| SNHG3 | GDI2 | 1 | 10 | Hela-3 |
| SNHG3 | GIGYF2 | 1 | 2 | Hela-3 |
| SNHG3 | GNAS | 1 | 20 | Hela-3 |
| SNHG3 | INCENP | 1 | 11 | Hela-3 |
| SNHG3 | ITGB3BP | 1 | 1 | Hela-3 |
| SNHG3 | NDUFS1 | 1 | 2 | Hela-3 |
| SNHG3 | PFKP | 1 | 10 | Hela-3 |
| SNHG3 | PKM2 | 1 | 15 | Hela-3 |
| SNHG3 | PRMT5 | 1 | 14 | Hela-3 |
| SNHG3 | RFWD2 | 1 | 1 | Hela-3 |
| SNHG3 | SENP3 | 1 | 17 | Hela-3 |
| SNHG3 | SNHG12 | 1 | 1 | Hela-3 |
| SNHG3 | TRNAU1AP | 1 | 1 | Hela-3 |
| SNHG3 | UBR5 | 1 | 8 | Hela-3 |
| SNHG4 | ANKLE2 | 5 | 12 | Hela-3 |
| SNHG4 | CLCN7 | 5 | 16 | Hela-3 |
| SNHG4 | KIAA0368 | 5 | 9 | Hela-3 |
| SNHG4 | MBD2 | 5 | 18 | Hela-3 |
| SNHG4 | UBE2D2 | 5 | 5 | Hela-3 |
| EEF1D | GNAS | 8 | 20 | HepG2 |
| EEF1D | MAD1L1 | 8 | 7 | HepG2 |
| EEF1D | PTPRN2 | 8 | 7 | HepG2 |
| EEF1D | SHC2 | 8 | 19 | HepG2 |
| EEF1D | TSPAN4 | 8 | 11 | HepG2 |
| EEF1D | TSTA3 | 8 | 8 | HepG2 |
| ELL2 | CAST | 5 | 5 | HepG2 |
| ELL2 | CAST | 5 | 5 | HepG2 |
| ELL2 | PFDN1 | 5 | 5 | HepG2 |
| ELL2 | PFDN1 | 5 | 5 | HepG2 |
| ELL2 | RHOBTB3 | 5 | 5 | HepG2 |
| HECTD1 | AFP | 14 | 4 | HepG2 |
| HECTD1 | ARHGAP5 | 14 | 14 | HepG2 |
| HECTD1 | C14orf126 | 14 | 14 | HepG2 |
| HECTD1 | C14orf126 | 14 | 14 | HepG2 |
| HECTD1 | PVRL3 | 14 | 3 | HepG2 |
| HECTD1 | STRN3 | 14 | 14 | HepG2 |
| HNRNPH1 | CTTN | 5 | 11 | HepG2 |
| HNRNPH1 | DDB1 | 5 | 11 | HepG2 |
| HNRNPH1 | FN1 | 5 | 2 | HepG2 |
| HNRNPH1 | GNAS | 5 | 20 | HepG2 |
| HNRNPH1 | IGF1R | 5 | 15 | HepG2 |
| HNRNPH1 | SQSTM1 | 5 | 5 | HepG2 |
| LOC375010 | C14orf126 | 1 | 14 | HepG2 |
| LOC375010 | C14orf126 | 1 | 14 | HepG2 |
| LOC375010 | CSE1L | 1 | 20 | HepG2 |
| LOC375010 | CSE1L | 1 | 20 | HepG2 |
| LOC375010 | EEF1E1 | 1 | 6 | HepG2 |
| LOC375010 | EEF1E1 | 1 | 6 | HepG2 |
| LOC375010 | GOLGA8B | 1 | 15 | HepG2 |
| LOC375010 | HNRNPC | 1 | 14 | HepG2 |
| LOC375010 | KIAA0146 | 1 | 8 | HepG2 |
| LOC375010 | KIAA0146 | 1 | 8 | HepG2 |
| LOC375010 | PIK3C3 | 1 | 18 | HepG2 |
| LOC375010 | SEC23A | 1 | 14 | HepG2 |
| LOC375010 | SP140L | 1 | 2 | HepG2 |
| LOC375010 | ZFR | 1 | 5 | HepG2 |
| ncRNA00188 | ANXA2 | 17 | 15 | HepG2 |
| ncRNA00188 | ATR | 17 | 3 | HepG2 |
| ncRNA00188 | C19orf48 | 17 | 19 | HepG2 |
| ncRNA00188 | CTNNBL1 | 17 | 20 | HepG2 |
| ncRNA00188 | MRPL3 | 17 | 3 | HepG2 |
| ncRNA00188 | SND1 | 17 | 7 | HepG2 |
| ncRNA00188 | SNHG7 | 17 | 9 | HepG2 |
| ncRNA00188 | TPI1 | 17 | 12 | HepG2 |
| ncRNA00188 | UBAP2 | 17 | 9 | HepG2 |
| ncRNA00188 | WIPF2 | 17 | 17 | HepG2 |
| SNHG3 | AHSG | 1 | 3 | HepG2 |
| SNHG3 | AHSG | 1 | 3 | HepG2 |
| SNHG3 | ANKRD17 | 1 | 4 | HepG2 |
| SNHG3 | ATG9A | 1 | 2 | HepG2 |
| SNHG3 | ATP5B | 1 | 12 | HepG2 |
| SNHG3 | CCNT1 | 1 | 12 | HepG2 |
| SNHG3 | CDHR2 | 1 | 5 | HepG2 |
| SNHG3 | CSE1L | 1 | 20 | HepG2 |
| SNHG3 | DHRS3 | 1 | 1 | HepG2 |
| SNHG3 | DYNC1H1 | 1 | 14 | HepG2 |
| SNHG3 | EEF1D | 1 | 8 | HepG2 |
| SNHG3 | EIF3E | 1 | 8 | HepG2 |
| SNHG3 | ENO1 | 1 | 1 | HepG2 |
| SNHG3 | FARP1 | 1 | 13 | HepG2 |
| SNHG3 | FN1 | 1 | 2 | HepG2 |
| SNHG3 | FN1 | 1 | 2 | HepG2 |
| SNHG3 | GFPT1 | 1 | 2 | HepG2 |
| SNHG3 | GTF2IRD1 | 1 | 7 | HepG2 |
| SNHG3 | HAUS1 | 1 | 18 | HepG2 |
| SNHG3 | HNRNPC | 1 | 14 | HepG2 |
| SNHG3 | IMP3 | 1 | 15 | HepG2 |
| SNHG3 | KIF1B | 1 | 1 | HepG2 |
| SNHG3 | KIF2A | 1 | 5 | HepG2 |
| SNHG3 | LDHA | 1 | 11 | HepG2 |
| SNHG3 | LSM2 | 1 | 6 | HepG2 |
| SNHG3 | NFS1 | 1 | 20 | HepG2 |
| SNHG3 | NPL | 1 | 1 | HepG2 |
| SNHG3 | PPA1 | 1 | 10 | HepG2 |
| SNHG3 | PRR13 | 1 | 12 | HepG2 |
| SNHG3 | PSMB2 | 1 | 1 | HepG2 |
| SNHG3 | PSMD3 | 1 | 17 | HepG2 |
| SNHG3 | PUS7 | 1 | 7 | HepG2 |
| SNHG3 | RBM39 | 1 | 20 | HepG2 |
| SNHG3 | RPL17 | 1 | 18 | HepG2 |
| SNHG3 | RPL18A | 1 | 19 | HepG2 |
| SNHG3 | SEC24B | 1 | 4 | HepG2 |
| SNHG3 | SENP3 | 1 | 17 | HepG2 |
| SNHG3 | SNRPN | 1 | 15 | HepG2 |
| SNHG3 | SPNS1 | 1 | 16 | HepG2 |
| SNHG3 | SRSF1 | 1 | 17 | HepG2 |
| SNHG3 | SUN1 | 1 | 7 | HepG2 |
| SNHG3 | TAF12 | 1 | 1 | HepG2 |
| SNHG3 | TAF12 | 1 | 1 | HepG2 |
| SNHG3 | TBCA | 1 | 5 | HepG2 |
| SNHG3 | TCF25 | 1 | 16 | HepG2 |
| SNHG3 | TLK1 | 1 | 2 | HepG2 |
| SNHG3 | TRNAU1AP | 1 | 1 | HepG2 |
| SNHG3 | TRNP1 | 1 | 1 | HepG2 |
| SNHG3 | UIMC1 | 1 | 5 | HepG2 |
| SNHG3 | USP48 | 1 | 1 | HepG2 |
| SNHG3 | ZFYVE16 | 1 | 5 | HepG2 |
| SNHG4 | CTNNA1 | 5 | 5 | HepG2 |
| SNHG4 | ETF1 | 5 | 5 | HepG2 |
| SNHG4 | GTF2I | 5 | 7 | HepG2 |
| SNHG4 | HP1BP3 | 5 | 1 | HepG2 |
| SNHG4 | PAIP2 | 5 | 5 | HepG2 |
| SNHG4 | RHOA | 5 | 3 | HepG2 |
| SNHG4 | ROCK2 | 5 | 2 | HepG2 |
| SNHG4 | SIL1 | 5 | 5 | HepG2 |
| SNHG4 | EIF4G3 | 5 | 1 | HT1080 |
| SNHG4 | GLYR1 | 5 | 16 | HT1080 |
| SNHG4 | NVL | 5 | 1 | HT1080 |
| SNHG4 | PHF14 | 5 | 7 | HT1080 |
| SNHG4 | RTN3 | 5 | 11 | HT1080 |
| SNHG4 | UCHL5 | 5 | 1 | HT1080 |
| ACADM | AP1G1 | 1 | 16 | K562 |
| ACADM | AP1G1 | 1 | 16 | K562 |
| ACADM | C6orf191 | 1 | 6 | K562 |
| ACADM | MSH4 | 1 | 1 | K562 |
| ACADM | NPL | 1 | 1 | K562 |
| ACADM | NPL | 1 | 1 | K562 |
| ACADM | VCL | 1 | 10 | K562 |
| ACADM | VCL | 1 | 10 | K562 |
| C7orf44 | BLVRA | 7 | 7 | K562 |
| C7orf44 | PSMA2 | 7 | 7 | K562 |
| C7orf44 | PSMA2 | 7 | 7 | K562 |
| C7orf44 | TAX1BP1 | 7 | 7 | K562 |
| C7orf44 | TAX1BP1 | 7 | 7 | K562 |
| C7orf44 | URGCP | 7 | 7 | K562 |
| C7orf44 | WIPI2 | 7 | 7 | K562 |
| C7orf58 | GOSR2 | 7 | 17 | K562 |
| C7orf58 | NMU | 7 | 4 | K562 |
| C7orf58 | RPL13 | 7 | 16 | K562 |
| C7orf58 | TUBGCP6 | 7 | 22 | K562 |
| C7orf58 | UBAP2L | 7 | 1 | K562 |
| SNHG3 | RPL17 | 1 | 18 | HepG2 |
| SNHG3 | RPL18A | 1 | 19 | HepG2 |
| SNHG3 | SEC24B | 1 | 4 | HepG2 |
| SNHG3 | SENP3 | 1 | 17 | HepG2 |
| SNHG3 | SNRPN | 1 | 15 | HepG2 |
| SNHG3 | SPNS1 | 1 | 16 | HepG2 |
| SNHG3 | SRSF1 | 1 | 17 | HepG2 |
| SNHG3 | SUN1 | 1 | 7 | HepG2 |
| SNHG3 | TAF12 | 1 | 1 | HepG2 |
| SNHG3 | TAF12 | 1 | 1 | HepG2 |
| SNHG3 | TBCA | 1 | 5 | HepG2 |
| SNHG3 | TCF25 | 1 | 16 | HepG2 |
| SNHG3 | TLK1 | 1 | 2 | HepG2 |
| SNHG3 | TRNAU1AP | 1 | 1 | HepG2 |
| SNHG3 | TRNP1 | 1 | 1 | HepG2 |
| SNHG3 | UIMC1 | 1 | 5 | HepG2 |
| SNHG3 | USP48 | 1 | 1 | HepG2 |
| SNHG3 | ZFYVE16 | 1 | 5 | HepG2 |
| SNHG4 | CTNNA1 | 5 | 5 | HepG2 |
| SNHG4 | ETF1 | 5 | 5 | HepG2 |
| SNHG4 | GTF2I | 5 | 7 | HepG2 |
| SNHG4 | HP1BP3 | 5 | 1 | HepG2 |
| SNHG4 | PAIP2 | 5 | 5 | HepG2 |
| SNHG4 | RHOA | 5 | 3 | HepG2 |
| SNHG4 | ROCK2 | 5 | 2 | HepG2 |
| SNHG4 | SIL1 | 5 | 5 | HepG2 |
| SNHG4 | EIF4G3 | 5 | 1 | HT1080 |
| SNHG4 | GLYR1 | 5 | 16 | HT1080 |
| SNHG4 | NVL | 5 | 1 | HT1080 |
| SNHG4 | PHF14 | 5 | 7 | HT1080 |
| SNHG4 | RTN3 | 5 | 11 | HT1080 |
| SNHG4 | UCHL5 | 5 | 1 | HT1080 |
| ACADM | AP1G1 | 1 | 16 | K562 |
| ACADM | AP1G1 | 1 | 16 | K562 |
| ACADM | C6orf191 | 1 | 6 | K562 |
| ACADM | MSH4 | 1 | 1 | K562 |
| ACADM | NPL | 1 | 1 | K562 |
| ACADM | NPL | 1 | 1 | K562 |
| ACADM | VCL | 1 | 10 | K562 |
| ACADM | VCL | 1 | 10 | K562 |
| C7orf44 | BLVRA | 7 | 7 | K562 |
| C7orf44 | PSMA2 | 7 | 7 | K562 |
| C7orf44 | PSMA2 | 7 | 7 | K562 |
| C7orf44 | TAX1BP1 | 7 | 7 | K562 |
| C7orf44 | TAX1BP1 | 7 | 7 | K562 |
| C7orf44 | URGCP | 7 | 7 | K562 |
| C7orf44 | WIPI2 | 7 | 7 | K562 |
| C7orf58 | GOSR2 | 7 | 17 | K562 |
| C7orf58 | NMU | 7 | 4 | K562 |
| C7orf58 | RPL13 | 7 | 16 | K562 |
| C7orf58 | TUBGCP6 | 7 | 22 | K562 |
| C7orf58 | UBAP2L | 7 | 1 | K562 |
| CCDC26 | ASAP1 | 8 | 8 | K562 |
| CCDC26 | ASAP1 | 8 | 8 | K562 |
| CCDC26 | ASAP1 | 8 | 8 | K562 |
| CCDC26 | FAM49B | 8 | 8 | K562 |
| CCDC26 | FAM49B | 8 | 8 | K562 |
| CCDC26 | FAM49B | 8 | 8 | K562 |
| CCDC26 | LOC728724 | 8 | 8 | K562 |
| CCDC26 | LOC728724 | 8 | 8 | K562 |
| CCDC26 | LOC728724 | 8 | 8 | K562 |
| CCDC26 | LOC728724 | 8 | 8 | K562 |
| CCDC26 | PVT1 | 8 | 8 | K562 |
| CHD2 | CCNF | 15 | 16 | K562 |
| CHD2 | PCF11 | 15 | 11 | K562 |
| CHD2 | SDF2 | 15 | 17 | K562 |
| CHD2 | SEPSECS | 15 | 4 | K562 |
| CHD2 | SRSF1 | 15 | 17 | K562 |
| CPSF6 | BTK | 12 | 23 | K562 |
| CPSF6 | C6orf203 | 12 | 6 | K562 |
| CPSF6 | CCT2 | 12 | 12 | K562 |
| CPSF6 | CSNK1D | 12 | 17 | K562 |
| CPSF6 | FAM120AOS | 12 | 9 | K562 |
| CPSF6 | GCFC1 | 12 | 21 | K562 |
| CPSF6 | KIAA0586 | 12 | 14 | K562 |
| CPSF6 | MRPL44 | 12 | 2 | K562 |
| CPSF6 | UBE2L3 | 12 | 22 | K562 |
| CPSF6 | UQCRB | 12 | 8 | K562 |
| CTBP2 | ATE1 | 10 | 10 | K562 |
| CTBP2 | MAEA | 10 | 4 | K562 |
| CTBP2 | MAP4 | 10 | 3 | K562 |
| CTBP2 | METTL10 | 10 | 10 | K562 |
| CTBP2 | OCIAD1 | 10 | 4 | K562 |
| CTBP2 | PSMB1 | 10 | 6 | K562 |
| CTBP2 | ZRANB1 | 10 | 10 | K562 |
| EXOC4 | CHCHD3 | 7 | 7 | K562 |
| EXOC4 | CHCHD3 | 7 | 7 | K562 |
| EXOC4 | CHCHD3 | 7 | 7 | K562 |
| EXOC4 | CHCHD3 | 7 | 7 | K562 |
| EXOC4 | SHFM1 | 7 | 7 | K562 |
| EXOC4 | TMEM209 | 7 | 7 | K562 |
| EXOC4 | TMEM209 | 7 | 7 | K562 |
| EXOC4 | UBN2 | 7 | 7 | K562 |
| HDLBP | ANKMY1 | 2 | 2 | K562 |
| HDLBP | ANKMY1 | 2 | 2 | K562 |
| HDLBP | GNAS | 2 | 20 | K562 |
| HDLBP | NDUFA10 | 2 | 2 | K562 |
| HDLBP | PASK | 2 | 2 | K562 |
| HDLBP | THAP4 | 2 | 2 | K562 |
| HDLBP | TRPC4AP | 2 | 20 | K562 |
| HNRNPH1 | CANX | 5 | 5 | K562 |
| HNRNPH1 | IARS | 5 | 9 | K562 |
| HNRNPH1 | MAML1 | 5 | 5 | K562 |
| HNRNPH1 | NDC80 | 5 | 18 | K562 |
| HNRNPH1 | PPIG | 5 | 2 | K562 |
| HNRNPH1 | SQSTM1 | 5 | 5 | K562 |
| HNRNPH1 | TBCD | 5 | 17 | K562 |
| HNRNPH1 | TXN | 5 | 9 | K562 |
| KIAA0114 | FAF1 | 4 | 1 | K562 |
| KIAA0114 | FKBP4 | 4 | 12 | K562 |
| KIAA0114 | GNB1 | 4 | 1 | K562 |
| KIAA0114 | GNB1 | 4 | 1 | K562 |
| KIAA0114 | MIB1 | 4 | 18 | K562 |
| KIAA0114 | NRD1 | 4 | 1 | K562 |
| KIAA0114 | NRD1 | 4 | 1 | K562 |
| KIAA0114 | PHF14 | 4 | 7 | K562 |
| KIAA0114 | PHKB | 4 | 16 | K562 |
| KIAA0114 | PHKB | 4 | 16 | K562 |
| KIAA0114 | PICALM | 4 | 11 | K562 |
| KIAA0114 | PRKCB | 4 | 16 | K562 |
| KIAA0114 | PRKCB | 4 | 16 | K562 |
| KIAA0114 | RPL10 | 4 | 23 | K562 |
| KIAA0114 | RPL3 | 4 | 22 | K562 |
| KIAA0114 | TRAPPC3 | 4 | 1 | K562 |
| LOC728323 | FAM138E | 2 | 15 | K562 |
| LOC728323 | FLJ45340 | 2 | 7 | K562 |
| LOC728323 | RPL23AP53 | 2 | 8 | K562 |
| LOC728323 | RPL23AP53 | 2 | 8 | K562 |
| LOC728323 | RPL23AP79 | 2 | 19 | K562 |
| LOC728323 | WASH3P | 2 | 15 | K562 |
| MCM3APAS | C21orf56 | 21 | 21 | K562 |
| MCM3APAS | C21orf56 | 21 | 21 | K562 |
| MCM3APAS | DEPDC1B | 21 | 5 | K562 |
| MCM3APAS | PRPF40A | 21 | 2 | K562 |
| MCM3APAS | PTTG1 | 21 | 5 | K562 |
| MIR17HG | FAF1 | 13 | 1 | K562 |
| MIR17HG | NUP214 | 13 | 9 | K562 |
| MIR17HG | NUP214 | 13 | 9 | K562 |
| MIR17HG | PANK2 | 13 | 20 | K562 |
| MIR17HG | PAPD4 | 13 | 5 | K562 |
| ncRNA00188 | ANXA2 | 17 | 15 | K562 |
| ncRNA00188 | BAZ1B | 17 | 7 | K562 |
| ncRNA00188 | CKAP5 | 17 | 11 | K562 |
| ncRNA00188 | CTNNBL1 | 17 | 20 | K562 |
| ncRNA00188 | EIF5 | 17 | 14 | K562 |
| ncRNA00188 | IMMP2L | 17 | 7 | K562 |
| ncRNA00188 | MAD1L1 | 17 | 7 | K562 |
| ncRNA00188 | MAD1L1 | 17 | 7 | K562 |
| ncRNA00188 | PAIP2 | 17 | 5 | K562 |
| ncRNA00188 | PHF14 | 17 | 7 | K562 |
| ncRNA00188 | PHF14 | 17 | 7 | K562 |
| ncRNA00188 | RPS3 | 17 | 11 | K562 |
| ncRNA00188 | RPS3 | 17 | 11 | K562 |
| ncRNA00188 | SENP3 | 17 | 17 | K562 |
| ncRNA00188 | SND1 | 17 | 7 | K562 |
| ncRNA00188 | SNHG7 | 17 | 9 | K562 |
| ncRNA00188 | UBAP2 | 17 | 9 | K562 |
| RPL27A | APLP2 | 11 | 11 | K562 |
| RPL27A | APLP2 | 11 | 11 | K562 |
| RPL27A | BAT2L2 | 11 | 1 | K562 |
| RPL27A | BAT2L2 | 11 | 1 | K562 |
| RPL27A | CCNT1 | 11 | 12 | K562 |
| RPL27A | DDIT4 | 11 | 10 | K562 |
| RPL27A | HDLBP | 11 | 2 | K562 |
| RPL27A | NVL | 11 | 1 | K562 |
| RPL27A | PLAA | 11 | 9 | K562 |
| RPL27A | RABGAP1L | 11 | 1 | K562 |
| RPL27A | RABGAP1L | 11 | 1 | K562 |
| RPL27A | RNF149 | 11 | 2 | K562 |
| RPL27A | RPL35 | 11 | 9 | K562 |
| RPL27A | RPS27A | 11 | 2 | K562 |
| RPL27A | RPS27A | 11 | 2 | K562 |
| RPL27A | RPS3 | 11 | 11 | K562 |
| RPL27A | SMC4 | 11 | 3 | K562 |
| RPL27A | SMC4 | 11 | 3 | K562 |
| RPL27A | SND1 | 11 | 7 | K562 |
| RPL27A | SND1 | 11 | 7 | K562 |
| RPL27A | SRSF2IP | 11 | 12 | K562 |
| RPL27A | SRSF2IP | 11 | 12 | K562 |
| RPL27A | UBE2D2 | 11 | 5 | K562 |
| SNHG3 | ABCE1 | 1 | 4 | K562 |
| SNHG3 | ABHD3 | 1 | 18 | K562 |
| SNHG3 | ABHD3 | 1 | 18 | K562 |
| SNHG3 | ADCK2 | 1 | 7 | K562 |
| SNHG3 | ADCK2 | 1 | 7 | K562 |
| SNHG3 | AKR1A1 | 1 | 1 | K562 |
| SNHG3 | ALG3 | 1 | 3 | K562 |
| SNHG3 | ALG3 | 1 | 3 | K562 |
| SNHG3 | ANKHD1 | 1 | 5 | K562 |
| SNHG3 | ANP32B | 1 | 9 | K562 |
| SNHG3 | ANXA2 | 1 | 15 | K562 |
| SNHG3 | ARL6IP1 | 1 | 16 | K562 |
| SNHG3 | ARL6IP1 | 1 | 16 | K562 |
| SNHG3 | ARL6IP1 | 1 | 16 | K562 |
| SNHG3 | ATP13A3 | 1 | 3 | K562 |
| SNHG3 | ATP13A3 | 1 | 3 | K562 |
| SNHG3 | ATP5A1 | 1 | 18 | K562 |
| SNHG3 | ATP5A1 | 1 | 18 | K562 |
| SNHG3 | ATP5B | 1 | 12 | K562 |
| SNHG3 | ATP5B | 1 | 12 | K562 |
| SNHG3 | ATP6V1G2 | 1 | 6 | K562 |
| SNHG3 | ATP6V1G2 | 1 | 6 | K562 |
| SNHG3 | ATP6V1G2 | 1 | 6 | K562 |
| SNHG3 | ATP6V1G2 | 1 | 6 | K562 |
| SNHG3 | ATP6V1G2 | 1 | 6 | K562 |
| SNHG3 | BAIAP2L1 | 1 | 7 | K562 |
| SNHG3 | BAIAP2L1 | 1 | 7 | K562 |
| SNHG3 | BLVRB | 1 | 19 | K562 |
| SNHG3 | BLVRB | 1 | 19 | K562 |
| SNHG3 | C11orf48 | 1 | 11 | K562 |
| SNHG3 | C11orf48 | 1 | 11 | K562 |
| SNHG3 | C2orf24 | 1 | 2 | K562 |
| SNHG3 | C9orf5 | 1 | 9 | K562 |
| SNHG3 | C9orf5 | 1 | 9 | K562 |
| SNHG3 | CANX | 1 | 5 | K562 |
| SNHG3 | CANX | 1 | 5 | K562 |
| SNHG3 | CANX | 1 | 5 | K562 |
| SNHG3 | CCAR1 | 1 | 10 | K562 |
| SNHG3 | CCAR1 | 1 | 10 | K562 |
| SNHG3 | CCDC132 | 1 | 7 | K562 |
| SNHG3 | CCDC132 | 1 | 7 | K562 |
| SNHG3 | CCDC18 | 1 | 1 | K562 |
| SNHG3 | CCNY | 1 | 10 | K562 |
| SNHG3 | CCT3 | 1 | 1 | K562 |
| SNHG3 | CCT3 | 1 | 1 | K562 |
| SNHG3 | CCT5 | 1 | 5 | K562 |
| SNHG3 | CCT5 | 1 | 5 | K562 |
| SNHG3 | CCT8 | 1 | 21 | K562 |
| SNHG3 | CCT8 | 1 | 21 | K562 |
| SNHG3 | CENPE | 1 | 4 | K562 |
| SNHG3 | CENPE | 1 | 4 | K562 |
| SNHG3 | CHAF1A | 1 | 19 | K562 |
| SNHG3 | CHCHD3 | 1 | 7 | K562 |
| SNHG3 | CHCHD3 | 1 | 7 | K562 |
| SNHG3 | CNOT1 | 1 | 16 | K562 |
| SNHG3 | CNOT1 | 1 | 16 | K562 |
| SNHG3 | CNOT10 | 1 | 3 | K562 |
| SNHG3 | CNOT10 | 1 | 3 | K562 |
| SNHG3 | COPA | 1 | 1 | K562 |
| SNHG3 | COPA | 1 | 1 | K562 |
| SNHG3 | COX5A | 1 | 15 | K562 |
| SNHG3 | COX5A | 1 | 15 | K562 |
| SNHG3 | COX5A | 1 | 15 | K562 |
| SNHG3 | COX5B | 1 | 2 | K562 |
| SNHG3 | CRAMP1L | 1 | 16 | K562 |
| SNHG3 | CRAMP1L | 1 | 16 | K562 |
| SNHG3 | CSE1L | 1 | 20 | K562 |
| SNHG3 | CSE1L | 1 | 20 | K562 |
| SNHG3 | CSE1L | 1 | 20 | K562 |
| SNHG3 | CTCF | 1 | 16 | K562 |
| SNHG3 | CUL2 | 1 | 10 | K562 |
| SNHG3 | CUL2 | 1 | 10 | K562 |
| SNHG3 | CUL3 | 1 | 2 | K562 |
| SNHG3 | CWF19L1 | 1 | 10 | K562 |
| SNHG3 | CWF19L1 | 1 | 10 | K562 |
| SNHG3 | CYHR1 | 1 | 8 | K562 |
| SNHG3 | DAP3 | 1 | 1 | K562 |
| SNHG3 | DAP3 | 1 | 1 | K562 |
| SNHG3 | DAP3 | 1 | 1 | K562 |
| SNHG3 | DAP3 | 1 | 1 | K562 |
| SNHG3 | DARS | 1 | 2 | K562 |
| SNHG3 | DARS | 1 | 2 | K562 |
| SNHG3 | DCAF6 | 1 | 1 | K562 |
| SNHG3 | DCAF6 | 1 | 1 | K562 |
| SNHG3 | DCAF6 | 1 | 1 | K562 |
| SNHG3 | DCI | 1 | 16 | K562 |
| SNHG3 | DDX17 | 1 | 22 | K562 |
| SNHG3 | DDX17 | 1 | 22 | K562 |
| SNHG3 | DHRS3 | 1 | 1 | K562 |
| SNHG3 | DHX29 | 1 | 5 | K562 |
| SNHG3 | DHX29 | 1 | 5 | K562 |
| SNHG3 | DIP2B | 1 | 12 | K562 |
| SNHG3 | DIP2B | 1 | 12 | K562 |
| SNHG3 | DKC1 | 1 | 23 | K562 |
| SNHG3 | DKC1 | 1 | 23 | K562 |
| SNHG3 | DKC1 | 1 | 23 | K562 |
| SNHG3 | DKFZP686I15217 | 1 | 6 | K562 |
| SNHG3 | DKFZP686I15217 | 1 | 6 | K562 |
| SNHG3 | DNAJC11 | 1 | 1 | K562 |
| SNHG3 | DNAJC7 | 1 | 17 | K562 |
| SNHG3 | DNAJC7 | 1 | 17 | K562 |
| SNHG3 | DYNC1H1 | 1 | 14 | K562 |
| SNHG3 | EEF1B2 | 1 | 2 | K562 |
| SNHG3 | EEF1D | 1 | 8 | K562 |
| SNHG3 | EEF1D | 1 | 8 | K562 |
| SNHG3 | EIF2B1 | 1 | 12 | K562 |
| SNHG3 | EIF2B1 | 1 | 12 | K562 |
| SNHG3 | EIF2B3 | 1 | 1 | K562 |
| SNHG3 | EIF2B3 | 1 | 1 | K562 |
| SNHG3 | EIF3E | 1 | 8 | K562 |
| SNHG3 | ELP2 | 1 | 18 | K562 |
| SNHG3 | ELP2 | 1 | 18 | K562 |
| SNHG3 | ENO1 | 1 | 1 | K562 |
| SNHG3 | ENO1 | 1 | 1 | K562 |
| SNHG3 | EPB41 | 1 | 1 | K562 |
| SNHG3 | EPB41 | 1 | 1 | K562 |
| SNHG3 | EPS15 | 1 | 1 | K562 |
| SNHG3 | ESCO1 | 1 | 18 | K562 |
| SNHG3 | ESYT2 | 1 | 7 | K562 |
| SNHG3 | EXOC6 | 1 | 10 | K562 |
| SNHG3 | EXOC6 | 1 | 10 | K562 |
| SNHG3 | EXOC6 | 1 | 10 | K562 |
| SNHG3 | FAF1 | 1 | 1 | K562 |
| SNHG3 | FAF1 | 1 | 1 | K562 |
| SNHG3 | FAF1 | 1 | 1 | K562 |
| SNHG3 | FAF1 | 1 | 1 | K562 |
| SNHG3 | FAF1 | 1 | 1 | K562 |
| SNHG3 | FAF1 | 1 | 1 | K562 |
| SNHG3 | FARSB | 1 | 2 | K562 |
| SNHG3 | FASTKD1 | 1 | 2 | K562 |
| SNHG3 | FASTKD1 | 1 | 2 | K562 |
| SNHG3 | FN3KRP | 1 | 17 | K562 |
| SNHG3 | FTSJD2 | 1 | 6 | K562 |
| SNHG3 | GABPB2 | 1 | 1 | K562 |
| SNHG3 | GCFC1 | 1 | 21 | K562 |
| SNHG3 | GCFC1 | 1 | 21 | K562 |
| SNHG3 | GDI2 | 1 | 10 | K562 |
| SNHG3 | GDI2 | 1 | 10 | K562 |
| SNHG3 | GGPS1 | 1 | 1 | K562 |
| SNHG3 | GGPS1 | 1 | 1 | K562 |
| SNHG3 | GNB1 | 1 | 1 | K562 |
| SNHG3 | GNB2L1 | 1 | 5 | K562 |
| SNHG3 | GNB2L1 | 1 | 5 | K562 |
| SNHG3 | GPR98 | 1 | 5 | K562 |
| SNHG3 | GPR98 | 1 | 5 | K562 |
| SNHG3 | GPR98 | 1 | 5 | K562 |
| SNHG3 | GSPT1 | 1 | 16 | K562 |
| SNHG3 | GTF2IRD1 | 1 | 7 | K562 |
| SNHG3 | GTF3C6 | 1 | 6 | K562 |
| SNHG3 | GTF3C6 | 1 | 6 | K562 |
| SNHG3 | GTPBP4 | 1 | 10 | K562 |
| SNHG3 | H2AFV | 1 | 7 | K562 |
| SNHG3 | H2AFV | 1 | 7 | K562 |
| SNHG3 | HBS1L | 1 | 6 | K562 |
| SNHG3 | HMGA1 | 1 | 6 | K562 |
| SNHG3 | HNRNPC | 1 | 14 | K562 |
| SNHG3 | HNRNPH1 | 1 | 5 | K562 |
| SNHG3 | HNRNPH1 | 1 | 5 | K562 |
| SNHG3 | HNRNPH3 | 1 | 10 | K562 |
| SNHG3 | HNRNPH3 | 1 | 10 | K562 |
| SNHG3 | HNRNPH3 | 1 | 10 | K562 |
| SNHG3 | HSP90AA1 | 1 | 14 | K562 |
| SNHG3 | HSPC157 | 1 | 1 | K562 |
| SNHG3 | HSPE1 | 1 | 2 | K562 |
| SNHG3 | HUWE1 | 1 | 23 | K562 |
| SNHG3 | HUWE1 | 1 | 23 | K562 |
| SNHG3 | ILF2 | 1 | 1 | K562 |
| SNHG3 | ILF2 | 1 | 1 | K562 |
| SNHG3 | ILF2 | 1 | 1 | K562 |
| SNHG3 | ILF3 | 1 | 19 | K562 |
| SNHG3 | IMP3 | 1 | 15 | K562 |
| SNHG3 | KARS | 1 | 16 | K562 |
| SNHG3 | KARS | 1 | 16 | K562 |
| SNHG3 | KIF1B | 1 | 1 | K562 |
| SNHG3 | KIF1B | 1 | 1 | K562 |
| SNHG3 | KIF2A | 1 | 5 | K562 |
| SNHG3 | KIF2A | 1 | 5 | K562 |
| SNHG3 | KLK1 | 1 | 19 | K562 |
| SNHG3 | KRT222 | 1 | 17 | K562 |
| SNHG3 | KRT222 | 1 | 17 | K562 |
| SNHG3 | LARP4 | 1 | 12 | K562 |
| SNHG3 | LARS | 1 | 5 | K562 |
| SNHG3 | LARS | 1 | 5 | K562 |
| SNHG3 | LCP1 | 1 | 13 | K562 |
| SNHG3 | LCP1 | 1 | 13 | K562 |
| SNHG3 | LOC440944 | 1 | 3 | K562 |
| SNHG3 | LOC440944 | 1 | 3 | K562 |
| SNHG3 | LOC641298 | 1 | 16 | K562 |
| SNHG3 | LOC641298 | 1 | 16 | K562 |
| SNHG3 | LRRC47 | 1 | 1 | K562 |
| SNHG3 | LSM2 | 1 | 6 | K562 |
| SNHG3 | LYN | 1 | 8 | K562 |
| SNHG3 | LYN | 1 | 8 | K562 |
| SNHG3 | MAPK1 | 1 | 22 | K562 |
| SNHG3 | MAPK1 | 1 | 22 | K562 |
| SNHG3 | MAPK1 | 1 | 22 | K562 |
| SNHG3 | MAPK1 | 1 | 22 | K562 |
| SNHG3 | MBD2 | 1 | 18 | K562 |
| SNHG3 | MBD2 | 1 | 18 | K562 |
| SNHG3 | MCM8 | 1 | 20 | K562 |
| SNHG3 | MDH2 | 1 | 7 | K562 |
| SNHG3 | METT10D | 1 | 17 | K562 |
| SNHG3 | METT10D | 1 | 17 | K562 |
| SNHG3 | MFF | 1 | 2 | K562 |
| SNHG3 | MRPL3 | 1 | 3 | K562 |
| SNHG3 | MTOR | 1 | 1 | K562 |
| SNHG3 | MYBL2 | 1 | 20 | K562 |
| SNHG3 | MYL6B | 1 | 12 | K562 |
| SNHG3 | MYL6B | 1 | 12 | K562 |
| SNHG3 | NDUFAF4 | 1 | 6 | K562 |
| SNHG3 | NNT | 1 | 5 | K562 |
| SNHG3 | NNT | 1 | 5 | K562 |
| SNHG3 | NNT | 1 | 5 | K562 |
| SNHG3 | NPL | 1 | 1 | K562 |
| SNHG3 | NPL | 1 | 1 | K562 |
| SNHG3 | NPL | 1 | 1 | K562 |
| SNHG3 | NPL | 1 | 1 | K562 |
| SNHG3 | NPM1 | 1 | 5 | K562 |
| SNHG3 | NPM1 | 1 | 5 | K562 |
| SNHG3 | NSMCE2 | 1 | 8 | K562 |
| SNHG3 | NSMCE2 | 1 | 8 | K562 |
| SNHG3 | NUDCD2 | 1 | 5 | K562 |
| SNHG3 | NUDCD2 | 1 | 5 | K562 |
| SNHG3 | NUP107 | 1 | 12 | K562 |
| SNHG3 | NUP214 | 1 | 9 | K562 |
| SNHG3 | NUP214 | 1 | 9 | K562 |
| SNHG3 | ODC1 | 1 | 2 | K562 |
| SNHG3 | ODC1 | 1 | 2 | K562 |
| SNHG3 | ODC1 | 1 | 2 | K562 |
| SNHG3 | OVOL2 | 1 | 20 | K562 |
| SNHG3 | OVOL2 | 1 | 20 | K562 |
| SNHG3 | PABPC4 | 1 | 1 | K562 |
| SNHG3 | PAK1IP1 | 1 | 6 | K562 |
| SNHG3 | PAK1IP1 | 1 | 6 | K562 |
| SNHG3 | PARK7 | 1 | 1 | K562 |
| SNHG3 | PARK7 | 1 | 1 | K562 |
| SNHG3 | PARP4 | 1 | 13 | K562 |
| SNHG3 | PARP4 | 1 | 13 | K562 |
| SNHG3 | PDCL2 | 1 | 4 | K562 |
| SNHG3 | PDS5A | 1 | 4 | K562 |
| SNHG3 | PFKP | 1 | 10 | K562 |
| SNHG3 | PHACTR4 | 1 | 1 | K562 |
| SNHG3 | PHACTR4 | 1 | 1 | K562 |
| SNHG3 | PHF14 | 1 | 7 | K562 |
| SNHG3 | PHF20 | 1 | 20 | K562 |
| SNHG3 | PHKB | 1 | 16 | K562 |
| SNHG3 | PICALM | 1 | 11 | K562 |
| SNHG3 | PICALM | 1 | 11 | K562 |
| SNHG3 | PICALM | 1 | 11 | K562 |
| SNHG3 | PICALM | 1 | 11 | K562 |
| SNHG3 | PICALM | 1 | 11 | K562 |
| SNHG3 | PKM2 | 1 | 15 | K562 |
| SNHG3 | PKN1 | 1 | 19 | K562 |
| SNHG3 | PLEKHA4 | 1 | 19 | K562 |
| SNHG3 | PLEKHA4 | 1 | 19 | K562 |
| SNHG3 | POLE | 1 | 12 | K562 |
| SNHG3 | POLE | 1 | 12 | K562 |
| SNHG3 | POLE2 | 1 | 14 | K562 |
| SNHG3 | PPA1 | 1 | 10 | K562 |
| SNHG3 | PPM1B | 1 | 2 | K562 |
| SNHG3 | PPM1B | 1 | 2 | K562 |
| SNHG3 | PRAME | 1 | 22 | K562 |
| SNHG3 | PRAME | 1 | 22 | K562 |
| SNHG3 | PRAME | 1 | 22 | K562 |
| SNHG3 | PRKCB | 1 | 16 | K562 |
| SNHG3 | PRKCB | 1 | 16 | K562 |
| SNHG3 | PRKDC | 1 | 8 | K562 |
| SNHG3 | PRMT5 | 1 | 14 | K562 |
| SNHG3 | PRPF3 | 1 | 1 | K562 |
| SNHG3 | PRPF6 | 1 | 20 | K562 |
| SNHG3 | PRPF6 | 1 | 20 | K562 |
| SNHG3 | PRR13 | 1 | 12 | K562 |
| SNHG3 | PRR13 | 1 | 12 | K562 |
| SNHG3 | PSMA1 | 1 | 11 | K562 |
| SNHG3 | PSMA1 | 1 | 11 | K562 |
| SNHG3 | PSMD4 | 1 | 1 | K562 |
| SNHG3 | PSMD4 | 1 | 1 | K562 |
| SNHG3 | PSMD4 | 1 | 1 | K562 |
| SNHG3 | PSMG3 | 1 | 7 | K562 |
| SNHG3 | PSMG3 | 1 | 7 | K562 |
| SNHG3 | PTCD3 | 1 | 2 | K562 |
| SNHG3 | PUS7 | 1 | 7 | K562 |
| SNHG3 | PUS7 | 1 | 7 | K562 |
| SNHG3 | QRICH2 | 1 | 17 | K562 |
| SNHG3 | RANBP1 | 1 | 22 | K562 |
| SNHG3 | NSMCE2 | 1 | 8 | K562 |
| SNHG3 | NSMCE2 | 1 | 8 | K562 |
| SNHG3 | NUDCD2 | 1 | 5 | K562 |
| SNHG3 | NUDCD2 | 1 | 5 | K562 |
| SNHG3 | NUP107 | 1 | 12 | K562 |
| SNHG3 | NUP214 | 1 | 9 | K562 |
| SNHG3 | NUP214 | 1 | 9 | K562 |
| SNHG3 | ODC1 | 1 | 2 | K562 |
| SNHG3 | ODC1 | 1 | 2 | K562 |
| SNHG3 | ODC1 | 1 | 2 | K562 |
| SNHG3 | OVOL2 | 1 | 20 | K562 |
| SNHG3 | OVOL2 | 1 | 20 | K562 |
| SNHG3 | PABPC4 | 1 | 1 | K562 |
| SNHG3 | PAK1IP1 | 1 | 6 | K562 |
| SNHG3 | PAK1IP1 | 1 | 6 | K562 |
| SNHG3 | PARK7 | 1 | 1 | K562 |
| SNHG3 | PARK7 | 1 | 1 | K562 |
| SNHG3 | PARP4 | 1 | 13 | K562 |
| SNHG3 | PARP4 | 1 | 13 | K562 |
| SNHG3 | PDCL2 | 1 | 4 | K562 |
| SNHG3 | PDS5A | 1 | 4 | K562 |
| SNHG3 | PFKP | 1 | 10 | K562 |
| SNHG3 | PHACTR4 | 1 | 1 | K562 |
| SNHG3 | PHACTR4 | 1 | 1 | K562 |
| SNHG3 | PHF14 | 1 | 7 | K562 |
| SNHG3 | PHF20 | 1 | 20 | K562 |
| SNHG3 | PHKB | 1 | 16 | K562 |
| SNHG3 | PICALM | 1 | 11 | K562 |
| SNHG3 | PICALM | 1 | 11 | K562 |
| SNHG3 | PICALM | 1 | 11 | K562 |
| SNHG3 | PICALM | 1 | 11 | K562 |
| SNHG3 | PICALM | 1 | 11 | K562 |
| SNHG3 | PKM2 | 1 | 15 | K562 |
| SNHG3 | PKN1 | 1 | 19 | K562 |
| SNHG3 | PLEKHA4 | 1 | 19 | K562 |
| SNHG3 | PLEKHA4 | 1 | 19 | K562 |
| SNHG3 | POLE | 1 | 12 | K562 |
| SNHG3 | POLE | 1 | 12 | K562 |
| SNHG3 | POLE2 | 1 | 14 | K562 |
| SNHG3 | PPA1 | 1 | 10 | K562 |
| SNHG3 | PPM1B | 1 | 2 | K562 |
| SNHG3 | PPM1B | 1 | 2 | K562 |
| SNHG3 | PRAME | 1 | 22 | K562 |
| SNHG3 | PRAME | 1 | 22 | K562 |
| SNHG3 | PRAME | 1 | 22 | K562 |
| SNHG3 | PRKCB | 1 | 16 | K562 |
| SNHG3 | PRKCB | 1 | 16 | K562 |
| SNHG3 | PRKDC | 1 | 8 | K562 |
| SNHG3 | PRMT5 | 1 | 14 | K562 |
| SNHG3 | PRPF3 | 1 | 1 | K562 |
| SNHG3 | PRPF6 | 1 | 20 | K562 |
| SNHG3 | PRPF6 | 1 | 20 | K562 |
| SNHG3 | PRR13 | 1 | 12 | K562 |
| SNHG3 | PRR13 | 1 | 12 | K562 |
| SNHG3 | PSMA1 | 1 | 11 | K562 |
| SNHG3 | PSMA1 | 1 | 11 | K562 |
| SNHG3 | PSMD4 | 1 | 1 | K562 |
| SNHG3 | PSMD4 | 1 | 1 | K562 |
| SNHG3 | PSMD4 | 1 | 1 | K562 |
| SNHG3 | PSMG3 | 1 | 7 | K562 |
| SNHG3 | PSMG3 | 1 | 7 | K562 |
| SNHG3 | PTCD3 | 1 | 2 | K562 |
| SNHG3 | PUS7 | 1 | 7 | K562 |
| SNHG3 | PUS7 | 1 | 7 | K562 |
| SNHG3 | QRICH2 | 1 | 17 | K562 |
| SNHG3 | RANBP1 | 1 | 22 | K562 |
| SNHG3 | RANBP1 | 1 | 22 | K562 |
| SNHG3 | RBM16 | 1 | 6 | K562 |
| SNHG3 | RBM16 | 1 | 6 | K562 |
| SNHG3 | RBM39 | 1 | 20 | K562 |
| SNHG3 | RBM39 | 1 | 20 | K562 |
| SNHG3 | RBM39 | 1 | 20 | K562 |
| SNHG3 | RFWD2 | 1 | 1 | K562 |
| SNHG3 | RHAG | 1 | 6 | K562 |
| SNHG3 | RHAG | 1 | 6 | K562 |
| SNHG3 | RHAG | 1 | 6 | K562 |
| SNHG3 | RHAG | 1 | 6 | K562 |
| SNHG3 | RHEB | 1 | 7 | K562 |
| SNHG3 | RHOA | 1 | 3 | K562 |
| SNHG3 | RNASEH1 | 1 | 2 | K562 |
| SNHG3 | RNF149 | 1 | 2 | K562 |
| SNHG3 | RNF149 | 1 | 2 | K562 |
| SNHG3 | RNF4 | 1 | 4 | K562 |
| SNHG3 | RNF4 | 1 | 4 | K562 |
| SNHG3 | RPL17 | 1 | 18 | K562 |
| SNHG3 | RPL18A | 1 | 19 | K562 |
| SNHG3 | RPL22 | 1 | 1 | K562 |
| SNHG3 | RPL23 | 1 | 17 | K562 |
| SNHG3 | RPL23 | 1 | 17 | K562 |
| SNHG3 | RPL23 | 1 | 17 | K562 |
| SNHG3 | RPL3 | 1 | 22 | K562 |
| SNHG3 | RPL3 | 1 | 22 | K562 |
| SNHG3 | RPL30 | 1 | 8 | K562 |
| SNHG3 | RPL30 | 1 | 8 | K562 |
| SNHG3 | RPL4 | 1 | 15 | K562 |
| SNHG3 | RPL4 | 1 | 15 | K562 |
| SNHG3 | RPL5 | 1 | 1 | K562 |
| SNHG3 | RPN2 | 1 | 20 | K562 |
| SNHG3 | RPN2 | 1 | 20 | K562 |
| SNHG3 | RPS18 | 1 | 6 | K562 |
| SNHG3 | RPS3 | 1 | 11 | K562 |
| SNHG3 | RPS3 | 1 | 11 | K562 |
| SNHG3 | RPS5 | 1 | 19 | K562 |
| SNHG3 | RPS5 | 1 | 19 | K562 |
| SNHG3 | RPS6KC1 | 1 | 1 | K562 |
| SNHG3 | SAGE1 | 1 | 23 | K562 |
| SNHG3 | SDHB | 1 | 1 | K562 |
| SNHG3 | SDHB | 1 | 1 | K562 |
| SNHG3 | SEC24B | 1 | 4 | K562 |
| SNHG3 | SEC24B | 1 | 4 | K562 |
| SNHG3 | SENP3 | 1 | 17 | K562 |
| SNHG3 | SENP3 | 1 | 17 | K562 |
| SNHG3 | SENP3 | 1 | 17 | K562 |
| SNHG3 | 2-Sep | 1 | 2 | K562 |
| SNHG3 | 2-Sep | 1 | 2 | K562 |
| SNHG3 | SERPINB6 | 1 | 6 | K562 |
| SNHG3 | SERPINB6 | 1 | 6 | K562 |
| SNHG3 | SETX | 1 | 9 | K562 |
| SNHG3 | SF3B3 | 1 | 16 | K562 |
| SNHG3 | SF3B3 | 1 | 16 | K562 |
| SNHG3 | SHPK | 1 | 17 | K562 |
| SNHG3 | SIKE1 | 1 | 1 | K562 |
| SNHG3 | SIKE1 | 1 | 1 | K562 |
| SNHG3 | SKI | 1 | 1 | K562 |
| SNHG3 | SLC38A10 | 1 | 17 | K562 |
| SNHG3 | SMARCAD1 | 1 | 4 | K562 |
| SNHG3 | SMARCC1 | 1 | 3 | K562 |
| SNHG3 | SMARCC1 | 1 | 3 | K562 |
| SNHG3 | SMC6 | 1 | 2 | K562 |
| SNHG3 | SMC6 | 1 | 2 | K562 |
| SNHG3 | SNHG12 | 1 | 1 | K562 |
| SNHG3 | SNHG12 | 1 | 1 | K562 |
| SNHG3 | SNORD1C | 1 | 17 | K562 |
| SNHG3 | SNRPD3 | 1 | 22 | K562 |
| SNHG3 | SNRPD3 | 1 | 22 | K562 |
| SNHG3 | SON | 1 | 21 | K562 |
| SNHG3 | SON | 1 | 21 | K562 |
| SNHG3 | SON | 1 | 21 | K562 |
| SNHG3 | SP1 | 1 | 12 | K562 |
| SNHG3 | SPTA1 | 1 | 1 | K562 |
| SNHG3 | SPTA1 | 1 | 1 | K562 |
| SNHG3 | SRP54 | 1 | 14 | K562 |
| SNHG3 | SRP54 | 1 | 14 | K562 |
| SNHG3 | SRP72 | 1 | 4 | K562 |
| SNHG3 | SRP72 | 1 | 4 | K562 |
| SNHG3 | SRSF1 | 1 | 17 | K562 |
| SNHG3 | SRSF11 | 1 | 1 | K562 |
| SNHG3 | SRSF11 | 1 | 1 | K562 |
| SNHG3 | STAG2 | 1 | 23 | K562 |
| SNHG3 | STAG2 | 1 | 23 | K562 |
| SNHG3 | STAT5B | 1 | 17 | K562 |
| SNHG3 | STAT5B | 1 | 17 | K562 |
| SNHG3 | STAT5B | 1 | 17 | K562 |
| SNHG3 | STIL | 1 | 1 | K562 |
| SNHG3 | STIL | 1 | 1 | K562 |
| SNHG3 | STIP1 | 1 | 11 | K562 |
| SNHG3 | STK3 | 1 | 8 | K562 |
| SNHG3 | STRBP | 1 | 9 | K562 |
| SNHG3 | STRBP | 1 | 9 | K562 |
| SNHG3 | STRBP | 1 | 9 | K562 |
| SNHG3 | TAF12 | 1 | 1 | K562 |
| SNHG3 | TAF12 | 1 | 1 | K562 |
| SNHG3 | TAF12 | 1 | 1 | K562 |
| SNHG3 | TBCA | 1 | 5 | K562 |
| SNHG3 | TBCA | 1 | 5 | K562 |
| SNHG3 | TCF25 | 1 | 16 | K562 |
| SNHG3 | TCP1 | 1 | 6 | K562 |
| SNHG3 | TCP1 | 1 | 6 | K562 |
| SNHG3 | TFPI | 1 | 2 | K562 |
| SNHG3 | TFPI | 1 | 2 | K562 |
| SNHG3 | TOPBP1 | 1 | 3 | K562 |
| SNHG3 | TOPBP1 | 1 | 3 | K562 |
| SNHG3 | TRAP1 | 1 | 16 | K562 |
| SNHG3 | TRAP1 | 1 | 16 | K562 |
| SNHG3 | TRIM33 | 1 | 1 | K562 |
| SNHG3 | TRIM33 | 1 | 1 | K562 |
| SNHG3 | TRNAU1AP | 1 | 1 | K562 |
| SNHG3 | TRNAU1AP | 1 | 1 | K562 |
| SNHG3 | TRNAU1AP | 1 | 1 | K562 |
| SNHG3 | TRNAU1AP | 1 | 1 | K562 |
| SNHG3 | TSR1 | 1 | 17 | K562 |
| SNHG3 | TTC17 | 1 | 11 | K562 |
| SNHG3 | TTC17 | 1 | 11 | K562 |
| SNHG3 | TYW1 | 1 | 7 | K562 |
| SNHG3 | U2AF1 | 1 | 21 | K562 |
| SNHG3 | U2AF1 | 1 | 21 | K562 |
| SNHG3 | UAP1 | 1 | 1 | K562 |
| SNHG3 | UAP1 | 1 | 1 | K562 |
| SNHG3 | UBAP2 | 1 | 9 | K562 |
| SNHG3 | UBAP2 | 1 | 9 | K562 |
| SNHG3 | UBAP2 | 1 | 9 | K562 |
| SNHG3 | UBAP2 | 1 | 9 | K562 |
| SNHG3 | UBB | 1 | 17 | K562 |
| SNHG3 | UBE2I | 1 | 16 | K562 |
| SNHG3 | UBE2I | 1 | 16 | K562 |
| SNHG3 | UBE3C | 1 | 7 | K562 |
| SNHG3 | UBE3C | 1 | 7 | K562 |
| SNHG3 | UBR5 | 1 | 8 | K562 |
| SNHG3 | UCHL5 | 1 | 1 | K562 |
| SNHG3 | UCHL5 | 1 | 1 | K562 |
| SNHG3 | UIMC1 | 1 | 5 | K562 |
| SNHG3 | USP48 | 1 | 1 | K562 |
| SNHG3 | UTP6 | 1 | 17 | K562 |
| SNHG3 | WDHD1 | 1 | 14 | K562 |
| SNHG3 | WDHD1 | 1 | 14 | K562 |
| SNHG3 | WDR43 | 1 | 2 | K562 |
| SNHG3 | WDR43 | 1 | 2 | K562 |
| SNHG3 | WHSC1 | 1 | 4 | K562 |
| SNHG3 | WHSC1 | 1 | 4 | K562 |
| SNHG3 | XPO1 | 1 | 2 | K562 |
| SNHG3 | YLPM1 | 1 | 14 | K562 |
| SNHG3 | YLPM1 | 1 | 14 | K562 |
| SNHG3 | YY1AP1 | 1 | 1 | K562 |
| SNHG3 | ZBED5 | 1 | 11 | K562 |
| SNHG3 | ZBTB8OS | 1 | 1 | K562 |
| SNHG3 | ZBTB8OS | 1 | 1 | K562 |
| SNHG3 | ZCCHC7 | 1 | 9 | K562 |
| SNHG3 | ZCCHC7 | 1 | 9 | K562 |
| SNHG3 | ZCCHC7 | 1 | 9 | K562 |
| SNHG3 | ZFR | 1 | 5 | K562 |
| SNHG3 | ZNF431 | 1 | 19 | K562 |
| SNHG3 | ZNF431 | 1 | 19 | K562 |
| SNHG3 | ZNF638 | 1 | 2 | K562 |
| SNHG3 | ZNF713 | 1 | 7 | K562 |
| SNHG3 | ZNF713 | 1 | 7 | K562 |
| SNHG3 | ZNF713 | 1 | 7 | K562 |
| SNHG4 | AGPS | 5 | 2 | K562 |
| SNHG4 | AGPS | 5 | 2 | K562 |
| SNHG4 | ATXN2 | 5 | 12 | K562 |
| SNHG4 | GNAS | 5 | 20 | K562 |
| SNHG4 | GTF2I | 5 | 7 | K562 |
| SNHG4 | NS3BP | 5 | 11 | K562 |
| SNHG4 | NS3BP | 5 | 11 | K562 |
| SNHG4 | PICALM | 5 | 11 | K562 |
| SNHG4 | PICALM | 5 | 11 | K562 |
| SNHG4 | PSMD1 | 5 | 2 | K562 |
| SNHG4 | RPS27A | 5 | 2 | K562 |
| SNHG4 | RPS27A | 5 | 2 | K562 |
| SNHG4 | RRN3P3 | 5 | 16 | K562 |
| SNHG4 | SKP1 | 5 | 5 | K562 |
| SNHG4 | TMEM66 | 5 | 8 | K562 |
| SNHG4 | UBE2K | 5 | 4 | K562 |
| SNHG4 | UBE2K | 5 | 4 | K562 |
| SNHG4 | UBE4B | 5 | 1 | K562 |
| SNHG4 | UBE4B | 5 | 1 | K562 |
| SUSD1 | HSDL2 | 9 | 9 | K562 |
| SUSD1 | HSDL2 | 9 | 9 | K562 |
| SUSD1 | HSDL2 | 9 | 9 | K562 |
| SUSD1 | KIAA0368 | 9 | 9 | K562 |
| SUSD1 | KIAA0368 | 9 | 9 | K562 |
| SUSD1 | ROD1 | 9 | 9 | K562 |
| SUSD1 | ROD1 | 9 | 9 | K562 |
| TAF1 | HP1BP3 | 11 | 1 | K562 |
| TAF1 | HP1BP3 | 11 | 1 | K562 |
| TAF1 | PICALM | 11 | 11 | K562 |
| TAF1 | PICALM | 11 | 11 | K562 |
| TAF1 | PRPSAP2 | 11 | 17 | K562 |
| TAF1 | PSMA1 | 11 | 11 | K562 |
| TAF1 | PSMA1 | 11 | 11 | K562 |
| CPSF6 | BAGE3 | 12 | 21 | MCF7 |
| CPSF6 | BAGE3 | 12 | 21 | MCF7 |
| CPSF6 | C14orf135 | 12 | 14 | MCF7 |
| CPSF6 | CCT2 | 12 | 12 | MCF7 |
| CPSF6 | CNOT2 | 12 | 12 | MCF7 |
| CPSF6 | CSNK1D | 12 | 17 | MCF7 |
| CPSF6 | HNRPDL | 12 | 4 | MCF7 |
| CPSF6 | IVNS1ABP | 12 | 1 | MCF7 |
| CPSF6 | LYZ | 12 | 12 | MCF7 |
| CPSF6 | LYZ | 12 | 12 | MCF7 |
| CPSF6 | LYZ | 12 | 12 | MCF7 |
| CPSF6 | MDM2 | 12 | 12 | MCF7 |
| CPSF6 | NUP107 | 12 | 12 | MCF7 |
| CPSF6 | PGBD2 | 12 | 1 | MCF7 |
| CPSF6 | RPL3 | 12 | 22 | MCF7 |
| CPSF6 | RPL30 | 12 | 8 | MCF7 |
| CPSF6 | RPL30 | 12 | 8 | MCF7 |
| CPSF6 | SPG7 | 12 | 16 | MCF7 |
| NCOA3 | BCAS3 | 20 | 17 | MCF7 |
| NCOA3 | BCAS3 | 20 | 17 | MCF7 |
| NCOA3 | GNAS | 20 | 20 | MCF7 |
| NCOA3 | H3F3A | 20 | 1 | MCF7 |
| NCOA3 | H3F3A | 20 | 1 | MCF7 |
| NCOA3 | NPL | 20 | 1 | MCF7 |
| NCOA3 | TRIM33 | 20 | 1 | MCF7 |
| NOC4L | CNIH4 | 12 | 1 | MCF7 |
| NOC4L | EEF1D | 12 | 8 | MCF7 |
| NOC4L | FBRSL1 | 12 | 12 | MCF7 |
| NOC4L | FBRSL1 | 12 | 12 | MCF7 |
| NOC4L | FBRSL1 | 12 | 12 | MCF7 |
| NOC4L | PTDSS2 | 12 | 11 | MCF7 |
| NOC4L | PTDSS2 | 12 | 11 | MCF7 |
| NOC4L | PXMP2 | 12 | 12 | MCF7 |
| NOC4L | TMEM8A | 12 | 16 | MCF7 |
| NOC4L | ULK1 | 12 | 12 | MCF7 |
| SNHG3 | C2orf24 | 1 | 2 | MCF7 |
| SNHG3 | CCT3 | 1 | 1 | MCF7 |
| SNHG3 | CHAF1A | 1 | 19 | MCF7 |
| SNHG3 | CRAMP1L | 1 | 16 | MCF7 |
| SNHG3 | CRAMP1L | 1 | 16 | MCF7 |
| SNHG3 | DNAJC11 | 1 | 1 | MCF7 |
| SNHG3 | GGPS1 | 1 | 1 | MCF7 |
| SNHG3 | GNAS | 1 | 20 | MCF7 |
| SNHG3 | GTPBP4 | 1 | 10 | MCF7 |
| SNHG3 | LOC641298 | 1 | 16 | MCF7 |
| SNHG3 | MFF | 1 | 2 | MCF7 |
| SNHG3 | MYBL2 | 1 | 20 | MCF7 |
| SNHG3 | NDUFS1 | 1 | 2 | MCF7 |
| SNHG3 | PDS5A | 1 | 4 | MCF7 |
| SNHG3 | PDS5A | 1 | 4 | MCF7 |
| SNHG3 | PRPF3 | 1 | 1 | MCF7 |
| SNHG3 | PRPF6 | 1 | 20 | MCF7 |
| SNHG3 | PSMB2 | 1 | 1 | MCF7 |
| SNHG3 | QRICH2 | 1 | 17 | MCF7 |
| SNHG3 | RNASEH1 | 1 | 2 | MCF7 |
| SNHG3 | SERINC2 | 1 | 1 | MCF7 |
| SNHG3 | SLC38A10 | 1 | 17 | MCF7 |
| SNHG3 | SYAP1 | 1 | 23 | MCF7 |
| SNHG3 | SYAP1 | 1 | 23 | MCF7 |
| SNHG3 | TCF25 | 1 | 16 | MCF7 |
| SNHG3 | TRNAU1AP | 1 | 1 | MCF7 |
| SNHG3 | U2AF1 | 1 | 21 | MCF7 |
| SNHG3 | UIMC1 | 1 | 5 | MCF7 |
| SNHG3 | YIPF1 | 1 | 1 | MCF7 |
| TANC2 | CA4 | 17 | 17 | MCF7 |
| TANC2 | CA4 | 17 | 17 | MCF7 |
| TANC2 | CA4 | 17 | 17 | MCF7 |
| TANC2 | CA4 | 17 | 17 | MCF7 |
| TANC2 | CA4 | 17 | 17 | MCF7 |
| TANC2 | CA4 | 17 | 17 | MCF7 |
| TANC2 | FAF1 | 17 | 1 | MCF7 |
| TANC2 | GNAI3 | 17 | 1 | MCF7 |
| TANC2 | MRC2 | 17 | 17 | MCF7 |
| TANC2 | MRC2 | 17 | 17 | MCF7 |
| TANC2 | MRC2 | 17 | 17 | MCF7 |
| TANC2 | PVT1 | 17 | 8 | MCF7 |
| SNHG3 | AKR1A1 | 1 | 1 | SJCRH30 |
| SNHG3 | CCDC18 | 1 | 1 | SJCRH30 |
| SNHG3 | GNB2L1 | 1 | 5 | SJCRH30 |
| SNHG3 | KIF1B | 1 | 1 | SJCRH30 |
| SNHG3 | MORF4L2 | 1 | 23 | SJCRH30 |
| SNHG3 | MTOR | 1 | 1 | SJCRH30 |
| SNHG3 | NDUFAF4 | 1 | 6 | SJCRH30 |
| SNHG3 | OSBPL2 | 1 | 20 | SJCRH30 |
| SNHG3 | RPL5 | 1 | 1 | SJCRH30 |
| SNHG3 | SMARCC1 | 1 | 3 | SJCRH30 |
| SNHG3 | ZFR | 1 | 5 | SJCRH30 |
| LOC375010 | DCUN1D4 | 1 | 4 | SK-N-SH |
| LOC375010 | DCUN1D4 | 1 | 4 | SK-N-SH |
| LOC375010 | GOLGA8B | 1 | 15 | SK-N-SH |
| LOC375010 | PIK3C3 | 1 | 18 | SK-N-SH |
| LOC375010 | PVT1 | 1 | 8 | SK-N-SH |
| LOC375010 | ZFR | 1 | 5 | SK-N-SH |
| PPP1R12C | AKT2 | 19 | 19 | SK-N-SH |
| PPP1R12C | C19orf6 | 19 | 19 | SK-N-SH |
| PPP1R12C | CIRBP | 19 | 19 | SK-N-SH |
| PPP1R12C | FKBP8 | 19 | 19 | SK-N-SH |
| PPP1R12C | GPC1 | 19 | 2 | SK-N-SH |
| PPP1R12C | HMGA2 | 19 | 12 | SK-N-SH |
| PPP1R12C | PNCK | 19 | 23 | SK-N-SH |
| PRKAR1B | FAM20C | 7 | 7 | SK-N-SH |
| PRKAR1B | MAFK | 7 | 7 | SK-N-SH |
| PRKAR1B | PDGFA | 7 | 7 | SK-N-SH |
| PRKAR1B | SUN1 | 7 | 7 | SK-N-SH |
| PRKAR1B | SUN1 | 7 | 7 | SK-N-SH |
| SNHG3 | ATP6V1G2 | 1 | 6 | SK-N-SH |
| SNHG3 | C11orf73 | 1 | 11 | SK-N-SH |
| SNHG3 | CWF19L1 | 1 | 10 | SK-N-SH |
| SNHG3 | DCI | 1 | 16 | SK-N-SH |
| SNHG3 | FSD1 | 1 | 19 | SK-N-SH |
| SNHG3 | HNRNPC | 1 | 14 | SK-N-SH |
| SNHG3 | NMNAT1 | 1 | 1 | SK-N-SH |
| SNHG3 | PDS5A | 1 | 4 | SK-N-SH |
| SNHG3 | RPLP0 | 1 | 12 | SK-N-SH |
| SNHG3 | SENP3 | 1 | 17 | SK-N-SH |
| SNHG3 | STIP1 | 1 | 11 | SK-N-SH |
| SNHG3 | TRNAU1AP | 1 | 1 | SK-N-SH |

[0137] We have discovered a total of 98 such natural networks in 14 different cell lines (FIG. 21e). Table 9 has shown that there are 40 5′ natural networks in 10 cancer cell lines. And Table 8 has shown 58 3′ natural networks in 11 cancer cell lines. From Tables 8 and 9, we have observed that seven cell lines have both 5′ and 3′ networks. K562 cells have the most networks among the cancer cell lines, which have 30 such networks (10 5′ natural networks and 20 3′ natural networks) and count for 30% of the total identified natural networks. There is no doubt that K562 large RNA-seq datasets have contributed such abundant networks. However, the dataset sizes are not the dominate factor of identification of natural networks since both MCF-7 and SK-N-SH have much larger sequence datasets than K562 one (FIG. 4a). They have only 9 and 7 such natural networks, respectively. This suggests that such natural networks are characteristics of cancer types.

[0138] As shown in Tables 8 and 9, we have compared 5′ and 3′ natural networks. Tables 8 and 9 have shown that there are significant differences between the 5′ and 3′ natural networks. These differences suggest that these natural networks of fusion transcripts may play very roles in cellular functions.

[0139] Table 8 has shown that the 3′ most abundant network is involved with GNAS, which has highly complex imprinted expression pattern for guanine nucleotide regulatory protein and has been found to be associated with progressive osseous heteroplasia, and gnas hyperfunction. The GNAS natural networks have been found in 9 out of 11 cell lines.

[0140] Table 9 has shown that the most abundant 5′ network is the one generated by SNHG3 and has been found in 9 out of 10 cancer cell lines. It is not surprising that Table 9 has shown that many genes for non-coding RNAs such as MIR17HG, DANCR (KIAA0114) and MCM3APAS have formed networks with other genes. The natural networks formed by non-coding RNAs have raised very possibilities that observed functions of many non-coding RNAs, such as mirRNAs (Ameres and Zamore 2013), are not functions of a single MIR gene, but the network formed by a non-coding RNA gene in certain cell types under certain different environments.

[0141] As seen from above discussions, we have proposed that none-coding RNAs have organized networks to regulate large numbers of genes and to have more powerful roles in regulating multiple cellular functions in cell lines. We have selected the some non-coding RNA fusion transcripts for validations, one of which has been validated as shown in Table 4. FIG. 22 has shown a schematic presentation of procedures to verify ncRNA00188|GNAI3 fusion transcripts. ncRNA00188 is non-coding RNA gene and is affiliated with the antisense RNA class. It has been known that GNAI3 gene coding for guanine nucleotide binding protein alpha inhibiting activity polypeptide 3, is associated with autosomal dominant Auriculocondylar syndrome (ARCND) and plays significant role in regulating downstream targets of the G protein-coupled endothelin receptor pathway (Oldham, et al. 2006). As shown in FIG. 22, ncRNA00188|GNAI3 fusion transcripts have first been detected in lymphoblastoid cells GM12878. FIG. 22a shows that ncRNA00188 gene on the chromosome 17 and GNAI3 gene on the chromosome 1 have been brought together via translocation. Solid angle lines and dashed dots represent introns and gaps, respectively. Since read-though allows the generating fusion transcripts, it is not necessary that fusion genes may not have to be truncated and may be just close to each other. The total RNAs have been isolated from lymphoblastoid cells GM12878. FIG. 22b has shown that junction sequences of ncRNA00188 and GNAI3 fusion junctions. Pre-mRNA splicing removes putative intron sequences to generate ncRNA00188|GNAI3 fusion transcripts. The primers based on fusion transcripts have been designed to amply ncRNA00188|GNAI3 cDNAs. FIG. 22c shows that the ncRNA00188|GNAI3 fusion transcript is amplified by RT-PCR. cDNA fragments are then cloned into pCR4-TOPO clone vector. The positive clones are sequenced. The fusion transcripts are verified by blast and visual inspections. FIG. 22c has shown the splice junctions of ncRNA00188|GNAI3 fusion transcripts. Arrow indicates splice junction sequences of the ncRNA00188|GNAI3 fusion transcripts. This has confirmed that the lymphoblastoid cells express non-coding RNA ncRNA00188|GNAI3 fusion transcripts. More systematic researches are required in the future to understand how these non-coding RNA fusion transcripts are regulated and expressed and to elucidate how these non-coding RNA fusion transcripts constitute natural networks to control and regulate the cell functions and how these natural networks transform the normal cells into cancer cells.

### REFERENCES CITED

[0142] Mitelman F, Johansson B, Mertens F. 2015. Mitelman Database of Chromosome Aberrations and Gene Fusions in Cancer (2015). http://cgap.nci.nih.gov/Chromosomes/Mitelman.
[0143] Klijn C, Durinck S, Stawiski E W, Haverty P M, Jiang Z, Liu H, Degenhardt J, Mayba O, Gnad F, Liu J, Pau G, Reeder J, Cao Y, Mukhyala K, Selvaraj S K, Yu M, Zynda G J, Brauer M J, Wu T D, Gentleman R C, Manning G, Yauch R L, Bourgon R, Stokoe D, Modrusan Z, Neve R M, de Sauvage F J, Settleman J, Seshagiri S, Zhang Z. 2015. A comprehensive transcriptional portrait of human cancer cell lines. Nat Biotechnol 33: 306-312.
[0144] Robinson D R, Kalyana-Sundaram S, Wu Y M, Shankar S, Cao X, Ateeq B, Asangani I A, Iyer M, Maher C A, Grasso C S, Lonigro R J, Quist M, Siddiqui J, Mehra R, Jing X, Giordano T J, Sabel M S, Kleer C G, Palanisamy N, Natrajan R, Lambros M B, Reis-Filho J S, Kumar-Sinha C, Chinnaiyan A M. 2011. Functionally recurrent rearrangements of the MAST kinase and Notch gene families in breast cancer. Nat Med 17: 1646-1651.
[0145] Sakarya O, Breu H, Radovich M, Chen Y, Wang Y N, Barbacioru C, Utiramerur S, Whitley P P, Brockman J P, Vatta P, Zhang Z, Popescu L, Muller M W, Kudlingar V, Garg N, Li C Y, Kong B S, Bodeau J P, Nutter R C, Gu J, Bramlett K S, Ichikawa J K, Hyland F C, Siddiqui A S. 2012. RNA-Seq mapping and detection of gene fusions with a suffix array algorithm. PLoS Comput Biol 8: e1002464.
[0146] Maher C A, Kumar-Sinha C, Cao X, Kalyana-Sundaram S, Han B, Jing X, Sam L, Barrette T, Palanisamy N, Chinnaiyan A M. 2009. Transcriptome sequencing to detect gene fusions in cancer. Nature 458: 97-101.
[0147] Zhao Q, Caballero O L, Levy S, Stevenson B J, Iseli C, de Souza S J, Galante P A, Busam D, Leversha M A, Chadalavada K, Rogers Y H, Venter J C, Simpson A J, Strausberg R L. 2009. Transcriptome-guided characterization of genomic rearrangements in a breast cancer cell line. Proc Natl Acad Sci USA 106: 1886-1891.
[0148] Maher C A, Palanisamy N, Brenner J C, Cao X, Kalyana-Sundaram S, Luo S, Khrebtukova I, Barrette T R, Grasso C, Yu J, Lonigro R J, Schroth G, Kumar-Sinha C, Chinnaiyan A M. 2009. Chimeric transcript discovery by paired-end transcriptome sequencing. Proc Natl Acad Sci USA.
[0149] Edgren H, Murumagi A, Kangaspeska S, Nicorici D, Hongisto V, Kleivi K, Rye I H, Nyberg S, Wolf M, Borresen-Dale A L, Kallioniemi O. 2011. Identification of fusion genes in breast cancer by paired-end RNA-sequencing. Genome Biol 12: R6.
[0150] Kim D, Salzberg S L. 2011. TopHat-Fusion: an algorithm for discovery of novel fusion transcripts. Genome Biol 12: R72.
[0151] Varley K E, Gertz J, Roberts B S, Davis N S, Bowling K M, Kirby M K, Nesmith A S, Oliver P G, Grizzle W E, Forero A, Buchsbaum D J, LoBuglio A F, Myers R M. 2014. Recurrent read-through fusion transcripts in breast cancer. Breast Cancer Res Treat 146: 287-297.
[0152] ENCODE. 2015. http://encodeprojectorg/.
[0153] ENA. 2014. http://www.ebi.ac.uk/ena.
[0154] NCBI. 2014. http://www.ncbi.nlm.nih.gov/.
[0155] Zhuo D, Madden R, Elela S A, Chabot B. 2007. Modern origin of numerous alternatively spliced human introns from tandem arrays. Proc Natl Acad Sci USA 104: 882-886.
[0156] Zhuo D, Cao W, Zhu S, Dong C, Glass ADM. 2012. Deciphoring Splicing Codes of Spliceosomal Intron. Int Conf BioInformatocs and Computational Biology 1: 521-527.
[0157] ACEVIEW. 2010. http://www.ncbi.nlm.nih.gov/IEB/Research/Acembly/Download/Downloads.html. UCSC. 2014. http://hgdownload.soe.ucsc.edu/downloads.html.
[0158] Thierry-Mieg D, Thierry-Mieg J. 2006. AceView: a comprehensive cDNA-supported gene and transcripts annotation. Genome Biol 7 Suppl 1: S12 11-14.
[0159] An integrated encyclopedia of DNA elements in the human genome. Nature 489: 57-74.
[0160] SCILIFELAB. 2015. http://www.scilifelab.se/
[0161] Yoshihara K, Wang Q, Torres-Garcia W, Zheng S, Vegesna R, Kim H, Verhaak R G. 2014. The landscape and therapeutic relevance of cancer-associated transcript fusions. Oncogene.
[0162] Asmann Y W, Necela B M, Kalari K R, Hossain A, Baker T R, Carr J M, Davis C, Getz J E, Hostetter G, Li X, McLaughlin S A, Radisky D C, Schroth G P, Cunliffe H E, Perez E A, Thompson E A. 2012. Detection of redundant fusion transcripts as biomarkers or disease-specific therapeutic targets in breast cancer. Cancer Res 72: 1921-1928.
[0163] Giacomini C P, Sun S, Varma S, Shain A H, Giacomini M M, Balagtas J, Sweeney R T, Lai E, Del Vecchio C A, Forster A D, Clarke N, Montgomery K D, Zhu S, Wong A J, van de Rijn M, West R B, Pollack J R. Breakpoint analysis of transcriptional and genomic profiles uncovers novel gene fusions spanning multiple human cancer types. PLoS Genet 9: e1003464.
[0164] Giacomini C P, Sun S, Varma S, Shain A H, Giacomini M M, Balagtas J, Sweeney R T, Lai E, Del Vecchio C A, Forster A D, Clarke N, Montgomery K D, Zhu S, Wong A J, van de Rijn M, West R B, Pollack J R. 2013. Breakpoint analysis of transcriptional and genomic profiles uncovers novel gene fusions spanning multiple human cancer types. PLoS Genet 9: e1003464.
[0165] Mercer T R, Clark M B, Crawford J, Brunck M E, Gerhardt D J, Taft R J, Nielsen L K, Dinger M E, Mattick J S. 2014. Targeted sequencing for gene discovery and quantification using RNA CaptureSeq. Nat Protoc 9: 989-1009.
[0166] SDG. 2015. http://www.yeastgenome.org
[0167] Porrua O, Libri D. 2015. Transcription termination and the control of the transcriptome: why, where and how to stop. Nat Rev Mol Cell Biol 16: 190-202.
[0168] ERP010142 SI. 2015. http://www.ebi.ac.uk/ena/data/view/ERP010142.
[0169] Kinsella M, Harismendy O, Nakano M, Frazer K A, Bafna V. 2011. Sensitive gene fusion detection using ambiguously mapping RNA-Seq read pairs. Bioinformatics 27: 1068-1075.
[0170] Koolen D A, Vissers L E, Pfundt R, de Leeuw N, Knight S J, Regan R, Kooy R F, Reyniers E, Romano C, Fichera M, Schinzel A, Baumer A, Anderlid B M, Schoumans J, Knoers N V, van Kessel A G, Sistermans E A, Veltman J A, Brunner H G, de Vries B B. 2006. A new chromosome 17q21.31 microdeletion syndrome associated with a common inversion polymorphism. Nat Genet 38: 999-1001.
[0171] de Jong S, Chepelev I, Janson E, Strengman E, van den Berg L H, Veldink J H, Ophoff R A. 2012. Common inversion polymorphism at 17q21.31 affects expression of multiple genes in tissue-specific manner. BMC Genomics 13: 458.
[0172] Stefansson H, Helgason A, Thorleifsson G, Steinthorsdottir V, Masson G, Barnard J, Baker A, Jonasdottir A, Ingason A, Gudnadottir V G, Desnica N, Hicks A, Gylfason A, Gudbjartsson D F, Jonsdottir G M, Sainz J, Agnarsson K, Birgisdottir B, Ghosh S, Olafsdottir A, Cazier J B, Kristjansson K, Frigge M L, Thorgeirsson T E, Gulcher J R, Kong A, Stefansson K. 2005. A common inversion under selection in Europeans. Nat Genet 37: 129-137.
[0173] Varley K E, Gertz J, Roberts B S, Davis N S, Bowling K M, Kirby M K, Nesmith A S, Oliver P G, Grizzle W E, Forero A, Buchsbaum D J, LoBuglio A F, Myers R M. Recurrent read-through fusion transcripts in breast cancer. Breast Cancer Res Treat 146: 287-297.
[0174] Rao P N, Li W, Vissers L E, Veltman J A, Ophoff R A. 2010. Recurrent inversion events at 17q21.31 microdeletion locus are linked to the MAPT H2 haplotype. Cytogenet Genome Res 129: 275-279.
[0175] Charlier C, Segers K, Wagenaar D, Karim L, Berghmans S, Jaillon O, Shay T, Weissenbach J, Cockett N, Gyapay G, Georges M. 2001. Human-ovine comparative sequencing of a 250-kb imprinted domain encompassing the callipyge (clpg) locus and identification of six imprinted transcripts: DLK1, DAT, GTL2, PEG11, antiPEG11, and MEG8. Genome Res 11: 850-862.
[0176] Gutschner T, Diederichs S. 2012. The hallmarks of cancer: a long non-coding RNA point of view. RNA Biol 9: 703-719.
[0177] Williams G T, Mourtada-Maarabouni M, Farzaneh F. 2011. A critical role for non-coding RNA GASS in growth arrest and rapamycin inhibition in human T-lymphocytes. Biochem Soc Trans 39: 482-486.
[0178] Tripathi V, Ellis J D, Shen Z, Song D Y, Pan Q, Watt A T, Freier S M, Bennett C F, Sharma A, Bubulya P A, Blencowe B J, Prasanth S G, Prasanth K V. 2010. The nuclear-retained noncoding RNA MALAT1 regulates alternative splicing by modulating S R splicing factor phosphorylation. Mol Cell 39: 925-938.
[0179] Ghoussaini M, Song H, Koessler T, Al Olama A A, Kote-Jarai Z, Driver K E, Pooley K A, Ramus S J, Kjaer S K, Hogdall E, DiCioccio R A, Whittemore A S, Gayther S A, Giles G G, Guy M, Edwards S M, Morrison J, Donovan J L, Hamdy F C, Dearnaley D P, Ardern-Jones A T, Hall A L, O'Brien L T, Gehr-Swain B N, Wilkinson R A, Brown P M, Hopper J L, Neal D E, Pharoah P D, Ponder B A, Eeles R A, Easton D F, Dunning A M. 2008. Multiple loci with different cancer specificities within the 8q24 gene desert. J Natl Cancer Inst 100: 962-966.
[0180] Enwerem, I I, Velma V, Broome H J, Kuna M, Begum R A, Hebert M D. 2014. Coilin association with Box C/D scaRNA suggests a direct role for the Cajal body marker protein in scaRNP biogenesis. Biol Open 3: 240-249.
[0181] An S, Song J J. 2011. The coded functions of noncoding RNAs for gene regulation. Mol Cells 31: 491-496.
[0182] Olive V, Jiang I, He L. 2010. mir-17-92, a cluster of miRNAs in the midst of the cancer network. Int J Biochem Cell Biol 42: 1348-1354.
[0183] Olive V, Li Q, He L. 2013. mir-17-92: a polycistronic oncomir with pleiotropic functions. Immunol Rev 253: 158-166.
[0184] Penna E, Orso F, Taverna D. 2015. miR-214 as a key hub that controls cancer networks: small player, multiple functions. J Invest Dermatol 135: 960-969.
[0185] Pelczar P, Filipowicz W. 1998. The host gene for intronic U17 small nucleolar RNAs in mammals has no protein-coding potential and is a member of the 5′-terminal oligopyrimidine gene family. Mol Cell Biol 18: 4509-4518.
[0186] Guttman M, Donaghey J, Carey B W, Garber M, Grenier J K, Munson G, Young G, Lucas A B, Ach R, Bruhn L, Yang X, Amit I, Meissner A, Regev A, Rinn J L, Root D E, Lander E S. 2011. lincRNAs act in the circuitry controlling pluripotency and differentiation. Nature 477: 295-300.
[0187] Ameres S L, Zamore P D. 2013. Diversifying microRNA sequence and function. Nat Rev Mol Cell Biol 14: 475-488.
[0188] Oldham W M, Van Eps N, Preininger A M, Hubbell W L, Hamm H E. 2006. Mechanism of the receptor-catalyzed activation of heterotrimeric G proteins. Nat Struct Mol Biol 13: 772-777.

The application's sequence listing, which the Patent Office published only in electronic form, follows.

SEQUENCE LISTING (259182 sequences)

SEQ ID NO: 1 - RNA, 71 nt, Homo sapiens
gaagcggcgcccaccggcgggcaacacccgccgcagagaagaaagaagaggcccgaaccaacgccacgaag

SEQ ID NO: 2 - RNA, 57 nt, Homo sapiens
ccaaaacccgcccggaaaggggacaccgggaaagaccagggaaacagggcaagaggc

SEQ ID NO: 3 - RNA, 61 nt, Homo sapiens
aaaccaaggaagacagaggccgaaaggacaagaggcagacacacacccccgagggcgcaga

SEQ ID NO: 4 - RNA, 82 nt, Homo sapiens
ggaagaccaaaaccaggggcaaaggacagacagaaggagaggcaaggaggggaagaagaccagaaggaaaaagcacaacaac

SEQ ID NO: 5 - RNA, 90 nt, Homo sapiens
accgagacccccggccggagccacgcagccgcggcccggagccccggggcggcggacggccgcgggcaggcagcagcaaggacaagagga

SEQ ID NO: 6 - RNA, 77 nt, Homo sapiens
accccgaccaccacagacagacagccccccaagaaaggaacgcgaaggaaagcagacaagacacaagcgagagccaa

SEQ ID NO: 7 - RNA, 81 nt, Homo sapiens
ccaaggaccccgcccagcccccgagaccgagaagcccagcgcagccaggagagcagggacgccggcgaacgcagaccacca

SEQ ID NO: 8 - RNA, 74 nt, Homo sapiens
cggccacccccgggaagagaaaaagagcggggccaggacccggcaaaggcgcggagggcagcggaccagccaca

SEQ ID NO: 9 - RNA, 79 nt, Homo sapiens
gcaaaagccaacacgcaccgcaggcacagagaacacaaggaacgaaaggaagggaagaagcagaaccaagacaaaagaa

SEQ ID NO: 10 - RNA, 79 nt, Homo sapiens
gccgaagaagaaccgcgagccgacaacgcccagcgccacgcagaaccaaccgaccagcagaagggagaagagagggggc

SEQ ID NO: 11 - RNA, 75 nt, Homo sapiens
ccgcgcccgccgcgggagagaggacccccccccccccccaagagaagacggaacaagaaaggaccaggagccccg

SEQ ID NO: 12 - RNA, 78 nt, Homo sapiens
agccaccagcagcccccagagcgggaccacaggcccccccgaagacgggagcacgaacacgaccggcccagcgcaccg

SEQ ID NO: 13 - RNA, 56 nt, Homo sapiens
caaaagaaaagaaccgggaaagcccaacggaagaaccggcaccggaagaaaaggga

SEQ ID NO: 14 - RNA, 77 nt, Homo sapiens
aacacgcggcaagccaacgacacaccagggaagcagacgaggaaaggcacacggagcaaccacgaagaccgggcgcc

SEQ ID NO: 15 - RNA, 70 nt, Homo sapiens
cggggcagcgagcgggcaggagcgagggccgggaggaagaaacccccacgcaagggagcaaaaggccagg

SEQ ID NO: 16 - RNA, 79 nt, Homo sapiens
gaccacggcgggcgcgaccgggcggcccgggggggcgggcgcagcgcggacagaggcacccaaagaagaaagaaagagg

SEQ ID NO: 17 - RNA, 78 nt, Homo sapiens
gaacccaaaggaaaagcgaccaggccggacccaagccagaagcccgcaaagcccccagaccgcagaaacagacaacgc

SEQ ID NO: 18 - RNA, 80 nt, Homo sapiens
cgacgacagaacccgacaagaagcacgaacagcaggccaaagaccagagccggagggacacacacgcaagccgcccgcag

SEQ ID NO: 19 - RNA, 72 nt, Homo sapiens
cccggagaaccccacggagaaccagaggcaccccgggaggacaggcaacacacggccgggggcggggccccc

SEQ ID NO: 20 - RNA, 71 nt, Homo sapiens
ccacccaagcaggcaaaacaagggagagcagggccaaggaaggagggcggagcaggagaagagaaaaaagc

SEQ ID NO: 21 - RNA, 81 nt, Homo sapiens
cggggcacgaggaacagggaagggacaacccgccacaacgacaaaggaccccaaagaccccggaaggcggaccaggcacaa

SEQ ID NO: 22 - RNA, 74 nt, Homo sapiens
cagccccgagagcgggaacaggcagacagagaacgagagagggagacggacaacggagcaggccgagagaccac

SEQ ID NO: 23 - RNA, 96 nt, Homo sapiens
caggccagagggggccgccgcggcagcaagaacagagagagaggggacagacgagagaacgaggaggccaaaggaagaccaggaaagaacagccag

SEQ ID NO: 24 - RNA, 79 nt, Homo sapiens
cgccccgacgaggacgaccaacaggcagcagcgggccccgccaccggcacaccgaaggagcggcacaccacacacaggc

SEQ ID NO: 25 - RNA, 78 nt, Homo sapiens
cgacagggcggcggcgccaggcagggcgcaggcccacaagacccggccccggccccacacaacggcaccccaccagca

SEQ ID NO: 26 - RNA, 57 nt, Homo sapiens
agaagacggggcccgggaccacaggccccggcccagaccgagagcggcccaggagga

SEQ ID NO: 27 - RNA, 114 nt, Homo sapiens
ccagaaggcaagagaccgggaagacagcgcccgcccaacacccagcagccagggaaccccagggggcaggccagaggaagcagggcagacacagccacgcagcccgaccccgga

SEQ ID NO: 28 - RNA, 73 nt, Homo sapiens
caaggggacggagagcagagggcccacagccgcgacaaggcacgggccggcacgcagggaccgggaaaggcca

SEQ ID NO: 29 - RNA, 83 nt, Homo sapiens
gggcgcgcggagcggcgccccgcagccgcggaccgaggcagcggcggcaccgccggccgaggcaagaacgccccggcaaggac

SEQ ID NO: 30 - RNA, 76 nt, Homo sapiens
gccaggcgcggaccggcggagcgcgggggagcggccacggagacggcggccccagaccggcaccaggacccgacac

SEQ ID NO: 31 - RNA, 76 nt, Homo sapiens
ccggggaaacgcaggaggacagagcgggagccaccagcgccaaagggaagccaggagcccgggggcacggggagaa

SEQ ID NO: 32 - RNA, 70 nt, Homo sapiens
acaaagccccgaggacggccggaaaaacgaacagacgcacaccacgaacaagcagaaagcacgaacaacg

SEQ ID NO: 33 - RNA, 76 nt, Homo sapiens
accagcggcccgccccaaaggggaggaacgggaagagggaaggcaagacccagggcagagcagaaaagcagcgaac

SEQ ID NO: 34 - RNA, 68 nt, Homo sapiens
acagccaccccgagaggcacaggagaaagcaaccaaaacacagcccaacagggaagaacagacacagc

SEQ ID NO: 35 - RNA, 75 nt, Homo sapiens
gacgaaccgaagcgggcgggcccccccacccagagggacagcaacagaccagcgagagcggaccccagccggccg

SEQ ID NO: 36 - RNA, 82 nt, Homo sapiens
gggcgccgcgcgccagcccaggaaaggcgccgaagaggcaaaacgggcgggggcaaagaaccacaagaacaaaaggcaagaa

SEQ ID NO: 37 - RNA, 76 nt, Homo sapiens
gagggcgggggcagcggcagcacacacaccaccacgggacaagccacgaaaaggcggagaaggagaaaaccgggaa

SEQ ID NO: 38 - RNA, 67 nt, Homo sapiens
accacaaggcaccaagcggggggggcccgagggcaggacagcaggcaccggcgaagcacagagaggc

SEQ ID NO: 39 - RNA, 75 nt, Homo sapiens
gacgcgccgagagcaaaaccgccggccggaccagaccggggggaaaggcgacgaaccccagaaacccagaaaaca

SEQ ID NO: 40 - RNA, 73 nt, Homo sapiens
ccaaccagagcggagcgcagaccgaggaaaaggagagaggaggggagagcaaacacgacggccagagaagaaa

SEQ ID NO: 41 - RNA, 74 nt, Homo sapiens
gggaagagcccaaacccagacagcgcaccccaagcccgggagcccaggcacgggaagcggagcccaccgccgag

SEQ ID NO: 42 - RNA, 85 nt, Homo sapiens
gaagcagcgacgaaacccccgaaggaccgcggacccgccccgggacagcgaggagcgagggacccgggaacgcccgcggacggca

SEQ ID NO: 43 - RNA, 73 nt, Homo sapiens
caggaaggagccaaagcacaagaagaagacgaggccagcaacaggaagagccacggcaaagacaccaaacgag

SEQ ID NO: 44 - RNA, 82 nt, Homo sapiens
agacaacagacaggaggcaaaggccccccgaaaaacggagagaccaaaaggggagcaagaagaaagagcagggaggagggag

SEQ ID NO: 45 - RNA, 73 nt, Homo sapiens
cgccgcccggcgccggcccgcccccgcagcagcgccaggaaggccgcggacccccccccccccaccccacagg

SEQ ID NO: 46 - RNA, 72 nt, Homo sapiens
gccagccgcgccagcggggaccgcacacccggccgacgcccaccccaaggcgggagggagaccgagggaccg

SEQ ID NO: 47 - RNA, 96 nt, Homo sapiens
agaaaagccagaagcacaggccagggcagaggaccaacagggcagagagcaaggggagcgacagaacaagaaagaggagacagcaaaacgaagaga

SEQ ID NO: 48 - RNA, 73 nt, Homo sapiens
cacagcgagcgaagcgaaccgaagaggaggaaaaggacccggccaggaccgcaggggaaccgcacgcccgggc

SEQ ID NO: 49 - RNA, 42 nt, Homo sapiens
gccgccagcaccccagcgcggaagcaccaggcccaccgccaa

SEQ ID NO: 50 - RNA, 79 nt, Homo sapiens
ccagaagaggagagagagcaagagaggaagaagaacgacccgcccggggcagcagcggagccccaggaccccaccccgg

SEQ ID NO: 51 - RNA, 78 nt, Homo sapiens
cgcgcgcccacccagggggaagccgggacaccacagcaagaggaacgggcacgccagaaaagaccaggagaagcagac

SEQ ID NO: 52 - RNA, 84 nt, Homo sapiens
ggggggggcgcggcaagggacaggggcagacccggggcagcgccaagagcaaccagccggagcgccaaggccgcaaccgaagac

SEQ ID NO: 53 - RNA, 74 nt, Homo sapiens
acccgggcggggcagagcagcccccagccagccgcgagggcagccccgggcaaccagcaagcccagagaaccca

SEQ ID NO: 54 - RNA, 58 nt, Homo sapiens
ccgcgcagcgccgaacgacgggccacagacggacagcggcaaaggaagaagagaccaa

SEQ ID NO: 55 - RNA, 58 nt, Homo sapiens
agacggaggaaaggacaagcaggccacgagaaccgaagggggaacaaagacccacgac

SEQ ID NO: 56 - RNA, 67 nt, Homo sapiens
cgaacccgcacgaagggaacaaagcgagagacgacaggcgggcaacacagaggcccacgcggaccgg

SEQ ID NO: 57 - RNA, 57 nt, Homo sapiens
gccagccaccccgccacggaagcgccaccaggcccggaggcaaggcgaccgcgcccc

SEQ ID NO: 58 - RNA, 74 nt, Homo sapiens
cgaggggggcgaccaggacggacagaagcaggggacgggaacacagcagcaccaacgcaggcaagaaggccggg

SEQ ID NO: 59 - RNA, 78 nt, Homo sapiens
ggaagggcgggaccaacagggagccagcccagaaagaagcagacagcgacggcaggccggagagagacagagccgaca

SEQ ID NO: 60 - RNA, 87 nt, Homo sapiens
acggacagccgagagacccagcggccggacaggaacaaacggacccaggacaaaacgacaccagccaaaccagcagcccccagcacc

SEQ ID NO: 61 - RNA, 77 nt, Homo sapiens
ggacaccaggacccaaaaggcgcaggggaggccggccccaggccccaacgcaaccagacacggacaggagccagcag

SEQ ID NO: 62 - RNA, 81 nt, Homo sapiens
ccgccgcgccacgccgcccacacagccagccacccacgagacaccacgacgcccgagagaccaccccaagcacagacgcca

SEQ ID NO: 63 - RNA, 104 nt, Homo sapiens
cggccgcaaggcggcaagaaagaaaagaagggcgcccggaaaggcgccgaagagagagccacgagagaagaaagaaaaagaaaccgccagcccagagacacgaa

SEQ ID NO: 64 - RNA, 82 nt, Homo sapiens
ggcgggccagagcggggcgaccaggaaaggcaccacacgaaccgaggcacaccaaaggcggaaggaggaccgccggccagga

SEQ ID NO: 65 - RNA, 71 nt, Homo sapiens
gcgacggacccggaggagaacacaagggcagcgagggaggagacagcaacgggggacaccaccaagacgac

SEQ ID NO: 66 - RNA, 69 nt, Homo sapiens
cgaaccgaagcgggcgggcccccccacccagagagcccaaaaggcagagcgaggagagaagaaggaggg

SEQ ID NO: 67 - RNA, 49 nt, Homo sapiens
caggacgcagaaccaccaaaagccaagaaacgagcccaaaaggcagagc

SEQ ID NO: 68 - RNA, 77 nt, Homo sapiens
ccacacagacagaacggcgcgcaaacgaaggaaaaggaaaaccaacagcgccacaaagaccggacacagacagaccg

SEQ ID NO: 69 - RNA, 53 nt, Homo sapiens
gaccacacaccagggcaccgaggcgccgagaaacacgcccaccgcacacacgc

SEQ ID NO: 70 - RNA, 74 nt, Homo sapiens
cccacccggcaccgacgagacaggagcgcgaaaggggaacccacagggggcagcgggaccagggggcgaagcag

SEQ ID NO: 71 - RNA, 84 nt, Homo sapiens
ccgacaccgcgggccgccagacgggaagggaacaacaaccgaccccgcggccgacaccagacggaggagggcgaggagaacccg

SEQ ID NO: 72 - RNA, 74 nt, Homo sapiens
cccggaagccgaaccaacggaggcaccgaccgcacgagcaacccggaagagcccgcacaaacaccgaagcccag

SEQ ID NO: 73 - RNA, 79 nt, Homo sapiens
agacgcccgggccaccaagcaagcgcaaaccagcaaaagcagaaagcacggaccaaaccagcgaaaaggggagaaaaca

SEQ ID NO: 74 - RNA, 54 nt, Homo sapiens
gacaagagcgcggggaagcaagcccgggagacgcaagccacccggacgcgaaga

SEQ ID NO: 75 - RNA, 78 nt, Homo sapiens
agaaggagccaaacccaaagaggaagcacagacaaagcagagcccacagacaaggccaaaggcaaagcgcacagaggg

SEQ ID NO: 76 - RNA, 73 nt, Homo sapiens
cgccccaggggaaaacccccgggaccaggacaggccgccagggggacagaaggagcaggcaaaagcgccaaaa

SEQ ID NO: 77 - RNA, 77 nt, Homo sapiens
cggccggaggaaccagagggacaacaggcaggagaaagggagcgcaccccaggggaagcaaagcgaagcaaaccccc

SEQ ID NO: 78 - RNA, 84 nt, Homo sapiens
gagaggcggggcgcccccgccacgcagccggccaccgccgagacccagcacacgccgaccaggaggaaagacaagccccaaaag

SEQ ID NO: 79 - RNA, 79 nt, Homo sapiens
ccggcgagggaagcggaaccaaccgggaaagcccggggcagggccaacacacagacccccagagcaaacgcggcagcac

SEQ ID NO: 80 - RNA, 61 nt, Homo sapiens
aagaaacgccaggaggggcccccgccagacgagaaggaagaggggcaggccggggaggccg

SEQ ID NO: 81 - RNA, 78 nt, Homo sapiens
gaaaggcgcccccgagaccccgcggaacgcccaccgcggagagcagcacgaccccagcacagcgcaaaccaacgggac

SEQ ID NO: 82 - RNA, 48 nt, Homo sapiens
accaaaggccggaggcaccacaacacgagaagccggccggacagccac

SEQ ID NO: 83 - RNA, 77 nt, Homo sapiens
gagaaaaaggaacagcgcccaaccaccgaagaagaaagagaagaaacgccaggcagaagcccccggggagagacaga

SEQ ID NO: 84 - RNA, 77 nt, Homo sapiens
cgggaggaaccagcaccgccacccccccaagccacccagcagaggaccgccaagaagaagagagaaggaagaaagga

SEQ ID NO: 85 - RNA, 67 nt, Homo sapiens
gagccacaccacggcacccacacacaaacaacaggcagccacaccacgccacccgaaaaacacggag

SEQ ID NO: 86 - RNA, 71 nt, Homo sapiens
gcgaagcaccacgaaaggagcccgaaaccaagacccgggacagacaaagggaagcaccaggcaaagaaccg

SEQ ID NO: 87 - RNA, 68 nt, Homo sapiens
acgcaaggagccaccagcacggaccaggaggcgagcaacagagggcggacggcagacaggcagcaacc

SEQ ID NO: 88 - RNA, 72 nt, Homo sapiens
aacgcagagaaacacggaaacaggaagaggaaaaacacgacaaagccacaccagcggacagccaccaagagg

SEQ ID NO: 89 - RNA, 72 nt, Homo sapiens
ggccccagcacaaaccagggaaagggagagaaagcaggagaaaaccaaagcacgaaaggaacccggcggcgg

SEQ ID NO: 90 - RNA, 70 nt, Homo sapiens
cagcgcagcgccgacggacccggaaaaccggcccccaacgacaaaaggacaccaaacaacgaccggaagg

SEQ ID NO: 91 - RNA, 83 nt, Homo sapiens
gcgggagcgaggcccgcggagcgccgccgcgcggacgagacaagggcaacgagacacccagcggcccggccccgccgggagac

SEQ ID NO: 92 - RNA, 80 nt, Homo sapiens
gccggaccgcacccgcaccgccaaccacgggcgaggaggcgccgcgcagcaagaggagccaggagcacggggggaacaag

SEQ ID NO: 93 - RNA, 74 nt, Homo sapiens
gggcgcaggaccccgccccacgcccaggcggccaacagggcgccagccagggccacagccggccagaccgcagc

SEQ ID NO: 94 - RNA, 80 nt, Homo sapiens
cacagagggacccggacaaccagaggcagccagcagggggagcccacaccgcggacagagcaaacagcaacaaggagcgg

SEQ ID NO: 95 - RNA, 65 nt, Homo sapiens
agcaacgcacagaaagaaagcaggagcccggaaaggagaaggaaaagacggcaggaggaagagag

SEQ ID NO: 96 - RNA, 70 nt, Homo sapiens
ggaagagcccaggcgcgggcgagggaggccaagaggccagggagagccgagacgcagggggaaccgaagg

SEQ ID NO: 97 - RNA, 70 nt, Homo sapiens
ccaggaggacaaagcagacacaagaaaaacgccacaaccaaacgcgcaaagcgccaaacgaaaaggaaag

SEQ ID NO: 98 - RNA, 126 nt, Homo sapiens
cacccaagacgacggaccacacgaggggacacaagccggaaaggccccgagagcaaccggacccgcggggcccagccccaccagggcccagaagaccggcaggcaccagggcaaacccaaaacgcg

SEQ ID NO: 99 - RNA, 79 nt, Homo sapiens
acagacagcgcccacaggcagccgaagaaccccccacaacaccaagagcaggcaggaagcacaggaaggacagggaaca

SEQ ID NO: 100 - RNA, 86 nt, Homo sapiens
gacagccacccgagaacacagcgagggcagggcgggccccggagaaggcgaccccggagcccgaaggaagggaccaaggaagcaca

SEQ ID NO: 101 - RNA, 68 nt, Homo sapiens
ggaggcccggcacggcagcccacaaaccagaagacacaccaaaagaccgcaaagaaaccgaccaccga

SEQ ID NO: 102 - RNA, 84 nt, Homo sapiens
ccgccaaagccgccgggcaagcaaggccagcagagcccaagggcgccagccaccacccagacgaccagacgagagcagacacgc

SEQ ID NO: 103 - RNA, 81 nt, Homo sapiens
cccgagccacaccgggacgaccaagccgagaccacgcacccagaggcgaggggcggcgaagaggacccgcaggcgcaagga

SEQ ID NO: 104 - RNA, 77 nt, Homo sapiens
ccgcgccggcccgccacccgcccggccccagcccagcgcggccgcgaccccggcgggaagaacagacacagcaccga

SEQ ID NO: 105 - RNA, 68 nt, Homo sapiens
ggcggagagacaaagagcagaggagcgcagaaaccaaaaaagcaggcacaaaacaacgcagcagccag

SEQ ID NO: 106 - RNA, 81 nt, Homo sapiens
cccaaacggacgagaccaggcggcgggagaagagcgcagaagagacccgggggcagaaaagcgaccggaaaacacgcaaaa

SEQ ID NO: 107 - RNA, 99 nt, Homo sapiens
acaaccacccgggcccaaccagcccagcgcgcggccccaccgcacgggcgagggccgacccgcaccggagccacccgcaggagaccaggagggcacagc

SEQ ID NO: 108 - RNA, 56 nt, Homo sapiens
gagcagaccgcgggaaagaagcagaggccagaagcaaaccccgcccaagacgcaag

SEQ ID NO: 109 - RNA, 75 nt, Homo sapiens
gcggccgcggaagcggggcgcacaccaccggacaaccgacaaaaccgggacacgcggccgggcccgcggcggacg

SEQ ID NO: 110 - RNA, 111 nt, Homo sapiens
cgggggccgcgcgcgcgcgaggccgggccggccgcccagacgcgcccgcgggcccggccacggcggagccaaggcggcgcaggccagccgcgcgggggaaacagagagcag

SEQ ID NO: 111 - RNA, 38 nt, Homo sapiens
cggcgaagcccaggagcgaagcgggaagcacaggagag

SEQ ID NO: 112 - RNA, 76 nt, Homo sapiens
ccgacagccgcagaacgaacagagaagacagcgaggaagaaacgggaagagaagccgaaaacagaggccacagaag

SEQ ID NO: 113 - RNA, 57 nt, Homo sapiens
agcaggagcggaccggcccggaaggaagaaccgaagaaaaagacagagggcaaccgg

SEQ ID NO: 114 - RNA, 75 nt, Homo sapiens
cgaccggcgaggggcaccgcgccagacgcccgagaagccaggcagcaaacacacaggagaaggcaaccaaaggca

SEQ ID NO: 115 - RNA, 71 nt, Homo sapiens
cccacagcgccaaaggaacggggcaccgagaggccaaggggagccgggacaccgcggcaggggcggcaggc

SEQ ID NO: 116 - RNA, 51 nt, Homo sapiens
cgcgggagagaggacccccccccccccccaaggagcgaagaaaccgcaaag

SEQ ID NO: 117 - RNA, 69 nt, Homo sapiens
ccgaccagggcaacaccaaaaacaaaacgaaccaggacggcaacccgggaacacagagcaccaagacag

SEQ ID NO: 118 - RNA, 77 nt, Homo sapiens
gccaggccccaccacggcgcgagccaggaaggcaggcgcgccggccccagcggggagcgggaaggagaccacgccac

SEQ ID NO: 119 - RNA, 74 nt, Homo sapiens
gggacaacacgacacaagcggccggggaagccgccaccgcaagagaaaagcgggcccgagaaccaaagaagccc

SEQ ID NO: 120 - RNA, 85 nt, Homo sapiens
cacagcacgagacccgcagaccacgccaggccaagacaaggggcgcagagcggggggacaggcgcaagaccggagaagcaggagc

SEQ ID NO: 121 - RNA, 80 nt, Homo sapiens
agaaacgcccaccgagaggaaagagcagcccagaaggaaaagaagggaacaggcccaggcgacgacgaaaggaaaggacg

SEQ ID NO: 122 - RNA, 87 nt, Homo sapiens
aaagggagacggcgagacgcgcagcgccggcgcccgggagacccaggaggagcccgcaggagcagggaacgagaagacccgagaaaa

SEQ ID NO: 123 - RNA, 70 nt, Homo sapiens
aaaccggagaaggagccaagaaagagaagggagaaaacgggccggaggaaaagggcggcaggggaccacc

SEQ ID NO: 124 - RNA, 83 nt, Homo sapiens
gccccacggaacaccccgcgccgccaacccgcccccagcgacagccgcaccccagcggcggagggagccgcacccaggagccc

SEQ ID NO: 125 - RNA, 77 nt, Homo sapiens
acgaggacaaaggaacagcacagggcgcaacaagagcgacaaacgcagaacaccgagagagaagaaggcacagaaaa

SEQ ID NO: 126 - RNA, 85 nt, Homo sapiens
gccagccccggagccgcccaagccgcgccccagagagcgcccgagagaacagggggccgcggccagacgggaacaaaggagaaag

SEQ ID NO: 127 - RNA, 63 nt, Homo sapiens
caccgcgcggaggccggggacgacaaggaggacgaagagccagaagcagcaggaccggcggag

SEQ ID NO: 128 - RNA, 62 nt, Homo sapiens
accccgaaacggaggaagaacgccgccaccagccaccaccaagaacacaggcacagaagcgg

SEQ ID NO: 129 - RNA, 74 nt, Homo sapiens
ggaaaacgcgcaacacacgcgaaaaacgcgcgcgcaaggccacgacacacgccgcaacacagcaaccagaaacc

SEQ ID NO: 130 - RNA, 74 nt, Homo sapiens
gagaagaaagcacaaaccggccagggcagcgcaagaccccgcacggaagcagcaagcacaggcagcgcagagcc

SEQ ID NO: 131 - RNA, 53 nt, Homo sapiens
gggaacaggaagacaacaaagaaagaaacaaggcaggcagagaaagaccaccg

SEQ ID NO: 132 - RNA, 73 nt, Homo sapiens
ggacggggggcggcagccagccgcagggggggccaggaggagccccagcacagcagagaaaaaaccacaggcg

SEQ ID NO: 133 - RNA, 76 nt, Homo sapiens
aaggcagagccacgcggaggccgagggaacggaccgagcagcagcagaggaaccaaagaaccccaaaacgaaacaa

SEQ ID NO: 134 - RNA, 60 nt, Homo sapiens
gagaacacagaaacccgccccggacaccacccaaacgccggcgaccccaagaggaagccc

SEQ ID NO: 135 - RNA, 77 nt, Homo sapiens
caaaacaacaaccagccaaacagaacaaaggaagaggaacccgaccgaaaagcgccgcaaaccgagacgaagccacg

SEQ ID NO: 136 - RNA, 53 nt, Homo sapiens
cccgggagaaaggcggagaagagggggggagccgcacgacccgaacgccagag

SEQ ID NO: 137 - RNA, 73 nt, Homo sapiens
ggcacgaagaaggccagcgggccaggaagcgcaccaggagggaccggaggaaggcagaagaccagacaagaaa

SEQ ID NO: 138 - RNA, 38 nt, Homo sapiens
agcggaagacgcagcaaagggccaaagcggcgacaaga

SEQ ID NO: 139 - RNA, 85 nt, Homo sapiens
cccgcccaaccggccgcgccccggccaggaagcgccggcagcccgcggcacggagacagaacgaaaacaaacggaagagagggca

SEQ ID NO: 140 - RNA, 80 nt, Homo sapiens
agccaccgccgccggcagcgaagacgcggagaaaaaagccgaccggaaacaggcacagaacagaaggaaaggacgaagag

SEQ ID NO: 141 - RNA, 72 nt, Homo sapiens
ccagccagagacagccacaaagggaagcaagagaaaaagaacaacgcgggggaaggaacagcgggaccaggg

SEQ ID NO: 142 - RNA, 83 nt, Homo sapiens
ggacgcaaagcgccaggacaagccaggaagagcccagacccgaggaaggccagaaagggccggcccggccaacgcaacaggga

SEQ ID NO: 143 - RNA, 79 nt, Homo sapiens
aaccacgccgcgcgcgcaaccccaagagcggagacacggggaaacgcagggacaagaccaccccagcacaggcgccagg

SEQ ID NO: 144 - RNA, 82 nt, Homo sapiens
cccgccaccgaccagcgggcaagccgggcccgccgacacacaccgcagcggccacgagaagggggcagacggccccgggacc

SEQ ID NO: 145 - RNA, 68 nt, Homo sapiens
gaaagcccgaaggggcgaaaaacgggacagcacaaagccagacgaagacacaaaagccaggaagacaa

SEQ ID NO: 146 - RNA, 66 nt, Homo sapiens
aacaccaggaaagacaggagaccaaaaaggggggagaagaacacgacaagcgcaagcagccagcag

SEQ ID NO: 147 - RNA, 71 nt, Homo sapiens
cgagccggccaggaaaggcagccgcccaccacccacgcgcccagccccacgcagagcaacccagggaggaa

SEQ ID NO: 148 - RNA, 57 nt, Homo sapiens
aacacgcaaacgagagcgaggcaagaaaaacaggcaacgagacaggcccagcaggaa

SEQ ID NO: 149 - RNA, 56 nt, Homo sapiens
gccaaccagagacaccagcaggacaggaaaaaaagagaaagcaccgggaggaaaga

SEQ ID NO: 150 - RNA, 61 nt, Homo sapiens
cagagcgagcggaaacccccacgggcgcaaagcaacggcggcacaagaaaggagagcaaga

SEQ ID NO: 151 - RNA, 85 nt, Homo sapiens
gccccaggagcaaaggcgaaggagaaagaaggggcaagaggaagaagcagaagcagagagaggagcgaagaagaagaagcgacca

SEQ ID NO: 152 - RNA, 77 nt, Homo sapiens
ggagacacgcaccagaagaaggagagcccggcagagaaggcagccggcacccgcacaacccagggggccgaacccag

SEQ ID NO: 153 - RNA, 80 nt, Homo sapiens
gcacgcgcacccgggccgcggagaaggaacccgagcagcccccggcccgggaggaaaggacacccgcccgggagccaggc

SEQ ID NO: 154 - RNA, 83 nt, Homo sapiens
cagccgaaggcgaccaagacgcggcccaagggcccggcggcgcgagcaggaagcaccgacccccgaagagcagaagaaacaga

SEQ ID NO: 155 - RNA, 57 nt, Homo sapiens
gcaccaacccaggaagaaccaaaagaagggggcggaggacggaaccagggagcccaa

SEQ ID NO: 156 - RNA, 70 nt, Homo sapiens
gcgccgggcccccccggaagagagccagacaccaggaccaagccaacagcaaaggaagcaacagagcgaa

SEQ ID NO: 157 - RNA, 76 nt, Homo sapiens
cagaagaaggagaaccagaaacaacaaacacagggagggcgcggggagcccagcagggggaggagagggcagagag

SEQ ID NO: 158 - RNA, 83 nt, Homo sapiens
gaaccaaaagcaaccgcgaagagcaggaccaagcacagagggcggaaaccgcggcgcacggggccccaggggcgcccccgaac

SEQ ID NO: 159 - RNA, 58 nt, Homo sapiens
gcaccagcgggccggaggagccagagcgcagaaaggcgccggcgaaagcaacgaaggg

SEQ ID NO: 160 - RNA, 71 nt, Homo sapiens
gggccagcaagacacagacaaaacaccaacaaaaaaaagcaagagaaccaggaagaaccaagacacacggg

SEQ ID NO: 161 - RNA, 56 nt, Homo sapiens
gagggaacagagagagaaaaacacaaaagagccaagagaacaaacggacccaggac

SEQ ID NO: 162 - RNA, 75 nt, Homo sapiens
ggacccacccagggcagaaaccaggcaggcacacgaaggggaaggaacaaagcagagaaaccaaaaggccagacg

SEQ ID NO: 163 - RNA, 76 nt, Homo sapiens
ggagaccgacgcggaaaaaaagacccaggaggagcaacacgggaccggaggccagccggcaagaggaggggccccc

SEQ ID NO: 164 - RNA, 74 nt, Homo sapiens
agaagcgaaccaaagaagagacaaaagagagagcggaaacgagggaaagacggcagcccagccacgcacagaca

SEQ ID NO: 165 - RNA, 87 nt, Homo sapiens
ccgggccacggaaaccggaggaccagaggagggacacggggcaaagaaaaaggagagaaaaagaggcaaaacaacaagaagaaaaga

SEQ ID NO: 166 - RNA, 54 nt, Homo sapiens
cgggccccaacacccagagacgaaagagcccagcagaccagcaagccagggaga

SEQ ID NO: 167 - RNA, 56 nt, Homo sapiens
ccaaccgcggggaacaggaaagccgagccaggcggaaaccgggagaagccggccag

SEQ ID NO: 168 - RNA, 73 nt, Homo sapiens
ccggggggcccggggccagcaccaacagcgcaggacggaagcggaacccacaggagagaaccacccagagccg

SEQ ID NO: 169 - RNA, 56 nt, Homo sapiens
acgggccccggccaggaacacacagccagacccaacggaggggacccaggacccca

SEQ ID NO: 170 - RNA, 38 nt, Homo sapiens
ccaaggaaggaaacagagcaaaagagaagagggagaaa

SEQ ID NO: 171 - RNA, 84 nt, Homo sapiens
gcgcgaaggagcgaccgcgccggcagcgccgcgaaggcgggccgggccagcccccgccgcccgggagaccggagaagaacaagc

SEQ ID NO: 172 - RNA, 72 nt, Homo sapiens
gccacaacccagaaacccacacggcaagggggagaggcaccagcaacagaccaaccgcagcaagcacagaga

SEQ ID NO: 173 - RNA, 78 nt, Homo sapiens
cgacaagcgcccacgaggagacgcggaggacagcccgcaggccggggcagcagaagaggacaagcagacagcaccaac

SEQ ID NO: 174 - RNA, 65 nt, Homo sapiens
cggccccggggaacagggagcgcccggcgcacagcgccagaaccacgaagcgcccgagacgccac

SEQ ID NO: 175 - RNA, 78 nt, Homo sapiens
cgggacggaccgagaccggaccgagagcggaccgagagcgcgaaacgcacgagaaggggaagaggacaggcccacggc

SEQ ID NO: 176 - RNA, 54 nt, Homo sapiens
gcacagcaggccaagacggaaagcagaggacccagcaaagacaaaacagaggag

SEQ ID NO: 177 - RNA, 64 nt, Homo sapiens
ccacgcgaaaaaacacagacaagagcgaccagcagacaccagaacccaacaacagacgccaaaa

SEQ ID NO: 178 - RNA, 67 nt, Homo sapiens
acgccgagagaaggagcaaagagggggagcacccaggccgccaggcacagagaaggcaaacgggagg

SEQ ID NO: 179 - RNA, 71 nt, Homo sapiens
gcggacaaaagggcagcaacgcccacggaccgagaaaagggaaacacaaagaagacaccagaagggccagc

SEQ ID NO: 180 - RNA, 71 nt, Homo sapiens
cgcagggcgcccccgacgaggagccgggccgccaccgccccagacacgccgagccggcaggggcgggcaga

SEQ ID NO: 181 - RNA, 75 nt, Homo sapiens
cccgacccacgggcggcggaggcaaccgcccagcgacagagcgaagagagaagggagaccgagccaggccaggag

SEQ ID NO: 182 - RNA, 61 nt, Homo sapiens
caagcccacccagaaaaaggcccgggacccaggaaccagggcaccccagacaggagcaccc

SEQ ID NO: 183 - RNA, 87 nt, Homo sapiens
cccagccggggccgacgccggggcaggaggcccaaggaacagcacagcagcgacacacggaccggagcagcccacagccacaggaca

SEQ ID NO: 184 - RNA, 75 nt, Homo sapiens
cgcgcggggggacccagaacaaagcagccagaaaacgaagagccagccacagcccacccggaaaccagagacccg

SEQ ID NO: 185 - RNA, 53 nt, Homo sapiens
aaagccgccaggagccagcgggcgacagcggaacgggcacaaagaaggcgcag

SEQ ID NO: 186 - RNA, 76 nt, Homo sapiens
cacaacccgacccgacgaaagagccaagggggaagagccaccggaccaggaaaccacccgagccggaagccaccag

SEQ ID NO: 187 - RNA, 81 nt, Homo sapiens
aaagcagaagaagaggaaagacagaaccagccaacaaaagaaggagcccgcagggccgccaccagcacagggagggagagg

SEQ ID NO: 188 - RNA, 51 nt, Homo sapiens
gcacaggaacacaaacggaaaagccaacagcagaaagacgaagaaccaaga

SEQ ID NO: 189 - RNA, 79 nt, Homo sapiens
ggcccccgccgagcaccgaggggaagcgaaccagcagcccgaccacagcgccccaggaggcggcacggagccaccgggg

SEQ ID NO: 190 - RNA, 73 nt, Homo sapiens
acggcgaaccagggcaggggacaggcaaaacgcgaacaacccacagaagcccaacagacggcaaaggaacacg

SEQ ID NO: 191 - RNA, 77 nt, Homo sapiens
gggaagaggcggcgggcaacgacagaaaggcaccaagagggaacaagggacaccagcacaggccgaacgcagaagaa

SEQ ID NO: 192 - RNA, 72 nt, Homo sapiens
acgagaagcaccgagcccacccacacccaagaacgccaagcgccaaaggcaaaaagggaaaagcagcagcaa

SEQ ID NO: 193 - RNA, 77 nt, Homo sapiens
agccagacgacaagcacacacaggcgcgaaacggaaaaaggaggcgaccgaagagaaaccaaaacaccagagaggca

SEQ ID NO: 194 - RNA, 30 nt, Homo sapiens
ggccaagggacagggcagagaacacaccgc

SEQ ID NO: 195 - RNA, 73 nt, Homo sapiens
ccgcgcacccccggccggaggcaccagcgacgggccaggcgacacgcagaacaaccccaagaccgggggcacg

SEQ ID NO: 196 - RNA, 77 nt, Homo sapiens
agccaagccagagccgggccccaacaacccggggaagacagaggaagaggaagacaaaccggcacgaaagaccagag

SEQ ID NO: 197 - RNA, 83 nt, Homo sapiens
aaggcggccagaagagaccacgcacaggaggcccgaggagcggccacgcgagaaagacagcaaagaaaaggagaagaaaggaa

SEQ ID NO: 198 - RNA, 80 nt, Homo sapiens
ggggggcagcgcacggaggagcggcgggccagacagggcggagaacggaaaagcaccaggaagcagagaggaccgcagaa

SEQ ID NO: 199 - RNA, 78 nt, Homo sapiens
aaacggaggagcccgccgaagcaggcacgggcaggagacaaccagaggaggaccaggaacgcagacccccgaaaacca

SEQ ID NO: 200 - RNA, 67 nt, Homo sapiens
acggagaacaacgcggccgggccaagcagagaacacaggaagaagaagcgcacaaggagcacaacag

SEQ ID NO: 201 - RNA, 75 nt, Homo sapiens
gacagcacccgaccgcgagaagggaacccccccggaccagaaggcgccagacaaagagacgggaacagagaagcg

SEQ ID NO: 202 - RNA, 80 nt, Homo sapiens
cccccccacccaggccccgcaagaagggccgggggcgagccggagcgaccccggcagaaaagcaccgagcagaaggcccg

SEQ ID NO: 203 - RNA, 54 nt, Homo sapiens
acaggaccccaagcaaaccggcggagaccagaggcccacggccaacagcccaga

SEQ ID NO: 204 - RNA, 53 nt, Homo sapiens
gagacccccccagcacaccaccagcaagggaggaacagacacagacgagaaac

SEQ ID NO: 205 - RNA, 101 nt, Homo sapiens
cgcgggccgaaggagcgccagggcgcgaggcgggcgcgcccgcggagaggccggggacagggccaaagcggcaggagaaggaagggaccggaaacgacaag

SEQ ID NO: 206 - RNA, 34 nt, Homo sapiens
aagcgcccaagcggacgagacgaaggaaaaggaa

SEQ ID NO: 207 - RNA, 71 nt, Homo sapiens
cgacaggaagacaccagggcagagaccaagaggcagacaacaagggagagcacaccgggacagccagccaa

SEQ ID NO: 208 - RNA, 62 nt, Homo sapiens
ccagaggccaacccaaagaaggagcggccagcgagagcgagacagcagagccaaaggagaaa

SEQ ID NO: 209 - RNA, 123 nt, Homo sapiens
agggaggaggccagacacaggaggaagagcagaaaaaagaggagcggccaggcacggagagaacgcagaaagacgagagacaagcagcagcacacgcccccacccaggcgacagaaaaggagc

SEQ ID NO: 210 - RNA, 83 nt, Homo sapiens
gggaacagacaacacggcagccaagggaggggaccagcaagacgggacccacaggacacacagaggaaggaaggacaagagga

SEQ ID NO: 211 - RNA, 78 nt, Homo sapiens
acaggcgaaggggagcaggccgagcccgagccgcagcacgagccaaaccgaggcagaaccagagaccacagaagaagg

SEQ ID NO: 212 - RNA, 74 nt, Homo sapiens
ccgccaggcagcaggacggacccgaccccacgcacccggagccaccgagacgaaccaaacccaggaagcggcgc

SEQ ID NO: 213 - RNA, 82 nt, Homo sapiens
ggggcccggggacggcgagagggcaagcccaggaacgggcgccacaccggacacaggccagaggaccacccgcacccagggg

SEQ ID NO: 214 - RNA, 71 nt, Homo sapiens
acccaggaagcagccagaccaagaacaaccgcggacacggagaggaaggcggaggggccgagaacgagaca

SEQ ID NO: 215 - RNA, 67 nt, Homo sapiens
agacaagaaaggaaaacaaggaaacacagaacgcagaccgaacaacagggcggggagggaacaccaa

SEQ ID NO: 216 - RNA, 59 nt, Homo sapiens
aagaagagcgccagcccccccccacagcacagcaggagggcaagcggagcaggggacgg

SEQ ID NO: 217 - RNA, 70 nt, Homo sapiens
acggaggaacggaagagcagaggaaccggacgcaggagcaaacagcaagagggaaacagaaaaaggacaa

SEQ ID NO: 218 - RNA, 79 nt, Homo sapiens
gggaaagcacaaagcaagagacagcgaggacagaaggaagcagaaaacaacagccgacacagagacacaaaccacaccc

SEQ ID NO: 219 - RNA, 77 nt, Homo sapiens
gcgccagacggacgaggcggcggagaacaagcggcagcaggcaacaggaagaagaacccacaggggccaacagagga

SEQ ID NO: 220 - RNA, 81 nt, Homo sapiens
acacgcacacaacacaaccagagcagaccagccccacagacaagaaggaaaccagaggaggaaggcaagagaaccaccaca

SEQ ID NO: 221 - RNA, 80 nt, Homo sapiens
cagcaacaccccaaacagcggcgcacggggcacaacagggaggacaaaaggagccaaacaaaaggagaacacccacgaaa

SEQ ID NO: 222 - RNA, 62 nt, Homo sapiens
cggcgagccgaaaagcgagcgcgaggaaaaggcggcgggaggccgggaccggaagcaggggg

SEQ ID NO: 223 - RNA, 83 nt, Homo sapiens
gcggcggcggcggggggacgcacgagcccggcgccggcaggccccgggccggaacaccccggcacggcagccgggaagagacc

SEQ ID NO: 224 - RNA, 69 nt, Homo sapiens
agagagagcaggccgaggcacagaagaaagccgggacaccacagcaagaggaacgggcacgccagaaaa

SEQ ID NO: 225 - RNA, 59 nt, Homo sapiens
gcagcaaaaagagcgggaagccacccgggaggaggagggggaacagagcagccaaggcc

SEQ ID NO: 226 - RNA, 81 nt, Homo sapiens
cgcacaagaaacccaagcgcgagggcggcgacggcggcgcgaggaccgaccgggcccgcggacgaagaaggcacccccccg

SEQ ID NO: 227 - RNA, 70 nt, Homo sapiens
cggaacccgggccccgccagcaacagacgaaaccagagagcaccacaccagagcaagacgcggaaagcag

SEQ ID NO: 228 - RNA, 73 nt, Homo sapiens
gacgcccgcggggaggcccgaccgaccaccgcacggaccacggggaaccagaagaggccaaccagcacgaacg

SEQ ID NO: 229 - RNA, 72 nt, Homo sapiens
ggacccaaggacgcgaaaggcgcagcaacggcacacagaggggagaccagacagaggacaccggcaaaacca

SEQ ID NO: 230 - RNA, 78 nt, Homo sapiens
caggaaacaccaagaaaaagccaaagcaagagcaggcgacacgcaggaggcacaagcagaggaaccagggaaccgccg

SEQ ID NO: 231 - RNA, 69 nt, Homo sapiens
caaccgcccgcaaacagcccaagacgggcgccggccgaccagaggccgagcaaaaaccagaccagccac

SEQ ID NO: 232 - RNA, 81 nt, Homo sapiens
aggagaagaaggaccaaggccagaagaagaaggagacggcgacggcgggaggcggcccgggcaaggcggccgcagcggggg

SEQ ID NO: 233 - RNA, 47 nt, Homo sapiens
gcggagaaccgcaggcccagaggggcaccccccgggaagaagccccc

SEQ ID NO: 234 - RNA, 82 nt, Homo sapiens
ggagcgccaggcggccgcaggcgggcggagagccagccaagaaaagggccaagcgacagaccaaagccgcgcccagcaggcg

SEQ ID NO: 235 - RNA, 64 nt, Homo sapiens
accccgcccaagagcaggacaaggaacaggcagggccaggaacaacacaccaaaaaggcaagga

SEQ ID NO: 236 - RNA, 72 nt, Homo sapiens
acgggggaccccagagaagacggaaggcaagcgcgccggacagcgacaaaagcgaacggacacaaaacggaa

SEQ ID NO: 237 - RNA, 83 nt, Homo sapiens
aggccaacgaccggagaggggaacagacgcagggcagggccccgcccggcggggaagggaccaggccggcacgacaagaccca

SEQ ID NO: 238 - RNA, 74 nt, Homo sapiens
cgccagaagaaaagcaaaaaaacaaggaaagccgcaacagaagaccgcccagagcgcggcccgccagccaaaaa

SEQ ID NO: 239 - RNA, 53 nt, Homo sapiens
caggagagcaggccgaccacagaaaacccgcgccccagaccaccggcagggaa

SEQ ID NO: 240 - RNA, 80 nt, Homo sapiens
gcccgcggccgggagcggagccccggggacagcccagagcaagcacacggaggcccgggagccagaccgggagcccgccc

SEQ ID NO: 241 - RNA, 78 nt, Homo sapiens
cgccgacagaaggccccgggcgagcgcggcggcggggggccgacgacgagccccgcgaggagcgcagcggagaggcca

SEQ ID NO: 242 - RNA, 78 nt, Homo sapiens
agagaagaaagcggaagagcagcccgacggccaggaggcgaagagacgaggaagcccaggagcccgaacacaaaaaga

SEQ ID NO: 243 - RNA, 77 nt, Homo sapiens
gcacagacagaacccgcaccaagaccccaacaggcccgaccaacaaagaaacccaacagacggaaaccaccaaccag

SEQ ID NO: 244 - RNA, 78 nt, Homo sapiens
ccgaaaaaaaaagaaaaggaaggagagaagagaggaccccgcagggacgaaggggaacgggaaaggaacaacgggcaa

SEQ ID NO: 245 - RNA, 40 nt, Homo sapiens
acacaaagcagcccaaccaaagggacaggagagacaacgg

SEQ ID NO: 246 - RNA, 84 nt, Homo sapiens
accgcaccacgggcccaccaccgcacccgccagcgagcccgggcacccgcggaccaggcaccggagacgcgggcagaaaaagga

SEQ ID NO: 247 - RNA, 81 nt, Homo sapiens
cgggccgccccgcccgaaagaagaaggaaccagcaaagcgccacgaagcacaagcaagaggaccagccaaaaccacacagg

SEQ ID NO: 248 - RNA, 69 nt, Homo sapiens
gggaagcaagacccaaccagagccgcaacagacccccaggcaaaccgccccgcagcaccacccggcccg

SEQ ID NO: 249 - RNA, 51 nt, Homo sapiens
gcgggacaaacagagaacagcaggagcgcaagagcgcccagaagaaaagaa

SEQ ID NO: 250 - RNA, 84 nt, Homo sapiens
aagagggagcagagcaagaaaaaaaggaagacgagaccagaaggggaacaaagcagaagccagaaaccgcaaaacagaagagaa

SEQ ID NO: 251 - RNA, 57 nt, Homo sapiens
ccaaacccaagggggagagggagaagaacagccagccgggacggagaccaaagcccg

SEQ ID NO: 252 - RNA, 72 nt, Homo sapiens
cggcagcgagagggagacaccagggagaggccaaagagagccacaacagcagcgaccccggcccgccgccgc

SEQ ID NO: 253 - RNA, 77 nt, Homo sapiens
gaagggaagaagcgccacgcacccgccagcgaccggaccccaccaaggggagaggggggacaggcccgggcggagca

SEQ ID NO: 254 - RNA, 82 nt, Homo sapiens
gaggacgaaaggaaggaggaaaaaaaacgcagcaaaaaggaaagggcacccggcgcgcacacaaagaaccgcagaagagaac

SEQ ID NO: 255 - RNA, 79 nt, Homo sapiens
gagccgcagagagcccccagggagggccaccaagggacaagcagagggagcacacaaggagaaagccgacggaccagca

SEQ ID NO: 256 - RNA, 69 nt, Homo sapiens
caccaaggaagagagaggagaaaaccggagaccacccacaagaagggaagaagggagcaccggaaagcc

SEQ ID NO: 257 - RNA, 80 nt, Homo sapiens
ccaaaaggcgcaggggaggccggccccaggcaagagcgaaggagaaaggcaacaaggcccgagcggggaacacgagagcc

SEQ ID NO: 258 - RNA, 37 nt, Homo sapiens
gcggcggcgaaagacaagcaagacaggacagcgagaa

SEQ ID NO: 259 - RNA, 84 nt, Homo sapiens
ggaaccggcccgagaggaaggcaggcacaagggacaagacagcccaggccgggaaaggaagaagggagcgaacgcggggagccg

SEQ ID NO: 260 - RNA, 75 nt, Homo sapiens
gccgccacagcaggacagaagcaccacggagacaggagagaccgggacccaagccgcccccccccaaaaagacca

SEQ ID NO: 261 - RNA, 73 nt, Homo sapiens
ggaaagcaagagggcaaaaacagccccaaccgcgaacggacaaaagacagagccggagaaagcgggaacagca

SEQ ID NO: 262 - RNA, 85 nt, Homo sapiens
caggacggacaagcacagccggaagggacgaacagcggggacgccccagcagaccgcccaggagaggaaagcaggaggaaagacc

SEQ ID NO: 263 - RNA, 77 nt, Homo sapiens
gcaacccacgcccagaaacagacaagagcacccaccacgcacaggaagcaggcaagcgcaagacgcgagcaaaaaga

SEQ ID NO: 264 - RNA, 67 nt, Homo sapiens
gcccgccacgaaaggagagggagaggggagggaagaaaagcaggcgacccaccgacacacaggggga

SEQ ID NO: 265 - RNA, 80 nt, Homo sapiens
ggaagacgcggccgcggcgccgggccgcagcggcccggacccgagagcggagcagggagagcaggaccacacacggaggg

SEQ ID NO: 266 - RNA, 82 nt, Homo sapiens
cgcaggcagcgggagccgccggaggaccgggacaccgcggaagcgggaaagggagacaaggggcccagcccaaagaagcaca

SEQ ID NO: 267 - RNA, 77 nt, Homo sapiens
gcgcgagaagagagacgagagagaagaggagagagaagaggcacccacagaaggagaacaagcagagcaccggacac

SEQ ID NO: 268 - RNA, 60 nt, Homo sapiens
caacagaggagcccagagcagggccagacgaaggccccgcccaaaacgaagagaaagcag

SEQ ID NO: 269 - RNA, 78 nt, Homo sapiens
ccggacgacacagcgaggccgccaacaccgggcccgggcaccaccagccccaagcccccagcccacgacacagcgacc

SEQ ID NO: 270 - RNA, 83 nt, Homo sapiens
aaagccccagcgcgcgcccggacagacaaggaggaagccagcccgagcaggcccaggggaggaggggcaaccacagacccgcc

SEQ ID NO: 271 - RNA, 52 nt, Homo sapiens
cagcaaaagaagccaacccgggacccccccgcccacgcccaaacgccaggcg

SEQ ID NO: 272 - RNA, 71 nt, Homo sapiens
gaccaagcccagcggaacgccccgcacgaaccaacaaacagaaccaacaggacaacaaaaggacagcccag

SEQ ID NO: 273 - RNA, 51 nt, Homo sapiens
caaagaaagaagcaccgaaggcgccccggcaaggccaccgcagaagccaca

SEQ ID NO: 274 - RNA, 33 nt, Homo sapiens
aagaacgacgacgccgacaaaaggacagcgaca

SEQ ID NO: 275 - RNA, 42 nt, Homo sapiens
gagcgaggcggcgcggccagaagcccgggaccgggagcccgg

SEQ ID NO: 276 - RNA, 51 nt, Homo sapiens
aaaaggcccaggcaaagcggcagagggagaagcacccaacgaaaagaggcc

SEQ ID NO: 277 - RNA, 77 nt, Homo sapiens
cgcgaacgagacacggaaaaacaaaggaacgcaagggcgagaacaccccaccagaccacccagcaagcccacaaaaa

SEQ ID NO: 278 - RNA, 78 nt, Homo sapiens
ccgaccaccccagcaccagcccagagggaaagcacaccaccccagccagcacgcagaagccagcggacgcccgcaacg

SEQ ID NO: 279 - RNA, 80 nt, Homo sapiens
gagaagcggaggggcagcagaaaccacccacccaaggaagacccacgccacaccaccccccagaggggaaagaaaaagag

SEQ ID NO: 280 - RNA, 72 nt, Homo sapiens
ccaaaaggagaagaaacgagcggcggagaccggaaagagccaagccgaagacaaacaacaagaaggagaaag

SEQ ID NO: 281 - RNA, 59 nt, Homo sapiens
gggcccgcggagcgccgaggccgggaacggaaacaaagagccccgggaaaagaaaaaaa

SEQ ID NO: 282 - RNA, 79 nt, Homo sapiens
aaaaagacaccacacccacacccacacggcaaacacccccaccgcccaggcaacaaagagacaagacgcagacaacgga

SEQ ID NO: 283 - RNA, 75 nt, Homo sapiens
agggaagggaaaagagccgggaacaaggggagcggaggccaagggagcacgaggagagaaaccagaagagcgagc

SEQ ID NO: 284 - RNA, 54 nt, Homo sapiens
caggccaccacagaaacaaaagcaacaaagaggacagcgcacgaaacacacaaa

SEQ ID NO: 285 - RNA, 49 nt, Homo sapiens
cgccgcacggaaaacaccaccagccagcgggaggaagcgcacaccgccc

SEQ ID NO: 286 - RNA, 80 nt, Homo sapiens
ccaaacccaccgcaagacagggaagcgacgaaaagagagacgagacggaaccccgcaaagcagcaggggggcccagccgg

SEQ ID NO: 287 - RNA, 85 nt, Homo sapiens
cgaggccggcgcgccacacagcggagggccgggcaggcagcaccgagccaacaggaaccagacagcgaggcccagggcaggcaga

SEQ ID NO: 288 - RNA, 56 nt, Homo sapiens
aagcccaggccggcagccgcccaggaaacgacaaaaaaagagagaaaagcgggaaa

SEQ ID NO: 289 - RNA, 74 nt, Homo sapiens
caccgggcagcgagacgaaaaacggaacaacgagagcgccccaagggagccagcgcagccacacaagcacacca

SEQ ID NO: 290 - RNA, 84 nt, Homo sapiens
acgaaccgagccacaacagccaaggaaaaaaagcagagaggagcggggagcaagcagcgaaggagaggaaaagaggacaaggca

SEQ ID NO: 291 - RNA, 64 nt, Homo sapiens
acgggccgcgggccgggccggaaaggaagggccaggacaccagaaacgcgcgaaacagacagca

SEQ ID NO: 292 - RNA, 77 nt, Homo sapiens
agaagaaggacaacgacaaaaaggaggagacagcaaggaagaagaaaagagagccaaggcggcaaaacccaaaacca

SEQ ID NO: 293 - RNA, 69 nt, Homo sapiens
gcccagccccggagacccccgcccaaagaaaaacccggaccaccaagcaggccaagcagcccaagacag

SEQ ID NO: 294 - RNA, 72 nt, Homo sapiens
aaaggggcgccgccagaagacacaaggacagaagaacgcacccaacccagacaccagagacagaaaaagcca

SEQ ID NO: 295 - RNA, 41 nt, Homo sapiens
ggacaccaacacagagagacggcacccggaggagaagaggc

SEQ ID NO: 296 - RNA, 57 nt, Homo sapiens
gacccagcgggaccggaacagcacacgcacaacccaagcgaaaccagaagcccagac

SEQ ID NO: 297 - RNA, 71 nt, Homo sapiens
gggagagcggaaccgcacgggccggcagaacaagaagggcaaccaggggggaaggagggagcggagaacgc

SEQ ID NO: 298 - RNA, 63 nt, Homo sapiens
ccgcgcgcggcgagccgagcggcaccccgcagccgagagccagcaacccaaggaaaggagaaa

SEQ ID NO: 299 - RNA, 66 nt, Homo sapiens
gaagaacccgcgaagaagcacagggacagccggagagcgcagccaaggaaaagaacccaggacgcg

SEQ ID NO: 300 - RNA, 77 nt, Homo sapiens
ggcgcaggaagccagccgcgccgacagcacgcagagcggagaagccccagaccagacgacaaaacggaacaagggcc

SEQ ID NO: 301 - RNA, 69 nt, Homo sapiens
aaagccgaggaaacgccaacccgaagagacacgaaaacggacaaaacaaaaccaaacgacaaagaggcg

SEQ ID NO: 302 - RNA, 55 nt, Homo sapiens
ccgacgccccacccgcccaggaagcaccggacgggcaacaacaggacagcaacgg

SEQ ID NO: 303 - RNA, 74 nt, Homo sapiens
aacaaccagcgggcacggacccccacccggcaccaccaccagagccgggacagaggagaccgacagggggaaga

SEQ ID NO: 304 - RNA, 77 nt, Homo sapiens
cgaccggaccgcaggacgggagaccaagggaggacggcggaacacggaggcgggaaagggaaaaagacccgagaagc

SEQ ID NO: 305 - RNA, 79 nt, Homo sapiens
ggcagggcaagaaagaaggggaacggggggccacgacgggccaaagcggagaagacacaaggcgcagcgcgccaaaggg

SEQ ID NO: 306 - RNA, 80 nt, Homo sapiens
agaacaaacccgccacgggagacagaggccccaagaaggaggcggcgcccagcggccacacgccccaagcgccacgcccg

SEQ ID NO: 307 - RNA, 74 nt, Homo sapiens
ccaccggaccccccaacaccccacgaaggcggcaccaagagcccaaaaggcagagcgaggagagaagaaggagg

SEQ ID NO: 308 - RNA, 79 nt, Homo sapiens
ggagaccccaccgccggcgcgggaaacgggcgaagcgacgagccgcgaggaggaggagagggaagggagcggccgggca

SEQ ID NO: 309 - RNA, 79 nt, Homo sapiens
aacccgcccaagcaacagaggagcccagagcaggccccgagcccgagcccgaagccaggcggaacgggcagccacagcc

SEQ ID NO: 310 - RNA, 83 nt, Homo sapiens
aaggaaacgggcagaaaggggccggggggggcacagagccccggaagacagcccccagcgaccagacccagggccagagcgag

SEQ ID NO: 311 - RNA, 73 nt, Homo sapiens
ggaacgcagcgcgcaggaccacggggaaagccaagagcgcgacccgccaaaaccgaccagcaagcaagaaccg

SEQ ID NO: 312 - RNA, 80 nt, Homo sapiens
aaccggcaccacagcacaacacccaccagcaaaagccgaacaggaccaggacaaacgcacacggaagcgcacacgagaca

SEQ ID NO: 313 - RNA, 55 nt, Homo sapiens
acagggaaggcccgaaggaagccaggagagaggacagggcccggcgaacgacgac

SEQ ID NO: 314 - RNA, 77 nt, Homo sapiens
accggcccaagacaaacgagagaaaaggcacgcaagggcgaaaacagaaaaaaagagagaacagaaaagagaggaag

SEQ ID NO: 315 - RNA, 79 nt, Homo sapiens
ggagcgagcgacgcagagggccgagcccccccgcccagcaggccaagggcaggaccgagccaggagacacgagccggag

SEQ ID NO: 316 - RNA, 68 nt, Homo sapiens
cgccgaagacgaaggaaaaggacaagccgacaggccaagagcagcagaagaagagcgagcagaagaaa

SEQ ID NO: 317 - RNA, 62 nt, Homo sapiens
cagccacccacaaacagagagaaggaaccacccacgcaggcagcgccacgcagagccccgcc

SEQ ID NO: 318 - RNA, 89 nt, Homo sapiens
cggaggcacggaggcggcgcgagagggcagaggagcggcggagagcggccgcgggcgacgggccgagggcccggcaggaaccggaacaa

SEQ ID NO: 319 - RNA, 86 nt, Homo sapiens
cgcgaccgaccgccaaggggacacacagaccacggaccccccgcccgacggcacggagccgcgcgggggccggaggaccagcgagc

SEQ ID NO: 320 - RNA, 87 nt, Homo sapiens
cgccgcccgccgacagccaggcccgggagaaccggaggccggcccgaccgccgcccggacggcgaggagaccaacaggcagcgcaga

SEQ ID NO: 321 - RNA, 43 nt, Homo sapiens
gcggcggcggcggcggcggagcaggccgcgccagggaaccccc

SEQ ID NO: 322 - RNA, 70 nt, Homo sapiens
cgaaccagagagaagaaagggggcccagagagcgggaaagagcaaaaaacaacagggaacggaggagcca

SEQ ID NO: 323 - RNA, 52 nt, Homo sapiens
cggcagacccagcgccggccaggggggaagaagagcgacaagaagacccgac

SEQ ID NO: 324 - RNA, 73 nt, Homo sapiens
ccccaagccacacaacgagacggggccggagccaagccccccaggagaaggagcacgcgcaaccggggcgagg

SEQ ID NO: 325 - RNA, 79 nt, Homo sapiens
cccggacgacccccagcgagccagcggagcgcgcaccacccgaaggcccaaaccccgccagagccgacgggcaaggcag

SEQ ID NO: 326 - RNA, 69 nt, Homo sapiens
ggccgaaggagcagcgagagggcgcaaaaccacaccgaagacccacgcagaggagagaagaagagcccc

SEQ ID NO: 327 - RNA, 72 nt, Homo sapiens
cgccgagcggaccccaagcccaacaggccaacacagcaagcgccgaagccggaaacaccccggaggaaccag

SEQ ID NO: 328 - RNA, 68 nt, Homo sapiens
ggaaacggcccaaaaacgacaccacgaaggacaagaccaaaacccacggaaccgaacacagggagggc

SEQ ID NO: 329 - RNA, 71 nt, Homo sapiens
cacagagagccaggaggaggggaaccaagagcccccaggacaacaagaccaaaagaggcggggcgcaacca

SEQ ID NO: 330 - RNA, 78 nt, Homo sapiens
caagagaagcacaaaacagcagacccaagagcagcggaaaagaccagcacagagcaaacagaacaaaaacaagaaaag

SEQ ID NO: 331 - RNA, 78 nt, Homo sapiens
cgaagcgggcgcgcgcacggcaggacggagcccacgaaggaacagagcaaggaaacaggccgagagaacagcacaggc

SEQ ID NO: 332 - RNA, 69 nt, Homo sapiens
cgaaccccagcagagggccccccgccaccaaaggcccaggagagagggaaagacaacggcaagcggaga

SEQ ID NO: 333 - RNA, 56 nt, Homo sapiens
aaacccaaccaagaaggcccaggagaagccaagcccacagagacggagagagcgac

SEQ ID NO: 334 - RNA, 71 nt, Homo sapiens
cccaaaaccggcgcccagagcacggccccaagcagcaagcaaagacggaggagcagacggcggccaggaga

SEQ ID NO: 335 - RNA, 72 nt, Homo sapiens
gccggcggggggaggccacaggcgcaagcagggggacggcgcgaagaagagaagacaggaacggcaaagcaa

SEQ ID NO: 336 - RNA, 86 nt, Homo sapiens
caaaaagaggcgaccaagcaagccaaccaggcgacccgagagcagccccagaggcccggaccaggcagaccgcccggaccccccac

SEQ ID NO: 337 - RNA, 78 nt, Homo sapiens
acgggaaccagcagcggaggcggacgcgcaggcgcgaggacacaccaaagagaccggagcccaccagccaacaaggcg

SEQ ID NO: 338 - RNA, 43 nt, Homo sapiens
ggaacacccagccccagaaacagcaaagacagaaagcccggag

SEQ ID NO: 339 - RNA, 69 nt, Homo sapiens
cgagccacgacagaggggaacagcgccccccgccaggacacgaagcaaagaagagaaaggaggagccaa

SEQ ID NO: 340 - RNA, 76 nt, Homo sapiens
aagaacccgcagaaggccccacacaaaacgcaggacagggccgggcgccccaacccccaacagcggggcccaggcc

SEQ ID NO: 341 - RNA, 70 nt, Homo sapiens
ggagcaacagccggcaaggagaaaagggaggccacccacgccccagaaacacccgaggaggcgcaaaaga

SEQ ID NO: 342 - RNA, 72 nt, Homo sapiens
ggagccagacacaaaacggaacagagcaacaccagccagccgccagggacaagggacacgggccgaacgcca

SEQ ID NO: 343 - RNA, 90 nt, Homo sapiens
cggacccgcccccgccccgccgcggccaggaggacgagcggaaaaacggagccacgacccacggcagggcaaccccaccgcggaaggcag

SEQ ID NO: 344 - RNA, 95 nt, Homo sapiens
aaacgccgcaccagaagaaggcgggacgccgcaacaccggcgggagccggcagacgaggcaagacaacggcgaaaaagacgccaaggaagcagcc

SEQ ID NO: 345 - RNA, 80 nt, Homo sapiens
agcgcagcgccaggccagccgaagaaggcgagcaggggcgggagagccccgcagaagacgccgacgaggccacaggaagg

SEQ ID NO: 346 - RNA, 67 nt, Homo sapiens
ggacccggcaggccgcccccggcaagagcaacacggacgcggcaaacagagcagagggagaaacgac

SEQ ID NO: 347 - RNA, 76 nt, Homo sapiens
ccggccacaggcagacggcagggccggccacaagcccgcgccagaccaacaagcggcagacccacaccggacacag

SEQ ID NO: 348 - RNA, 54 nt, Homo sapiens
ggccacagacaccgaaggaagaccagaaagaaccaccgacagcgagaacaacac

SEQ ID NO: 349 - RNA, 71 nt, Homo sapiens
cggccccccacgcgcacacaagggagcccccccaccacccccgagaaagcaaaaccagaggcccagaagag

SEQ ID NO: 350 - RNA, 80 nt, Homo sapiens
caggacaaccgggaggggagagaagagagaagaggaagagaagaggaagaaacgacgggcacgggagaagcggcgccccc

SEQ ID NO: 351 - RNA, 109 nt, Homo sapiens
aggcagagggggccacgaaggcccgagacggaggaacaccagggccggcgcgccaagaggcagccaccaacggggacgggaggccccggcaggccgaagagggggggcc

SEQ ID NO: 352 - RNA, 72 nt, Homo sapiens
agacaaagcaaaagccggacagcaggacacaaaccaaaacgagacagaggaggcgaaacgaccccacgagcg

SEQ ID NO: 353 - RNA, 73 nt, Homo sapiens
aaggagggagccgccagaaggaaagcggggcagcaaggcaaggaaaaaacgaagagcaggggaaaacaaaagc

SEQ ID NO: 354 - RNA, 72 nt, Homo sapiens
cagaccgcagaaggccggagacaccagcagccgcagaaggacgccccgaagcgcacaccccccagagagcgg

SEQ ID NO: 355 - RNA, 71 nt, Homo sapiens
aacaacaagccgccaggaggcccgccaaggcaaaacagacaaggaaaaccgccgccggggccagcaagaac

SEQ ID NO: 356 - RNA, 53 nt, Homo sapiens
cggcgacgccccaggggaaaacccccgggaccaggagaggagccaagcccaac

SEQ ID NO: 357 - RNA, 59 nt, Homo sapiens
gaaggccgagagcagagagaccagccagggaggacagaaaggccaaagaagagacgaag

SEQ ID NO: 358 - RNA, 82 nt, Homo sapiens
gccagaccagaggagccggcaagcaaaacccgcagaacggcgccaaacagcaaccagagggcaagaaagccagagcccgaac

SEQ ID NO: 359 - RNA, 53 nt, Homo sapiens
acaagcccccccaggcggacagcgccggaggaagagcggaaaaggcggagacg

SEQ ID NO: 360 - RNA, 79 nt, Homo sapiens
caacgaccgacagcgccaccaggcccccgggggcgcccgccccacagcaaagcagagggacaaaaaaaacaaaacacga

SEQ ID NO: 361 - RNA, 99 nt, Homo sapiens
cgcgacgggccccgagcgacgggcgaagggaggggggcagcggagcccaggcggcagcgccagacaagggaggcgaggacggacaaaaggaaacggacg

SEQ ID NO: 362 - RNA, 73 nt, Homo sapiens
agccagaggccagcagcaacaggcaagaaagaaaaaggcacacaccggaccaacggaaaagagcaaagcagca

SEQ ID NO: 363 - RNA, 71 nt, Homo sapiens
gagcaagcaacagagcgcgggacgggcaaaggaaagaaagggggcaaagaaccccgcaccccgaaagccgg

SEQ ID NO: 364 - RNA, 72 nt, Homo sapiens
aaccaccgggaggccaacggccgcaccgcgcagagagaagagaaggcgaaccaagggaacaaagaaagaaga

SEQ ID NO: 365 - RNA, 53 nt, Homo sapiens
cgaaggcgacagagacagcagaccgaaaagggcggaaaaggaccaaggcccgc

SEQ ID NO: 366 - RNA, 85 nt, Homo sapiens
ccggccccggcgcgagaggcccgggagccgccggccaggacgcccccgaggggagaccgcgccccggagcaaaccggccgcacga

SEQ ID NO: 367 - RNA, 101 nt, Homo sapiens
aagagaagagcagcaagagcaccacaaccacacagccaaaaagaaaaagaacgaccaggacacagagcggcccaagagacaaaaagcgggggagcaggaga

SEQ ID NO: 368 - RNA, 48 nt, Homo sapiens
aaggagccgccaaagccagacgcggccgcgagaaccgggcagagcagc

SEQ ID NO: 369 - RNA, 76 nt, Homo sapiens
caacgccagcagcccccgcccagaacagcaagcacaccgaaaacccccccaggggcaaccaaaagccagaccaaaa

SEQ ID NO: 370 - RNA, 72 nt, Homo sapiens
gcaacggggaccccggagcccagaagacagagggcgagagagcccgagggaaaagacaggcaacaggaaagc

SEQ ID NO: 371 - RNA, 78 nt, Homo sapiens
aaaaggggcgggcggcgacggcggagggcccgggggacaaagcgggaacccccgaaaagaaggagaaaggaacccaaa

SEQ ID NO: 372 - RNA, 43 nt, Homo sapiens
agcggaggaggagccgccgccgccagacccagagaaaggccac

SEQ ID NO: 373 - RNA, 77 nt, Homo sapiens
agaggaagccgaggaccaccacagaaggaagaaggagggccagacaaggggaacacaagaggagagaaggggaccgc

SEQ ID NO: 374 - RNA, 82 nt, Homo sapiens
gaagccggaggaggcggcagaggacgccccagagcagcgcggccagggcccggcaggaaccggaacaacccacagggcagag

SEQ ID NO: 375 - RNA, 67 nt, Homo sapiens
gaaaaggaggaagaaaacaaccggacacacccgggccaggacagagacggaacagaagacagaaaag

SEQ ID NO: 376 - RNA, 85 nt, Homo sapiens
aggccgacaagaaccccgcagccacccacagggaggaagaggaggagagaagagaggaagcgagcagcacgggcaagcgggcagc

SEQ ID NO: 377 - RNA, 96 nt, Homo sapiens
agaggaccagagcagcccgacgcagcaaaggcaaacggaaagagcaagacggcagcccaaagcagcagaccgccaaagacgcagccaccgcccaca

SEQ ID NO: 378 - RNA, 78 nt, Homo sapiens
aggaagaacagaaaccaagccaacaaaagaagcgccgcaggacacaccggaacaaagaaaaccaaaacgcaacagaaa

SEQ ID NO: 379 - RNA, 85 nt, Homo sapiens
cgcagagcaggcaggaggggcaaggggaacaggcccgcagcccccggaagccaaagacccccagggacccggccccagcaccgcc

SEQ ID NO: 380 - RNA, 74 nt, Homo sapiens
aaaggcggagggaccccaaaaaaaacaagaaccacggcacgaaagggaaaacggacgagaacaagcggaaaaca

SEQ ID NO: 381 - RNA, 63 nt, Homo sapiens
cgcggacacaagaacacggcgggccaagacacccaaggagcccaggagggaggaccaggccgc

SEQ ID NO: 382 - RNA, 73 nt, Homo sapiens
ccgcacaggccccacgacgacagccagacaagagagggcggcagaaggaacaccgagaaaccgcacaccggag

SEQ ID NO: 383 - RNA, 81 nt, Homo sapiens
aaacccaagcccagaccgccaccaaaaacaaagaggagagaaggagagaaaaagagccaaggaagaaccggaggaaaaaag

SEQ ID NO: 384 - RNA, 80 nt, Homo sapiens
ggcccgcgcacgagcccacgcccgaccccggcgcacgccagggaacagagaacaacaaccaggccagaagagcaaagaac

SEQ ID NO: 385 - RNA, 73 nt, Homo sapiens
aaaaacggccaagaggcagaccaggaaaggaccacggaaagaaagacaacaagacacacgacacagaagagag

SEQ ID NO: 386 - RNA, 67 nt, Homo sapiens
gacaagccacacacggcggggccccggaggacgagaggggacgccacgaagcaggaggggaaggcgc

SEQ ID NO: 387 - RNA, 72 nt, Homo sapiens
ccgcaaccgccgcgcgcggcccggcgcgcgcggccggagcccagccgcagcccgccgggggaacagagaggc

SEQ ID NO: 388 - RNA, 41 nt, Homo sapiens
ggagaagagagcggcggaagggggggccggcccaggccggc

SEQ ID NO: 389 - RNA, 71 nt, Homo sapiens
acccgacacgagccaagaaaagaaagagccagccccaagacgcgaagacggggggaccaggagaagaagga

SEQ ID NO: 390 - RNA, 65 nt, Homo sapiens
gaggaccgcggcgaagcaaaggaacgcgccggaagaaaaggccgcaggcgaggccgccccgagcc

SEQ ID NO: 391 - RNA, 78 nt, Homo sapiens
cacgcgcggaaggcagcgcccagcagcgcagcgcgccccagaccaccggcagggaacagccgagcagaccgaggaggc

SEQ ID NO: 392 - RNA, 76 nt, Homo sapiens
aacacgagaaacaaagcaacaaacaacaggcagacgaaagaacggccaggcccccaaggggaaacccaaagagcga

SEQ ID NO: 393 - RNA, 68 nt, Homo sapiens
ggcacacagagaggcgccggaccagaaagccgagacccagaccagcaggaaaaggacagggcgaaccc

SEQ ID NO: 394 - RNA, 38 nt, Homo sapiens
cccccgagcggcgggaacagccccagggaacccgagaa

SEQ ID NO: 395 - RNA, 70 nt, Homo sapiens
aacccgcccaggacaagccgcgcggggacccgacgcccgcacgaacaagagaagcagggagagcaccaaa

SEQ ID NO: 396 - RNA, 72 nt, Homo sapiens
ggcggcggccagcgccacgcgcaggcgacacgagacccacgccaccccaccaagcaaaaccggaaaagacgc

SEQ ID NO: 397 - RNA, 70 nt, Homo sapiens
gccgcgcggcgggaccgggggggacacaagggagcaacagcgagcaacaggcaacgaaaacagacaaaac

SEQ ID NO: 398 - RNA, 70 nt, Homo sapiens
gacacaaaccaccgaacaaagagaccgagagagccacaaacacagagcgcacagcggaggaaagccccag

SEQ ID NO: 399 - RNA, 88 nt, Homo sapiens
cgcaggaggacggagcccaaccgcaacccgcgccgcgccgcgccgcgccgggcccgcacagcggagcgaccccaggcaccaagcaaaa

SEQ ID NO: 400 - RNA, 35 nt, Homo sapiens
accagacagagaacgacgagccaacggaggcagcc

SEQ ID NO: 401 - RNA, 83 nt, Homo sapiens
gaaggaccccaacggggaggccaacggaagaagaaggagggccccggagcagccacaccaccgaggccccacccagcacgagc

SEQ ID NO: 402 - RNA, 56 nt, Homo sapiens
cagaaacaggaagaagagccaaaggacagccagacaagaccccaacgaagggccag

SEQ ID NO: 403 - RNA, 57 nt, Homo sapiens
ggagcgcgcccaggagccccccaccggagcaggacacaggaacgccacaagaaacaa

SEQ ID NO: 404 - RNA, 80 nt, Homo sapiens
ggcagacggacaagagcgcggaacaggacgccccgagcgaagccgacgagcccgaacagacgcaccagcgggaggaagag

SEQ ID NO: 405 - RNA, 80 nt, Homo sapiens
ggcggacgaggacagccagggcaggaaggggggggcgacaacggcaccgggaacaaagaagccacagacaaagagggagg

SEQ ID NO: 406 - RNA, 69 nt, Homo sapiens
gagcacaaagcagaagcacaaagcccgaagcagggacacaaaagcaaccgagagggaaacaaccacgcg

SEQ ID NO: 407 - RNA, 80 nt, Homo sapiens
cggacgcagccgccaccgagacgaggacaccgaccagaccccggaaacagggaggacccagccgccggagggcccaaggg

SEQ ID NO: 408 - RNA, 76 nt, Homo sapiens
ccaagcaggcacagaaagacgaaaccagcggaaaaacagaccagcagggacacagcaggacaagaacgacagaaag

SEQ ID NO: 409 - RNA, 78 nt, Homo sapiens
cggaagaagagaagaggaacaaaagcccgacccagacccagccgccgagcgacggaagacaacgcccgcgagcagaac

SEQ ID NO: 410 - RNA, 76 nt, Homo sapiens
aaggaacagaacgcggccccagccacaccaagcaggcagagcccccgccaggcccccaaaccaaccgcggcccacc

SEQ ID NO: 411 - RNA, 73 nt, Homo sapiens
gacgaagaaggaacccccacggcgaagccagcggacgggcagggcccagcgagaaccagccaaaacacacgaa

SEQ ID NO: 412 - RNA, 81 nt, Homo sapiens
gagaagagagagaaagaccaaggagaaggcggccagggcggaaggagagcgacggaaccagcacaaggagcggagaaggcc

SEQ ID NO: 413 - RNA, 99 nt, Homo sapiens
ggaccgacgcagccacacccccggcccgaccccaccccaaccccgcggcaccccggacgcagagcacgcagccccgaaggcggcccggccccccaaaag

SEQ ID NO: 414 - RNA, 76 nt, Homo sapiens
ccacagaaacagccaaccccaggcagggcagccagcacaggaagaaacgccaggaacacaagaaaagacagcagac

SEQ ID NO: 415 - RNA, 77 nt, Homo sapiens
ggagcaggacgcagaaccaccaaaagccaagaaacgacaagcggaaccagaaccaaaacaaagacaagagaaccaca

SEQ ID NO: 416 - RNA, 88 nt, Homo sapiens
ccgagcccaccgcgccgggccccggacgccgcgcggaaaagaacacaagggaagacaaaacaaagcagggcacaggaaagcagaccgg

SEQ ID NO: 417 - RNA, 75 nt, Homo sapiens
gagcccaccggaagcgacgggacgccaggagacgagccccgggcaggaacagagacagacccgggggcccccaag

SEQ ID NO: 418 - RNA, 76 nt, Homo sapiens
caaaaccagaaagccaaagccaacaggcagaccacagaaacgaagccgggagaacgcccggggccgccaccggaga

SEQ ID NO: 419 - RNA, 79 nt, Homo sapiens
ggggcccagacccacgacggaaaggaaaaccacgcgcccacggacacggcaggcgcgacaagcacaggaaagcggcaac

SEQ ID NO: 420 - RNA, 82 nt, Homo sapiens
ccggaaggccaaaggcgcgcaaggaggaagagcagagaaagggggaggcggacccggcaacacgaaccggaaagccaaggaa

SEQ ID NO: 421 - RNA, 54 nt, Homo sapiens
gcagaagacaagaagaggaggggccagccccaccccaaccaagacaaacgggag

SEQ ID NO: 422 - RNA, 72 nt, Homo sapiens
ccgccggagcaccgcagcggcgcccgcaggggagagaagagggggaaaaaggaaggccgccggacagcgcag

SEQ ID NO: 423 - RNA, 93 nt, Homo sapiens
ccaagagcgacgccgccgggcccaacggcgggccccggcgaggcagcgcggccgcagcagcccgagaaaccagaggcaagcgacgggaaggac

SEQ ID NO: 424 - RNA, 79 nt, Homo sapiens
cggggagaggcacccgagacccacggagaccgcagaccgcaagagaaaaggcaaacagaacaaaacgaagaggagaaag

SEQ ID NO: 425 - RNA, 68 nt, Homo sapiens
gggaccgacgccagacaagacggacacacaacaaaccagagcagcgcaggggaagcccagaggcacgg

SEQ ID NO: 426 - RNA, 77 nt, Homo sapiens
acaaggcgccaaacaagaaaaacaaagccaaggaaaccccaacacagagccaagcgccaagcaacgaggcacgggaa

SEQ ID NO: 427 - RNA, 83 nt, Homo sapiens
cccgagagcgggagcagacgccccaaggggccccagaaccgcaccggcccagaagcagacggaaggccaagcagacaagcagg

SEQ ID NO: 428 - RNA, 68 nt, Homo sapiens
gcaaaaaccggaaagaaaagaaggaggccagcgggacacacaaagaaagacgaaggacacccaaaggg

SEQ ID NO: 429 - RNA, 82 nt, Homo sapiens
caacagcaccgagccagccaagaagagagggaagaaagagccaaacaggcgagaggaagaagcaaagacaaagcaagagaac

SEQ ID NO: 430 - RNA, 75 nt, Homo sapiens
gcagacgaagaccaacgaaagaaaacacacacacacaagggaggcaagcaggggggcaaaggaaagaaggcagaa

SEQ ID NO: 431 - RNA, 79 nt, Homo sapiens
gggccgagggcccaaaggggacaagacaaggaccacccaagcgggcgccagggccagcacaccagaaggaaacggccag

SEQ ID NO: 432 - RNA, 82 nt, Homo sapiens
cagacggcccaacgaggcgagggcgccccaggagacgcagaccaaaaagagccaagcgagaagagagaaccacaaagggcag

SEQ ID NO: 433 - RNA, 76 nt, Homo sapiens
ggagcgcccgggccccagcagggccagagaccacggaagccccgccgggcgggcaaaccgggagcgcacccacgag

SEQ ID NO: 434 - RNA, 89 nt, Homo sapiens
caagagacaagcaggacagccaaaccaaccgcccccacgacgagcaacgagccaacaaacaacaaagacagcagcagaacggaaaacaa

SEQ ID NO: 435 - RNA, 72 nt, Homo sapiens
caagggcccagggacaagagggaaaggagagggacaggaacaccagcgagccgccgagaagcggagcgaaag

SEQ ID NO: 436 - RNA, 76 nt, Homo sapiens
cgaccacgcagagacgccccgaggagcgagagaagacgccggcccccgcgaagccccagagccgccaggcagaaga

SEQ ID NO: 437 - RNA, 68 nt, Homo sapiens
caaagaaggaagcacggcggacgagggacaagagcggagcagcggaaagcaaagaagcgggagaagcc

SEQ ID NO: 438 - RNA, 72 nt, Homo sapiens
gaaacggaggcaccaacccccacacgcccggggaaccagaaccggaacagaagacagggaaggacccaagag

SEQ ID NO: 439 - RNA, 81 nt, Homo sapiens
agacaagaacaaggacccggaaagccggagaaaaaggagaagcggcaagcaaggaagaagcaaagaagcagagaagaacag

SEQ ID NO: 440 - RNA, 78 nt, Homo sapiens
gcacagaagagacccgccgaacaacagcaaaaagaaggggcagaagcgaaggaggaaaccagaaccgggcaaggaaag

SEQ ID NO: 441 - RNA, 84 nt, Homo sapiens
cgacgcggacagcacagcccgagcgcgcaagcccgacggcaccccgccccaccgccgaccaagaaggacgccccgagaggcccc

SEQ ID NO: 442 - RNA, 75 nt, Homo sapiens
gagggcggggcgccgccgaagacagaaaaggacggaagggagcgcaagagaaaagaaacaggagacccagcggaa

SEQ ID NO: 443 - RNA, 52 nt, Homo sapiens
gacggaagccccaacaagagcggaaaagaggccccaacaaaccgaacaggca

SEQ ID NO: 444 - RNA, 53 nt, Homo sapiens
cgggcccacaggggcggagaacggaaaagcaccaggaagcagagaggaccgca

SEQ ID NO: 445 - RNA, 79 nt, Homo sapiens
gaaaagaacagacacgccagcggaggaggagcagggagacgcagccccgcgaaacgaagcccccacaccaaagaacagc

SEQ ID NO: 446 - RNA, 88 nt, Homo sapiens
caaggcggagcaggaagagaggaggaaaagagacagaggaagaggaggccacgcggacgagcggagaccaggaggccacggagacacg

SEQ ID NO: 447 - RNA, 61 nt, Homo sapiens
agcagggcagccacgaggggaccaaaccccacacccagggagagggcggggacacagcggg

SEQ ID NO: 448 - RNA, 81 nt, Homo sapiens
aaaaacaagaaacagcagccaaccaggcccgagacaaaaaggcagggggaggcaagcccaggaaagagagaaacggacgaa

SEQ ID NO: 449 - RNA, 37 nt, Homo sapiens
cccgcagcggcccccgccgggagccagcaggccaagg

SEQ ID NO: 450 - RNA, 68 nt, Homo sapiens
ggacacacaaagggcccacaagcgccagaaaggcacccgaaaggggaaggaaaagaaggaagaacagg

SEQ ID NO: 451 - RNA, 74 nt, Homo sapiens
cggaagcggacgaccacaaccgagagacgccacagaggagagggggccacacccacagacagcagccagccacg

SEQ ID NO: 452 - RNA, 75 nt, Homo sapiens
ccgcccgccacgagcgccccccgagcggggggacgcgccaggcacagcagcaggacagcccaaggcggaaaagcg

SEQ ID NO: 453 - RNA, 58 nt, Homo sapiens
cgccagccaaaaccccaccggacgccccagaaaagagaacccaggacgagaaaaaaca

SEQ ID NO: 454 - RNA, 76 nt, Homo sapiens
cggggcggggaccgccgcccgggaacggccaacagcccagcacaagacgcccaggaagcacaaagaagaaggcaca

SEQ ID NO: 455 - RNA, 79 nt, Homo sapiens
ccaaccacgcggcgcgagccccgcccccgccgccgcgcacaaccgcacggcagacccaacagaggaagccgcaagaaac

SEQ ID NO: 456 - RNA, 74 nt, Homo sapiens
aaaaaagacagaagacgcgaacagagcacggaaaacccagaaggcaccggaaggcacaccggcagcaccacaaa

SEQ ID NO: 457 - RNA, 80 nt, Homo sapiens
ggggcggcgccgggccgcgccgaggcgaggcccaaggagggcgcagcacggccggcgagccaaaaccaggcgggagggga

SEQ ID NO: 458 - RNA, 85 nt, Homo sapiens
gaaaccagaaaaacagaaagcagcgcacaaaacaggccgcagaccaagaagaaaaacacacgaggaacgccgaagacagcgcaag

SEQ ID NO: 459 - RNA, 50 nt, Homo sapiens
gagcaaagagggagaaccgaccggacaggacacaaagcccccaaaaggag

SEQ ID NO: 460 - RNA, 84 nt, Homo sapiens
aaaacccagcgagaccgggccggaacgaaagcaggacggaggagcgaccaccgccaccaggcaggcaaccagcgggaccagagg

SEQ ID NO: 461 - RNA, 74 nt, Homo sapiens
aaggccgggcggacgcagggcaccccgaagagaagagcagcagcggggccacgggcaaagacaccaaccgaagg

SEQ ID NO: 462 - RNA, 49 nt, Homo sapiens
caaccgccacggaagggcggcggccggggcagcgccgcgagccagcaac

SEQ ID NO: 463 - RNA, 81 nt, Homo sapiens
acccgaaaaacaaccacacgccgaccggacaggagcaggcagagagaaaaggacgacggaaccaccacgaaaaaaagcaca

SEQ ID NO: 464 - RNA, 71 nt, Homo sapiens
acagcacgcagcagccaaccacgacacagagggcgaaaaagaacgaccaggacacagagcggcccaagaga

SEQ ID NO: 465 - RNA, 79 nt, Homo sapiens
ggacaagaaaggaagaacagaaaccaagccaacaaaagaagcgccgcaggagaccggaaaccgagagaaacgaagacga

SEQ ID NO: 466 - RNA, 75 nt, Homo sapiens
cgcacacggacccggaacgcccggggagcaaagacacagcaacgagggaagaaccaggcaggaggcacaaggggc

SEQ ID NO: 467 - RNA, 65 nt, Homo sapiens
gagagccgggaaggccgacagggagacgacagaagagacgggggagcaagagagagaacccgagc

SEQ ID NO: 468 - RNA, 67 nt, Homo sapiens
gcggggcccaaggcgccacaaggcaagaagcgaaagaagagaagccaggcagggaaaagaaacgacg

SEQ ID NO: 469 - RNA, 81 nt, Homo sapiens
ggggaggacccgaccaggccacgacccgacgggagaggaagcagagcacggaaagcacgcccagacaagccggcagacacg

SEQ ID NO: 470 - RNA, 64 nt, Homo sapiens
acggcagcaggcgcgcacagccgagagacagacgcgaagcaaagcgccacccagaagacgacag

SEQ ID NO: 471 - RNA, 55 nt, Homo sapiens
cacggcggaaacaaccgcaaaaaggaaagcgcaccaagaagagcccggagagcga

SEQ ID NO: 472 - RNA, 78 nt, Homo sapiens
aggagacccggccaagaaaaagcagcgagggaagccgagagaaggcgggaagagagaaacgaggcggggagagaagca

SEQ ID NO: 473 - RNA, 55 nt, Homo sapiens
gcgggggcccgagaagccgacggagcggggcccggcgcacccaccaccgccgccc

SEQ ID NO: 474 - RNA, 35 nt, Homo sapiens
aagcaagccgccaaaggagaagcgccaccccaagc

SEQ ID NO: 475 - RNA, 72 nt, Homo sapiens
ggccccaccgggacgggaacagccaagcagacacaagacaccccgcggcccccgcccccgcgggcccggacc

SEQ ID NO: 476 - RNA, 55 nt, Homo sapiens
gacacagggcaaagcaaagggcaaggccacaggccccaagaaccgacgagccccg

SEQ ID NO: 477 - RNA, 60 nt, Homo sapiens
gaccacgaggcaacgccccagaccgcgaagcgaacacgagacagaaaaccacggccaaaa

SEQ ID NO: 478 - RNA, 56 nt, Homo sapiens
caacaggaacagaagcacgaaagaaggggaaaaagaaaagggcgaagacccgaagc

SEQ ID NO: 479 - RNA, 80 nt, Homo sapiens
cgcacaaggaccgggacccgcccagggagacgaggacgagccaggacaaaaccaggcagaaccaacacgaacccaagcac

SEQ ID NO: 480 - RNA, 77 nt, Homo sapiens
ggaagccgggagagaaacacagagccagccaaggaaaaggaacagagagagcagaaccgaaacggggaaagaccgaa

SEQ ID NO: 481 - RNA, 50 nt, Homo sapiens
caagagagaaggggagaacagagaaggggaccaacagggcggaacagcca

SEQ ID NO: 482 - RNA, 59 nt, Homo sapiens
aagccgcacagagcaagcaggcagaaaagagaccccggacggacgcacagcaggaggcg

SEQ ID NO: 483 - RNA, 84 nt, Homo sapiens
gggagagggggaggcgcggcggccgcagcgccacaaaccaggagacgagcgccaaagacagaagcaagcagaaaagagcaacac

SEQ ID NO: 484 - RNA, 77 nt, Homo sapiens
ccagcccccaagagcgggaacagaccgagagcagaccgaaagaacacaagagaaggacagaggcccaccgaggcggg

SEQ ID NO: 485 - RNA, 73 nt, Homo sapiens
ggagaaccaagacaacacgacgccaagacagacggacaaaggccccaccacagaaaggaaagaggagggaggg

SEQ ID NO: 486 - RNA, 76 nt, Homo sapiens
agacaggaggccggggcacgccacccagggggacacagcggaaaacacggaggagaaggacccgaacacggaagaa

SEQ ID NO: 487 - RNA, 104 nt, Homo sapiens
gaccaggagcgcaggcagcagcccacggaaaaaaagacgggaccaagaaaggcccagggaccaaagcccggacaaggcccgagcaccaggaccgcagaaggccc

SEQ ID NO: 488 - RNA, 85 nt, Homo sapiens
cgagacccgggcgggggcaccgagggcaccacgcgcggaaagccaaacggcccgcggcaacaaagcacagccccgaagacaggaa

SEQ ID NO: 489 - RNA, 78 nt, Homo sapiens
cccccaccggcacagccgaggggccccgagagaacagggcaaagccaagacaacaggcacaaagagagaaggaacacc

SEQ ID NO: 490 - RNA, 65 nt, Homo sapiens
gaagcggacggagaggagcgcggccagccaggcgccgggggccaggcacgggagacgaaacgccc

SEQ ID NO: 491 - RNA, 71 nt, Homo sapiens
gggagaggaaggacaaccccagggggcaggcacacgaaaagcaccgagcagaaggcccgaacaggcacgaa

SEQ ID NO: 492 - RNA, 73 nt, Homo sapiens
agccggagcgccccccaaagccagaagggagggcaagcagaaagcagaggaaaacgaacaacacccaaagcca

SEQ ID NO: 493 - RNA, 51 nt, Homo sapiens
gccaggagcacagaagagcgaggagacacggaccaagcgcaggcagcgcca

SEQ ID NO: 494 - RNA, 68 nt, Homo sapiens
gggaggagagagggagagccaaagaagccccacccagcaaacaagccgaagggaacagcgcggggccg

SEQ ID NO: 495 - RNA, 68 nt, Homo sapiens
aagaacagaaggaacgcagaaacacaggaccccccccaacgagaggcggacacgagcgaaccgaaaag

SEQ ID NO: 496 - RNA, 74 nt, Homo sapiens
caacaaaccgacggcaggcaaggggccccaaggagccccaaaggcccagcgacacccgaaacacagagcgcggg

SEQ ID NO: 497 - RNA, 71 nt, Homo sapiens
ggaggggcacggggacgagacgaggagaaggagagaagacccccggccggggccggcggcgggcgcccgcg

SEQ ID NO: 498 - RNA, 76 nt, Homo sapiens
gaaaaccaacgaggggacccacgcaccaccgacacagcaaagcgacacgccacaccaccgagggaagggaaggcgg

SEQ ID NO: 499 - RNA, 73 nt, Homo sapiens
caacacagagggacaaccagaagggaagacaccaccaggccgggcgggggcgacagccggcgaagcccgccgc

SEQ ID NO: 500 - RNA, 78 nt, Homo sapiens
gggagaagccaaggagcgcgcccaagcacggcagaggcagcccgcgccccgcgccgcaagagggggcccgggggagac

SEQ ID NO: 501 - RNA, 67 nt, Homo sapiens
ccagcaaggcagaaccaacaggaccccccacaggacagaagaaaaagaaacagaccgacggaaaaaa

SEQ ID NO: 502 - RNA, 38 nt, Homo sapiens
gaccagaccgcccaggaaacggcaaggacacggagcca

SEQ ID NO: 503 - RNA, 69 nt, Homo sapiens
agaagccaaccaggcagcagaggacccgaaaagcgaaaagaaacagagaggagggagaaaaagccaggc

SEQ ID NO: 504 - RNA, 81 nt, Homo sapiens
gcaagacaccggacaccgagggcccccaaaagagaagaggcgaaagaagagggaaaagacgagcaggagaagaaaacaaga

SEQ ID NO: 505 - RNA, 80 nt, Homo sapiens
aggaaacaggcggcggcggggggagcgggaagagccgccaaaacacaaaaccagaaagaaggagaaagaaaaaaagggca

SEQ ID NO: 506 - RNA, 81 nt, Homo sapiens
ggacaagaagggcaaagccgaaaaaacccaacaccccgggagaagggaaaagcacaacacaacgggcaggcaagcccgggc

SEQ ID NO: 507 - RNA, 55 nt, Homo sapiens
aggcaggaaaacaagcagggccccacgacacaagcgagcaggcgacccaaaagag

SEQ ID NO: 508 - RNA, 76 nt, Homo sapiens
acccgcagcaaaaacggccacacgacacacagccaggacacggccaaggccggcgagaacgcccgcggcagcgagg

SEQ ID NO: 509 - RNA, 81 nt, Homo sapiens
caggaacaccaaggaagcaaaagccccagaacgacgcgaggcacaggcaaaaacaccaaaaagaagggcggagcacacagg

SEQ ID NO: 510 - RNA, 60 nt, Homo sapiens
cggccggccagccgaagaggggcggcacccccggagaaagaagaaacaaagagggaccca

SEQ ID NO: 511 - RNA, 73 nt, Homo sapiens
cacgggacaccgcaccaaggcggggaagggccaacccaacagcacagagggaacagccccggccgacaggacc

SEQ ID NO: 512 - RNA, 81 nt, Homo sapiens
gaacgggcaacacacacgcacgccggagggcagaaggagaggaaaccagcaggacccagcgcggggagcgggccaccgaga

SEQ ID NO: 513 - RNA, 67 nt, Homo sapiens
gaaccaccggacggcggaaaggcccaggcgccccgcagccccgggcaaggggagcagacaacaaaac

SEQ ID NO: 514 - RNA, 88 nt, Homo sapiens
aggcaggcgcggcgccggcggcgggacgaagagggacgggcccgcggcgagcgagcccgaggaagcaagaggcccccaagaacacacc

SEQ ID NO: 515 - RNA, 41 nt, Homo sapiens
ccgggcaccgaggaccagccaagacagcaccaggacaaaag

SEQ ID NO: 516 - RNA, 72 nt, Homo sapiens
gcgggaagagaacaaaaaacaccacagacacgcacaggagaagggcccggagagcaaggagagcgaaaggaa

SEQ ID NO: 517 - RNA, 86 nt, Homo sapiens
ggagggcacagcacgcaccgcagacaagccgccagccccgaggcagaacccaggaacaacccagagacacaagcagcgaggaccag

SEQ ID NO: 518 - RNA, 73 nt, Homo sapiens
gaccaaaagagagggacgaaagagaagaccaccagaagacaagaggggcaggaacacccagacaggggaaggg

SEQ ID NO: 519 - RNA, 65 nt, Homo sapiens
gccagggcccgaagagggaagacacgcggaaacaggccaggcacccagagaagcaggcgaagacg

SEQ ID NO: 520 - RNA, 78 nt, Homo sapiens
ggaggagagcgcccgaaggccccagcggaccgacgcagggagaaaagaacgggaaggcccccacagagagcacacaaa

SEQ ID NO: 521 - RNA, 68 nt, Homo sapiens
cgagagcccgacccggagaaagaagaaccaggaagcaacaacgggcagcaagccccagccaagaccca

SEQ ID NO: 522 - RNA, 75 nt, Homo sapiens
cccgggggcgagcacaaacggggcggggccggggaacacacagggcggaaaacaccccaaaagccaaaagggaaa

SEQ ID NO: 523 - RNA, 84 nt, Homo sapiens
aaggaagcaagcagcagaagagccaaggaaaaacagcaagaacccaaaagggcagcccaagagaacgaaagcaaaaagcgccga

SEQ ID NO: 524 - RNA, 76 nt, Homo sapiens
gcgcccgggccggggagcaagcgccaggccccgagccccggccccaaagacccaaaacagagacaccccccagccc

SEQ ID NO: 525 - RNA, 58 nt, Homo sapiens
ggccgagcaggcgagcgaacgacgggaaacccagacgacaaggaaggccaagggaccc

SEQ ID NO: 526 - RNA, 82 nt, Homo sapiens
ggagccggcgccgggcacggcacgggggccggacgcacggcccggcagcagacgaacaagggacccacgggaaggggggacc

SEQ ID NO: 527 - RNA, 82 nt, Homo sapiens
cacaggagcgagagcaaacagaaggggcagaccaacaccacccagcaaaaaccccgacgaacgcgccagggagcgccagaca

SEQ ID NO: 528 - RNA, 47 nt, Homo sapiens
cgcagcagagcgccaagacgggccgggagacgcaaaaagaggcacca

SEQ ID NO: 529 - RNA, 74 nt, Homo sapiens
agagaacggaaaaagcgaagcacgcccggcccacacgcagcccggccagcccaacagcgcgcaaccccggacac

SEQ ID NO: 530 - RNA, 85 nt, Homo sapiens
gacgacaggcgaggccgagaagcagacgaagacccgccgcgaaccaggcaccagccccgagagggaaaaggacggaggccaagca

SEQ ID NO: 531 - RNA, 77 nt, Homo sapiens
gcaaccgccgccccgcagagcggcgaaccggggcaggagccccgacaagggaccgggcgggccccgcaggaaacccc

SEQ ID NO: 532 - RNA, 69 nt, Homo sapiens
cgaaccggacggaaaggaagagcagacaggccaaaccacaggggggccgaacgccaacgaccagacgac

SEQ ID NO: 533 - RNA, 63 nt, Homo sapiens
gcaaaggccaaggggcggcaaaaaggcggaagaaacggacaccaccagagcaagccccgaagc

SEQ ID NO: 534 - RNA, 70 nt, Homo sapiens
cgcggagcgaaccacggggacgacaccgaccaagcgcccccggcgggcgaaagagaagaaggagcaaaac

SEQ ID NO: 535 - RNA, 55 nt, Homo sapiens
acagaaaaccagagaccaaaggcgccgcgcccggggagacagaaacgaggcgccc

SEQ ID NO: 536 - RNA, 67 nt, Homo sapiens
caaggaaacgcccgcgggacacgcagcaggcaacaaaagaaaaagaccacagagaggaaggaagcaa

SEQ ID NO: 537 - RNA, 87 nt, Homo sapiens
cggacaccaccaggggacggcacggacgacagaagcgacgggagaccggaaggccaggagaagcgagacccccccggggagcgaccg

SEQ ID NO: 538 - RNA, 70 nt, Homo sapiens
gcgcccagccaaccaaaaggcgaccacagcagcccgcagagccgcacaccccgaaggccgcaaggacgaa

SEQ ID NO: 539 - RNA, 39 nt, Homo sapiens
cagccgccaccgagacgaggcccgggcgaaccgccgcgc

SEQ ID NO: 540 - RNA, 80 nt, Homo sapiens
ggccgacaagaggcggacggggagcgaacgggacagcccacacccggcgcggagggacccaaaccaaaaagggggaagaa

SEQ ID NO: 541 - RNA, 68 nt, Homo sapiens
gaagcagaaaaccagaagcacaaggacagagcacccaccacaggagggcgaagagagaacacgcacgg

SEQ ID NO: 542 - RNA, 36 nt, Homo sapiens
agaaaccaaaacgcaaagcccggaaaggaaaaacag

SEQ ID NO: 543 - RNA, 76 nt, Homo sapiens
cacccaaagcaaacaaggaggcacacaaagacagccgcacacaaggaacggcagagacacccagaaagaacaccag

SEQ ID NO: 544 - RNA, 78 nt, Homo sapiens
accgaacagaaggaacgacgcggaccagaagccagagcgaggacgccggcagcccgccggaaaggagacacagaaaca

SEQ ID NO: 545 - RNA, 81 nt, Homo sapiens
aggccggacgcacccggggggcccagaagaacacaccggaaggcacaaaggacagaaggcagcagcgcagaaagcggcggg

SEQ ID NO: 546 - RNA, 78 nt, Homo sapiens
gcgacagagaggaccaccccgaaacccccggcggcgccggggcccgccgcagaccggaccagagcggagcgagcacag

SEQ ID NO: 547 - RNA, 73 nt, Homo sapiens
cgcagaagaaggaccggagaaccacccaaaccgacgcaaccaggagcagagaccccgcgccggcagccccccg

SEQ ID NO: 548 - RNA, 82 nt, Homo sapiens
aacaccccggggaaagcagaagccaaggcaggccagcagaggcaccaccagcccaagcaacagacaccaacagcagagggaa

SEQ ID NO: 549 - RNA, 76 nt, Homo sapiens
cgccccccccgacgggcaccacagggacaaagaggaggacaagaacccacccgcgcccaaccggccagaacacaac

SEQ ID NO: 550 - RNA, 69 nt, Homo sapiens
ccgaaagcccgccacaacggcagcgacaccgcagacaacccacggcaaagaacagaaagccaaagggag

SEQ ID NO: 551 - RNA, 55 nt, Homo sapiens
acacagcgaccgggagcacaccacaggcaagccagagacgcgcacgaaacgacga

SEQ ID NO: 552 - RNA, 78 nt, Homo sapiens
aacagagccaaaccagaagaggagggcccagaagaaaaaggaaccggaaccgaagaagaacaaagacaagaacacaaa

SEQ ID NO: 553 - RNA, 72 nt, Homo sapiens
gaggcgggccagcgacaaaaagagaagaccgcgcgcggggaagacaccacacaaggagaagacacaacggac

SEQ ID NO: 554 - RNA, 80 nt, Homo sapiens
aaaaacagaacaggaggggagagggcaggaaccaccgcccaaaggaacaccaccccagagcaagcccaaggcacgaccgg

SEQ ID NO: 555 - RNA, 74 nt, Homo sapiens
cggggacaggaaggggcagacaagcacgccgcccagacaacccccgaaggagggacccagacacccccgcagca

SEQ ID NO: 556 - RNA, 61 nt, Homo sapiens
ccgccagagcgcggccgccaagacggcgagcaaaacacaagaaccaaaagcacacggagaa

SEQ ID NO: 557 - RNA, 74 nt, Homo sapiens
acggccaggcccacaacagcaacagcgaagcgccgggaagagcagacagagacccaccaaggggggaaaaggac

SEQ ID NO: 558 - RNA, 58 nt, Homo sapiens
acggcgacggacacgaggagcagaagcagcggagccggagcgaggcgggggaggcagc

SEQ ID NO: 559 - RNA, 64 nt, Homo sapiens
gcgaaaggccgagagaagcggccgccacgagagaaaaaggaggcaaaagcggcccaccgcgggg

SEQ ID NO: 560 - RNA, 81 nt, Homo sapiens
gagaaagccacagaccggagccccagagccaggcagggggagaaccgcgagggagccccgggaagagccggaggagagaca

SEQ ID NO: 561 - RNA, 82 nt, Homo sapiens
gggaaagaccacgaccgcagggaggagaggcgagaagaggagaagaagagggcacgggagccacgagaccaccaagaggggc

SEQ ID NO: 562 - RNA, 80 nt, Homo sapiens
cggagacggcgaggagagcgaaagaacaaggaaggccacagaggaaacgccacccgaaaccagggggcccaagggcgagg

SEQ ID NO: 563 - RNA, 63 nt, Homo sapiens
ggagaaagaagcccaagacaagaccaaaagacggcagagaggccaagaagcagaagccaggcc

SEQ ID NO: 564 - RNA, 75 nt, Homo sapiens
ccgcagccaccgaaaaggcaaaaagacgccgcccacaccgcgagcgccaacacaccacagagcaccagaagggag

SEQ ID NO: 565 - RNA, 77 nt, Homo sapiens
aaaaaagacccagaagaaagccagcaaaacccaccgccagccagcaggcgaacccccgggacggcccggagaagaag

SEQ ID NO: 566 - RNA, 79 nt, Homo sapiens
gggggagacagcacggaacgcaagaggagcaggcaaaagcgcacagccagaagaaaccgggaggaccgagaacagcgcc

SEQ ID NO: 567 - RNA, 68 nt, Homo sapiens
gagccccaggacaaacaaggggagagggcacggaaagaccaaggaggcgcccaggaagaaagacacag

SEQ ID NO: 568 - RNA, 68 nt, Homo sapiens
cgacgaaggacacgcaacccccagcacaggagcggcgacaagccacacaccaaacccagaacaggaag

SEQ ID NO: 569 - RNA, 85 nt, Homo sapiens
ggaaggggcacgggcacccccgcggccccgggaggcagagcaccagaacagaagaggaacgacagcgccaccccccagaaggcga

SEQ ID NO: 570 - RNA, 76 nt, Homo sapiens
aaaacaggcgcccccacagagaagcagagcagcacaagccagaaccgaccgcgcacagccagcggcacgccacaag

SEQ ID NO: 571 - RNA, 57 nt, Homo sapiens
cgggacggaccaggcgccgcgaccccagacgccgacggcacgagggccccgagacca

SEQ ID NO: 572 - RNA, 79 nt, Homo sapiens
ggaccaaggaagaacccgaagcaccgagacgccccacaaccgcccgggcgcggacggggcccggcgaaccccggcgcgg

SEQ ID NO: 573 - RNA, 78 nt, Homo sapiens
gcacaagggcgaacacagcccacccgcagcagaaagccacggcaagaggggcaacacggagacaccgccaggacaacc

SEQ ID NO: 574 - RNA, 73 nt, Homo sapiens
agaggcggcaagcacgggggaacccccagagcaccaaaagcaccaaccccacggcaccggaccaaaccagaga

SEQ ID NO: 575 - RNA, 69 nt, Homo sapiens
cgaaagagccacacgaccagcagccggggccaaaagaaaggcagaaaaagccaccggagcgaagcgaag

SEQ ID NO: 576 - RNA, 80 nt, Homo sapiens
ggccgcagcggagccacaggaccgccggacagaggagagaagaagaagggggaggccccgggccccgccgaaggacagag

SEQ ID NO: 577 - RNA, 75 nt, Homo sapiens
ggaaaaagcgaaaaaccggagccaacgaaacaaaaagcaggaacaggaaaacggaagccgaaagagacacacgga

SEQ ID NO: 578 - RNA, 39 nt, Homo sapiens
cgggaagagagcgaggagacaagacagggcacccaaaaa

SEQ ID NO: 579 - RNA, 47 nt, Homo sapiens
gaccgagaccgcggccgggaccgagggccaagaaaaggagacggggc

SEQ ID NO: 580 - RNA, 68 nt, Homo sapiens
agacaaaggcaccaggccaccacagaaacaaaagcaacaaagaggggcgacgccaggagcacaccgaa

SEQ ID NO: 581 - RNA, 80 nt, Homo sapiens
aaccgccagggccgggaacaagcgagggccccacggcccaggagccggagagcacagggccgcagaagagcggccggagc

SEQ ID NO: 582 - RNA, 52 nt, Homo sapiens
caagagacaggcagcagaccaagaaccagggcccgagggcaggacagcaggc

SEQ ID NO: 583 - RNA, 60 nt, Homo sapiens
cgggaccgggcgagccgaggaagagagaggccaccgcggcccacgagccgggggaccccg

SEQ ID NO: 584 - RNA, 77 nt, Homo sapiens
agagagcaagaagagccagaccacggcacaagcggagcccggggaaagcaacccaccaagccccacacaggaaggag

SEQ ID NO: 585 - RNA, 75 nt, Homo sapiens
agggcccggcagaaggggccaccagaggccgggcagacgggaggaggccgaagccaaacaggcaggaccggaaag

SEQ ID NO: 586 - RNA, 76 nt, Homo sapiens
acacgggacggaaccggcgccgcgcgcgcggaacagggccgccaggggcccccccagccgaaaagacgaggcgagg

SEQ ID NO: 587 - RNA, 82 nt, Homo sapiens
cgcgcaagagcggcagagcacaggcaccaagccgccggaccgaggaccggaagaagcagaggagccagacaggaggaagacg

SEQ ID NO: 588 - RNA, 57 nt, Homo sapiens
cagcgacgagaaggagacacaccgaggaacgaaagcggcacggagaagaaggaaaag

SEQ ID NO: 589 - RNA, 82 nt, Homo sapiens
ggaagaccggcccagcggaggggcgaccaccggaccggcagagacgcaccacgcccgaggagacccacaaggggcgacagcc

SEQ ID NO: 590 - RNA, 80 nt, Homo sapiens
gcccgacgcacccacgcccccaccccccgagagccgacgagacgccccccggagccccaggccggaagcgcgggcccgca

SEQ ID NO: 591 - RNA, 77 nt, Homo sapiens
ccgggcgcccggcgaaggagccgcggcggggggaaaaggagccccaccaaggaggccgagcacccggagaggaagga

SEQ ID NO: 592 - RNA, 83 nt, Homo sapiens
cagaccgcagaaggccggagacaccagcagggacaaaaacgaacagaagaggacaggagagacgaacccagcgcccacaaacc

SEQ ID NO: 593 - RNA, 72 nt, Homo sapiens
gcccggagcacgaccgaggcgccggcaccaccccagaggcaccacgaagaccccgcccagcccgccaccacc

SEQ ID NO: 594 - RNA, 65 nt, Homo sapiens
aggcgcacggagacccgccggcaccaacaagccaaaggaagagccacggcacaagacggaagggg

SEQ ID NO: 595 - RNA, 74 nt, Homo sapiens
agccgaaggggacgccgggaacagacccacaggaccgcgaacaaggaggccacaaaacacccggacccaccaga

SEQ ID NO: 596 - RNA, 76 nt, Homo sapiens
ggcggaggaagccggagacagcaggggacaggagaagacagaggagccagaccaagagacagcacaggcgagcgag

SEQ ID NO: 597 - RNA, 72 nt, Homo sapiens
cggcacggaaaccagaaggaagcgccggccagaggccggcacacgggaaaaggagcgaacaggggccacagc

SEQ ID NO: 598 - RNA, 80 nt, Homo sapiens
gaaggcagacagcgagggcgacgaagcccgaaaggccgcgcgagcccgagagagggagggagggacgcgacgcccaagaa

SEQ ID NO: 599 - RNA, 68 nt, Homo sapiens
ccagcaggaccgggccagggcaggacaaggacaaggcccagaaagcgggcaccagcgcaaggaaccca

SEQ ID NO: 600 - RNA, 44 nt, Homo sapiens
gaacgggagccaagggacagccgcaggcagaggaggggacacgg

SEQ ID NO: 601 - RNA, 83 nt, Homo sapiens
acaaccgcccaccacgccagccaccacgcggcgcacaacgcaggaacaccgcacgcgcggaggagcgccccccccaacccaac

SEQ ID NO: 602 - RNA, 103 nt, Homo sapiens
aaaccggagggggaaaaaacccaaggcgcaaagaaacgcccaggaaaaaaaggaggaaaccggaaaagaaaagcccagggacacagcaagcaaggaaaaccag

SEQ ID NO: 603 - RNA, 73 nt, Homo sapiens
caccccgcgaaaggaggaggcacagaccccacagcaaccccacccaggggccagacgggagccagaccagggc

SEQ ID NO: 604 - RNA, 74 nt, Homo sapiens
accgaacacaacaaaaagaaaggaaggcccaggaagccaaggcgaaacaacagcccaagccggaaaagcaagag

SEQ ID NO: 605 - RNA, 68 nt, Homo sapiens
caagccggaggagaagcaagaaggcccggacacagcaaaccgggccacaggaaacggcaaaaggcgcc

SEQ ID NO: 606 - RNA, 85 nt, Homo sapiens
aacagggacagcacccaccccggagggggaccacaagacccacgacagagccaggacaaaaccaggcagaaccaacacgaaccca

SEQ ID NO: 607 - RNA, 86 nt, Homo sapiens
ggcaggagcgagaagagagagcagagacagccgcggcgaaaacgcggccaagcgaacgggcggcgaagagagaggaagggccagag

SEQ ID NO: 608 - RNA, 67 nt, Homo sapiens
cagcgagaacaaaggagagaggaccacccagaggagcaacgggaacagaggccgccccgggacagca

SEQ ID NO: 609 - RNA, 82 nt, Homo sapiens
gggaagcgggaaacccacaggaggcaaccacacagaggccgacgcccccaacccaccccacccagagacgagccggggggac

SEQ ID NO: 610 - RNA, 86 nt, Homo sapiens
aaggagcaagagcagcggcgcagaaaggggaggccgggaggacgaagaccagagacaaggccccgagggaggagcccgaaggcgca

SEQ ID NO: 611 - RNA, 81 nt, Homo sapiens
acagcagacagacagccaggcgcccagaggggccccggagccaggacaccagaggaccagaacccacgagaaacagacgag

SEQ ID NO: 612 - RNA, 72 nt, Homo sapiens
acgcaccaggaggaaccccagcgcccagacgcgaggaccggggaacaaaacagacaagacagaaggaccaca

SEQ ID NO: 613 - RNA, 76 nt, Homo sapiens
agagcgagcgagggggggcgcgccggaaaccggagcgcgcagcaggcacaaaccgaagagcccggggcgggacgcc

SEQ ID NO: 614 - RNA, 62 nt, Homo sapiens
cccgggccagccggggcggccggccaggaaccacccgaagaacacacagcaggacgaaagag

SEQ ID NO: 615 - RNA, 42 nt, Homo sapiens
agcagcaggaggacaccaaagaaacccaaaggacaccagagc

SEQ ID NO: 616 - RNA, 74 nt, Homo sapiens
cacaccccagcgcgcaaagcgcgaggggcgaggcgggggaagcaccgcaaacaacaaagcggaaaacaaaaaac

SEQ ID NO: 617 - RNA, 72 nt, Homo sapiens
cggcagagacagcgccagaaccacggcaaaaaagaaaaggcagcgaaaggacaggggcgggagccgagaagc

SEQ ID NO: 618 - RNA, 81 nt, Homo sapiens
gaccccgcgccaggaggaccgcaggaggacgcagacggagccgacgcagcagggcccagggcaaagagggcgcacgagaga

SEQ ID NO: 619 - RNA, 50 nt, Homo sapiens
agagggagagccaaagaagaagaagaacgaaggcgaggacacagaagggg

SEQ ID NO: 620 - RNA, 77 nt, Homo sapiens
aagcggcgagcaaccacggggaagacagggacaacagaccaaggaccacccagggcacaaagacacagaaaagacaa

SEQ ID NO: 621 - RNA, 79 nt, Homo sapiens
aaaacggaaaagcgggaggggagcggaaaaggaagcaccaccgggccgcgacgcacaggaacagagccagaaggagaag

SEQ ID NO: 622 - RNA, 72 nt, Homo sapiens
gacagaggcacaaaaagcggggaccacaccacacaggaagggggagcaacagacaagcccgaaaggaacagc

SEQ ID NO: 623 - RNA, 77 nt, Homo sapiens
caaaacaccggaaaccccagccgggaggggagcgggaggaggccgccacaggccccgggaaaggcccaccagacgcc

SEQ ID NO: 624 - RNA, 84 nt, Homo sapiens
gagagcgcgagagaggagagggcagacggacaagagcgcggaacaggacgccccgaaacaggagggccaaccggggaaggggag

SEQ ID NO: 625 - RNA, 76 nt, Homo sapiens
gcagggacagcgcaggcagcagcacacgacggcgcccaaaacgagagaggacacgcaccacagacccagcaggagc

SEQ ID NO: 626 - RNA, 76 nt, Homo sapiens
cgggcagggcccaccccgcgcccgacaggaaccacaggcccggagaaggaccacacagcgcccaccgccgaacacg

SEQ ID NO: 627 - RNA, 72 nt, Homo sapiens
ggcccccgacgggacagcagaggaaagacggaagcccagaccccgcggccccgcccgcgggcgaggaaagga

SEQ ID NO: 628 - RNA, 56 nt, Homo sapiens
gcgcggaggcagaagcaccagaccgccaagggcgggaggagagaaagaacccacgc

SEQ ID NO: 629 - RNA, 80 nt, Homo sapiens
aagaagacacaaaggacggaggcacggagaagcaaaagcagcggcaagaacgcggccggagcgacaggccgacgcgaacc

SEQ ID NO: 630 - RNA, 71 nt, Homo sapiens
ccaagggggccagccgccgcgcccgcccgacccgccaccgccaggccaggacaaagagagacaccagagcc

SEQ ID NO: 631 - RNA, 54 nt, Homo sapiens
agccccagccaggaggccaccagagcgcacggagaggcaccgcccagggggaag

SEQ ID NO: 632 - RNA, 36 nt, Homo sapiens
agggaaggcgaaaaagggaacgggaacgagaaggaa

SEQ ID NO: 633 - RNA, 57 nt, Homo sapiens
agagcacgagaagcggaagacaccacagcgccgacaaaggccgcgccccacgaggcc

SEQ ID NO: 634 - RNA, 56 nt, Homo sapiens
aaacacagagcagcggcacagggggacacggaaagcacaaggagaaaaaaggccag

SEQ ID NO: 635 - RNA, 79 nt, Homo sapiens
ccgggacaggggagacccgccccaagagcaggaaagccaaccaaccacccagaagggccaaacaaggccaggaaaaaac

SEQ ID NO: 636 - RNA, 85 nt, Homo sapiens
cgcggcgcggacaggcccaaacggacacaaccagagggaagcacgcccgggcacagcggaagagacgacggaacagccccggcga

SEQ ID NO: 637 - RNA, 52 nt, Homo sapiens
aacccgaagcgggcgcgcgcacggcaggacggagggacggaaaaggcgcaca

SEQ ID NO: 638 - RNA, 86 nt, Homo sapiens
cacggaccacacagcgcgggagccacgcagaggacgccggaacacccggaagccgagaaagcccgaaccgacagccacaagggcgc

SEQ ID NO: 639 - RNA, 79 nt, Homo sapiens
aaagaaacaagcggcaagagaggcaccccgaagaggcgaggagcaacccagaccgaaaagacgcggccccaaaggaaac

SEQ ID NO: 640 - RNA, 35 nt, Homo sapiens
cccagaaccaaagaacagcgcagagacaaggaagg

SEQ ID NO: 641 - RNA, 96 nt, Homo sapiens
aagcgccgccaggcccgcaggaccgccggagacagggcaagcgcagcaggagccgcaaagggcaagacaaaacggcaggaaaaaccagaacaaaca

SEQ ID NO: 642 - RNA, 68 nt, Homo sapiens
gacacgggacacggaacgaggcccccgaggagggaacaagccagaccaggaggagaaaacaaaaacca

SEQ ID NO: 643 - RNA, 71 nt, Homo sapiens
acgaaggaggcagaaggacagcccccaagaacgccaggcggaaagagcgaaggagccaacgaggaagcaga

SEQ ID NO: 644 - RNA, 119 nt, Homo sapiens
cgcccccgaaccagagaggcgcgcgacaccgccgccacaccgccgccacaccgccgcgcccagcagccgggcccagcaccagagggccggacccccgccggccgggagggccggcagcc

SEQ ID NO: 645 - RNA, 90 nt, Homo sapiens
gaccgcgccgccccgcgagcacagagcccgccgccgaccgccgcccgccacacccgccgccaggaaggaagcagccaccccgccaggccc

SEQ ID NO: 646 - RNA, 68 nt, Homo sapiens
agaccgaccaccaaaaagcgaggggaaaaaagcccgagaaagaaacggacagggacccgccaacggga

SEQ ID NO: 647 - RNA, 69 nt, Homo sapiens
aagcaggcccagagcgagcacagcaggaggagacggcaccaaacggcaaggaggaaaaaaccagaaacc

SEQ ID NO: 648 - RNA, 82 nt, Homo sapiens
cgcgcgaccgcaccccgcggccacgggccagccgcgggacgaagacccaccaagacagaagcgaaggggacagggggagaac

SEQ ID NO: 649 - RNA, 72 nt, Homo sapiens
acgccagaaacagccaccagaaaccaaacgagaaccagaagaacgaaaaggcagacgacgagagaagagaaa

SEQ ID NO: 650 - RNA, 70 nt, Homo sapiens
ggaaacaggacggcacccagcagccgcaggcaccaagaagaccaacaagcagaagagccaagacaaaaag

SEQ ID NO: 651 - RNA, 69 nt, Homo sapiens
ccagggaacaggcccgggggaagagccgcgacacgcggagaggacaagaagggcagagaagccagaacg

SEQ ID NO: 652 - RNA, 65 nt, Homo sapiens
gcgacggacgcaagaggcgacggcgaccaagcccgacccagcagccagcgaagccccaaggaagc

SEQ ID NO: 653 - RNA, 81 nt, Homo sapiens
agagacaacaagacaggagggccgcaagaacgagagcgcgccaagggaaagcgaaggccccgaacaccccagccgggcgag

SEQ ID NO: 654 - RNA, 75 nt, Homo sapiens
aaaaccagccgacaaagagggggcccaagaagggggagccggcgggccggaccccggcccccagcccaaggagcg

SEQ ID NO: 655 - RNA, 73 nt, Homo sapiens
aaaacagcgggaagagacagccaaggagaacgacggccgaagaaaacaaggcaaaaccagccgcgccggggag

SEQ ID NO: 656 - RNA, 82 nt, Homo sapiens
gcggagcgagcgagcggccggcagggggaggagcggccgaagacacgggggaccgcggcgggagcggggcaaacaccgggca

SEQ ID NO: 657 - RNA, 43 nt, Homo sapiens
ggcgagcgcagcgcgaccgggaggcccaggcgacccccccaag

SEQ ID NO: 658 - RNA, 68 nt, Homo sapiens
gaggggccagcagagcaggaaaacgaagaaggcaaaaccaagaggaaaagagccgggccagaacaggc

SEQ ID NO: 659 - RNA, 74 nt, Homo sapiens
ccccccaggccacccgccccaggacccgggcccgagggggaggggagacacgccaccccgccccaccgaggccg

SEQ ID NO: 660 - RNA, 59 nt, Homo sapiens
ggggggcaaacccgagagaacgggcaaagcaaaacacgaccggccaaaggaggagaagc

SEQ ID NO: 661 - RNA, 35 nt, Homo sapiens
ccgcccgcgcggggcggggaggccaacagacccaa

SEQ ID NO: 662 - RNA, 73 nt, Homo sapiens
ggaacccccaggagccaaggaggagcaaaaaggacagagcacagagccagcacaggaaggagacgacgagggc

SEQ ID NO: 663 - RNA, 75 nt, Homo sapiens
cgccggaggaccagacccaggagggggggaaaggggcggcgcccgaaagccagggcccaggagaacgaaagaccc

SEQ ID NO: 664 - RNA, 38 nt, Homo sapiens
gccacagacagaaaagaggaggaaggaccgagcgcagg

SEQ ID NO: 665 - RNA, 81 nt, Homo sapiens
caggccaacgagagacgcagaggcgggccagagcccaggagcgcgacaacgacaaggccggaacgccacagcaagggaaca

SEQ ID NO: 666 - RNA, 61 nt, Homo sapiens
acgaaaggcagaacaaccccggggcccagggcgcacagaccggaagaagcaaccccaaaag

SEQ ID NO: 667 - RNA, 82 nt, Homo sapiens
gcgcaagcgaaaacagaccgcgagcccagagggcggaaaacaccccaaaagccaaaagggaaaggaaaagaccaacaacagc

SEQ ID NO: 668 - RNA, 83 nt, Homo sapiens
gaggcaggcgcggcagacggcgacagggcggcggcgccaggcagggcgcaggcaacccaaagcggaagcacgcagaacccaca

SEQ ID NO: 669 - RNA, 94 nt, Homo sapiens
gggcggcaggcggcgccggccggggacccggcccgggaccggcggcgcgcggcggccgaggccagcggcaggagaaggcggaggggccgagggg

SEQ ID NO: 670 - RNA, 41 nt, Homo sapiens
gggacaagcccagcgggcggggccagccgggagagccgggc

SEQ ID NO: 671 - RNA, 82 nt, Homo sapiens
agagggagcggccggcgcggcggggcgcggcagaggcgcccgacccggccagcacgccgcggcgcggaggccaggagcacag

SEQ ID NO: 672 - RNA, 68 nt, Homo sapiens
ggcggcggaaaaccccaaaaggacaaagacagagagacaggcaagcaggagccagacaacaaggaaga

SEQ ID NO: 673 - RNA, 63 nt, Homo sapiens
gcacaaacaaggcaaaaccggacgggggggaggagggacaacacacaacgcaggcgcacagcc

SEQ ID NO: 674 - RNA, 71 nt, Homo sapiens
agaacccaagaccgcaaggagcagagccggcgggaagagagcgacgcgaaaaacagaggacaggaagcgca

SEQ ID NO: 675 - RNA, 68 nt, Homo sapiens
ccgccgcccccacacgggaacccagcagaagccagccgccacgccgagccagccagcaccaaccaacg

SEQ ID NO: 676 - RNA, 71 nt, Homo sapiens
cagagcgcaggaaagacaagccgggagcagacaagagagagcgaccaaacccccacaacaaggacaaaggg

SEQ ID NO: 677 - RNA, 79 nt, Homo sapiens
acaaccggacagggccacaggcccgggagcggcgcggccacacgaaaacgacggcacccggggcgccggaagcggcaga

SEQ ID NO: 678 - RNA, 83 nt, Homo sapiens
gcgggcgccgcgcgagccacccagcgaggacgagagaggagcgcgggccgagagcggagagcgggacgcaaggaggaggacgg

SEQ ID NO: 679 - RNA, 72 nt, Homo sapiens
ggaaccgggcgcgaagcagcagaccgacccgaacaaggccaacaccagcaggaggcgcagcccccaagacgg

SEQ ID NO: 680 - RNA, 100 nt, Homo sapiens
gcgaggacccaaaggggacaaacccgggagaacacccccccaggaggcgaggagagggggcgcagggacaaaccgccgggcgagccccgcgagcgcagac

SEQ ID NO: 681 - RNA, 51 nt, Homo sapiens
acccggacaaccagaggcagccagcagggggagcgagacgacgggaccgaa

SEQ ID NO: 682 - RNA, 84 nt, Homo sapiens
gcacaaacaaacagagaggagaagccgaaacacccacacagcaacaaacaggaacgccacacagaccagaccccaacagcagac

SEQ ID NO: 683 - RNA, 63 nt, Homo sapiens
acaaccaacagagcccgcagagcaccaggcccaccggaaagggcggagaacggaaaagcacca

SEQ ID NO: 684 - RNA, 76 nt, Homo sapiens
ggaccacggcagaagaggacgaggccgacagcacgccgagaagagccgagcccggaagccggcaagacaagcgagg

SEQ ID NO: 685 - RNA, 72 nt, Homo sapiens
ggcaggagaaggcagagcggggcacccacccaaggggccaagggcggagcacgagaaagcggcaccggcaga

SEQ ID NO: 686 - RNA, 71 nt, Homo sapiens
aaggcgcccaaaacaagcgaagaagaaagagcggcccgcgcagaacagcggggagaaaacgaccgaggaac

SEQ ID NO: 687 - RNA, 81 nt, Homo sapiens
cacggggacacacaaggacaggagaagaaacgggggggcgccagaacgaccagaagggccccgcccagagcaccacccgag

SEQ ID NO: 688 - RNA, 79 nt, Homo sapiens
ggcaagacaagaggcagccagcggacggacccgaccagcggaccggacagcaacccagccaaaggcagcgccgcacgaa

SEQ ID NO: 689 - RNA, 92 nt, Homo sapiens
gaacgggaacaggcggggcaggggcacccgcgcgagaaaaggccccccggacagaccacccagcccgacagggaccgcgaggaccagccgcg

SEQ ID NO: 690 - RNA, 68 nt, Homo sapiens
gaagaggagaagacaccaaaaagcaaacggaccagaccgaccaccaaaacaagaagaaggacgccacc

SEQ ID NO: 691 - RNA, 51 nt, Homo sapiens
aaagcacggggaggcaacagggccccgcagaggcggaaaggacaaagagaa

SEQ ID NO: 692 - RNA, 78 nt, Homo sapiens
cgagacccaggagacaaaccgcaccaccggcagcgaagccaaggccaccaccaccacagacagagggaagagcggaac

SEQ ID NO: 693 - RNA, 86 nt, Homo sapiens
caagccgggccgcgccgaggggaccgcgggacgcaccgcgaccagggccgcaggaagacgcacaaaccagccagcacgggggccca

SEQ ID NO: 694 - RNA, 77 nt, Homo sapiens
ccagccagccacacggcagaaaaagagaacccgagccagaccagcgagcaggggagccagaccaaagacagccgaag

SEQ ID NO: 695 - RNA, 88 nt, Homo sapiens
gccgcggggaggaggagcgggcgagaagcgccgccgaacgacaggacgggggcggccggcccccaggacagcaagggaggggcagcag

SEQ ID NO: 696 - RNA, 66 nt, Homo sapiens
caaaaggcccagcagggcagaaggacccacggcagagacggagaccgacggaaaccagggacacca

SEQ ID NO: 697 - RNA, 121 nt, Homo sapiens
ccaggaaacaaccacgagcaggcaaggcagcgggccccacacaccgccacacgcacgcagaaggaggccccaacccgagcacaacagcaaccggccaaacagaggggcgcagcaaacaagc

SEQ ID NO: 698 - RNA, 87 nt, Homo sapiens
acaggacccagcaacccaaaggagcaggcagggccaacaggaacagccaccagcagagaaggaaggcccgcccgccgcaggaaagaa

SEQ ID NO: 699 - RNA, 75 nt, Homo sapiens
caaagacgcaaaagcgaaagagcacaaaacggaacagagacagagagagcaaaacgacgaaggagccaagaggac

SEQ ID NO: 700 - RNA, 58 nt, Homo sapiens
agcaacacaccaacccgagagacagcaaagccccacccagacggcaggggaagacaaa

SEQ ID NO: 701 - RNA, 77 nt, Homo sapiens
agccggcagcccggaggcccaggccgggcccccagccggggcgcgagccgggagccagagccgaaagaagcagagga

SEQ ID NO: 702 - RNA, 73 nt, Homo sapiens
cccagagaggcccacaaccaagccacaaaagacacgccacaaccgggaggaacgaggcaacaccggcaaaagc

SEQ ID NO: 703 - RNA, 80 nt, Homo sapiens
gcgcccaggccaaacccccgccagacagccgaggcagggggcaccacaagccgaacagccagccagcaaaagaacagcag

SEQ ID NO: 704 - RNA, 48 nt, Homo sapiens
cagagggagcgcaggggaagggaacggcgccaccgagcacagaagagc

SEQ ID NO: 705 - RNA, 70 nt, Homo sapiens
aaacaggaagaggcaaaaagagaagacagaggagccagaccaagagacagcacaggcgagcgagcagaga

SEQ ID NO: 706 - RNA, 74 nt, Homo sapiens
gaagaagaaaaagccaaccagagcagcacaaggaaaacgagagaaacgaaggcgagagaaacagcaaggcccga

SEQ ID NO: 707 - RNA, 73 nt, Homo sapiens
agagaagagcagcaagagcaccacaaccacacagccaaaaagcgggggagcgggaggagccagagcacaccgc

SEQ ID NO: 708 - RNA, 73 nt, Homo sapiens
gaacgcagcggaaggggagacacgaaaggagagaccagaccaagcagaaaaaagcagagagaacacaagccaa

SEQ ID NO: 709 - RNA, 68 nt, Homo sapiens
gcggcggccaggccccagacacagacgagcaggggaagggccgcagcagcaaggccaagaaaccgccg

SEQ ID NO: 710 - RNA, 85 nt, Homo sapiens
gggaaagacacggagccccgaggacggccggaagcgggcagcccacccagaggagcgcaccccaagaccacgagacaagccacac

SEQ ID NO: 711 - RNA, 74 nt, Homo sapiens
cacagcgcccgaggacaggacccagagagggaccagggccaaagaagagccggggggcaggcggacagcaagcg

SEQ ID NO: 712 - RNA, 88 nt, Homo sapiens
gggcgcagacacacgggccaaggcgcacagcgagccacgcgcgcacaagcggaaaacccgcagcccaaagggcagaagaagaagaaga

SEQ ID NO: 713 - RNA, 77 nt, Homo sapiens
gcgggccacaccaggccggggagcggcacggcgaggcccgcaagcgcaagacaagcagaccggaagaccgacggaag

SEQ ID NO: 714 - RNA, 39 nt, Homo sapiens
cccgcagcggaaagagcgggcagagagacggggcaccgg

SEQ ID NO: 715 - RNA, 75 nt, Homo sapiens
cccgggagggaagacagggcgaccacagggcccacggacccgcccaccagcacggcgcccgggccagcacccaga

SEQ ID NO: 716 - RNA, 78 nt, Homo sapiens
aggaagaggagaaagaaaccgcaaaaccaaaaccagacccaaagccaggcccgagacaagacaccgccagggaaccca

SEQ ID NO: 717 - RNA, 36 nt, Homo sapiens
ggaagaggcccagccagagagggcccagacagacga

SEQ ID NO: 718 - RNA, 73 nt, Homo sapiens
aaaacgggccagaccacacacacggcacagaaggcaacaggagccccggcggcagggagcccgcgggggaaag

SEQ ID NO: 719 - RNA, 72 nt, Homo sapiens
aagaggagccaagccgcaaggccagagcagccagaaggaaacacaggaaacaggcacggggccaaaaaggca

SEQ ID NO: 720 - RNA, 71 nt, Homo sapiens
ccgcgggacccgcagccccgcgcgggcaccagacaaacgagggagcaggagacacccccgacaccgacacg

SEQ ID NO: 721 - RNA, 73 nt, Homo sapiens
aaagacccaagaaagcacggacagcggaaaagcggccccaaggcgaacaaaccccaaggcacaaaagaggagg

SEQ ID NO: 722 - RNA, 69 nt, Homo sapiens
cggggggcgccgcgccaaggcaaggaccccacaagcgaccggcaaagcgccagagaacaacaaaggagg

SEQ ID NO: 723 - RNA, 68 nt, Homo sapiens
aaaccagaagacgaaaagcggcagaaaaaaaagaacaccaaccaaaagaccaggcagaccgaacggaa

SEQ ID NO: 724 - RNA, 78 nt, Homo sapiens
cgaggaagcggaaccaccggagaaccaggaccccaccaaaccgaaaagggaagaaggagaaagggccaaccccgaaga

SEQ ID NO: 725 - RNA, 77 nt, Homo sapiens
gaaaaaacgcaaaaggagaccagaaccggagcagcaaagccgcgcgcggaaggcgaccagaccacagcagaccccaa

SEQ ID NO: 726 - RNA, 74 nt, Homo sapiens
ggagccggggcgagccagaaggccgggggaaagcaacacgagaccccggagaagaaccgcgccagaagggggac

SEQ ID NO: 727 - RNA, 73 nt, Homo sapiens
ccgcacgccccggggcccaccacccggccggcacgagaacgaaggcggccagcaccgccaacccggagagaca

SEQ ID NO: 728 - RNA, 73 nt, Homo sapiens
cgcgggcgggcgcgggggagcgggcgccaggacaagacgagacaccggcgacaggaagacgggggcgggcgga

SEQ ID NO: 729 - RNA, 85 nt, Homo sapiens
acggcgggccccgggaccgggcgggaacccgcggggagcgggacacgaacgggcgcaagacaaggcccgcgggccaagacaaaca

SEQ ID NO: 730 - RNA, 39 nt, Homo sapiens
gggcacaggagggaagagcaaggagccgcccagcaaaac

SEQ ID NO: 731 - RNA, 123 nt, Homo sapiens
ccgccccggcgccagaccacaaccaccacccaagggagcgaccccaacagcaggaaagccccgagcacgcaccgggggcccgggagccaacacacgcaacaagaccggccagccccgcggcag

SEQ ID NO: 732 - RNA, 52 nt, Homo sapiens
gccccacccccgagcccagcaccgcgggaaggccaaaggcgacaaaaaagcc

SEQ ID NO: 733 - RNA, 71 nt, Homo sapiens
ggagcgccgggaacaaaaccagcacccaaggcagccggaaacgagacgaagaaagacgcagaaaaaccaca

SEQ ID NO: 734 - RNA, 61 nt, Homo sapiens
acccgaaaccagacaggaacgccgaagaggaagggaaaaggccgaggcacagcgggaagac

SEQ ID NO: 735 - RNA, 71 nt, Homo sapiens
ggggccacgacagaggagcaaccagaggaaggccagcgcagaagacgagaagccaggaggagaagcggccc

SEQ ID NO: 736 - RNA, 70 nt, Homo sapiens
cgagcagcgcgaacacgaaaacgaagagacaccaaaaagagccaagcgagaagagagaaccacaaagggc

SEQ ID NO: 737 - RNA, 71 nt, Homo sapiens
ccgagcacggggaaaagaaacacagcacacaaggcggaggcacgcagaaaagaagagcgaaacgggaccac

SEQ ID NO: 738 - RNA, 37 nt, Homo sapiens
gagcgcccccacaggagaggaagcccggggcggcgac

SEQ ID NO: 739 - RNA, 91 nt, Homo sapiens
gcaaggcccgaggggcggcgcaggggccagccaaggcaccacacaggacacagaaacaaggaaggacaccaaaaacgcacagaacacgacc

SEQ ID NO: 740 - RNA, 64 nt, Homo sapiens
caaacaccaccaccaagcaaagcaccacaggggaaaacaagcagaaccggggaccagccaacag

SEQ ID NO: 741 - RNA, 75 nt, Homo sapiens
acaaaggaccagaaggaaacacgaaggcaggaagcgaagaaaaggacccagaaagcagcacaccggaaaacagag

SEQ ID NO: 742 - RNA, 66 nt, Homo sapiens
ccacagaagaccaaacgcagaccagcccaggaaggcccaaagcccagccaaggacccgaaaaacga

SEQ ID NO: 743 - RNA, 73 nt, Homo sapiens
ccaacaggacggcccaaaaccagccgacaaagagggggcccaagaaggggagaggccccggggagcaggacgc

SEQ ID NO: 744 - RNA, 36 nt, Homo sapiens
aaggcccccaaacaacagacggagccgccgcgccca

SEQ ID NO: 745 - RNA, 69 nt, Homo sapiens
gaggaacagacggaccgccccgggaaaagcagggggacgaacccaacagaggaggaagaaacagcgcac

SEQ ID NO: 746 - RNA, 56 nt, Homo sapiens
gaggcaaccggcagaacgccccacaagagaaggccggcccagggagaacgcaaaac

SEQ ID NO: 747 - RNA, 78 nt, Homo sapiens
aaggaaccgacgcggccgagcgccgcccggcagccccacaggcgggaccgcaagcggaagcgagagaggagaggaaag

SEQ ID NO: 748 - RNA, 79 nt, Homo sapiens
agaacgaacaccggaccgccaggccccagggaaaggaccgaggcaggaaagaggccagacgcagggaccggcaccgacg

SEQ ID NO: 749 - RNA, 78 nt, Homo sapiens
aaagccgaccacccggcgaaggggccaaggcgacagcaaaacggagaaagaggagagggcaggggccgccggaggcag

SEQ ID NO: 750 - RNA, 124 nt, Homo sapiens
ggagcgagccagcaagcggaagcgccccaccgcgggcgccaaggggagcagaaggaccggacacagcccgggcgcgccaggcacagccaagagcggaccggcagcggccagcgcagcggccgga

SEQ ID NO: 751 - RNA, 76 nt, Homo sapiens
acccgcggagacagacaagacaagaccggcggggaagcgaaagcgccaggaccccacaggggacaacacaaaggac

SEQ ID NO: 752 - RNA, 39 nt, Homo sapiens
cccagcacgagaaaaaaagaagacggcccagcagagcac

SEQ ID NO: 753 - RNA, 72 nt, Homo sapiens
ggcccaaggcagaggcgaggcggaagggcaccccacccggggaaaggacaagggacagcagccgcagaagac

SEQ ID NO: 754 - RNA, 49 nt, Homo sapiens
agcgcgaaaagagacacaagagcaggcaaaaccgacaccgggaaggcac

SEQ ID NO: 755 - RNA, 56 nt, Homo sapiens
caacacgagaaccaccccgacacaacaccaccaacaggaacaaaagagaaaggcaa

SEQ ID NO: 756 - RNA, 40 nt, Homo sapiens
ggcgcgccagagcggcacgagagacagggcaaagacaagc

SEQ ID NO: 757 - RNA, 76 nt, Homo sapiens
aggggcaagcccacaggaaccggagaaaccccgccagcccccacccagcagcacacccgacccagaagaagaagag

SEQ ID NO: 758 - RNA, 49 nt, Homo sapiens
ccaaagaggaaaccaaggcacaggaaggaaaacgaaaaggaaaggaggc

SEQ ID NO: 759 - RNA, 75 nt, Homo sapiens
cgaggggcagaaaaacagggcaccaacacagccaacccacaggccacgcagcccggagaacggggccaggcaaac

SEQ ID NO: 760 - RNA, 76 nt, Homo sapiens
gaaccaaggaagagaagaaggaacggaaacaaagagccgcaaggcaggaacggaccaaacagcagcgggcgcaacg

SEQ ID NO: 761 - RNA, 59 nt, Homo sapiens
cggcgggaccgggcgcagacggcgagaccccgcacaggcaggcaggggcagaaggcgac

SEQ ID NO: 762 - RNA, 73 nt, Homo sapiens
accaggaggaacgggcgcacagaaacgagccccacaaaggacggcacagccagacccaaacgagaaaccagaa

SEQ ID NO: 763 - RNA, 79 nt, Homo sapiens
agaggcaagacaagggccaacgcggcaccggccccgcccgccagaaacaagggacgaacaaaacaccgaggaaggacac

SEQ ID NO: 764 - RNA, 58 nt, Homo sapiens
gcccagcccccgagcggcgggaacagagcacgaacaaccgcaccagcaccaccccaca

SEQ ID NO: 765 - RNA, 72 nt, Homo sapiens
cagcacaaccacccgggcccaaccagcccagcgcgcggccccaccggcaagcgacgcggcaggacgagcggg

SEQ ID NO: 766 - RNA, 73 nt, Homo sapiens
caaccagagggaagcagccggagaacagggacggacacaaggggaaccgcccaaaagcccgccagaagaagga

SEQ ID NO: 767 - RNA, 69 nt, Homo sapiens
caacccgaaaagacagaacagaagaaagcaaacaagcaggaaaaaaccgccaggagcaagcaagagcgc

SEQ ID NO: 768 - RNA, 51 nt, Homo sapiens
ggggggggcaaacccgagagaacggaagccaccgagcgccggggggcggcg

SEQ ID NO: 769 - RNA, 72 nt, Homo sapiens
aggacacgagcgggaacgcaaacgaagcaaaacagaccgagccacagagcccaccagcaaggcaccggccac

SEQ ID NO: 770 - RNA, 77 nt, Homo sapiens
cgagacaaaggcaccaggccaccacagaaacaaaagcaacaaagaggggccccgggcgcgggagccagccgaagaaa

SEQ ID NO: 771 - RNA, 76 nt, Homo sapiens
agacggccaaaggaacggcagccaaagcggccccagcacacaaaaaaggcgccgcgcccggggagacagaaacgag

SEQ ID NO: 772 - RNA, 73 nt, Homo sapiens
cgaagggccccgaacaacagacgaaaaaccgccagaacaccaagagaagaacaaggagaaaagaaagccagga

SEQ ID NO: 773 - RNA, 69 nt, Homo sapiens
aagaggaagagagagagagaaagagagagaacaacgacggaacaaagggcagagcagacgaagagagcc

SEQ ID NO: 774 - RNA, 78 nt, Homo sapiens
caagcacagaaaagaagcaacagaagaagaccaaacggaggaaaaggacgccgaaaagggagagcacaaccagaccag

SEQ ID NO: 775 - RNA, 75 nt, Homo sapiens
gcgccgggaccaacaggggcaagacaagccagaacgagaagcgcaccacaggacagagcagccagcgcccagcaa

SEQ ID NO: 776 - RNA, 84 nt, Homo sapiens
gcagaggaagagaaaaagcaaacgaccagacggcagggaggcacaaaggggaacacagggaggggaaagacaccaagcaaaaag

SEQ ID NO: 777 - RNA, 82 nt, Homo sapiens
ccacaaccaaaagcgcaggagagaaggaaccggacgacgaacacaggcccgccgccgggccccaaaagagcagcagaaccgc

SEQ ID NO: 778 - RNA, 75 nt, Homo sapiens
ggggccccaggcgcagcagacaaccaggacaacccgggcagggaaggacacagacaaaagaccaggagagagcag

SEQ ID NO: 779 - RNA, 85 nt, Homo sapiens
cagccagccagaaccaccgaagcaaaagacaacagggaagaaggagaaagggccaaccccgaagaagcaaacagaaacgaaggag

SEQ ID NO: 780 - RNA, 69 nt, Homo sapiens
caacacccggaggcgaacgaaaccagaacagaaagggacgggacagcaaaaggcgaccaggacacaaga

SEQ ID NO: 781 - RNA, 73 nt, Homo sapiens
ggcgcccccaaaccggagaacaggaaggcaggggagaacagagaagagggccacagaacaccccccgcgcccc

SEQ ID NO: 782 - RNA, 81 nt, Homo sapiens
ccgcgggccgccagacgggaaggcgcccaccccacgggaggccgggacgggacaacgaaccaccccgaagggaggagcccg

SEQ ID NO: 783 - RNA, 68 nt, Homo sapiens
gccaaggcgccaggcaggacgacagcagcagcagcacgccccaggacggcaccaggcaacggcaccca

SEQ ID NO: 784 - RNA, 72 nt, Homo sapiens
gaaaacagggaaacacagagccaggaaaagaagaagaagccgaagcgaagccagcagaacccgaccaggagg

SEQ ID NO: 785 - RNA, 79 nt, Homo sapiens
gcgagggggcccgcgccccagaaagcccaacggggcaccagccgaagccaggcaagcaagaaccaacaagaagacccca

SEQ ID NO: 786 - RNA, 80 nt, Homo sapiens
gggggagcagaaaagcagggggcgcagccaacagaggaggagaaaggcggccagcgagcgccgacacccaacaagaccag

SEQ ID NO: 787 - RNA, 67 nt, Homo sapiens
caaagaacacagaccccaacaccggaaaaagcccacgggaaaagaaggacggcgccagagaaggaac

SEQ ID NO: 788 - RNA, 80 nt, Homo sapiens
ggaaggcccgcgcccgccccagccaccaaaggacaggagaaaagaaagcaaccagccgagacaagcagccaaaccaaaga

SEQ ID NO: 789 - RNA, 75 nt, Homo sapiens
acgaccagagaccacggcggggcagagcgaggccgaagacccagaggaccccagcaccacagaaaccccacaccc

SEQ ID NO: 790 - RNA, 82 nt, Homo sapiens
aaccaccagccagcgcaggccggagcaggccaagccggcacacggggccccaaagaggcaaggaaaaacgggcagaaggagg

SEQ ID NO: 791 - RNA, 81 nt, Homo sapiens
cggcgcgcggaagacgaggagcgcgcggcgccggggggcgcgccgcgaccgcccgccggacccacccagccaacaaacacc

SEQ ID NO: 792 - RNA, 81 nt, Homo sapiens
gcacaggccacccagaccaaggaccccagcccaccgagcccgacagcaccaagcagccggagccaaccgccaaccacaggg

SEQ ID NO: 793 - RNA, 42 nt, Homo sapiens
gggagacccccgagacgcggcaagaaaaacacggagagcaac

SEQ ID NO: 794 - RNA, 75 nt, Homo sapiens
gagccaccagcacggaccaggaggcgagcaacaggcagaaccgaagaagccggagaaagggaaccgcccagggga

SEQ ID NO: 795 - RNA, 64 nt, Homo sapiens
ccacccggggacaagggaaaccggggccgcacgccccaccccgagccggggaagaccacagagc

SEQ ID NO: 796 - RNA, 80 nt, Homo sapiens
ccccaaacggagcacccaaggaagcggaagccaagaccggagaggcgccggggacaggaccggaaaagagcaagagaaga

SEQ ID NO: 797 - RNA, 68 nt, Homo sapiens
ggcagcagaagggcgacgagaccaacaagacgagggcgcagcacagagagacccgccccgcgcacgag

SEQ ID NO: 798 - RNA, 74 nt, Homo sapiens
gcgcagccgcgaagccgagagaagaccaaacagacaaacaggcggaagaaagaggaaaccggaagaaggagggg

SEQ ID NO: 799 - RNA, 86 nt, Homo sapiens
gaaacgaagcaaaagacagcgaggagcagcagcagcccagcaggcgcggcccgccagagagaggcgccacccaacagacgcccacc

SEQ ID NO: 800 - RNA, 81 nt, Homo sapiens
caggcggaacaaggagaagaaccaggagacggaggaagaacccaagccagagcccaggcagggagacgggcaaggacgcga

SEQ ID NO: 801 - RNA, 78 nt, Homo sapiens
acgccaagcagccagcccaggagagggccggcccagggagaacgcaaaaccaccacccccacaaaaaacgcagggaga

SEQ ID NO: 802 - RNA, 82 nt, Homo sapiens
agagaagcagagaaagagccaccccaggcaagagccggccagggcagcgcggacacaccgcaggcgcgggccccagcccgcc

SEQ ID NO: 803 - RNA, 79 nt, Homo sapiens
caccagcggcagcgggaagcggccagccgagcaagcggaggaccacgccggccgggaacccgcccacgccagcgaagcc

SEQ ID NO: 804 - RNA, 82 nt, Homo sapiens
ggggaggacaggccgcgcacaggccggggaagggccaggccgggcagccgccgacgagcaggcccaagagaaacaggcacgc

SEQ ID NO: 805 - RNA, 76 nt, Homo sapiens
ccccccccccgacagagacggcggagaccccgaaggcgcaaacgacaccacccgaccgacacgggcgcagccccga

SEQ ID NO: 806 - RNA, 61 nt, Homo sapiens
gccgacgcacgcgaggagcggcaggacgcgaggagcgggcaaggaggaccccccccagaaa

SEQ ID NO: 807 - RNA, 78 nt, Homo sapiens
cgacaagcccccagccgccgccccgcggcagccacaccgcgggaggaggacacggaaaaaccgggccgaggacacagc

SEQ ID NO: 808 - RNA, 84 nt, Homo sapiens
acaagcgagcgccgcacaaaaagcagagaggccaaacgaccaagaaagcgggacgcggaaaacgggacccgcaggggccccccc

SEQ ID NO: 809 - RNA, 67 nt, Homo sapiens
cgcaggacacacgaagccgagagagacggccggcaacaagcgaggggggaggccaggcgcccagaac

SEQ ID NO: 810 - RNA, 79 nt, Homo sapiens
ccaccagccagaaaaacaggcagcggggaagggggacagcacaccaaacccgggagagcaagaaccaggaccgagggga

SEQ ID NO: 811 - RNA, 95 nt, Homo sapiens
cgacccggaaccgccgggccgaacagcagacgccgcggagaacacacaaccagagcccgggaagcgcagagggaacacggccacgaggggaacgg

SEQ ID NO: 812 - RNA, 39 nt, Homo sapiens
ggaccggcccgcgaaggggcggggggaccaggaaggacc

SEQ ID NO: 813 - RNA, 74 nt, Homo sapiens
gggaggacacgagccagggaggaaggcgcaggagcccggccaccacacccagcggaggcgacccgcggcgagag

SEQ ID NO: 814 - RNA, 79 nt, Homo sapiens
caggggacgcgggcgcgccggccgccgagaacccaggagaaacgagagggacagcaaggaagacgccagagagcggcac

SEQ ID NO: 815 - RNA, 87 nt, Homo sapiens
ggaacccgaagaagaaaggacgacagccagagagaaaccccaagccaagaagaagaagcacaggaaggagaaggaggagcggaccaa

SEQ ID NO: 816 - RNA, 75 nt, Homo sapiens
ccagccgcggagccgggggcaggcgacacagccccaacgcggaccgagaaacggacaccacaccggaaggcaggc

SEQ ID NO: 817 - RNA, 71 nt, Homo sapiens
agaccaccaggagcacacgcagaggcagcgacagagaaaaccccggagcagggagaggacgaccccagaga

SEQ ID NO: 818 - RNA, 86 nt, Homo sapiens
caaaaacaagcaccagaggcccgagcagccagcacggaggcgcgggggcaggcagggcgcgcgggccaaggcccggccaacggccc

SEQ ID NO: 819 - RNA, 76 nt, Homo sapiens
cgaggaaagcaggaggaggggcggcggcgggaagagggccgcggagcagcggaagggaacgcagaaggcaaaggga

SEQ ID NO: 820 - RNA, 52 nt, Homo sapiens
cccaagcaagcggcccgaacacagaacccaagaaggaggagcgagaaggaaa

SEQ ID NO: 821 - RNA, 93 nt, Homo sapiens
ccccggcccgcgcgcccgcacccggccgccggggccgcccaggaaaacaaagagggaaaacggagaaaagcccccccaggccagcgcaggaac

SEQ ID NO: 822 - RNA, 79 nt, Homo sapiens
ggaacccgagaccacagccaccacacagcaccggaaggagcagggcagcccaaggaccaagggagaagagacccaggag

SEQ ID NO: 823 - RNA, 85 nt, Homo sapiens
ccagagggcacgcgaaagagccacgaacagacagcgagcgcacacagggaccaagaaaggcccagggaccaaagcccggacaagg

SEQ ID NO: 824 - RNA, 75 nt, Homo sapiens
caccgcgccccccaacacgccgcgcaggaacgggccgacgacaccagggacaagcaaggggccaaggagccaagg

SEQ ID NO: 825 - RNA, 84 nt, Homo sapiens
aggcccacaggacaggagagaaagacgacgaaccggccgcgacacccggagaagaggaggacaccggagaccccgccagccagg

SEQ ID NO: 826 - RNA, 95 nt, Homo sapiens
caaggacccggaaggcagacaggaaacaacacgcaggggagcgggcgagggcgccagcccccgggaccgggccgccgcccacagaccagcccggg

SEQ ID NO: 827 - RNA, 72 nt, Homo sapiens
aaggggcaacaccccggaaacacgacaagccaaagcaagggggcacgaacaacaagacaagcaaccaagaaa

SEQ ID NO: 828 - RNA, 74 nt, Homo sapiens
cgcccccccggcggcagcccccgggcacacggcggcggcgaagccaagacacgggcccgccgagggcgggaccc

SEQ ID NO: 829 - RNA, 84 nt, Homo sapiens
accagacaggcaggaaaagacaggcagcaagcagaggggaaaccacaaacaaaacagagcaggaacccagagaagaggcgacag

SEQ ID NO: 830 - RNA, 77 nt, Homo sapiens
agacgaaccacaagagaaaggagggacagggaagaagaaagggcgagaggagacaacgccaggcagccgggaccggg

SEQ ID NO: 831 - RNA, 77 nt, Homo sapiens
cacgacccaggccaaccccggggcacgcgcccacaggcgcaagccccgaggggaggccacgcacgggcggagacgag

SEQ ID NO: 832 - RNA, 52 nt, Homo sapiens
caaagaacccccaagcaggaaggacggaaaaaggacaaggaggaaagaaacg

SEQ ID NO: 833 - RNA, 35 nt, Homo sapiens
gagggacgcaggcgcaggccagcggcgaggacacg

SEQ ID NO: 834 - RNA, 83 nt, Homo sapiens
aacacgcagcccccaggaggccgccgggccggaaggaacagaccccgagcgggaccacggccgagccgggacaagccgccgcg

SEQ ID NO: 835 - RNA, 57 nt, Homo sapiens
cggaaccgggaggcgacgcacacgagcggaggcgaaggacaccaaagaaaccgcccc

SEQ ID NO: 836 - RNA, 61 nt, Homo sapiens
gaaagagcccgccacacggaagacaggccgcgaacacaaagagcagacaacgacaaaccgc

SEQ ID NO: 837 - RNA, 83 nt, Homo sapiens
gaagaagcagcacaaggcgagccagggcaggaaccacagagaacagcccggacacgcgcaccccgaggacacgggagcagaag

SEQ ID NO: 838 - RNA, 60 nt, Homo sapiens
agcagcagccaccgaggacggggaccagaagagagagaagcagcgggcgagaccaaggga

SEQ ID NO: 839 - RNA, 73 nt, Homo sapiens
ccgacagccgcagaacgacacaggcggagaccgggagacgggccaaacagccacgccacagaggaaagaggcg

SEQ ID NO: 840 - RNA, 68 nt, Homo sapiens
agaacgaggccaacagggcgcaaaagcggcagaagcaaagagacagcgggagaaacaaaaggaagaaa

SEQ ID NO: 841 - RNA, 90 nt, Homo sapiens
ccgccccgcgagcacagagcccgccgccgaccgccgcccgccacacccgccgccagggagcaccgcggacgccccagggcacaccgcgca

SEQ ID NO: 842 - RNA, 64 nt, Homo sapiens
cccgaaggcgcaaacgacaccacccgaccgaccggggaccacgggaaagcccccgcagccggca

SEQ ID NO: 843 - RNA, 62 nt, Homo sapiens
accccgcccccaacacagaccacaaagacggaaagaacaggccaagaaaagccaaagaaagc

SEQ ID NO: 844 - RNA, 80 nt, Homo sapiens
aagccaaccagaaagaaacccaacacagcccaaagaaaaagggcaccaagggcaaagccaaaaacaggggaaacgaaagc

SEQ ID NO: 845 - RNA, 70 nt, Homo sapiens
ccgggggcccccgggccccagcaggcgaaggacagggacaagcgcacagcggagaaagcagcgcggccag

SEQ ID NO: 846 - RNA, 80 nt, Homo sapiens
gagggcgccgcacccacaccgcgcgcgcaggcgcccagcgcgaagggaccagccggaaggggcgaccggaccgggagaag

SEQ ID NO: 847 - RNA, 82 nt, Homo sapiens
aacaaaacaggacagcacaggcacagaaggccaaaaaggcaaccacagagagagagagggagggaacagcaacccgccagga

SEQ ID NO: 848 - RNA, 71 nt, Homo sapiens
gacacgagaagcaaagacagggacaggacagcgagcgaggacgaggaacggcgacagcgaacccacccaac

SEQ ID NO: 849 - RNA, 63 nt, Homo sapiens
cccgcggcgagcgagcccgaggacggcgcgggaacagacacaagggcagaaggaaggcagcgc

SEQ ID NO: 850 - RNA, 75 nt, Homo sapiens
gcggccgagcaggcgagcgaacgacgaaaaacaggggcggggacccaacacaccaagacccaaaacgagaaccag

SEQ ID NO: 851 - RNA, 79 nt, Homo sapiens
cccccaagaaccaacccccaaaggcgggacaggaaccggagggacggagggcaaccaggaagaaggggacaccaacaga

SEQ ID NO: 852 - RNA, 56 nt, Homo sapiens
gcccacccacagaacagaaaagggacaggaggacccggagggcgcaaaagacaagg

SEQ ID NO: 853 - RNA, 48 nt, Homo sapiens
cgaaggccaaaaaggaggagaaccgggaggacccgaaaaccccgagag

SEQ ID NO: 854 - RNA, 79 nt, Homo sapiens
gaaggacgaaagcgcgcaaccagaaggggaggcacaggcaggaaaagcgcggagaacagccaccggaagaagccacaga

SEQ ID NO: 855 - RNA, 80 nt, Homo sapiens
cggccgaccagagaacagaaacaaaggaggagaggcccaagaccagcgaaccccccgcccacaccccccaacaccagccc

SEQ ID NO: 856 - RNA, 38 nt, Homo sapiens
ccagaccgcccaggaaacggaccagaacagagaagaaa

SEQ ID NO: 857 - RNA, 76 nt, Homo sapiens
gaccagaggagacgagcccagacaaaagaggaacaagcagaaagcacgaacaacgagaacaagacacgagcaaacc

SEQ ID NO: 858 - RNA, 41 nt, Homo sapiens
cacccaggcacgggccgaggaccagccccgaacccgccacc

SEQ ID NO: 859 - RNA, 50 nt, Homo sapiens
gacgccaaggcccccaagcgcgagcaagaggaaaaggcaagacaacgcag

SEQ ID NO: 860 - RNA, 74 nt, Homo sapiens
cccagcccgccaggaccgaggacgcgccgaaaagcgaaaagaaacaagccgcggcaacagcgaccccaagccag

SEQ ID NO: 861 - RNA, 73 nt, Homo sapiens
aaacacacaccgagccaggacaaggacggagagggcccgggcagaccaagacacccaggagaaagacagcggg

SEQ ID NO: 862 - RNA, 71 nt, Homo sapiens
cagaccagccgcggccacagcacggggccacacggcaacgacgcaccaggaaagagcaccgagacaccaaa

SEQ ID NO: 863 - RNA, 75 nt, Homo sapiens
cacaacaggaagaaacacccaaagacccacaggcgggccaaaggagaaacaagaaggagacaacaacggccaccg

SEQ ID NO: 864 - RNA, 78 nt, Homo sapiens
cagccccgccggcagcccaagggcaaggcccggcgaccggcagggagcagccgcccgccacgcgaggccccaagggac

SEQ ID NO: 865 - RNA, 52 nt, Homo sapiens
aaacacccgcgccgaggcaaacaacccccacgaaagcggaggacgaaacaag

SEQ ID NO: 866 - RNA, 51 nt, Homo sapiens
ggcggcgaagaaggaggcaggcacgagcacgaaagaaagcagggaacccac

SEQ ID NO: 867 - RNA, 75 nt, Homo sapiens
acaacaagagaaagacccaggaagcagaagaagcgaggagaagaagaggggagaagcagaccgcaccaggcggga

SEQ ID NO: 868 - RNA, 62 nt, Homo sapiens
cacaagcacaagccccaaggaacccacgcgagccagcaaccagagggccgcgggggaagagc

SEQ ID NO: 869 - RNA, 70 nt, Homo sapiens
cgaggaggaaaggaggacgagacagcaagaacgccgcggagcagcagcccgaaaaaagacaaagacgaag

SEQ ID NO: 870 - RNA, 130 nt, Homo sapiens
aggaaaacagacgcccagccaaacaaaaaggaaaggagacaagcagagacgaaccaggcaaaggcagaagacaacacagacaagccgacagcacaggccagagcaaacaaaggaggcggagaagcaggag

SEQ ID NO: 871 - RNA, 74 nt, Homo sapiens
cagggcgggcgaaaagaagggggcgacccgacgaccagcggggccggcacgcacgggcggaggcaaggcgcgac

SEQ ID NO: 872 - RNA, 87 nt, Homo sapiens
agcccagagaggcccacaaccaagccacaaaagacacgccacaaccgaacaccagaagcagccgaaacgaaccaagaaccgaaggaa

SEQ ID NO: 873 - RNA, 61 nt, Homo sapiens
cagccgagacaccagcccgaaacaccaccaagcgggaggccaccgccccaccagcaggcaa

SEQ ID NO: 874 - RNA, 81 nt, Homo sapiens
acacaaggggcgagagcgcagagccacggccccagaggcggagcacagagagcgcggcgggacaaggagcacccgcggcag

SEQ ID NO: 875 - RNA, 41 nt, Homo sapiens
acaaacgaagcacccccaggaaagcgaagaaggaacagaca

SEQ ID NO: 876 - RNA, 65 nt, Homo sapiens
cagcaacacggcgcgaggcaaggccagcggaaacccagcggcggcagaaccagccggcacaaagc

SEQ ID NO: 877 - RNA, 66 nt, Homo sapiens
gacgggcaacaggagccccacgccacggagggcccccaaggaagacagcacgagggaacagaccgg

SEQ ID NO: 878 - RNA, 37 nt, Homo sapiens
cgggggagcgggagcgcggaaaggaggaggagcggaa

SEQ ID NO: 879 - RNA, 91 nt, Homo sapiens
caaaaccaacgccggccggagcagcagcccgagaccgaggaggagaaggggcggcccggaggccgagaggagcggagagacaagacgaagc

SEQ ID NO: 880 - RNA, 80 nt, Homo sapiens
ggcaagagggagacaaagagagagcaggcccaccaagccgagaacaccaggaaacagcccaggggaaggccacggagaag

SEQ ID NO: 881 - RNA, 74 nt, Homo sapiens
gcacagaagaagacggaagaacaggagccagccagaacaggcaacacaggcaccagccaaaccaaccaccacaa

SEQ ID NO: 882 - RNA, 80 nt, Homo sapiens
ggaaaaccaaccagaagacgaacaaacagcaagaaagaccacaagaccagaggccagagcgaccacagcagaagcgcgga

SEQ ID NO: 883 - RNA, 61 nt, Homo sapiens
aagcggaaagcagaggaccgggaacgaaccggaccggaaaggggaagcaggccacaagaaa

SEQ ID NO: 884 - RNA, 58 nt, Homo sapiens
ccaaagcagcgcaacccagccacaggggaagcgacgaggaagccaagcaggccggaag

SEQ ID NO: 885 - RNA, 78 nt, Homo sapiens
gacgggagaaagaagagagaaacaaaagacggccaccgaaagccagggcgaagagggaagcacggacaagccacaacg

SEQ ID NO: 886 - RNA, 76 nt, Homo sapiens
cggaggagacgggccgcacccgccccccgcgcccgccaccggccgccgcccgggaggaccggcgggggcccagggc

SEQ ID NO: 887 - RNA, 57 nt, Homo sapiens
cggacaaccagaggcagccagcagggggagcagcacagcagaccgcgaagacgccaa

SEQ ID NO: 888 - RNA, 42 nt, Homo sapiens
accagaaccggacggcacggaacagagacgccaagcccgggc

SEQ ID NO: 889 - RNA, 75 nt, Homo sapiens
cgacccagccaccccaagaacccggccaagggacagagcaacgcaccccacagcaaggaccacagccgcgcaacg

SEQ ID NO: 890 - RNA, 73 nt, Homo sapiens
cagggccacgggacccagcacaccccagcagaaagacaaagcaccagggagaaaccgaagaacaggggaaaca

SEQ ID NO: 891 - RNA, 51 nt, Homo sapiens
gcccccagccagccgcgagggccaagaggggaaagaaaacacacaagggga

SEQ ID NO: 892 - RNA, 71 nt, Homo sapiens
ggagcggagagagaaagagaccaaaggagggagagacaaaggggaaacccagcgcaacagcagagcaagac

SEQ ID NO: 893 - RNA, 81 nt, Homo sapiens
acaagggcacacagggcggggggcagacagcccgggccagcaaacagcaggaggccgagcggcggcccagcaggacgacgg

SEQ ID NO: 894 - RNA, 78 nt, Homo sapiens
aacgcacccccgacaaacaccacgagaaccgcagcccacacgaaagaccagggacacagagagccacggcccaccaac

SEQ ID NO: 895 - RNA, 75 nt, Homo sapiens
caggcgcaagccacaggccagcgcacgcggaggcacagcacaagggggggaaaagaacacaaggccgaaaggccg

SEQ ID NO: 896 - RNA, 69 nt, Homo sapiens
gcacacgggggcggacaccacaagaagggcgccaggaggcgcagcccccaagacgggcccccccacggc

SEQ ID NO: 897 - RNA, 61 nt, Homo sapiens
cccacgcacgaaagcccaggccaaaaagaggggagccaacagacagacagcgacccaaaaa

SEQ ID NO: 898 - RNA, 78 nt, Homo sapiens
cgacaagaccgggacacccgaagcgggaaagaaagagccgcagacgcacagcaaccaccggacccgaaggccaccacc

SEQ ID NO: 899 - RNA, 56 nt, Homo sapiens
cggagccaggcacaagaaaagaccacgcaacaacgggaagggaggccaacgaaggg

SEQ ID NO: 900 - RNA, 54 nt, Homo sapiens
caaacacccagaacaacaaagaggggaaagagggaccagcgcagcagaagcagg

SEQ ID NO: 901 - RNA, 73 nt, Homo sapiens
agccggaggagaagcaagaaggcccggacacagcaaaccgggccacaggacacaagagaggaaacccccggaa

SEQ ID NO: 902 - RNA, 85 nt, Homo sapiens
acgaggagaggaccaggaggaggaggcagaggacggcggacaaggcccagaacaagcacaacaagacccaaagcccgcagcgacc

SEQ ID NO: 903 - RNA, 88 nt, Homo sapiens
cgggagaagaagagcgcgagaggacgggacagaccacaacggccagagcgagaacaacgaagacagagaccccccgaaacacccccaa

SEQ ID NO: 904 - RNA, 81 nt, Homo sapiens
ggaagggcaggcaagacccaccccgggaagaaagcaaacaaagcaaaccagccccagaaaagaaaagaagcaggcccgcga

SEQ ID NO: 905 - RNA, 73 nt, Homo sapiens
gcaccggagaaaaccagcagagaaggcaggcaaagaacagagggggacggaagcggcagcgggcagccggccc

SEQ ID NO: 906 - RNA, 80 nt, Homo sapiens
ccagggaaaggagacaaggaccgaaacagaaacggaacaccaagcgaaagccaacacaccccgagaggggacaagacaag

SEQ ID NO: 907 - RNA, 87 nt, Homo sapiens
gaagcaccagggagaccccaccagcaaacacggcacgcggacgggagcggagcagcggaaaaggcagccagcacagcagcaaccagc

SEQ ID NO: 908 - RNA, 84 nt, Homo sapiens
cacgagcaccgccaccaggggaaggggggccaaccgccccccagcagcaggcacgggcgaaccccgagccccgccccacgcccg

SEQ ID NO: 909 - RNA, 80 nt, Homo sapiens
agaaggggggcaacgggcggggcggagcgccgggccgcgcagcgccgaacgacgggccacagggagaccagcacgagccg

SEQ ID NO: 910 - RNA, 74 nt, Homo sapiens
agaaggccacaaccaagagaaacaaccggcccggccaggccccaccgccacaagcaggggaacaccgccaaccc

SEQ ID NO: 911 - RNA, 70 nt, Homo sapiens
aaagcccacggagagaggggagacccaggcggccaaggaagagcgcccggggccgccagaccgagacgcc

SEQ ID NO: 912 - RNA, 71 nt, Homo sapiens
cgcgccccgcacccgggagccgggaccggccagagaacgaaggcagcgggggcacagcgagggggcagacc

SEQ ID NO: 913 - RNA, 39 nt, Homo sapiens
cccggaccggaaaccagaacagaagggcccggccaggga

SEQ ID NO: 914 - RNA, 81 nt, Homo sapiens
ggcacagcccgccgaacccgaaaggagagccagcgggccggcaccggcacgaggagcgcacacccgcccagccaagaccgc

SEQ ID NO: 915 - RNA, 88 nt, Homo sapiens
gcagcgacggagcagcagcaggccgcgacaggggggagaggggcgccacacgcagcggaagcaacaaagaacagcaaagggggacagg

SEQ ID NO: 916 - RNA, 73 nt, Homo sapiens
agacacgcaaaaaaacgacccgaagagaagggggacaaaggacgaagggagcagcacgcaaaacggaaggaag

SEQ ID NO: 917 - RNA, 78 nt, Homo sapiens
gacagcgcaaggaggccgcacccaaggccgcagacaagaaggggggcggcgcaggacgagagcccccgcaggacccgg

SEQ ID NO: 918 - RNA, 73 nt, Homo sapiens
gaccacccacaggagcaacaggcagcaggaggagccagagcagggcagaagacaagcaacgcagaacaaacac

SEQ ID NO: 919 - RNA, 83 nt, Homo sapiens
aaccaagaccccaggacaacaaggaggggacaaccggaggaacgaacgacccgcgaagaagcacacgcgaccgccccccaggc

SEQ ID NO: 920 - RNA, 74 nt, Homo sapiens
cgcgccagccagcgaaagccgggccccgcaggacagaaggaagcaccaggcgcgcaagggaccacagaacaaag

SEQ ID NO: 921 - RNA, 77 nt, Homo sapiens
aaggagaaaggaaccgacagggagcccacaggagacaaaagccaaaagaaccaccgagcagcaagagaaagagacag

SEQ ID NO: 922 - RNA, 78 nt, Homo sapiens
aaggaccaagaaccagaggcaggagaggagaaccaaggaagagccagacccaggagcccaggaacgaaccagcagagg

SEQ ID NO: 923 - RNA, 82 nt, Homo sapiens
gggggcgcggcgcgggagccggcggggcggcggcaacggggcacgaccggggaccagcaccagacagcgaaaaagaggaccc

SEQ ID NO: 924 - RNA, 74 nt, Homo sapiens
gaggcgcgggcgcgcacccgagccgcaagggacacgcagagcgaagccaggcacagggccaccgggcgcggccc

SEQ ID NO: 925 - RNA, 50 nt, Homo sapiens
gccagaaaccaggcacacaggaaacaagggggggggaaccagaagaggcc

SEQ ID NO: 926 - RNA, 78 nt, Homo sapiens
gcaaccccagaccaacacacaggaggacagagcccaggaccaagagcacaacaacacggaccagaaaaaacagaggag

SEQ ID NO: 927 - RNA, 79 nt, Homo sapiens
ggcccacccaagacaaccgaagaccagaagcaaggccagacacggcacagcgaggagaacgcacccaaccagagaaagg

SEQ ID NO: 928 - RNA, 75 nt, Homo sapiens
gccccagcagccaccaaggcagacccacagcggggccgggccccgaccacccagagaaaggaaaggagccagaga

SEQ ID NO: 929 - RNA, 78 nt, Homo sapiens
gggaagccgagcggcagcaagaacgcccgccagaccgcaggaccgacagaaccgagaagcaggccgggccaagaacgg

SEQ ID NO: 930 - RNA, 55 nt, Homo sapiens
aggaccacccagaggagcaaccggcgggggcaccggggcgggcagccaggccggg

SEQ ID NO: 931 - RNA, 36 nt, Homo sapiens
ccaggagcgggagagggccagacagagcacccgacc

SEQ ID NO: 932 - RNA, 77 nt, Homo sapiens
cggcagaagaaagcaagacccaggacaccccgaagccgagaaaggcgagaacgcggacaagcaaacaaagaggaaaa

SEQ ID NO: 933 - RNA, 41 nt, Homo sapiens
gagaagacggacagggcaagaagcccggcggacacggaagg

SEQ ID NO: 934 - RNA, 52 nt, Homo sapiens
cacgcgcggaaggcagcgcccagcagcgcagggcacacaaaggaacagaaaa

SEQ ID NO: 935 - RNA, 77 nt, Homo sapiens
aagaccaaagcagaacaggcacgaagccaacacagaggaaaggacgaggacgaggagggcacaaccaacggacaaaa

SEQ ID NO: 936 - RNA, 76 nt, Homo sapiens
aaagccccaagaaagcccaggacgggccaagagagcccgggcccggaaagggagccggagggaacagcagggcaaa

SEQ ID NO: 937 - RNA, 80 nt, Homo sapiens
gcgcgcacaaccccccccggcccacgacccaaggacacaacccggccgcagagcccaggcagaccagcaggacagcacgg

SEQ ID NO: 938 - RNA, 86 nt, Homo sapiens
cggacgggggcccacggaggcagaggggaggaggaccggagcgacagcgcgcaccacccgcaggaaaaaagacagggccaggccca

SEQ ID NO: 939 - RNA, 84 nt, Homo sapiens
aaggggcaagacgggcagcgcaggggcgggaaagacccaggagaagccgcccaaagaacgggagccaggacaacgggcggccgc

SEQ ID NO: 940 - RNA, 77 nt, Homo sapiens
agcccccaaaggggaaacaggcagagccaccggcccggccaaccaaaagaccgaggaggaaaagaaagcagagagaa

SEQ ID NO: 941 - RNA, 73 nt, Homo sapiens
gcagcgcgcagcgcgcacagaaaaagcgaacagacagacgaggcgaaacgaagaaacaccaagcgcaggagca

SEQ ID NO: 942 - RNA, 67 nt, Homo sapiens
aacccaggggcgaaaaagcccgaaacgggggaagaaggagagcagaggagggacaagacagggacgg

SEQ ID NO: 943 - RNA, 75 nt, Homo sapiens
caagacaccaagggacgcagcggaagaaaagaaaggaggcagcacggcaggagacgaggagaggacagcaggaca

SEQ ID NO: 944 - RNA, 76 nt, Homo sapiens
ggaacaccagaaaaaaaaaggcagaaaggcaccaaaccaacgacaagaaaacaccgggaaaggcccaaaccggcga

SEQ ID NO: 945 - RNA, 66 nt, Homo sapiens
cgcgaaacgcacgagaagggagcggcgacagacacgggaagcaagagaacggcgcagcggacaagg

SEQ ID NO: 946 - RNA, 117 nt, Homo sapiens
gggcccacagagaacggcacgaccgcgcaagggcggcaagcaccacaccaaacgcaggacccagcagccagcgaagccccaaggaagccgggacgcccacagacccagcagcgcacg

SEQ ID NO: 947 - RNA, 76 nt, Homo sapiens
gaaagccagccaaccaaagacgggaacaagggagggggacagaccaaagaggggcccagggagggaggggaaaaag

SEQ ID NO: 948 - RNA, 96 nt, Homo sapiens
accgagccgggaggccggccgggccagcacccggccgagacggcggcagcagcggcacaggcaaccggccaccaggccgcgggagccccagcaagg

SEQ ID NO: 949 - RNA, 41 nt, Homo sapiens
gggacccgcccaaccccggagaaccagggcacagcgcagcg

SEQ ID NO: 950 - RNA, 66 nt, Homo sapiens
agacagcagcgaacaagaaggggccagacaagcgccccaagaggaaagcaggagaaaggagaccca

SEQ ID NO: 951 - RNA, 71 nt, Homo sapiens
ggccaggacccacccgacccgagaaccaggggaccagcagagggggcgcaagcgcagcccgcaaaaagcgc

SEQ ID NO: 952 - RNA, 79 nt, Homo sapiens
gccgagcccgggggcgcgccccgcagggacaccaggcagaaagagcccacaagacaaaaaagcagacggaaacaggcag

SEQ ID NO: 953 - RNA, 119 nt, Homo sapiens
cagcagccagcagcgccgccggcggccaagcagccaaccagccaaccgggccccccagcagacgcgaacaccagcaggaaaaaagagcggcagaaggccaaacggccgagcaggcgagc

SEQ ID NO: 954 - RNA, 73 nt, Homo sapiens
cccacagggcacacagcaccgggcgaaaaggaggaaaagaagccagaccgagggcagagcaaacaaagcaaaa

SEQ ID NO: 955 - RNA, 75 nt, Homo sapiens
agggccagacccgggccacgcgccccgcagcccggcagcgacagacagggaggacggagacagccagagagcgaa

SEQ ID NO: 956 - RNA, 82 nt, Homo sapiens
cgcgcgaacccccacggcagcagagacgcgcgcccccagacgaggaaaccggccccggagccaggccgggcccccaggaggg

SEQ ID NO: 957 - RNA, 46 nt, Homo sapiens
agccccagcaccaagggcacaacgagcgagaagaagccggaacagg

SEQ ID NO: 958 - RNA, 82 nt, Homo sapiens
gggaacaggcggagccaccacgccggcccaccaaacagaaacgaggggaggggcgaccccggggcccggccagcacgaccga

SEQ ID NO: 959 - RNA, 72 nt, Homo sapiens
cagcagccagggcacccgccagccgacgaaggggagccacaggagagcgcccaggaagacacagagggaacg

SEQ ID NO: 960 - RNA, 70 nt, Homo sapiens
ggagccgccggcagacccaggcgcagggagcaggagaagcggagcgaaggggcgggcaggcagaggcggc

SEQ ID NO: 961 - RNA, 70 nt, Homo sapiens
cgggggcggcgcgcagagcggagcagccgggaaagaccacagcaagaccacgcccccagccgggggacca

SEQ ID NO: 962 - RNA, 84 nt, Homo sapiens
ggggcaacggcagcgccggcagggggcggcgaccacacggaggacaccgggaccagaaccagcagccaacaaaggacggagaag

SEQ ID NO: 963 - RNA, 76 nt, Homo sapiens
cacaaagagcgccccacgagagaacggcacacgcgagcggaaaccccccggagccccaaagccaggacagcccagc

SEQ ID NO: 964 - RNA, 63 nt, Homo sapiens
cggggacgagccggaagaagggcgaaccaaagaaggaaggcgacccaaaaccacgaagcacag

SEQ ID NO: 965 - RNA, 78 nt, Homo sapiens
acggacacggagaccgggcggagccggacgagcgcgggcaagaacggaagcacgggcggaggaaagcacaagcagagc

SEQ ID NO: 966 - RNA, 55 nt, Homo sapiens
ggaagcgacagcggggaaggaccaagagaaggcgagaaccaagcagaagcgcaag

SEQ ID NO: 967 - RNA, 70 nt, Homo sapiens
gcgccggcccaggcgcacacggaaggaaaccggcccacaacacagccacggaccaggagcgaacgagaag

SEQ ID NO: 968 - RNA, 56 nt, Homo sapiens
cgaagaagaccccccacacggaaacacaggggaaacacgagagagcaacagccgac

SEQ ID NO: 969 - RNA, 71 nt, Homo sapiens
gggaacaccaccgcaccaggcaccaagagaaaaggaaacacaccaagaaaccaggaccccgaacccagcca

SEQ ID NO: 970 - RNA, 82 nt, Homo sapiens
gcagcacaaaccagaagagagaaacacgaaagaagagaaaagaaaccagcaggaagagacggccacagaaaaaaacaagagg

SEQ ID NO: 971 - RNA, 81 nt, Homo sapiens
ggcgccggggcggacccggaacggcagcgcacccacccacccccgcacccgggaccgacccgacagggacagcggcaccac

SEQ ID NO: 972 - RNA, 71 nt, Homo sapiens
gccgcaaaaggccccaggagcaaggcacaacgagccagaacaagaaccccgaccagacccaccagcaaaac

SEQ ID NO: 973 - RNA, 97 nt, Homo sapiens
gaccagaccacgcagccacgcgggcgagcggcggggagcggcgaagccgcgggcgaggcgggccaggacaccccaagcgcagaaacaggcacaccca

SEQ ID NO: 974 - RNA, 70 nt, Homo sapiens
gccgcaggaaacacagggcaagaacccgacaagaaagagcaaagggacagcaaaggcacaacacagaaag

SEQ ID NO: 975 - RNA, 65 nt, Homo sapiens
aagagcagcaggaaaccgacgaacaacacaggaccagcccagagcacaacccaaaggaacccgaa

SEQ ID NO: 976 - RNA, 79 nt, Homo sapiens
agacaggccagacacgagcagaggccacgcgggaggggggcaaagaggcaaaaaggcagagcaaaaaagcaggaaggcc

SEQ ID NO: 977 - RNA, 91 nt, Homo sapiens
caacgccccggagccgccggccgcagcgcagcgccagccagaaaccaacaggagaaggcccaagacccacacaaaaagcccacgaaggcaa

SEQ ID NO: 978 - RNA, 78 nt, Homo sapiens
acgaccggaccgaggaggcagcgcggggcagcgcgagccgggaaggaggaggcgaggaagacaaagacgaagaacaca

SEQ ID NO: 979 - RNA, 62 nt, Homo sapiens
ccaggaccagcaccccccagcccagggccgccggccaagcccgccccccaaagcgaagccaa

SEQ ID NO: 980 - RNA, 79 nt, Homo sapiens
caaggggccaccaggaggccagggggcgccagagacggggcgacggggagaggcaggcgaggggacgaccggcaccgcc

SEQ ID NO: 981 - RNA, 71 nt, Homo sapiens
ccgcgcggggcgcgggcgcggccggaccgcagccgcaaggaaacgaaaagagacagcagggcaaaacgggc

SEQ ID NO: 982 - RNA, 45 nt, Homo sapiens
aggagacaaagggccgccgcagaaagcaccggggaagaaaacagc

SEQ ID NO: 983 - RNA, 87 nt, Homo sapiens
gccggagcgcggagcccggccccgcaccaggaggaggacgacagcacggacgagaacccccgcgaaccagaggaacccagcgagcga

SEQ ID NO: 984 - RNA, 78 nt, Homo sapiens
agggagcagagcagccggaacggcggaccgggacgcacgccagcgaggaggacccccaaagcaacgaccaacaaggga

SEQ ID NO: 985 - RNA, 85 nt, Homo sapiens
gccggaggagcccccaggccaggagcaggagcggccgcggagcaggagcgagagcaggaacagaagaaggccaaagccggccagg

SEQ ID NO: 986 - RNA, 63 nt, Homo sapiens
agcaccaagccaacaagaaaagccgaaaccaaacggagccaggagacaagcggagaaaggcac

SEQ ID NO: 987 - RNA, 75 nt, Homo sapiens
cggggcccacgccgccaagccgccccgaccaaagaacagcagccccgcggccagggacaggcacagcgccgccca

SEQ ID NO: 988 - RNA, 65 nt, Homo sapiens
agaaggaaaaagcggaagaaaacagaagaggcggggagaaagaggcagaaaaacaaaggcccaag

SEQ ID NO: 989 - RNA, 81 nt, Homo sapiens
aagccggggccaccaggggcgccacaaaggagccccacaccaccacacccgggccagcgagcagggaagcacgaagaccgg

SEQ ID NO: 990 - RNA, 78 nt, Homo sapiens
gcagacgcggggggcggccagagcgccggcaagagccgggccgagaacgaggcagggcagagcggcgggaaaccacca

SEQ ID NO: 991 - RNA, 64 nt, Homo sapiens
cacggaggggacgaagacaaaaaccagccagcagcagaaagcaccccagcgaggcccagcaaaa

SEQ ID NO: 992 - RNA, 40 nt, Homo sapiens
gcgcgaaggaggcggaccagaagaagccgggaagaaaaca

SEQ ID NO: 993 - RNA, 57 nt, Homo sapiens
acgggaggcccgacaagcgaacccaagaacaggagggacacaaccagagggaagcac

SEQ ID NO: 994 - RNA, 76 nt, Homo sapiens
gggaagggagcaccgagaggcagacaagacacccgcagggcacggaccgaagagggcggaaccccaggaggagggg

SEQ ID NO: 995 - RNA, 71 nt, Homo sapiens
cagcaggaaggacaaaacacaacagggaagagagccaggcaaagacaaacgccgcaaaaggaccggaaaaa

SEQ ID NO: 996 - RNA, 83 nt, Homo sapiens
ccacggccacagccgccgcagacccagcagccaagagggaagcagacgagagcaaggggagcacccacagaaggacacagaag

SEQ ID NO: 997 - RNA, 57 nt, Homo sapiens
caaaccagcccggaagggaaagggagaaacagacccaccgcgcagaaggcaagaccg

SEQ ID NO: 998 - RNA, 72 nt, Homo sapiens
aaaacccaggcacacaaacgaagggagccggcaacacaggcgacgccaggagcacaccgaaaagaaaggaaa

SEQ ID NO: 999 - RNA, 70 nt, Homo sapiens
gaagacccgccacgcagcaccaggaaccgcacgagcggaggaccagccgcgggaccgggcccgaccaaaa

SEQ ID NO: 1000 - RNA, 56 nt, Homo sapiens
acccagccaagcagaggccacacgaacggcgcccagacgagcccaccacggaccac

SEQ ID NO: 1001 - RNA, 80 nt, Homo sapiens
ggaggggagggacccgccagacccgaggcaggcaggaaagacaagggaggcgaggacggacaaaaggaaacggacgggag

SEQ ID NO: 1002 - RNA, 85 nt, Homo sapiens
gcacagagcccgccgccgaccgccgcccgccacacccgccgccagggacgcccggagcggcccacacacgggccgccggcagacc

SEQ ID NO: 1003 - RNA, 84 nt, Homo sapiens
cagacacgcacggagggcccaacccacagcgccccaggagaccaggcccaggaaggaacgaggaagggccagaacggagacggg

SEQ ID NO: 1004 - RNA, 72 nt, Homo sapiens
ccggaaacgcagaccaggcagacaacagccggagacccccgcacagcggcgagaacaggcaccgaaaggggg

SEQ ID NO: 1005 - RNA, 61 nt, Homo sapiens
gcaacccacgagagaacagaggccgaaagaacccggcaagcccacaccagccacacccacg

SEQ ID NO: 1006 - RNA, 53 nt, Homo sapiens
cggaacaaaacgaagggggccaaaccaaaagccagcagcgcagcgcccgcagc

SEQ ID NO: 1007 - RNA, 72 nt, Homo sapiens
ggagaaggaccaagaaccaggggcccaccagggaggaagaggcaggcgcagcagagagagcagagccacacg

SEQ ID NO: 1008 - RNA, 72 nt, Homo sapiens
cagaacgacccaacacgagcagagacacgggagcaaaaccagaacagaggaagcgggaacacacaagaaggc

SEQ ID NO: 1009 - RNA, 65 nt, Homo sapiens
cagcgcgaccgagaacgaaagagaccagaggaacacagccgagacagaggggaagcggagcgacg

SEQ ID NO: 1010 - RNA, 44 nt, Homo sapiens
agacaagcggcggggccccgggggcgggccccggccagggccca

SEQ ID NO: 1011 - RNA, 77 nt, Homo sapiens
cgcgcgagcgcgaacagaagagaggaagaaaggacagggagagaagccaagaaagacaggcggaagcccggccaggg

SEQ ID NO: 1012 - RNA, 39 nt, Homo sapiens
gcccgccgccagcgggccgcagaagcaccagcaccaaga

SEQ ID NO: 1013 - RNA, 79 nt, Homo sapiens
gcagccgcagccgggcggcagggccccgagccggcccgggcgaggggaagcgacgaggaagccaagcaggccggaaggg

SEQ ID NO: 1014 - RNA, 69 nt, Homo sapiens
aacggaccgccagcagccgaacagagacagacccgggggcccccaaggagagggaagaagccaggcaga

SEQ ID NO: 1015 - RNA, 78 nt, Homo sapiens
gggaaacggcacgcaggccgggcaggcggcaaccaaacggcgccaaggaggccagagaggagcccacccccaacagaa

SEQ ID NO: 1016 - RNA, 56 nt, Homo sapiens
cacagcaaagccagcgacagaagccaggcagggaacggggacaggagaaaggagaa

SEQ ID NO: 1017 - RNA, 71 nt, Homo sapiens
aggaaggccgccggacagcgcagagccaagacggagaaacaaaggcagaagccgaggagaagcgcagcgag

SEQ ID NO: 1018 - RNA, 108 nt, Homo sapiens
agacccccacgcacaaaccgaacgcggaaacgcccaaagacgggaccggacgagacggagcaaggaagagaaaggaaccgcccgaacccggaccagaaacaacccaac

SEQ ID NO: 1019 - RNA, 81 nt, Homo sapiens
agcaaggcggaaggagaagaggccgccgcgccaacgcgagcggcgacggcgacccccggcggccaagacacagcgaaaaac

SEQ ID NO: 1020 - RNA, 68 nt, Homo sapiens
gcgccccgaggccaagccaccccggcggaaccgcccccaggacccgagacagaaggccaaagagacag

SEQ ID NO: 1021 - RNA, 111 nt, Homo sapiens
gggccaaagcccccgcccccagcacccacccgggggcagggggcccgggacaggaaagaccacagcaagaccacgcccccagccgggggaccaggccgaacgacccggaca

SEQ ID NO: 1022 - RNA, 59 nt, Homo sapiens
ggaggacgccgggacaccggaagccgagaaagggagaagagacgcaagaaaacagaaaa

SEQ ID NO: 1023 - RNA, 83 nt, Homo sapiens
agaggagcggcgggaacgggagagaggccggcgcggaagaggccggcggcgggacggccccacgggacccgccccgaccacag

SEQ ID NO: 1024 - RNA, 72 nt, Homo sapiens
gcccgccaagaaagagccacgcgcgcaaaaggacacgggaagcccagggcagaacacagggggaggacagcc

SEQ ID NO: 1025 - RNA, 58 nt, Homo sapiens
gagcggagccggccgacgcgggcgcgagggcagaaccggaaccaaggaaaagggcaac

SEQ ID NO: 1026 - RNA, 84 nt, Homo sapiens
gacagaaaagacccgggcacgaccgcgacagcagagacagccgcagagccagccagcagggcagcggagcggacgacgcgacca

SEQ ID NO: 1027 - RNA, 40 nt, Homo sapiens
ggaggcgaggcgggcagacacgaggagggaaacacccacg

SEQ ID NO: 1028 - RNA, 77 nt, Homo sapiens
agaaggaggggaacaagcaagaaaagaaagagaacaaaaccccaggggaaaaggcgaagcacacaagagcggcgaag

SEQ ID NO: 1029 - RNA, 76 nt, Homo sapiens
cacagaaggcagaggcagaaccacaggcacaggcacaggagaccaccaacacagcaaagcagccaaaggggggcac

SEQ ID NO: 1030 - RNA, 86 nt, Homo sapiens
gacacccccgggaccgcggagagaagcagcggacagcagaggagcacagaccagcgcgcgaccggagccccacagcggcacaggcc

SEQ ID NO: 1031 - RNA, 71 nt, Homo sapiens
acggcagggagcccagcgagagcgcgcccaggcccccagcaccacacaagaaacgacagggagaaaaagca

SEQ ID NO: 1032 - RNA, 67 nt, Homo sapiens
gaccgggcccggaggagcgaacaaggcgacaacacagaaggagaaacgcagacaccggaaaggaaga

SEQ ID NO: 1033 - RNA, 68 nt, Homo sapiens
aggaacggaaaagggcagccgcacgggccaggcgccggcaggagcgaacacacacgaacaacgagagg

SEQ ID NO: 1034 - RNA, 78 nt, Homo sapiens
ccgaccaaaaagagcgagacaggaaaaccaccgcgacgaaacgaaagcgcaacacccaacaccccgagcccagaacgc

SEQ ID NO: 1035 - RNA, 76 nt, Homo sapiens
gggacgcacggaccaaaaacccgcaacagcccccgcccaagaacaggcgcgccgggggcccgggccagcggccgcc

SEQ ID NO: 1036 - RNA, 58 nt, Homo sapiens
gccccggagcagagcgacagcggaagccagaggacaacagagcaaccagccgggcacc

SEQ ID NO: 1037 - RNA, 75 nt, Homo sapiens
gacgacaaagaagaagagcagaagcaacaccagcccaacggaccagagacccacaggaccgaaaagacgcggccc

SEQ ID NO: 1038 - RNA, 71 nt, Homo sapiens
cgcgaaacgcacgagaaggggaacggcgagggaacccaggaaggagggcgacaaacaccagccggcacaca

SEQ ID NO: 1039 - RNA, 74 nt, Homo sapiens
gacgccgcagcagagagaggacaacccacggaggaaggagcacgggaaggaccgaaacagcaacaaccgcaacg

SEQ ID NO: 1040 - RNA, 74 nt, Homo sapiens
gaaaggcgggacacgaccccggaccacgggaaggcaacagggcacagcacgagccccgccagagcaggggccgc

SEQ ID NO: 1041 - RNA, 69 nt, Homo sapiens
gcgccgccgaccccccggcgccgcgccggcggcgaaacaacgaagcaagcccaagggcgcaggggcaac

SEQ ID NO: 1042 - RNA, 88 nt, Homo sapiens
ccaggggcaggacaagagaagcacaaaacagcagacccaagagcagcggaaaagaccagcacaggaccgaaggagaagaaggagaagg

SEQ ID NO: 1043 - RNA, 83 nt, Homo sapiens
gaggcgagcccggggaggaagagacagccaggggccgggccccacccccaggacacaggcccggccacgggcggcccaaccca

SEQ ID NO: 1044 - RNA, 76 nt, Homo sapiens
cgaacagaaggaacgacgcggaccagaagccagagcgaggacgccggcagaaacaacaccgagaacagaagaagcg

SEQ ID NO: 1045 - RNA, 77 nt, Homo sapiens
gcaaaccgcgaacagcgaacaaaagcaaaggcaacagagagaggacggaacacagcaaagcacaagcagaagggcca

SEQ ID NO: 1046 - RNA, 53 nt, Homo sapiens
ccccaacggggaggccaacggaagaaacagagaagcagccaggccacacggag

SEQ ID NO: 1047 - RNA, 37 nt, Homo sapiens
aaacgcacccagaaacaagagaagcacaacgagaaag

SEQ ID NO: 1048 - RNA, 53 nt, Homo sapiens
caaacaaagagaagaaaccaaggacacggacggacagcgcaggagaagagggc

SEQ ID NO: 1049 - RNA, 68 nt, Homo sapiens
aacagcaggccacagagcgcgcggccaagacaaggaacgcgaacacgcgaccccggcaggaggacgcc

SEQ ID NO: 1050 - RNA, 80 nt, Homo sapiens
agagcgcggaacaggacgccccgagaaccaggaccccgggagggcgggacacccaggaggaagggggcagcggacccacc

SEQ ID NO: 1051 - RNA, 82 nt, Homo sapiens
aggaccaacaaagacgaaacggcaaaacaaggagaaagacagcaaagaaaaggagaagaaaggaaaaaaacaaccccgggca

SEQ ID NO: 1052 - RNA, 72 nt, Homo sapiens
gacaggcacccgggccgcagacccagggaggcggaaaaccaacagagacaacaaagagaagaaacaggccgc

SEQ ID NO: 1053 - RNA, 72 nt, Homo sapiens
gggaaacagaggaaaaagcacaagcgaagaccgaagcccaaagcagagaccgcaagagaaaaggcaaacaga

SEQ ID NO: 1054 - RNA, 71 nt, Homo sapiens
ggaaagaacaccaaaagggccaagggcaaggccagagaaggcgggagaaagacacgaaccacagaacgcaa

SEQ ID NO: 1055 - RNA, 79 nt, Homo sapiens
ccgcgcggccccgccagcgccccaccgagccggcacgcagcacgggggcaggggccgacccagaacgccagcgccgcaa

SEQ ID NO: 1056 - RNA, 78 nt, Homo sapiens
acacgaaaaccagaacgcacagcagagcgagcagcgcagggaagagaaagaaagccccggcaaagcacacacccagca

SEQ ID NO: 1057 - RNA, 67 nt, Homo sapiens
gaccaggcgggccaagcaggaaccagcaccgccggacccaggacacggcccccggaagccgggccca

SEQ ID NO: 1058 - RNA, 81 nt, Homo sapiens
cacgaaaggagcaagagcaagacaccggacaccgagggcccccaaaaggaagagaccagaagagcaggaggaaacaaagga

SEQ ID NO: 1059 - RNA, 53 nt, Homo sapiens
acccacacgcccgggcgggacaagcggcaagggggcggccaggcaggcaaaca

SEQ ID NO: 1060 - RNA, 77 nt, Homo sapiens
cagccaccagcagcccccagagcgggaccacagccaaacagaggaaagagcggagcccgccagaaacagacaccacg

SEQ ID NO: 1061 - RNA, 74 nt, Homo sapiens
ccagagcccgaacggaacccagaacgaggccagagggaagcaaagcagccaacaccagaagaagggacaaaagg

SEQ ID NO: 1062 - RNA, 73 nt, Homo sapiens
gccgacagacaaccagggcagcgcaagaccccgcacggaagcagcaagcacaggcagcgcagagccagagacc

SEQ ID NO: 1063 - RNA, 56 nt, Homo sapiens
aacagcacccgcgcccaagaccgcgcaacccgagaaagagagacgagcgcacagcc

SEQ ID NO: 1064 - RNA, 78 nt, Homo sapiens
acgggacccagcccaggggccgacggggcggcagccacccgaggagcaaagaccaccccacacagaccgcgccccagg

SEQ ID NO: 1065 - RNA, 74 nt, Homo sapiens
gcgggcgggaggacccaaacaggcacagccaccccgggccccgggggcgccgagggcacaagggcaacgacaga

SEQ ID NO: 1066 - RNA, 67 nt, Homo sapiens
gacggccccaacccgggcacaggacggacccacgggggaaacgaagaagagaaaaagaagaaagcaa

SEQ ID NO: 1067 - RNA, 69 nt, Homo sapiens
gcagacaacagaagggacgccagcccaaacaggccagccaaccccagcaccccagggcagcagagaccc

SEQ ID NO: 1068 - RNA, 74 nt, Homo sapiens
agaccgaaggcgccggccaaaagaggacgaccacgagcagagcgagaaaagaccagaagacacaagacaaggcg

SEQ ID NO: 1069 - RNA, 63 nt, Homo sapiens
aacaaaagcaacaaggcgggacgacccgggacagcccacggggcagaccagcgaccaccggca

SEQ ID NO: 1070 - RNA, 71 nt, Homo sapiens
ggagccaagaggcaggcccgagggccccccggggccccccgggcaaggggccacccacaaacacaccgccc

SEQ ID NO: 1071 - RNA, 73 nt, Homo sapiens
ccagaaggaagcaacagacgggaccgaaagacaccgcaacagagaccaaggaaggggaagccaaggaggccca

SEQ ID NO: 1072 - RNA, 76 nt, Homo sapiens
gcggcacggggaacgcagggcagggccaggcgggcgggaaaaaccaagagcacagcgagccagaagaaagaagcaa

SEQ ID NO: 1073 - RNA, 69 nt, Homo sapiens
agaaagaaacacagaagcgagcaccacaaacgagaacaaaaaggcccggggacagggcgcaggaagagc

SEQ ID NO: 1074 - RNA, 80 nt, Homo sapiens
aaggagggcgaagagcgaggaggccgccagcgggagccgacaagaccgcagaggaccaccgcagccagagcaggaccggc

SEQ ID NO: 1075 - RNA, 80 nt, Homo sapiens
aaggcaccgggcccagcacagccagcaccgcacgcccgcaagggaggcagagaggcggaccccgcgggcgcgcggcccga

SEQ ID NO: 1076 - RNA, 59 nt, Homo sapiens
ccgcccagccccccagagcgggacacagggggaaaaacagaccaagccaagagaaagaa

SEQ ID NO: 1077 - RNA, 80 nt, Homo sapiens
gaaggaagaggagggcaagaagggcaagaaggaaggaacggcccaggaccggaccgcagcagaaggggggcagcggagca

SEQ ID NO: 1078 - RNA, 71 nt, Homo sapiens
ccaccccgacagagagaaccgaacgaagggcggagaacggaaaagcaccaggaagcagagaggaccgcaga

SEQ ID NO: 1079 - RNA, 34 nt, Homo sapiens
aaaacgacacgcggagggagccgacagcccgcaa

SEQ ID NO: 1080 - RNA, 86 nt, Homo sapiens
aggaaccgcccgcaagagcgagccgccgccccgggcgcagacagagcaccagcaccagcagagcaccgagacaccacccagaaagg

SEQ ID NO: 1081 - RNA, 94 nt, Homo sapiens
cccacacggcgcgccgggcgagcccaggggcagccaccgccaggaccccagaaagaggccagagggaagcaaagcagccaacaccagaagaagg

SEQ ID NO: 1082 - RNA, 70 nt, Homo sapiens
acaaggggcgggagcaaaaggcaaagccaaacaggacaaagcggcgcacgcacggagacgacgggaggag

SEQ ID NO: 1083 - RNA, 79 nt, Homo sapiens
caccaggaaaccccagaggaggcgggcccggagcaggcaaggcggaacccacacagggacccgcagggaaaagaaaacg

SEQ ID NO: 1084 - RNA, 64 nt, Homo sapiens
gcagcccccaacccaagggccgacgagggggcggggcggcagaccgaagcggcagccaaaaccg

SEQ ID NO: 1085 - RNA, 54 nt, Homo sapiens
aaaggcgggcacaggccgaccgcgcgggacaaaagggcccaaccagcacagcac

SEQ ID NO: 1086 - RNA, 73 nt, Homo sapiens
ggccagacagcaagagcacccgacccacaggccagagagagagggacgcaggaaaggaggcccccaaacgcca

SEQ ID NO: 1087 - RNA, 86 nt, Homo sapiens
gcgaacgagcgacggcggaacccggggccgggacgcagcccggcggcagcaggggggacacagcgagccacgcgccaggaagcccg

SEQ ID NO: 1088 - RNA, 74 nt, Homo sapiens
aagcacagcaagcaaagcaacccagaccaaggaagaggcgaacaaggacagagcgggagccaccagcgccaaag

SEQ ID NO: 1089 - RNA, 54 nt, Homo sapiens
ggaggccggggagccgacgccgagcaagaagaaccgaaggcagaagcagcaaca

SEQ ID NO: 1090 - RNA, 67 nt, Homo sapiens
ggaggcggcaccccaggcaccaggaagagacaagccccaccccgaggcagaaagagcaagggcccca

SEQ ID NO: 1091 - RNA, 42 nt, Homo sapiens
agcccagcgccgggacgggagcgggacgacaagaccaaggga

SEQ ID NO: 1092 - RNA, 70 nt, Homo sapiens
acccgcgccccgaccagggggcaaggcaaacagcacccgccagacccgagagcaggcacgaagagcccgc

SEQ ID NO: 1093 - RNA, 58 nt, Homo sapiens
gccagcggaaccacccaccgagggaccagagaaaacccaggacaacccgaaaggcaag

SEQ ID NO: 1094 - RNA, 71 nt, Homo sapiens
gccgaacaacaagcacagaaaggaccccagcccggcacaaacaggaaggacagccagcccagccccagaga

SEQ ID NO: 1095 - RNA, 76 nt, Homo sapiens
agaagcaaggcaaagcggccccccccccacaaaggaaaggggaaaagccagcgaaagagcccaaaaggcagagcga

SEQ ID NO: 1096 - RNA, 80 nt, Homo sapiens
gccgaccagccagcccacaagaaccgcgaggacagagaaaaccccgcagagcgagggagcacaaccgggacgcacccccg

SEQ ID NO: 1097 - RNA, 93 nt, Homo sapiens
cgcagccgagacaccagcccgaaacaccaccaagggggaggcccccgcgagagggggcgcgcgcggagaaggaaaccagaggagccaccgaga

SEQ ID NO: 1098 - RNA, 72 nt, Homo sapiens
agccccaaccggcccagccccccccggaggggcagggccagcgcaacaccccacccaggaccagcggcggcg

SEQ ID NO: 1099 - RNA, 72 nt, Homo sapiens
agccagcaggccgggcgggggagccaagaggccacgacagaagaacagcaacagaacacaccaagagacccg

SEQ ID NO: 1100 - RNA, 70 nt, Homo sapiens
ggccccgggccgggcccggccccggagaaggaacagggaaaagacgcgaagaagagaaagaagggagaag

SEQ ID NO: 1101 - RNA, 79 nt, Homo sapiens
cggcccccggcgccccggcccccgccccagcccgccggcggcggcgggagaggaaccgcacccaaggacggcggaggcc

SEQ ID NO: 1102 - RNA, 77 nt, Homo sapiens
agcccccgccccgcggaaacaacacacgagagaagagccgccagaaccagggcggaaaacaccccaaaagccaaaag

SEQ ID NO: 1103 - RNA, 71 nt, Homo sapiens
ccacccccggcgggcccgaggcggcgagagaggcaggcggagccgaccgggccaggggacgcgccacagac

SEQ ID NO: 1104 - RNA, 84 nt, Homo sapiens
ggaggaggaggccacacagaaggacggcccgacggaaggggagccgccaccaaaagcagacggaaaacccacggggaagaccac

SEQ ID NO: 1105 - RNA, 74 nt, Homo sapiens
gggggagccccgggagccgcacggagagcaaagaagggaacgcccaggcgagaacaagaggcaaagcgagaacc

SEQ ID NO: 1106 - RNA, 77 nt, Homo sapiens
ccacaagaagcggaagagagggggcgcccagcgccaacaccaaggcgccgagcggaagaaccccagccacaaagagg

SEQ ID NO: 1107 - RNA, 80 nt, Homo sapiens
acgcccccacgaacccaggcagcagaaagggacgcggcacagaacgaagaagaaagcagaagcaagagaaaaaagaaaca

SEQ ID NO: 1108 - RNA, 84 nt, Homo sapiens
gaaccagccggggaccagacagacaaagccacaaccagggcaacaggacaggggaccgaggaagccacgcccccagagcagcag

SEQ ID NO: 1109 - RNA, 88 nt, Homo sapiens
ggcccgggagccgccggccaggacgcccccgaggggagaccgcgccccggagaaccgaaaaaagcggcagcgcaacccagaagagggc

SEQ ID NO: 1110 - RNA, 84 nt, Homo sapiens
cggcggccgcagcgccacaaaccagagagccagcgcccccgggaacaaccaccaagaggcaacaaccaggcaaccaggcagcaa

SEQ ID NO: 1111 - RNA, 69 nt, Homo sapiens
ggaaggcaagagccaacccaaaaccaagcacaagcagaggaaccagggaaccgccgccagcaaccaaca

SEQ ID NO: 1112 - RNA, 70 nt, Homo sapiens
gacgcagggcgcccccgggcgacaagaagagcgaggaaacaggccacaaaggaccagaggaaaggaacca

SEQ ID NO: 1113 - RNA, 36 nt, Homo sapiens
gcagcggacaacaagcaggacaaaccggcgaccaca

SEQ ID NO: 1114 - RNA, 73 nt, Homo sapiens
gggacccccaacccaccggcacgacagcccaaaggaaccaaaaaaggagcccaaaacacccccccacagcaag

SEQ ID NO: 1115 - RNA, 79 nt, Homo sapiens
accagaccgggagcacgcacccacgaggaacgaagcgcgcggcaggcgcgcgccgccccaggccgcaagacccagcgcc

SEQ ID NO: 1116 - RNA, 86 nt, Homo sapiens
gcaggagaaccccccgccccggccaaagggcccagagccgcagccgaagccgccaacgcagccggcagggcccgggcggggaggga

SEQ ID NO: 1117 - RNA, 82 nt, Homo sapiens
ccaagagacccgccacccaccgaggggcggcaccacaccaagggcgccccagcaagccgcgagaacccagccgggcaccaga

SEQ ID NO: 1118 - RNA, 73 nt, Homo sapiens
gggagcccacaagcggcagccagggacgaaaaaagaggacagagacaacggcccaacaacagaagacacacca

SEQ ID NO: 1119 - RNA, 70 nt, Homo sapiens
cccaccccccgccccacggggcgggcgggagggggccacggagcgaaagccgcagccagagaagaccgcg

SEQ ID NO: 1120 - RNA, 79 nt, Homo sapiens
cagaagaaggaccggaagcacacaacaggaaaacaaaagaggagaaagaacagaaggggcaggcacaggagacacaggg

SEQ ID NO: 1121 - RNA, 71 nt, Homo sapiens
cggacacaggaggaaacaagaagaaaaagggcagccacaagcaccgcggaaccgagcagcaggagcggacg

SEQ ID NO: 1122 - RNA, 56 nt, Homo sapiens
acagcaccaaccccggggaaggggagcggccggggacacagcagggcaggaagaca

SEQ ID NO: 1123 - RNA, 68 nt, Homo sapiens
acacggccacgaggccagggccacaacacacaggacgcaagagcaacaaagcgggaaccaagagacac

SEQ ID NO: 1124 - RNA, 82 nt, Homo sapiens
cagacgccgccgcaccgcagacaacggcgagggaacgggcgcaggcggcaaaaccccagggcgaagacccccccccagggca

SEQ ID NO: 1125 - RNA, 82 nt, Homo sapiens
ggggaggcggcggcgccaagcaaggccacggccgcaagaccacgaacggcacagccaacaagagaacggagcggacaccaga

SEQ ID NO: 1126 - RNA, 44 nt, Homo sapiens
cagagggaggaagacagccagcagccccaagacgcagagaagcc

SEQ ID NO: 1127 - RNA, 66 nt, Homo sapiens
caccaccccagacaccaggcacacagccagaacacacagagacacagggagagggaaaaacacggg

SEQ ID NO: 1128 - RNA, 38 nt, Homo sapiens
cagcagaccgggaggcacagaccagaaccggcgcaaca

SEQ ID NO: 1129 - RNA, 75 nt, Homo sapiens
cacacggcggagaagcagcggggggccacgcgacaagggaaaagccgggccacagaagcaccaccacaagccaca

SEQ ID NO: 1130 - RNA, 81 nt, Homo sapiens
acggacgggccaggcagcagaaccgccaaagcaaaccagaccgacacacgccagagggcggagaaggaacagggagagaaa

SEQ ID NO: 1131 - RNA, 51 nt, Homo sapiens
gaaaccagacggccagcagagaggaaaaaggaccccacgaaaacggacgca

SEQ ID NO: 1132 - RNA, 78 nt, Homo sapiens
agcagagcgccaagacggaggaagccaggaaggggaggaaagacgggcggaaccgcaaaggaggggagggagaagaaa

SEQ ID NO: 1133 - RNA, 71 nt, Homo sapiens
ccaaaacgagcccgagcgccgcaccggccgggaccccagggagaagacacaagacaccgaaaacgagaaac

SEQ ID NO: 1134 - RNA, 90 nt, Homo sapiens
ggaggagcagacggccagagacacaaggccccggcagcagcaggaagggaaaaggccgaggcacagcgggaagaccgcaaagacgacccg

SEQ ID NO: 1135 - RNA, 71 nt, Homo sapiens
aagcaagcagggggaagcaagcccccaacaagcaaaggaacggagaagcacaagaagacaagggcccagaa

SEQ ID NO: 1136 - RNA, 71 nt, Homo sapiens
cccgacccgggacaacacacaaaacgccgcaggaggggcagccaagaggggcaaaaaggaccggaagagag

SEQ ID NO: 1137 - RNA, 114 nt, Homo sapiens
gaaccaggacaggccgccaggggccggacacccaggccgacaacacggaccccaagaggagagccaaacaccgaggcccgagcaccgcacaaggagaagagcaagagcgcaagc

SEQ ID NO: 1138 - RNA, 75 nt, Homo sapiens
ccgccccgccgcccgagccggcgccaagccacgaaccgacggggaccccaagaggaaggaaccggagacgcagcc

SEQ ID NO: 1139 - RNA, 46 nt, Homo sapiens
ccagccggaaagacaggagaaaagcacacgccggacggaaacccac

SEQ ID NO: 1140 - RNA, 83 nt, Homo sapiens
accaagaaccagagccccagcccccagcagccgacaggaggcccgcaagagcaggcaggcagccaccccagggagaagacagc

SEQ ID NO: 1141 - RNA, 75 nt, Homo sapiens
agagggccgaaggcgggggggggaggcccgaggcagaggggaaagaaaaagagcccaccaaaaggaacagacggc

SEQ ID NO: 1142 - RNA, 72 nt, Homo sapiens
aacaagagacgaacacacagacaggacacaagacaaagagcaccgaagaagccgagagacggaaaagaacaa

SEQ ID NO: 1143 - RNA, 77 nt, Homo sapiens
gcaaggggaaagagggggacccaaggacgcgaaaaagcccgaaaagacacaagcaaaggaaccagcaaccaaagacg

SEQ ID NO: 1144 - RNA, 70 nt, Homo sapiens
ggcccggaggagcgaacaaggcgacaacacaggcggcaccaggacgccgaaaagcgaccggacgcaggca

SEQ ID NO: 1145 - RNA, 74 nt, Homo sapiens
gcccgggacccaacggaagggcacaaggccaagacggccaagggagccacagggcccagagcacggaaccggcc

SEQ ID NO: 1146 - RNA, 73 nt, Homo sapiens
caggggacaccgaaaacaaggaagcaggaagacagcgggcgcgacagccacccagggcaccgcacccaggcgg

SEQ ID NO: 1147 - RNA, 72 nt, Homo sapiens
caaggggccgcggccgcccgaaggaccgccggccgacaaggacacgagggggggggaagaaaaagcgagccc

SEQ ID NO: 1148 - RNA, 73 nt, Homo sapiens
gcacacagaccgcgagaacggccaacaggccggagagaaaacgcagccccaccgcagcgcaaacgagagaaag

SEQ ID NO: 1149 - RNA, 79 nt, Homo sapiens
ccaaacgcaaaagccgccccaaggaagcgacacagaacggggaggggccacccagagcacaacaggacacggacacagc

SEQ ID NO: 1150 - RNA, 71 nt, Homo sapiens
aagccggccagcaagacccgagcccagcagaaggacccacggcagagacggagaccgacggaaaccaggga

SEQ ID NO: 1151 - RNA, 82 nt, Homo sapiens
ggccgagcgagcgccgagcggacaaggaccgcgggcaagagacccgacgccgcccccaagccggcacagccacaccgagaag

SEQ ID NO: 1152 - RNA, 46 nt, Homo sapiens
ccggagcacagggcagcggagaccgagaccagagccgcgggcgccg

SEQ ID NO: 1153 - RNA, 72 nt, Homo sapiens
aagacccggccggcgccgcggccgcggcccggggccgccagagcggagaaagcaggacaagaccgcagacgg

SEQ ID NO: 1154 - RNA, 74 nt, Homo sapiens
gcagcgggaaagaagagcgggaagggacaaaacagaggcaacaagaaaaggggacaagccacaagagaagagac

SEQ ID NO: 1155 - RNA, 84 nt, Homo sapiens
ggagaagaggcgccggcagggcagccagcggccaggggggcccgcgggccagccaccgggccggggaaggccaccgagaacagg

SEQ ID NO: 1156 - RNA, 82 nt, Homo sapiens
ggcgagaagccccagcgcacacgcggaaagaaagggcgggcaagaaggaaaagaagcaacaaaacgacggaggagagggacg

SEQ ID NO: 1157 - RNA, 72 nt, Homo sapiens
gaagcgggcaagccaggagaaagccggacacggacagaaacacggccaggcccggggaggcaagcaggaaca

SEQ ID NO: 1158 - RNA, 66 nt, Homo sapiens
aggcacacaagacaaaggcgccgcagcaccccccggacccagccccggagagcgaccaaaccccca

SEQ ID NO: 1159 - RNA, 86 nt, Homo sapiens
gaacaaaggcaggcccgcgcgggagagcagacgcagcgggacgcagaacagcccccggccacaccacgaggcgagccaagagcgag

SEQ ID NO: 1160 - RNA, 79 nt, Homo sapiens
ggcaagagggagacaaagagagagcagagaacccccggcccagacagcaagaggcacagaaaacgcagaaaggaccgaa

SEQ ID NO: 1161 - RNA, 34 nt, Homo sapiens
gagaagaacagccaccggaagggcaccagggaag

SEQ ID NO: 1162 - RNA, 70 nt, Homo sapiens
cggccggagaaacgaggagccaggacaaggcacgaggcgcggcgaccaccacagcagagcccggcgaagg

SEQ ID NO: 1163 - RNA, 74 nt, Homo sapiens
gaagacgcaacaccgccgcgccacaccgacagagaacccaggccaacacacagacagaggcagccaccccagac

SEQ ID NO: 1164 - RNA, 86 nt, Homo sapiens
ccacccaggccccgacgccccgagccaggacggcaacccccaccccaaccagcgccaccgcagccgccacccgagcccgagcacag

SEQ ID NO: 1165 - RNA, 76 nt, Homo sapiens
gggaggaggcaacgccgcgacgaagaacggaagcgccccagaggagagggcggagagacggagaaaacgcaggaag

SEQ ID NO: 1166 - RNA, 82 nt, Homo sapiens
aggccggaccccagcgcccaggagaggagcagagccaacagcaggggggagcaaacaaaaccgagggcgagaagaagcagag

SEQ ID NO: 1167 - RNA, 95 nt, Homo sapiens
cgccgccgaagaagcacgaaagccccacccgccgcagcaagcagagaccgacaaaaaggggaacggaagaggagcgcaaaccacgcacagcaaaa

SEQ ID NO: 1168 - RNA, 107 nt, Homo sapiens
gacaggaccgaaagagccagcaaaagacgagacaacagggcccgagaaacaagacaacacaccccgggaggcggccaggacaagccggggccaccaaacgggaggac

SEQ ID NO: 1169 - RNA, 74 nt, Homo sapiens
gcgaacggagccaggcgagcgcggcgccggggcggggcccaggagacggaggacaaagcccagaaaagagaaaa

SEQ ID NO: 1170 - RNA, 70 nt, Homo sapiens
ggacaagacgaggaagagaaggagcggagcgccaagcccggccaaaaaaacgaaaacaaacggaagagag

SEQ ID NO: 1171 - RNA, 67 nt, Homo sapiens
ggcaccgaagcccgccccagcacgcgaggcaaaaaccccccacgaaagaaacggaggccaggaaacg

SEQ ID NO: 1172 - RNA, 82 nt, Homo sapiens
agcgcgccaggccgacagccgcggccgggcccgaggaaagaccacagcaagaccacgcccccagccgggggaccaggccgaa

SEQ ID NO: 1173 - RNA, 52 nt, Homo sapiens
gaggaaaaccagcggggcacgcgcagcgagcccagaggaaaacccaagacaa

SEQ ID NO: 1174 - RNA, 49 nt, Homo sapiens
ccggccagaggggcagagaggaagagacaccggcgggcagaggggacga

SEQ ID NO: 1175 - RNA, 83 nt, Homo sapiens
acaaaggcaggggcgccagggcaccagacgggcgggaaagagaggcccgaacccaagaaggcagaagccagccccgcaggccg

SEQ ID NO: 1176 - RNA, 83 nt, Homo sapiens
gcccgggcaacacagccccaccagccgaacacaaaagcgcagccaggcccggaagaagacaagagcaacccaaaaggcaccag

SEQ ID NO: 1177 - RNA, 71 nt, Homo sapiens
gaaacaaagaccacaccagaacacgacccgggccgcagccgacccggcggagccacagccaacccgaagca

SEQ ID NO: 1178 - RNA, 78 nt, Homo sapiens
acggaggagcggcgggccagacaggaaggcagcaacaaccacccagggagaaaaacaagaggacagacaccagaacac

SEQ ID NO: 1179 - RNA, 83 nt, Homo sapiens
ccagcggacagagaaccaagagagcagagcaaagcggcagccccggacagggagggccgaccaggaggacagcaagcccacac

SEQ ID NO: 1180 - RNA, 38 nt, Homo sapiens
gagaccgggagcggggggaagcccagaagccgaaaagc

SEQ ID NO: 1181 - RNA, 77 nt, Homo sapiens
gaacccagaggcgggaggggccgggaggcagaggggcagggggcaacagggcagcggccaaccgggcgggccaggcc

SEQ ID NO: 1182 - RNA, 77 nt, Homo sapiens
gcgcgcacccgagccgcaaggacgagaagccacggacccaggacccccggaagaggaaaacccacacgccacccaga

SEQ ID NO: 1183 - RNA, 82 nt, Homo sapiens
ccgcagacgcgaaggaacggcaaagaccagccgacagcgaccaaggccagagcgaaaggccacggccagccgccggcacgca

SEQ ID NO: 1184 - RNA, 71 nt, Homo sapiens
aaggccaacacggagcacagaaaagaagaacagagcaaacagacggaagaggcagcacaccgcgcccacag

SEQ ID NO: 1185 - RNA, 80 nt, Homo sapiens
aagaagcggaggcaacgaggccgagcgcgcggcgccgcaacaaagcagacaccaggaagacccagaccagccgggaacca

SEQ ID NO: 1186 - RNA, 81 nt, Homo sapiens
gggcaaccgggcggccacgcccgcgcagggcgcaagaggcagacagacaggcgacgggcagccaacaagaaacgacaccca

SEQ ID NO: 1187 - RNA, 74 nt, Homo sapiens
ccgaaaagagccaccgggaggacgggaaggaaggagcagccgaccagggggcagcggcaagcaggggagccagc

SEQ ID NO: 1188 - RNA, 74 nt, Homo sapiens
agaggggccgaaccggaagggcggaggccccggcggcaggcaccccgagccggcgacccggcagccccagaggg

SEQ ID NO: 1189 - RNA, 61 nt, Homo sapiens
cacgccccccaaagcaggccaccggacagcagcgggggcccaccagggaggaagaggcagg

SEQ ID NO: 1190 - RNA, 78 nt, Homo sapiens
gccccaaacaggacgaaggcggcgaagccccaacgagcggcccgcgacccgcggccggcagcgacaccaagaacgcac

SEQ ID NO: 1191 - RNA, 36 nt, Homo sapiens
ccaagcaccagaaggagagaaggacgggaggaaaaa

SEQ ID NO: 1192 - RNA, 66 nt, Homo sapiens
aacccggcgcaaaagccggagaggccaaccagaacaccaggagaaacacgcaaagacgggaacgac

SEQ ID NO: 1193 - RNA, 74 nt, Homo sapiens
caaacgacaccacccgaccgaccaaaccgcacaaacaaagccaaggaacaaagaaggcggcagccaagaaaaag

SEQ ID NO: 1194 - RNA, 68 nt, Homo sapiens
cacagaagagcaaagagcaagcgagcaaggggcgaccaaaggggcaaagagaaccaggagaccccacc

SEQ ID NO: 1195 - RNA, 70 nt, Homo sapiens
gccacgaggaagcgcggccccgcacaagaggaagacccgggcgacggcgccaaaagcagggcccgacacg

SEQ ID NO: 1196 - RNA, 71 nt, Homo sapiens
ggaaagccagaaggcaccagagagaggccgaacggagcagacaaagggaagaccacaagaggggcagcaga

SEQ ID NO: 1197 - RNA, 59 nt, Homo sapiens
acgcgggacgccggcgcagccgcccacgcaggcagcagcagcggaaccgcaggcagggg

SEQ ID NO: 1198 - RNA, 78 nt, Homo sapiens
gggacacacccccaggaggcccggcagagcaggcggcacagggagaacacagggccccaccgcgccccacagaaaacg

SEQ ID NO: 1199 - RNA, 67 nt, Homo sapiens
cccaggccccagcgcgagagacacaggaacgacccaaagcggaaaacccgcaagggccagcaaaacc

SEQ ID NO: 1200 - RNA, 81 nt, Homo sapiens
gcaacaaggcggacaagagaagccgccaggcacagccagaggacaacacacacacacaagaaacagggccaggagggggcc

SEQ ID NO: 1201 - RNA, 91 nt, Homo sapiens
ggcaggagccgaaagggaagcacacggaccagcagaacagaaacaaggccccgggcagggagggacaagcccacaccccgaggacagagaa

SEQ ID NO: 1202 - RNA, 82 nt, Homo sapiens
cgacggcccagcaggcggggaagagaaagggcggcccgcagacggccccaagaccggagcgggaagccgcggccacaggcca

SEQ ID NO: 1203 - RNA, 78 nt, Homo sapiens
cagcgaggaacagacaggaggggaggcaccggcagcggacccgcccagcaacacccccagggagcgggggcggaaaca

SEQ ID NO: 1204 - RNA, 83 nt, Homo sapiens
cagaagcacaaccagagccggccccgggcgaggaaccaaagccccggcgcgcaacagaagaggagcggagcaggccaacgaga

SEQ ID NO: 1205 - RNA, 59 nt, Homo sapiens
cagacacgacgcggcaggaacccggcccagagcgaccggacagaagacagaccgacaga

SEQ ID NO: 1206 - RNA, 59 nt, Homo sapiens
gaggaggaggggaacacccagccccagaaacaggagggcaggagaaaggagaaaaagag

SEQ ID NO: 1207 - RNA, 81 nt, Homo sapiens
cacgacaggagggcaagaccgcggcggggaacagaccagggaaggggaggagaagagccgggaaaaacacagcaagaacca

SEQ ID NO: 1208 - RNA, 69 nt, Homo sapiens
gccagaggaaagggcagacagagacccagaaggaccgcaggcgggacaagaaaagaaaaagcaacagaa

SEQ ID NO: 1209 - RNA, 79 nt, Homo sapiens
accagacacacagggccgacagaaagggccacacgggacagggcccagaaaaggaaccaagagcacgaagaacaccagc

SEQ ID NO: 1210 - RNA, 112 nt, Homo sapiens
agaaggcagccgagcaccgagccagcccaggaaaaggagaggggaccaaaagaacccagccaacccgcagagggaggggaggggcgagcggaggagagcggggcccaagaac

SEQ ID NO: 1211 - RNA, 81 nt, Homo sapiens
cgggaggaaggaggaggacgagacacagaacgcgcccagcaaagcgaagcgcagacccaggggagcccaccagccagcaac

SEQ ID NO: 1212 - RNA, 65 nt, Homo sapiens
cggggcgggccagccggggagcaagcaggacccccccgccccacccaggggcccagaagaggaga

SEQ ID NO: 1213 - RNA, 70 nt, Homo sapiens
agacggacagcccacgggaacaagaggggacagaaaggagggagcgggaccgagaaggcgaagcgcagag

SEQ ID NO: 1214 - RNA, 80 nt, Homo sapiens
aggcaccacgaccagagcgacagagggggaagccacacaccgcggaaccgcggggcaagaagcaagcaaccaggcgccgc

SEQ ID NO: 1215 - RNA, 111 nt, Homo sapiens
cccagagcacagagccgaaaaaaaagcaaaggccagacggagccaaacagccacagaaggagagcaacaggggccagagaagaagcagaggcgaagcccacaaggccccag

SEQ ID NO: 1216 - RNA, 76 nt, Homo sapiens
cacaccaaccacgcaccaaaaggaaccgagacagaaagaggaccaggacagagacaggcggacaagcgcagcaacg

SEQ ID NO: 1217 - RNA, 75 nt, Homo sapiens
cggcccagaaggaggaggagagaaggaaccaccacccaccgaagggggacgaagacccaaacgacacagcggaac

SEQ ID NO: 1218 - RNA, 76 nt, Homo sapiens
acggaaaaggaacagagccaaaccagaagaggagggcccagaagaaaaaggcgggagcggaaaggacgaagaaagg

SEQ ID NO: 1219 - RNA, 55 nt, Homo sapiens
caccccccaaagagaccagcaagcgccagggaggcacccggaagccgcacccgag

SEQ ID NO: 1220 - RNA, 79 nt, Homo sapiens
cgcaacggcgaggaagagacgacagcaaggcggagacgaggacgcgcacaggaaaggacgcggaacaagcaggcagcca

SEQ ID NO: 1221 - RNA, 67 nt, Homo sapiens
ggagccaggcccgaccggcagcgcacaagagcggaaccaagcccgggccgagccgccccagccacca

SEQ ID NO: 1222 - RNA, 77 nt, Homo sapiens
ccgagaccagagaggaaaaagaagcacaccgccaaccacccgggcaacacagggccgggccgagccagggcccccag

SEQ ID NO: 1223 - RNA, 81 nt, Homo sapiens
ggccgccacccagacacacgagacacaacaggggcgggaagcccagccgccagaagcagcaaagaagcccgaagaaggaag

SEQ ID NO: 1224 - RNA, 80 nt, Homo sapiens
cccgcggccggagagcggaggagaggcaaccgcgcccgaaaggagacacggcgcgccgcagcagggggaagaagagaaaa

SEQ ID NO: 1225 - RNA, 54 nt, Homo sapiens
gcggcgccgaaaaaaaggggggggaaggcgcaaaaaaggaaagacccacgaccc

SEQ ID NO: 1226 - RNA, 61 nt, Homo sapiens
cccggcgcgaagaggcggaccggacggccgaggacgccaggaaagcaggcagagcaacccc

SEQ ID NO: 1227 - RNA, 79 nt, Homo sapiens
gaagcagcagagaagaaaaacagaaccacacaaacgccgggagacaacaaccacggcgccggcgacggagcccgcaccc

SEQ ID NO: 1228 - RNA, 51 nt, Homo sapiens
gggcgccacgagccacagccgggcggcggcgagaaacaccacccgccaccc

SEQ ID NO: 1229 - RNA, 81 nt, Homo sapiens
ccacgacccacgagacaggggcccaagaaaaagcaccggacgccgagggagcaacaagagcagaaaggaagaaccacccgc

SEQ ID NO: 1230 - RNA, 73 nt, Homo sapiens
ggaccaaaagcgcagaaagccacgcaaaaggaaagagcccagaggcccggaaggcgcaaaagggggagaacaa

SEQ ID NO: 1231 - RNA, 57 nt, Homo sapiens
gcacaccccaacgcggagaagcaccacaccaacacagcccccgggaaagaccaggag

SEQ ID NO: 1232 - RNA, 40 nt, Homo sapiens
aggcgaagacggggagccacgagcaaaacaaacggagaga

SEQ ID NO: 1233 - RNA, 95 nt, Homo sapiens
gcggaggcgacggggcggcccggagccggcgcgaaccggcccccgcagcgggacccggagcgagaagaggcgacaccagggcccaaagaacaacc

SEQ ID NO: 1234 - RNA, 76 nt, Homo sapiens
cccgccgaacccgaaaggaggccgcagaacagcgccacagccggccacaacacccaaacaaggccacccgcccgga

SEQ ID NO: 1235 - RNA, 96 nt, Homo sapiens
gggagaccggcgcgcagcggagagaacaacgcacacaagagcacgaacccaacaacagacgccaaaaccagaggaacaaggcccccacggagccac

SEQ ID NO: 1236 - RNA, 75 nt, Homo sapiens
cagccggaccccgccacgcgcgcgcccacaggagccacccccacgaggcaaggaggccacggggccgaagacacc

SEQ ID NO: 1237 - RNA, 57 nt, Homo sapiens
caaaaagaaccgcagacagccaccagggaagacaaccaggagaagaccaaagaccac

SEQ ID NO: 1238 - RNA, 69 nt, Homo sapiens
cggggagcacggcgagcagccaggccaggagaggacaggaagggaaacgaaaaaggccaggcgacagaa

SEQ ID NO: 1239 - RNA, 70 nt, Homo sapiens
caccccagggccggcaccgccacccagcccaacgcccggggaggcggccaaggaacaagacacagaagga

SEQ ID NO: 1240 - RNA, 74 nt, Homo sapiens
aagaacggacacgaagaaccacaagcaagaaacacaggagcccggagcgagacagagggaaagaaccaccacca

SEQ ID NO: 1241 - RNA, 58 nt, Homo sapiens
cacaacaccggcaggaaccaccaggacagacagcagggaagagcacgcaagcaaacac

SEQ ID NO: 1242 - RNA, 73 nt, Homo sapiens
caccccacgcgagaacgaccacgcaggagaagacagaggagccagaccaagagacagcacaggcgagcgagca

SEQ ID NO: 1243 - RNA, 66 nt, Homo sapiens
aacggagcaccagaaaaagccgacgcacgcgaggagcgcaaagggaagcaacaacgcaagacaaga

SEQ ID NO: 1244 - RNA, 77 nt, Homo sapiens
cggccaaacaacagggaaccaaggggacaaaccaacagaagggcaaccagaacccacaggagggccagaggacaaag

SEQ ID NO: 1245 - RNA, 69 nt, Homo sapiens
gccccagacgagccgagaaggggggcgcccccgaggaagcaaccccggccggagggggcaaaccgacgg

SEQ ID NO: 1246 - RNA, 45 nt, Homo sapiens
ccggccggggcgcgaggcgcgaggcgcagcaagaaggccacggcc

SEQ ID NO: 1247 - RNA, 104 nt, Homo sapiens
gggccgaagggggcccgccccgccggccacgggcgggaggccgggggagggaggaagaggcgcggcaagggcgcggcaagaaaaccggggccgccccacccaag

SEQ ID NO: 1248 - RNA, 73 nt, Homo sapiens
caggcagcgcggggagccgcaagaggaagaccaacacgcacgaagggaacacacggaagcaaccagcccgcga

SEQ ID NO: 1249 - RNA, 101 nt, Homo sapiens
ggagacaaccaggagaaggcggaagcggcgcgggggaggaacaacaacggcaacagaaagcggggaaaaggcccgagcagcccggccacacaagaaagcac

SEQ ID NO: 1250 - RNA, 68 nt, Homo sapiens
cgagcagcggggccaacacacagaccacccccagaacagggagcggcaggggaggcgaagaagagccc

SEQ ID NO: 1251 - RNA, 84 nt, Homo sapiens
caaaccgcgaagacgaacaaacccacagccagagccagagcaaagcaccacaggggaaaacaagcagaaccggggaccagccaa

SEQ ID NO: 1252 - RNA, 55 nt, Homo sapiens
ccccagggaagcagaaagggacgcccagaacaagaagcagaagccaagaagggcg

SEQ ID NO: 1253 - RNA, 58 nt, Homo sapiens
cagcgacaaggagagaagcgcggagccccaagggacgaagccacgacagcagagagga

SEQ ID NO: 1254 - RNA, 73 nt, Homo sapiens
caaggagcgccacggaaggagagcgcagacgagcagagcccgacagggcgccacgggcacaccagcagaaccc

SEQ ID NO: 1255 - RNA, 78 nt, Homo sapiens
acaccagagcgacgccagagccccgacaagggaccgggcgggccccgcaggaaacccccaccggcccacacagacgca

SEQ ID NO: 1256 - RNA, 77 nt, Homo sapiens
agaggagggagaacacagaaaccggccccaggccaggcgaaccagccgaaaaaggagaaaccaaaaggaaaagcgaa

SEQ ID NO: 1257 - RNA, 72 nt, Homo sapiens
agagcagggcaaggagccaggaaggaggaggaaaaaaggagcaaaaggaacacaagacccaaagagacagag

SEQ ID NO: 1258 - RNA, 67 nt, Homo sapiens
gggagggaacaaaggcgagagaaacgacgaagagagaagacaaggcgaagaccgcacagccgccaaa

SEQ ID NO: 1259 - RNA, 84 nt, Homo sapiens
cgaagccccacaagccagggaagaccccgaaggaccaagcacgccaggaaagagagaagaaaaccgaacaacaaaccagaacaa

SEQ ID NO: 1260 - RNA, 68 nt, Homo sapiens
aggagagaagaccagaagggaggagagacgaaagagccaccaagaagagccagcaacgaggaacagaa

SEQ ID NO: 1261 - RNA, 74 nt, Homo sapiens
ggcccgcgggccagaacgagggcgcccggcagacgacagagagcgaaggaggaggccaccccgcccagcggggc

SEQ ID NO: 1262 - RNA, 78 nt, Homo sapiens
cgaccgagacgggcggagaggagaagagccaacgccggcggaccccagcgacacagcagaaccagcagcaccaagaaa

SEQ ID NO: 1263 - RNA, 90 nt, Homo sapiens
ggagagcacccagggaaaggagacaaggaccgaaacagaaacggaacaccaagacaagagagggcggcagaaggaacaccgagaaaccgc

SEQ ID NO: 1264 - RNA, 70 nt, Homo sapiens
ggcgaaagcaagacgcagcagaaagcaggacagcagaccacagcccggcaggcccaaaaacccaaaggga

SEQ ID NO: 1265 - RNA, 81 nt, Homo sapiens
gagcgagcgagggggggcgcgccggaaaccggagcgcgcagcagagcgcagaaacggagggcagcagggaccggcggacgc

SEQ ID NO: 1266 - RNA, 76 nt, Homo sapiens
acccacgcccggggcaccgcgagcccgcaaaggggagggcaggggagcacgcggacagaacggagcgccggagagc

SEQ ID NO: 1267 - RNA, 73 nt, Homo sapiens
acgcaccgcaggcagacaaaagggccaaagaagggagagaggcgggagcagcggaagacaccaaggccaggga

SEQ ID NO: 1268 - RNA, 73 nt, Homo sapiens
ggcgcggccgcggagcccccgaggaggggccacggggccggggagccaccaggagacagcccagacaagcagg

SEQ ID NO: 1269 - RNA, 70 nt, Homo sapiens
aacaccggccaagaaggacccaaagacaggaccacgcaccagcagagaaggaaagcaaaccgaagcaggc

SEQ ID NO: 1270 - RNA, 74 nt, Homo sapiens
cgcgccacggaggggcagccacccccggggacccaacagcaagaaagacaaggcccccccccccgggacaaggg

SEQ ID NO: 1271 - RNA, 82 nt, Homo sapiens
cagcagcgcgcgacccggcccaaccccgagccgcgggcacaggaagacaggacccgcccacagaaagccagcaagaaaaaca

SEQ ID NO: 1272 - RNA, 63 nt, Homo sapiens
cagcgaacaaaaaagggacaggccacagaaacgaaccccaagggacacaagggccagcgaaag

SEQ ID NO: 1273 - RNA, 69 nt, Homo sapiens
ggaaccgcgcagcacaggcccagacggcgggagcgaccccggcaggaaggcgacccaggagaggacgaa

SEQ ID NO: 1274 - RNA, 60 nt, Homo sapiens
accagggacgcccccaggcccgcccaggcaacaggcacccgacagcagcaaccgacccca

SEQ ID NO: 1275 - RNA, 59 nt, Homo sapiens
gaacgcaccggagcgggccaagggcgggaacgcggacaggggaccaggaggagaagcaa

SEQ ID NO: 1276 - RNA, 81 nt, Homo sapiens
aacagacagaaggagcaggaaccaaaggagccgaaaaccagccccgcccacacacaccaacagaacccgggggacccccag

SEQ ID NO: 1277 - RNA, 55 nt, Homo sapiens
cggacaaggcacgccagacggcagagacccagagaacccaaacaagaccaaaacc

SEQ ID NO: 1278 - RNA, 82 nt, Homo sapiens
caaccgggcgccgacgagacggggaaacaacacgaggaggacggcacaaaaagcaccagcggggaggaacaacgaagagaag

SEQ ID NO: 1279 - RNA, 61 nt, Homo sapiens
cggggcacaagcaggaaggacgaacgcagacacccgagcgacacaggaagaacaagaagga

SEQ ID NO: 1280 - RNA, 60 nt, Homo sapiens
acagagaggggaaggagcccagcgacaaacccacagccgcgcgcgccggcgcggccccgg

SEQ ID NO: 1281 - RNA, 64 nt, Homo sapiens
accaaaaacgcaacaacagacgcggagcccaccagcccagcagagaacaggccacacggccggc

SEQ ID NO: 1282 - RNA, 80 nt, Homo sapiens
acaccaagcccacgaaagcaccggcaaagggcgaaaggagagagaagcccagaaacagcggagaagcaaacgagaagcac

SEQ ID NO: 1283 - RNA, 58 nt, Homo sapiens
aaaggacggcagcacacaacaaaacacaggagggggaagggccgggcacaaacagcgg

SEQ ID NO: 1284 - RNA, 70 nt, Homo sapiens
agcaacagggacggcaaaggcgcaacggccccaacgggagagcggcaccgagaccaggcggccgaacccg

SEQ ID NO: 1285 - RNA, 74 nt, Homo sapiens
ccgaggcagagacagggaggaggaagccagggccgcagccaaaggcagggaagaaaaagaagacaccagagaaa

SEQ ID NO: 1286 - RNA, 73 nt, Homo sapiens
gccaccgggccgcaggaccaccccgcacaccacccaagggaggcccccccccacaaggcccgcaagcaccagc

SEQ ID NO: 1287 - RNA, 70 nt, Homo sapiens
gaggaccgcccacagagaagccgcacccggagacccagaccagaaaaagagcagcccagcgggggcaggg

SEQ ID NO: 1288 - RNA, 77 nt, Homo sapiens
acagaaacgggcccaaaccgccgcgcaagcagaccagcggggagacgacacgccaggagccccgacaagggaccggg

SEQ ID NO: 1289 - RNA, 62 nt, Homo sapiens
gcccacgaggaggagccggaccgcgccaagagggcccacaccgggggcacgggccacagcgg

SEQ ID NO: 1290 - RNA, 80 nt, Homo sapiens
gaggagcggccaaagcagacagcgggacagcgcgagaagagcaagaaaggagcaggcagagcaaggaaacaagagggcga

SEQ ID NO: 1291 - RNA, 117 nt, Homo sapiens
caacaccgcacaaacaccaacgcacagagagaacccaagaccgcaaggagcagagccgagcgaggaagcacacagggagaaaacagccagacagaggacgaagacaaaaaagcggga

SEQ ID NO: 1292 - RNA, 70 nt, Homo sapiens
gagggaagcaaacagaaaagggagggggcaggggacagaccggcaccagccgcgagggagcacgccggga

SEQ ID NO: 1293 - RNA, 80 nt, Homo sapiens
caggaaggacccagggaggcgaaacgagagcgggaggggggcgagaacgaagcgaggaggcgcacggaagaccaggagag

SEQ ID NO: 1294 - RNA, 72 nt, Homo sapiens
gccggggagcccaggccaagccaccacgggccggagggccccgacgagaaggcaccccgaagagccagggcg

SEQ ID NO: 1295 - RNA, 67 nt, Homo sapiens
cacgacgcgccaacaacgggcacacaaggcagcgagccgaggggaggggagggaccggcgggaccca

SEQ ID NO: 1296 - RNA, 84 nt, Homo sapiens
gcccagcgcccaaaggcccaaggagcgccggcccccacaaagacacgccacgcaggcgcgggggacgacggcgggggcacacgg

SEQ ID NO: 1297 - RNA, 71 nt, Homo sapiens
caagcagggaaacgaaaaagggcaggagaggggggaaagggccgaggggggggggccgaggaaggccgggg

SEQ ID NO: 1298 - RNA, 70 nt, Homo sapiens
gaccgacacccagaacgaccaagagacagcacagaggcagagcaacagggacacaagcaagaagaaaggg

SEQ ID NO: 1299 - RNA, 84 nt, Homo sapiens
ggccgccacaaagaggcagaacaggcccaagggagcagacaggagaaaacgacaaagggaaaagaagaacaagggacggaggag

SEQ ID NO: 1300 - RNA, 79 nt, Homo sapiens
gaccacaccagacacgggggacagaaagcaagacagcagaccacagcccggcaggcccaaaaacccaaagggacagaag

SEQ ID NO: 1301 - RNA, 65 nt, Homo sapiens
cagacgcagggcgcccccgaggaacggccacaaacgcccaccaaacccaaaagaaaagccggaag

SEQ ID NO: 1302 - RNA, 76 nt, Homo sapiens
gaacaaaaagggccgacgcgcccgagagaggcccaaaaggcagaggggaccagaagggacaagcaaggggccaagg

SEQ ID NO: 1303 - RNA, 78 nt, Homo sapiens
aaaccacccccacccagcccccaagagcgggacaaggggagcagcggaggaagccacaggacgccggggaccgacagg

SEQ ID NO: 1304 - RNA, 46 nt, Homo sapiens
cgcagggcgcccccgacagacaaccggagaaaccaaaagaaaaaca

SEQ ID NO: 1305 - RNA, 87 nt, Homo sapiens
agacagccaaacgcagcgcagaccgcgcccgccgagaaaaacaaccaccagcgagcaaaaaggcaaagaccaagaccaccaagaagc

SEQ ID NO: 1306 - RNA, 64 nt, Homo sapiens
gaagcgacacagggaagaagccagaagccagaaaacccagacaagaccccacgaggacggaggc

SEQ ID NO: 1307 - RNA, 77 nt, Homo sapiens
cacaccgcggggccgaaaacaacgacaacgagcacagacacggccgagaccccgacgcccgacggccacacgccagc

SEQ ID NO: 1308 - RNA, 70 nt, Homo sapiens
gggggcgagaacggccccaggcggcccaaggacacacaggacaaacacacaggaagggcggaaaaggcaa

SEQ ID NO: 1309 - RNA, 85 nt, Homo sapiens
acccaggaaggaccgagaccccacaagacgcaccaacgcaaggcaacagaggagaagaggaagaggaaaccagcaagaaggcagg

SEQ ID NO: 1310 - RNA, 75 nt, Homo sapiens
gcccccggggacaggagaaggggcccagcgcacaggcgccaagcccacgggcgcaccaacggagagccagagcaa

SEQ ID NO: 1311 - RNA, 69 nt, Homo sapiens
agagcgacaggaggagacaggcgagagaggaggacacgaccgcccggcgaccacaagaacaccaacaag

SEQ ID NO: 1312 - RNA, 53 nt, Homo sapiens
aggaagagccacaaccggaggccccagaagaagggacacgagaaacgaagcag

SEQ ID NO: 1313 - RNA, 75 nt, Homo sapiens
aacacagaggaaaccgcaccgcccggagggcgggaagcgaagaagagaaggcgccggcgagggccacaggacagc

SEQ ID NO: 1314 - RNA, 75 nt, Homo sapiens
gcaccaagggcgaaggagccggcccaagagggaaggggaacaggaccggccacagacagccccccaggggccgga

SEQ ID NO: 1315 - RNA, 79 nt, Homo sapiens
ccgagcaggcgagcgaacgacgacgaggcgaggaaccaaaggccaccccgccgagcccacccaccaagaagcacggacc

SEQ ID NO: 1316 - RNA, 79 nt, Homo sapiens
aacagaagcaaggaagcgggcaagaggggaaaacagaggaaagcaagaaagaagcggaagggaggcgcgcgaccagaga

SEQ ID NO: 1317 - RNA, 33 nt, Homo sapiens
gccaccccaagagcccgcagaaaaaccggcagg

SEQ ID NO: 1318 - RNA, 93 nt, Homo sapiens
acaaggcacgggggccagcaaccaccaagggaacagcacagggaccaaccaagaagaaacaacgaccaccaccaaaacagcccacgaagaacc

SEQ ID NO: 1319 - RNA, 81 nt, Homo sapiens
gcgccccggggccgcggggagccacggcggagacccccgccccaacgaggcgccaggagggcgcgggcgaaaaacggagcc

SEQ ID NO: 1320 - RNA, 34 nt, Homo sapiens
accccggcagccgggaaaggagccgcgcacccag

SEQ ID NO: 1321 - RNA, 85 nt, Homo sapiens
gcggggggccgcgcgcccgcggcagaagagggcggcgcgcggcgcaggggggcagccgagagcccaagggccgccggcccaggcg

SEQ ID NO: 1322 - RNA, 94 nt, Homo sapiens
cgagggccgggccccacgacgcgggacgaagagccgaggagacaagaaggagaccggcaccaggccccggccgaagggagagcccagcccaacc

SEQ ID NO: 1323 - RNA, 64 nt, Homo sapiens
gacaacaccaacaaggggcgacacgcaaagcgagcggaccggaacaagggaggggggagcagca

SEQ ID NO: 1324 - RNA, 70 nt, Homo sapiens
aaacgaggcacaaaaagcagagcacgggaaacacaaagaagacaccagaagggccagcaccacgacaaca

SEQ ID NO: 1325 - RNA, 78 nt, Homo sapiens
gggcacgaggaacagggaagggcgcgagcggggacaaagcgggaaaaagaaaagggcgaagacccgaagcagcgcagg

SEQ ID NO: 1326 - RNA, 66 nt, Homo sapiens
ccacagaaacaaaagcaacaaagagggaccgccgggagagccgcccaccccccacccggacgccgg

SEQ ID NO: 1327 - RNA, 58 nt, Homo sapiens
caacgaacgaaaaaaccagaacacgccaaggacaggaacacaagacacaaacaaacca

SEQ ID NO: 1328 - RNA, 85 nt, Homo sapiens
acacggagcacgcaggcgccggccgaaaagacgaggcgaggaggcgagacacccaacccaccccaccccggagggccagaccccc

SEQ ID NO: 1329 - RNA, 82 nt, Homo sapiens
agagacggcgaaaaaccaaaaagccaggggaccaaaagaacccagccaacccgcagagggaggggaggggcgagcggaggag

SEQ ID NO: 1330 - RNA, 69 nt, Homo sapiens
gccgcaggggcacccccaacgagaaccgaacacacaaaagaaggacacagacaaaagaccaggagagag

SEQ ID NO: 1331 - RNA, 81 nt, Homo sapiens
cggaagagccccgcccgggaaaaaggcacaaacccagcacagagaagacggcgacaagcaaaagacgacgcagaaaggaga

SEQ ID NO: 1332 - RNA, 77 nt, Homo sapiens
gaagagcgaaacgggaccacacggcgcacacagcgacagaagagcgaaacggcaggccgacgcagaccaaaacaaga

SEQ ID NO: 1333 - RNA, 82 nt, Homo sapiens
aagaaggcccagaaccgaaagagaagaagagagccaggaccaaggagcggcgcggggaccaaacccggagccagccaccccg

SEQ ID NO: 1334 - RNA, 87 nt, Homo sapiens
accccgccggcaaccaccccgcgagaagaaaccagggccgggaagcacacaggaggcgccacgggagcagcggaaggggcccagcag

SEQ ID NO: 1335 - RNA, 79 nt, Homo sapiens
gagcccgcccccgagaagagcagccagccgcggaggggagcggagggcgagccaacgaaagaaggcgccgcaaggaaac

SEQ ID NO: 1336 - RNA, 80 nt, Homo sapiens
ggagcgcacgaggacggaagaaggcggccaaccagcggacaaggaccacgcgaaagcggagccccggccgaaaacccggg

SEQ ID NO: 1337 - RNA, 57 nt, Homo sapiens
gaagaaacacagacagcgccaacgagcacaggaagccgagccacggagcacccaaag

SEQ ID NO: 1338 - RNA, 57 nt, Homo sapiens
gggaaacgcggagccaggccgagagccaagaggcgaggaggaggagagaacaaccgc

SEQ ID NO: 1339 - RNA, 74 nt, Homo sapiens
gaagcacaaaagagagacgcccaggccggggggggcacagagccccggaagacagcccccagcgaccagaccca

SEQ ID NO: 1340 - RNA, 78 nt, Homo sapiens
caaggaggccccagcggaccgaacaggcaccgcggccacaagaaaagccagcccccagaaagaaccgcccacgggccg

SEQ ID NO: 1341 - RNA, 69 nt, Homo sapiens
gacaagaggacaccgaacggccccgggggcgccgagggcacaagggcaacgacagaagggcgaagccaa

SEQ ID NO: 1342 - RNA, 76 nt, Homo sapiens
ggcagaaacacaagaaccacaaggaaacagacagaccggcgagcggaaacaacacacgacaacaacgacacccaac

SEQ ID NO: 1343 - RNA, 77 nt, Homo sapiens
aggccccaagcgcgccaccagcgacaacacccaggaaggggaaccacaaagaagagaaggcgggccaagaccgacaa

SEQ ID NO: 1344 - RNA, 61 nt, Homo sapiens
gaaaacagaccagaacagagagacccgcggccagaaggagaggacccagcggaaaacagca

SEQ ID NO: 1345 - RNA, 78 nt, Homo sapiens
gagcaaccccccaggacgggcggaggcggggggaccggcgggcgggacacgaggaggggacggcccgccacaggcaca

SEQ ID NO: 1346 - RNA, 68 nt, Homo sapiens
ggaccaagaaccagacgaacacaaacacaggccggagggcacagaccggccgccacacggggaacgag

SEQ ID NO: 1347 - RNA, 77 nt, Homo sapiens
gcccagcccccgaggagcgggacacagcgcggacaaggccacaagagggcagggaaaaaagggagcagacagaaaac

SEQ ID NO: 1348 - RNA, 83 nt, Homo sapiens
ggagaccaagagacagacaccgccccgagacgagagggaacaggcacgccccacccgccagccgagcccccgacgcagcacaa

SEQ ID NO: 1349 - RNA, 76 nt, Homo sapiens
aggcgaaacagaacaaccccacggaagaagagggccaaccagcacgagccacgcgaccccaggaacccagcaccag

SEQ ID NO: 1350 - RNA, 78 nt, Homo sapiens
aaggaagaaggaagaaagaagcacggacagaacagcacacaaggaccagaaggacccaaggacgaaggcaggggaaag

SEQ ID NO: 1351 - RNA, 77 nt, Homo sapiens
gcgaggagggggaccacggagagagaaagaagacggggggagaccagcgggggaagaaggggcagggggcacgaaag

SEQ ID NO: 1352 - RNA, 72 nt, Homo sapiens
caccaccggagcaaacaaccgaggaccaccggcaccacaccaccaaagcaccaggagacaaagccacaaaaa

SEQ ID NO: 1353 - RNA, 72 nt, Homo sapiens
agggagaccacagcaagacccaggaccccggaagccagaaaggaagagacccagacgaagagcgcacagaaa

SEQ ID NO: 1354 - RNA, 64 nt, Homo sapiens
cagggggcaggacgaccagcgggaggccagaggaaggcgagggaaaaggcccccccaggcggag

SEQ ID NO: 1355 - RNA, 57 nt, Homo sapiens
cggcgaccagagaggccaacaaacaggccggaagaagccccacggcagcagcaacca

SEQ ID NO: 1356 - RNA, 80 nt, Homo sapiens
gaaagccagacccgcccaacagaaaaagagaggagggagaacacagaaacccgccccgggacccaggagaaggaccagac

SEQ ID NO: 1357 - RNA, 75 nt, Homo sapiens
aaaagaccaaggacccacaaagaagagagggccaaagggccagggaaggaagaaggcggaggaacacaccgcgcc

SEQ ID NO: 1358 - RNA, 53 nt, Homo sapiens
agaacagaacccaaaagccgacaaccccagaaacagcaaagggcgagagaagc

SEQ ID NO: 1359 - RNA, 37 nt, Homo sapiens
aggccagggcaccacaccagagacggggccacaggcc

SEQ ID NO: 1360 - RNA, 58 nt, Homo sapiens
cagccccgaggagcgggaacagaccaccgaccgagcccagaagcccgaaaagccggag

SEQ ID NO: 1361 - RNA, 73 nt, Homo sapiens
aagcaggaacagcgaggccaaggaaagagagcacaccgcagcccaggagcgagcccacagcccgggccccccg

SEQ ID NO: 1362 - RNA, 78 nt, Homo sapiens
ggcgggagccaaggaggggcgggagagaaggaagagcgcagcccgaggaccagcagcaggggcggggccccgaacgag

SEQ ID NO: 1363 - RNA, 84 nt, Homo sapiens
ggccgcggcagggcggcgcggccgagccagcacgaagggggaggacggcgaaccggcggagcacagcccggaggagacccgcgg

SEQ ID NO: 1364 - RNA, 78 nt, Homo sapiens
ggaagagggagcaccacggaccccaaggaagccacggcagacacacaacccgacccgacgaacaagggaagcagggac

SEQ ID NO: 1365 - RNA, 70 nt, Homo sapiens
caggccaaggcaaacaggccacagcgaccagccgccagcaccaagaaagccaaagccacagcggcagaga

SEQ ID NO: 1366 - RNA, 52 nt, Homo sapiens
caagggcgggggaggacaagccggaggaagcagacgagccgcccaaggcgga

SEQ ID NO: 1367 - RNA, 82 nt, Homo sapiens
aagaccgcgagcaaggagcgcggaacggggagcgccggagcagcggacccaggcagagcccggagagggaaagaagcagaag

SEQ ID NO: 1368 - RNA, 82 nt, Homo sapiens
ggggaaaaccggcaaccgcccaccgcacgaccagccagcaaccgcggaaggaccgagccgagagcagcagaggccgcgacaa

SEQ ID NO: 1369 - RNA, 55 nt, Homo sapiens
cacaccaggcggagaaagggcagaggcccccacggaaacagagcggaaacagaca

SEQ ID NO: 1370 - RNA, 72 nt, Homo sapiens
gcggacacagccccggagggccaggagagcgggacagggccacggggcaccaacaccggccggaacaaaccc

SEQ ID NO: 1371 - RNA, 71 nt, Homo sapiens
ccgagaagaggagacccgaaaacgacaaccccaggcagacaccaaaagcaccaggaaaaacagcccacggc

SEQ ID NO: 1372 - RNA, 79 nt, Homo sapiens
gaagaaaacacgagggaaaagagaagaacaagaggcaaaaacagccacgaacacagaaagagacaaccaaccgggcaag

SEQ ID NO: 1373 - RNA, 92 nt, Homo sapiens
ggcaacagacacaaagcgacaaagaccaagccaacgaggccccgcagcgacgacggacagcaaggaaccccggccggcgcggacggaagcac

SEQ ID NO: 1374 - RNA, 74 nt, Homo sapiens
ggcgcaggacacacagagagagaacaggaagcgggcaggaggccagaggcagaaccccaaaaccagcagaccac

SEQ ID NO: 1375 - RNA, 74 nt, Homo sapiens
ggggggggccagggagcccggaaggagaccgaggacaggccggacaccgcagcccaaaggagagagggcccgga

SEQ ID NO: 1376 - RNA, 70 nt, Homo sapiens
ggcaacccaaaaacaggacgccccagaaaggacaccggaaaaaaagggggaagggcaaaaagcaaggacc

SEQ ID NO: 1377 - RNA, 70 nt, Homo sapiens
gcaccggacacgaggagaaacagcagaaacgcaccaggccaaagaaagagaagggcaggaagaagcaaag

SEQ ID NO: 1378 - RNA, 72 nt, Homo sapiens
cgcagagccccccagcagacgagcccagaccgacagcagcgaaagaccaggaacgccagacccgggagggag

SEQ ID NO: 1379 - RNA, 66 nt, Homo sapiens
gagccaggggagaaggaggaaaggcccggcagcgcgacggcaaacagaagggcgcaggaaaaggcg

SEQ ID NO: 1380 - RNA, 74 nt, Homo sapiens
gggacacacgaacaaagacaggagggggacaaaaaagaccagaagaggagggcaaggaggaaggcccacaagcg

SEQ ID NO: 1381 - RNA, 87 nt, Homo sapiens
agggagagacggagaaggaccggaggaagcccacgagagaagagcaaaggagacgcaccaccggggcaaagagaaccaggagacccc

SEQ ID NO: 1382 - RNA, 69 nt, Homo sapiens
acagcagccggggcagcccagcggccgcgggcaaaagcggcccaccgcggggaacccgaggcccaggcc

SEQ ID NO: 1383 - RNA, 94 nt, Homo sapiens
cagaggccgccacaaccgccagacaaccggagccacgccccacgaccgccaggcagagggcaccacagacaagaaagcccccacggaaggccac

SEQ ID NO: 1384 - RNA, 66 nt, Homo sapiens
ggacgaagggaccaagaaaaggagcaaggcaggcgagaaaggccgggcaaaaagggaaagaaagga

SEQ ID NO: 1385 - RNA, 70 nt, Homo sapiens
ggcaggacagaagagggaacccaaacgcaaaaaggcacgccaggggcaaagaaaaaggagagaaaaagag

SEQ ID NO: 1386 - RNA, 60 nt, Homo sapiens
agaaaagcgagccgccggccaggggcggggcggaccagcccaggaccggcgcggccagag

SEQ ID NO: 1387 - RNA, 77 nt, Homo sapiens
gcccggggacggcgaggccccagaccacacgcggagcagaccaccgcccagcaaaaagcggcggaaagaaagacaaa

SEQ ID NO: 1388 - RNA, 74 nt, Homo sapiens
ggcaagggcagccgaccgacagcccccaggaaggaggcggcggccgcgagagcccagccgccgggcaggggacg

SEQ ID NO: 1389 - RNA, 78 nt, Homo sapiens
acagaaagccaaaaaggagaaagccaaagggagacacaggggaccacgagagagaaagaggaggaccacaggggagac

SEQ ID NO: 1390 - RNA, 63 nt, Homo sapiens
gagcagaaagaagacagaacaagggaggcaaaaaaaacgacccgaaggcgcaggaacaaagaa

SEQ ID NO: 1391 - RNA, 50 nt, Homo sapiens
cagaaccacaaaagaaagaagcccaacgaaaaaccgagggcaacccgccc

SEQ ID NO: 1392 - RNA, 76 nt, Homo sapiens
aaaccccaggcccaagccacggacaccaaggggccagcacgaaagcagccaggagaagagcacaagaaacaagagc

SEQ ID NO: 1393 - RNA, 77 nt, Homo sapiens
cccgccagaagccccccgcaggaaccacacggcggaggcaccgacaaaccagcgaaggagcacccacccaggaaccc

SEQ ID NO: 1394 - RNA, 75 nt, Homo sapiens
caaggagcccaagaaaacaagcaaagccaccaaaacgccaccaccaccacagacagagggaagagcggaacacca

SEQ ID NO: 1395 - RNA, 76 nt, Homo sapiens
cggaaccaaagaaaaacagaaagaggaaaaccagagaaacaagaggaggaggggagcaaaagaaaaggccaaaacg

SEQ ID NO: 1396 - RNA, 73 nt, Homo sapiens
cccgggccagccggggcggccggccaggaaccacccgaaggggggacacaggacaacgagagaagccgaagcg

SEQ ID NO: 1397 - RNA, 75 nt, Homo sapiens
agacaaaaaaaagaaggaagaagccgggaccgaaggcgaagccagaccgggaaaaggcaagggggacccgccccg

SEQ ID NO: 1398 - RNA, 77 nt, Homo sapiens
gaccggagagagccagcgcagaagggacggagcccagccgaggaccgcgaagaggaacaagacaaaacagaggagac

SEQ ID NO: 1399 - RNA, 79 nt, Homo sapiens
gaagcgggggaagagggacccacgacaagaacccgaggacagacagccgaaaagacgaggcgaggaggcgagacaccca

SEQ ID NO: 1400 - RNA, 76 nt, Homo sapiens
gggaaacaagcacgggcgagccaggacacgaccacaacacagcccacagggagaaggaaggccagaaaggagcaca

SEQ ID NO: 1401 - RNA, 72 nt, Homo sapiens
aaaaagaaagggaagcaccgccagaggaaacgaaagaccgaagggagaaaggagaagaagaaaggagaagaa

SEQ ID NO: 1402 - RNA, 75 nt, Homo sapiens
aagcggaggggcggaggggcaccggccgcaccgccaggaaaccccggaccaagaccgcaccacgacagcgaccac

SEQ ID NO: 1403 - RNA, 75 nt, Homo sapiens
agagagcgccacgcgagaacagagaagggagccaagcggagggagaacgcaaggcgaagagccaccagcggcgac

SEQ ID NO: 1404 - RNA, 62 nt, Homo sapiens
ggcgcccccccgaggcgcgccacccccggcaccaagacagggaaaaagagaacagcggaaca

SEQ ID NO: 1405 - RNA, 79 nt, Homo sapiens
cgggaggggaaaaaccagagacccccgaagacgagggccgaacccaccgagccccggggaggagagcgccggaacgccg

SEQ ID NO: 1406 - RNA, 74 nt, Homo sapiens
gcagggaggaagccgcccgcgcagcaggaaggcaacaaggcaccaggagacacccgaaacagggggcaagggac

SEQ ID NO: 1407 - RNA, 87 nt, Homo sapiens
cacaacaccaggaggaccagcggacgacccccgggacaggaacaacgaacagagacaagacaaccaacagaaacacagacagcggcc

SEQ ID NO: 1408 - RNA, 79 nt, Homo sapiens
cgcggagggcggcggagcaggggaccacgacggacagggcccagcaccaccaggaccgagcaccccagccgcggccgag

SEQ ID NO: 1409 - RNA, 75 nt, Homo sapiens
agagcgaacagaaggaacgacgcggaccagaagccagagcgagaaggacgccggcagagccgggaccgggaccag

SEQ ID NO: 1410 - RNA, 70 nt, Homo sapiens
acgacccagggcaggacgaaacggaaaccagaccacaaccacgcggccacacacccagaaaagaaagcca

SEQ ID NO: 1411 - RNA, 78 nt, Homo sapiens
aggagcaagcagggggcacccaagcaggaggaccccggaggaaaagcggaagcggcagcggcgaacgccggaacggac

SEQ ID NO: 1412 - RNA, 109 nt, Homo sapiens
gaagcacccagaccagcaaaagagacaagaagcaacagaacacccaaagaaagagagaggagcccaggggaagagaggggccgaggggggcacacgaggaaacgagcgg

SEQ ID NO: 1413 - RNA, 56 nt, Homo sapiens
aaaacgccaaggaacgaggaaccaggacagaaacccacagaaagagggggcccggg

SEQ ID NO: 1414 - RNA, 70 nt, Homo sapiens
aaggccccccgcgcaggcacacagcaaagggaccgacacagggaggaagcaagcacccagccaggaagga

SEQ ID NO: 1415 - RNA, 60 nt, Homo sapiens
gggcaggcggccggacgagcaggaaagacgaagcggcggagagggggggagggacaccag

SEQ ID NO: 1416 - RNA, 94 nt, Homo sapiens
ggcagacgcggccgcggcaccccgaacggggccccccgcgcgagacgagccaaaccaggcgaccgagcagccaagcaacgggccccgggccccg

SEQ ID NO: 1417 - RNA, 71 nt, Homo sapiens
gccccccccgccgcaccagcaggaggcaaagggaccccaagaaaccaaagggcaagagccgcagcccggca

SEQ ID NO: 1418 - RNA, 66 nt, Homo sapiens
aggaccaagaaccagaaaccggcccacaacacagccacggaccaggagcgaacgagaagaggccca

SEQ ID NO: 1419 - RNA, 77 nt, Homo sapiens
caaggccgcggagccagagggaggagccgcggcgggcgccgagcgcaccgcaggaggccgacacgcggcgcccacgc

SEQ ID NO: 1420 - RNA, 75 nt, Homo sapiens
gccgggggggaccgcgggccaggcccgggagcgcggaccgaggggccgagcgcccagagcacagagaccgaaaag

SEQ ID NO: 1421 - RNA, 76 nt, Homo sapiens
ccacacaacggcgggaccaacgcggccagacgcgacaaggccaaccagcgaccaaagccaaaaacacagaagcccg

SEQ ID NO: 1422 - RNA, 78 nt, Homo sapiens
acaaggcagccgccgggagccagaagcacaggcccgggcgaaggggccacgcgaacgcccccacaacaaagagaaaga

SEQ ID NO: 1423 - RNA, 63 nt, Homo sapiens
aagccccacagacaagaaagaagccaacagaggcacagaccagacggcagcagccgaaccagc

SEQ ID NO: 1424 - RNA, 71 nt, Homo sapiens
gacagcggagcggcaacgcccacaaagagggaccgcaggccgagacgcaccagagccggaccggggacgcg

SEQ ID NO: 1425 - RNA, 85 nt, Homo sapiens
cgcgacccagccagccagcaaccggaccgggcgccggccgagcccgggaaaacgacagcagcagcagggccggaagacgccaccg

SEQ ID NO: 1426 - RNA, 39 nt, Homo sapiens
aaaacaggcggaccagaacggaggacccacagcccagga

SEQ ID NO: 1427 - RNA, 82 nt, Homo sapiens
cagggggcggcacggggccggcggccacggccggaaggcagcaagccaggcccagaaggggaagacccccagcgaacagaga

SEQ ID NO: 1428 - RNA, 71 nt, Homo sapiens
cccaaccaaaggaaaaccccaaaaaaacagacgggggcgggcacgaagcaagcagaccggaaaaagacaac

SEQ ID NO: 1429 - RNA, 81 nt, Homo sapiens
gcggcgccgggggcaccgcgccgccgaggagcacagaccagcgcgcgaccggagccccacagcggcacaggccccagccaa

SEQ ID NO: 1430 - RNA, 72 nt, Homo sapiens
cgaaaaagaccaagcgagccccccccaaggaaaagcccggagaagaagcaacggaaaaccaaaaggggcagc

SEQ ID NO: 1431 - RNA, 57 nt, Homo sapiens
caacacggcccccgacccaacaggaggaaaagccaagaaagacccaaaagaccccag

SEQ ID NO: 1432 - RNA, 70 nt, Homo sapiens
ggagaacacaggagcggacagggggcgagcaccagcacaacaaggagaccaagaacccgggccagagggg

SEQ ID NO: 1433 - RNA, 85 nt, Homo sapiens
gacagcccgggggcggacacaaccgcgggcccgggacagacacagccaaacaaccggaaacagaaaaggccgccggcgcagaaag

SEQ ID NO: 1434 - RNA, 81 nt, Homo sapiens
gaagagacggaggaaaccacaggaaggaagcacaggggccaccggagcgcccgagaacaccgggaaccccaagaggaacag

SEQ ID NO: 1435 - RNA, 80 nt, Homo sapiens
aggacacaaaaagccaccgaaggccaccggaggacacaacagaaacccgagaagcaagggaaagcgggcgaaaaggaacg

SEQ ID NO: 1436 - RNA, 77 nt, Homo sapiens
ggcggagacgggcccagcacaccgaagagccacccgcgggcccagggaagacacaggaagcgccgaggaaggaaacc

SEQ ID NO: 1437 - RNA, 79 nt, Homo sapiens
ccgcacgacccggaacagacgggccccaagaggccagccccccgagggcaacgagaaagagacgagccggccgaccccc

SEQ ID NO: 1438 - RNA, 68 nt, Homo sapiens
ccaaccgccgcagggaagggcggaaagggcagaaacccaacggccaaacagcccgagggggggcggac

SEQ ID NO: 1439 - RNA, 38 nt, Homo sapiens
ccggcgggaggaacaaaaggacgcgggccagacacaaa

SEQ ID NO: 1440 - RNA, 79 nt, Homo sapiens
agcccgaaaggagagacacggaacacaaggaagcaaaagcccagaagagccaaaacacaccggaagaccccaccacccc

SEQ ID NO: 1441 - RNA, 78 nt, Homo sapiens
acggggcgagccggaggagcacccaaccccgcgggaccagaagcagcagccccagaagccccgaagccggggcacccc

SEQ ID NO: 1442 - RNA, 79 nt, Homo sapiens
cccgccggcccccccccgcgcccgcgaccgccgcggcgaagaggcagaaccagagaccacagaagaaggaagggccacc

SEQ ID NO: 1443 - RNA, 77 nt, Homo sapiens
agggggcacccagcacacccaagacgcggcaacaggccggaaggcaggcagcacgaagaggcaaagaggaacggacg

SEQ ID NO: 1444 - RNA, 81 nt, Homo sapiens
cccccaggccgcgccgagcccgccgcgcgggcccgcccgacgcggaaggggaaggcacaacccaggggcccacgccggaga

SEQ ID NO: 1445 - RNA, 50 nt, Homo sapiens
ggcagcaggaagcacggcgggcgaaacagagcaaccgaggaggacaacac

SEQ ID NO: 1446 - RNA, 75 nt, Homo sapiens
gaacccaccagcagcgagaaaacaccggcgagcacgcagacacggcagcgggccggccgaggccaccacaacaag

SEQ ID NO: 1447 - RNA, 53 nt, Homo sapiens
cgcccaccggcccgccaaggcccggccagaccggagggccgggaggaacaccc

SEQ ID NO: 1448 - RNA, 36 nt, Homo sapiens
aaaacagaggcaacaagggcggccgggggggcaaca

SEQ ID NO: 1449 - RNA, 65 nt, Homo sapiens
ggcgcgagggccgggagaaccgcgcggaggaaaggcgaacaacgggcggaccccggcaaaacgcc

SEQ ID NO: 1450 - RNA, 71 nt, Homo sapiens
gcccagcccccggagcgggaacagccgcagacaacacgcaacagagcccccgaaggcaccgaaagacccgc

SEQ ID NO: 1451 - RNA, 70 nt, Homo sapiens
gaggcgcacggggcaggccaagcccgggagacggaccaggaggcaagacaggcccagaacaggacagagc

SEQ ID NO: 1452 - RNA, 69 nt, Homo sapiens
acaccacgaaaagacaagccaaagcagaaaaaccaggaagaaagcacaacgcaggcaaagaggagcagg

SEQ ID NO: 1453 - RNA, 38 nt, Homo sapiens
agacagagggcgaggcaacaagagacggaagccagaaa

SEQ ID NO: 1454 - RNA, 83 nt, Homo sapiens
ggaggcacggggagccccggcagcaggagcgcgcagggcccggccaggccccaccgccacaagcaggggaacaccgccaaccc

SEQ ID NO: 1455 - RNA, 72 nt, Homo sapiens
cgggcgcaggagaagaggcggcccacaggcaaaaacgaaccaagggaaggcccgacgaaacacggagaaagg

SEQ ID NO: 1456 - RNA, 77 nt, Homo sapiens
cggaagccgacagacaaccaggacgagccgggaggggagacaccgaccccaagcgagagagcagaagacaaggagac

SEQ ID NO: 1457 - RNA, 78 nt, Homo sapiens
ccccggggccccggccggccaagcagacacccaagaacgaggccccgcagcaggcagaaagggagaagcccgcacaca

SEQ ID NO: 1458 - RNA, 73 nt, Homo sapiens
acgccaccgaggcaacacagccagagcaacgcacacggcgccacacgaggccacgaggcggcgcggggggaga

SEQ ID NO: 1459 - RNA, 79 nt, Homo sapiens
ggaccacggcaccgaggacccggccagcgcagccagcccagcaccaggaagggaccacagaccagcacgccggcgccac

SEQ ID NO: 1460 - RNA, 87 nt, Homo sapiens
ggagacgccgggcagccgaacggagggcgacggagggagccccgcagcgccccaccccagagacccggaccaagcacacaggacaac

SEQ ID NO: 1461 - RNA, 49 nt, Homo sapiens
gggcaaagaaagacccgccacaagaccccggagagggggaaacagaaag

SEQ ID NO: 1462 - RNA, 58 nt, Homo sapiens
cagcacaaggggcagagacgcaccgaggaccaccagcaggaagaccagaggacgcacc

SEQ ID NO: 1463 - RNA, 71 nt, Homo sapiens
ggagcggggccccacacccccccgggggggggagggggagcacccgaagaagacaagacaggggaaagaca

SEQ ID NO: 1464 - RNA, 80 nt, Homo sapiens
cgggggcggcggccgggggcccagcccgggcggcgcggccagagagaagacaggaggagggaagaaggccaccaaaaaca

SEQ ID NO: 1465 - RNA, 81 nt, Homo sapiens
acaaccacgccgggcccgggcagagccgcccagaacccacgcccaggggacaccagccaggagagaaccagaccgggcgga

SEQ ID NO: 1466 - RNA, 75 nt, Homo sapiens
ggccagaaggaccggcggacacgaggcaccaaagcccgggaggcgacgaaaaaccgagggaaaaaagcacgcgcc

SEQ ID NO: 1467 - RNA, 76 nt, Homo sapiens
agcgccaaggggagagagggaacagaaaggagaacaccacaggggaagcgacgaggaagccaagcaggccggaagg

SEQ ID NO: 1468 - RNA, 85 nt, Homo sapiens
cgcgcgaagcggccaaagccgcccagacggccaccggcgggaggaacaaaaggaagcccggggcggcgacggagcacgacccaag

SEQ ID NO: 1469 - RNA, 86 nt, Homo sapiens
aaaaccgagcagcccccaggaacagggcaaaggagagcacaaccacgcagggaagcccaggggcagaggaggggacacaaaggaag

SEQ ID NO: 1470 - RNA, 54 nt, Homo sapiens
aacgaaaccggcacggccgcccgaaagacagaacgcgggagagaacacaaccgg

SEQ ID NO: 1471 - RNA, 54 nt, Homo sapiens
cgagcccccgcggacccacccccgaacccccaagccggccacacacggcacaag

SEQ ID NO: 1472 - RNA, 70 nt, Homo sapiens
cacgcgcccgcgcccgacggccgcaggcggggggcggcggggcgcggaggggacccccgggagccccagg

SEQ ID NO: 1473 - RNA, 80 nt, Homo sapiens
caaaccggagaaggagccaagaaagagaagacacagcgagaagaggccaccagaaaacggccacgacacgagaaacggaa

SEQ ID NO: 1474 - RNA, 91 nt, Homo sapiens
cgccgggcgcccgcgaagagcagccaagccgaggagacaaccccgagcgggacagcaggccgcggcgggccgcccggcccggcaccaggag

SEQ ID NO: 1475 - RNA, 72 nt, Homo sapiens
cgagcggggccggccacagagaccccaacaggcccgaccaacaaagaaacccaacagacggaaaccaccaac

SEQ ID NO: 1476 - RNA, 65 nt, Homo sapiens
ccgacgccaggcagcgcccccaaacggggaggagaagaggggaggaaccaaggaaggccaacaga

SEQ ID NO: 1477 - RNA, 88 nt, Homo sapiens
ccacccagcaacagcccgcagcagaccgaggccccggggaagccaccccaccccccagcaggaggcaaagggaccccaagaaaccaaa

SEQ ID NO: 1478 - RNA, 82 nt, Homo sapiens
gaggagcgggagccggcgggcgaagagccgccgcccggcccgcgagcaccagcagcgggggccaagagccgagagcgccgga

SEQ ID NO: 1479 - RNA, 85 nt, Homo sapiens
cggcccaggccagcacccgcagagcagagcccaggcagccaggcccacggccacgagccggaggcaccgaggcggaggagaccgg

SEQ ID NO: 1480 - RNA, 67 nt, Homo sapiens
cggccgaaacagaaaacaagagaccacagaaggagcagcgacccgccgggcccagggccccagggac

SEQ ID NO: 1481 - RNA, 65 nt, Homo sapiens
gcccgccaacgaaccacaggcgagaccgagacaaggccaagaaaaccagaggacaccaccgggca

SEQ ID NO: 1482 - RNA, 61 nt, Homo sapiens
cgcgcgagcggaccaggagggcacccccgggacggcagacacgagagcacaacacagcgac

SEQ ID NO: 1483 - RNA, 76 nt, Homo sapiens
gccagagcacacacggccaagagcgggcaccaggaagcgaaggcggggaagggggccagacaaccagggaagcaca

SEQ ID NO: 1484 - RNA, 90 nt, Homo sapiens
cagcgcgggccagagcgcagcgccgagcgcggcccgggcgccacgagccggcggcggacggcagggcccggggacacgagcggccccagc

SEQ ID NO: 1485 - RNA, 66 nt, Homo sapiens
gccgcggaacagaccaacgccggaaagaacccaggacgagaaaaaacagagcggaacaagcggccc

SEQ ID NO: 1486 - RNA, 51 nt, Homo sapiens
gcaccgaggggaagcgaaccaaacgaaaacaaacggaagagagggcagcaa

SEQ ID NO: 1487 - RNA, 77 nt, Homo sapiens
cacacacgaagagagggcacagaccaggaggcaacaccaccgagaacggggaaaaagacggccgacacaagccgggg

SEQ ID NO: 1488 - RNA, 37 nt, Homo sapiens
ccggacagaaaaaaacgggccaagagcaaaaaaaaga

SEQ ID NO: 1489 - RNA, 73 nt, Homo sapiens
ccaacggcacaaaaggggcaaagaccgcggagaaccgaaccaacagccagccaaagccaggcagcacagcaca

SEQ ID NO: 1490 - RNA, 41 nt, Homo sapiens
aaccacaggaggagacacgaggcggaggcaggagaaaccgg

SEQ ID NO: 1491 - RNA, 78 nt, Homo sapiens
aagggaggcgggacgcgcgccaggacgaagagcagcaaaaaccacaaagcaacgcaaacacaagacccacagggacga

SEQ ID NO: 1492 - RNA, 65 nt, Homo sapiens
cgagaaaggaaggaaaaccgacgagacacagccgagaaagacaaaagaccccacaagacagacaa

SEQ ID NO: 1493 - RNA, 81 nt, Homo sapiens
cccaccagaccccggccgccgaccgcggccccgccggccgccggccgcgcgggggcagaaaggacccaggagcgaaacaga

SEQ ID NO: 1494 - RNA, 77 nt, Homo sapiens
agagcagcccaaagagaacagggcagaggaaaagcaagaagacgaggagcaggcgcaaaaaaaaggaagaaaccaaa

SEQ ID NO: 1495 - RNA, 79 nt, Homo sapiens
cacagacagcaggagcgaggccgggaccggagcaccggcagacccggggaccgggaagccagcgcccagacacacggga

SEQ ID NO: 1496 - RNA, 83 nt, Homo sapiens
gggaaggaggagccggaaaaggccacgcaagcccccccgggagagcaggaagacagcagggacccagggagccaggagacagg

SEQ ID NO: 1497 - RNA, 87 nt, Homo sapiens
ggcgacggggcggcccggagccggcgcgaaccggcccccgcagcgggacccggacaacaggcacaaagagagaaggaacacccacag

SEQ ID NO: 1498 - RNA, 70 nt, Homo sapiens
gaagagagagacacggacaagggaaacccagacgacaaggaaggccaagggacccacgaccaaccaagaa

SEQ ID NO: 1499 - RNA, 74 nt, Homo sapiens
gcgcacaggaaacgagagcgcagaacccgagcaagagaaaggagagagaacgccaggagccagaaccccgagga

SEQ ID NO: 1500 - RNA, 79 nt, Homo sapiens
agcgaaacaagggacccaggggagccggagcccacggagaggcccggagagaaggaaaacagagaaccaagcagagaga

SEQ ID NO: 1501 - RNA, 69 nt, Homo sapiens
aggacacagccagaagcggagggaccccagagcaggccccgagagagaggagaaaagagaaccggacga

SEQ ID NO: 1502 - RNA, 129 nt, Homo sapiens
ggagaagaccagccgacaaggagggaagcggccccagcaccccagcgcgcagggccgccaggggcgccgaaacggcgaggaaagagaggagccccggaaagaaaaggacagacccggccagaaaggaag

SEQ ID NO: 1503 - RNA, 62 nt, Homo sapiens
agacgcaaggagccaccagcacggaccaggaggcgagcaacagggaacaaggccagagagca

SEQ ID NO: 1504 - RNA, 100 nt, Homo sapiens
gccaagagaagccgagagaggagacgaaggagaaacaccaccgacgagaggcggggaaaaaaaggggaccaccggcagagacaaccaaaaaggcagcgcc

SEQ ID NO: 1505 - RNA, 74 nt, Homo sapiens
aagccgggaaagggacaagaagggcaaagccgaagaagcaagccggagcagggggcacaaggaccacgcagcag

SEQ ID NO: 1506 - RNA, 62 nt, Homo sapiens
cacgcgggaaaacagccacggggcggcaaccggaaacaagaccgcgcacgggagcgcaagga

SEQ ID NO: 1507 - RNA, 68 nt, Homo sapiens
gaggggaacaagcaacgagggagaagaacccaacagaaaaaaaaaagcacaagaccagagaagcccgg

SEQ ID NO: 1508 - RNA, 73 nt, Homo sapiens
cccggcgccgcgccccccgcacggaccaaggagcggcgcggggaccaaacccggagccagccaccccgaccca

SEQ ID NO: 1509 - RNA, 77 nt, Homo sapiens
ccaggggaaaacacacgaaaaggaggccccaaggggagcgaagaacaagcaacccccagccacaacgcgaaccgggc

SEQ ID NO: 1510 - RNA, 64 nt, Homo sapiens
gccggcccgcccaccagcaagcgcacccagcaggaacggcgaaagcacggaaagccaaagcaag

SEQ ID NO: 1511 - RNA, 56 nt, Homo sapiens
gagaaggggaaaaaacacaggacacgcggcagagagaggaccgggcaagcaacaaa

SEQ ID NO: 1512 - RNA, 77 nt, Homo sapiens
cacagcgccacaaagcccagcggccaaacaaccacaagcggagaacaggcaagggccaagacaagcccagagggccg

SEQ ID NO: 1513 - RNA, 65 nt, Homo sapiens
agagaaagaacaacaaacacaaggaccagcccaacagggaaacacgccggcagcgagaccggcgc

SEQ ID NO: 1514 - RNA, 69 nt, Homo sapiens
aggaggcaacgaaggcaaaagcggagagccggcaccaacgagggggccaggaccagccgcgcccaagca

SEQ ID NO: 1515 - RNA, 52 nt, Homo sapiens
acccaacaaaggccacgcgagaacaaaaaggcaagaacggaagcacgggcgg

SEQ ID NO: 1516 - RNA, 79 nt, Homo sapiens
gagaggcggaggcccgccgggcccccgagaaggcgaggaggcggcccgaaaaccccccaggcagggggaaggagccacc

SEQ ID NO: 1517 - RNA, 77 nt, Homo sapiens
caggagcgcacccacggaaagacgaccacgcaaaggagcaggagagacaaagggaaagaccgggacggccggagaag

SEQ ID NO: 1518 - RNA, 84 nt, Homo sapiens
ggaggagaagaacaagaacgcagcggggaagccaagaaagggggcacacaaagcagaagacaacagaacaagagaacaaaagca

SEQ ID NO: 1519 - RNA, 82 nt, Homo sapiens
cgcaaccagacgccagcgggacgaggaccgagaccgcggccgggaccgagggaaaacaaagagggaaaacggagaaaagccc

SEQ ID NO: 1520 - RNA, 69 nt, Homo sapiens
cagacccgaggagcccgcaggcgcaaaaaccagacaccccacaccaccacccagacgaccaaaagggca

SEQ ID NO: 1521 - RNA, 37 nt, Homo sapiens
ccccgagcaaaccagggacgaggaagacaaggccagc

SEQ ID NO: 1522 - RNA, 76 nt, Homo sapiens
cccggccaggggaaccaccaaaagcagaaggaacaagcagggggagacaagagccaacagacaaacggcaacaaaa

SEQ ID NO: 1523 - RNA, 66 nt, Homo sapiens
aaccgcgcgccacccacaaccagacccacaggaccgcgaacaaggaggccacaaaacacccggacc

SEQ ID NO: 1524 - RNA, 77 nt, Homo sapiens
ccccgacacggccaagacagcccaccgaggaagaccaaaggaccaaccaacaagaagcacaggccgagccagacaca

SEQ ID NO: 1525 - RNA, 69 nt, Homo sapiens
ggcgaagccgggccaaaggacgaagaacccacagagacagccacgcgggccacaccgagccaacccgag

SEQ ID NO: 1526 - RNA, 73 nt, Homo sapiens
cggcggaccgcccgcgacagcccgggaccaaggcagcaagggacggggggcaccccgcccgccgaagcaagaa

SEQ ID NO: 1527 - RNA, 75 nt, Homo sapiens
gcccgcggcggggaccacaagcagacgagccaagggaaccaggagccgacaacaacccgacgcaaggcagccaca

SEQ ID NO: 1528 - RNA, 69 nt, Homo sapiens
aacagacaccgggaagaaaacgaggcgagagaggcccacacagcaaaacgggcaccggaaacaccgaga

SEQ ID NO: 1529 - RNA, 83 nt, Homo sapiens
gcgaggaaaaggcggcgggagagccagccccaggccgcgagccggacaacacaccacaagaaccgcagcacagacacagcacg

SEQ ID NO: 1530 - RNA, 71 nt, Homo sapiens
cacacccagccagaaccccggaacaagaaccacgcccgcaccagccacggccggcccagggagaacgcaaa

SEQ ID NO: 1531 - RNA, 69 nt, Homo sapiens
caggccaaggcaggggccagaagacaaagcaaccaggaaggccagcccccacggaagccaaccgacaag

SEQ ID NO: 1532 - RNA, 69 nt, Homo sapiens
ggacgaaccaacaagcggcaacgcagaagacaagggcaaacgaggaccaagagccaggacaagccacaa

SEQ ID NO: 1533 - RNA, 80 nt, Homo sapiens
agacaaaacagaggcaccaagaaagaccgggagggaagagagaccaaacaccaagcgcccaggggcggggcacaagccac

SEQ ID NO: 1534 - RNA, 51 nt, Homo sapiens
cggccgagaaggcagaggcgaccgagccagaggacggagagagggagccag

SEQ ID NO: 1535 - RNA, 72 nt, Homo sapiens
gggaagaaggaggacaacaggagcacgaccagcgcgaaaaccaaggagcaggaagcccaccagggcagccag

SEQ ID NO: 1536 - RNA, 47 nt, Homo sapiens
ccccgacaggcaagaagcagagcgcagagggaaacccagcaccaaac

SEQ ID NO: 1537 - RNA, 99 nt, Homo sapiens
ggcgcacgcgggcgcacccgccccggcgccgccggcccgcgggaccgacagccgggcagagcacgagccagggagccgccgggaccggcccgggagacg

SEQ ID NO: 1538 - RNA, 76 nt, Homo sapiens
caagcgcgcggacagcggggcccggagacggcggccagggcccaccccgccccacaggcccgccggagagggaaca

SEQ ID NO: 1539 - RNA, 80 nt, Homo sapiens
ccgaccccacccagcaccaagacggaggaccaacaaccgcacagaagagcaagacagggaggccgcacagaggaggagca

SEQ ID NO: 1540 - RNA, 53 nt, Homo sapiens
cggaaggccagaagcagggccgagcaacacaggggcggagcccgcgcgcccag

SEQ ID NO: 1541 - RNA, 77 nt, Homo sapiens
cgggggcgggaccccgccgcggcgggaggacaagcagaccggaagaccgacggaagaccacaccccgagggagccca

SEQ ID NO: 1542 - RNA, 61 nt, Homo sapiens
gcaacccaagaacaggccacacgggggagcagaaccaaggaaaaacgaggggagaggaggg

SEQ ID NO: 1543 - RNA, 71 nt, Homo sapiens
ggcgacggcggagggcccgagggaaaacgggaacacaagccaggacagcccagcaagcggagggcagccaa

SEQ ID NO: 1544 - RNA, 50 nt, Homo sapiens
cgccagcaccaagccgacccgaagacaaaaccacccacgaaagcgaaaag

SEQ ID NO: 1545 - RNA, 80 nt, Homo sapiens
agacgacaagcacacacaggcgcgaaacggaaaaagaggaaaacgcgagagagacgcaaccagcacaaagaaaaaagaaa

SEQ ID NO: 1546 - RNA, 75 nt, Homo sapiens
ggaggcaggaccgcacgaggcgggcgaaccaagcggccacacaacggacagcacaaagcgccaagggcggccgac

SEQ ID NO: 1547 - RNA, 56 nt, Homo sapiens
gggaccacaagacaacgcggagcggcgaagagcaaccagaaggacgagaagggcgg

SEQ ID NO: 1548 - RNA, 60 nt, Homo sapiens
caggaagaagaacaggaagagccagaaggcacgcggccaaagggacgcaagaggcgaaga

SEQ ID NO: 1549 - RNA, 75 nt, Homo sapiens
gcaagacccaaggcgacgaccgacaggggggaaaggaagaccgggagcacagaagaaaagaacaaggccagaaaa

SEQ ID NO: 1550 - RNA, 37 nt, Homo sapiens
cacagggaaggcacacagcaggaggagccaggaggag

SEQ ID NO: 1551 - RNA, 58 nt, Homo sapiens
aaggccaaggacccccgccaccgcccaagagcaaaggcgaaggcaacaccaggagaag

SEQ ID NO: 1552 - RNA, 77 nt, Homo sapiens
gcaggagacgagaggacgggaccaggcgaagcggccgagcaggcgagcgaacgacgggcaaaccgacacaaagcgag

SEQ ID NO: 1553 - RNA, 73 nt, Homo sapiens
ccgccaaggaccgaccccaaacgcgacagggacaagcgcacagcggagaaagcagcgcggccaggaggcggga

SEQ ID NO: 1554 - RNA, 77 nt, Homo sapiens
gcccagaaagccaaccccaccgaagcaacaggacgaggagccagagaccaggagccccagagagcagagccccccac

SEQ ID NO: 1555 - RNA, 86 nt, Homo sapiens
ggcacccaggaccccaccacggaccccagccaacgggacagcaaggaggaggagaccccaacacagaaggggagaacccgggagag

SEQ ID NO: 1556 - RNA, 73 nt, Homo sapiens
agccgccacccagagcgcacggcgacgccccaggggaaaacccccgggaccagaggagcaagaggggggggcc

SEQ ID NO: 1557 - RNA, 78 nt, Homo sapiens
gggcagcagacacaccagggagagacggacgagagggagcaccacagaggaaggaagcccaggaggcaagagcgagaa

SEQ ID NO: 1558 - RNA, 83 nt, Homo sapiens
gcggcagcgacaagcaggcagcgggcgccagcaaaaccgaaacaggaagcgccgcaagagaggagggccaagcaaacgaagaa

SEQ ID NO: 1559 - RNA, 77 nt, Homo sapiens
cccggggcgaggacccccgagccaggccggcgccgaccagcaggcaccgaagaggaaaggaagcagggggaagccgg

SEQ ID NO: 1560 - RNA, 77 nt, Homo sapiens
aacggaaagaaaggaaggaacaagaggccggaagccggagaagccggagagcaccagagagacggggcaccacgggc

SEQ ID NO: 1561 - RNA, 77 nt, Homo sapiens
caagcaggcagaggagccaccaagaagcaacgagggggaaccaagggcggacagcccaacgacaacaaagaagccaa

SEQ ID NO: 1562 - RNA, 66 nt, Homo sapiens
cgccaacccgccgcgcaccgacccgacgcgccggcccacgcgcggccaagagccaggaggcccagg

SEQ ID NO: 1563 - RNA, 75 nt, Homo sapiens
cgaccagcacggcgaccgaggcagccccccaaagcccggccccacaggccacagagaggagcgcccaaagcgaac

SEQ ID NO: 1564 - RNA, 77 nt, Homo sapiens
ggagccacagaaaaggcaagggcagaggcaacagaacaacaggaacagacggaaggcacccacaaagggcagagcca

SEQ ID NO: 1565 - RNA, 61 nt, Homo sapiens
cagacagacccaccaagagggcgggagaaccacgaggagaggggggaagcacaagagggaa

SEQ ID NO: 1566 - RNA, 80 nt, Homo sapiens
agagacaggaaaagggagagcccagaccgaggccaaaagaaaggaagaaaacccccaaaaagccaaaaggccaagacaag

SEQ ID NO: 1567 - RNA, 83 nt, Homo sapiens
accagagaaagggaacagaagacaaaccaacaagggggcccccggcagagggcagagagaggccggcccaaggcccggggcgc

SEQ ID NO: 1568 - RNA, 69 nt, Homo sapiens
caaccggggaggaaaaccgacgaagacggaccagaaagccggagggggcaaagagaaacagcagcacgg

SEQ ID NO: 1569 - RNA, 69 nt, Homo sapiens
gcgccaggccgacgccgagaaaagaagagaaagggcagacagaaaacagaaggccccagaaacaacagc

SEQ ID NO: 1570 - RNA, 34 nt, Homo sapiens
gacaggaccacgcaagaccgaaaagacgcggccc

SEQ ID NO: 1571 - RNA, 79 nt, Homo sapiens
agcccagcaacccccggacacccagcccaggagaaagcagacgccccagcgggggacagggaaagaacaggagagcgca

SEQ ID NO: 1572 - RNA, 80 nt, Homo sapiens
gccgccgccgccaccaccaccgccgcgccccggcgcccccccgagggccaaaaaggaaacgcgaaaaaagaccccccggg

SEQ ID NO: 1573 - RNA, 74 nt, Homo sapiens
cccaaagaagacaaggcacaacgaacaggcgcgacgacggcgcacccgaggcgggaagagcagaccaaagcccc

SEQ ID NO: 1574 - RNA, 79 nt, Homo sapiens
ggcgcgaggaggaaaggaggacgagaacaaacaccgcgcagaacagaaccagagacaaaaaagaagaccggaagaaaag

SEQ ID NO: 1575 - RNA, 56 nt, Homo sapiens
gccacaggagcaaaagaggccgaagcaggacacaaagaaaagacgaaggaagcaac

SEQ ID NO: 1576 - RNA, 48 nt, Homo sapiens
gggagaacaccccacagggaagagggcaccgcaagcggacccaggagg

SEQ ID NO: 1577 - RNA, 90 nt, Homo sapiens
ggccgggaggcgggccgcagcgggaccccagccccgccaagcgcggccgccgcccccgcccagacaaagaaccggcgcgcaaacgcgccc

SEQ ID NO: 1578 - RNA, 76 nt, Homo sapiens
cgccgggaagcagccgccaaaaaccggacagccaagcaacagcccagcaaggaccggaggagcggcgcggaacggc

SEQ ID NO: 1579 - RNA, 74 nt, Homo sapiens
aggggggcgcgacaggagacagggaaacgaaaaccaccgggcaccacgagcccacgagagaggacagccccagg

SEQ ID NO: 1580 - RNA, 57 nt, Homo sapiens
ggaaaggagagacagcacaagaaaagaccaggcccgaacggagagaaaaagaaggag

SEQ ID NO: 1581 - RNA, 75 nt, Homo sapiens
acagacaccaccgaaacgcgccaagcagacagggagagacaaaccagccgccacacaacacaggaccggacaagg

SEQ ID NO: 1582 - RNA, 76 nt, Homo sapiens
gaccagggcaacccagacggcaacccgcccagaagaggcaccaggcccaccaaagaggggaagggaggcgaaggac

SEQ ID NO: 1583 - RNA, 68 nt, Homo sapiens
gaacaacaggggaaggagacagaggaaggaagagcagagaagggccccgcccagagcaccacccgaga

SEQ ID NO: 1584 - RNA, 55 nt, Homo sapiens
agagagcggaacgggagaaagcacgggaggagaggcagaagagacaacacagaaa

SEQ ID NO: 1585 - RNA, 79 nt, Homo sapiens
cgcggaccgcggacagcgaacccggagagcagcgcgaccggccccccgcggaaccgagagggcagcagcggacccggcc

SEQ ID NO: 1586 - RNA, 88 nt, Homo sapiens
acccaagggcagggggaagaggaggagagagaagcagagacccacagacgccaccggcgaccaaccaggagcgacagggacccgaagc

SEQ ID NO: 1587 - RNA, 71 nt, Homo sapiens
cagcggagagccagaaaccaggaaaaggcaccgggagagggaaacaaggcagcggggaaaccacacacaga

SEQ ID NO: 1588 - RNA, 55 nt, Homo sapiens
agaggagggagaacacagaaaccggccccagggccaggagagcgggacagggcca

SEQ ID NO: 1589 - RNA, 77 nt, Homo sapiens
aggcccggggagaggggagccgcacgccacagcgaaggcgcgagggacaagagcagagaaacaccccccagaggagc

SEQ ID NO: 1590 - RNA, 50 nt, Homo sapiens
ccccacagacaagaaagaagccaacagacaccacaaaaccgaaaacagga

SEQ ID NO: 1591 - RNA, 82 nt, Homo sapiens
ccacccgacggggccggcccgccgcccagcaagaggaggaacgacgagaagagaggaagagagagacgcaacggagaggaag

SEQ ID NO: 1592 - RNA, 85 nt, Homo sapiens
ccacccacacccaccaacaacaccacaaaaccacagccaaggccaacacacagacccccagagcaaacgcggcagcaccagaaga

SEQ ID NO: 1593 - RNA, 102 nt, Homo sapiens
aaaaggcggacgggaaggcgggagacgagaagccgaaaagcgcagcgagcggagccgccggagaggaacggccacaaacgcccaccaaacccaaaagaaaag

SEQ ID NO: 1594 - RNA, 79 nt, Homo sapiens
ccagggcaagccccgcccggccaacaagaaacccgaccgccccaggggcacagcaggaccagcagggccccacacagca

SEQ ID NO: 1595 - RNA, 73 nt, Homo sapiens
cgggggcgcccggaggagcccgaagacagccccgacgggagggcagggagaggaagggagacggcaacggaag

SEQ ID NO: 1596 - RNA, 69 nt, Homo sapiens
cagcgaagcagcacagaaagaaaaaagcgcgccaagaagcgagaaagggaccggcaagagagggcaaaa

SEQ ID NO: 1597 - RNA, 58 nt, Homo sapiens
acagagaaagagaagagaagagaaaggcccggagacaacccagcagaaacccagagaa

SEQ ID NO: 1598 - RNA, 59 nt, Homo sapiens
aagcagaagcaagggacaagggccacacccccaggaaccccaaagaggcccggaggaaa

SEQ ID NO: 1599 - RNA, 72 nt, Homo sapiens
cgaaagaaaccaagcagaggaggaggagagaaagaacccacgcaggacgacagaagaggccggacaagagaa

SEQ ID NO: 1600 - RNA, 71 nt, Homo sapiens
aggcgaggcagggagcaacgaacaagaacaccgccgggcaaagaaagcgcaggcaggagaaggacagcaga

SEQ ID NO: 1601 - RNA, 72 nt, Homo sapiens
cgaccaggggcgagagcgggcaccccccaaacgacgcagccacggagaggggcaaaggaaaggggcaggcac

SEQ ID NO: 1602 - RNA, 62 nt, Homo sapiens
cgagcgcgaggggaggccgggagccgaggcgccagcacggacgacagggcggccggaaggac

SEQ ID NO: 1603 - RNA, 64 nt, Homo sapiens
gacagccggcgcgggcagagccgcggacaagggcgcagcagagggagcaaaagcaagcgccaca

SEQ ID NO: 1604 - RNA, 66 nt, Homo sapiens
accaaagaaagcaggagccgcgaaccaaaaacaaaccggcgaggagaagaaaggaagcccccagcg

SEQ ID NO: 1605 - RNA, 70 nt, Homo sapiens
aaacaggggggaaaagcagagggaggggggaccacgaagaaggcggcagaaagggaagagccaaaacgcc

SEQ ID NO: 1606 - RNA, 76 nt, Homo sapiens
ggacagggcaaagaccaccaaaacccacgggcacaacggcgcggaaaaggaacagaagaggaaccgaaacccaaga

SEQ ID NO: 1607 - RNA, 81 nt, Homo sapiens
gagcgaggcgcgagggccagaacgcggagggaggggcacgggcacccggaccacgcagcagagcgacgggagaaggccacc

SEQ ID NO: 1608 - RNA, 75 nt, Homo sapiens
ccgaaccagcacccacccaagagaaacgccccaacgcaacacgcgaacaaagaagacaccgcgaagacgaaggaa

SEQ ID NO: 1609 - RNA, 81 nt, Homo sapiens
gccgccaccaagagagcagggcccgcggagccgcgccgaggggaaggcgaaggggagcaagggagaaaagcaaagggaagg

SEQ ID NO: 1610 - RNA, 71 nt, Homo sapiens
cgaagacgagacacaccaacccgaggccacgaggaccgcccaggcaacacgacaggcacggaccccaaaac

SEQ ID NO: 1611 - RNA, 96 nt, Homo sapiens
agcgacgacggcaggaagaaaacgagccaggaacaaagagcaagaaaccaacacacaggaaaagcacagcagccacccggaagccggcaaagggaa

SEQ ID NO: 1612 - RNA, 89 nt, Homo sapiens
ccgcagacaaggaaaaacccaaaaagaggggggacagcagcagcagacggaaggggaggagcacagaacgccaggaccaaaacagggag

SEQ ID NO: 1613 - RNA, 61 nt, Homo sapiens
aagccaaccaccagaagcgaagggggaaggggcgccggccgaaaggacccggagcagggca

SEQ ID NO: 1614 - RNA, 64 nt, Homo sapiens
gaacgccaggcacgcccagaacgccgccgcgacggccgccggaaacggcccgagggcaggacag

SEQ ID NO: 1615 - RNA, 77 nt, Homo sapiens
gccgggcgcccaggccaggccagcgggcaagaaaacagacgaaccgaccagagggggcggaccccccggcccacaaa

SEQ ID NO: 1616 - RNA, 84 nt, Homo sapiens
acagcccaaacaggagcggagcagccaaagagccaaaagcaaacgaccaaagacaggaagaaaccaaaagacggacccgaacca

SEQ ID NO: 1617 - RNA, 64 nt, Homo sapiens
cggaagggaggaacaggccaggaaccggaacccaggacgagaaaaaacagagcggaacaagcgg

SEQ ID NO: 1618 - RNA, 66 nt, Homo sapiens
gcgggcggccagcccgccagcaagacaggaggagggcagagccaagacgccagggaagaagggaca

SEQ ID NO: 1619 - RNA, 83 nt, Homo sapiens
cgggcacagcaggacacagccaggagagcaccgaaaagagcaagaaaacgcccagccaccaagaccagacaagagaaagcgac

SEQ ID NO: 1620 - RNA, 74 nt, Homo sapiens
cgggaccgacgccagacaagacggacacacaacaaaccagagcagcgcaggacaccgggaacgacgaggggaga

SEQ ID NO: 1621 - RNA, 67 nt, Homo sapiens
ccgaacacgacagaaagaaaggccaaagcagcagggaacgaccacgggcggaagaaagggcccaaaa

SEQ ID NO: 1622 - RNA, 54 nt, Homo sapiens
cgcacacagcaagcacgagaccgcaacagagaccaaggaaggggaagccaagga

SEQ ID NO: 1623 - RNA, 57 nt, Homo sapiens
cgccgacgagcccccggaaccacacccaggggcccagcagcgcggccaccaccacag

SEQ ID NO: 1624 - RNA, 78 nt, Homo sapiens
gggacaagacccacagcaaagccagcgacagaagccaggcagagacggaggggaaagccagccagagaccacggcgaa

SEQ ID NO: 1625 - RNA, 79 nt, Homo sapiens
ccaaacacagaggacgacagagcacggaggaggacagcagccaaggagagcgacgggccccgcccccaggggaaggacc

SEQ ID NO: 1626 - RNA, 65 nt, Homo sapiens
gcccccagccacgggaacgccggaaaagaggcaaaaccggagaacccaagaccccggccggcggc

SEQ ID NO: 1627 - RNA, 86 nt, Homo sapiens
aaagaggagccagaccagaccaccagcaaaccagccagcacgggggcccagccagccagcagcgaggggggacggaggcggcacgg

SEQ ID NO: 1628 - RNA, 64 nt, Homo sapiens
cgccaagacgaagcaagagcgaccagcagaacaccgaccgaggacaacaggagagaagcaaacc

SEQ ID NO: 1629 - RNA, 76 nt, Homo sapiens
ggcaccgcagcgccggaagaggcgcaccagccgaaccacagccgccagagccagagcaggggaaagaaggcggccg

SEQ ID NO: 1630 - RNA, 76 nt, Homo sapiens
ggaggcagcggaaccacccaacacccgccaagcgagaggcacggggaggaaggggaggggacgagggcagagccgc

SEQ ID NO: 1631 - RNA, 73 nt, Homo sapiens
gaacaggaacagaagaaacggaaaggcaggaaaggccaaggcagagaagccccagcccgacggacgccccacc

SEQ ID NO: 1632 - RNA, 75 nt, Homo sapiens
gggaccgcggaaaggagggcggcccggaccgggagacacggccagacgcccccagccagcgcagaagacgagaag

SEQ ID NO: 1633 - RNA, 79 nt, Homo sapiens
gggggagcccaggcaacgcacagacgcagcggcggaggcccccggaccaagacaaaacacgaagcgaccagaagcggga

SEQ ID NO: 1634 - RNA, 73 nt, Homo sapiens
caggcggcggggacacccggacacggcaaggcacaaggcgagaagggaaggcaagagaccaccaggagcgaaa

SEQ ID NO: 1635 - RNA, 70 nt, Homo sapiens
gccgaccccccggcgccgcgccggcggcggacccccgcgcggggaaccgggcgccaaagagcgcagccac

SEQ ID NO: 1636 - RNA, 77 nt, Homo sapiens
cccaaacaccagcacggaaccgccaccagggcagcgagcgcaaacccaggccgagggagagaggaaaggcaggacag

SEQ ID NO: 1637 - RNA, 50 nt, Homo sapiens
aagcacccgaaaaaccaagaacgccagaaggccggcccacagcccaaaaa

SEQ ID NO: 1638 - RNA, 55 nt, Homo sapiens
aaagacgcccgagcaccccagaaagcgcagcccgaagcaaaacaagcacgacagg

SEQ ID NO: 1639 - RNA, 73 nt, Homo sapiens
cgggaagagaagacacgagcacaaacgggggcagcacgccgaaggagagaccagacaacaggccagggaaggg

SEQ ID NO: 1640 - RNA, 86 nt, Homo sapiens
cagcccccaggaggaccagcaagggccgggcccaggagcgccggccccaggcggagcgccccggaggagggacccccaacagaccc

SEQ ID NO: 1641 - RNA, 74 nt, Homo sapiens
gacagggcgcagcgggagcagaggaggacaagcaggcacagggaaggggagcccccgaccagacccccgcagcg

SEQ ID NO: 1642 - RNA, 71 nt, Homo sapiens
ggccaggaacccaacgcaggcagaccgaagcgccggccagaccaggcgagccgagagagaggacaccgagc

SEQ ID NO: 1643 - RNA, 73 nt, Homo sapiens
gccgggccgggaccacaacaaccggagaacgggcacaagccgccccaccacggcgggaaagcaagcaaagcac

SEQ ID NO: 1644 - RNA, 75 nt, Homo sapiens
cgcccagacggcgcgcacgggacgccggggagaaggaacaagcgcgagaaggaacaaaccaggagaaaccgaaca

SEQ ID NO: 1645 - RNA, 72 nt, Homo sapiens
cgaaaagacagagaggggaaaccccgaaaggggggcagggagagaaggacaccagaggacgcccggcagaag

SEQ ID NO: 1646 - RNA, 80 nt, Homo sapiens
agacggcgagaccacaaacagaggaagagagaagggcacagaccaagacaacgaaccccggccaggacaggcccccacgg

SEQ ID NO: 1647 - RNA, 70 nt, Homo sapiens
acaggacagaagccaagacaaacggcaacagaccggaacacagagaaaggacagagggaaaaggaagaaa

SEQ ID NO: 1648 - RNA, 75 nt, Homo sapiens
ggccagggagagaggaacccaagacaccaccaggacgcacccgagaccccggacccagcggaggagagaacagcg

SEQ ID NO: 1649 - RNA, 80 nt, Homo sapiens
caggcagccccgcacgagcggcaaccgaaagccagcagcgggacccacgaggaagcggccgcggcgaaccccagagccag

SEQ ID NO: 1650 - RNA, 76 nt, Homo sapiens
caaaaagaagcaaaaccacgccagaaccgcaaagaagaacaccaagaaccagagaccggccagccacagagcagag

SEQ ID NO: 1651 - RNA, 76 nt, Homo sapiens
gcaacaagaaggccaaaaaaacccagcggaaagcaacaaaagacacaaggaggaagagcgagagaagaagcagaag

SEQ ID NO: 1652 - RNA, 88 nt, Homo sapiens
caagaagaagaaggcgaaggaccccaacggggaggccaacggaagaacccacagaagaggccgcggcaccccggaagaacggccacag

SEQ ID NO: 1653 - RNA, 64 nt, Homo sapiens
aggccacgcaaacaagcagcgaaacgagcagaaaggcaaaccgacaccagcgacacaagcgcga

SEQ ID NO: 1654 - RNA, 76 nt, Homo sapiens
accacacgggccggcgccgcgcacgccgagccacgggggcgcgacggcagagggggggccgaagaagccaggggga

SEQ ID NO: 1655 - RNA, 70 nt, Homo sapiens
gagcaagcagccaccaccgacaacgagggggcgccacagggaaggaccaagacgcagcgaaaggcggggg

SEQ ID NO: 1656 - RNA, 58 nt, Homo sapiens
gaacgagacgcgaaccagaccaagacacccaggagaaagacagcggggaaaagaaaaa

SEQ ID NO: 1657 - RNA, 73 nt, Homo sapiens
acaaaaccccgaaaaaggcaacagacacaccaacagcagcagcggagcgaggccggcccggccgcccacacca

SEQ ID NO: 1658 - RNA, 80 nt, Homo sapiens
ccagcgcccggccccccaccggacacccgcgggagaccgaggacaggccggacaccgcagcccaaaggagagagggcccg

SEQ ID NO: 1659 - RNA, 73 nt, Homo sapiens
gccgacgaaggggagccacaggagagcgcccaggggagcaggacaacggccaaaagcggaacgagcagggccg

SEQ ID NO: 1660 - RNA, 37 nt, Homo sapiens
cgccaagaaacccgggccgggggccgggagaggaagg

SEQ ID NO: 1661 - RNA, 63 nt, Homo sapiens
aagaaaaacccgccaggcgccaagcagccagccgggacccaacacgcaaccacagccaggcca

SEQ ID NO: 1662 - RNA, 60 nt, Homo sapiens
agggaacccggcaccgccccagggcacccacagaaggagaacaagcagagcaccggacac

SEQ ID NO: 1663 - RNA, 83 nt, Homo sapiens
aggggaccgcccggacacaagaaaaagagcgaaaaagacacgccgggggggcagacccaaaggaaacgcacgaaagaaacagg

SEQ ID NO: 1664 - RNA, 119 nt, Homo sapiens
agacgccagagggcaccagaccaaacagcgaggaagcccacaaaagcaggcaacacaaggcccgcacagagacaccccagacagacagcacggacgggcgaggacgggagaggccgccc

SEQ ID NO: 1665 - RNA, 43 nt, Homo sapiens
ggcgcccagccgcgccgagagggcgacggggccaccgcgccca

SEQ ID NO: 1666 - RNA, 56 nt, Homo sapiens
ggacgcgccagccgggagcggcggcgaggacgaggaaaccggagaagccgcgaggc

SEQ ID NO: 1667 - RNA, 85 nt, Homo sapiens
gccgggacccggccccggcccacaggggggggcaaacccgagagaacgggaagggaccacagaccagcacgccggcgccacgaac

SEQ ID NO: 1668 - RNA, 73 nt, Homo sapiens
cgcgaggaggaaaggaggacgagggaaaggaagcagacaccaagccaaaaagcagagcaaccgcccccgcacc

SEQ ID NO: 1669 - RNA, 81 nt, Homo sapiens
gcccggccgcgacgcccgggacccagagcgggcaggaaccgaggaggcgcaaaggggaagaaagacccaaccagagagcgg

SEQ ID NO: 1670 - RNA, 69 nt, Homo sapiens
gacaacgggacgggaaacggaagggacacaggagacaggcacaccaaccaccaccagcacgggaacagc

SEQ ID NO: 1671 - RNA, 72 nt, Homo sapiens
gggggacgaccacaagaccgggaaaaagcggggaaggggggcaaaaaaaagaagcaagcgaagcaccgagca

SEQ ID NO: 1672 - RNA, 81 nt, Homo sapiens
gcagagccgaaacaaaccggaggcaggcgcagagaccacaagaaccaggagagacccagagccagcgcaggggaagccgca

SEQ ID NO: 1673 - RNA, 76 nt, Homo sapiens
acacgggcggcgcggaagggagcgccagcaggccgggcgcagagcagcgagaacagggagacggcggaagagggga

SEQ ID NO: 1674 - RNA, 111 nt, Homo sapiens
aggagcgggacggcgggcgacgcaccgccgccggccgacgggcgccaggcggcgcgcgccgggagaggacaaaccggggggcccccaggggggaccaggaacgggagaccg

SEQ ID NO: 1675 - RNA, 88 nt, Homo sapiens
cgcacggacaccggcggccccaccagcagacgcagccgagacaccagcccgaaacaccaccaaggaagcggggagagggggagagaga

SEQ ID NO: 1676 - RNA, 38 nt, Homo sapiens
accccccaccgcagccccaagaggaccagaagcacgca

SEQ ID NO: 1677 - RNA, 75 nt, Homo sapiens
cgagaaggacaaagcagcagacgcgggagaaagaagaacgaaccgccaggcgaggacgacgggcagacgccagcc

SEQ ID NO: 1678 - RNA, 72 nt, Homo sapiens
aaggagcagcagaacgaaaaggggagcgccacgaagggcaccaacccgcggcaccagggaacgccagccggg

SEQ ID NO: 1679 - RNA, 85 nt, Homo sapiens
agagccacacaccccgaccacgcggccgagagacagcaagaaagcaccagccaagcagaagggagccagcggacgagggcgccag

SEQ ID NO: 1680 - RNA, 81 nt, Homo sapiens
gcaccagaaagggaaaccagccacgaagcgaaccaggacaagagccaaagaaaacagaaaccacaagacccaacggaaaga

SEQ ID NO: 1681 - RNA, 75 nt, Homo sapiens
ccagagccaaaggagccccacaaaagggaagcgagaacgcggcgacaacgggacgcccgcgaagaaagaagagag

SEQ ID NO: 1682 - RNA, 80 nt, Homo sapiens
gcgaaacgcacgagaaggaaggaagagggaaggaaaaagaagacgccaaaaaggcgcagacacaaacccggcaggcacaa

SEQ ID NO: 1683 - RNA, 69 nt, Homo sapiens
cagaacaagcccaaagccccaaaagaggaaagggagaacggaaaaaacaaagcgaaacagcggggccac

SEQ ID NO: 1684 - RNA, 44 nt, Homo sapiens
gaggaggaggggggcgaggaaacgcacgccagcagccgcccacc

SEQ ID NO: 1685 - RNA, 75 nt, Homo sapiens
gggcgccagaaggaagaggcggacggaggagcaggcgagaagagaaggagaaaagcagaagcccaggacgcccgg

SEQ ID NO: 1686 - RNA, 85 nt, Homo sapiens
agcggcagcagcagcggcgggaggagccccggggagcccacgaaagggccagcagcccccagaagaagccagaaagccaggaaag

SEQ ID NO: 1687 - RNA, 73 nt, Homo sapiens
ccaaaccaccccgaaccgagccccagcacaaaaacggaggacggaagcaaagggcagccaccgaagacagcga

SEQ ID NO: 1688 - RNA, 76 nt, Homo sapiens
gaggcgaggcagggaggacccacccccgggggaaaagaacgagggccaaaaccacaccaaaaccaagggacagaaa

SEQ ID NO: 1689 - RNA, 78 nt, Homo sapiens
aggggcgagcagggccacaggcacagaacggggagccaaaggccgaaggcggccgcagaccccggacacgggggcacc

SEQ ID NO: 1690 - RNA, 52 nt, Homo sapiens
ggcggggcgggcgaacccgggggagggcgccccggccagagaggggcgcggg

SEQ ID NO: 1691 - RNA, 61 nt, Homo sapiens
cagcgcaaccgaaggcacggggcaggaaacagaagagggccagaggacaccagagacccag

SEQ ID NO: 1692 - RNA, 70 nt, Homo sapiens
cagcagcagaaaagaccagacagacaacggcaagcggagaagagcaaggccgaaccgagaggaagggcaa

SEQ ID NO: 1693 - RNA, 67 nt, Homo sapiens
gacggcccaccagccaccccaccgcgcagggagagccaagaaagggagggggaaacagccaaggccg

SEQ ID NO: 1694 - RNA, 52 nt, Homo sapiens
ggaaaacccaggaaccagaacggggaagagccgcaggaggagaaccaaacgc

SEQ ID NO: 1695 - RNA, 81 nt, Homo sapiens
gaaaaagggcgaggaacgcgccgccccccgcgcagccagcccgacgagcggcccggaccgacacagccagcggcccacccc

SEQ ID NO: 1696 - RNA, 85 nt, Homo sapiens
gcggacagcagcgagcccccgcggacccacccccgaacccccaaggccaacggaccacaccaaaagccaccaaaggaacacgcca

SEQ ID NO: 1697 - RNA, 56 nt, Homo sapiens
accacggagggaaagaccaggcagagcaacgaacaccacagacgaaagccaaggga

SEQ ID NO: 1698 - RNA, 80 nt, Homo sapiens
ggagcgccccaaaaggaaacagaaaccaaggcaccccggagcccggaaagggccacaccagaggcagcaagagaccggcc

SEQ ID NO: 1699 - RNA, 85 nt, Homo sapiens
gagccgcacgcggcgaaggaagaggagggcaagaagggcaagaaggccagggcccagcagcagcccacggggccagcggaggaaa

SEQ ID NO: 1700 - RNA, 65 nt, Homo sapiens
ccccacagaaagggcgacaccgaaaacgagaaacgaaagagacacgggggcacaaccgagcccgg

SEQ ID NO: 1701 - RNA, 72 nt, Homo sapiens
caagcccgcggaagagaaccagaccaggggagcaacccaccaacaaacagcggggaagcggacggcccacgg

SEQ ID NO: 1702 - RNA, 72 nt, Homo sapiens
cgcggggagacacggcaaagggccaccaggccccgggggcgccgagggcacaagggcaacgacagaagggcg

SEQ ID NO: 1703 - RNA, 73 nt, Homo sapiens
aaagggccaagagggaggaaccgggccccagggaaaggaccgaggcaggaaagaggccagacgcagggaccgg

SEQ ID NO: 1704 - RNA, 80 nt, Homo sapiens
ggagccgacgcggggcagcgccgcaccgaggcagcccgcggcaccgggggacagggacagagcgaagaaccccccaagaa

SEQ ID NO: 1705 - RNA, 68 nt, Homo sapiens
caaaaagggccaaagaagagcaggccaagcaaggggcggacacaaggcggggcccaaaaagaggcgaa

SEQ ID NO: 1706 - RNA, 64 nt, Homo sapiens
ccggcccgaagaggaaagaagggagccgcgacgaaaccagaaacgggaggaccaggaagcgcga

SEQ ID NO: 1707 - RNA, 76 nt, Homo sapiens
agaacaaacggccaagaagggccaccccacagacggaaggaagggaacacggacgacgagacacgaccaacacagg

SEQ ID NO: 1708 - RNA, 70 nt, Homo sapiens
cgccgaagaagcacgaaagccccacccgccgcagcaagcagaggaggagcggccggggcccaggcgcggc

SEQ ID NO: 1709 - RNA, 77 nt, Homo sapiens
agagaggagagggcagacggacaagagcgcggaacaggacgccccgagggacccaacaagccccaggacagaaggaa

SEQ ID NO: 1710 - RNA, 77 nt, Homo sapiens
aaacaagccaacccaggaggaaaaacgacgggcggcagagaagagaagagcacagcgggaggaaagggagagacaag

SEQ ID NO: 1711 - RNA, 77 nt, Homo sapiens
ccccacaccagaacccagagcagagaagggaagaggccagcacgccgggcaggaagagcccacacggagaccgacga

SEQ ID NO: 1712 - RNA, 60 nt, Homo sapiens
cacgcccacgggacgaggagagggagggaaccgggcagagagaacccgaaggaagagaga

SEQ ID NO: 1713 - RNA, 70 nt, Homo sapiens
ggccagagcccagaaaagagcacaggaagagggcggcacgcggccagagagcacaacgggaggaagggaa

SEQ ID NO: 1714 - RNA, 72 nt, Homo sapiens
gcaggggcgccaacgcccggccgcggcccaggacagcggcaaacgaagccaccaggcacaggcacagcgacc

SEQ ID NO: 1715 - RNA, 57 nt, Homo sapiens
gcggggccgggagcaccggggcccgcacgcggagaaagagccgcagacgcacagcaa

SEQ ID NO: 1716 - RNA, 61 nt, Homo sapiens
aggaacggcccggaaacaggaggacggaccccacacgggcagcggcccgaccagccggccc

SEQ ID NO: 1717 - RNA, 41 nt, Homo sapiens
gacgggacagagcaacaggacgccgaaccaagaacaacccc

SEQ ID NO: 1718 - RNA, 81 nt, Homo sapiens
agaacggagggcacgagcgggccgagaccagggcgacaaggcccccaagaaggacaaccagaacgcccaccacggggaaag

SEQ ID NO: 1719 - RNA, 52 nt, Homo sapiens
gggcaccaccgcccaccccggcagaacagcagaaaacacacgaccgcgagag

SEQ ID NO: 1720 - RNA, 64 nt, Homo sapiens
ggaacgccgaccggcacgaggcccccaaacccaagaaaaggacagagaggcccgagggaggacg

SEQ ID NO: 1721 - RNA, 79 nt, Homo sapiens
cgcgcagaggcaagggagcccaccgcccgccagccgccggggaggggacccgaacacccaaagccccacgcgggccgcg

SEQ ID NO: 1722 - RNA, 85 nt, Homo sapiens
acaaacacacgcaaaggagaaaggaaccgacaggaaagagcacacgggagcgcccccgagagaaccaaacgaagcacacgggccg

SEQ ID NO: 1723 - RNA, 71 nt, Homo sapiens
ccgggacccgggcgcccgcgcccgccccaacccagccacaggagagggaagcggcagggcccccccccagg

SEQ ID NO: 1724 - RNA, 81 nt, Homo sapiens
gaccagccgggaccggccggagaggagcgacgcgagggccgagacggcgcggcaaggggaaaaaaggccagagacagacgg

SEQ ID NO: 1725 - RNA, 74 nt, Homo sapiens
gccccgccgcccagaggacgcccaacaccacccacccaccacggcccgccagaggccccaccacccagacccca

SEQ ID NO: 1726 - RNA, 70 nt, Homo sapiens
gaaaagaaacagaaagagacaggacaaacgaagaagacaccacgaggcgagcacagggacaggccgggcc

SEQ ID NO: 1727 - RNA, 71 nt, Homo sapiens
cagcgcagcagccaaggagacaccccagcggaaggaggagcccacggcagccagcggaagagagcggaagc

SEQ ID NO: 1728 - RNA, 75 nt, Homo sapiens
ccaaacccaagaacaaaaaggacacggggggcccacacaagcccccacccgaagcaaccacacacaaaacgccca

SEQ ID NO: 1729 - RNA, 79 nt, Homo sapiens
caagaaaagaaacaagacagcaaggggacaaaagggagacaccaccagaacaggccggcgcgcgggaaggcacacaaca

SEQ ID NO: 1730 - RNA, 84 nt, Homo sapiens
ccaccgccagccgcgaggccgcagaacacgacggagcgaagcagaacagcccgggcccccacagcccagcccaaagccccaccc

SEQ ID NO: 1731 - RNA, 81 nt, Homo sapiens
agacgcgcgcaggaggcagacaggcagcaggagaggagcggcgcgggagccaccagcaggaaagcaggaagagcggggaga

SEQ ID NO: 1732 - RNA, 75 nt, Homo sapiens
aagagggggcagacccggaagccgaaccaacggaggaaacggagcacccaccaacgagagagccgcagggcagga

SEQ ID NO: 1733 - RNA, 78 nt, Homo sapiens
caggacaccagacacacaaccgcggcggcacagcggggagaaacaagccgaggaggcaacagccaggagaaagaagcc

SEQ ID NO: 1734 - RNA, 74 nt, Homo sapiens
gaagacccggaagcaccacagcaaacaacaagcagccacccagaaccgccgccaaggaaaagaagaagcaaagc

SEQ ID NO: 1735 - RNA, 71 nt, Homo sapiens
aaaaccccaccgcgagggggcccaggaaaaggagcaggcgaggcaaggacggggacacaagaccagccagc

SEQ ID NO: 1736 - RNA, 55 nt, Homo sapiens
gaccacgccacccccgaaggaaccgcgaccacagacagcgaacccacccaacacg

SEQ ID NO: 1737 - RNA, 65 nt, Homo sapiens
ggggacgcggacgcacgagccggaggaaaccacagagcagccagcagaagggagaaccaaaagga

SEQ ID NO: 1738 - RNA, 70 nt, Homo sapiens
gccacgagaccggagacagggcagccccaccggaagggagcccaaaggaaccccgcgcaaagcacacgac

SEQ ID NO: 1739 - RNA, 81 nt, Homo sapiens
cggaacacccgccaaagcagagaaaaacccaaaggccggcgacagaaaggccccaaacggacccgcgacccgaagcgccga

SEQ ID NO: 1740 - RNA, 72 nt, Homo sapiens
ggcaccccagcgccaccgccaggacagagggagcacagccaaaacggaacggaaacacaaagcggaagaaca

SEQ ID NO: 1741 - RNA, 70 nt, Homo sapiens
ggaagaagaaggaagccaaagaaggcagcgcaaccccaccggaaccaccgccaagagcaacagaacgaaa

SEQ ID NO: 1742 - RNA, 75 nt, Homo sapiens
caaggcgacgccagaggaggaaaggaagacaagggaagcccagaggcacggggcagaacaccaacagagggccga

SEQ ID NO: 1743 - RNA, 75 nt, Homo sapiens
acgccaccagccacggaaagcagagcaaggccacagagccgaacacagcagagggggacaagcccacggagacgg

SEQ ID NO: 1744 - RNA, 67 nt, Homo sapiens
ggggaacccccccaagagccgggggaaaagcaggaggcagagcagaaccccggggcacggaaaggga

SEQ ID NO: 1745 - RNA, 78 nt, Homo sapiens
ggcgccggcagcagagaccaccagaagggcacacaagccgaagccaacacgcccagaacagcggaacagcggaaccgg

SEQ ID NO: 1746 - RNA, 81 nt, Homo sapiens
acaaagcggcagcgggccgcgacacagcaggggagcgcccgacgcaaagaaggagaaagcggcaggacccaaagacaggac

SEQ ID NO: 1747 - RNA, 54 nt, Homo sapiens
gacccaaggccaagaaccccacaggccgaggagcaggaaaaagacaagggcaga

SEQ ID NO: 1748 - RNA, 51 nt, Homo sapiens
aagggccgccacagaaaccagggaggcaggagcagaaaagcgaggcaaggg

SEQ ID NO: 1749 - RNA, 79 nt, Homo sapiens
ggaaggccccagcggggggggaagcggaggcacgggcggcccgcaggaccggaccgggggagggggagaggcaccagca

SEQ ID NO: 1750 - RNA, 77 nt, Homo sapiens
aagggaaggagagcgcaggagagcgaaaacccaaaggcaaccagccaagggaccgcagggagacggcaccaccaccg

SEQ ID NO: 1751 - RNA, 77 nt, Homo sapiens
gcgcgggacggccgaggaaggaacggcccccccccagcccgccccaaaagaagaaccgcaaaaagcccaccacccga

SEQ ID NO: 1752 - RNA, 75 nt, Homo sapiens
ccaagaagaccaacacagaccgcagcccccggcgccaccagcagccaaaggcacacagagaaaaaaagggaacaa

SEQ ID NO: 1753 - RNA, 84 nt, Homo sapiens
cccgggagacccaggcgggacagagggagccaggcagagacaagcagaccggaagaccgacggaagaccacaccccgagggagc

SEQ ID NO: 1754 - RNA, 68 nt, Homo sapiens
cggggaccccggagcccagaagacagagggcgaggcaccaccgggagagcgggaccggccgggggcga

SEQ ID NO: 1755 - RNA, 71 nt, Homo sapiens
gggccgcgccgccaccgcgaacaggagcccgacagaagagcccaaaaggcagagcgaggagagaagaagga

SEQ ID NO: 1756 - RNA, 82 nt, Homo sapiens
agaccaggagaccccacggagcgggcgacgagcgacccgggagacacgacgggggagcgggccggagagaagagaggggcgc

SEQ ID NO: 1757 - RNA, 74 nt, Homo sapiens
gacagacgcagggcgcccccgcaccaggaagaagaggcggaagaaacaacaagcgcaaggagcgcccaaaccac

SEQ ID NO: 1758 - RNA, 71 nt, Homo sapiens
cgaaaagcggggcgcggcccgagcagaagaaggggaccgcgcacgcggcccccagaacacgccgcgagcca

SEQ ID NO: 1759 - RNA, 52 nt, Homo sapiens
aggagggcggaacggcggaagggacgaacagcggggacgccccagcagaccg

SEQ ID NO: 1760 - RNA, 79 nt, Homo sapiens
accagagcggagacacccaggaggcagaagccacaggcaccgaacaagggccccgcaccacacccgccacccgccagaa

SEQ ID NO: 1761 - RNA, 75 nt, Homo sapiens
gccacacacccagaaaaagaaacaggacacacaagggccaaggcagcgcagagaggccacggaagcacagccaag

SEQ ID NO: 1762 - RNA, 77 nt, Homo sapiens
ggaagaggcacgcgagggggcgcgaggggaacggaggccagagcgcgggggcagcggcaagcaggggagccagccac

SEQ ID NO: 1763 - RNA, 94 nt, Homo sapiens
acgaacagcccacgccaaaccagaccccaggccgccagcccagcgacaccacgcaaacaaaagaaaaccaaaaagcgaaaaaccgcaagcaaca

SEQ ID NO: 1764 - RNA, 81 nt, Homo sapiens
ggaggagcgccacgggacaggggcgcggccagagccaagaccacagcagacaacgaagagaggaaagaagcggaaaggagg

SEQ ID NO: 1765 - RNA, 71 nt, Homo sapiens
ccagaagcaggcccccagccgcagccacaacaccggcaggaaccaccaggacagagccccggaccagacga

SEQ ID NO: 1766 - RNA, 55 nt, Homo sapiens
acgagacgacacccacaagagcaccacaggaaagaggacaacccggacgaaggcg

SEQ ID NO: 1767 - RNA, 72 nt, Homo sapiens
cgccagaccaaagccagcagaaaccagggagaagaaaagcaacacagcgaccagaaaaaacagggagccacc

SEQ ID NO: 1768 - RNA, 82 nt, Homo sapiens
ggacggaccgagaccggaccgagagcggaccgagagcgcgaaacgcacgagaagcacggcggcaaagaccacacagcgcaaa

SEQ ID NO: 1769 - RNA, 77 nt, Homo sapiens
agcgcccgaccggagcccagcggggggagccggagccccccagccgcgccagcagcgcgccgcgcgccgggagaggc

SEQ ID NO: 1770 - RNA, 60 nt, Homo sapiens
aaaaggcaaacagaaaagccaagagcaggaccggagaacccccccacaccaacacccagg

SEQ ID NO: 1771 - RNA, 60 nt, Homo sapiens
gagcggaaaaccaggaacggccaggccacgaagaccgggcgccagggccgccgccccgcc

SEQ ID NO: 1772 - RNA, 89 nt, Homo sapiens
ccaagggcaacgcggaaaggaaaaccacaccggcgaccaaggaaagagccaaaagagccaggaagggccgcccaaaaaagagcaggaaa

SEQ ID NO: 1773 - RNA, 61 nt, Homo sapiens
ccagcaaaggaacagcccggcagaacacacagaaccacacaggggcccagaaggaagaagg

SEQ ID NO: 1774 - RNA, 72 nt, Homo sapiens
ggagagcacgcagcccagcaccaccaggcgggagcaaaacggccaaccaaaacagacgcacaaaaggcgggg

SEQ ID NO: 1775 - RNA, 77 nt, Homo sapiens
agagagccaggacaccaaaggaccccgagaccggagacgcaccccaggcagcacgcggcccccgaaccccgccgccg

SEQ ID NO: 1776 - RNA, 62 nt, Homo sapiens
aaggacggcgccgcccgacagcgagccggggaaaaccccagggcaaaacgccagaaaggacc

SEQ ID NO: 1777 - RNA, 56 nt, Homo sapiens
ggcccggcggcggggagggaggcaccgccccaacccccccccgcccggagaacccc

SEQ ID NO: 1778 - RNA, 58 nt, Homo sapiens
aggccccagggcgagcacagcacacaaggaccaccaagcagagagacgaggcgccagg

SEQ ID NO: 1779 - RNA, 82 nt, Homo sapiens
aaagcagaagcacaaagcccgaagcagaagggagaggaagaaagaccaaacgagagacaaaagagaacaacagaacgcaagg

SEQ ID NO: 1780 - RNA, 64 nt, Homo sapiens
ccgcacaggggcagggaaccgaaagacaaggcagcgagaaggaagaaggggaggaagaaacgca

SEQ ID NO: 1781 - RNA, 38 nt, Homo sapiens
ggacaccggaagcgggaaagaagcagcaacagacggaa

SEQ ID NO: 1782 - RNA, 82 nt, Homo sapiens
gagaggaagacgagccgggaggaacggcccggaaacaggaggacaacaacggcccaagagcacagagaagaccaagggccgc

SEQ ID NO: 1783 - RNA, 70 nt, Homo sapiens
caaagggcaaccagggaaacaggagagcagaagggaacacccgcacagaaagaccagggaaccacaggga

SEQ ID NO: 1784 - RNA, 74 nt, Homo sapiens
gagaaacaaacacgaggggcacgcagaggcgccagggcaagagcaaaaggcccgaccaagcaacacagcaaaag

SEQ ID NO: 1785 - RNA, 71 nt, Homo sapiens
ggccgagcaaagaaaaaggagaaggccaaaaagcgaagaagaacgccaagggagaaaacagagggacagga

SEQ ID NO: 1786 - RNA, 70 nt, Homo sapiens
cagagcacgcggagcgacccgccacgcggagacccagaaccggcggccaaggccgaccaaagacacgaca

SEQ ID NO: 1787 - RNA, 69 nt, Homo sapiens
cgggaaacagggccccaacaaagagacaaaaccaaggaggacacaaccgcgagaaccaccagcaaagac

SEQ ID NO: 1788 - RNA, 75 nt, Homo sapiens
agcccccaagagcgggaacagaagagaccccaaaagaagaggcggcgcaggccagcggaccacagcccgcgcaag

SEQ ID NO: 1789 - RNA, 84 nt, Homo sapiens
aaacccaacagaccagccccccccaggccgaaaggaacaacggaaagccagagcgaaaaaaagaaacacgcaaaacggcgggaa

SEQ ID NO: 1790 - RNA, 74 nt, Homo sapiens
gaaggggacagcgcacacggcaaggcaccggaaagaacaggcacacacgaggaccacggacagaggaagaggag

SEQ ID NO: 1791 - RNA, 78 nt, Homo sapiens
gaacaagacgggagccacaccggcacaacaccccggaacaaggccggccaacggagacagagccagcgggccggcacc

SEQ ID NO: 1792 - RNA, 79 nt, Homo sapiens
gcagggaagacgccgcgccaccgagccggaccggagacggggccaacaggcacagaagaagccaaaaacgggccagaaa

SEQ ID NO: 1793 - RNA, 63 nt, Homo sapiens
cagggacaccggccagcgcagcacgggacgcgaccggaaggcaggaaggacgcccagagaccg

SEQ ID NO: 1794 - RNA, 77 nt, Homo sapiens
cagagccccccggaaccagcagcgcagccgggggccagggaaagggagcagcaccggccacacccacagcacgaccg

SEQ ID NO: 1795 - RNA, 69 nt, Homo sapiens
cagaacgccaggaccaaaacagggagaaacacagccagaaggaacacggaagccagcggagcgaggaca

SEQ ID NO: 1796 - RNA, 80 nt, Homo sapiens
caagaccggaccggcaccaccaggaaccacagggaaagggagcagcaccggccacacccacagcacgaccggaacccagc

SEQ ID NO: 1797 - RNA, 81 nt, Homo sapiens
gagcccaccaggacgaccgcgccgcccagcacgccagggagagaacagcacacagaggcgcaaggggaagagaaaagacag

SEQ ID NO: 1798 - RNA, 78 nt, Homo sapiens
cggggagagacggccaagcagcaccagcggccggggaaaggggacaaaccggcgaccacacacggggacgacggggaa

SEQ ID NO: 1799 - RNA, 72 nt, Homo sapiens
gccggaaaagccaacgccggcgaaggcagaaggcggcagggagcacgcaccaggagcccacggcccacccac

SEQ ID NO: 1800 - RNA, 72 nt, Homo sapiens
gggccggcgagcccggccccgccggcaccagacacgcgagacagaaagagacgaaaaaaggggaaagaaagg

SEQ ID NO: 1801 - RNA, 45 nt, Homo sapiens
aacaaacagaagacagcagcccaagagaacgaaagcacagaaaac

SEQ ID NO: 1802 - RNA, 83 nt, Homo sapiens
cggaggagcagggcagagcacgcgcgcagcgaagcccagggaggccaccagacacagccggacaacaagcgagaagacaacac

SEQ ID NO: 1803 - RNA, 86 nt, Homo sapiens
ccggcgaccccgcgcgcacgcggcgcgccgagcagcagcagagaaacgagcagaacaaaaaggggacaagagacccaaacagaaaa

SEQ ID NO: 1804 - RNA, 40 nt, Homo sapiens
gagagaaggaacaccagaaacggagaggacggggacgggc

SEQ ID NO: 1805 - RNA, 75 nt, Homo sapiens
gggaaagagacggaaaccacccgagcaggaagaccacacaggggacgggggaggacaggagacaggaagagagag

SEQ ID NO: 1806 - RNA, 77 nt, Homo sapiens
gcaggaaagccccagccacccacaaacagagagaaggaaccacccacgcaggcagaaaaccagaaggcaccgacagg

SEQ ID NO: 1807 - RNA, 103 nt, Homo sapiens
gaagaaggcgcagcagaggggccacgcgggcccgaggcgcaccaagggcgaaggagccggcccaagccaagagagaaagcaagccagaagccagggggcacca

SEQ ID NO: 1808 - RNA, 91 nt, Homo sapiens
cgcagccagagccaccagcgcagcgcgccaggagcccagcagcaagggcgaccagacgaggggagacggacgggggagagaggccaaacgg

SEQ ID NO: 1809 - RNA, 66 nt, Homo sapiens
cggacccgacacaaccagacagacgccaacccaacgacccacaaagccggagcccggagaaaacca

SEQ ID NO: 1810 - RNA, 57 nt, Homo sapiens
acaagaggaagaagaaaaaacaccgagaccaagccaggggacagacgggaaagagcc

SEQ ID NO: 1811 - RNA, 64 nt, Homo sapiens
gcggcggcggcggcggaggagagccgcagagcgcgcagaccccgacgaagaagacacgaacagg

SEQ ID NO: 1812 - RNA, 73 nt, Homo sapiens
aagaaagcagcaaacagcgaccgccaagagacacacagggcaccagaccggcccaaaccaggcccgcaacagg

SEQ ID NO: 1813 - RNA, 84 nt, Homo sapiens
aacacgcgaagagacagacccaagaaggaaaccccagacagccagcagcaggccgggaccagcaggggccgcgcagcagcagac

SEQ ID NO: 1814 - RNA, 74 nt, Homo sapiens
acagcgggcgggccgggcgacgccggggggggcggcccgcagcgaaggaccgggaagccaaaaaccccccaccc

SEQ ID NO: 1815 - RNA, 78 nt, Homo sapiens
gcccggagagaagagcggcagcggagcgacccagcagggacaccaaccacacgagcaccagaaggcccggaaaagggc

SEQ ID NO: 1816 - RNA, 66 nt, Homo sapiens
acggggacaagcaacagggcaaggaacaaccggggaaagacacccggcaggcaccggggaggcaag

SEQ ID NO: 1817 - RNA, 73 nt, Homo sapiens
cgaacacaccagaacaggaaggggagaacaccgaagcccccacaagggaagaaccacaggggaaaagccagcc

SEQ ID NO: 1818 - RNA, 86 nt, Homo sapiens
cgagcgcggaggaccgggaggccccgggcgcgggccaaaccagaaaggggacagcggcgggcagggagcacggaaggaaccacaag

SEQ ID NO: 1819 - RNA, 86 nt, Homo sapiens
gagaggcgcgggaggcgaggaggcggcggcggagacggcccaccgggggacggcacggcaggcggacgcccggggccccccggacc

SEQ ID NO: 1820 - RNA, 55 nt, Homo sapiens
gaacccaaaagccgacaaccccagaaacagacaacgaagagaggaaagaagcgga

SEQ ID NO: 1821 - RNA, 52 nt, Homo sapiens
ggggaccaccccaggaagaagacaacaggccggagcggacccaccgcagcca

SEQ ID NO: 1822 - RNA, 62 nt, Homo sapiens
caggaggggaggcccagccagcgcagcaggagaaccaggccagggaagaaaaccgccgacaa

SEQ ID NO: 1823 - RNA, 114 nt, Homo sapiens
cgcacagcccgcaaccagcagagcccaggacacaagcccagcgggaccagacaccgcggaagcgacaacaacgccagcaacacccccgcagaacaagcaagcaagccaccacca

SEQ ID NO: 1824 - RNA, 69 nt, Homo sapiens
gagaaaagcacaacccggacacgccagggacacccaaagcgcacacaaaacacaaggagaagaacccac

SEQ ID NO: 1825 - RNA, 79 nt, Homo sapiens
ggaccggagccgggcgggccacagagacagagacagacgaaccgagacaacacacgccgcaaggcgccggaggccggag

SEQ ID NO: 1826 - RNA, 73 nt, Homo sapiens
acgaaggaggccggagaagaaagaggccacggaccgggaggaggacgaagggggaccccgggcgcccaggggc

SEQ ID NO: 1827 - RNA, 88 nt, Homo sapiens
ccggaaaaaaggaaaccccggagagcgagagcgcgaaggaaacggccgccgccgccgcgagcgccccgggcggagaacggaaaagcac

SEQ ID NO: 1828 - RNA, 86 nt, Homo sapiens
aacagggccgaagaggaagacgccgcgcaaagcaaggcagagagcggggaccagcgaagaccaccagcaccaccgcaccacggagg

SEQ ID NO: 1829 - RNA, 56 nt, Homo sapiens
agcgagaagcccaaagcaggagaccaaggacgccaccacacgaagacagcagacaa

SEQ ID NO: 1830 - RNA, 59 nt, Homo sapiens
gaagacccagaggaggcgacaggccgccacaaaggagggagcgccccaggccgacggcg

SEQ ID NO: 1831 - RNA, 80 nt, Homo sapiens
ggcgagacgggcgcaggcaacacgaaggaaaaccacgccgcaagcccagaccgggaacaccaccaccgcgggagcagggc

SEQ ID NO: 1832 - RNA, 83 nt, Homo sapiens
cgaaggggcgcagccaggcggcaggggagagcaggccagcggaggcgggggaccggagccacacgcacagacgccgggaccgg

SEQ ID NO: 1833 - RNA, 80 nt, Homo sapiens
ggccgaagccgcgcggcgccgcgagaggaggacccagacagcggccccccacgagcccggacaaaggggcccagggaggg

SEQ ID NO: 1834 - RNA, 83 nt, Homo sapiens
cgggccccgggcggcggcgccaggccagggccgggggacccgagggaccaggaggagaagcaaccagagaggaagcgagaccc

SEQ ID NO: 1835 - RNA, 66 nt, Homo sapiens
gcgcgcggcccccacaccacacagagagcgagggaaggagcgagacacgacgaaggagaagaagcc

SEQ ID NO: 1836 - RNA, 83 nt, Homo sapiens
agggacggacaaaggaacaggaccagagcccacgagaaaaggaagaccggcggcagcagaggagcccgggagcgaaggagaac

SEQ ID NO: 1837 - RNA, 84 nt, Homo sapiens
aaaccgcacacaccaaaaacccaccgcagcaagcagagcccggacaggcccgccaccggggcacgggcgccccccggaagcgga

SEQ ID NO: 1838 - RNA, 81 nt, Homo sapiens
cgagacggagaagaaggaaaagaagaaacagaaagagaaaaaaccccggcgacaaagaaagcagaaggggaaaggagagag

SEQ ID NO: 1839 - RNA, 65 nt, Homo sapiens
aggcaccacggggcagcgcgaggaacgaaacccgaggcagggagggaagccgggcgccaagagcc

SEQ ID NO: 1840 - RNA, 68 nt, Homo sapiens
aacacccgcagacaccggccacccagagagcaaaaggcagcgaaacaaaagccaaggacacgcaggac

SEQ ID NO: 1841 - RNA, 58 nt, Homo sapiens
caacccaggcacgaggccagccgaaggacaaggaacaagggacaaaccaaagaccaac

SEQ ID NO: 1842 - RNA, 68 nt, Homo sapiens
cggaaacgaagaaggcccagcccaccagagcccaaaagcaaagcagggcagcaaagaacacaaaggca

SEQ ID NO: 1843 - RNA, 56 nt, Homo sapiens
cgaggcgcccccaccacccacaagcaaggaggcggaaaaaacaaagagagggggcc

SEQ ID NO: 1844 - RNA, 78 nt, Homo sapiens
gaagccacccagcgccgaggaaacagcccgaacgcacagaagaaaccagcgcccagcgccgggagacaaagagaaaac

SEQ ID NO: 1845 - RNA, 70 nt, Homo sapiens
aggcacaaacgaccgaaggacccaggccaagccaccaagcgacagaagggcccgagaacaccgaacggca

SEQ ID NO: 1846 - RNA, 80 nt, Homo sapiens
gcgccgcaggagacgagaggacgggaccaggcgaagcggccgagcaggcgagcgaacgacgagacagagcagccgccgga

SEQ ID NO: 1847 - RNA, 75 nt, Homo sapiens
gccccgcaccagccgacacgcgcccggagcaccccgcggagcggagcgacaggccgacagcaggaagcaccagac

SEQ ID NO: 1848 - RNA, 59 nt, Homo sapiens
ccgccaccggcacaccgaaggacaacaggcacaaagagagaaggaacacccacagggca

SEQ ID NO: 1849 - RNA, 83 nt, Homo sapiens
acagacacacggagagggggcaccagaaaggcacagcagaagcagccaaaaggaccccagggagaagccacaccaaggcacga

SEQ ID NO: 1850 - RNA, 57 nt, Homo sapiens
ggcagaggcagaaccacaggcgagagagagcgcgagggcaggcccagaacacgggag

SEQ ID NO: 1851 - RNA, 82 nt, Homo sapiens
ggcccccagcgcagccgcagccaggggcgagccggccagggggcccacaagccccggcccagcacagccgggcccagcggcc

SEQ ID NO: 1852 - RNA, 123 nt, Homo sapiens
ggagcaaggggaacgccaggggcccgacccgggaaccagggcagggaggcccagaggacgccagccgaggacgcgccaaacccagaagacaggcagaagccaggggacaccgccagcccaaac

SEQ ID NO: 1853 - RNA, 70 nt, Homo sapiens
cacccgaggacaaagggcggaaagggcgagggcaggcagcggacggggcgccgggccaagacaggcgaca

SEQ ID NO: 1854 - RNA, 40 nt, Homo sapiens
ggcagggaaaaaggcagccgcaacgaaggcgaaccaacca

SEQ ID NO: 1855 - RNA, 56 nt, Homo sapiens
acgagaaagacacgcaacaagcccagcaaaaagaggagaagcacccccccagaaga

SEQ ID NO: 1856 - RNA, 71 nt, Homo sapiens
gcgggccgcgggaggacaccacccacaggcagcgggagagaggagagcagagagcagaaacaccgaccacc

SEQ ID NO: 1857 - RNA, 77 nt, Homo sapiens
aagaacaagaacgacggagcccagcaggcagcaggggaaccgcgcgaaggacacaccaccggacacaaggagagaac

SEQ ID NO: 1858 - RNA, 52 nt, Homo sapiens
ggaggaggaggcgagcacaggcggagagcgaggagagccagcaggggagagg

SEQ ID NO: 1859 - RNA, 77 nt, Homo sapiens
gccaagaggggagagcgagaagcagccgcgcgcgccccacacggcgcgaaaaagaccagaaggccacccccacacac

SEQ ID NO: 1860 - RNA, 68 nt, Homo sapiens
gaacaccacaaacaaacaccaaggcccacggccccacggggcgacgagccacgggcgggcccaccgca

SEQ ID NO: 1861 - RNA, 76 nt, Homo sapiens
cgagaaccgcagcccacacgaccaaaaaaccaaggacgacgggaaaccggacccgcaaagaggaaacaaaagaaaa

SEQ ID NO: 1862 - RNA, 68 nt, Homo sapiens
aaagaaaagggggaaggaaacccgcgggaccagcaacaagaaaagcaagaagaccagagcagcaaacg

SEQ ID NO: 1863 - RNA, 83 nt, Homo sapiens
gccaaaggccaggacaccaacgggaccagaagagggcaacagcaccgacccggaagcgagacaagccgcggaggagcagcgcc

SEQ ID NO: 1864 - RNA, 94 nt, Homo sapiens
gcaccagccgcccaagccgcacagccgcggcggcagcagcaggagagcccgggcgcgccaggcacagccaagagcggaccggcagcggccagcg

SEQ ID NO: 1865 - RNA, 81 nt, Homo sapiens
aacaggggcccgccaggagggccacgccgccccaaccccaagcaaccaaagggggagggcagagcccagccagcacacagc

SEQ ID NO: 1866 - RNA, 74 nt, Homo sapiens
cagaaccaagggagggaaagacaacaggcacaaagagagaaggaacacccacagggcagacagagaaagaacac

SEQ ID NO: 1867 - RNA, 36 nt, Homo sapiens
acagagccacgggcccaggcagagggaggagcgaga

SEQ ID NO: 1868 - RNA, 70 nt, Homo sapiens
gacaaagacagagagacccacgaagacgaaccaggaccaagccaagaccagcccaggcccacaggggccc

SEQ ID NO: 1869 - RNA, 65 nt, Homo sapiens
aaagcaccgcacaacccccggaaaccgggcagcgaaagaaaaggccaagaagggacccagacacg

SEQ ID NO: 1870 - RNA, 79 nt, Homo sapiens
gggcaggccccgagaggaacccagccgacacgacgccgccggcaggcccgcgcaccagacaacaggcacaaagagagaa

SEQ ID NO: 1871 - RNA, 71 nt, Homo sapiens
cccggacgagagaggaggcgccacggcccaggcaagcccagagaagcccggcccaaacacgacccaacgaa

SEQ ID NO: 1872 - RNA, 76 nt, Homo sapiens
accgggcagccccaaacggaaagaagagcaaaaaggaaggagcacagcaagcgggagcaggcagaccaaaggaaca

SEQ ID NO: 1873 - RNA, 74 nt, Homo sapiens
aggagaaaacccagacagaacaccacgaccaacgggagccgcaaggacaacagccgcggccagacagcggccgg

SEQ ID NO: 1874 - RNA, 67 nt, Homo sapiens
gccagaccaacaagcggagggggccacagggcaacggggcccgcaggcccccaccgcccagaggaga

SEQ ID NO: 1875 - RNA, 77 nt, Homo sapiens
agggcgcaaccaaagcaccagaccccaccagcaacgcgccgaaaagcgaaaagaaacaagccgcggcaacagcgacc

SEQ ID NO: 1876 - RNA, 76 nt, Homo sapiens
ggcgagggggcgcggcccggcccggcagacacggcccgggcaaacagcagaacgcaagaggggaaccacccaccga

SEQ ID NO: 1877 - RNA, 52 nt, Homo sapiens
ggaaccacacacaccacaggaagccaaaagaggaacagagcgaaggcggaac

SEQ ID NO: 1878 - RNA, 81 nt, Homo sapiens
cgaagaagggcgagggagcaagcgcacacgaagagaagcaaggcccaagacccaggcggaaccgaggaggcgcaaagggga

SEQ ID NO: 1879 - RNA, 85 nt, Homo sapiens
cccggccggagcgggcggagacgccgggcagccgaacggagggcgacggagggagacaaaacagaggagaccagaccagaagccc

SEQ ID NO: 1880 - RNA, 68 nt, Homo sapiens
ccaaacgacgggggaaccaggcgcacaggaaagagacacaaaaaccggaagggaggacccaaaaagga

SEQ ID NO: 1881 - RNA, 82 nt, Homo sapiens
gcccgcaccgccccccccaccaggcaccagccggggaaaggagcgcagcgcccgggcggaggagcagaaaacccaacacgac

SEQ ID NO: 1882 - RNA, 70 nt, Homo sapiens
agaagaggacgcggagacaagagacggagcgcgccccaccgcggccgccggggacacagagcccccgggg

SEQ ID NO: 1883 - RNA, 75 nt, Homo sapiens
ccacgcgcgcgcagcgcgcggagcccggcccgacggcagccggcaggcagggaagaagagagggcgaaggaggcc

SEQ ID NO: 1884 - RNA, 71 nt, Homo sapiens
cccagccggagccccagacaacccggacggccggccaaacgcaagccccggggcagagacacaggacaccc

SEQ ID NO: 1885 - RNA, 88 nt, Homo sapiens
ggcggacagcggggcccgcggaaaacagcaaagaacagcgaacgacaagaggagaggaagaagagaagaagaggaaacgggaagaaac

SEQ ID NO: 1886 - RNA, 78 nt, Homo sapiens
aaccagaggagccagcaacaccacgccaaacagaagccagaacgcggacccccgcagcaggcgacccacaacggggac

SEQ ID NO: 1887 - RNA, 66 nt, Homo sapiens
cacaccggcgggccagcaggcaggccgaaccagggggagccaccccgcggcgcaacaggagacgaa

SEQ ID NO: 1888 - RNA, 67 nt, Homo sapiens
cccaaccgaagaaaacaaggaaagccagcccgacaccggacaacaacgccagcacgcagaaggcaag

SEQ ID NO: 1889 - RNA, 66 nt, Homo sapiens
caagagcgggcaccaggaagcgaaggcggagaacggcagcagccaccaccaacagccacaagggca

SEQ ID NO: 1890 - RNA, 70 nt, Homo sapiens
aaaggggcgggcggcgacggcggagggcccggacagggggacagcagcaccagaaccaaaaagccacaac

SEQ ID NO: 1891 - RNA, 63 nt, Homo sapiens
gcgccggggaaacagaagcaggcacacagacacacccaaacaggaaccggcaccaggggggcg

SEQ ID NO: 1892 - RNA, 79 nt, Homo sapiens
gcgagggaaggcggcgaccgagccggagcgccgacgaccaagaggcgaagagggccaagaccgccagcagagaggcgag

SEQ ID NO: 1893 - RNA, 56 nt, Homo sapiens
gcgcgggcccgggccaggccgccgccgagccgagcggaagcccgcgggccccgcag

SEQ ID NO: 1894 - RNA, 65 nt, Homo sapiens
cccgcgggcacaggaccccacacagagacaagccaccagcagaaccaaaggcagacccagaagag

SEQ ID NO: 1895 - RNA, 69 nt, Homo sapiens
aagaaccgagaagacccggaagcgacggggcgcagcacacaagaaggcgacaacgaagcagacggacac

SEQ ID NO: 1896 - RNA, 74 nt, Homo sapiens
gacccgcgcccccggacggccacgagaccgggaggaagcgaaccagaggcccaacaagagagggagacacacca

SEQ ID NO: 1897 - RNA, 78 nt, Homo sapiens
cggccggagaggagcgacgcgagggccgagacggcgcggcaagacagggcccggggcacagcaaggggaacagaacac

SEQ ID NO: 1898 - RNA, 83 nt, Homo sapiens
agcccaccagaaacacagccagacacggcacccacaagagcaccaggacaaccccaccaccacccagagccagcccagcacag

SEQ ID NO: 1899 - RNA, 76 nt, Homo sapiens
cacgcaccagacgcaaacgcgaaaaggagggcgaagaaaaaagagggcccaaggaggcaaaggagagacggaaagc

SEQ ID NO: 1900 - RNA, 72 nt, Homo sapiens
gagagccaggacagccacaccccaagaggcagaacagacagacagaagagccgaaaaaacacaaccacccga

SEQ ID NO: 1901 - RNA, 77 nt, Homo sapiens
cgaaaagcagaagacaaccaaaacaaacgcaccccacgagccagcaggccaagggaaaagcagcggaaaaccagccc

SEQ ID NO: 1902 - RNA, 100 nt, Homo sapiens
aaagcaagaaagcaggccaggccggaggaacggagcaccgcgcaaaaaaacgggagaaccggggcaagagacggcagacaaacacagccgagagaaggca

SEQ ID NO: 1903 - RNA, 86 nt, Homo sapiens
gcaaggagaagagaaagcacaaagcaggagaccccccccagggaacgcggccaagccagagcgaggcaagagagaggcacaagacc

SEQ ID NO: 1904 - RNA, 76 nt, Homo sapiens
gccagcaacgcgggcagaggagcggagcggagaagccaagagagggcaaaaaacacagacaccggcgaacaacaag

SEQ ID NO: 1905 - RNA, 73 nt, Homo sapiens
gaaggcagaggcgggaagccggcgcgcaccaggcggaacgaggaaacaccccgggcggaggggcgaagaagga

SEQ ID NO: 1906 - RNA, 92 nt, Homo sapiens
gccggaggaccccaaccgcccaggaaacagcccaaaaccgccgcgcgcgaccaaaggccagcaacagaagaaagcaagcaccggggaaagcg

SEQ ID NO: 1907 - RNA, 79 nt, Homo sapiens
gagaagagcaagacagggggccgggaaacagggacacacccagaagggcagaaaagaaaaggccaaacccacccacagc

SEQ ID NO: 1908 - RNA, 79 nt, Homo sapiens
ccccgagcggggggcgacccgcagggcgcagcccaggggcgagagaagcagccggcacccgggccggccacagagaacc

SEQ ID NO: 1909 - RNA, 33 nt, Homo sapiens
aaccgccaccacccacgaagaaggaaacagaac

SEQ ID NO: 1910 - RNA, 76 nt, Homo sapiens
ccaaccgcgccagcagacgggcaccgggacagagcccggccgaaaaggaaaaggagccagggcggaccccgcggga

SEQ ID NO: 1911 - RNA, 56 nt, Homo sapiens
cggcgacgccccaggggaaaacccccgggaccaggccaggagggggccacaccgaa

SEQ ID NO: 1912 - RNA, 81 nt, Homo sapiens
agggaaagggaaggagaaggagggacgcaggcgcaggccaggaaaaaaaggaacggaaccgaacagaagaaagagaagacc

SEQ ID NO: 1913 - RNA, 33 nt, Homo sapiens
ggagagagaccaacaaggccgaagcacgaaaaa

SEQ ID NO: 1914 - RNA, 82 nt, Homo sapiens
gaacaagaagcagggaaggaacgaaagcggagagcgagagcagcggggcccaggaaaggccgggcaggggcagagccgcgca

SEQ ID NO: 1915 - RNA, 63 nt, Homo sapiens
gcgggggaccaacgagaaagaacagcgagaaggcaaagcccgcagagcaagccgggaagaagg

SEQ ID NO: 1916 - RNA, 45 nt, Homo sapiens
gcagccaggagagcaacggaaaggcagagagaaagaccagcgaga

SEQ ID NO: 1917 - RNA, 90 nt, Homo sapiens
ggcaagcgccagcaagggacagccccgaggcccgagagagaagaaaacccgcagcccaaagggcagaagaagaagaagacgcaagacggc

SEQ ID NO: 1918 - RNA, 58 nt, Homo sapiens
gcaacaggacacagcccgggcgccggcgagaacgagcgcagcagggcagaaaagaaca

SEQ ID NO: 1919 - RNA, 57 nt, Homo sapiens
acagcggcccggccccccggacagacgccgacgcccagcgcagaaaggccagacagg

SEQ ID NO: 1920 - RNA, 77 nt, Homo sapiens
aagaacccggagcgagaaccgagagcgaagcggggccccaggacgcaccaaagaagacagacacgcagaaaaggagc

SEQ ID NO: 1921 - RNA, 56 nt, Homo sapiens
ccaccacacgccaccgcaaggcgcaacaggacccgaacacggaagaaagacacgca

SEQ ID NO: 1922 - RNA, 81 nt, Homo sapiens
cgcgcggcgcgggcacggagcaggcgccgccggcgccaagccgcccaaagaccaacagggcagcagacccccccagcccca

SEQ ID NO: 1923 - RNA, 74 nt, Homo sapiens
agaccaggaggcaaaagacagaacagggaaaagggaagagagcaagaaccacaaggacacgccagccaagccgc

SEQ ID NO: 1924 - RNA, 77 nt, Homo sapiens
gaccgcggcccgacgaggaagcacgaaagcaccaacgagacccgccacacgagcggccgccacccccgcagagccgg

SEQ ID NO: 1925 - RNA, 78 nt, Homo sapiens
gggcccgaggagagcgcggagccgcgcccccggccccgccacaagaagagggcagacaggagggaaagcacaccagca

SEQ ID NO: 1926 - RNA, 81 nt, Homo sapiens
cccagccaaacaaaaaggaaaggagacaagcagagacgaaccaggcaaagcgccaggcacacgccacaggccaacaaagcc

SEQ ID NO: 1927 - RNA, 84 nt, Homo sapiens
cgaggagaggaggagacccaccgccaccccccacccccccagcccaccgagaacgaagacgccggaggcgcgggcaagaccccg

SEQ ID NO: 1928 - RNA, 73 nt, Homo sapiens
aggcaaaaaaggaagaggccagaaaccacccaggccagagaggaccgagaggaccggcagacagagagggccg

SEQ ID NO: 1929 - RNA, 79 nt, Homo sapiens
gaggaaagagaggaagggacaacccgacaaccaggccgacagaaggacagagcaccggagagagcaggaacaagcacgg

SEQ ID NO: 1930 - RNA, 53 nt, Homo sapiens
ccgacgccacgacagccaggacgcggagcgagaaccccggcaggaagccggga

SEQ ID NO: 1931 - RNA, 75 nt, Homo sapiens
gcgggcccgcgagaagcaagcggaacccgagggcgggccagccaaagaggccagaagaggaaggggagaaaagac

SEQ ID NO: 1932 - RNA, 86 nt, Homo sapiens
gaccaagaacagccggacgccagcaggccagccggccccgcccacacgaccccgggggagcggcagcagagaaagaagccaacaca

SEQ ID NO: 1933 - RNA, 71 nt, Homo sapiens
caaaaagagcccaaaaccggcgcccagagcacggccccaagaccgaaagaaccgcacagagcaggcccacc

SEQ ID NO: 1934 - RNA, 76 nt, Homo sapiens
cggcggaacgggcagggaaaccggagcggcagagcagggcaacgcagaggggagcccagcacccggggcacaagag

SEQ ID NO: 1935 - RNA, 50 nt, Homo sapiens
ccgccccaccggcggaacccagcaagggcaccaggccaccggaacccaaa

SEQ ID NO: 1936 - RNA, 67 nt, Homo sapiens
cggccgcagccgccacccaggggagcacgacacccgccacgagcggaggaccagaagaagccccccc

SEQ ID NO: 1937 - RNA, 67 nt, Homo sapiens
cggcccgcgccgcccaggccccgcaggaggcacggacaaaacgcagggccagcaaacccgggcccaa

SEQ ID NO: 1938 - RNA, 63 nt, Homo sapiens
ggagccggccgacgcgggcgcgagggcagaaccggggagagaaggcgcgcaggagagcgcaga

SEQ ID NO: 1939 - RNA, 79 nt, Homo sapiens
ccgaaaccacgggaagcagaaccgagggccaaggacaaaggacaacaaggcaggcggggagcagaccggagggccccac

SEQ ID NO: 1940 - RNA, 56 nt, Homo sapiens
aaaaacgccagacacagcggccaggcacgaacgagcaggagcagcaaccgaagcga

SEQ ID NO: 1941 - RNA, 84 nt, Homo sapiens
cgggccggagcccagcagcggggagccccgagaacgccccagcggggagacacagaagggcaacagggcagcggccaaccgggc

SEQ ID NO: 1942 - RNA, 58 nt, Homo sapiens
accaaaagaaagggcacaagaaagccaaggacacgcaggacgaagaaggaggagagcc

SEQ ID NO: 1943 - RNA, 71 nt, Homo sapiens
agagaaaaggggcgggcggcgacggcggagggcccggggcgaagacagagacgccacaggaaaggaagccc

SEQ ID NO: 1944 - RNA, 73 nt, Homo sapiens
gcaaaccccggaaccaggaaaaacaggcggaccagaacgacccccagggcagccagagagacacagcccacga

SEQ ID NO: 1945 - RNA, 38 nt, Homo sapiens
cccaccgcgccgaaccagaaggacccagaccggaacgg

SEQ ID NO: 1946 - RNA, 91 nt, Homo sapiens
ggaaaaagaagcccaagaccagaaaaacaaggaaaagaggacaagaagagggcaccgccgaggcagacccgaagccagaaacgcacccaag

SEQ ID NO: 1947 - RNA, 62 nt, Homo sapiens
caacgcagaagcccggggaaacgcaaacacaggaggacacaaccagcgaggccaccccaccc

SEQ ID NO: 1948 - RNA, 89 nt, Homo sapiens
aagccggagaaagaggaggcggaagccggccaaaggggacaaggggaaccggcccggcagccggcccccggggcccgggccccgggcgg

SEQ ID NO: 1949 - RNA, 81 nt, Homo sapiens
ggcgggagagcgaaccccgggacacgcaggaacggcccagcacaagaccgcgacagggaggcccagagcagagaaacgcac

SEQ ID NO: 1950 - RNA, 72 nt, Homo sapiens
cgacccagaaggcagaaaccgcagagagcaaggcgaccggcccgaggaccgccgcacgaccaaacgcagaac

SEQ ID NO: 1951 - RNA, 82 nt, Homo sapiens
aagaaagaacagacccacccgcaagaacccagggcagaaaggaggcgacagacacagcaccggccccggcagcgggacgcag

SEQ ID NO: 1952 - RNA, 77 nt, Homo sapiens
aaaggagaaagagaaggacaccaagacaggcaggaccggaaggaagaaacaagcgagaggaagcacagcagaggagg

SEQ ID NO: 1953 - RNA, 70 nt, Homo sapiens
ccgagcaaaaaagaaaaggccccaacagagccccagcaagggccgggggcaagacggagagaacggccca

SEQ ID NO: 1954 - RNA, 63 nt, Homo sapiens
agaggaggcgggagaggagagaaaggcggaagacgagcagggaaaacaggcgagccggccgag

SEQ ID NO: 1955 - RNA, 40 nt, Homo sapiens
acagagaccaagccaaacccccagagggacggggcaccag

SEQ ID NO: 1956 - RNA, 76 nt, Homo sapiens
gcgcccggagcggccgccccagcgcacccggaaacaagccacgaaggagagaaaaccagcagcagcgcagcagaga

SEQ ID NO: 1957 - RNA, 71 nt, Homo sapiens
aaagaagcaacagaaagaggggcacaggagccagcaggccaagggaaaagcagcggaaaaccagcccaaaa

SEQ ID NO: 1958 - RNA, 64 nt, Homo sapiens
cggcaagggagagcccacggggcgggacgggacgggggacaggagaagcagccagacccagagg

SEQ ID NO: 1959 - RNA, 33 nt, Homo sapiens
ccaggcggcccggacaggggaagcgcgagaaac

SEQ ID NO: 1960 - RNA, 73 nt, Homo sapiens
ggagagagccacagccaggaagcgagagaaaagaagaaggcacaaaggaagccaaggagccaaaaaacccggg

SEQ ID NO: 1961 - RNA, 112 nt, Homo sapiens
ccggcccgggcgggcgcccgccggcacgccgccagccccgggggccacgagcggaggcggagaagaacccaaccaaaaccaggcggcaaccccggggcgacaaaaagggaac

SEQ ID NO: 1962 - RNA, 78 nt, Homo sapiens
gagggcgagcgaggaggaggcggagcggggcccgacggggaagaagacggacagaagcaacaaaggaaaaacggggag

SEQ ID NO: 1963 - RNA, 72 nt, Homo sapiens
aagcccgggccaagcgggaggcgccgcagggagcacgcgggcaggcagcccagcaaacccaggcaagaacgg

SEQ ID NO: 1964 - RNA, 85 nt, Homo sapiens
cagaggcgaccccccaggaccccaaccagcgcaccgggcagaagcccagggacaaggggaagggaagcggaaacggcgcagaacg

SEQ ID NO: 1965 - RNA, 117 nt, Homo sapiens
gacaaaaaggagcacgacggacagcccaggaggggggaacaggggagacccaagcaaagccaaacacacaggaacgccagaccccagccgagggaggcaacagcaaagggacagcca

SEQ ID NO: 1966 - RNA, 41 nt, Homo sapiens
cgcgccgcgcagcgcggagcggaaacaagaaaaggcacacc

SEQ ID NO: 1967 - RNA, 80 nt, Homo sapiens
gggaaaacccccgggaccagggcagagcggcgggaaaccaccaacaacacccccaaaccaaaacagccggaagcgggcag

SEQ ID NO: 1968 - RNA, 78 nt, Homo sapiens
ccacgaacaaagagagagcagcacccggaaagagaaaccccaagccaaaggaaggagaaacgcagacaccggaaagga

SEQ ID NO: 1969 - RNA, 78 nt, Homo sapiens
gccacacaagcaccagaagccagaaggaaaagccaggagcgcggagagagcacacagccgaggagggcaaaacaaaag

SEQ ID NO: 1970 - RNA, 71 nt, Homo sapiens
acacgcggagaaagcggcggccaagggccgcaacgggagcgcccgccaagaggagggcaaaagaaacaacc

SEQ ID NO: 1971 - RNA, 79 nt, Homo sapiens
acccgagcacagagacgaagaggaccaggagcaaacagaaaaaacacagaacccagaacaaggaaaggaggaggccccc

SEQ ID NO: 1972 - RNA, 39 nt, Homo sapiens
ggcaacccaccccaacccaaaggcagagaggggcgccag

SEQ ID NO: 1973 - RNA, 82 nt, Homo sapiens
cggcccagcacccaccagcggggacggaaagagagccgcagcgcagaacaagggaaaaaagggcaaaaagggcaaaaaagac

SEQ ID NO: 1974 - RNA, 75 nt, Homo sapiens
gaggcaccggaacagacgcaggaaggaaaaggggaagaaggagaccagaaaagcagagcagacagcgacaagaag

SEQ ID NO: 1975 - RNA, 70 nt, Homo sapiens
agggcgccaccacaagccaggacagggggacgagccaccaaaggaggacaaggggagcggggaaagggga

SEQ ID NO: 1976 - RNA, 42 nt, Homo sapiens
gacaaggacgcaaagaaggcagacggcgccccgccagcgagc

SEQ ID NO: 1977 - RNA, 83 nt, Homo sapiens
gcgaggacgcgcgcggccgcccgggagggcaagacccaggggggacaagacaggggccggcagagagagccagcgaggaggcc

SEQ ID NO: 1978 - RNA, 89 nt, Homo sapiens
cacgggcaaggcggagaggacggagcggcgagcccccgcggcgacagcagggagagggccaaaggaacgggacagcacggcacacaccc

SEQ ID NO: 1979 - RNA, 56 nt, Homo sapiens
cgcggacggggagcaccgaaagccaggaaagacaacgaagagaggaaagaagcgga

SEQ ID NO: 1980 - RNA, 82 nt, Homo sapiens
ggcagaccaacaagaggacccaggagaaacgccccaaaagccccccccagcgccgaaggcccgacccagcagcccggcccgg

SEQ ID NO: 1981 - RNA, 76 nt, Homo sapiens
accaccacaaagaaccaaaaaccaggaccaaaaaggaagggaccccaaaggagcacgcagccggaaacccaggacg

SEQ ID NO: 1982 - RNA, 66 nt, Homo sapiens
ggacacgagcgcggggacggacagaggaagcagaagcagcaaagaggccgggagccaacaagaccc

SEQ ID NO: 1983 - RNA, 84 nt, Homo sapiens
gaagaaacagaacacccaagaaggcaaagcgcgaaaacccaaagcaaacagagcagaccaaccagcagccaagcaacccagcag

SEQ ID NO: 1984 - RNA, 58 nt, Homo sapiens
ggacgcgcacgcgaggaaaacgacaaagagagacaccagagccagcagcccgccagaa

SEQ ID NO: 1985 - RNA, 66 nt, Homo sapiens
agacccggggacccccgacgccaggcagcgcccccaaacggacacaggaacgccacaagaaacaac

SEQ ID NO: 1986 - RNA, 72 nt, Homo sapiens
ggaaccgcccgcacggggacccgcaaagaacaggccggcacaaaagggcgagccaagacaagcgcgcacgcg

SEQ ID NO: 1987 - RNA, 76 nt, Homo sapiens
cagaaagaagcacgggacacagaagagcagcccgccgacaaggagaaaaccggaagagaaaggccgggaagcagga

SEQ ID NO: 1988 - RNA, 72 nt, Homo sapiens
cggccgaagaaagaagcagggaccgacacaagaagcagccagaacagacgggaaaagaaacccaccacaaaa

SEQ ID NO: 1989 - RNA, 92 nt, Homo sapiens
gaggaggcgagcggacgaggagggggcaggaggccggcgcgggggaggaggaaccccagaaagagcccagggaacgagccaccaccgcagac

SEQ ID NO: 1990 - RNA, 74 nt, Homo sapiens
agaaggcaaaggaccagaccgagccagagggagcgaacgcagggaacgacgaagcgggacgggggcggccccgg

SEQ ID NO: 1991 - RNA, 73 nt, Homo sapiens
gcaagaggagcccggaagaaccagaaagcacggacggcgaggacacagcagcacgggaaacccagacgacaag

SEQ ID NO: 1992 - RNA, 63 nt, Homo sapiens
gacgaggcggacgacgaccggccaacaaggcacccgagcgaacgggaagccacggcaggcccc

SEQ ID NO: 1993 - RNA, 69 nt, Homo sapiens
ccaaacgaacccaaaggccccaacaagaagagacaggggaaacaagaagcaggaaaaaagaacaagaac

SEQ ID NO: 1994 - RNA, 70 nt, Homo sapiens
ccagccagagacagccacaaagggaagcaagagaaaaagaacaacgcgaagaccagaagagcagccaggg

SEQ ID NO: 1995 - RNA, 84 nt, Homo sapiens
ccggacccccgggaccgggcacggcggagcaggacaaccaagcgccccaggccacacgaagacccaggacccagccaaagcccc

SEQ ID NO: 1996 - RNA, 108 nt, Homo sapiens
gccaccaccacgccagccgcaccagccgcccaagccgcacagccgcggcggcagcagcaggagagaccccaagaagaagcggaagaggagccgcggaaccaagacaca

SEQ ID NO: 1997 - RNA, 76 nt, Homo sapiens
accgagcaggcgagaccacgggaaacacaagaccggaggccacggacccgcgaagagcgacggccccagggacaag

SEQ ID NO: 1998 - RNA, 79 nt, Homo sapiens
gccagcggccggccaaggacgcgaggccgaaacacaagcaaggaacacaaagaagaaagaaaggaacggaaggaagaaa

SEQ ID NO: 1999 - RNA, 79 nt, Homo sapiens
gcaggacgaaagacgaagcgacggagcacaggcgagagggcaaaagaaggcacacaacgggacgccggaggaggcggag

SEQ ID NO: 2000 - RNA, 38 nt, Homo sapiens
gcagccccagaaacagaacaacaaaaccgcacggagac

SEQ ID NO: 2001 - RNA, 74 nt, Homo sapiens
gcgcgcccggcacggcaccaggagaagaagaaagggccacccggcagaagacagaccgcagcgccagcacaagc

SEQ ID NO: 2002 - RNA, 88 nt, Homo sapiens
accgaccgcgccaggccacccacgaccaggccggcaggcgcgaagcgcgcgggcaaggagggcgcggaggagagggccgaggcagaca

SEQ ID NO: 2003 - RNA, 75 nt, Homo sapiens
ccgagagccgcccgggccagcggccgcgcacccccggccggaggcaccagcgccccaacccgcccagccagccac

SEQ ID NO: 2004 - RNA, 62 nt, Homo sapiens
ggaaccgaagggagcaaaagggacagcacagcagagggcccaggaacccgaagcgggcgagc

SEQ ID NO: 2005 - RNA, 75 nt, Homo sapiens
ccaaaaacgccgaaacggaaagcccaagaggagacgacggcgaaccgaccaagaacaacacccagagggccagga

SEQ ID NO: 2006 - RNA, 77 nt, Homo sapiens
cacgaccgcagccaccgaaaaggcaaaaaggcgagcacacagagaggggaagggcagcagcagcagagaaccaaacc

SEQ ID NO: 2007 - RNA, 53 nt, Homo sapiens
gccaagggcggagcaaacacaacagcgggcaacggaccccggagaccaagcac

SEQ ID NO: 2008 - RNA, 69 nt, Homo sapiens
gggcggcccaggccgggccccacccccggggccgggggcccagagcacgggaaggcagcaacaaccacc

SEQ ID NO: 2009 - RNA, 91 nt, Homo sapiens
gcaacaaagagagcgcgggccgcaccgccgcgccccgcaccccccgagcagcccggggaccagcacgcagggaaagcaggcaggagggaga

SEQ ID NO: 2010 - RNA, 49 nt, Homo sapiens
gggacccagcgcgccacacccaagcaggccagaccagaaccggcgcaac

SEQ ID NO: 2011 - RNA, 72 nt, Homo sapiens
ggaggcgaaagcggaacgagcaaccaccgaaacgggcgaaaaagaagaacagcaaaacacgaaaggcaaaga

SEQ ID NO: 2012 - RNA, 82 nt, Homo sapiens
gggacccgcgaaagcggggcacaggcgggcacgcgcccagagggggacggaaagcaagccgcagaaccaacagcaccccagg

SEQ ID NO: 2013 - RNA, 96 nt, Homo sapiens
gagaggcaccgggacggaccgagaccggaccgagagcggaccgagagcgcgaaacgcacgagaaggaccagaggacgcaccagaagacagggcaac

SEQ ID NO: 2014 - RNA, 86 nt, Homo sapiens
gccgagcgcagcccccaaagccgcgcgagaggagccgggacacgccagcgcgggcccaggaagaaaacaggcgaaacaaggcaccc

SEQ ID NO: 2015 - RNA, 76 nt, Homo sapiens
agccggggccaaaagaaaggagggccccgcggaagggcagcgaaggacccagagcagccaacccgcagccggccca

SEQ ID NO: 2016 - RNA, 64 nt, Homo sapiens
cccacagagaggaccggagggggaaccagcccgggagcaaacacccgggaaggagcaacccccg

SEQ ID NO: 2017 - RNA, 74 nt, Homo sapiens
ggggcgcgcggcgcgcagcgcacgcccgggcgcggcgcaaggaccccaggggcgcggacgaagacgccggaagc

SEQ ID NO: 2018 - RNA, 76 nt, Homo sapiens
gcgagcgaggacgaggaacggcggaccagagaaggcagaagcgcacaagccccagacaaagcaagaaagacacacc

SEQ ID NO: 2019 - RNA, 90 nt, Homo sapiens
gaagaaaaggagaaggaaagcgaaggggaaggcgccgaagaggacgaagaaaaggacccaagggggcaaaggcggaaacagcagaggaca

SEQ ID NO: 2020 - RNA, 67 nt, Homo sapiens
aggcgcacgaacagaggcacgggaaaaaacgcagcaaacaccaggagaaaccccagcacaagagaaa

SEQ ID NO: 2021 - RNA, 82 nt, Homo sapiens
aagccccaaacgcgccaacggacccaaaaggcggaaacgacgccaaaccaggagagcaacaacagaacaacaaacacgccca

SEQ ID NO: 2022 - RNA, 57 nt, Homo sapiens
gaaagggcccaccgcaaggacggagaaggggcgacagaaaacgggcagggcagccac

SEQ ID NO: 2023 - RNA, 79 nt, Homo sapiens
agagcgcccggccgcggccagcggagcccgggcggggcaggagccggccaaggaagcgacagccaggaccaggcacccg

SEQ ID NO: 2024 - RNA, 69 nt, Homo sapiens
ggacaccggaagcgggaaagagacagaagagcagcacaggggaagagacagaaggcaggacagacaaga

SEQ ID NO: 2025 - RNA, 87 nt, Homo sapiens
ggcacccggacagccggaccccggaccccccggaccccccggacccccggacccccggcccggaggaggaaaagcgagacacagcag

SEQ ID NO: 2026 - RNA, 70 nt, Homo sapiens
ggaggaacaaaggcggaaacgaaggggaggacacagaagccggcagcggaggccggcagaagacagagca

SEQ ID NO: 2027 - RNA, 72 nt, Homo sapiens
gagaggagcagccagcagcacccaccacacagggaacgaggaccagagaagacacacaacaaccccacggag

SEQ ID NO: 2028 - RNA, 59 nt, Homo sapiens
cgagaaccggagggcaccggaggacaacacagagaaccggaaagaacaagccaccaaaa

SEQ ID NO: 2029 - RNA, 62 nt, Homo sapiens
cgcgggggcggggacggcgccgagaggacgggcccagggaacacgggagccccggaccaccg

SEQ ID NO: 2030 - RNA, 59 nt, Homo sapiens
ggccccaagggaggcgacggagaagaagcaaggggcaaaacaggcagcaaggcccgacg

SEQ ID NO: 2031 - RNA, 31 nt, Homo sapiens
aagaacccacagaggacccaaagacaggacc

SEQ ID NO: 2032 - RNA, 75 nt, Homo sapiens
aacaggacccacaacaaaggagaggcacagaccaacgggagaacacggagaagaccaagcgaaagccgcccacga

SEQ ID NO: 2033 - RNA, 80 nt, Homo sapiens
agggcccccagcggcggagacagacgggaacccccgggaccagggcccgcagagcgccaggaaaggggaccaggcaggac

SEQ ID NO: 2034 - RNA, 73 nt, Homo sapiens
gaggacacaggcaccagacgggacagaaaaccagagggagggagaaggacccagaaaggaggcacaggagcca

SEQ ID NO: 2035 - RNA, 72 nt, Homo sapiens
gaacgagcaaccgaacacaaggacagaagagggccgggaagccccaacagaagagagaggccaaagggccaa

SEQ ID NO: 2036 - RNA, 70 nt, Homo sapiens
aacggccccggaggacagacccggcagcccaaggagcaggggccagcagccgcggaggcacggaacagag

SEQ ID NO: 2037 - RNA, 71 nt, Homo sapiens
ccacccagcaaccgcccaccggccggcgccagaggcccggacgacagcccccagcccaggaccgggggccg

SEQ ID NO: 2038 - RNA, 75 nt, Homo sapiens
gcccacgcgcggccaagaacccggccggaaacggaggggacggccaagacgcccccccgcccccacccaggccac

SEQ ID NO: 2039 - RNA, 64 nt, Homo sapiens
ggaaaaaccagccgcacgccaaggaaacagagacagggaaggcccgcgaagaagcacggggcgg

SEQ ID NO: 2040 - RNA, 84 nt, Homo sapiens
ccgcgcagccgcgcagccccacgcaacgggcccgcgcgcaggagacccccaggcccaggcgggaagcaggggacgaccccggaa

SEQ ID NO: 2041 - RNA, 67 nt, Homo sapiens
acaagagagaaaaggacaagccaaggaacccaggcgccaggccagcaaaggcaaccgacaaacagac

SEQ ID NO: 2042 - RNA, 84 nt, Homo sapiens
aaggcacagccccagcagcggcagaagaagcaacacgcaaacgagagcgaggcaagaaaaacagggggccgggggaggcagcgg

SEQ ID NO: 2043 - RNA, 72 nt, Homo sapiens
accaagcacccgcggggagagacggcaagcaagcggcgaagagacaacagccacaagggacaaaaggaagac

SEQ ID NO: 2044 - RNA, 83 nt, Homo sapiens
ccgcagccggcgcggggacgcgcgcggccgagaccggccgcagcgccgccgccgccgccagaagcgcacaccacaacagcaca

SEQ ID NO: 2045 - RNA, 72 nt, Homo sapiens
cagagacaaaagagcaaagagacaccgcacccaaggaaaagcgacacaccaggcgccaagccacaccagccg

SEQ ID NO: 2046 - RNA, 69 nt, Homo sapiens
gccccggaaaaagagaacggcaaagaaagcaacgggaagcggcaggagcaaaacggaccaaggagaaca

SEQ ID NO: 2047 - RNA, 77 nt, Homo sapiens
gagagaaacaaaagcgccagagccaagaacgaaagcgagccgaccacggagcggaacccagaggagacaaacaagaa

SEQ ID NO: 2048 - RNA, 78 nt, Homo sapiens
acaagcaaacgaggcaccgggagacaaaaagcaagggggacaaagaaaagaaaccgacccggaaaagagaagacaaac

SEQ ID NO: 2049 - RNA, 72 nt, Homo sapiens
cgcgccccccccagggccccggcgccgcccccgacgcgccagggaggccgacaccaacacgaccgccggcgc

SEQ ID NO: 2050 - RNA, 77 nt, Homo sapiens
gacacacagcacaaacacaccaaagcgaacccgggaagaagggaaagaaaggcaaagcgagcaagagggagaccaac

SEQ ID NO: 2051 - RNA, 74 nt, Homo sapiens
ccagaaggaaagcaacaacagcacaacggacacagagggagcccaccggaacagagaggacagaaagcagcaac

SEQ ID NO: 2052 - RNA, 80 nt, Homo sapiens
cgagaaggaccgccgacccgcccaccacgccagcagcgcgacggcaggccccaggccaggccagacgggcgccagggcgg

SEQ ID NO: 2053 - RNA, 84 nt, Homo sapiens
agaaggaaccccgaccgcagcccccgggcacgaccccggacacgggcaggcaggccaagaagcgagagaagaaaaacagaaaaa

SEQ ID NO: 2054 - RNA, 72 nt, Homo sapiens
gccgagaaggccgggcgccgagccggaccggagagcacaagccggccacggaagaaaacaccggagcccaag

SEQ ID NO: 2055 - RNA, 101 nt, Homo sapiens
ccaaaaaaggagcggcgaacggggggcagcaggagccccagccgaggagaagaccaggagacgcccgcaccaaaaaccgaacagcgaacagaacacccaaa

SEQ ID NO: 2056 - RNA, 38 nt, Homo sapiens
cgccaccacgccgcggaggcggaggagggcgcaacgga

SEQ ID NO: 2057 - RNA, 82 nt, Homo sapiens
ggccccggcgcaggcgcccgacgcccgggcagagggagccggaagagcgagcccggaaaaccaacggcccggaggaccacag

SEQ ID NO: 2058 - RNA, 66 nt, Homo sapiens
ggcgcggagagggggcgcgagcgggggccacaaaaccgaggggaaagagaccgggccgacgggcgg

SEQ ID NO: 2059 - RNA, 83 nt, Homo sapiens
agcaggcgaccaggaggaacagaccggcggccgacgggacagggccggccacgccagcggaaggcgcgcaagacacccccgga

SEQ ID NO: 2060 - RNA, 48 nt, Homo sapiens
gccggccgagaaggcagaggcgggaaccgagagacacaggggcacaag

SEQ ID NO: 2061 - RNA, 72 nt, Homo sapiens
accaaggacagagcaggaccaaaagaagcaaaaacgaaaacaaacggaagagagggcagcaagaaagaacaa

SEQ ID NO: 2062 - RNA, 64 nt, Homo sapiens
ccacgcgcggaaggcagcgcccagcagcgcagggagccaaggagccagcaggccgggaaaaggc

SEQ ID NO: 2063 - RNA, 49 nt, Homo sapiens
accaggccgaagggggccgggaaagcggggcagcaaggcaaggaaaaaa

SEQ ID NO: 2064 - RNA, 67 nt, Homo sapiens
caacggagacagcacgcacgaaacagaaacaggcacccacaacgcgggaacggggacagccggaccc

SEQ ID NO: 2065 - RNA, 80 nt, Homo sapiens
ccaaccagggaggccgcgcccgcccaggaggggggacgacgagaccaagccacgcgcacggccgcagcagacacgcaaac

SEQ ID NO: 2066 - RNA, 64 nt, Homo sapiens
gaaacgggaaagcagaaaagcaagccacaggcagaaggaaccgcggagagacgacggacgggaa

SEQ ID NO: 2067 - RNA, 81 nt, Homo sapiens
accgccgccgccggagccggcggccgcgacccagccgcccgccgcccgccggggcagaaacaacggcagaaagagagcccg

SEQ ID NO: 2068 - RNA, 64 nt, Homo sapiens
gcacaggcagccgccagggaggacccggccagaggcagagagggcccagaggagacaggggaac

SEQ ID NO: 2069 - RNA, 113 nt, Homo sapiens
gccagcaaacgcacacgacagcaacaagacacggagcaaggaggaaaacacacgggccgcccaaaacccagaacacggggcccaaacgcagagaaccacgccgggacacgggg

SEQ ID NO: 2070 - RNA, 77 nt, Homo sapiens
ggccggcgaaaggagcgggccggcaagggaggccaaaggggaaccaggaaaaagccaccaggccccccggagcagaa

SEQ ID NO: 2071 - RNA, 92 nt, Homo sapiens
ccacggagaagggcaggcacggcgccagcccagggccacccccaaccaggaccaaagacgaccaccaaagccagcccccagaacacgccgac

SEQ ID NO: 2072 - RNA, 76 nt, Homo sapiens
gcaggagcagcccaggaagcgagagcgaagccgccacccaaaccagcaaaccaggaagaagagagggcgaaggagg

SEQ ID NO: 2073 - RNA, 69 nt, Homo sapiens
gggaacagagaaacaagcagcaccacagcacagcagcaccacagagcaaaaaagcaggaaacggaagag

SEQ ID NO: 2074 - RNA, 73 nt, Homo sapiens
gaaagaagggggcagaagagggaaacaagaggaggcgcccacgaagcccacccagaagagaaggacaaaccga

SEQ ID NO: 2075 - RNA, 80 nt, Homo sapiens
cccccagccggcgcacgaggcccgcccaggaagacaccagcgaccccgggccggagcacacccagcggccgggccgcccc

SEQ ID NO: 2076 - RNA, 80 nt, Homo sapiens
ccagagaccgaacagagagaacaagagacgcagccgcacagagggccccgaaccccccagcagaggaagaagagcaaaga

SEQ ID NO: 2077 - RNA, 60 nt, Homo sapiens
ccaagacagcagcaccaaggaccagcaacaacagaagaaggaagcaagagaagaaccagc

SEQ ID NO: 2078 - RNA, 58 nt, Homo sapiens
caaaagcaacaaagagggaaaccgagaggaagaaaggccagaacgaacggaagggcca

SEQ ID NO: 2079 - RNA, 82 nt, Homo sapiens
cgccggagccgacgccgggaacccgccgcgcgccgcgaccccaagcagccgggacaaccagaggcgaagagcccacccgcca

SEQ ID NO: 2080 - RNA, 73 nt, Homo sapiens
caaaagacccgaaaaaagcgagacccacacaagaaagggacgggcggagccaagagaagaggccaccgcgacc

SEQ ID NO: 2081 - RNA, 68 nt, Homo sapiens
ggaccggggcagaccaaacggcaagcagggaacgggcggggcaaacaggggagaagccgggggagaga

SEQ ID NO: 2082 - RNA, 86 nt, Homo sapiens
aaaggaagagaacccccagcacgccaccaaagacggaacccaacaagacccgccccaccaccggccgggaagaaaacgcagcggac

SEQ ID NO: 2083 - RNA, 71 nt, Homo sapiens
agcacaccccgggacagaggcagaggccagcacaaagcgagaaggagggagaagggcgcgagaaccaagag

SEQ ID NO: 2084 - RNA, 86 nt, Homo sapiens
acaagaggagacacaccccgacggcagccagacgggaagaagggagagaccgggaaaaccggaggccagcccacccagagaggccg

SEQ ID NO: 2085 - RNA, 84 nt, Homo sapiens
cacaagccacccgcccccagcccaggcaggagaacagcagggccgcacccagaaaaagcgaaggagaagcgcaaagaaaaagca

SEQ ID NO: 2086 - RNA, 58 nt, Homo sapiens
cggaggccaaaagcgcacagacaccgcgcggaccagacccgggccagccgccggaacc

SEQ ID NO: 2087 - RNA, 78 nt, Homo sapiens
cagaaaggaagcgcgggccagcgacccgcgccagcgcccagggggggaaaccaccggaagaggaacaggcccggccac

SEQ ID NO: 2088 - RNA, 77 nt, Homo sapiens
caaggacggcgcgagggggacgcccgagggccggccggcacagccgggcacagggaggcgaaaaccaagagacacgg

SEQ ID NO: 2089 - RNA, 72 nt, Homo sapiens
cggccgccgagcaaacagaggcgccaccacagagccacacgagacgagcggcgaaaggggggagaggcaggc

SEQ ID NO: 2090 - RNA, 73 nt, Homo sapiens
gcaccgcgccccgcacccgggagccgggaccggccagagaacgggcccaaagcacaagcgaccgccgaaggag

SEQ ID NO: 2091 - RNA, 77 nt, Homo sapiens
caggcaagggccaaggcgaccaagggaggccccgggaggccgaggcgggaggagccaagcgggaaaaggggcaccga

SEQ ID NO: 2092 - RNA, 112 nt, Homo sapiens
gcggcggcgaggcggacaggacggaagccgcgaacccccgaccgggagcccacggaaccaaaggcagacccagaagagcacaaaacagagaaaagggaagggcccggagagg

SEQ ID NO: 2093 - RNA, 63 nt, Homo sapiens
gccgacagccaggcccgggagaaggaggagggacacacgacaggcccgagagggaacccacac

SEQ ID NO: 2094 - RNA, 89 nt, Homo sapiens
ggaacgagacgaagacggaaccggagccgggcgggcagggacgcggcgccgagagccgacgccgacaccccaggccacgagccccaggc

SEQ ID NO: 2095 - RNA, 80 nt, Homo sapiens
cggcggccgccacaacagcacagccggcgacggcgcgaagggacaagcgaacaggagcgaggagaaaacaagcggacaaa

SEQ ID NO: 2096 - RNA, 70 nt, Homo sapiens
cgcggcggcccgcgcacagagagaacggacgagaccaacgcggaaaccagcaagaaaaccagcggcgcaa

SEQ ID NO: 2097 - RNA, 68 nt, Homo sapiens
ggccccaggcagagaaaacacccgagagcaccgccgagcggaccccaagaccggcacacaaagacagc

SEQ ID NO: 2098 - RNA, 58 nt, Homo sapiens
cgcgggaagaggcggcgccgccacccccccccagcaggaagacaaaaaggaccaagag

SEQ ID NO: 2099 - RNA, 92 nt, Homo sapiens
aggccaaagaggacgggacacgggccaagggagcgaaaagaacccccaaaaggacggaccaacagaagcaaaagccagagcagagaaaccac

SEQ ID NO: 2100 - RNA, 61 nt, Homo sapiens
gaaccaggggccgaaggcgacacacgagggccaagagcacagcagccccccagcaaacaaa

SEQ ID NO: 2101 - RNA, 71 nt, Homo sapiens
agaacagcaacagacggcggggccccccgggcagcccagaaccgggacaacccagcaaacaggccagaccc

SEQ ID NO: 2102 - RNA, 41 nt, Homo sapiens
ggcaccaggacaagcaaaggacggcggacaaggcccagaac

SEQ ID NO: 2103 - RNA, 66 nt, Homo sapiens
gagcgacaagcgccccgacggagcgccaggacggaacaagaacaggcgcacaaaaccggagaaagg

SEQ ID NO: 2104 - RNA, 37 nt, Homo sapiens
cccgggaacgggaacaggcgggaagaacaaagcaagc

SEQ ID NO: 2105 - RNA, 64 nt, Homo sapiens
agagaggaagcaaagcagggaaaagcacagggccaggaagcagagggacagccaggccagaaac

SEQ ID NO: 2106 - RNA, 72 nt, Homo sapiens
gaacaacagcgcagcgagccagagcgcagaaaggcgcacggaaccgagcaaaaagcacaagcagggggcgcc

SEQ ID NO: 2107 - RNA, 33 nt, Homo sapiens
acccaagagcagcggcagaggggaagcacaccc

SEQ ID NO: 2108 - RNA, 54 nt, Homo sapiens
agagcaacaaaacagagagcaggccccagcaccacaggggcagggcccagggac

SEQ ID NO: 2109 - RNA, 84 nt, Homo sapiens
gggcgccccacggacgaccaggacgaaggccggcggcaggcacacagcggcaggaaaagagcacagggagggagagaccaagaa

SEQ ID NO: 2110 - RNA, 50 nt, Homo sapiens
cagccccgagagcggaacagaaggagagagcacgaccaccgccgagagac

SEQ ID NO: 2111 - RNA, 92 nt, Homo sapiens
ggagcaagcagcgacgccagcggcggagaaccgacgaaaggaggggaggagcggcgcaggcagaacagagaagagaagaggagaggagaaga

SEQ ID NO: 2112 - RNA, 83 nt, Homo sapiens
cgccgagccgccaccgcaggcgaggacggcggaccccgcggcgggaggagccgccccgagaaaaacaccagcaaccgacggca

SEQ ID NO: 2113 - RNA, 76 nt, Homo sapiens
aggccggaaacgacacaacaagcacgacagaaaaaaacgacggccgaaggagacgggccagaagcgaccaaagcaa

SEQ ID NO: 2114 - RNA, 51 nt, Homo sapiens
aaggggacagggaacagcggaagcagaaagaggagccgaggaagagaaaac

SEQ ID NO: 2115 - RNA, 57 nt, Homo sapiens
agggcccgcaaggccacagcacgggggcggagaacggaaaagcaccaggaagcagag

SEQ ID NO: 2116 - RNA, 83 nt, Homo sapiens
gccaacacacgcggaggcccgcgcgagcccgcgggggccggccgcccacgccagccacagggcgggaccgacgggaagagcgg

SEQ ID NO: 2117 - RNA, 89 nt, Homo sapiens
gggacggcgccggccggggggacgggcacggggcagcaggaggagccagagcagggcagaagacaagcaacgcagaacaaacacaggac

SEQ ID NO: 2118 - RNA, 73 nt, Homo sapiens
ccacacccagaagacgacggcacagcgcacaagaaacccaagcgcgagaccacgaacgaagaaaccacgccaa

SEQ ID NO: 2119 - RNA, 72 nt, Homo sapiens
cccacgggaacaagaggggacagaaagccagcccgagggagaggagggacaaacacacacaggaagagagcc

SEQ ID NO: 2120 - RNA, 80 nt, Homo sapiens
agccgggccccccccaggaacggcccggggccgacccggcccgaggggaagcagccaggaaagcgaagccaacaaagaaa

SEQ ID NO: 2121 - RNA, 71 nt, Homo sapiens
cacaaaggaacgcccacccacggggaccagcagccgggccagggccagagcaaaggagaaagaggacacgg

SEQ ID NO: 2122 - RNA, 67 nt, Homo sapiens
gaacaggccacgcaaacaagcagcgaaacgagcagaaaggaagcagagaaaacccggacaacagcca

SEQ ID NO: 2123 - RNA, 88 nt, Homo sapiens
ccaagaagcagaaggagaacaagccaggaaaaccccgaaaacgcaagaagcgggcgaaagaacccagggaacacccaagagcaaaggg

SEQ ID NO: 2124 - RNA, 79 nt, Homo sapiens
cagaggagcccggaggaggcaggagcccgaggaggagccaaggggcagcagcggaagcggaggagagcacggggaccag

SEQ ID NO: 2125 - RNA, 34 nt, Homo sapiens
ccccaagggcgggaacaggacgaacagaaagcac

SEQ ID NO: 2126 - RNA, 97 nt, Homo sapiens
ccgagaccggaccgagagcggaccgagagcgcgaaacgcacgagaaggaggggcagcagcaggacagggaacccgggagacagcaacagacggagga

SEQ ID NO: 2127 - RNA, 102 nt, Homo sapiens
ccccaccggcagaaccagagcgaagcgcccgcgcgggaacggacgccccaggcaccgagccgcccggccgggcaggagcggggccagcccgagcgggagagg

SEQ ID NO: 2128 - RNA, 55 nt, Homo sapiens
gggcaggggaacccaggcaggaacgcagagggacaaacggagaagccaacgggga

SEQ ID NO: 2129 - RNA, 84 nt, Homo sapiens
acgcggaggagcggacgcggaggccgccggggagcggcggcgggagccggcgccgcaggagccggcccaggagcagcagggagg

SEQ ID NO: 2130 - RNA, 79 nt, Homo sapiens
gagaggaacgcagcgagagaggccgaagacaagccccggcacaggaggagagaaaccagccgaggcagccgaacaccac

SEQ ID NO: 2131 - RNA, 83 nt, Homo sapiens
gaccgagaccgcggccgggaccgaggggagaccgggagccgcccccgccggcgcagcgcaccagacgggcggcggccgccggc

SEQ ID NO: 2132 - RNA, 64 nt, Homo sapiens
cgaggaaggccccgagacccaggcacgaggacgcaacgagaaaacgaaaagcgcgagagcaaag

SEQ ID NO: 2133 - RNA, 59 nt, Homo sapiens
cccaaagagcaggacagcccaaagaagaggcccgaacaacagggagaaaccgacccacc

SEQ ID NO: 2134 - RNA, 78 nt, Homo sapiens
caaaacgggccacgagaaccaggccaggaaacaggcagcaaaagagcccagaagagggcagagcacaccgaacacccc

SEQ ID NO: 2135 - RNA, 75 nt, Homo sapiens
caaaacgcgaccagagaccgggcagaaaaagagcgccgggccagaaaaaggagcacagcaagcaagcagcagacg

SEQ ID NO: 2136 - RNA, 121 nt, Homo sapiens
ggacgaccaccccacgcgcgccgcgcgagccaccgcacgcggccagcgcgagggacccggccagcccagcccccggcagggccaaggcccccccacggcgcgccgacggacagcgggcgcg

SEQ ID NO: 2137 - RNA, 78 nt, Homo sapiens
accgcgggacgggaaccgcgacacaaggccccggagcaacgaagaaacccaggccaggggcagccaccagcaagcagc

SEQ ID NO: 2138 - RNA, 98 nt, Homo sapiens
gccaaaagaaggcccgggaaagcacaaagcaagagacagcgaggacagaaggaagggcggagaacggaaaagcaccaggaagcagagaggaccgcaga

SEQ ID NO: 2139 - RNA, 77 nt, Homo sapiens
ggagcagggagaggagcgggaaacgggagggaaccagcaacaagccgggaaccagggccaccagagaagcgacagac

SEQ ID NO: 2140 - RNA, 84 nt, Homo sapiens
agcgggaaaaggccggagaagggaaacgggccccccggcgagagacgcagccccgcacagaacccaggagcacagggaggagga

SEQ ID NO: 2141 - RNA, 79 nt, Homo sapiens
ggggaaaagcccgcccaccaccggaccagcagggcgccacaaagacaagcagggacagaggaacgccaccagagacaac

SEQ ID NO: 2142 - RNA, 60 nt, Homo sapiens
cggagcggcgagagcccccacgggcgcgcacaccaccgggacgcagacccacgagcaaaa

SEQ ID NO: 2143 - RNA, 55 nt, Homo sapiens
ccgggcgcggcaccacgcccgccccagcggagaggagccggaaagccagggaaaa

SEQ ID NO: 2144 - RNA, 83 nt, Homo sapiens
cgagagcaagagggcaccagcagcgacggagccacccgcgaaaacggccagggccgccggcaaccggaaaagcgaacaggcca

SEQ ID NO: 2145 - RNA, 68 nt, Homo sapiens
aagagccgcccccaccagacgaggccaccagccagggaacagaagaacggcacacaccccccagaacc

SEQ ID NO: 2146 - RNA, 81 nt, Homo sapiens
gccgggccagcaacagagcgggccggggacgcacccagagggccacacgggcaggacaccccccgccggaggagcacaggg

SEQ ID NO: 2147 - RNA, 73 nt, Homo sapiens
cgcccacagaaagagggcaagacggagagaaacagcaaagcagaaacaagcaggagaagacagggcaacagga

SEQ ID NO: 2148 - RNA, 58 nt, Homo sapiens
ggaagagaccggaacagaagcgaaacaggagagaagacgacgcaccgcaggcagacaa

SEQ ID NO: 2149 - RNA, 75 nt, Homo sapiens
aggcgggaggcgcgacacggaggcgcccggaacaggaggagaagagagggcggcgacggcggcgcgaggaccgac

SEQ ID NO: 2150 - RNA, 75 nt, Homo sapiens
aacggcaccaggacacacacaaccgggccccccagcgacacgaacggaggaaccacgcacagaggagcggcgaca

SEQ ID NO: 2151 - RNA, 88 nt, Homo sapiens
cccggaggaaaacagccgggcagagcagcagaggaggaaaacagcgaggaaacagaccccgagaagggggaccgaaagggaccagagc

SEQ ID NO: 2152 - RNA, 77 nt, Homo sapiens
ggacggaagaaaaggcggccggcaccacagaaaagcaaggcgaaggaggacaggagacgaccgagcagaacccccga

SEQ ID NO: 2153 - RNA, 87 nt, Homo sapiens
gagcgaggggaggcaggcgcggcagacggcgacagggcggcggcgccaggcagggcgcaggcgaagccgacgagcccgaacagacgc

SEQ ID NO: 2154 - RNA, 97 nt, Homo sapiens
gaaagcagccaggaccgccgccgcaaaaggaccccgcgaggaaacagagggacacaaagaacaagaccagacagagaaagaagagagacaagaccaa

SEQ ID NO: 2155 - RNA, 56 nt, Homo sapiens
ggcggaggcgaaagcggaacgagggccacaaagcccagacaagcgcagaagcaaca

SEQ ID NO: 2156 - RNA, 79 nt, Homo sapiens
ccaggacacagagacacaaaaacagaacagggacaccaggcaacgcgacacacggacaccaccccaacgaaggggaagg

SEQ ID NO: 2157 - RNA, 87 nt, Homo sapiens
ccgcgcgcgggccgcaaccacccgggccgaccccgaggccccgcacccgcccggacccccggccccgccgggagcgcggcacccagg

SEQ ID NO: 2158 - RNA, 59 nt, Homo sapiens
ccgaccccccggcgccgcgccggcggcgcaggcaaggccagcaaggaggggggccgagc

SEQ ID NO: 2159 - RNA, 96 nt, Homo sapiens
caggaccaccaggccacgaggagggcgcgagaagacaaagagaggacggggacgggccccaggacgaggaagacaaggccagccacggaaggagac

SEQ ID NO: 2160 - RNA, 60 nt, Homo sapiens
aagccccgcgcggacccgccagaacgcagagggcagaccggaagagaagaaggagcagaa

SEQ ID NO: 2161 - RNA, 77 nt, Homo sapiens
gcaggaagaacaacgacgccaagagaggaaaacccaagacaaggaagggcaaagcccacagcacaagaggcgggcgg

SEQ ID NO: 2162 - RNA, 86 nt, Homo sapiens
ggaccaagcaacacccggagccggaccccccaagcaggaacggagaaagaacagcaacaaaagcgggcaccaaagacaaggaaccg

SEQ ID NO: 2163 - RNA, 78 nt, Homo sapiens
ccgaagagcgccgcgacgcccggcccgcagggcagacgagcagaaaacccaggacggccaaaagcggccacggaacaa

SEQ ID NO: 2164 - RNA, 79 nt, Homo sapiens
gggaaggacggggccggcccccgggaccccggccgcggagcgacgccgacggcagcaggcgcaaaaacgaacccacaac

SEQ ID NO: 2165 - RNA, 63 nt, Homo sapiens
cacccaaaacgcgcaggggacagagcgggagccaccagcgccaaagggaagccaggagcccgg

SEQ ID NO: 2166 - RNA, 69 nt, Homo sapiens
acaagaggggaaagcaggagagaagaccagaagggaggagaagcccagccacagagcgagaaggaaaaa

SEQ ID NO: 2167 - RNA, 84 nt, Homo sapiens
cgcaggggaagcgcagcacgcaccaggagacccaagcggaaggagaacgaccgccagaagagaagaggaaggagaaaaacaaaa

SEQ ID NO: 2168 - RNA, 39 nt, Homo sapiens
aggagccggggaaacgcaggagcaaaagagcaacgccac

SEQ ID NO: 2169 - RNA, 77 nt, Homo sapiens
agaagcaacagacaagccccacagagggaaaaccgaaagcagagacagcagggaaccaagaaagaggaagaagagga

SEQ ID NO: 2170 - RNA, 67 nt, Homo sapiens
gaacccgagacaaccaccgggggccaccaccgaggaaggaaaagggaaacagcccaggccagacaac

SEQ ID NO: 2171 - RNA, 55 nt, Homo sapiens
agcggcgggcgcggcgcaacggcgcgcacaggaaaggccagcgccggagcggggg

SEQ ID NO: 2172 - RNA, 80 nt, Homo sapiens
ccaagcaacagccaccggcagaggccagccgacaaaagccagggggggcaggccacagcagcagcccgggagcaggccga

SEQ ID NO: 2173 - RNA, 73 nt, Homo sapiens
ccaaaacacaccgaagccagaaaaacgccacaaccaaacgcgcaaagcgccaaacgaaaaggaaaggacccag

SEQ ID NO: 2174 - RNA, 81 nt, Homo sapiens
ccgaaggaaacgggaaggagacgcagaagcacaagccgaacggccgagcgaccaggagaggagcccccgcccgaagaccgg

SEQ ID NO: 2175 - RNA, 85 nt, Homo sapiens
cccagcccaccagaggacccagaaaggagccagaacgggaagcggcgagccagaggccaacgcagaggaacggaacagaggaaca

SEQ ID NO: 2176 - RNA, 67 nt, Homo sapiens
gaaagcaggccagcagaccgacccacagccaccgaggaggggcaggagaggcggaggacaggaggga

SEQ ID NO: 2177 - RNA, 58 nt, Homo sapiens
caaggacagggccagcaggagcagagacagccacaagagcagagcccgggaagcgcag

SEQ ID NO: 2178 - RNA, 78 nt, Homo sapiens
gcgaggcggcgaggcacccggcgcccggcgcgcccgcgccagccccccgcgccagggcggcacggccccaccacagag

SEQ ID NO: 2179 - RNA, 67 nt, Homo sapiens
gacgcagggcgcccccgaaacacaggggaaacacgagagagcaacagccgacagagcggcaccgacc

SEQ ID NO: 2180 - RNA, 77 nt, Homo sapiens
aggcggagcgggcagcaccgagcccggaggaggcaccaagcaggcaaggccggccaccggcccaagaagaagaggcc

SEQ ID NO: 2181 - RNA, 77 nt, Homo sapiens
ccaccggcaccaaggcaagcacggaaagaagacgaggcgcggaacggcagacggggaggcgcccccgccagcgacaa

SEQ ID NO: 2182 - RNA, 66 nt, Homo sapiens
gaacacacggaagaagaagggcgacagaacaaaacccaggaacgagaaaaagcgagaaggcagaaa

SEQ ID NO: 2183 - RNA, 76 nt, Homo sapiens
cggcccgcccggacgggccccgagagcaagggcaagaaacacggcagggcagagagcgaaacgcgaagagccgcca

SEQ ID NO: 2184 - RNA, 77 nt, Homo sapiens
accggaggggccgcaaggaggagacacacagccccagacgggaggaaaaaaggaaggaccgcgacgaacacaaccaa

SEQ ID NO: 2185 - RNA, 38 nt, Homo sapiens
ccacacccccccgggggggaagacgaccccgacgcagg

SEQ ID NO: 2186 - RNA, 68 nt, Homo sapiens
agggaggacggcggaacacggaggcgggaaaggcccagccagagggaaaaagaacaagacagagaagc

SEQ ID NO: 2187 - RNA, 81 nt, Homo sapiens
cgacaccaggcgaaccggccacgcacccccgaagccggaggagacaggccgagaccgagggccccgcaccccggagaagag

SEQ ID NO: 2188 - RNA, 80 nt, Homo sapiens
agagcccagaaaagaggaggcccgcaccccccggccgccgcacagccagagagggccagcagcaggcaagcggcaaagga

SEQ ID NO: 2189 - RNA, 55 nt, Homo sapiens
gagcccgcccaacaaacagaggacagggaagcggaagaaagaagagccaagaagg

SEQ ID NO: 2190 - RNA, 55 nt, Homo sapiens
ggaccaggaaacggaggcggcgagacgacgggaccgaaggaccccgccagagaca

SEQ ID NO: 2191 - RNA, 86 nt, Homo sapiens
ggcggaggccccagggaagcgcagaaagcaggcgaacccgcggcgcaaaacgccgccgccagcgcgcacgcaaggaggcggcggaa

SEQ ID NO: 2192 - RNA, 50 nt, Homo sapiens
ggggaaagagcggcaagcaaggaccggggaaacaggggcagacacagggc

SEQ ID NO: 2193 - RNA, 79 nt, Homo sapiens
gcccccgaaccaacccgggccagagcagaagggagaggaagaaagaccaaacgagagacaaaagagaacaacagaacgc

SEQ ID NO: 2194 - RNA, 82 nt, Homo sapiens
cacacgggaggagccaacagcaggaaggcaggccaacaagccgaggagaggcccacccgccaagcgcacaacccccaggcac

SEQ ID NO: 2195 - RNA, 74 nt, Homo sapiens
caaccccgaagcggacagacaagccaccaggcagggaaagcaggcaggagggagagcgccgaagaaccaccccc

SEQ ID NO: 2196 - RNA, 68 nt, Homo sapiens
aggaacgcccgcgcagcgaaagaaaacgggagcgggaaggaaaaaaaccgggcggaagacgggaaaag

SEQ ID NO: 2197 - RNA, 66 nt, Homo sapiens
cgccccgccgccacgccgaggcccgcgcccagacagagcagagagaagcccgggccaccgacagag

SEQ ID NO: 2198 - RNA, 100 nt, Homo sapiens
ggggcccgggcgccccgcagccccccaacaccgcccgccaggacgacggaccccaggggaagaaaaggagggggagcgcgggaggggacccccggcgaga

SEQ ID NO: 2199 - RNA, 79 nt, Homo sapiens
ggcgcggcggcccagccccgacacagaggacggaaggcccacgccccgaagacaaaggaagcgccagcgccgggcccca

SEQ ID NO: 2200 - RNA, 66 nt, Homo sapiens
cgacagaccaggcccaagcgaaaaagcgggaacgcaggacccaaagcagagaacacaagaagaaag

SEQ ID NO: 2201 - RNA, 75 nt, Homo sapiens
caccgaaaccagaagggggcaggaaaacagaagaaagcgagaaccggcggcccagaaggggagccacccagcccg

SEQ ID NO: 2202 - RNA, 78 nt, Homo sapiens
gcccccaggccaggggcccggaacagacaaaagcagaccggagaagaacaagccgacccaaagccgccgccgagggcc

SEQ ID NO: 2203 - RNA, 70 nt, Homo sapiens
ggccgggggccgagcgggcaggccgaaccacccaggaaaacccccgaagacaaggaggacgggccaaaag

SEQ ID NO: 2204 - RNA, 75 nt, Homo sapiens
ggccaccccgcaggagaacgagcccccaccccggcaagaaagggagggcaaggaacacagacaacagagaaaacg

SEQ ID NO: 2205 - RNA, 78 nt, Homo sapiens
ccgaaaagcgagcgcgaggaaaaggcggcgggagcaaacgccaggggcagagcggccccaaaaaaggacagagaaggc

SEQ ID NO: 2206 - RNA, 93 nt, Homo sapiens
aagaggccgaaaggaacagcccggcacagccccagcggagcgacgcagaagacggggacgcaccacgagggcagcagaaaaacagacccagag

SEQ ID NO: 2207 - RNA, 44 nt, Homo sapiens
cgccagcaccggggggaccagccagggaggaccggagaggaaga

SEQ ID NO: 2208 - RNA, 69 nt, Homo sapiens
agaagcgcggagccccaagacacaaaagcacaacacaagggagaaggcgaaggagcaggacgcagcaag

SEQ ID NO: 2209 - RNA, 75 nt, Homo sapiens
cgcggcccccggacagcagaaaccaagcagacaacgcagagggcgacgccaacaagaaacagaaagcccggccag

SEQ ID NO: 2210 - RNA, 82 nt, Homo sapiens
caaaaacaaggcgaaagcaggcgaaagggaaaaccagaagcgcagaaaaagggacccagcccgcagccgcccggcgaccgaa

SEQ ID NO: 2211 - RNA, 70 nt, Homo sapiens
agaacagcacgccccgcgagggggcaaaacccacggaacggaaagggcagccccacaccaacaaagaagc

SEQ ID NO: 2212 - RNA, 59 nt, Homo sapiens
ccacaggcaggagaggaggcgcgggggagccagaagggcgaagaagagcagagcagccg

SEQ ID NO: 2213 - RNA, 54 nt, Homo sapiens
caaggaggccccagcggaccgaacagacgacacaagcccacacaaggaccggac

SEQ ID NO: 2214 - RNA, 59 nt, Homo sapiens
gcgccacccccagaggacaagcagcaggaggaaagacaagccccaaaagcagccgggaa

SEQ ID NO: 2215 - RNA, 76 nt, Homo sapiens
acccgaacgaggagacgggcccccaaaaagcggcaaaagcaagagaacagccacaaaagaagacccaaagcaccaa

SEQ ID NO: 2216 - RNA, 58 nt, Homo sapiens
cagccccccccccagccgggacaccccgcagcaggcaggcaagaggaaaaccaacgaa

SEQ ID NO: 2217 - RNA, 82 nt, Homo sapiens
gaggccggggcgggcgcgccccgcggagccggagccgcagaggccccgggcggaccaggcccaggcggaggcaaggcgcgac

SEQ ID NO: 2218 - RNA, 72 nt, Homo sapiens
acaccaacggacaaggcggcaaagcggggaggccagcgacgccaggaagaaaacggggacgcagccccaggg

SEQ ID NO: 2219 - RNA, 80 nt, Homo sapiens
gaagcacaaaacagcagacccaagagcagcggaaaagaccagcacaggaacgcaagcacaggaccagaaacgaaaggcag

SEQ ID NO: 2220 - RNA, 79 nt, Homo sapiens
aaccagcgagggaaaggcaggaacagaaccggagcaggccgagagcggaaaagaccaaagcagaaaagaaaggagagag

SEQ ID NO: 2221 - RNA, 75 nt, Homo sapiens
cgcgcggcgagaaggggcaggacgccaaaaacagagggaaggggcgaaacaccggaaaacggagccgcacaccaa

SEQ ID NO: 2222 - RNA, 78 nt, Homo sapiens
ggggcgccaacgccccagcccggccccgcgccgcaccagccgccagagagccaggcagcgagcgggagcagacaggga

SEQ ID NO: 2223 - RNA, 74 nt, Homo sapiens
cagaagacgccaaaacccaaagggaacaacagcaaccaccacaagggggggaggagggacaacacacaacgcag

SEQ ID NO: 2224 - RNA, 75 nt, Homo sapiens
cgacgcaagaccacgaacaacccacagaacacaaaacggaaaggagagaaaagcggaacaagcacacagagacgg

SEQ ID NO: 2225 - RNA, 81 nt, Homo sapiens
cagcacagcgccggcgcaagccccaagagacgacagaaaggcagagaaggaaaaaaggaccagagacggagcaagaacaag

SEQ ID NO: 2226 - RNA, 58 nt, Homo sapiens
aagcagggacgggccagcaagccgggcgaaagacaacagagacgaacgcaacagagag

SEQ ID NO: 2227 - RNA, 77 nt, Homo sapiens
acacaccagggaaacccccaagagaccaaggggcacacgccacgagggcacagacaaccgggcacccgggggccggc

SEQ ID NO: 2228 - RNA, 76 nt, Homo sapiens
ggagcgaagcaaaacagagagagcagaagaaccgcacggccaagcccacacagaggaaaccgggagagagacagaa

SEQ ID NO: 2229 - RNA, 68 nt, Homo sapiens
cagcgcgaaaccgagaagcaggagaagagcgaagccagcaaaacgcaacacggggaccggagaagaga

SEQ ID NO: 2230 - RNA, 68 nt, Homo sapiens
gccaggaccgccgagcgcacgcgcgggcgacaaaaccgcccaccaaccaggaggaccagggaggagca

SEQ ID NO: 2231 - RNA, 71 nt, Homo sapiens
aaccccaccagccggcacccagaccaaccggaggagacacgggaacaaaaccaaagggggcgcaagcagcg

SEQ ID NO: 2232 - RNA, 63 nt, Homo sapiens
agccagaaaaccccccagaaagaggccaaagcaagagcggccaggcggaggcaggcggacccg

SEQ ID NO: 2233 - RNA, 71 nt, Homo sapiens
cgaagagcgagaaggggcaaaggcgcccaaagccagaccgccaggcagggagcaagccgaggggaaagaag

SEQ ID NO: 2234 - RNA, 71 nt, Homo sapiens
gagaacaccccacagggaagagggaacccaacgccaccaagcgccagaacacgaaaggaacaaagagcccg

SEQ ID NO: 2235 - RNA, 62 nt, Homo sapiens
gccagaagagaaccacaaggacagagaggcgcaggcaagacccggaaggcccagaagaaacc

SEQ ID NO: 2236 - RNA, 51 nt, Homo sapiens
acaccaacaaagcaccacacgacggacagccggacacaagagggcaagaaa

SEQ ID NO: 2237 - RNA, 70 nt, Homo sapiens
caaagggagggcggccaaccgcacagacgaccagaaacacaagagagaaaaagaccgcgagccgaagggc

SEQ ID NO: 2238 - RNA, 85 nt, Homo sapiens
ggccgcggggccaggaagcggaggagccccggaggcagagcggcgccagggcggagaacggaaaagcaccaggaagcagagagga

SEQ ID NO: 2239 - RNA, 80 nt, Homo sapiens
gcaaccagacgccagcgggacgaggaccgagaccgcggccgggaccgaggggacggaacggagagggggaccaacacagc

SEQ ID NO: 2240 - RNA, 92 nt, Homo sapiens
gagaggacaggcggaggccccagggaagcgcagaaagcaggcgaacccgcggcgcaaaacgaccacccaacacacaacggcccagccaaaca

SEQ ID NO: 2241 - RNA, 73 nt, Homo sapiens
gaggacacccaaaacgaagggagacggacccgccgagcgccgaacgcccagaaaagccaagccagcaggggcc

SEQ ID NO: 2242 - RNA, 73 nt, Homo sapiens
agaagcaggaaaggccggacaccaggccaagccgacgccagcgggcgccacccaacaggcgcaccgcccacgg

SEQ ID NO: 2243 - RNA, 78 nt, Homo sapiens
agagcgccacgcacagcgaggggccaaggcagaagaaacggagaagggcaaagggaaagaaaggcaaagcgagcaaga

SEQ ID NO: 2244 - RNA, 79 nt, Homo sapiens
ccaggggaacacaccagaaggagaaggagagggaccggaagcccgggaacgaagaagcacccggagagccgaccggccg

SEQ ID NO: 2245 - RNA, 76 nt, Homo sapiens
caaaaaaaagaggagcagcaggcacagcacgggcagagccagcgacggaaaaccggcagcaggagaggccacgcca

SEQ ID NO: 2246 - RNA, 70 nt, Homo sapiens
cggccgggggaaagaacgaagggcgccggacaggcagaacaagaagggcaaccaggggggaaggagggag

SEQ ID NO: 2247 - RNA, 73 nt, Homo sapiens
ccggagaaccgggcggagcagaccagagaagagcacagaagaccagagagagaaaaccaggaagaaaggcaac

SEQ ID NO: 2248 - RNA, 76 nt, Homo sapiens
gcacgcgccggagcgccaccccccgcccacgcgcgagagaggaggggggggagcagcaccgcgaaaagcgaggaaa

SEQ ID NO: 2249 - RNA, 79 nt, Homo sapiens
cccgccgcagccacaccaggcccagaggccaggcagacccagccaaaccgcgacagccaaagggaaccaaccaaaccag

SEQ ID NO: 2250 - RNA, 62 nt, Homo sapiens
acaagcccgagcccgaagagagaaggcaaagaacccggggaaaggagacggaagcggaagca

SEQ ID NO: 2251 - RNA, 82 nt, Homo sapiens
acccaagccccagcggggcccgcccgaagcccgggcgcgccaggcacagccaagagcggaccggcagcggccagcgcagcgg

SEQ ID NO: 2252 - RNA, 78 nt, Homo sapiens
ggcacccccccccggcagggacggcgggcgacgcgaggagagagcgacgaagccaacgccagcacgcccggggagagg

SEQ ID NO: 2253 - RNA, 103 nt, Homo sapiens
caccaccggcgcccacgcgaacaccaccagaagacacagagcaccaaggcacagcagagagacccgagccgccgcggagcgccccagcgaaggacagaggcgg

SEQ ID NO: 2254 - RNA, 85 nt, Homo sapiens
caacaaaaaagaacaaccggacacgaggcagaaacggggacacaagcgaaaggcaacggcgcacagaacaaaggacgagccaaag

SEQ ID NO: 2255 - RNA, 113 nt, Homo sapiens
ggaggccacgggggagaaaggcgcgcacgagacccacaggacggcgcagcgggacgcggagggaagggcaacaacccaccgggggaaacaccagacgaagccaaggagcaaaa

SEQ ID NO: 2256 - RNA, 59 nt, Homo sapiens
gaaacaaggcaacagaaagagcaacagcagggcaacaggcgggaaaaccgccacaaagc

SEQ ID NO: 2257 - RNA, 86 nt, Homo sapiens
gccagacacggaccgagccgcgaggacacgggcgcaaccgcagcacacagcgaccgggagaacaagacgaaccacggggggacaac

SEQ ID NO: 2258 - RNA, 57 nt, Homo sapiens
agcaaccaccagcagcccccagagcggaacacagggacgccagacgggacacgcaca

SEQ ID NO: 2259 - RNA, 75 nt, Homo sapiens
cgcgccacagagcagcggagcaccccaacgaggaagcgggacggaaaaggaccacacgagagacgcaaagaagcg

SEQ ID NO: 2260 - RNA, 68 nt, Homo sapiens
cgcgcggcaggccaggggaccgaaggcaacacacagagcccccgaaggaaggcgcacgcggggacggc

SEQ ID NO: 2261 - RNA, 86 nt, Homo sapiens
cgagcaacaagaaccagacgaacaaaaaacggaccgccgaaaggggacaaagagaaagagaaaccgccgagaagaggccacggaag

SEQ ID NO: 2262 - RNA, 74 nt, Homo sapiens
ccgcgcgaggccggcacggggccacgcggggcgggccagccaaagaggccagaagaggaaggggagaaaagacc

SEQ ID NO: 2263 - RNA, 74 nt, Homo sapiens
aggccgagcaaggagagaacgcgagggaaggcaaaccgacaccagcgacacaagcgcgagggaaccacagagga

SEQ ID NO: 2264 - RNA, 60 nt, Homo sapiens
ggcaacggggcacgaccggggacacgagaggcgagggacgacagagcaagcggcagaggg

SEQ ID NO: 2265 - RNA, 71 nt, Homo sapiens
gcgcgagccacacaacccgcgccggccgcgggaaggagagaaggaacccgacacaggacaagaagcggaac

SEQ ID NO: 2266 - RNA, 58 nt, Homo sapiens
gcgcccgggcacggggacaagggccagccacccacacagaaagccagggccggaggga

SEQ ID NO: 2267 - RNA, 72 nt, Homo sapiens
gaaagacgaacgccgagggcggaggcccacaggccacccagcgcgcgccaggaggagcaacacacaaaaaaa

SEQ ID NO: 2268 - RNA, 55 nt, Homo sapiens
aaccggggacgagccagacggggcaaagccgggggaagccaccgagcccagacga

SEQ ID NO: 2269 - RNA, 61 nt, Homo sapiens
acggggagcggaggaaaggacggagggggaggacccgggagcacccaccagcgagacgcac

SEQ ID NO: 2270 - RNA, 70 nt, Homo sapiens
cgcgcagggcacaccaggaacacgcgggaaaggcagcagcgcagcggacgacagcccgggagagggaccc

SEQ ID NO: 2271 - RNA, 74 nt, Homo sapiens
caaccgagacacaaagggaaagcgggcgaaaccgccaagcgcccccagggcacaggacggccgcaggaacaggc

SEQ ID NO: 2272 - RNA, 59 nt, Homo sapiens
gggcggaggaagggaggagacccgaccccagaagacacaaaagccaggaagacaagagc

SEQ ID NO: 2273 - RNA, 89 nt, Homo sapiens
ggcccccgccgccccgccggcacagcgggaagagcgggcagcgggggcagagacggggaacagggccacccacacggacgccaacgcgg

SEQ ID NO: 2274 - RNA, 69 nt, Homo sapiens
cagcagacaagagaccaacagagcagagaagcccgacccgacaccaaggaagcccagaaaccacgggaa

SEQ ID NO: 2275 - RNA, 73 nt, Homo sapiens
ccaggcccagacccgggaaccaccacacagaccccggaaagcaggcaggacacaccgagaagccgaaacagcc

SEQ ID NO: 2276 - RNA, 82 nt, Homo sapiens
ccgcccagcccccgagggcgggaacagaacacgcgagcacgcccccacagagggacccggaaggcgaggcaccccgagccgg

SEQ ID NO: 2277 - RNA, 84 nt, Homo sapiens
gaaccgagcgacagagacaagcgagcgccgcacaaaaagcagagagggccgagcgaggaagacaaaccggccgccgcccacccc

SEQ ID NO: 2278 - RNA, 71 nt, Homo sapiens
gcagagaaggaagcaaagcaccaaagacgagaaagaaacagcagggcagaagcaggcacggcagacccaca

SEQ ID NO: 2279 - RNA, 79 nt, Homo sapiens
gccacccgcccccaccaggccgaagagaaccacaagcagccgcccaaaacacaaaccaaagaagaaacccgaaggacca

SEQ ID NO: 2280 - RNA, 85 nt, Homo sapiens
cacccacacagaggcccagcacgcaggcagcagggcagcaacagagcgccaaaaagaggaccccagcacagcacagagcagggag

SEQ ID NO: 2281 - RNA, 78 nt, Homo sapiens
gacccccaagagcacagccggaagaggacaggacagcagccgcaaccaagcacacgagagcgcacgagacaacgacag

SEQ ID NO: 2282 - RNA, 86 nt, Homo sapiens
aacaacgggccaagagcaggacagcacgagcagacagacacgcgcagggaccagcggcggagaccgcgagcggccccacagaggac

SEQ ID NO: 2283 - RNA, 66 nt, Homo sapiens
aacaaagaccccagagaaaccgcccggaggaacgaaagacagggacggaaaaggcgcacacgaccc

SEQ ID NO: 2284 - RNA, 67 nt, Homo sapiens
cccccacacggccccccgcacggaacgcagaaggaccaacgccggccaagaaagaggcacggagcgc

SEQ ID NO: 2285 - RNA, 70 nt, Homo sapiens
caaagacagccgcacacaaggaacggcaggaaccgcggcgccaagggaaaaaaacaaacacacaaacacg

SEQ ID NO: 2286 - RNA, 70 nt, Homo sapiens
cgacgaacgcaccgggcgaagaaaccacacagcggcagcgcgcagacaggacaaccagcggaggcacgac

SEQ ID NO: 2287 - RNA, 69 nt, Homo sapiens
accaagagagaaagaaaaaacgcgaagagcaacagagaggaaaggagcgagaaaccaacaaggcgaaag

SEQ ID NO: 2288 - RNA, 76 nt, Homo sapiens
agaacacaacaagaggaagagagccgaagagacccggggaacgccaaacagaggaaggagagaggggccgcaggcc

SEQ ID NO: 2289 - RNA, 79 nt, Homo sapiens
ccaggcgcggaagagaagcagcggcaggaggaggcgaaacgaaaaccagaagaggcaggcgcaagacggagaaaagccc

SEQ ID NO: 2290 - RNA, 79 nt, Homo sapiens
accagagcggggcaccgagccgggacccaaggccagccagccccaggcaccagcggacaggacagggaggacgaaggcc

SEQ ID NO: 2291 - RNA, 81 nt, Homo sapiens
agccacacccagacgagcgggagaaggcgcgcgcaagcacgcgaggagcagccgcgaacgcggccgggaggcagagcgagg

SEQ ID NO: 2292 - RNA, 77 nt, Homo sapiens
acaaagcgaaagcacaccaagccaaacaaccaaggaaaagaagaaaaggaagcacagccaacaaaaacgagaaagca

SEQ ID NO: 2293 - RNA, 74 nt, Homo sapiens
caacaaaggaaagcgaaagaggcacgcagacagcaaaacaagcacgacagggaagacccagaaaagaaacacaa

SEQ ID NO: 2294 - RNA, 74 nt, Homo sapiens
acacgggagagccgaaccagaagagaaagcccaccacagcggagaagagaacccgaccgaagaaggaacaggca

SEQ ID NO: 2295 - RNA, 73 nt, Homo sapiens
gggaagaagacggcgaagcaccaacgccaagacggcgcggacggacagaaggaacccccaccccgcgaccgca

SEQ ID NO: 2296 - RNA, 74 nt, Homo sapiens
cggaacaacccgacacgagaaaaccaaaggagaaaggaagacagcagacggcgcggacggacagaaggaacccc

SEQ ID NO: 2297 - RNA, 118 nt, Homo sapiens
aagacaagccaggcagaccggggacaacaaagcgcgggaacaaagcagcccaggcagaccccaggcagaggaaagggcgcaggcagaggagcagccgccaccccccagggggggcgga

SEQ ID NO: 2298 - RNA, 96 nt, Homo sapiens
agccggcccacacacgggcgagcgacagcggcggaaggccaccagaggcggcgggaggcggaggccacccagacccggccgggacaccagggaagc

SEQ ID NO: 2299 - RNA, 63 nt, Homo sapiens
acgacacggccggcgcacaagaggacgccgccagccaccggcgcgaagccagaccagaccagc

SEQ ID NO: 2300 - RNA, 78 nt, Homo sapiens
gcgcgccgcgcccggaccccaggggagaaccgccagcgacgggaaggcaggacccacgcacgagcaacgagaagagag

SEQ ID NO: 2301 - RNA, 81 nt, Homo sapiens
agccagcgggggccccagcaccgcaaccaccgccaccagccacggagggcagaggagcacccacgggaacagcccagaaac

SEQ ID NO: 2302 - RNA, 76 nt, Homo sapiens
ggagcacgacagaaacacagccgcaggaaccagcagcaaccggggaggaaagaaaagacaagccaaaaaaaggcca

SEQ ID NO: 2303 - RNA, 61 nt, Homo sapiens
gccagcccacaagaaccgcgaggacagaggaagagggaggaacagcagcggaaacaagcac

SEQ ID NO: 2304 - RNA, 60 nt, Homo sapiens
agagccacgagcagccgagggccacagaaagaagacacccgccacacaggacagagaagc

SEQ ID NO: 2305 - RNA, 77 nt, Homo sapiens
acaggaaacgggggcgcaggacccggggaaagccaccagagccgcgacagccaaggaggcaagcaaggggccccggc

SEQ ID NO: 2306 - RNA, 61 nt, Homo sapiens
gcaccgggagcccgccgccccgaaaccaccgcgagcggggcggagaacggaaaagcaccag

SEQ ID NO: 2307 - RNA, 41 nt, Homo sapiens
cagaaggggaaaagcaccaagaacggaccagaggagccccg

SEQ ID NO: 2308 - RNA, 67 nt, Homo sapiens
ggaaccgaccacagcaacaagacaaaaggccgaccaggcacaggcagccgccagggaggacccggcc

SEQ ID NO: 2309 - RNA, 74 nt, Homo sapiens
aagaaggaaacgcccgaggcccgaaccgcgggagaggggaagagacaagaccagcacccacaaaagcgaaaagc

SEQ ID NO: 2310 - RNA, 66 nt, Homo sapiens
caacgaaggggcaacaccccggaaacacgacaagccaaagcaaggccagcgagacagaccgaaacc

SEQ ID NO: 2311 - RNA, 77 nt, Homo sapiens
caaaggcaagagaacagcagcgccgcccgccgacagccaggcccgggagaaaggcgcggccagcgaagaagacgcag

SEQ ID NO: 2312 - RNA, 78 nt, Homo sapiens
aagggcggccggcccccgacagccaggcccgcgagaagggacgaagggaacccgccgggcggcccggcacccagcccc

SEQ ID NO: 2313 - RNA, 38 nt, Homo sapiens
ccccaagggcgggaacaggagaagaagggggcagcgca

SEQ ID NO: 2314 - RNA, 50 nt, Homo sapiens
ggcgcccgaggggaagagcggcccggcccgagcacccacacagccgacag

SEQ ID NO: 2315 - RNA, 78 nt, Homo sapiens
caagaaaccaaaaagccgagagagaagacagcggagggaggcgcccggccaccccaagccccggcgccacggggacgc

SEQ ID NO: 2316 - RNA, 85 nt, Homo sapiens
ccagccggagaagcgagcagcgaaacaccacgacagacacaagaagaagaaaaagaaaaaagaagaggaccgaacggaaaaggaa

SEQ ID NO: 2317 - RNA, 36 nt, Homo sapiens
caacccgcaaccaacaagaacgccacacagaccaga

SEQ ID NO: 2318 - RNA, 76 nt, Homo sapiens
aaaggccaagaccaggaaaggaagggggagagacaaccagagcggaaagggagaaaagcccccagaaaggaggcac

SEQ ID NO: 2319 - RNA, 58 nt, Homo sapiens
acacacgagaacgcgcgcagaggccaggggagccgccaccaaaagcagacggaaaacc

SEQ ID NO: 2320 - RNA, 40 nt, Homo sapiens
ggccgccagaggcgggcaggaccgaagcccccagcacgcg

SEQ ID NO: 2321 - RNA, 73 nt, Homo sapiens
gccggcaaggaggcaccgcggcagacgggaccacgaggcaacgccccaggagccaagacacccgaacccgccc

SEQ ID NO: 2322 - RNA, 86 nt, Homo sapiens
gaggagaccggcacccagacaggggcgacggcagaggagcccagcagagcggagagggggagcgggaggaagccccgccacagcgc

SEQ ID NO: 2323 - RNA, 71 nt, Homo sapiens
caagcccgccaggccgacaggacggccgccaggcacagagaaggcaaacgggagggcgaggacaccaagag

SEQ ID NO: 2324 - RNA, 80 nt, Homo sapiens
gggaccccgccgcggcgggaggggacgaaacgcccaccccgggaagcaggacgcgcacagagcgacagaaaggacagcag

SEQ ID NO: 2325 - RNA, 79 nt, Homo sapiens
cgggagacaaccgaacccaggaagcagacacaagaggacaggacaaagcccccagaacaccggggaaccacccggcccc

SEQ ID NO: 2326 - RNA, 72 nt, Homo sapiens
gggacgccagccgcagaggaagacccgggaacccgagcgcagaggggaagcagaggacccaggcgaacagca

SEQ ID NO: 2327 - RNA, 63 nt, Homo sapiens
gcggccggggcgccgcgcgccagcccaggaaaggcgccgaagaggcggaaaccccacaagcgg

SEQ ID NO: 2328 - RNA, 79 nt, Homo sapiens
gccagcggcaccgacagggacaccaccgaaccccagcccaagccgcgcccgagcaagaagaaagagccaccagcacaaa

SEQ ID NO: 2329 - RNA, 70 nt, Homo sapiens
gggcaaagcggacaccggggacccaaagacaggaccacgcaccagcagagaaggaaagcaaaccgaagca

SEQ ID NO: 2330 - RNA, 36 nt, Homo sapiens
gagaaccccccaggcgcagcaacagacaacgagcaa

SEQ ID NO: 2331 - RNA, 80 nt, Homo sapiens
aaagaggagagaacccaacacagggaaaggaaccgcggacagcaccgccggccaggaggagagcgcaccaccaaaaaggc

SEQ ID NO: 2332 - RNA, 104 nt, Homo sapiens
cgggccgcgaagcgcagcgccagacccaaggcccccgaggagcgcgggcgccgaggcaaaagcagaccggaaaacccaccggcaagaccacacccgaggggagc

SEQ ID NO: 2333 - RNA, 73 nt, Homo sapiens
accgaagagaagccaaggccgaagccgagcagaggacaaaacaagagggccaggaggcccacaagcggcaccc

SEQ ID NO: 2334 - RNA, 77 nt, Homo sapiens
aggagacaaaagaagagagacacaaagagcacaaaaaagcggaaaaacgagcagagaccgggaggcagcaacccaga

SEQ ID NO: 2335 - RNA, 70 nt, Homo sapiens
agagaaaaggcagacgaagaagaagcaagcgaggcccacaagaagaggaagacgagaaaacacgcagacg

SEQ ID NO: 2336 - RNA, 78 nt, Homo sapiens
gcggggcacccgcaggggcagacagcacaaccagcgaacagcggagagcaccaggagggcaagacgagccccgacaag

SEQ ID NO: 2337 - RNA, 59 nt, Homo sapiens
gcacccccacagggcagaggcgagggcagaaagggcccagccggcagagggaccggaga

SEQ ID NO: 2338 - RNA, 58 nt, Homo sapiens
caccgcaccggagggcgagcggacccccggagaaggagacggaaaagcagacccagag

SEQ ID NO: 2339 - RNA, 81 nt, Homo sapiens
gaaacagaggcccccgaggaccacagggagccaaaacagaagaggcaaagcccagccacagcagcagcccagcagcaaaca

SEQ ID NO: 2340 - RNA, 70 nt, Homo sapiens
aaacgaggaaaccgggaaagccaccgaaaagacgaagaaaacccgcggaagaaacagcagcgcaggcaag

SEQ ID NO: 2341 - RNA, 87 nt, Homo sapiens
cggaccgagagcggaccgagagcgcgaaacgcacgagaagaaccccagccccacaccgaggagcgggcagagacggacacaccgggg

SEQ ID NO: 2342 - RNA, 77 nt, Homo sapiens
cggacaggcgccgcgccgccgcacgggaccgccgagccacaccgggccacaggagaaagccgagcaggccagcccgg

SEQ ID NO: 2343 - RNA, 73 nt, Homo sapiens
ccccgcaccaacgagaagagagagaaaagcccggaaacgcaaaccaagcaaccaacaaacccagagaggcaaa

SEQ ID NO: 2344 - RNA, 62 nt, Homo sapiens
aggagagaaggaaagcaacgaggaagaacacagacagggaccaagaaaggcccagggaccaa

SEQ ID NO: 2345 - RNA, 79 nt, Homo sapiens
cggaagaagcgaccaaagcgccgaggaccggcaacagggcggcggggaaaaggacaggcgaagaaacagagaccacaga

SEQ ID NO: 2346 - RNA, 79 nt, Homo sapiens
cggcggcggcggccgggccggggacgacccagcgccgacgagagaaacgacaccaagaacgagcgcgaaggacaagcga

SEQ ID NO: 2347 - RNA, 50 nt, Homo sapiens
cgaggggcccgacgcaagaggcgagcaccacgccgaaaaacgggagaacg

SEQ ID NO: 2348 - RNA, 51 nt, Homo sapiens
aaggccacgggaggaagacccaaaagggaacggaggcaacggaaacagcga

SEQ ID NO: 2349 - RNA, 72 nt, Homo sapiens
ccaagccaacaaaagaagcgccacaggacacagaaaacaagggaagagggaaaccggggacaacggaacagc

SEQ ID NO: 2350 - RNA, 56 nt, Homo sapiens
cagacacggaaaacgggaagaggaagacccagagagaagacagacgccacaaagag

SEQ ID NO: 2351 - RNA, 76 nt, Homo sapiens
gcggcgaagaaggaggcaggcacgggagccgaaggaaacagaacgacagcccgcaccgacgccggcggccagccag

SEQ ID NO: 2352 - RNA, 78 nt, Homo sapiens
gcaagggggaagagagagaaacaaaagcgccagagccaagaacgcgaggcaagccggcaggggaagcaaccagggcgg

SEQ ID NO: 2353 - RNA, 70 nt, Homo sapiens
aagagcgcggaacaggacgccccgagcgccgcgccgaacccaggaccagcggcgggagaacacagggacc

SEQ ID NO: 2354 - RNA, 79 nt, Homo sapiens
gcagagcagagcgcacgaggaaacgcccagccagcgcccaggcccaggcgccggcggggacccgccgggcggagggcag

SEQ ID NO: 2355 - RNA, 69 nt, Homo sapiens
gagaaaaggggagaaaccaacaagaaaaagaccgggcaaagaagggaccaggaggagaagcaaccagag

SEQ ID NO: 2356 - RNA, 84 nt, Homo sapiens
gcggccgggggcgggaggaaccgacgggaacgaaggcggaccccaagaagaagcggaagaggagccgcggaaccaagacacaag

SEQ ID NO: 2357 - RNA, 59 nt, Homo sapiens
cagaagcggcgcgcacggacgcggagaggggagccgcacacgagacacagaaggggaga

SEQ ID NO: 2358 - RNA, 85 nt, Homo sapiens
gagccgcggaccaggagcagggcagcagaccccgcccggaagggccgcagcccggggcaacgacagcacagagggccaagccaga

SEQ ID NO: 2359 - RNA, 67 nt, Homo sapiens
agggaaaaggcagccaggcggggaggcccgcacccccagagacgcagcaggagaaccccaagaaaca

SEQ ID NO: 2360 - RNA, 88 nt, Homo sapiens
ccgagggagcagccagcccggcagccgccgcgcgaggaaaggccgaggggccggagccacaggcaaccgagaggggcgagccggggcc

SEQ ID NO: 2361 - RNA, 49 nt, Homo sapiens
gccacagcgcggcacaagacaggcccggaggaggaagcaaacggggacg

SEQ ID NO: 2362 - RNA, 60 nt, Homo sapiens
ggacgaggacgacagcgggagcccagagaggaccaggaaaaaccccagaccaccaacacg

SEQ ID NO: 2363 - RNA, 76 nt, Homo sapiens
gaaggagcggccgggagcccgccgcgcggagcgaaagagcacgaggagcagcacggacgagagaccgcacaccgga

SEQ ID NO: 2364 - RNA, 59 nt, Homo sapiens
ccgaacgacagcacagcccaagcaacagaagcagagggagggccgaacaggggggaacg

SEQ ID NO: 2365 - RNA, 86 nt, Homo sapiens
gcccgcccaggacccccaagccgccgcggacgcaggcagggagaccccaaggcaaaaccaccacacgacaaaaaccggaacgcgga

SEQ ID NO: 2366 - RNA, 75 nt, Homo sapiens
cggaaacaggaagaggaaaaacacgacaaagaaagacgggcccagccaaaaacggaagacaaaaaaacgcaccaa

SEQ ID NO: 2367 - RNA, 73 nt, Homo sapiens
cacccaggccccgacgccccgaggaaagaccacagcaagaccacgcccccagccgggggaccaggccgaacga

SEQ ID NO: 2368 - RNA, 75 nt, Homo sapiens
gacggcagcagcgagaagaagaaagcaaggaaggacgagagcgacgacaagcgggccacgcggacgaggaggacc

SEQ ID NO: 2369 - RNA, 107 nt, Homo sapiens
ccaccacggggcagcccgacaagggaggaaagagacggagaggaggacagggacgaggacgaggagggcacaaccaacggacaaaaacgcccccgagaccgaaacca

SEQ ID NO: 2370 - RNA, 73 nt, Homo sapiens
aaacccaggaaaaagccaagagagaccggagaacgcgacagaccaacaagaggccggaaaaggccaagcaaaa

SEQ ID NO: 2371 - RNA, 78 nt, Homo sapiens
ggccgccggacggccgggcgcggagacaacaggcacaaagagagaaggaacacccacagggcagacagagaaagaaca

SEQ ID NO: 2372 - RNA, 81 nt, Homo sapiens
cagaagagcaccagcagccaaaacccggggaggcaaagccagcgcaacccggggagagcccaagcccacagaggaacacaa

SEQ ID NO: 2373 - RNA, 75 nt, Homo sapiens
ggacgcgccgcgccccaagcaaaacaaacggagagaggagggagaaacaaaggccaaagacgcaggagggacaga

SEQ ID NO: 2374 - RNA, 69 nt, Homo sapiens
acgggaaggagagcgcagcgcgcggacccccccaagacacaagacccaccaccccaccgaccagaggcc

SEQ ID NO: 2375 - RNA, 84 nt, Homo sapiens
acacaggcagacccaacgggccaccacgcccagcgggaaagagcagcaccacagccccaccgagcacgggacaggaccccgccc

SEQ ID NO: 2376 - RNA, 60 nt, Homo sapiens
ggaacacagcacagaaaccagacccccaggcccaggaaaccagagaaaaaccgaggggag

SEQ ID NO: 2377 - RNA, 75 nt, Homo sapiens
cggagggagaaaggagagcccggaccgacagcagacaacaggcacaaagagagaaggaacacccacagggcagac

SEQ ID NO: 2378 - RNA, 77 nt, Homo sapiens
cccggggcaaagcagcaaagcaccacggacagagacaagacgccaaggagaggcagaccccaccaacagcaaccccc

SEQ ID NO: 2379 - RNA, 53 nt, Homo sapiens
gaccaagaaccaggccaccccaggccaccagcaagaccaccccccgagaacga

SEQ ID NO: 2380 - RNA, 55 nt, Homo sapiens
acagacccacccgcaagaacccagggcagaaaggagggggaagaccacaagggcc

SEQ ID NO: 2381 - RNA, 74 nt, Homo sapiens
cccaggaacaacaagaaacgacaggaggacggccaggccagagcgggagaagcccagaccgcgggacggcacgc

SEQ ID NO: 2382 - RNA, 68 nt, Homo sapiens
aaaccagccccaggaggggacaaaaccccgaaaaaggcaccggagaccgggcccaaacaacaagaaga

SEQ ID NO: 2383 - RNA, 38 nt, Homo sapiens
ggacaagacccgccagaacaggcgaaaaacccgcccag

SEQ ID NO: 2384 - RNA, 67 nt, Homo sapiens
gacaagcagcagcgaagccggaaccaacagagggccagcaccccgcgcaggccagcagcggcgcacc

SEQ ID NO: 2385 - RNA, 73 nt, Homo sapiens
gcgaagaaaaccaagaaccgaggaggcgcagccagccagaaagaaggggcaagaagaaacaagggcgcacaca

SEQ ID NO: 2386 - RNA, 41 nt, Homo sapiens
ccggcggccaaacaccgggcggcgacggcggcgcgaggacc

SEQ ID NO: 2387 - RNA, 89 nt, Homo sapiens
cggcggcgcgcagcggcaggcggagagacccgccgccagacagccgccaggaagcaacgcagcgcggaaaggcacaaccaaggacacgc

SEQ ID NO: 2388 - RNA, 65 nt, Homo sapiens
ccagccccaggaggggacaaaaccccgaaaaaggcaacgagaaacgacagcagaggcccccccgc

SEQ ID NO: 2389 - RNA, 73 nt, Homo sapiens
ggcaagcacaaaaggggccagggcgcaaaaaagggaagagagagcgggacggcacgggcggaaggagccacga

SEQ ID NO: 2390 - RNA, 80 nt, Homo sapiens
acgggcagaagcgacaccgaggcagaaccgcaagcaaaccaacacagcgggaaagaaagcagccacgagaagacgaaaaa

SEQ ID NO: 2391 - RNA, 63 nt, Homo sapiens
ggaaaaggacaacggaggcagagaccaagcaggggcgaaggagacagggaacgcgcgggcacg

SEQ ID NO: 2392 - RNA, 86 nt, Homo sapiens
caccaacgggaagggccggcccgcccccggccggggcgcagcggaggcagcccaccgggggacggcacggcaggcggacgcccggg

SEQ ID NO: 2393 - RNA, 52 nt, Homo sapiens
gcagggcgcccccgaggccaaaaaggcgaaacgagccgcgcccaagacaggg

SEQ ID NO: 2394 - RNA, 72 nt, Homo sapiens
acccacagcgagggaagacagacagggacgaaaagcccacacaggacaggaaaccaggaggcggcccaagac

SEQ ID NO: 2395 - RNA, 50 nt, Homo sapiens
gagccggaaacggacaaacaggaacaagggacaaaccaaagaccaaccaa

SEQ ID NO: 2396 - RNA, 71 nt, Homo sapiens
gcgaaagcacccagaggagaaaagcccaaagcgagccaaagggccggagacagcccacaccggcaggccaa

SEQ ID NO: 2397 - RNA, 71 nt, Homo sapiens
acaagacccacgaaacacggagcaaaacgccgcacgcagcaaggcgcaggaagggcaacaccaaaccagaa

SEQ ID NO: 2398 - RNA, 79 nt, Homo sapiens
ccgaggaacagagccccgaagaggcaccagggggcggcaccccggggcacaagccacgggaacacgagcacaacgaggc

SEQ ID NO: 2399 - RNA, 42 nt, Homo sapiens
gcgaaagcggaacgagccgcccggcggcccgcgccccgaagg

SEQ ID NO: 2400 - RNA, 83 nt, Homo sapiens
ccaaaccagcacaacacacaccccagccagaagcccgagcacacgcagcagggacgcaccaaaacggacagccgaagacaggc

SEQ ID NO: 2401 - RNA, 75 nt, Homo sapiens
cagcagcgcgcggagaagaacggggagccaggaaggaagggaacacggacgacgagacacgaccaacacaggcga

SEQ ID NO: 2402 - RNA, 79 nt, Homo sapiens
gacccgcggcccccgagcgcgcgacagagaccgggcagccacaggacagcagggaagaacggaaaccagagaaagaaac

SEQ ID NO: 2403 - RNA, 81 nt, Homo sapiens
acaacaaaacagaagcgcagaaaacagcgacaaggaccaaagaggaaagggagaacaggggacccaccgaccggaaccaga

SEQ ID NO: 2404 - RNA, 70 nt, Homo sapiens
caaaagcgcagaaagccacgcaaaaggaaaggacgccgccagccaccggcgcgaagccagaccagaccag

SEQ ID NO: 2405 - RNA, 66 nt, Homo sapiens
gcacaccggcaaggaccgacagcacgaggaggagagaagaaaagcggcccgagacaacaagggcag

SEQ ID NO: 2406 - RNA, 33 nt, Homo sapiens
gggaacaacagacacgggcaggcgacacccaag

SEQ ID NO: 2407 - RNA, 35 nt, Homo sapiens
gggggagaccagcaagcaggggaggcacccaccag

SEQ ID NO: 2408 - RNA, 73 nt, Homo sapiens
aaggaaaaagaagcccggacaccgggagagacaaaggggcaagaccaggaaaggcgggccaagcagaagccac

SEQ ID NO: 2409 - RNA, 74 nt, Homo sapiens
ggaccccggacgcgggaaaggcgaacagggcgggcagcgcgaaaaaagcgaccgacaaccagacccgaccagaa

SEQ ID NO: 2410 - RNA, 87 nt, Homo sapiens
cccaagggcgggaacagagaacaagagaacgggcaacccagaccacacaccggacaaggaaacaggaaagcccaaaggcgagccaca

SEQ ID NO: 2411 - RNA, 85 nt, Homo sapiens
acgcgccgggcggccaccggcgccgcgccagcgcccgccgcgcgggcacaacaaagaaaggccaagccaaacggaaagaaaaacc

SEQ ID NO: 2412 - RNA, 79 nt, Homo sapiens
ccaccacccaggaccaaaagaggaagaagcgggacccgcagggcaaaggggggaagaacaaggcccgagaagcagggga

SEQ ID NO: 2413 - RNA, 76 nt, Homo sapiens
gaaaaaccgcaagaaaccaggcgggaaacaggggacagaaagcagcccggacggcacagccccaggggcgggccac

SEQ ID NO: 2414 - RNA, 84 nt, Homo sapiens
aaaagccaccagcaaaccccccacagcagagggagaacaagaccaagaggaaagccagccagaggagggaaacagcaaaaagaa

SEQ ID NO: 2415 - RNA, 56 nt, Homo sapiens
agcccaaggcagcagccacgacacccaagccgcacaggagacagcaaaggggaagg

SEQ ID NO: 2416 - RNA, 32 nt, Homo sapiens
cgaaggccaacagaaggacgcgaagagccgga

SEQ ID NO: 2417 - RNA, 78 nt, Homo sapiens
acgcgcaagggcgcggagccgcgggccggcgagcgcgcgccaccagggagaccggcgacggccggcgacacccccacc

SEQ ID NO: 2418 - RNA, 65 nt, Homo sapiens
cacccacacagaacaagagcggacaggaaggacccgacggagaccgacaggcagccgagagagac

SEQ ID NO: 2419 - RNA, 81 nt, Homo sapiens
acaacgaagcccaggaaagagagccgagacgcgaagcgggcccaccgcgagggagaagcgccaagcaagggcccgaggcaa

SEQ ID NO: 2420 - RNA, 79 nt, Homo sapiens
caccccgcccggggagaagcacagccacagagcagcgagaagggaggaaaaaaccagaagagcaaaacaccacaacgaa

SEQ ID NO: 2421 - RNA, 80 nt, Homo sapiens
agcacggcggaagaaacggagggcagcccaccgcccgaggagccgaaggacgaagcccgggaaaccacggacggcaaaga

SEQ ID NO: 2422 - RNA, 78 nt, Homo sapiens
aggaaaagagccggaaagaagagacagagaggggaagaaccccagacagcgaacgggcacgacggccagcgaaacaga

SEQ ID NO: 2423 - RNA, 80 nt, Homo sapiens
gcgcgcccaaggccccgcccgcgggaagcggcaggagccgccgccgacaccgaagaacaccagcgccccccccaccagag

SEQ ID NO: 2424 - RNA, 52 nt, Homo sapiens
aagagagccgccagaggagcgcgccaagaggcacaaaaaacaccaaacaaga

SEQ ID NO: 2425 - RNA, 66 nt, Homo sapiens
aagcaaagcgcaacagaaacagagagaacaacgaagagaggaaagaagcggaaaggagggagcaca

SEQ ID NO: 2426 - RNA, 69 nt, Homo sapiens
gcacgcgaggggagacgacccgcccgcaagacgccccggccaggggccgagagggagagaagggcccgg

SEQ ID NO: 2427 - RNA, 78 nt, Homo sapiens
acgacgccccagcgaccccacaggcaaaggagaaggcagagcccccccaggcagaagcccgagcgggaaccagcgaag

SEQ ID NO: 2428 - RNA, 80 nt, Homo sapiens
gcagaggggagagcggccgccgccgcgccgcccaccacaggacaccacgacgccggcgcaggccagaggaagagagacca

SEQ ID NO: 2429 - RNA, 69 nt, Homo sapiens
gggagcaacgagcagaaaacccaagagcagaaagaagaggcaggacgcagggcccagaggagcccgccc

SEQ ID NO: 2430 - RNA, 78 nt, Homo sapiens
cggcaaggacgagccggggcgcgaagcccagggccacaaaggagaacacgagagacacaagaaggccaacggcaagag

SEQ ID NO: 2431 - RNA, 79 nt, Homo sapiens
gaaagagaaacccggagggcgccggggcaacgaaaaacgacaccaaccaaccggagaggggggaaaaacaaaaacaaac

SEQ ID NO: 2432 - RNA, 78 nt, Homo sapiens
ggccgggcccagaggcggagcgcgggaggaacaacgaacagagacaagacaaccaacagaaacacagacagcggcccg

SEQ ID NO: 2433 - RNA, 88 nt, Homo sapiens
ccgcggcagcaagaacagagagagaggggacagacgagagaacgaggacagagcgggagccaccagcgccaaagggaagccaggagcc

SEQ ID NO: 2434 - RNA, 66 nt, Homo sapiens
ccaaccgggaagggaaccggaaaagacaagggggcaaaggcaaaaacagcaaaagaaaagaaaaaa

SEQ ID NO: 2435 - RNA, 65 nt, Homo sapiens
accgcaggcagacaaaagggccaaagaagggagagagaccccgaaagcgaaaacagcaggaacgc

SEQ ID NO: 2436 - RNA, 41 nt, Homo sapiens
gacacaggcacaagcagggacaggccggcgggggaagagga

SEQ ID NO: 2437 - RNA, 57 nt, Homo sapiens
cccaagccgcaagccggggggccggccgggcgccccaagggagaagaaggagccaag

SEQ ID NO: 2438 - RNA, 76 nt, Homo sapiens
cgcgagaacccggggacccaaggaccacggcacgaacaggacaggcgccaaccggaacagcaaacggaacaagagg

SEQ ID NO: 2439 - RNA, 83 nt, Homo sapiens
gcccagccgggaacccccacgcggccagcgaaaacgcccaggagagagaagcccagaaacagcggagaagcaaacgagaagca

SEQ ID NO: 2440 - RNA, 73 nt, Homo sapiens
aaagggagaaagaaggaagaaacgcacgagaccgaacccaaggagaggaagagcgaaacgaagaaaccaaaaa

SEQ ID NO: 2441 - RNA, 91 nt, Homo sapiens
agggcagagcaaagacccagaacaccaagcaaagaagaggagcacaacagggaccaagaaaggcccagggaccaaagcccggacaaggccc

SEQ ID NO: 2442 - RNA, 87 nt, Homo sapiens
gcacccccgccccgggcagagaaccgacgccaccgggaggggaccggagccgccagcgcggccagagcgaagaagcaggggagaggc

SEQ ID NO: 2443 - RNA, 60 nt, Homo sapiens
cagaggggaggcgcgaaagagccaggacaaaaccaggcagaaccaacacgaacccaagca

SEQ ID NO: 2444 - RNA, 74 nt, Homo sapiens
ggaaaaagcaaagcgcacggccgggcaacggagcagcgccaagagacagcaaagaggccagacacacgcggccc

SEQ ID NO: 2445 - RNA, 61 nt, Homo sapiens
aaaaaagcgaaagcaccagcaggaaaggagaacaaacaggggggagcccccaaaaggcggc

SEQ ID NO: 2446 - RNA, 74 nt, Homo sapiens
caagcaaacgcagaaggacgcccacgagcaaccaagagggagggcagaacaacagcagcagaacggaggacagg

SEQ ID NO: 2447 - RNA, 113 nt, Homo sapiens
cgcggagcagagaagcgaaagacaaggcaaacggggaccccaggagagcgccggcagcaaaaagccccagggggcagagcggaaggacagccggaaaaacacagcgcacggag

SEQ ID NO: 2448 - RNA, 77 nt, Homo sapiens
cgcagcaaccaggagacaaagagggcaaggccgacaaccgggccagggccgcgggccaagagcaaaagccgaccgca

SEQ ID NO: 2449 - RNA, 68 nt, Homo sapiens
gggccacaggggcccgacaacggcacggggccgcaaggccaggcgcgcagaggcacccaacggcacag

SEQ ID NO: 2450 - RNA, 77 nt, Homo sapiens
cccggagcacacgcgcgcagaacaccgcccaccggagccccaccccacaggccaaagcggcccagagcgaacacagc

SEQ ID NO: 2451 - RNA, 92 nt, Homo sapiens
aaacgccagggcaaggccggcccaaagcacgccggccacggagagaagcagggaaagcaacggcgcaagcggcggcggcgggcagaggacac

SEQ ID NO: 2452 - RNA, 67 nt, Homo sapiens
ggccagcaacacccacccgaagagacaacaacaaacaaacggacagggacaagcgcacagcggagaa

SEQ ID NO: 2453 - RNA, 78 nt, Homo sapiens
gcaacggaccagaagaacagagaagaacgaacagacagaagagaaggcaggcgccgaggcgggccagcagcaccgcca

SEQ ID NO: 2454 - RNA, 78 nt, Homo sapiens
ccgcgcaagaggcgaccccagcacggcaaagcccggagacaagcaggcagcagcagagcgaacaggacgaaaggagaa

SEQ ID NO: 2455 - RNA, 75 nt, Homo sapiens
accgcgggccaaaagaaccacccggcagaaaagcaaccaccgccacgcgcccgagacaaccacaccccccccaca

SEQ ID NO: 2456 - RNA, 87 nt, Homo sapiens
cccgaagcccaacccgagagggacggggaggaacgagggcagaccggaaacaccaagcagaaagaaaaccagccaagaccacaaaag

SEQ ID NO: 2457 - RNA, 70 nt, Homo sapiens
aagcgcccacccacccagaacaggcgaggccggcaacaggcacagggaaccgacgacaagcaggaaaacg

SEQ ID NO: 2458 - RNA, 61 nt, Homo sapiens
agagacagggaggaagcggagaggaagaggagagaagcccacccaaagaaacaggacccgg

SEQ ID NO: 2459 - RNA, 80 nt, Homo sapiens
acgcccgccaacccaagcggggaggccaggagacaaaccaccaggaacccgaaaccaaacacggagggaaacaggaggac

SEQ ID NO: 2460 - RNA, 74 nt, Homo sapiens
aggaaccaacgaggcgccggaagcagaacggaacgccagacccgggagggagaaacgagaggcagggggcagca

SEQ ID NO: 2461 - RNA, 52 nt, Homo sapiens
aggaccacgaaacccgagggccaaaaaagaagggacaaacagagccaggggg

SEQ ID NO: 2462 - RNA, 82 nt, Homo sapiens
gggggcccgccgggacccccggggcccagggacagcacagagggccaagccagaacaggggaaagccaaggcgagcaggagc

SEQ ID NO: 2463 - RNA, 80 nt, Homo sapiens
ggcgccccagagcccagggcaggacaccgacaggaacagggaccacggggacagaaccccaccaaacaccagaaaacaga

SEQ ID NO: 2464 - RNA, 66 nt, Homo sapiens
ccgcaggagccccgggcggcggacggcgcccgggcgacgggaacagaaaggccccggagcagcgcg

SEQ ID NO: 2465 - RNA, 80 nt, Homo sapiens
gagagagaaaaaggacaaaagccaagaggaggacagcgcacacagcaagcacgagcaggcaacaggaagaagaacccaca

SEQ ID NO: 2466 - RNA, 60 nt, Homo sapiens
cgagaagccgaaaagcgcagcgagcggagccgccggaggaaaccccaaagagaggagaaa

SEQ ID NO: 2467 - RNA, 60 nt, Homo sapiens
gcagaaccaccccaggcacccccggccggcgcgaggccaggaccagaacagagaagaaag

SEQ ID NO: 2468 - RNA, 86 nt, Homo sapiens
cgccacggcgccccgcaaggcagaggcaaggcggcagcaaaacgggcgcccgggcagaagcaagagaaacgcagagagaacggaac

SEQ ID NO: 2469 - RNA, 47 nt, Homo sapiens
ccccagacgagggcagcaagagggcccgcggccggcccgaccggacg

SEQ ID NO: 2470 - RNA, 69 nt, Homo sapiens
agggggagcgcaggggccccgcgagacagggccagacgacggaggcgccgcacgacgcggggacagacc

SEQ ID NO: 2471 - RNA, 69 nt, Homo sapiens
cgacccgggcacccagagcagggaggagagaacggacgagaccaacgcggaaaccagcaagaaaaccag

SEQ ID NO: 2472 - RNA, 103 nt, Homo sapiens
ggagcgggcggagacgccgggcagccgaacggagggcgacggagggagggcagagcagagaccaaggagccaggaaggagaagaggggaaacagaaagggaga

SEQ ID NO: 2473 - RNA, 81 nt, Homo sapiens
gaaacagagaaggaacaggagagagaagcccagaaacagcggagaagcaaacgagaagcacaaaaaacgacagcagcccaa

SEQ ID NO: 2474 - RNA, 75 nt, Homo sapiens
ccagccgcccgcggccgggagcggagccccgggggcacagccggggaggagaggggaagcaaggggacaagagga

SEQ ID NO: 2475 - RNA, 52 nt, Homo sapiens
gcggccacgaccaagaagaagccgggaccccacgaggggaaagaaaaagagc

SEQ ID NO: 2476 - RNA, 49 nt, Homo sapiens
agggaagcagcacgagagcgggacgaccccaacacgggccaagaaacgg

SEQ ID NO: 2477 - RNA, 83 nt, Homo sapiens
caggacacggccacaacaccaagagagcggggcccggcgcacccaccaccgccgcccacggcagcccagggacccgagcaccg

SEQ ID NO: 2478 - RNA, 70 nt, Homo sapiens
aggcacacaaagagcgaaaaagccaaaagaggaaacgagccgccaaacagacaaaggaaacagcacacac

SEQ ID NO: 2479 - RNA, 60 nt, Homo sapiens
aggagcagggcggacaagcaccacggaaacaaagcggaagaccccaagaaccggacaaga

SEQ ID NO: 2480 - RNA, 77 nt, Homo sapiens
gaggcaaggggccagaggacagaggacaggaggagacaggccgagaccgagggccccgcaccccggagaagagcccc

SEQ ID NO: 2481 - RNA, 81 nt, Homo sapiens
gaacccgggggacacgcgccggaaggggcccgaagcccccgcaggaaccacaacccaaccaggaggaacggaaggaggcaa

SEQ ID NO: 2482 - RNA, 59 nt, Homo sapiens
aaaagacgacgcccggaagaggcgaaacggagccacgaccaaagccaccggcccggcag

SEQ ID NO: 2483 - RNA, 72 nt, Homo sapiens
aacgggggcgaccaggccgaaaggacagaggacagaagaagcaacccccccgaacaagacaggagccaaaaa

SEQ ID NO: 2484 - RNA, 76 nt, Homo sapiens
gacggaccggccggcgggagcaggcccagaaagaacagacaaagaccgaaaaacacgaggaaagcagacccacggg

SEQ ID NO: 2485 - RNA, 69 nt, Homo sapiens
cgggcgaggaggaaggaccgcgagaaaacacaaaccgaaaggaaagcaggcacaacaaaagcagaaccc

SEQ ID NO: 2486 - RNA, 60 nt, Homo sapiens
gcgggggacgggagcggcagccccgacagagaacaaacagcggacaaaaaacaacccgca

SEQ ID NO: 2487 - RNA, 73 nt, Homo sapiens
acaaaaaaggaagcgaaacggcgcgaacaaacaagaccggccaaagagggcgaggggacaagcggcccacaaa

SEQ ID NO: 2488 - RNA, 64 nt, Homo sapiens
agccggcagacacagcgacgaagaggaagaggggcaaaccaggaccgaccaccccgccagagcc

SEQ ID NO: 2489 - RNA, 111 nt, Homo sapiens
gcagccggccgggaccgcaggcccggaaggccagggaggaccccagacaccggagacgggaaagaacaaagaaccaggaggcagcaaggacgagcccaaggaggacacgaa

SEQ ID NO: 2490 - RNA, 63 nt, Homo sapiens
cgccgcccgcaccgccgcccgcgccccaccagaccacacgaaggggcagaagagcacaagacg

SEQ ID NO: 2491 - RNA, 74 nt, Homo sapiens
agacccccaacacagaccagacaggcacagagcgggaaaggcgcagcccggcgcagccaccgccgcaaaccgcc

SEQ ID NO: 2492 - RNA, 80 nt, Homo sapiens
gacggaagcaacaaagaaacaccaaccggccaaagaaaggaagaagaagaaaacgaaaaggagaagagaggagcagagac

SEQ ID NO: 2493 - RNA, 71 nt, Homo sapiens
cggaggaggagcggcggaggcagcagcaggaggaggacgagcaggagaccgcagaggacagagacgaggcg

SEQ ID NO: 2494 - RNA, 78 nt, Homo sapiens
ccccgagcccagaagccacagaccgcgcggagagggcaggacaaaacaccagacgaggggaaaagccccagagcggaa

SEQ ID NO: 2495 - RNA, 63 nt, Homo sapiens
gcaccaggaaacagagaagaccaaagacgaccaccaaagccagcccccagaacacgccgacag

SEQ ID NO: 2496 - RNA, 75 nt, Homo sapiens
aaccaaacgggacacacgagaggccgcgacagccaccaaagcagcgcggacaagaaaagacagaaaggaaaagca

SEQ ID NO: 2497 - RNA, 60 nt, Homo sapiens
gcgcccggcgcccagcccaccagcacggcagcaaaggccaccagagcagagaacgcaagg

SEQ ID NO: 2498 - RNA, 108 nt, Homo sapiens
cgcgaaaaccggaacaggaacaagagcaggagcagggaggacacaaaggaggagggggccacggagcgaaagccgcagccagagaagaccgcggaccgaaagcgccac

SEQ ID NO: 2499 - RNA, 74 nt, Homo sapiens
caacgggaccgcagcccacgaggcccgccaggcccggaggaggcaaggacgccacaggagaccggcgagcaccc

SEQ ID NO: 2500 - RNA, 83 nt, Homo sapiens
acagagacagagaaagagagagagcaagaacgcaacgcaagagaagagggaggggaaaagaaggcacccgggcccaaaccaga

SEQ ID NO: 2501 - RNA, 82 nt, Homo sapiens
gagagagaacagcacgacagaagcagcaagaaccacagaagccagcagacccagcacgggacagagcagacgaggaagagaa

SEQ ID NO: 2502 - RNA, 76 nt, Homo sapiens
acaaaaagacacaacagaaagaggacccgagccccaaagacagaaaagccccgagacggaagagaagagaagagaa

SEQ ID NO: 2503 - RNA, 120 nt, Homo sapiens
gagggggcccgagccccgcaacaccgcggcccacgggacccccaggagggacccgcagggcccgccacaaaaacggcagcagagccaaaccaggacggaccagagaaggagagaagccaa

SEQ ID NO: 2504 - RNA, 82 nt, Homo sapiens
aaacagacaggggaagcgccagcaggagagggggacagcgccagcccgaccaggcagccaagaacgagaagcggggcagaca

SEQ ID NO: 2505 - RNA, 87 nt, Homo sapiens
cgagcacgccgcagggagaagaccagcaagcgggcggcaagacacggggcgacgccacagagaaagccaaagcgccagacaaaccac

SEQ ID NO: 2506 - RNA, 81 nt, Homo sapiens
gacccacgggccaaaagcgagcaaggaggcggcggccggacaagcagacccacccccgacgccgaccaggaaaaaaccggc

SEQ ID NO: 2507 - RNA, 76 nt, Homo sapiens
gcgccagcgcccagggggggaaaccaccgcccgcacggcaaagcaaagaagagccgcgcagaacagaaggacagac

SEQ ID NO: 2508 - RNA, 82 nt, Homo sapiens
acccaagccgagccggccgcaaaagggcaccacaagccgaacagccagccagcaaaagaacagcagcaccagaagcagccag

SEQ ID NO: 2509 - RNA, 74 nt, Homo sapiens
gcagcgacacaggaggagacggcgcacagggcccaggaaggccaccccagcagacaggccaaggcccgggcaag

SEQ ID NO: 2510 - RNA, 75 nt, Homo sapiens
ggcggcggcgacagccaggcccggaagcgagggcggccgcgccggcccagggccggcacgggccggaccacagaa

SEQ ID NO: 2511 - RNA, 75 nt, Homo sapiens
gacaccacaagaacaaagaggcagaaccaggccccgccggcggagcgccaggcgcgaccaccaacggagcgggcc

SEQ ID NO: 2512 - RNA, 114 nt, Homo sapiens
agcggagcgagacgaagcgcccggggggcgagcccgccgcacccgggccgcgccggcacgacaccccgggccaagaggacaacaagaagcgccggccacgccacaccagccgca

SEQ ID NO: 2513 - RNA, 76 nt, Homo sapiens
aggacagcgcacacagcaagcacgaggcgggcaggggcacggccaggcagcccgacccgggaccagcgacccccgc

SEQ ID NO: 2514 - RNA, 71 nt, Homo sapiens
ccacagcgggaaaagaaagcaacgcgagcccgcacaggcacaaggccaagacggccaagggagccacaggg

SEQ ID NO: 2515 - RNA, 78 nt, Homo sapiens
aaagcaggacagcccagcgagaccgaggaagccggacacggccagaaagcccgacaccagcacccggccggcagagga

SEQ ID NO: 2516 - RNA, 76 nt, Homo sapiens
ccagggagaccagcgaagccggaccccagggagccggggggaacgggggcacgccggcacgggaggcagaaggagg

SEQ ID NO: 2517 - RNA, 52 nt, Homo sapiens
ggccagggagcccggaagggaggggaagggccgaaacagacaaccgagaggc

SEQ ID NO: 2518 - RNA, 85 nt, Homo sapiens
ccccccagcagccgccaccccgcgcagagccgggcacacgggccgcagcccaccacagcccccaggaagggaccacagaccagca

SEQ ID NO: 2519 - RNA, 59 nt, Homo sapiens
aagcaacgaagccggggaccagaaaggaacggcaagacaacaagggcccgggcagaggg

SEQ ID NO: 2520 - RNA, 116 nt, Homo sapiens
agcgagcacgcgcccgcaacccgaaccacggacaggacccgcccagcccaacggggaggccccgagccccggccccaaagacccaaaacagagacaccccccagcccccgcgcccc

SEQ ID NO: 2521 - RNA, 53 nt, Homo sapiens
acaggagaacaagcaggggcccccgaggaagggcgcgggagcggggcgcagac

SEQ ID NO: 2522 - RNA, 74 nt, Homo sapiens
ccagaagcaaacaaaagcaagcggccgggaaaaaaagcaggggaaggggcgacggcccacgagcgcacaggacc

SEQ ID NO: 2523 - RNA, 84 nt, Homo sapiens
gcccaccgggcacccgacgaagcaacacgaagaccgaggaaaagcgcgggagccaccaccccgaagacgagccacgcccagaag

SEQ ID NO: 2524 - RNA, 78 nt, Homo sapiens
aagagacaccaaggagacgcccaaggaaccccgccggccaccggcgcagggcacggaccgaagagggcggaaccccag

SEQ ID NO: 2525 - RNA, 38 nt, Homo sapiens
gcccaaaaacacaagggagcgccaaaaaagagggggcg

SEQ ID NO: 2526 - RNA, 55 nt, Homo sapiens
gccagcacgagagcaagacgccaggagggagcgcgcggaacgaggaagcagaaag

SEQ ID NO: 2527 - RNA, 83 nt, Homo sapiens
agaaacagagggaggaagacagccagcagagccagagaccaagagcccagagaacagagcgccccaccgaagagccccagacc

SEQ ID NO: 2528 - RNA, 67 nt, Homo sapiens
caaccaaaccacccagacaagccacccaccgagcagggacacacaggaagacgaacacggaacgggc

SEQ ID NO: 2529 - RNA, 76 nt, Homo sapiens
ggaggcagcaccaccgcccgggcaagacaacaggcacaaagagagaaggaacacccacagggcagacagagaaaga

SEQ ID NO: 2530 - RNA, 106 nt, Homo sapiens
ccacggagagaaggaggccaaaagggacccggggggagcagggacggagacagcacaagaggaagaccagcacaggacgcccgaaaccggggcaacgcggaggaag

SEQ ID NO: 2531 - RNA, 75 nt, Homo sapiens
ccccgcccccacgcgccaaaagcaaaaagaaggaaaaccgcaccgaagcagccaaggccaagaagagcaagcggc

SEQ ID NO: 2532 - RNA, 74 nt, Homo sapiens
ggagagccgaaccagaagagaaaggagaacagagagagggaacaacaaaaggaagaaaggggaccaaaagccca

SEQ ID NO: 2533 - RNA, 72 nt, Homo sapiens
ggaggagccgaacgagccccagccaggaacagccccagcgcggcacagaccaccgggagcaacacccaagca

SEQ ID NO: 2534 - RNA, 70 nt, Homo sapiens
aaagcagagcaaaccaccacgaaggcaggaaggaacggcaccgaggcacgggggcccggcaaaccacaga

SEQ ID NO: 2535 - RNA, 70 nt, Homo sapiens
cggccccaggagaagagccagagcgggaggacgacgagagagcccaggaccacaagccagaaaacacgcg

SEQ ID NO: 2536 - RNA, 75 nt, Homo sapiens
gcaggggcgggcggcagaacagccaagagcgcggaacgcggaagagagaagggcacagaccaagacaacgaaccc

SEQ ID NO: 2537 - RNA, 85 nt, Homo sapiens
caggcggaacaaggagaagaaccaggagacggaggaagaacccaagccagagcccagaccggcaccgcggagcaaaggaaaaagc

SEQ ID NO: 2538 - RNA, 58 nt, Homo sapiens
aacaagacagaacgagaggcgcagaagagcaagaccgaagacaacaaaagaaaacaaa

SEQ ID NO: 2539 - RNA, 77 nt, Homo sapiens
gagaagcaagaaggcccggacacagcaaaccgggccacaggaagggagagaccagcagccgcgaaaccacccgaaag

SEQ ID NO: 2540 - RNA, 52 nt, Homo sapiens
aaaggaaaagagccccgaccaagcgaaagacagaggcccagccgaaagaggg

SEQ ID NO: 2541 - RNA, 72 nt, Homo sapiens
ggggcgccgcgcgcccgcgccacccggggccgccgcgcaggagcccccggagcggggaggaaggagcccccg

SEQ ID NO: 2542 - RNA, 58 nt, Homo sapiens
caacagacaaccaccaaaggggaaacagaaacaagggggggccgcccgcccaaggcag

SEQ ID NO: 2543 - RNA, 39 nt, Homo sapiens
ggcggcggcggcgcggcccaaaagaggagcgggggacag

SEQ ID NO: 2544 - RNA, 74 nt, Homo sapiens
cccagagagaagacagcccacgagggccccgaggcgcgagggccaagacgccacaggcaggaggcaggggcgac

SEQ ID NO: 2545 - RNA, 88 nt, Homo sapiens
gccgccgcggcagcaagaacagagagagaggggacagacgagagaacgagggacacggccaacacgggaaggaaaagcgggaggaagc

SEQ ID NO: 2546 - RNA, 75 nt, Homo sapiens
caaaacgggcaaaagaccaaagaaggcaaggagagaagagaagaacagcacaggacagggagccagaacagaaag

SEQ ID NO: 2547 - RNA, 95 nt, Homo sapiens
gcaaagaagagaaaaggcggcaggagaaaagcacgacaacgcgagaccaaaaggaacggcacggagacaagggagccacgcagccgcaggggaac

SEQ ID NO: 2548 - RNA, 75 nt, Homo sapiens
cgccggggcgcaaacaggagacagaggagacagaaaggaacgcaagcacaggaccagaaacgaaaggcagcagaa

SEQ ID NO: 2549 - RNA, 75 nt, Homo sapiens
agacgcaaaagcacaagagccgaccaacgggggacaggccgaaccgaggccaagccgcaggccgcgccgccggac

SEQ ID NO: 2550 - RNA, 56 nt, Homo sapiens
agcaagccagggcaacgaggacaaccgagcacaaaaaaggcacccggagaacagac

SEQ ID NO: 2551 - RNA, 82 nt, Homo sapiens
ggaggcgcggcggcgccgcgcgcgcagggccgccggcccgcagccgccaccacccaggaccagaagacgccccgagccggac

SEQ ID NO: 2552 - RNA, 81 nt, Homo sapiens
gaaacccggacacccgccagcgagcggccgcccccagggacgcgagcccgcaacccccaagcagacggagccaccgcgccc

SEQ ID NO: 2553 - RNA, 74 nt, Homo sapiens
ggcggggaagcaagcggggccacgacgcccgcggaaaaccaagccaggagggaacgcaacacaacccgcacacg

SEQ ID NO: 2554 - RNA, 71 nt, Homo sapiens
gccagcacaccccagcacgacccgagagcacaggcaccgacgagagggcgcaccgcgccggagcccgaccg

SEQ ID NO: 2555 - RNA, 82 nt, Homo sapiens
gcgagaccgcgcgcgaggagaggagcgcaacagcagcaccagggaaaaacaggcgccgcgacaaggggagggagcggggccc

SEQ ID NO: 2556 - RNA, 77 nt, Homo sapiens
ccccaccgcgggggcgcagagcgggcaagaggggccgaacaagccgagacggggccggccgagcaagaccccgcgga

SEQ ID NO: 2557 - RNA, 70 nt, Homo sapiens
cacacgggaacccaagaaacaaacccagacgggcagaagagagagaaaggaagccaggaccccgcgagag

SEQ ID NO: 2558 - RNA, 75 nt, Homo sapiens
gaagcgcccccgggaggggaccagaaggggccgccgcacgccaacaggggaagcgaagaggaggcacccggacaa

SEQ ID NO: 2559 - RNA, 60 nt, Homo sapiens
aggaaccggccagaggagaagccgcggaaaccaacaggaaacaggaggaaagaaaaagca

SEQ ID NO: 2560 - RNA, 72 nt, Homo sapiens
ccaggggcaggagccggcggcccccaggcccaacacgcccaacgggacaagagcaccaagagagaccaggac

SEQ ID NO: 2561 - RNA, 77 nt, Homo sapiens
gcacaggcacagaaggccaaaaaggcaaccacagagagagagagggaggggaggggagagcagacaaaaacgagaaa

SEQ ID NO: 2562 - RNA, 53 nt, Homo sapiens
gaagccacggaaaagaaaaaaaaggcagcggaaagaagaaaagaaacggccca

SEQ ID NO: 2563 - RNA, 43 nt, Homo sapiens
acacgcagcgcaggaaagggggaaccgccaaaggcagacagga

SEQ ID NO: 2564 - RNA, 87 nt, Homo sapiens
cagcagccggcagcagcccccggggcaagagcaggagcccggcaccccccgccgacaaggagggcgcgagaccgcacagcaaggaaa

SEQ ID NO: 2565 - RNA, 54 nt, Homo sapiens
gggacccggccgcaggggggccccaacagaaaagcccgagaaaggaggagaaac

SEQ ID NO: 2566 - RNA, 67 nt, Homo sapiens
gagaagcaggcggcgccggaacagaacgggagaggaaaagcaggcgacagcaaacaagacgacagac

SEQ ID NO: 2567 - RNA, 93 nt, Homo sapiens
accaaacaaaacccaaggaaaggcgccggccaaaggacagggaaccaggccagaaaacaggcacaaagagggcagccccccaagaagagaagc

SEQ ID NO: 2568 - RNA, 30 nt, Homo sapiens
accgacaagacccggcggaaacagggaggg

SEQ ID NO: 2569 - RNA, 66 nt, Homo sapiens
ggagacaacgagccgcagagagccggacaaaccagacacgggagggggagcagaccacaggcggag

SEQ ID NO: 2570 - RNA, 60 nt, Homo sapiens
cacagggggacgcgcaagaagcacaccagagccaggccagaagaggccgcccaggccccg

SEQ ID NO: 2571 - RNA, 79 nt, Homo sapiens
cgccgcaggagacgagaggacgggaccaggcgaagcggccgagcaggcgagcgaacgacgggacggggacaccagacgg

SEQ ID NO: 2572 - RNA, 59 nt, Homo sapiens
gggaccacggcaccgccccagcgagacacagccagcgcgccagaaaccggggaacgaga

SEQ ID NO: 2573 - RNA, 59 nt, Homo sapiens
gccgaaagcaagaccaaaagagaggcaccgcggaacacaagaggacccaaagacaggac

SEQ ID NO: 2574 - RNA, 68 nt, Homo sapiens
ccggaaagcccaggcccgccagccaccaggaagaaagcagaggcgaccaggaaccggaaccgaggcca

SEQ ID NO: 2575 - RNA, 76 nt, Homo sapiens
aagccaagagagaccggagaacgcgacaggaagaccgcaggaaagcaggaaggcaagaaagccaaggacgaaaccc

SEQ ID NO: 2576 - RNA, 70 nt, Homo sapiens
gagaaaaaacagaggggcacaaccgacaggaaaaaaagcggaagagcgccagcacggaacgcgaagagac

SEQ ID NO: 2577 - RNA, 68 nt, Homo sapiens
aagaccaaagaaacgggccccccaggagcaaggaacagaggagaacgagaccggagggcagccccggc

SEQ ID NO: 2578 - RNA, 73 nt, Homo sapiens
aggaaggcccgagggaaagcacgcggaaaggcgcagacagcgaaagaaacaagaccgacaagcaaacaagaac

SEQ ID NO: 2579 - RNA, 88 nt, Homo sapiens
ccagggaagggccacccaggggcccccaccccgcgggcgcccggacggcgaaggagcaggggcgcgcaggcggaggcaaggcgcgacc

SEQ ID NO: 2580 - RNA, 72 nt, Homo sapiens
agagcccaaccaggagccagccagggccgcgagggcccggaacaggggcacgcacgaggcggaaccacagga

SEQ ID NO: 2581 - RNA, 86 nt, Homo sapiens
ccagaaggaagaggcggacggaggagcaggcgagaagagaagggggccgacaggaccacaacccccaggaacccggaccccaccag

SEQ ID NO: 2582 - RNA, 70 nt, Homo sapiens
gaaaccaagacagcccaaacgccccacgaccagccagccaaccaagaaaaagaaccacacgagaaacaca

SEQ ID NO: 2583 - RNA, 62 nt, Homo sapiens
gccagcgcccggcaccaaggaaccccggcagccaaggccagggaagcccagggaagacccac

SEQ ID NO: 2584 - RNA, 65 nt, Homo sapiens
cgcggagcaaccaaccagcaaccaacgaggaaaaaggaggaaaaaacgcccgacaaaacccagag

SEQ ID NO: 2585 - RNA, 79 nt, Homo sapiens
aaccgccaaccacgcaccgggaacagaaggccaagaggaacagccaggggacccacccgcccaacagccccaccacaga

SEQ ID NO: 2586 - RNA, 71 nt, Homo sapiens
ccggcacaccgcggggccgaaaacaacgacaacgagcacaggacagggacaagcgcacagcggagaaagca

SEQ ID NO: 2587 - RNA, 74 nt, Homo sapiens
ggaaggcaagaaaccagaaagagaacgggacaacaaaagagccacccaaggaagagagaagggcacagaccaag

SEQ ID NO: 2588 - RNA, 84 nt, Homo sapiens
ccgccgccacagcaggaaacacccaccccgcgaggcccccgggcccgggaaaacacacggccaggcacaaagacggcgaagaaa

SEQ ID NO: 2589 - RNA, 74 nt, Homo sapiens
aggcggagcgcgggacagccgcgacacacagagccggaagaaaacagaagcggagaaagggagagcacaggggg

SEQ ID NO: 2590 - RNA, 55 nt, Homo sapiens
accaggccccaaggcccgccgcacacccggagagagccgaaaggcagagccccgg

SEQ ID NO: 2591 - RNA, 75 nt, Homo sapiens
gaagaacgggagcgccgcaagggcagcaagaaccacaagccaggagaccaccccacaacagggcgcacagacaag

SEQ ID NO: 2592 - RNA, 75 nt, Homo sapiens
ggagaaagaaggggaaggacgcgcgggcacaacccgaacagaggagcccgggacagcaagaaagccagccagcaa

SEQ ID NO: 2593 - RNA, 89 nt, Homo sapiens
ggaggaggggcgaagacgaaagagcgaagggggcagggccggcccagggagaacgcaaaaccaccacccccacaaaaaacgcagggaga

SEQ ID NO: 2594 - RNA, 82 nt, Homo sapiens
aaggagcaggccagaaaagaccaggcagcaacaggcaagacgggggggccaaacacgggacaggaaaaagggagcgaaaacc

SEQ ID NO: 2595 - RNA, 43 nt, Homo sapiens
agaaacccggagggcgccgggcccccgggaccgggccgccgcc

SEQ ID NO: 2596 - RNA, 52 nt, Homo sapiens
cccaggggaaaacccccgggaccaggacagcagaccacagcccggcaggccc

SEQ ID NO: 2597 - RNA, 84 nt, Homo sapiens
ggggcaaaagacagaaaaaacaaggaggaccaggcaccaacagaacaccacgacagcagcagcagaggacccaggagaaccccc

SEQ ID NO: 2598 - RNA, 77 nt, Homo sapiens
gcagccacgggaaccaaaaaccacagaaaacaagcggaggcacgccgaggcaggcaggggacagagagaggggccaa

SEQ ID NO: 2599 - RNA, 95 nt, Homo sapiens
gccgccaggagcccgaccgggagaggacaagaccacgagccaggcacgagaagagaagcccagagcaaaacaccccaaaccagaccaccgacgcc

SEQ ID NO: 2600 - RNA, 79 nt, Homo sapiens
cgccagcaaggggcaccagcaagcagaaggcaagcggacgaggaacgcaggagcgaagaggaggaagcccccaggagcc

SEQ ID NO: 2601 - RNA, 84 nt, Homo sapiens
agaaggcgcgaagcacaggaggagaacaagccccgagcggaaaacccaccggacgaggggcgggaggcccagaccaacggaccg

SEQ ID NO: 2602 - RNA, 68 nt, Homo sapiens
ccagaaaaacccacagccagcaaccagagggaaagcaaacgccgaaggcaagacacgaagacgccacc

SEQ ID NO: 2603 - RNA, 73 nt, Homo sapiens
caagagaaagaaaaacaagaacgaggaacacgaacaggaacccgcaggcccagaaggcaaaaccacagaagaa

SEQ ID NO: 2604 - RNA, 57 nt, Homo sapiens
agggagcggaggagccagacaggggaaagccggggccccggggacccgcggcacgga

SEQ ID NO: 2605 - RNA, 76 nt, Homo sapiens
caacaacagcaacggaggcgggaccggaacaggcacaccccacacaagcacgccaagacgaaaccacaaaacgccc

SEQ ID NO: 2606 - RNA, 63 nt, Homo sapiens
gggaccgggaccgcccggacccggccgggagaagcagcagagaaagcgaggggcacagaggca

SEQ ID NO: 2607 - RNA, 69 nt, Homo sapiens
agcccgggccacccccccaggcaaggaaggaggacgaggcaagggaacagaaggagcaggaaaagaaac

SEQ ID NO: 2608 - RNA, 60 nt, Homo sapiens
aggacgcccacgagcaaccaagagcccggagagacaaggagaggaacaaaggcggaacag

SEQ ID NO: 2609 - RNA, 72 nt, Homo sapiens
aggagccgacagcaagaccacgggagcgagacaaaaagcgcgcagaagaaagccgcggaaccgcgacaccaa

SEQ ID NO: 2610 - RNA, 56 nt, Homo sapiens
cacccggaggcgcccgagcgaacaaccgccagggaacagcaaaaaacgagagcagc

SEQ ID NO: 2611 - RNA, 79 nt, Homo sapiens
aacgcccccaccaccgcaaacagccgaagaccccaagaagagagagaagaaccagacacgcgaagaaaaaaggaacaga

SEQ ID NO: 2612 - RNA, 82 nt, Homo sapiens
cagggaggaaggggaggaggagacaggagacccaaagaccccagacccaacagaggaagccgcaagaaacgggacgacagga

SEQ ID NO: 2613 - RNA, 104 nt, Homo sapiens
acacggagcgaggaaagagaaggcgcaccggaggacgacaggcaaaggggcaccagcgggcacaccaagaagcgccccgcaagacccaccgaggccgcgcaagg

SEQ ID NO: 2614 - RNA, 67 nt, Homo sapiens
ggaacaagagaaagcagggaagcgacagggagagggcgcgccgggcaccaaagcgaaccagacaggg

SEQ ID NO: 2615 - RNA, 75 nt, Homo sapiens
cacaaaagcagccaaccacccccagccgaaggaaccaagaaggagcgagggaggagcagcgagacagcaagagac

SEQ ID NO: 2616 - RNA, 70 nt, Homo sapiens
aaaaacaacaccgcgaaagagcagcaacccggaaacggaaaagacaaacacaaacaccccgagaccacaa

SEQ ID NO: 2617 - RNA, 74 nt, Homo sapiens
accgcagccagaaacgaagaaaagcccacccacaagaccagacaaggaggaacaccgcaaaaccaacacaacaa

SEQ ID NO: 2618 - RNA, 86 nt, Homo sapiens
caagaacccaaaaaaagacagccagggggcgccaaacaagggaaccgacccagagaggaaagaaacaaggcagaaagagacgacga

SEQ ID NO: 2619 - RNA, 32 nt, Homo sapiens
ggcgcgcaaaagcgagacccaggccgccagac

SEQ ID NO: 2620 - RNA, 69 nt, Homo sapiens
caaagacaccgcagcacgagggagcgcgcaaggaagcgcgggggcaggccgggcgaccagcccgagggc

SEQ ID NO: 2621 - RNA, 84 nt, Homo sapiens
ccgaggcccgcccgcaccagcggcgggcagggcgcaagaggcagacagacaggcgacgggcagccaacaagaaacgacacccag

SEQ ID NO: 2622 - RNA, 69 nt, Homo sapiens
gagagagccaagcaaccaagccagaacagagacagacccgggggcccccaaggagagggaagaagccag

SEQ ID NO: 2623 - RNA, 74 nt, Homo sapiens
ccaccagagcaggggagagaaccaacacaccaaaggccaagagaggccaacagaggaacaaggcccgcagaacc

SEQ ID NO: 2624 - RNA, 62 nt, Homo sapiens
gcggaacccggggccgggacgcagcccggcggcagcaggaaccaacgcagagccccagaaca

SEQ ID NO: 2625 - RNA, 58 nt, Homo sapiens
cggaccccccgaacagaaacagagaacggaccccaccgacgaggcacccgagaagccc

SEQ ID NO: 2626 - RNA, 65 nt, Homo sapiens
ggggcgaagaagcagcacaaggcgagccaggccaggcagagcagcccaccagggaggggaggggg

SEQ ID NO: 2627 - RNA, 65 nt, Homo sapiens
ggcgacaacgagcacaaaaagagaaagcgcgcaaagcggaccaaaaccagggggcaagaaacccg

SEQ ID NO: 2628 - RNA, 79 nt, Homo sapiens
gccagcgccggaccccccacccacgcgaacgagagggacacggagcaggccgcaggagggaagcgcacggaaaccgccc

SEQ ID NO: 2629 - RNA, 59 nt, Homo sapiens
aggaggcagagccaaacacccagggaagacaaggggaagcaacaccagagaacacggaa

SEQ ID NO: 2630 - RNA, 45 nt, Homo sapiens
agcaacggcgacaccagcaagggacgcaccaaagaagacagacac

SEQ ID NO: 2631 - RNA, 71 nt, Homo sapiens
accaccggccggaagcaacaagcaaaacccaaggccagggcgaagacagaggcagggcaacggagacagaa

SEQ ID NO: 2632 - RNA, 60 nt, Homo sapiens
accacacacaccacaggaagccaacaggaagggaaggggcggagacgggcggaacgcagg

SEQ ID NO: 2633 - RNA, 74 nt, Homo sapiens
gaacgccggggaccccggagcaaaaacaggagagaaacagggccacacagagcaaaacgcacccccaggaggga

SEQ ID NO: 2634 - RNA, 40 nt, Homo sapiens
ccgagagcgggcccgagcagggcccccgagcccccgcagg

SEQ ID NO: 2635 - RNA, 72 nt, Homo sapiens
gagagagccgcgcacgcacagacaagggccggcggcacccacgcgggggacgggcggccgggcccaccccgg

SEQ ID NO: 2636 - RNA, 56 nt, Homo sapiens
gaacgggaacagcgcaagaaagaagcacccagaagggagaggccaaaggaacggcg

SEQ ID NO: 2637 - RNA, 47 nt, Homo sapiens
cgcggcaggccaggggaccggccggaagaaggaacaagaacaggagc

SEQ ID NO: 2638 - RNA, 71 nt, Homo sapiens
acggccgacccgccagaggaggccccccagccacggaaacagaccgaaccagcacaccgaaccccccacgg

SEQ ID NO: 2639 - RNA, 74 nt, Homo sapiens
gaggaacagccacagaccccacgcgggggccacgcacaaaggcaaccccgcacaaacccagcgaacaacggagg

SEQ ID NO: 2640 - RNA, 52 nt, Homo sapiens
caacaacacaaaaaaagcagcaaggggaccgacagcaagaaaaggagaaaac

SEQ ID NO: 2641 - RNA, 67 nt, Homo sapiens
ggaccggaacggcggcgacaaggggcccgaacagagggggcagaacccgacaacgacaaccagagag

SEQ ID NO: 2642 - RNA, 76 nt, Homo sapiens
gcaaggacccgcccccaagacggcgacacccccaggcccacacgccggcaccccaagggaccgcaagaacaagcac

SEQ ID NO: 2643 - RNA, 88 nt, Homo sapiens
ggaggaaacagcgagggggaggagacggggacgagacagcccgcacagagcagagcgcagccgccaggccccgcccagccccaccagg

SEQ ID NO: 2644 - RNA, 82 nt, Homo sapiens
aagggccccgggacccgccgcgagggacccggggaagcccagagcgcggcgcaggccgcaagcagccggcggccggaagcac

SEQ ID NO: 2645 - RNA, 76 nt, Homo sapiens
cgggccaagggagcgaaaagaacccccaaaagggggcgacagcaagaaggagccagcacagaggcaaaagaaccaa

SEQ ID NO: 2646 - RNA, 69 nt, Homo sapiens
ggcagcgggccagacccaggaccgcgacacaccaagagaagacagaacacacgacaccagaagaaacca

SEQ ID NO: 2647 - RNA, 77 nt, Homo sapiens
gaggagcaggaagagaaaccagaaacccgcaaagaagcgagccagcaaagaaacggggggacccacgagagaacccc

SEQ ID NO: 2648 - RNA, 78 nt, Homo sapiens
ggacggaggcacagcgcagcgacgagagggggaagaccaaagcaagggaggagaagccagccccgcggcgggcgggaa

SEQ ID NO: 2649 - RNA, 75 nt, Homo sapiens
ggcccgcgacggaggccgcggggcggcagaccaggggaaagagcaaggcacagcgacaacacgaacggggaagcc

SEQ ID NO: 2650 - RNA, 79 nt, Homo sapiens
cggccgggggaggcaggggcgcggcaggacacagggcccgggagcgcacggggccgggccgccgcgggcaaggaggcac

SEQ ID NO: 2651 - RNA, 69 nt, Homo sapiens
caggacagagcccccgaggccccagaacaccgacaggaagggaaggggcggagacgggcggaacgcagg

SEQ ID NO: 2652 - RNA, 79 nt, Homo sapiens
cgagcaacaaccgccgagcgggagaacccagaagaaaggcggggacaggcaaccagggagcaggcaccgcccagacaca

SEQ ID NO: 2653 - RNA, 70 nt, Homo sapiens
cagcagaccacggcccggagagagcacgcccaccgcgccggagccaaagacgaggcgaggaaccaaaggc

SEQ ID NO: 2654 - RNA, 70 nt, Homo sapiens
agacaggcgccaggagcacagaagagcgaggaggggggggagagaaaccagcccagacacagaggagaag

SEQ ID NO: 2655 - RNA, 77 nt, Homo sapiens
ccgaaggagccaccccccggcgacgccccccgcccaccacaggacgagaacccccgcgaaccagaggaacccagcga

SEQ ID NO: 2656 - RNA, 59 nt, Homo sapiens
cggacggagaaacaggcggaccaaaccgccgcgaacgccaaaagacgaacacaaaggga

SEQ ID NO: 2657 - RNA, 56 nt, Homo sapiens
gaggagacagagaaaacacggaacagaggaaccggagggacggagggcaaccagga

SEQ ID NO: 2658 - RNA, 78 nt, Homo sapiens
gcggcggcggcagcgacagcagcagcagcagccagacgggaaaggcagacagaccgaagcgccggccagaccaggcga

SEQ ID NO: 2659 - RNA, 74 nt, Homo sapiens
gagaagggcagggcgagcgcccccgccagggccgaccaggggggagaagagaaacaaagagagcagaagcccca

SEQ ID NO: 2660 - RNA, 82 nt, Homo sapiens
gcacggaccacacagcgcgggagccacgcagaggacgccggaacacccggaagccgagaaagccagaccagaccgaccaacc

SEQ ID NO: 2661 - RNA, 82 nt, Homo sapiens
cacgccaggcggccagaggacccagagccaggaagaggccgaccagcagccagacccggcgaagccaacccaacggagccaa

SEQ ID NO: 2662 - RNA, 71 nt, Homo sapiens
gaacaaggagcccgaaaagcaagaaacaaaaacacagggaaccgggcgagcggcagagcgggacaagacac

SEQ ID NO: 2663 - RNA, 77 nt, Homo sapiens
gaagaaaggcagaagaccggaaaaaacgaaggaaggaggacccgaggagagagaagacggaaaggaaacacggaagc

SEQ ID NO: 2664 - RNA, 72 nt, Homo sapiens
gaggaaaaagccggacgcacggcccccgagaaaacgaacagcagggaacgggaagaacaaggccaaacccgg

SEQ ID NO: 2665 - RNA, 57 nt, Homo sapiens
ggggagcccggggcgcgaggaccccggggggaggacgaacggacagccagaagggac

SEQ ID NO: 2666 - RNA, 71 nt, Homo sapiens
gccacgccgcaccgaggagaacccggaagcgggcaggacagcaccgacgggacaccaaggaccgcggacgc

SEQ ID NO: 2667 - RNA, 74 nt, Homo sapiens
acacgggcgagaagcccacgaggcaacacgcaaggccgccaccaggagcaccacgaagaaacgcccagaggagc

SEQ ID NO: 2668 - RNA, 55 nt, Homo sapiens
gcccacagaaacgcgcaggcaggcccggaaaagaggaaacaaggacccgccacag

SEQ ID NO: 2669 - RNA, 83 nt, Homo sapiens
gacgaacccaaccgggcccggcccgcaggggcgggaagaagcccgccgccaccaccccaccaccagcgcagcagagaagaaaa

SEQ ID NO: 2670 - RNA, 57 nt, Homo sapiens
aacaaaccaaagggacgaggcccccccgccccagccagccggcagacgcgccgcggc

SEQ ID NO: 2671 - RNA, 79 nt, Homo sapiens
cggcacgagcggccgcggccaggcgacgccacccaagacacaaacggcgacacagacaagcagaccggaagaccgacgg

SEQ ID NO: 2672 - RNA, 76 nt, Homo sapiens
gaaaggccggccagcgggacaggagggcaggaagagcgcagcggggacaaggcggagaagacaacacaggaggccc

SEQ ID NO: 2673 - RNA, 84 nt, Homo sapiens
acggcacagggagaaaccgcccgaaaacggagaagcagaaggaaggcagagcccacaaacccaagcagcaaagaaagagccaag

SEQ ID NO: 2674 - RNA, 114 nt, Homo sapiens
ggggcggcagcgaggcggaggcgacgaggaggcggacccccggcgcagcgcccgggggcggagaaggccaggcagcagcgcaggaggagcccggcaggcagcggccagcgggag

SEQ ID NO: 2675 - RNA, 38 nt, Homo sapiens
caaaacaggcagaaaacaaagcaaacaggaccaaggca

SEQ ID NO: 2676 - RNA, 72 nt, Homo sapiens
cgggccagagaagcaggaggacgcgagaaggagcgacgaaaggaagaagccaggggcgcggggcggggaggc

SEQ ID NO: 2677 - RNA, 116 nt, Homo sapiens
cggggagaagggaagcgcagacgggacacagcggggcaggagcgcccgcaccacaccccacgcgaggcggagggggggcggcgcggccagcgcgggccccgggacccaggcacccg

SEQ ID NO: 2678 - RNA, 57 nt, Homo sapiens
gcggggccccggcgcgccacagcggggccgcggaaaaccagacgagagacagaagac

SEQ ID NO: 2679 - RNA, 55 nt, Homo sapiens
caccgcccgccgcccgccgcgcgccgccggagccacagcgagccgcccgcgggcc

SEQ ID NO: 2680 - RNA, 47 nt, Homo sapiens
gcagacaaaagggccaaagaagggagagagcaggcacaacaccggga

SEQ ID NO: 2681 - RNA, 59 nt, Homo sapiens
gacggagcggacggaaagcccggccgaggggagggagggcagccgagaaaggaaagcac

SEQ ID NO: 2682 - RNA, 61 nt, Homo sapiens
aaagggccaaagaagggagagagacaggagccggcacggagcacccgccgccgaccaacac

SEQ ID NO: 2683 - RNA, 79 nt, Homo sapiens
agaaaaccagagaagaaaggcaagccagacggggaagagacaaaaaggagaagacagacgcgcggaccgggaagaggcc

SEQ ID NO: 2684 - RNA, 75 nt, Homo sapiens
gaggagagcccacagggcaaagagagcagacccgaggagcccgcagaggggaaccacgacccaacaaaaaacgga

SEQ ID NO: 2685 - RNA, 80 nt, Homo sapiens
cgccaggcgcggagagccccaaccgggcggaaccgcccagcacagacgccccagggccaccgccagcagacgacagaagg

SEQ ID NO: 2686 - RNA, 65 nt, Homo sapiens
gagacagcagccaaacccccagcccagagaggaccaggaaaaaccccagaccaccaacacgcagg

SEQ ID NO: 2687 - RNA, 78 nt, Homo sapiens
cacgcaggcgccgggccccgccggcgcggcggcgcgcgggccagcgcgccccgcccggcccccacgacacaccgaaga

SEQ ID NO: 2688 - RNA, 64 nt, Homo sapiens
cgaggcaggaaggccccgaggccccgaccgccgcgccccaggagaaagaagaaacaaagaggga

SEQ ID NO: 2689 - RNA, 85 nt, Homo sapiens
ggacagagggcagaaaagagaacaacgaaggaaaggcgccacgggcaaacgaaaacaccgacagaaaaaaaagccagggaaggag

SEQ ID NO: 2690 - RNA, 66 nt, Homo sapiens
acagaccccacgaccggacgcccacgaccccagcaggggaagccgcgcagagggagcgcgcgccgg

SEQ ID NO: 2691 - RNA, 69 nt, Homo sapiens
aggagcaggaaggaccgaagaccccagagacacggaggacaacaaacccggagcaagaccaaaaagggc

SEQ ID NO: 2692 - RNA, 77 nt, Homo sapiens
agcccccgcgcgggcagccaccccgcccccgccccccccgccgcaccaggagcccacgaaagggccagcagccccca

SEQ ID NO: 2693 - RNA, 65 nt, Homo sapiens
ggaaaagcacgaaggagaccagagaagccaaagaagccagccccgagagccgggcccagacccgg

SEQ ID NO: 2694 - RNA, 71 nt, Homo sapiens
ggacaaaccgcccagcgaaaacaggggaggaacgaaagaacaagacccgaagagaagccaggcagaggaga

SEQ ID NO: 2695 - RNA, 80 nt, Homo sapiens
cgggggccacgcaaacacggccaggaagagccaaagaaaacagaaaccacaagacccaacggaaagaacgccaaacgacc

SEQ ID NO: 2696 - RNA, 72 nt, Homo sapiens
aaaagcggaaaaagcaaaaaaagcagcacacacaggcgcaaaaggcagagaagcagaagcggcccaccagag

SEQ ID NO: 2697 - RNA, 56 nt, Homo sapiens
caagggccccggggccggcgaagggcagaaagaaagcaggaccagggggagggacc

SEQ ID NO: 2698 - RNA, 73 nt, Homo sapiens
ccaaagagcaccgcgaagaccccagacaggagaccgcagaggcgcccgaagccccgggccggagacagacaag

SEQ ID NO: 2699 - RNA, 74 nt, Homo sapiens
cgagccgaccgcgccgcacgggagccagcgggggggagaagcgccccgcgccggcggccacacgaaccccagac

SEQ ID NO: 2700 - RNA, 79 nt, Homo sapiens
ccgacccccgcgcgacggcgacgcgggaggccagaacccaagcgggcagaacaagaaggaaggagaagcggaacaaagg

SEQ ID NO: 2701 - RNA, 77 nt, Homo sapiens
caagcccgcaaacgggacaaaaagaaaaccagaaggcaccgacaggaaaggaaaaggagaaccaggcacccgggggc

SEQ ID NO: 2702 - RNA, 83 nt, Homo sapiens
acgcccgggccagcccaggaccccaggggaacaagaggccacgcagagccacgccgcccagaagcgccccaaagccaagcgcc

SEQ ID NO: 2703 - RNA, 82 nt, Homo sapiens
cccggacgcgcccgcgcccccgcggcggagggggaaacacgccgcaccagggaggagagaaacgacaccccccacccgaagg

SEQ ID NO: 2704 - RNA, 79 nt, Homo sapiens
cggaaccagagccagcacgagaagagacaggagagcaaagaggacgacgggggacagaagaggaaaacaccacaaaagg

SEQ ID NO: 2705 - RNA, 71 nt, Homo sapiens
gcgccacgcgccgccgcccccggagcgcggcacgaggcgggccgccagaacaccaacgccacacacgggac

SEQ ID NO: 2706 - RNA, 77 nt, Homo sapiens
agcacccggaagccacgaccccgagcccgagggaccagcagcaggcgggcggccgagccgggaagccaaccagggcg

SEQ ID NO: 2707 - RNA, 80 nt, Homo sapiens
cacacacaggaggggacccagggcacccacgcacagagagacggaaagcgaaggccaagcaaggcaaggggagagcaacg

SEQ ID NO: 2708 - RNA, 71 nt, Homo sapiens
ccaacaggaggaccaaggcgcacacccggcgcggcagaagggaacacccgcacagaaagaccagggaacca

SEQ ID NO: 2709 - RNA, 80 nt, Homo sapiens
caagacaggacaggaagagggccgagacacagcccaccgcaggcggggaagacgcccggcaggaggagcgcacgcccgcc

SEQ ID NO: 2710 - RNA, 78 nt, Homo sapiens
agaacaggaaccaggccggccagcgaacgacccaggccagaagccgcagagcagcagaacagacagaaacacgaaaac

SEQ ID NO: 2711 - RNA, 72 nt, Homo sapiens
ggaggaaagccgagacacgggccaaaggccgccacacagcaggcgcacccgccggaggaagcagacgcccga

SEQ ID NO: 2712 - RNA, 80 nt, Homo sapiens
gaaccgcaaggacgccgccgacgccggcagcgggcccgccaggagcgcaccgcgccccgcaagcaccgccggaacggggc

SEQ ID NO: 2713 - RNA, 76 nt, Homo sapiens
aacagagccacgaagggggagagaagcgccaggaagcgacacaaacccgccgggcgggcaaccaagaacacaaccc

SEQ ID NO: 2714 - RNA, 82 nt, Homo sapiens
gcacgagcggcgcggcgcggcccacccccgcccccgacgcggccggagcgcagcccgaggcccaggacggcagccggcccgg

SEQ ID NO: 2715 - RNA, 72 nt, Homo sapiens
cacgacaagccaaacaccagaacaagggacaccaaacaccagaggcaaaaacgaaccaagggaaggcccgac

SEQ ID NO: 2716 - RNA, 83 nt, Homo sapiens
agcccacgcagcaacaagggcccccgacgggcgcggccgaggcaagaaccggaagagaagccagccgaggcgcgcccgcagcg

SEQ ID NO: 2717 - RNA, 78 nt, Homo sapiens
ggagagaagaagaccgcggagagagaggaccagaaccagaccggaaagcaccaggcaaagaaaaaaacaggagccaag

SEQ ID NO: 2718 - RNA, 65 nt, Homo sapiens
cgcggaggcaagcacgggccaccaaggaagaaggagaaagggccaaccccgaagaagcaaacaga

SEQ ID NO: 2719 - RNA, 83 nt, Homo sapiens
cgaaaaggggcggaagaaaaacaaacacacgcaaaggagaaaggaaccgacagcacaagcagcgcgcccggcggaggaccagg

SEQ ID NO: 2720 - RNA, 82 nt, Homo sapiens
acggcaacgaacggaccgagcccagcgaccgaagaggcccgggaaggagcggcgggagaaggacggccaagggagaagagcc

SEQ ID NO: 2721 - RNA, 42 nt, Homo sapiens
aagagcacagcaaagaaacagcccccaacaagcagaaacagc

SEQ ID NO: 2722 - RNA, 78 nt, Homo sapiens
agcccggccggagcgggcggagacgccgggcagccgaacggagggcgacggagggaggaagcccggggcggcgacgga

SEQ ID NO: 2723 - RNA, 73 nt, Homo sapiens
ggccgacggcgcgccccaagaaaacacacggccaacccaagacgcgcaagaggagcgccccgcccaggcggag

SEQ ID NO: 2724 - RNA, 37 nt, Homo sapiens
cgggcggcggggcccacgggggcggggccgacaaaac

SEQ ID NO: 2725 - RNA, 68 nt, Homo sapiens
ccaggaaagacaggaggccacccccaaagaaaagggggcgaaaagcgaggagcgccaccggcccagca

SEQ ID NO: 2726 - RNA, 110 nt, Homo sapiens
gcaccagacagaagagcgcgacacgcacgggcagaacgcacaagggcccccccacagcaaacggaggggcgggacagcggggagccggcccaccggcacaccaaacgccg

SEQ ID NO: 2727 - RNA, 77 nt, Homo sapiens
acccagggccgggacacggcaaaggggggcacggagcaacaggaaaggagccagacacggagaagaaccacccgaaa

SEQ ID NO: 2728 - RNA, 52 nt, Homo sapiens
gcagcgccaagagaaggggccgggaacagcgcgagcagaggcaagacaccga

SEQ ID NO: 2729 - RNA, 75 nt, Homo sapiens
cgacccccacccagcccgagagcagacacggcacgagacgacggagagggacaaacaaccaagggagggaaccca

SEQ ID NO: 2730 - RNA, 72 nt, Homo sapiens
agaaacagaacggaggccggaagcgaccgaaacaccaaacacggcgccaacggccgacaagcccgacgaaga

SEQ ID NO: 2731 - RNA, 70 nt, Homo sapiens
gaaaaggccaggacaaaacaacccaggagaagccccggggaaagaggaggaaaacaaaggcagcgaacaa

SEQ ID NO: 2732 - RNA, 67 nt, Homo sapiens
cgcagccgagacaccagcccgaaacaccaccaaggacgaccaaagagggcaccggagacagggcggc

SEQ ID NO: 2733 - RNA, 66 nt, Homo sapiens
aaaagacggggacggacgcgaagcccgcaccccgccggaagacaacccggaacaagggggggcaac

SEQ ID NO: 2734 - RNA, 81 nt, Homo sapiens
agaagcagaacgaaggaaaccacagcccacacaggagagacccaaaagacacgcaagacagaaagacagacgagacaagag

SEQ ID NO: 2735 - RNA, 61 nt, Homo sapiens
cgcggccccggccgaccaggacagcccaaaggcaagcagccacggccagacgacgccaccg

SEQ ID NO: 2736 - RNA, 84 nt, Homo sapiens
ccggagcaagcggagccccccaagagccggaaagggagagaacagcacacagaggcgcaaggggaagagaaaagacagaagcac

SEQ ID NO: 2737 - RNA, 75 nt, Homo sapiens
gacgaccccacccgcgccgcgacccggcgcgggggcaggcagggcgcgcgggccaaggcccggccaacggcccac

SEQ ID NO: 2738 - RNA, 78 nt, Homo sapiens
gacgaaggggaaaccgacggaaagcagccaaagggagaccgagcagccaaaaaggaacggaagaggaggcaacagagg

SEQ ID NO: 2739 - RNA, 75 nt, Homo sapiens
agacgcgcaaaggacccgcgcgaaggaaaaacacacgaacaaagagggggccagaaagagcaaagaagagaacag

SEQ ID NO: 2740 - RNA, 65 nt, Homo sapiens
agcccaacacagccgccgcggccacaagaacagcgcgagccacaaggcaaggaagcaggcggcac

SEQ ID NO: 2741 - RNA, 74 nt, Homo sapiens
acagaacaacaacacacagaaggcagggagggaggggaaagacccacaccaagaggaacaaacacccaaagcag

SEQ ID NO: 2742 - RNA, 79 nt, Homo sapiens
agacgaagcacgcaggcgcagcaaacagaagaaagaagcaggggaggcgcaagagccaacacagcgcacccggagggac

SEQ ID NO: 2743 - RNA, 77 nt, Homo sapiens
ccaggagcccgagagagaagggaacgcccaaaacccgccggaccgaagaaggggcaagcaccaaccccaaaaggaca

SEQ ID NO: 2744 - RNA, 67 nt, Homo sapiens
agaccacgccggccgcgaccaaggaagcaaaaccccacaaggaggacacaggcaccaacgcgagaac

SEQ ID NO: 2745 - RNA, 88 nt, Homo sapiens
gcaagagcggaggcgcccggcggagcagaggaaccacacgcgacagggccaggccgagggcccgcccggccccaggagaagaaccagc

SEQ ID NO: 2746 - RNA, 78 nt, Homo sapiens
aaccccagaaacacaaaacaccgaggggcagaaaaacaggcgccagaccaaaacgaagaagacgagccaaacccaaaa

SEQ ID NO: 2747 - RNA, 77 nt, Homo sapiens
ggagaagaccaccacaacaagagacaacaccgcgcggaccacaaaccgcgccagaaaagagccagcaggccaaggga

SEQ ID NO: 2748 - RNA, 85 nt, Homo sapiens
gcggacgcgcccgggacgcgcggcggcaccgggaggccgggccgagcgaaaaacagccaggacccaaacaaaaacgcgcccacaa

SEQ ID NO: 2749 - RNA, 52 nt, Homo sapiens
gagcacccgagcagccggaggagcgacacaggaacgccacaagaaacaacag

SEQ ID NO: 2750 - RNA, 68 nt, Homo sapiens
agggcgggcgacccaccgccggccacagcgcagaaggagaaaaggaccaggggccggcaaaaccggac

SEQ ID NO: 2751 - RNA, 71 nt, Homo sapiens
acaaaccgcacgacacaggaaaggacaaaaccagaagcagggaccgcccccccccccggcaacagcggccc

SEQ ID NO: 2752 - RNA, 81 nt, Homo sapiens
ggcggaagggggggcaccgggggcgcggcgagggcgagggcgagccggacgcacgggagaaagcgcagcgcgcagggccac

SEQ ID NO: 2753 - RNA, 58 nt, Homo sapiens
ggagagccacagcgacaacagccggaccccgaacgggagagaagcgacggagggaagg

SEQ ID NO: 2754 - RNA, 76 nt, Homo sapiens
caggagcacagaagagcgaggagggcggcaccccaccgcccagccacagccccccccacaggagcaccggccgaag

SEQ ID NO: 2755 - RNA, 71 nt, Homo sapiens
cccacggagcgacggcaaaacccgccaacaacaggccccacaagggccggaccacacgggagaacagggac

SEQ ID NO: 2756 - RNA, 72 nt, Homo sapiens
agagagcgagcagagaaccacccgaaggaagccgggagagaagaaggcaggcccacaccacggggcagggcc

SEQ ID NO: 2757 - RNA, 38 nt, Homo sapiens
cacaggcacaccaagggacaacaggcacaaagagagaa

SEQ ID NO: 2758 - RNA, 86 nt, Homo sapiens
agcgcacccagaggagcgcgccaggagcggacccggggcggaccgcggaacccgaggccagcccagaaaagaggggcggggacaac

SEQ ID NO: 2759 - RNA, 78 nt, Homo sapiens
agcgggcggccgcaccggggaaaaacccgaaggggggagaggaaaagccgcagcaagacagcacacacccaaggccag

SEQ ID NO: 2760 - RNA, 61 nt, Homo sapiens
ggaagagaagccgcgacccaaaggacggaaagacggcagaagacgcagacggaacagcacg

SEQ ID NO: 2761 - RNA, 74 nt, Homo sapiens
gagccgcgaacaccaaccagcacaaaggcccaaccagaagacgaaacaggaacacgaagcgcaaacgccgagaa

SEQ ID NO: 2762 - RNA, 72 nt, Homo sapiens
cggcggcagcagcggcacaggaagaccgcaggaaagcaggaaggcaagaaagccaaggacgaaacccacacg

SEQ ID NO: 2763 - RNA, 73 nt, Homo sapiens
cgccacgacagcagagcggggcggccacaagcaaaggaaggaaaacacccggcagggaaggaaggaacgcaac

SEQ ID NO: 2764 - RNA, 64 nt, Homo sapiens
agcagcccccggagacagcggcacagagggccgccaggcaaaaccccaccgaacaaagcagcgc

SEQ ID NO: 2765 - RNA, 65 nt, Homo sapiens
agcccagccacggggcccgcccgccgccggaagcggggggaccgcacgggcaagcgacccgccca

SEQ ID NO: 2766 - RNA, 71 nt, Homo sapiens
cgggaaaggagaaaccggagccccagcaaccgcagccccaagacggaacagccccaagccggaaacccagg

SEQ ID NO: 2767 - RNA, 61 nt, Homo sapiens
caccaacaaggccccgacaacaccagggggggccgaagaagccagggggaggaaagcagac

SEQ ID NO: 2768 - RNA, 80 nt, Homo sapiens
aaccccgggccggcggcggcggccaggcccgcgaacacacgccgccaccgggaggcccagggaagggcgaagagagaaca

SEQ ID NO: 2769 - RNA, 77 nt, Homo sapiens
agcagacaacgcccgccggaacaccgcagagaaaaagggacggcagcggcccagcggaagaacgccgcagagagcag

SEQ ID NO: 2770 - RNA, 71 nt, Homo sapiens
ccaagaaggagagaagagcagaacccaggaggccagagaggagcccacccccaacagaagagagaggaaac

SEQ ID NO: 2771 - RNA, 51 nt, Homo sapiens
acgcagacgacggagaacggagagccggacccgacggggaaccaaggccgg

SEQ ID NO: 2772 - RNA, 61 nt, Homo sapiens
ccgccccgccggccccgaccgggaaaaccggaggccagcccacccagagaggccgaaaacc

SEQ ID NO: 2773 - RNA, 72 nt, Homo sapiens
cccaggccgagacgaaaggcagccagcaaaacgccggaagaaccggacaccccaacccccggagcaagacca

SEQ ID NO: 2774 - RNA, 79 nt, Homo sapiens
cgcaaccgccagcaccgggaagagaaagaaaagccgaaggcaccagacagaggagaggaagacaccccccccaccgaaa

SEQ ID NO: 2775 - RNA, 37 nt, Homo sapiens
ggacggaaacaaagacagcggaagccgcagaaggacc

SEQ ID NO: 2776 - RNA, 70 nt, Homo sapiens
cgcgccagcgcccagggggggaaaccaccgagggacggaaacagacgacgacacggacaggacggcggac

SEQ ID NO: 2777 - RNA, 72 nt, Homo sapiens
agagaaggaggaaaagaagcagccgagacaaagaacaaggaccccagaggcgcagccgagccaaagaaaaag

SEQ ID NO: 2778 - RNA, 81 nt, Homo sapiens
ccaggaccgacccaaccacgcacgggacagagagcccgagacacgacaggaagaaccggcaccggaagaaaagggaggaga

SEQ ID NO: 2779 - RNA, 80 nt, Homo sapiens
gagcccaaaaccaacgaaccaaaagcaaccgcgaagagcaggcagcaaaaccccagaagaggcgaaccgcaggaaaccag

SEQ ID NO: 2780 - RNA, 79 nt, Homo sapiens
gccacgcaggcaggaggacgggaggaccaagagagggggaggagcgggcaggccgcacgaggcagcaaggcagcgggac

SEQ ID NO: 2781 - RNA, 43 nt, Homo sapiens
gggcacaccaaacccacggcagcaccgggaccggaggcccaga

SEQ ID NO: 2782 - RNA, 78 nt, Homo sapiens
cccacagccacacagacccgagaccagacggcggcggccccgaggagcaacccgaaagggcaacagggccaaagcgcc

SEQ ID NO: 2783 - RNA, 74 nt, Homo sapiens
acccggagccaagcaccacagaccccccccgcccccacaagagccacggggcccgcgggcggagagccacggcc

SEQ ID NO: 2784 - RNA, 66 nt, Homo sapiens
gcgccgaaaggaagggaggaacccagaagggcaagggggaagaaggagccgcagccagaaaaggcc

SEQ ID NO: 2785 - RNA, 73 nt, Homo sapiens
agcagaccgagaagaggacccggagagggaaacaaccccacgagaaggccccagggggggaacagcgccagga

SEQ ID NO: 2786 - RNA, 71 nt, Homo sapiens
cgccgaccacagcacacgaaacggaggcaccaacccccacacgcccggggaaccagacacgcggcacagga

SEQ ID NO: 2787 - RNA, 65 nt, Homo sapiens
caaacaagcagccaagcacagcaggcggagcaagaacccggcggaaaacgaaccacacccgcgag

SEQ ID NO: 2788 - RNA, 67 nt, Homo sapiens
cgaaaagcccacagaaccaggcagaaggacgagacagaggcccggagacggcagggaagggaagaga

SEQ ID NO: 2789 - RNA, 78 nt, Homo sapiens
acgcaccgggcccaaccagcgcccagcccccgcagacccgcgaaggcgcgcggacacggagacccagaccggggcacc

SEQ ID NO: 2790 - RNA, 69 nt, Homo sapiens
ggagacggagcgaaggccggaggagcggagaaaaaaaggcaggaaagagaaagaagcgaggacaacggc

SEQ ID NO: 2791 - RNA, 37 nt, Homo sapiens
ccgaacccagcaccgggaggcaagcgacccgccagcc

SEQ ID NO: 2792 - RNA, 79 nt, Homo sapiens
gcagcccccgcgcgggcagccaccccgcccccgccccccccgccgcaccaggacgagaacccccgcgaaccagaggaac

SEQ ID NO: 2793 - RNA, 76 nt, Homo sapiens
acccccgcccgacccgggccccgccagcccccggcggaaaggcccgagcccaagcgcacgacaccagaggccgaag

SEQ ID NO: 2794 - RNA, 72 nt, Homo sapiens
ggggaggggagcccgcgcccgccgcgggagagaggccccgggggcgccgagggcacaagggcaacgacagaa

SEQ ID NO: 2795 - RNA, 78 nt, Homo sapiens
ccggggaccggggcgaccccaaacgaggagcacggcgaaccgcaaacagaagagggagccagaagaacaaggaaagaa

SEQ ID NO: 2796 - RNA, 82 nt, Homo sapiens
agcggcagaaacaaggcgcagggaccaagaaaggcccagggaccaaagcccggacaaggcccgagcaccaggaccgcagaag

SEQ ID NO: 2797 - RNA, 86 nt, Homo sapiens
ccacaggcacagggaccgccagaaaccaaagacgagaggacaggaagagcacccaagcgcaagcaaaagaaggcccccccagcaga

SEQ ID NO: 2798 - RNA, 55 nt, Homo sapiens
gcccccgcgacagaaggggacgccggaaagaccagaaaagcacccaagcaaagcc

SEQ ID NO: 2799 - RNA, 42 nt, Homo sapiens
acccggggccagcggccggagccaggaaacccacccaccacc

SEQ ID NO: 2800 - RNA, 71 nt, Homo sapiens
gcagcccccgaacgcggcccgcacaggacggaggccacaggacaagagggaccggaagcgcagcgacacag

SEQ ID NO: 2801 - RNA, 50 nt, Homo sapiens
aaagcaaacggaccagaccgaccaccaaaagaacacggccaaagccccag

SEQ ID NO: 2802 - RNA, 77 nt, Homo sapiens
gcacacaggcaggaggcgggaaacgcagccggcaccgccggccaggaggagagcgcaccaccaaaaaggcaaacaca

SEQ ID NO: 2803 - RNA, 57 nt, Homo sapiens
cagcaaggacagcgcgagccaggacccgggccaaccgccccccagcagcaggcacgg

SEQ ID NO: 2804 - RNA, 72 nt, Homo sapiens
aaaagagagccgggcgcggaaacgaggagaaaacgaccgcaaaaagacgaggagaacgaaaaagaagccgca

SEQ ID NO: 2805 - RNA, 81 nt, Homo sapiens
gacgggcagcagcgcgacccgagccggcgcccgggccggccaggacgacccgggcggagaacggaaaagcaccaggaagca

SEQ ID NO: 2806 - RNA, 76 nt, Homo sapiens
gcgacggcgcgcggcgcgagacccggaggagcgcaccgccaggggaaacggagaagagcgagaaaaaggaacaaac

SEQ ID NO: 2807 - RNA, 59 nt, Homo sapiens
ccagacgcacaccccgcagcccggacagacccccgccccgaggcaagaacggaagcacg

SEQ ID NO: 2808 - RNA, 76 nt, Homo sapiens
cccgccggagcgcccgacccgcgggccgggcgcagccgccgccccgccccagaaggaaacccgaacccagcggaga

SEQ ID NO: 2809 - RNA, 72 nt, Homo sapiens
aaaacggagacacagcgcaaacaaggggcgccaagcggaacggaggaggcggacggcgccccccacagaaca

SEQ ID NO: 2810 - RNA, 64 nt, Homo sapiens
caccgccgccaggaggaaaagggccaaagggagcgagcgccacgaaggccgcgcccgccagcga

SEQ ID NO: 2811 - RNA, 110 nt, Homo sapiens
gcaaccagacgccagcgggacgaggaccgagaccgcggccgggaccgagggaacccgcccacgccagcgaagccgacaggaccaacgacaggcgcccccccccagcgagg

SEQ ID NO: 2812 - RNA, 62 nt, Homo sapiens
gggccaccaggaggccagggggcgccagacaagccaccccacaaaccggcaggaccccagcg

SEQ ID NO: 2813 - RNA, 69 nt, Homo sapiens
agaagaccagagaggaacgggaaggaaggagcacagagggagcaaagcacacagagcaacagaaccgga

SEQ ID NO: 2814 - RNA, 79 nt, Homo sapiens
aggggggaaacgccagcaggaagaggacacacagagaggccaaagccagagacagagcacaaaggacacagcaggggcc

SEQ ID NO: 2815 - RNA, 71 nt, Homo sapiens
cgccggcgggcgcagagcggaaagcaggcgaaccggccgagacagggccccgacggaagacacaaagagac

SEQ ID NO: 2816 - RNA, 80 nt, Homo sapiens
gcggggccgccggggccgccaggagcccgaccgggagaggacaagaccacgagccagagggaaaagaggacgaggcgcga

SEQ ID NO: 2817 - RNA, 81 nt, Homo sapiens
cgggcccccagcccgccgccgccgccaggcggacccaaaacgccgacccccggcacccggacgaggggcaggaccggggac

SEQ ID NO: 2818 - RNA, 76 nt, Homo sapiens
cggggcccccacggccagcgggcgaagggaagaaggaagagagggagccccaaaggggaagcaggagcacagcgca

SEQ ID NO: 2819 - RNA, 87 nt, Homo sapiens
cccaaagggaagacgggagccggaggagcagcagaggggcgagcaggagcgaccgcgccaaacagggacacccggacgcaggcccgg

SEQ ID NO: 2820 - RNA, 56 nt, Homo sapiens
gagaaacaaaggaaccggaaaagcaaaacagggcggcagaacgaaaacaaacggaa

SEQ ID NO: 2821 - RNA, 79 nt, Homo sapiens
ccggcacgcccgcccgaggcgacggccgcggcgcacaggcagaaaaagcaacacgagcagaaacaagaaaaaaaggaaa

SEQ ID NO: 2822 - RNA, 53 nt, Homo sapiens
accaccacggaacgaggcacggccacgacagggccacggacgcagagcaccca

SEQ ID NO: 2823 - RNA, 72 nt, Homo sapiens
agaaggcaggccaaaccaccgaccagggcaacacagagggccacacggggaaacggccaacagggggccagc

SEQ ID NO: 2824 - RNA, 69 nt, Homo sapiens
aaccacagggcaggaggaacaaaggcggaaacgaaggggaggacacagaaggggggcccgaacagaagc

SEQ ID NO: 2825 - RNA, 82 nt, Homo sapiens
ggggccgaacgcgagaacaacacaacagcccccaaaggaaagccgaccaagacggcaccccaacacacagagacaggggaaa

SEQ ID NO: 2826 - RNA, 86 nt, Homo sapiens
cgggcgggcaggagggcggcggcggcggcgcggcgaagaaggggacgccgacaagggacccgagcgaccagaaagccaacggccca

SEQ ID NO: 2827 - RNA, 77 nt, Homo sapiens
cggggggccgaggccgggacaagcagcaaggcgcggggggccacgcgaggccgaggggaaaaaaggccagagacaga

SEQ ID NO: 2828 - RNA, 80 nt, Homo sapiens
agaaccaggaagcaacggggaagcagcaaaaacagcaaagcggcaggcaacaggaagaagaacccacaggggccaacaga

SEQ ID NO: 2829 - RNA, 82 nt, Homo sapiens
ccggcagccgcgaacagcagcgaccggacgccgaacacaaccccagagccggcagcgggccccccgccgcggcccaccaccg

SEQ ID NO: 2830 - RNA, 79 nt, Homo sapiens
gaaacaggcggcggcggggggagcgggaagaccgggaagccggaagcaggacgccgcccgaagcgggaacgcccggacc

SEQ ID NO: 2831 - RNA, 79 nt, Homo sapiens
ccccagaggaggccccccagccacgggaacgcccagcagcagggaacaggaagcaaggagcaagaacagggggaagcca

SEQ ID NO: 2832 - RNA, 75 nt, Homo sapiens
acagccagccagccacacggcagaaaaagagggaaagccccgaagcgagggggaagacaggcgagaaacgcagaa

SEQ ID NO: 2833 - RNA, 61 nt, Homo sapiens
caagcgaagaggaagaaaaaagaaggaaccaggcacgaaggaaagaccacagcaagaccac

SEQ ID NO: 2834 - RNA, 78 nt, Homo sapiens
caaagagagaggcacgcaccaacccaagaacaccccagaaaaggagagcagcaggaaaaaaccaggaacgccccaaac

SEQ ID NO: 2835 - RNA, 74 nt, Homo sapiens
cccggagcgacccggacaccgacgcgccacgcggagcccgaacgccaggagccagaaccccgaggaaaggggaa

SEQ ID NO: 2836 - RNA, 68 nt, Homo sapiens
cagaaaaaacccaaggaaaggaacagggaagcagcacgagagcgggacgaccgaaacaaggacccccc

SEQ ID NO: 2837 - RNA, 77 nt, Homo sapiens
gacggaaccgcaacaccggcaagagacccgagagggccggcccagggagaacgcaaaaccaccacccccacaaaaaa

SEQ ID NO: 2838 - RNA, 61 nt, Homo sapiens
gaagaagaggaccggagagagcaccgacagaaggaaaacagcacagccacgaaaggaaggg

SEQ ID NO: 2839 - RNA, 83 nt, Homo sapiens
gaaggcgaaggaccccaacggggaggccaacggaagaagccaagacaaggggcgcagagcggggggacaggcgcaagaccgga

SEQ ID NO: 2840 - RNA, 69 nt, Homo sapiens
cccgagagcggaaacagggaagcggggccggcgcgggcggccgagggccaggcgagcccgcgggcggac

SEQ ID NO: 2841 - RNA, 58 nt, Homo sapiens
agaggagcggacccccgcggcgcgcagcccagcagggagaaaccggaggccaggaggg

SEQ ID NO: 2842 - RNA, 78 nt, Homo sapiens
cgccacggcgccccgcaagggaaagggagcagcaccggccacacccacagcacgaccggaacccagcgaccgacgccg

SEQ ID NO: 2843 - RNA, 84 nt, Homo sapiens
gcagcaaaagaaggccaaagaaggagaaaagggagcagcaggagccccgcgggaagaagaagaggacaggcccaggaaagggaa

SEQ ID NO: 2844 - RNA, 88 nt, Homo sapiens
ggccgcgaccaaacgacgggggccggagcccacagcgacaggggccggacaagacgcagagagccgacagaccccgaagggacaggga

SEQ ID NO: 2845 - RNA, 75 nt, Homo sapiens
gaagaaggaggcaggcacgggagccgaaggaccaggggccggcaaaaccggacccagaggacgagaggccagcca

SEQ ID NO: 2846 - RNA, 64 nt, Homo sapiens
gcggaaggccccaacacccggagcagcgccacaagggacaggcaaaggcgcggggccgagaggc

SEQ ID NO: 2847 - RNA, 37 nt, Homo sapiens
aaagaagccaaagggacacgggcaaaagcccacagag

SEQ ID NO: 2848 - RNA, 83 nt, Homo sapiens
aaacagagaggccagaaaggcgcaggccaagcgcccacgccggaccgggcagacgaagagcaaagcaaagaaccagcagaaca

SEQ ID NO: 2849 - RNA, 72 nt, Homo sapiens
gcgggcacgaacgcagaaagaaaggagcggaagggcggacaaggggaagaacaagggagcagagacgcaaca

SEQ ID NO: 2850 - RNA, 52 nt, Homo sapiens
gcacagagaaccgaccagaacgcagcaacaaagacaagggaggcgaggacgg

SEQ ID NO: 2851 - RNA, 89 nt, Homo sapiens
cagacggagcaaagcccccacgcccagccaggagcaccgccgaggacccagcacaccgagggaaaacaaagagggaaaacggagaaaag

SEQ ID NO: 2852 - RNA, 75 nt, Homo sapiens
cacaagcaaaagcacagaccaggcccccaccaggaacagagacgggagggacaggagaacaggcacgaccccacc

SEQ ID NO: 2853 - RNA, 69 nt, Homo sapiens
acaggcccaagaaacggcccggcacagcaggaggagccccaggccagcccggggccggaaccccgagcc

SEQ ID NO: 2854 - RNA, 80 nt, Homo sapiens
cgagcccccgaaccgcaaagccccagaggacaaccaccccaggacaggagcagaggacacacgcggaaagagggaacagg

SEQ ID NO: 2855 - RNA, 57 nt, Homo sapiens
agaaggcagaggaacacaacagaaagcgccaggaccccacaggggacaacacaaagg

SEQ ID NO: 2856 - RNA, 57 nt, Homo sapiens
cgcggacaacaccaggaaaagacagagcccaggggcgaggagagaaacagagcccag

SEQ ID NO: 2857 - RNA, 77 nt, Homo sapiens
gacaaaagggccaaagaagggagagagcggcagagaggcgagacacggaacggcgaagaagcgcacgggcccggcgc

SEQ ID NO: 2858 - RNA, 69 nt, Homo sapiens
ggaaaaggaaggaagggaggagcgaaagcagaaaaagccaggcagaaaaagggggaacagaaacacaga

SEQ ID NO: 2859 - RNA, 76 nt, Homo sapiens
gggggaggaggcaacgccgcggcggggccggggagcccgggccagaccccccagacccagcccaccccggagcagc

SEQ ID NO: 2860 - RNA, 41 nt, Homo sapiens
aggagggacccgggaggccaaggagaggagcacggcagcca

SEQ ID NO: 2861 - RNA, 85 nt, Homo sapiens
ccagggcgaaagggcaaggcaccaacgggcaaaaaagccagaaagccaaggaagggcggaaacagcagaagagcgcggcaagcgg

SEQ ID NO: 2862 - RNA, 80 nt, Homo sapiens
agcagcacggggcggcgcgccggggccggggggcggcggagcgagggcaagggccaggcgccagccgccaacaccacaac

SEQ ID NO: 2863 - RNA, 69 nt, Homo sapiens
aaacccgacaggaaggaaggaaccaagcacccaggagacgggacgcgccagcccacaagacaccacgaa

SEQ ID NO: 2864 - RNA, 76 nt, Homo sapiens
gggacaacagaggcagaaaaggggacacggcgggcagaaggcgcagcgccaggccaccagaccgcgacaccagcac

SEQ ID NO: 2865 - RNA, 70 nt, Homo sapiens
gaagacaggccacccagcggggagcacggcgagcagccaggccaggagaggaaaggggaggaaaagccag

SEQ ID NO: 2866 - RNA, 56 nt, Homo sapiens
cagggcagcaggcgggcagaaagacacccaaaggacggcgggaagagggggcagaa

SEQ ID NO: 2867 - RNA, 54 nt, Homo sapiens
ggagaaaagacccggccgaggggaaccggggacccaggaaggggaaaaagagag

SEQ ID NO: 2868 - RNA, 83 nt, Homo sapiens
acccgagcgccgccgacgacgcagccagcagcgggaggagccgaaggggagcgacagaaaagcagcacaacccccggagaacc

SEQ ID NO: 2869 - RNA, 72 nt, Homo sapiens
agagaagcacaacagggaggcaggagcaacacacaagggcggacaggcggaagcaaagcgggcggccacgca

SEQ ID NO: 2870 - RNA, 76 nt, Homo sapiens
acagaggcagccaaggaaccgcggcagaaaaggcaacagagagaggacggaacacagcaaagcacaagcagaaggg

SEQ ID NO: 2871 - RNA, 81 nt, Homo sapiens
ggaaacggcccgcaaccagggggccaggcaggaggcaaggaaagggccgagaaagaagagaggaagaagaggaggaggagg

SEQ ID NO: 2872 - RNA, 63 nt, Homo sapiens
cccgagccacgcgaggacgccgagacgccagaccaagaagccaggcgggcaggaacagccagc

SEQ ID NO: 2873 - RNA, 101 nt, Homo sapiens
ccgccgccgcgggcgccagaaggaagaggcggacggaggagcaggcgagaagagaagagggcaggcacgagcaaggaggagccccgaaaagcaaagaaaaa

SEQ ID NO: 2874 - RNA, 81 nt, Homo sapiens
cggaccccagggccggcccggaggcgggacccagggcccagggggccgacgacgagccccgcgaggagcgcagcggagagg

SEQ ID NO: 2875 - RNA, 87 nt, Homo sapiens
gggccagaacggggcgacaagaaagggcacccgagaggaacacagcagagaagcaggagacgaacaacggaacgcaggaagcgcgcg

SEQ ID NO: 2876 - RNA, 71 nt, Homo sapiens
ggaggagcgaaggacaaacacagaaggagccccagcggagaaagaaagaccggagacccgaaagaggaaga

SEQ ID NO: 2877 - RNA, 74 nt, Homo sapiens
gaacgagggcgagcagaggacgacaggccgggagggcggcaggaggggacgggagccaaacagggaggagcaca

SEQ ID NO: 2878 - RNA, 82 nt, Homo sapiens
ccaggggaccaggggacgaagggaacagagcggagccggcggcacaaccagcaccacggcgcgaggggacacggaaagccca

SEQ ID NO: 2879 - RNA, 62 nt, Homo sapiens
cccagcccaaacccggaaacccagcggcccagccggggccgaacccacggccaggcccgggc

SEQ ID NO: 2880 - RNA, 84 nt, Homo sapiens
gccccagcagccggaccccagcaaccggaagcccccacagcccaaaaagacgcaccccagcggcgggagcaagagagccagagg

SEQ ID NO: 2881 - RNA, 85 nt, Homo sapiens
accggaacgaccgcaggacacgggaccgcggacgaggaccggcccgggaagcaggaagagaacgacgggggagaagcgaaccccg

SEQ ID NO: 2882 - RNA, 37 nt, Homo sapiens
ggacccaggaggggcgcggagcccgcggagaggcacc

SEQ ID NO: 2883 - RNA, 64 nt, Homo sapiens
agaacggagcaagcccaggcacagccgacgccgcgggacgagcccaagggggcagcacagaccc

SEQ ID NO: 2884 - RNA, 83 nt, Homo sapiens
ggcaggaaggggaccgggcggcggagcggcggaagaagagccccaaggcagcgaaaccaaagaagaaggcagaagccagccac

SEQ ID NO: 2885 - RNA, 81 nt, Homo sapiens
caagcgcgaaaagcaaaaacccagagaccgcaggaggccaacaagccacaagccagggaaggaagaggggagccaggggac

SEQ ID NO: 2886 - RNA, 77 nt, Homo sapiens
cgagcgcaaggacagcgcgaggccgcgcagcccagcgcagccacgcaacaggagacgaacccagaccagcaaaacgg

SEQ ID NO: 2887 - RNA, 66 nt, Homo sapiens
agacccaaggcgcgcggggccgcgcaggcacagaagagcagagcaagcgacccggacaaaaggaca

SEQ ID NO: 2888 - RNA, 61 nt, Homo sapiens
ccagcggacccccacacgaaggccgcaaggcggggagggccagacaaggggaacacaagag

SEQ ID NO: 2889 - RNA, 65 nt, Homo sapiens
ccacacaaacccaccaacaaggagacccgggaggaccaagccgaacacccagacagcccgaacac

SEQ ID NO: 2890 - RNA, 104 nt, Homo sapiens
gccagaacagggaaggcccaagacaagaggagcagacccgggacgaggcagcacacgcaggccgaccacaccgagacgcaaaaaggagcacaccagcgaaaaca

SEQ ID NO: 2891 - RNA, 71 nt, Homo sapiens
ggacaggaaggggcagacaagcacgccgcccagacaaccgccaaacagaacagcacaggcggaacggagca

SEQ ID NO: 2892 - RNA, 79 nt, Homo sapiens
ggaccgccccagccaacagcaggcagaagaggaccaagagggaaaggagccaggacaggagcgaaggaaaaaacagaag

SEQ ID NO: 2893 - RNA, 74 nt, Homo sapiens
aaggcccgcgaggcacaggcacggcagacacaccgaccagaggaaggcgaacccgccacgcagcaggagcaggg

SEQ ID NO: 2894 - RNA, 63 nt, Homo sapiens
aaacaccgaaaaaaaaaaggccagagggcgcaaacggaacagaccggaggccgggcaggggag

SEQ ID NO: 2895 - RNA, 61 nt, Homo sapiens
gagggaagaaagaagcaagaaggggaaaagacagcccagcaaccaaaagcccaaaggaggc

SEQ ID NO: 2896 - RNA, 78 nt, Homo sapiens
cgaacccgggcaagccagaggaacgggagagcccgagaggaaggccaggagaaggaagaccgaccccgggcaaccaca

SEQ ID NO: 2897 - RNA, 73 nt, Homo sapiens
ggcagagggaacaggcagcaggaagcacggcgggcgaaacaggaaacagagcaaagcagcgacaacaaagaca

SEQ ID NO: 2898 - RNA, 74 nt, Homo sapiens
ggcaacagaaacaaccgacgcaccgagaagcccacaaaccagcgcgccaacacccccaaccccagaaccccacc

SEQ ID NO: 2899 - RNA, 64 nt, Homo sapiens
gaaaaaaacgcagacaaagaaaacgagcggggacgaacagacgagaaagagcccaaaagcaaag

SEQ ID NO: 2900 - RNA, 78 nt, Homo sapiens
cgaagaaaacagcgggaagagacagccaaggggcaaggaaaaccaggaaggacgcagaaaggcagcggcaccaggaaa

SEQ ID NO: 2901 - RNA, 85 nt, Homo sapiens
cacccacacggccggcccggggaacccacccaccacccagggcacaacaccacagccggaccgcacccgcaccgccaaccacggg

SEQ ID NO: 2902 - RNA, 79 nt, Homo sapiens
gcgcgccccacgggccaggaggaagaaggaaccagcaaagcgccacgaagcacaagcaagaggaccagccaaaaccaca

SEQ ID NO: 2903 - RNA, 67 nt, Homo sapiens
ggagccgccccggaggagaagggcgccagcacgagccccccccccacacccacaggagacaccagcc

SEQ ID NO: 2904 - RNA, 53 nt, Homo sapiens
cacacccccccggggggggaaggagggccccggagcagccacaccaccgaggc

SEQ ID NO: 2905 - RNA, 87 nt, Homo sapiens
ccgccggccgagggggcccaggggcagcgagcaagacagcaagcaggaggcaacacggaaaccgaggagcaccacaaccccagggac

SEQ ID NO: 2906 - RNA, 82 nt, Homo sapiens
acagccggaagggcggggggcgggccggaggggagacgggaggcaggaagccaaacgccccccggcgggcccgacgggaccc

SEQ ID NO: 2907 - RNA, 79 nt, Homo sapiens
ggccaggccgggcgggcccgcggcaggcccaagaggcagacgccgagaaggccgcgcggacccaccaccccacacgcca

SEQ ID NO: 2908 - RNA, 68 nt, Homo sapiens
agccaggacagccacaccccaagaggccccaaaacaggagaggcagaaggcaggcgggcaacagcagg

SEQ ID NO: 2909 - RNA, 46 nt, Homo sapiens
gcgcaggagcccccggagcgcagggagagcaacaagccccggcccc

SEQ ID NO: 2910 - RNA, 53 nt, Homo sapiens
cagcacggaaggccgaggcgggggacagaggcgggaggggacggcaaagggcg

SEQ ID NO: 2911 - RNA, 114 nt, Homo sapiens
ggccccaccgaaaaccaaaaagaagggagaaaaaaggaccagagccagacacgaaggacggaggaaaaaacggaaacgagaaaagccagaacagcagaagacgggcgagacacc

SEQ ID NO: 2912 - RNA, 84 nt, Homo sapiens
cccggcggccgagggcgggagggaacgggacagcggccaccaaaccaaccgcagagaggcaccacagacccaagcggaggagac

SEQ ID NO: 2913 - RNA, 80 nt, Homo sapiens
aaaagcccagagaaaaagaacgacacacagagagccccgaaaaagaggaggaaaagaaggaagcaagaaacacggaggaa

SEQ ID NO: 2914 - RNA, 70 nt, Homo sapiens
caaccgaacccagacgcagaacggaaagaaaagaggcccggaagagagccaccacgacggcagcgacagc

SEQ ID NO: 2915 - RNA, 59 nt, Homo sapiens
gggacgaggaaggaaacaggaaccaggcagaaacgaggcaaggacggggacacaagacc

SEQ ID NO: 2916 - RNA, 69 nt, Homo sapiens
gaacaccgaagcccccacaagggaagaaccacaaaaaaaaacagggcgaccagcggaagagcgcaacaa

SEQ ID NO: 2917 - RNA, 82 nt, Homo sapiens
ggggacggcgcgcgggacggccgaggaaggaacggcccccccccagcccgccccaaaaggaaacaggaacacgaaagaggaa

SEQ ID NO: 2918 - RNA, 78 nt, Homo sapiens
aagaacaaacggcagccacacgccaccccagcacacaagggaggaccacagggcacggggaaacggcacccagaagaa

SEQ ID NO: 2919 - RNA, 38 nt, Homo sapiens
gccggaacccgaaaggaggcaggggcaccagccagcga

SEQ ID NO: 2920 - RNA, 74 nt, Homo sapiens
cagcccagaaagccgggacaaagggaaagacaaggagccgggccgagaaaccgaaccagagaccagagaagaaa

SEQ ID NO: 2921 - RNA, 61 nt, Homo sapiens
ccgggaacccacccaccagcgggcccaggcacgcgcaacaaggagcccggagaggagacga

SEQ ID NO: 2922 - RNA, 79 nt, Homo sapiens
cgggcccagcagcgccaccaagaaaaccagacgagagacagaagacgaaagggcaagaaagagagcacggacaagagga

SEQ ID NO: 2923 - RNA, 83 nt, Homo sapiens
gggacgaagagggacgggcccgcggcgagcgagcccgaggacggcgcgggcgcagaaggccagacacagaaccaggaaagcac

SEQ ID NO: 2924 - RNA, 85 nt, Homo sapiens
ggagcgggcccgagccaggccggagcgaggagaacgacgggcgccgcccagcaaagcgaaggcacacccaccccccgccccgccg

SEQ ID NO: 2925 - RNA, 81 nt, Homo sapiens
cggaggaggcccggagcagagccgaagccgccggagaagaggagccccagcgccccgggcaaagcagcacaagagagggga

SEQ ID NO: 2926 - RNA, 79 nt, Homo sapiens
aaacgccggagcgcacgagagacaagaggaaaaagcgaagagcgagggcggaagaaacgggcagaacaccacggagaag

SEQ ID NO: 2927 - RNA, 84 nt, Homo sapiens
cgggagcgagcgcagcaaagcgcccagccgccgcccgcgcccgcggccggggaaaaagcggggaaggggggcaaaaaaaagaag

SEQ ID NO: 2928 - RNA, 85 nt, Homo sapiens
agacacgccaccccaaggagcacgcagggcgagggaacagagagaaacccggcaagaaagacgagaacccccgcgaaccagagga

SEQ ID NO: 2929 - RNA, 42 nt, Homo sapiens
gacaaaagggccaaagaagggagagagcaccagagagcgacc

SEQ ID NO: 2930 - RNA, 72 nt, Homo sapiens
aacccaagcagggcgaagggaacgcaaggcccccgaccacacgcccgcgcgaggcgcgggacaaccaacaca

SEQ ID NO: 2931 - RNA, 76 nt, Homo sapiens
caagagaagcaaggagccccgccacacacgcaaacgagaaaagacacggaaccagaggcagcagcccaaccccgag

SEQ ID NO: 2932 - RNA, 66 nt, Homo sapiens
ggggaggaccgaaccccagagccagccagacggcggggagacacagaacaaggagcgcaagagaac

SEQ ID NO: 2933 - RNA, 73 nt, Homo sapiens
cagacaagcgccgaacggaccgggggaaacaaaaacgcacacaacgacccagcaaaccaggccaggccgccac

SEQ ID NO: 2934 - RNA, 72 nt, Homo sapiens
aaaccgccacggagcaacagaacggaggagagaggccagggaaagaaaagaggcccggaagagagccaccac

SEQ ID NO: 2935 - RNA, 84 nt, Homo sapiens
gccgcagaccagaccgggaggagcagccgcgcgccgagaagcacccgcgacccagaaggaggaagaacggcaaaacggaggagc

SEQ ID NO: 2936 - RNA, 65 nt, Homo sapiens
ggaaccacccaccgagggaccagaacagcaagaagagaaagccaaaggaacaaaggcaaaggcca

SEQ ID NO: 2937 - RNA, 71 nt, Homo sapiens
gacccaaaaagacggacagcccacgggaacaagaggggacagaaagagagaagaagaaggaggccgcggcc

SEQ ID NO: 2938 - RNA, 39 nt, Homo sapiens
aacacgaccagcgccccaaggaggacccacaaggcacaa

SEQ ID NO: 2939 - RNA, 72 nt, Homo sapiens
gggacaacccccgacggcccacgccagggagggggagagccgagcaagaccccagagcagcagcagcgggga

SEQ ID NO: 2940 - RNA, 79 nt, Homo sapiens
cgcgagccagcccgaaacgccacaaggcgggcgacagagagaagcggccagggcggagcagccacaaacaagccgggcg

SEQ ID NO: 2941 - RNA, 82 nt, Homo sapiens
gaccgcacccagaagggacgaaaagaaaggaacagggaaagaggcacaagcagggggagaggaagacaacaagggccgaccg

SEQ ID NO: 2942 - RNA, 79 nt, Homo sapiens
gacacccacaccccgacccccgaacccccagcccaaacccggaaacccagcggcccagccggggcccggccaggcccca

SEQ ID NO: 2943 - RNA, 70 nt, Homo sapiens
cgagcgcaagagacagaacgcgacgccagagggacagggccgagcccgaagaggccgccggggggggacc

SEQ ID NO: 2944 - RNA, 81 nt, Homo sapiens
cgacgccagcacgacccaccgcacgcagaagcggccagggcccgcgaaccagaagacccacgacgggacacgcgccaaacc

SEQ ID NO: 2945 - RNA, 78 nt, Homo sapiens
gacgcggcaacacccaagaaggacagaaaccgaagggagaagagccacaaccaggagaaccccgacaaaccgagaaaa

SEQ ID NO: 2946 - RNA, 68 nt, Homo sapiens
cacccggggacgggagggggggccccgcgcaaagggaacacaagccagaaaaagggggaagccagaga

SEQ ID NO: 2947 - RNA, 74 nt, Homo sapiens
aagagacgacagaccagaccaagcaacagggcggagaacggaaaagcaccaggaagcagagaggaccgcagaag

SEQ ID NO: 2948 - RNA, 52 nt, Homo sapiens
ggaggagcagaggacacgaaaagaagcaagaagaggagcaagaggggggggc

SEQ ID NO: 2949 - RNA, 68 nt, Homo sapiens
ccgcaacacaggagaaagaacaccacaaacccgagagcaaccagacagaccagggccaggagacaggg

SEQ ID NO: 2950 - RNA, 78 nt, Homo sapiens
ggcacaggaaagaagacgggacagcaggccaaaaggaaaacgaaccagagagcaccagccaggacgcccacccggccc

SEQ ID NO: 2951 - RNA, 61 nt, Homo sapiens
cggagacggcgagcgcggcgcgccgagaaagccacagaccagaggcagccggagcaggcgc

SEQ ID NO: 2952 - RNA, 73 nt, Homo sapiens
cagggccccgcccggcggggaagggaaacaacacgaggaggacggcacaaaaagcaccagcggggaggaacaa

SEQ ID NO: 2953 - RNA, 76 nt, Homo sapiens
gccagccgccaaagaccccgccgaaaagggcacagaaagccaggagcgaacacacagaacccgcaagaaaaaggaa

SEQ ID NO: 2954 - RNA, 75 nt, Homo sapiens
gcaccacagcccgcagccccgccagccacccccaggagggaagacaagagcaccaacggacaagcacaagcaagg

SEQ ID NO: 2955 - RNA, 72 nt, Homo sapiens
cagagggccggggcaaccccaccgacggccagggagcgcgcaaggaagcgcgggggcaggccgggcgaccag

SEQ ID NO: 2956 - RNA, 52 nt, Homo sapiens
ccaggagcccgagagagaagggacagggcagaccgccagcagcacagcaagc

SEQ ID NO: 2957 - RNA, 66 nt, Homo sapiens
aagaaagacccggcagcaacaaaggcggcagacagagcaagagagaggaggaaaaaaaggagcgac

SEQ ID NO: 2958 - RNA, 79 nt, Homo sapiens
cagccgcgagccccccggggcgccaaaacgcccccaacccagcgcaaaggaagaggaagaaaaaggcacaaacccagca

SEQ ID NO: 2959 - RNA, 64 nt, Homo sapiens
aaagcaagagcaggcgacacgcaggagggaccaagaaaggcccagggaccaaagcccggacaag

SEQ ID NO: 2960 - RNA, 75 nt, Homo sapiens
ccacaaacacacggacccaggcgcggccgcgacgggagaggaaaacgccgccgagccggagaaggaagagggaaa

SEQ ID NO: 2961 - RNA, 81 nt, Homo sapiens
cacaccaaccaccccacaggacggcacacaggacggcccgcgcaggcaccaagggcagccgcccccccgcccccggagagc

SEQ ID NO: 2962 - RNA, 61 nt, Homo sapiens
gcgcgaaagccagggaagccacgacagggccacgggcaaggaacgagggggcaccagccaa

SEQ ID NO: 2963 - RNA, 78 nt, Homo sapiens
gccacccaaccgaaaacggaccagaacccacagggaagggggcgggagccggaggagcccggcagaagggggccagag

SEQ ID NO: 2964 - RNA, 70 nt, Homo sapiens
aagggagacagaagagacaggaagcacgcccagaagaacaggcacagagacccccacccagaagaccagc

SEQ ID NO: 2965 - RNA, 59 nt, Homo sapiens
agaagagaaggaaccgggggaaagggcccaccagggaggaagaggcaggcgcagcagag

SEQ ID NO: 2966 - RNA, 77 nt, Homo sapiens
gcccagcggcagcagcagcggcgggaggagccccggggaaggggaaaaccgccgccacccaagacagcggggcaggg

SEQ ID NO: 2967 - RNA, 71 nt, Homo sapiens
ggccaggccgcggccggggcaggagcgcagacacaagcgggacggaagaggcccggcgaccggacagaaac

SEQ ID NO: 2968 - RNA, 83 nt, Homo sapiens
cggggcgcccgcggccgaagagcaagccgaggccacgggagcgccggagccggagaggcaggccccgagccccggccccaaag

SEQ ID NO: 2969 - RNA, 65 nt, Homo sapiens
accacggggcggcgccggccccaaggaggagcgagggagaagccagagagcgaccaccaaccgag

SEQ ID NO: 2970 - RNA, 80 nt, Homo sapiens
caccgggacggaccgagaccggaccgagagcggaccgagagcgcgaaacgcacgagaagaagcacccaagccagggagcg

SEQ ID NO: 2971 - RNA, 75 nt, Homo sapiens
gagacagagggccaaggcaacacccgacggcaagagagagaagaagccggcagcccggcccaggccgagaaaaaa

SEQ ID NO: 2972 - RNA, 75 nt, Homo sapiens
gcggggccacagcaagcccaggcagagagaggagcgagaggaagcggaagaaaaccaacaaaggacagcgggagg

SEQ ID NO: 2973 - RNA, 76 nt, Homo sapiens
aaccacagaacgcggacaagaaaccgcacccaacaggacaaagaggggggcaggccacgggccagcggaacacagg

SEQ ID NO: 2974 - RNA, 81 nt, Homo sapiens
ggagagcacaccaggcacccgggcccagccgggaacccccacgcggccagcgaaaacgcccagcccaacaagagcagagac

SEQ ID NO: 2975 - RNA, 74 nt, Homo sapiens
ccgcgaggacgagccacacaggcacaggcgcccaacacggggccaagcgcacggaggagaaaacacagaggggg

SEQ ID NO: 2976 - RNA, 81 nt, Homo sapiens
gcagcagacacggccgaccacgcagccacggccagcgggcaaggagaagcggcggacaacgggacaggaaagggaagagaa

SEQ ID NO: 2977 - RNA, 80 nt, Homo sapiens
gaagcgcgcgccgcgcccggaccccagcaggcggacaccgaccgcaggaaggaggaggaggagggagccaggcagaaaac

SEQ ID NO: 2978 - RNA, 70 nt, Homo sapiens
gaccggggcaccagggaaaacacacccgagacccagacagaggacagcagaccacagcccggcaggccca

SEQ ID NO: 2979 - RNA, 74 nt, Homo sapiens
gcgagcgaacccccgggccaaaacccagaagaagcacaaaacagaggcgccgcgcccggggagacagaaacgag

SEQ ID NO: 2980 - RNA, 78 nt, Homo sapiens
gcggcagacggcaggccagcgcggccggacgggcacccagaggcgccaggacggcgggaccccgccagccgaggaaga

SEQ ID NO: 2981 - RNA, 80 nt, Homo sapiens
gggggaagcgggaaacccacaggaggcaaccacacagagcccacacggaacaagcaccgaacaagcgaaggagggacgga

SEQ ID NO: 2982 - RNA, 81 nt, Homo sapiens
aaggcgaccgcagccccccgcccggaggccgggaaggaaacaacggaagggaacaaaagcaacgaaacaggccccagacaa

SEQ ID NO: 2983 - RNA, 61 nt, Homo sapiens
ggagaaggacagaaaaaggagagacagcgaaagcaagggggcaagaaggacgcacaggagc

SEQ ID NO: 2984 - RNA, 67 nt, Homo sapiens
accgcggcaaagagaggacgcagcgagaaaggacaggccccggaacaagaggaggacagaaccaggc

SEQ ID NO: 2985 - RNA, 73 nt, Homo sapiens
gcacaggcccacaaccgcaccaagaagcacgaccgcgagaagggcacggagaaaaggacgaacagcaaagacc

SEQ ID NO: 2986 - RNA, 71 nt, Homo sapiens
ccagacaccaagggagccagcggaggagcaagaaggggggaccggaggagagaacaaccaagcggaaaccc

SEQ ID NO: 2987 - RNA, 78 nt, Homo sapiens
cgcggcgggccgcgccgcgccgccgcccacaagcggcgccgcgccccggccgcacgggggcagagggcaggagcaaaa

SEQ ID NO: 2988 - RNA, 79 nt, Homo sapiens
aggccgcgcccaggagccgggaagaagaggagcaggccgggacgcccaccgcagaaaccaacagggaaagagggcccag

SEQ ID NO: 2989 - RNA, 117 nt, Homo sapiens
gcagcccggcccgcggcacgcccaccacaaggcagcgacaagaggcggacgcacaagacagagggggaagacggggggccccccaccgccccgcagaagagcagcggccgccggcaa

SEQ ID NO: 2990 - RNA, 82 nt, Homo sapiens
cacaagcagggaacaccggccaagaaggagccgcccggcaaagcgaaagcgcaggaccgaggagaaggagccgccggagcag

SEQ ID NO: 2991 - RNA, 84 nt, Homo sapiens
gcgggagcgcgaacgagcgacggcggaacccggggccgggacgcagcccggcggcagcaggcgagcacacagagaggggaaggg

SEQ ID NO: 2992 - RNA, 56 nt, Homo sapiens
gcaggacaaagaggaacaggcagacacccggggagaaaaccagacgagagacagaa

SEQ ID NO: 2993 - RNA, 107 nt, Homo sapiens
agaaaagaacggcgagggacagaagaagggagcacggaacagacaagccagaacgacggaaaaacaaaaggaggcaggacaagagaagacccacaaaagaacgacac

SEQ ID NO: 2994 - RNA, 50 nt, Homo sapiens
cgcagggcgcccccgcaagaggaaaggccgccccggaggaagaaaaggga

SEQ ID NO: 2995 - RNA, 73 nt, Homo sapiens
ggggcgcggagggccgagggagggccgagccagccgcggccggaggagcccccaggccggcccaccggaccgg

SEQ ID NO: 2996 - RNA, 58 nt, Homo sapiens
cggcggagcggagggggggcgccagaacaacagcgaccccaaggaagacaaggagaac

SEQ ID NO: 2997 - RNA, 38 nt, Homo sapiens
ggggcccggacagagagacgcaggcaggcccgaagcga

SEQ ID NO: 2998 - RNA, 87 nt, Homo sapiens
caaagccaagaggcggacaaaacgccaggcggaccagaaggccagcaaagagagaagaagaaggaggccgcggccagaaacccaaga

SEQ ID NO: 2999 - RNA, 76 nt, Homo sapiens
agaccagggacccccccagcccccccgcagagcagccccggaaggaggccgccacagcagccaggcccggggccaa

SEQ ID NO: 3000 - RNA, 65 nt, Homo sapiens
acggacagaccaggggaagggccaggccagagaagacccggggcaggcgcaggaggcacccaagg

SEQ ID NO: 3001 - RNA, 90 nt, Homo sapiens
cgcgccggcacacggggagaagccccgccgcaccggccaggcgcggcggagggagcccccaacccagaccacacccgagccgagcccgac

SEQ ID NO: 3002 - RNA, 87 nt, Homo sapiens
agaacagaagaagaaagcagggggacgcaaaggccaaggggcggcaaaaagggacaagaacccaagaaacaggaaaaaacccaaaac

SEQ ID NO: 3003 - RNA, 73 nt, Homo sapiens
ggggacgggccagcaagacacagggaccacaagacaaacgagggcccagcaagcaaggagaaggaacaaaacg

SEQ ID NO: 3004 - RNA, 69 nt, Homo sapiens
aggcagccagcagggggaggacaggagagacaacggaggcaagaaagacggagaagcgagaagagacca

SEQ ID NO: 3005 - RNA, 75 nt, Homo sapiens
ccagacgacaagcacacacaggcgcgaaacggaaaaaggcgagaacgcggacaagcaaacaaagaggaaaaagag

SEQ ID NO: 3006 - RNA, 74 nt, Homo sapiens
agacaggaggggccgggcaagcgaccccagaagggggaccagagacacccgacccgaccacagcggaggagaga

SEQ ID NO: 3007 - RNA, 82 nt, Homo sapiens
accagcccgaccaaccccaagggaaggaacaaaaccagcaaagaacaacccaggacccaaacacaagaagaccagcaaccag

SEQ ID NO: 3008 - RNA, 76 nt, Homo sapiens
ccaaacaaaaggaaaccacaccaaccaagaagagccaggccccgggggcgccgagggcacaagggcaacgacagaa

SEQ ID NO: 3009 - RNA, 74 nt, Homo sapiens
acaccaaacccagcaaaaccacgcaagaccacaggcaaaagagaggcccggcacacgcccaggacaacaagcag

SEQ ID NO: 3010 - RNA, 76 nt, Homo sapiens
gaggagagcggaaccaacgaagcagcgcaagcaagagcgccccggagggaagagaaaagagggagaagaagccgaa

SEQ ID NO: 3011 - RNA, 77 nt, Homo sapiens
ggaaagcaaagacggaggagaggccggggggggcacagagccccggaagacagcccccagcgaccagacccagggcc

SEQ ID NO: 3012 - RNA, 40 nt, Homo sapiens
gagggacgggaagaagaaaggggggaccaaccaagaagaa

SEQ ID NO: 3013 - RNA, 42 nt, Homo sapiens
gcgggaggagcggcgcgcacaagcggacgagcacacagcaag

SEQ ID NO: 3014 - RNA, 71 nt, Homo sapiens
acaaacgagaaggcagagaggggaagaccaagagcacagccccacacaaggagagcaagcagggagggccc

SEQ ID NO: 3015 - RNA, 76 nt, Homo sapiens
ggacgagcgaggccgcgcggacaagacacaaagccagacccaagacccaagcagcacgagagcaagcaccaagacc

SEQ ID NO: 3016 - RNA, 72 nt, Homo sapiens
gcgcccaagaacaggcgcagggaacacgaaggaagccggaccccggggaagggagcaaagaaggacgcagag

SEQ ID NO: 3017 - RNA, 77 nt, Homo sapiens
gcccgggaccgggagacacaagccgcacaaacacgcagaggcaagaagagaggcaggagggccgggacgggagaggg

SEQ ID NO: 3018 - RNA, 80 nt, Homo sapiens
ggagcaccaaggcgcaagaacccagagcgggcagcggaacgcgccgacgccgcaaccagcaccccgaggagcggaaccag

SEQ ID NO: 3019 - RNA, 73 nt, Homo sapiens
ccaggaccagagaccggaggcacaaccccaagcggggggaaaggcagagcgacagggaaagagacgacacaaa

SEQ ID NO: 3020 - RNA, 48 nt, Homo sapiens
cccagagaaagaggccacacgcagaggagcagccgcgcaagggggaag

SEQ ID NO: 3021 - RNA, 69 nt, Homo sapiens
cagcaggaagcacggcgggcgaaacaggaggggcagcagcaggacagggaacccgggagacagcaacag

SEQ ID NO: 3022 - RNA, 56 nt, Homo sapiens
accaaccacacaaagcaggaggaagaaagaggaccaaacaggagcgccgagcccac

SEQ ID NO: 3023 - RNA, 63 nt, Homo sapiens
ccgccacagccgccggccgggagaggcgcgcgccaggccggagccgagacccaaagacaggac

SEQ ID NO: 3024 - RNA, 54 nt, Homo sapiens
aggagaagggcggcaagcaaaagcaggacaccaggcggaggcagggcaagaccg

SEQ ID NO: 3025 - RNA, 69 nt, Homo sapiens
ccagcagcccccagagcgggaccacaggggccagaggcgccggaaggacggggacccgagaaaaggaag

SEQ ID NO: 3026 - RNA, 87 nt, Homo sapiens
cgaccgggcccgggcggcgcacgacgccgcccggcccggacccgagcgcggggaggcagaccgagagcagcaccagcagaagagggc

SEQ ID NO: 3027 - RNA, 73 nt, Homo sapiens
gcgcaaggcacaagcaccagagaacaagcaccaaagcgaaggagggccgcaaggaccccggaggaaaagcgga

SEQ ID NO: 3028 - RNA, 72 nt, Homo sapiens
gggcggaagacaggccacccagcggggagcacggcgagcagccaggccaggagaggagccacaacgaccgag

SEQ ID NO: 3029 - RNA, 42 nt, Homo sapiens
gggaacaggcggagcggaaggggaaaagcgcagcaacaggaa

SEQ ID NO: 3030 - RNA, 74 nt, Homo sapiens
gcaaagcgaaaagggaacggagcggaaccgggaaacaacgaacgagcaaggaagggccaaggcagaccccacac

SEQ ID NO: 3031 - RNA, 75 nt, Homo sapiens
acggacaagacacgggacagagcgacagaggagcacagcaagcgggagcaggcagaccaaaggaacagaagccag

SEQ ID NO: 3032 - RNA, 81 nt, Homo sapiens
cggcaggcgccgaggaggaagagcgagcccggacggcgccccgaacgagggggcgcgagaaaaaggcacaaacccagcaca

SEQ ID NO: 3033 - RNA, 78 nt, Homo sapiens
ggcagaaggacgagacagaggcccggagacggcagaagcgcagcacacgcggaagccacaaccagaggaccagacaga

SEQ ID NO: 3034 - RNA, 71 nt, Homo sapiens
aaagaaggagaaaagggagcagcaggagccccgcgggagcacagaaagggccccccggacacaccacgccc

SEQ ID NO: 3035 - RNA, 78 nt, Homo sapiens
cccaccgcaccggaaggggagcacgcgagggccagggccccagggcaaacgaaggacgcacccccgaggacgagagag

SEQ ID NO: 3036 - RNA, 83 nt, Homo sapiens
ggcccggccacacgcgggaagggaacagaaggccaagaggaacagccaggggacccacccgcccaacagccccaccacagagc

SEQ ID NO: 3037 - RNA, 84 nt, Homo sapiens
gcacagccgagagaagacggaggacgagcgcggggcggcaccggaggaggagaaccgaggaagggagcggaagaaaagcaggca

SEQ ID NO: 3038 - RNA, 35 nt, Homo sapiens
gcccccacacggggagcagaagaggggaagaaaga

SEQ ID NO: 3039 - RNA, 77 nt, Homo sapiens
gagcggcggcgcaccaaccgcgcgcaccgccgacccggaagaccgccgccggaaagaacaagcaccggagagagagc

SEQ ID NO: 3040 - RNA, 84 nt, Homo sapiens
ggcgccaccagggcgcggacggggcgggcgcaggacggaccagcaagccaggcggcagacaaacggaaccaaccaaagcaaaac

SEQ ID NO: 3041 - RNA, 72 nt, Homo sapiens
agggaagaccaggagccccaagcaggggccgcggccagcccccaccaggaagaggggaggagcgccagcggg

SEQ ID NO: 3042 - RNA, 56 nt, Homo sapiens
aacagcgggaagagacagccaagcaaaccagccggcgggcgccacaacggacgacg

SEQ ID NO: 3043 - RNA, 56 nt, Homo sapiens
gacccacgcagcaagaacgacccaggccgagaagcagcaaaggcaaacaaagcggc

SEQ ID NO: 3044 - RNA, 77 nt, Homo sapiens
ccagcaggaagcagaccccgaaaaccaagccgaggacgcggggccgggccacgcagacccgggcaacccagggggca

SEQ ID NO: 3045 - RNA, 86 nt, Homo sapiens
ggaccgagaccggaccgagagcggaccgagagcgcgaaacgcacgagaaggaccgccgggagagccgcccaccccccacccggacg

SEQ ID NO: 3046 - RNA, 33 nt, Homo sapiens
cggacccaagcgaaaaagcaaggcgcagagaca

SEQ ID NO: 3047 - RNA, 83 nt, Homo sapiens
cccgggcagcaccagccccggccaaccgggcagacaacaagcccaccggacccgggcggaccaccggaagcaggggcagaggg

SEQ ID NO: 3048 - RNA, 88 nt, Homo sapiens
agaaacagagcgccccgcaggagcacaacaccacacgcagacccagaccgccaagcgcagggacacaccggagacagggagggaggga

SEQ ID NO: 3049 - RNA, 116 nt, Homo sapiens
ggggagagcccaagacgggcgccaaaccccaaaggcaaaaacgccaccccaacaggagacgccagagagaaagcccagaggccccgggaccggcccgggagagcgccaaacagccc

SEQ ID NO: 3050 - RNA, 81 nt, Homo sapiens
aagagaggacaagaagaggccggacccgcagggaagaaggccagcaggcgcgccccgcacaccggagcacccggacaacga

SEQ ID NO: 3051 - RNA, 78 nt, Homo sapiens
agaagccacgaccagaccgcaaaacaaggacaggcagaggaggaaaacgagagggcaacggcaacaaacagaagaaga

SEQ ID NO: 3052 - RNA, 83 nt, Homo sapiens
cgcggcgcagcccacggcgcaggcccacggagcgcagccgccgaggccggacaagcacacacaaaccacaagaaggggcgcga

SEQ ID NO: 3053 - RNA, 59 nt, Homo sapiens
gggacgcgcgcgggcacccacggagccccggggcgcgggaggcgggcggcggggcggca

SEQ ID NO: 3054 - RNA, 84 nt, Homo sapiens
cggacccgcgaaccgggcagggcacgggaccagcccagggggcccacagaccgaaggcaggggaggaagaaagcggaacagaaa

SEQ ID NO: 3055 - RNA, 69 nt, Homo sapiens
aggaggcccccagccacgggaacaaaagagcgagaagaagagaggcggccgcccaggaagcgccgaaca

SEQ ID NO: 3056 - RNA, 80 nt, Homo sapiens
gccaccagcaaaagcagggaccccacacgcggacaagcacccggaggagccagacaggcccagagccccgcagggagaaa

SEQ ID NO: 3057 - RNA, 76 nt, Homo sapiens
agccccgacagggcgcggccaagcagaaggaagagcaaggagcaaaccaagacggccaagggggagccggccggga

SEQ ID NO: 3058 - RNA, 74 nt, Homo sapiens
cgacgaaagacaccaccagggacaacagaagggcggcgacggcggcgcgaggaccgaccgggcccgcggacgaa

SEQ ID NO: 3059 - RNA, 65 nt, Homo sapiens
agagagaggagggggcaccgagcaacgagggcagggccagccaaagaggagaacacgccccgacc

SEQ ID NO: 3060 - RNA, 61 nt, Homo sapiens
acgaccaccacccggggcccccccagccgcaccaccaaggaaaaagggccaccccgaccac

SEQ ID NO: 3061 - RNA, 59 nt, Homo sapiens
caggcagcccagcccgcccccagaaaccagggcccccaagccggcaggggaacgaggag

SEQ ID NO: 3062 - RNA, 76 nt, Homo sapiens
cgcaacgacaagcacccccacagcccagcgagaacccaggacgagaaaaaacagagcggaacaagcggcccaagag

SEQ ID NO: 3063 - RNA, 78 nt, Homo sapiens
agaggcccccgcagcaggccggccacccagagggcccggccaaggacacgccaccacaccgacccacgacaagaacgg

SEQ ID NO: 3064 - RNA, 84 nt, Homo sapiens
ccggacagagcggccagggaggccgagagcgcacaggaggcacgggcggagaaggacccgcagagacagacagccaccggccca

SEQ ID NO: 3065 - RNA, 76 nt, Homo sapiens
gacggcaccaggacgacaaaagaccccgaagaggaagacaagacccaccaaaaggggagcgggagcacagacccag

SEQ ID NO: 3066 - RNA, 72 nt, Homo sapiens
gcccgcccgccgacgcccgcgccggcgccccggcaggaggcaaagggaccccaagaaaccaaagggcaagag

SEQ ID NO: 3067 - RNA, 80 nt, Homo sapiens
aaagagccgggagccagaggagacagaaaggagccaaacccccaggagaccagagacagacgaggaagacaccaagaagg

SEQ ID NO: 3068 - RNA, 51 nt, Homo sapiens
agggacccaggaagagaagaaagaggacaacagacggccggggggggcaca

SEQ ID NO: 3069 - RNA, 84 nt, Homo sapiens
agcaaaccagaaaagaaccaagcaccggggccagccagacacccgggacaagccaacccgaggaaaggaggccaacagaaagaa

SEQ ID NO: 3070 - RNA, 57 nt, Homo sapiens
cacaacaggaaaacaaaagaggagaaagggaaggagaaacaacaagaaaacggcccg

SEQ ID NO: 3071 - RNA, 75 nt, Homo sapiens
gcaggggcccacacccccggcacccccacagagcggaccgcgaagagagacacgcaggaaagccccagccaccca

SEQ ID NO: 3072 - RNA, 79 nt, Homo sapiens
ccaccacggagggaaagaccaggcagggagaaaccggaaaccgacaaggcaacagggcccagcgcacaacccagcggca

SEQ ID NO: 3073 - RNA, 81 nt, Homo sapiens
gcgccagcagcccgccggcgcgagaggagacgagagggccccaaagggaccagggacgcgcccgcgcgggagacgggagcc

SEQ ID NO: 3074 - RNA, 74 nt, Homo sapiens
gcacgagggccagagggcgagaggggagccacaacaggacaaacccaacgcgaaaagggaaaaagaaggaaaca

SEQ ID NO: 3075 - RNA, 77 nt, Homo sapiens
aggaagcggaagcgcagccacaaggccgcaggggagccgagagccacaggaagagaagcccagacacgaagaagaga

SEQ ID NO: 3076 - RNA, 73 nt, Homo sapiens
ccccccccacccaccaaaccggagggggaaaaaacccaaggcgcaaaggaaacacgccgcaccagggaggaga

SEQ ID NO: 3077 - RNA, 81 nt, Homo sapiens
aacacgaggggcgccgcgggacgcagaggagagggaaccgcaaagcacaaagcacccagggaaggacaagccaggagggcc

SEQ ID NO: 3078 - RNA, 70 nt, Homo sapiens
acaggagaaagcgaagccaagcccgaagccaaggggccaagaggagaagaagcacaacacgaaaggagaa

SEQ ID NO: 3079 - RNA, 79 nt, Homo sapiens
cggagacagcgacacccaccgagaagagagcggcacagggagaacacagggccccaccgcgccccacagaaaacgagca

SEQ ID NO: 3080 - RNA, 73 nt, Homo sapiens
acaggaaagcaagggaaggcgccccaacaaagggacaacaaaacaagcgcagacgacagaaaaccaagaaccg

SEQ ID NO: 3081 - RNA, 65 nt, Homo sapiens
caagaaccagcggccgggaagcaagacccaaccagagccgcaacagggaccggagggccggaagc

SEQ ID NO: 3082 - RNA, 71 nt, Homo sapiens
gaagcaggcccccagccgcagccacaacaccggcaggaaccaccaggacagagcagaaaaaaccagcaggc

SEQ ID NO: 3083 - RNA, 55 nt, Homo sapiens
ggagaccccgcgccgacggcgccaaacacaggccggccccgagcgaggcaccgga

SEQ ID NO: 3084 - RNA, 67 nt, Homo sapiens
agagcgaaaagcgagaacccagggcagggggacacagccagggcgcaggcagcgcccaacaacacgg

SEQ ID NO: 3085 - RNA, 75 nt, Homo sapiens
agccacccacgccagcagaggggcaaaagcagcgagagcaagcagaacggaacgcgaggaagaaagcaaaggacc

SEQ ID NO: 3086 - RNA, 68 nt, Homo sapiens
accacgcggaggacgggcaacaggagccccacgccacgggcgacgagggcaaaacaccaggaccaacc

SEQ ID NO: 3087 - RNA, 71 nt, Homo sapiens
ccgaacacaaggcaggagcgagaagagagagcagagacagccgcggacagcagaccacagcccggcaggcc

SEQ ID NO: 3088 - RNA, 76 nt, Homo sapiens
ggccaggccagacgggcgccagggcggaaccaagcagggaaacgaaaaaggccacagaggaagccacgagcagccg

SEQ ID NO: 3089 - RNA, 71 nt, Homo sapiens
gacccgcggccccagcacccaagggaagagacgcacgacagccagaacccacaggaccgcgaacaaggagg

SEQ ID NO: 3090 - RNA, 82 nt, Homo sapiens
ccccgggccggagcccagcagcggggagccccgagaacgccccagcggggagacacagaaggaaggcccgccgaaggagaag

SEQ ID NO: 3091 - RNA, 39 nt, Homo sapiens
aagaagagcgccagacccacagcacaccgacagagaacc

SEQ ID NO: 3092 - RNA, 38 nt, Homo sapiens
gaggaggagccgcagacgaaaaagagacggcgccgagg

SEQ ID NO: 3093 - RNA, 73 nt, Homo sapiens
aagcagagggggaagaaaaacagaggagcaaagacgcgagccaagcaagacaagagcagccgagcggacaccg

SEQ ID NO: 3094 - RNA, 82 nt, Homo sapiens
cacgagcaggcaggccccgcaggccacccaggcccggaggcagcgcagacagccccagcacagaggaaagagaaagagccag

SEQ ID NO: 3095 - RNA, 68 nt, Homo sapiens
gccgagagcacccgcaccaagagaagacccgggagaaaacgggccggaggaaaagggcggcaggggac

SEQ ID NO: 3096 - RNA, 81 nt, Homo sapiens
cgcgagcccgaggccaggcgccggccggcgcgaagacgcgggggccgccccccggaaaaagacaagggcagagcagccggg

SEQ ID NO: 3097 - RNA, 75 nt, Homo sapiens
cccaagccacggaccagagacacgccaagcagccagcccaggagagacacgagaggcgagggacgacagagcaag

SEQ ID NO: 3098 - RNA, 74 nt, Homo sapiens
gagggaccagacgcgaaggacgccggccaaacccaggacaagagccggaggagccaccaacagaagcaggagcc

SEQ ID NO: 3099 - RNA, 76 nt, Homo sapiens
ggaaacgacaagaaaaacaacgccaagagggaaggggacccgccgggaggacgcggccgaagacccagcaaacaag

SEQ ID NO: 3100 - RNA, 82 nt, Homo sapiens
gagcaccgccccaaccagaagaaaccagccagagagccaagaagaacagacagacaggcccagcgggacgacccgggacagc

SEQ ID NO: 3101 - RNA, 57 nt, Homo sapiens
ggagacaccccgggggccccgagcaaaccagggcaaaagcagaccggaaaacccacc

SEQ ID NO: 3102 - RNA, 75 nt, Homo sapiens
cgaccacaccaagcggaaaaaagacaccagcgacaaggacagggcggaaaacaccccaaaagccaaaagggaaag

SEQ ID NO: 3103 - RNA, 80 nt, Homo sapiens
gaggcgagcgcccggaggggagagagcggaggacagccgagaggagcacgagccagggagccgccgggaccggcccggga

SEQ ID NO: 3104 - RNA, 83 nt, Homo sapiens
cgcaagcggccaaccagccccacccgacagaacggagcacgaaaacaagccgacaggagaagaggaggcgcggaggaggagga

SEQ ID NO: 3105 - RNA, 72 nt, Homo sapiens
aaacaagagaccacagaaggcccaagggaagcaagaaaaaagacgggcccggggagagaaggagcgacccac

SEQ ID NO: 3106 - RNA, 74 nt, Homo sapiens
ccagacggccggcaagaacagcgacaaggagagaagcgcggagccccaagggaacacaccagggacggccagaa

SEQ ID NO: 3107 - RNA, 71 nt, Homo sapiens
gccaggaaccaagcacaggacgggagccccagaccggaaagccgcccccgccggaaccaagacccgacgac

SEQ ID NO: 3108 - RNA, 45 nt, Homo sapiens
ccaccgaacaaagcagaacgcaacagggaaacaggccagccacgc

SEQ ID NO: 3109 - RNA, 78 nt, Homo sapiens
agaaacaaagaggaagagcagcaccagaaaccgcaaacagacgcagcacaaaaggccaaaacgcaggaagggcgaaag

SEQ ID NO: 3110 - RNA, 73 nt, Homo sapiens
ggaaacgacagaagcagaggggaaaaagaaaagggcgaagacccgaagcagcgcaggaacagaagagaagacc

SEQ ID NO: 3111 - RNA, 68 nt, Homo sapiens
cagaaaacgaggcggggccgcacaggaaagaggaaaccagagcaggcggaacgcgacaaacagcgagg

SEQ ID NO: 3112 - RNA, 55 nt, Homo sapiens
ggagccgaacgagccccagccagggagaaaagcccagcgagcggaaaggggaaag

SEQ ID NO: 3113 - RNA, 102 nt, Homo sapiens
gagggcaagaccgcggcaggcgcgaaggcgcacccagaccggccccccacgcagagagaacaacaggggggagaggagagaaccagaagagaggagcagaga

SEQ ID NO: 3114 - RNA, 82 nt, Homo sapiens
ggggggggcaaggggcccaccgcacaggaaaaccaccgagaacaagcagcgggaagaaaaggggcaaacaccaagaaacaag

SEQ ID NO: 3115 - RNA, 40 nt, Homo sapiens
acccaccgaggcgagaggcaggcaccagggacccgggaac

SEQ ID NO: 3116 - RNA, 60 nt, Homo sapiens
aagccaaccaagccaggcacacaggagaggagccaagcccaacgggacgggaaaacggcc

SEQ ID NO: 3117 - RNA, 73 nt, Homo sapiens
gggccaagcagaggaggccagaagcagcagagaagaaaaacagaaccacacaaacggaaccggagaccagggc

SEQ ID NO: 3118 - RNA, 103 nt, Homo sapiens
cacacacgaccagacggcacccccaagacaaccaaagggcagaaagcaccgacaagcaacaagagccgcacacgagacgcggcccgaggcagcacgcaaacga

SEQ ID NO: 3119 - RNA, 62 nt, Homo sapiens
gagacccacccaaacacggaaacgagcaagagaacggaaaagccgggcaaaaaacagcagaa

SEQ ID NO: 3120 - RNA, 81 nt, Homo sapiens
cggggcggggcgaagaagcagcacaaggcgagccaggggagaaccgccagcgacgggaaggcaggacccacgcacgagcaa

SEQ ID NO: 3121 - RNA, 76 nt, Homo sapiens
ggcgcacggccgcacagcgcgcgagacaccgcacgcaaggagcgcgaggagagcggccacggagacggcggcccca

SEQ ID NO: 3122 - RNA, 57 nt, Homo sapiens
gcgcaggacggcaaggcgcagacggcacaggcaggggcaaggcagaaagcggcgcga

SEQ ID NO: 3123 - RNA, 82 nt, Homo sapiens
gccgccaagacaggcaaaagaaggcgggcgcagagagacaagggcacccgaggcaaccaccggggcagaaggacagggagac

SEQ ID NO: 3124 - RNA, 77 nt, Homo sapiens
aagcaagacccaggacaccccgaagccgagaaaggacaccaggggggaaaaaccacacaggcaaagaacgcgcaaaa

SEQ ID NO: 3125 - RNA, 42 nt, Homo sapiens
gcccgggccgagcccccagccagaggcagggcagcaccagag

SEQ ID NO: 3126 - RNA, 74 nt, Homo sapiens
gcggcgagaacagcaaagcccaagagaggcaggcagcgacagccacacaacggacagacggagccaccaccacc

SEQ ID NO: 3127 - RNA, 77 nt, Homo sapiens
ccccggcccacaggggggggcaaacccgagagaacggcgacagagccaacgcaaaaccagaccaacagccacaggac

SEQ ID NO: 3128 - RNA, 84 nt, Homo sapiens
cagaggccaaggcaaaccgcaccccacccagcggggccagaggcagccgggccggcccgagcccgcccgcaagagccgcaccgg

SEQ ID NO: 3129 - RNA, 77 nt, Homo sapiens
cagggagggccccgacagcggaaccaacaagggcaaacaagggagccaggacgaaggagacgcaggagggagagcag

SEQ ID NO: 3130 - RNA, 79 nt, Homo sapiens
gggacaaacggaggaagcacgggagaagccagggggaagaagcgagacccggagaaggcaggacacccacaaaggaaaa

SEQ ID NO: 3131 - RNA, 75 nt, Homo sapiens
cagcggccgcgcacccccggccggaggcaccagcgaccgacagcccccaggaaggaggcggcggccgcgagagcc

SEQ ID NO: 3132 - RNA, 82 nt, Homo sapiens
cgggaggccggacccagcgagcgggcggcacgcacgcaggccaaaacagaagaggcaaagcccagccacagcagcagcccag

SEQ ID NO: 3133 - RNA, 84 nt, Homo sapiens
gggcgagaacgccacgcgggccggcgaaagcggggagcgacagaaaagcagcacaacccccggagaaccgaagggacacagcag

SEQ ID NO: 3134 - RNA, 79 nt, Homo sapiens
gacccgcgaaaacaccgagcgaggacacccccagaacgagcccccaacggaacccccacaccccaaccaggaccagaga

SEQ ID NO: 3135 - RNA, 65 nt, Homo sapiens
cagaccaaagccgacgagccccggagcaggcgacagcccgagagggccagcacgaaaggagcagg

SEQ ID NO: 3136 - RNA, 69 nt, Homo sapiens
gcggccagagagaacaagcgacccgacgagcgcaaggagagagcagagaggagcccaggggaagagagg

SEQ ID NO: 3137 - RNA, 77 nt, Homo sapiens
gggccaagagccgaggccaagcacacaaggggagaggaggcgaacccacccccagcacccaccacaccagcacagcc

SEQ ID NO: 3138 - RNA, 104 nt, Homo sapiens
cgcccggcggcaggcccacacccaccaaaggggcggcacggagaaacagggcggaaacagggagggccacagcccccgcccgggagacaaagccccaggccggg

SEQ ID NO: 3139 - RNA, 79 nt, Homo sapiens
cgccgggggcaccgagcgggaacgcacggggcgcgccgggcggagcagacccaacagaggaagccgcaagaaacgggac

SEQ ID NO: 3140 - RNA, 83 nt, Homo sapiens
caaagcggggacccagacccggagcccagggaagcagccgaccagccgcggagccgggggcaggcccccgcgggcgcacacag

SEQ ID NO: 3141 - RNA, 73 nt, Homo sapiens
ggccccgggacagacagggaagacagacccaacccggagccggggacggcacacgggcgggggcaacgggagg

SEQ ID NO: 3142 - RNA, 80 nt, Homo sapiens
gccgacgagcgcgcacaacgcaggaccggcgccgaaggcccgccagggcccgggaggaggcggacaaggggacggcaccc

SEQ ID NO: 3143 - RNA, 75 nt, Homo sapiens
ggggcaagcggcgccaccaccagcaccaggcgggacaacacaagggaaccaaggagggcgccgcgggcgcgccgc

SEQ ID NO: 3144 - RNA, 77 nt, Homo sapiens
aggcggagccgaccgggccagaggcgcaggaagggcaacaccaaaccagaagaaggacgagcaaagcgaaaacacag

SEQ ID NO: 3145 - RNA, 84 nt, Homo sapiens
gagccaccggcgcggcgccgcccccgccgccgcccgccgcccccggcggagcagccgcagccacgacccggggccggagagccc

SEQ ID NO: 3146 - RNA, 61 nt, Homo sapiens
ccggggacacggccgaagaagaaaggaagccgggggaccaacaacaaagcacacggacaca

SEQ ID NO: 3147 - RNA, 68 nt, Homo sapiens
gaaagcgaagaaaaggaccaaaaacacaacaaaagaaaccaacaccgcaggagaacaaaacccccaca

SEQ ID NO: 3148 - RNA, 35 nt, Homo sapiens
gcgcagcggcgcggaagagggccgcacgccccacc

SEQ ID NO: 3149 - RNA, 69 nt, Homo sapiens
ggagagagggaaaaaacaaccccgccggcagaacaagacaaaccagacagagaaagagcaaccagaaaa

SEQ ID NO: 3150 - RNA, 75 nt, Homo sapiens
ccgcacagccgccagaggagcggaaagggggccgggccccaggagcccgggcacgcccgcccacagcgaagacca

SEQ ID NO: 3151 - RNA, 83 nt, Homo sapiens
cccacgccacgcccggcgcgacacaagaaaaccacaagaacgcaccccccagacacgacgccacagcaacaagcagggcgagc

SEQ ID NO: 3152 - RNA, 64 nt, Homo sapiens
agaaaagagagaaccccaaccggggaggaaaaccgacgaagaaaccgcaaaagaggggaaggcc

SEQ ID NO: 3153 - RNA, 82 nt, Homo sapiens
ggaggaggcgggggcgccggcagaggaccaggcaccaccggccccggaagggaaccacggagaccagaccgcgccacaggac

SEQ ID NO: 3154 - RNA, 54 nt, Homo sapiens
acggggcacgcaaagaggaccgccaacaacagggggggaaaaagacaaaggcgg

SEQ ID NO: 3155 - RNA, 63 nt, Homo sapiens
agaagaagcgagaaagcccgcgacaggccaaagcaagcggaggagaagaagggaaacaccagg

SEQ ID NO: 3156 - RNA, 107 nt, Homo sapiens
ccgcaaacgaggacagcaccaaaagagaagacgggcgggaggaggcgaggagagagcccggcagggaaccaacccagccacaaccaccccagggcgaccacagagcg

SEQ ID NO: 3157 - RNA, 65 nt, Homo sapiens
gaaaggaaacggaagaaaaaagaaaagaaacgacaaaaacacgagaccagcagaagagacacggg

SEQ ID NO: 3158 - RNA, 67 nt, Homo sapiens
gaggagaaacagcagaaacgcaccaggccaaagaaagagaagagagaagagacccacgcgagaacca

SEQ ID NO: 3159 - RNA, 76 nt, Homo sapiens
agcccaaaccacaagccacaaaagggcggaaaacaccccaaaagccaaaagggaaaggaaaagaccaacaacagcg

SEQ ID NO: 3160 - RNA, 56 nt, Homo sapiens
cgaggacaaggaccgccgggcaagacccaagggggggaggagggacaacacacaac

SEQ ID NO: 3161 - RNA, 73 nt, Homo sapiens
gaaacgaagagaaggggaagaaagagagaacaggcaccgaggagcaacacccccagggagcccagaccgacag

SEQ ID NO: 3162 - RNA, 51 nt, Homo sapiens
ggcagaggcaacagacaggccacgagggcacagaacgagcggccacgcccg

SEQ ID NO: 3163 - RNA, 70 nt, Homo sapiens
ccaggccccgcggggccgcagacggggcagcccaaccggacagaggaaacgaaaagagacagcagggcaa

SEQ ID NO: 3164 - RNA, 71 nt, Homo sapiens
ggaccaacgcgggagaaagagaaaagagaaggcagggggagaaggaagagagcagccaaccaggggcacca

SEQ ID NO: 3165 - RNA, 71 nt, Homo sapiens
ggggcagaccccagcccacaacccacgcgcaccggaaagccccacgaagagagaagcgcggaccaaagcag

SEQ ID NO: 3166 - RNA, 64 nt, Homo sapiens
accaccaaagaccacgaagccggaagcagaggaggacaaggcaaaagcccgaaaacaacgaaaa

SEQ ID NO: 3167 - RNA, 86 nt, Homo sapiens
cggggcccgggaccacaggccccggcccagagaagggaaaaggccgaggcacagcgggaagaccgcaaagacgacccgagacaggg

SEQ ID NO: 3168 - RNA, 72 nt, Homo sapiens
acaagaccaccggagagaaaaccgcacacacaaaggacagcccaaggcggaaaagcgaaggaagccacaagc

SEQ ID NO: 3169 - RNA, 75 nt, Homo sapiens
aaagagcaagagcagggaacaggaagagagaaggccacgcccgaccccaagcaacaacggggcagggacaggcgc

SEQ ID NO: 3170 - RNA, 70 nt, Homo sapiens
cgggcagaagccaaaacaggaaagacgaaagggaggcaccaggccacaaaggggaagccaggaaagagca

SEQ ID NO: 3171 - RNA, 64 nt, Homo sapiens
ggggaagccgcagcggaaagcaggagcacaggccgccgacccagcggaacaagaggaaaccacc

SEQ ID NO: 3172 - RNA, 69 nt, Homo sapiens
cccgccccaaagcgagggacgagaagcggccaggaagaaaaccaccccccaagggggaccgcggagcag

SEQ ID NO: 3173 - RNA, 58 nt, Homo sapiens
gccaagagacagagaaggacaagaacagcaagccaaagagcggcgggccacccaagaa

SEQ ID NO: 3174 - RNA, 76 nt, Homo sapiens
ggaaccccaagaggaccgaggccagccaccgcggcagcgcagcagcccggccaggagcaaccgccagacggagaca

SEQ ID NO: 3175 - RNA, 75 nt, Homo sapiens
aacgggcgaagcgacgagccgcgaggagcggcggagaaaccaccacaaacacgaggccagcaacgaccaacaaga

SEQ ID NO: 3176 - RNA, 80 nt, Homo sapiens
cggcccccaagacagcgacgaagccagaaccgaagcccgcaccaagagagaggaagacaacaaccaccaacaccgccgaa

SEQ ID NO: 3177 - RNA, 81 nt, Homo sapiens
caagacccagaggagccaaagaggaaaagcaggggagggaagaccgccccacaaaaggggagagcacaaggcgaacaagcc

SEQ ID NO: 3178 - RNA, 76 nt, Homo sapiens
agcaaagaagaccgacaaggaaggaaacaccaagcagaacagacgacgagggcacgggcaaacacccaacaagaca

SEQ ID NO: 3179 - RNA, 69 nt, Homo sapiens
aggacacccaccgggcacgacagaccgcggaggcccaaggcaaagcaaagaagaagacgaacaagagag

SEQ ID NO: 3180 - RNA, 80 nt, Homo sapiens
caggcagacgggaagaacccagaaagaaaggagcgccccaaaaggaaacaacacccagacagcccgaacacggaaaccga

SEQ ID NO: 3181 - RNA, 68 nt, Homo sapiens
gcaacaaaggaaagcgaaagaggcacgcagacaggcacagaagagcagagcaagcgacccggacaaaa

SEQ ID NO: 3182 - RNA, 75 nt, Homo sapiens
aagccgagccgccacccggccaaggggcgaacgccacggggggcccgccgcgcaaagcgggccggagaagggggc

SEQ ID NO: 3183 - RNA, 74 nt, Homo sapiens
cgcagcgggaacagaagaggcccgcacaccaacaaggaagaagccaagccaagagacagcgcccccacagcgaa

SEQ ID NO: 3184 - RNA, 74 nt, Homo sapiens
cggaccgagagcggaccgagagcgcgaaacgcacgagaaggaggaagaggagaaaggcccaaaggggcgaaaag

SEQ ID NO: 3185 - RNA, 55 nt, Homo sapiens
aaacaaaagaaacgcccacagaacaccgagaggggcgcggaacagaaacagcaac

SEQ ID NO: 3186 - RNA, 75 nt, Homo sapiens
gaagaacccacagagggccacccaggcccgcagaagacgcaggaacacccgacagcagccccccccagcagccac

SEQ ID NO: 3187 - RNA, 50 nt, Homo sapiens
accaaggaccaagaaggggggcgcgacagagagggcgaagcaaaaaccga

SEQ ID NO: 3188 - RNA, 65 nt, Homo sapiens
cggcacccccccgcgcgcggggagacaaagcaacaacggaaccaccacccgagagggagcgcagc

SEQ ID NO: 3189 - RNA, 84 nt, Homo sapiens
ggccacacccgccacccacaggaccaggcgggagggcccccaagacccaacagagggagccgcaaagaacaccagcaaggaaaa

SEQ ID NO: 3190 - RNA, 73 nt, Homo sapiens
agaaaccaacaaagacgagccgcagacaagaaacacgagagaggggcccaggagcaagaggagaacagggagg

SEQ ID NO: 3191 - RNA, 67 nt, Homo sapiens
cagcgacggaaacgaacgcagcaaacagacaacaaacagaacggcaaaaggaaggaagggaacacgg

SEQ ID NO: 3192 - RNA, 58 nt, Homo sapiens
ccgcagccgcacccccggcggcagcacgaaagaccaccgcgcagacaaggcaggaacc

SEQ ID NO: 3193 - RNA, 79 nt, Homo sapiens
cagccgcacacaccacgccgcaaggaccggcacaaggacgccaagggggcgagaggcaccgcccggccaaaggaggcac

SEQ ID NO: 3194 - RNA, 82 nt, Homo sapiens
acgacggcacgccaagccaaggaaggccgagaagaagcaaagggcaaccagggaaacaggagagcgaacaacgccacagcag

SEQ ID NO: 3195 - RNA, 46 nt, Homo sapiens
ccagaaggccgccccagcaaagagaaaaaagcggcaccaagccaag

SEQ ID NO: 3196 - RNA, 74 nt, Homo sapiens
gaaagccccagagaaaaaccaggaagcaggaccacgccgcgaggcaaacgcaagggaaaaaagggcaggggaaa

SEQ ID NO: 3197 - RNA, 83 nt, Homo sapiens
ggaggaggacaacgacaccaccgcagcgacgagcaggcacccgggaacagaaaggagagggagcacagccaccgccagaccgg

SEQ ID NO: 3198 - RNA, 67 nt, Homo sapiens
ccgacgccaggcagcgcccccaaacggaggcacaaaaagaacaaccagaaggaacgcagagaccgac

SEQ ID NO: 3199 - RNA, 57 nt, Homo sapiens
acagccgcacagaacaccaagggccaaggccaagacgcgaggcgagggcgaaagccc

SEQ ID NO: 3200 - RNA, 75 nt, Homo sapiens
cccaggggacagcaggaagagaacagcaaagcaggagcacagcaagcgggagcaggcagaccaaaggaacagaag

SEQ ID NO: 3201 - RNA, 99 nt, Homo sapiens
gccggagcgcgaaggccgggacccggccccggcccacaggggggggcaaacccgagagaacggacagacagaaagcgcccaggacaggaccaggagggg

SEQ ID NO: 3202 - RNA, 70 nt, Homo sapiens
gcaacggggaccccggagcccagaagacagagggcgagaagccgggcggaagcccacgcacaggcgccgg

SEQ ID NO: 3203 - RNA, 79 nt, Homo sapiens
gaccagcaccaggggaagcgggacaacgggggccaagggacaagaaaggaccagccaggcgcaggagccaaagaagaac

SEQ ID NO: 3204 - RNA, 54 nt, Homo sapiens
acgccccggaaacgaaggcagaaaggaaccaggagccagcggaggaaaagaaaa

SEQ ID NO: 3205 - RNA, 35 nt, Homo sapiens
gcggacgcgccgaacaggcggagaacggaaaagca

SEQ ID NO: 3206 - RNA, 59 nt, Homo sapiens
acgaacaaagacggcaacgcgcacagcgcagagaagaacgaaggggaccacaacacagg

SEQ ID NO: 3207 - RNA, 76 nt, Homo sapiens
gagcagccaccgagagacggagccccggccgcccgggcagagaaaacaccgggaaaggcccaaaccggcgaaaacc

SEQ ID NO: 3208 - RNA, 53 nt, Homo sapiens
ccccagcaacacacaggcgaaccaagccaacggaaaggcaccgagcagaaaag

SEQ ID NO: 3209 - RNA, 79 nt, Homo sapiens
gggcagccccgggccaggccgcggccggggcaggagcgcagcggcggagaaaccaccacaaacacgaggccagcaacga

SEQ ID NO: 3210 - RNA, 73 nt, Homo sapiens
cagggcggcggcgccaggcagggcgcagggagaacggcagaaccaagggaccaaagcgggacggcaggccacg

SEQ ID NO: 3211 - RNA, 83 nt, Homo sapiens
gaaaaagcagccggagacaggcgagaggaagacgacgaggaagagcccgccgaagaaaggcgagcaggagcgccacgcacagg

SEQ ID NO: 3212 - RNA, 61 nt, Homo sapiens
ggaacagaaaaggcaagaaggaacggaaggcacaacagccaccccacgcagcgcagcgccg

SEQ ID NO: 3213 - RNA, 79 nt, Homo sapiens
acgaccacagcagagacaggacaaggggacaacaacacagcagggacaaagaagcgccagcaggagaagaagaagaaag

SEQ ID NO: 3214 - RNA, 55 nt, Homo sapiens
gacgacggacagcaaggaaccccggaaaccccacccaggaaagaaccacaggaac

SEQ ID NO: 3215 - RNA, 76 nt, Homo sapiens
aaggcgcgaggaggaaaggaggacgagaggcccacgcggaccggcagcgccaccggaccaccagacaaggacacgg

SEQ ID NO: 3216 - RNA, 81 nt, Homo sapiens
cgggccagcgacaaaaagagggccgccgaagggcgggaagcgaagcccggagaagaacggccgccggcgcccgcccgagca

SEQ ID NO: 3217 - RNA, 70 nt, Homo sapiens
ccagggggcgcacagcagcgagaacgaggaccggaccagggaccagaggaagaccgagaggcagaaccga

SEQ ID NO: 3218 - RNA, 78 nt, Homo sapiens
gaggaacagcacacacacagggaacaaagaaacagaccgagccccgaacgcggggaaccaccacgcagaccaccagca

SEQ ID NO: 3219 - RNA, 78 nt, Homo sapiens
cggggagcagggcgcacgaaaaaagcccgggcaaggggacgcgcagcgaggaacccggaacaaggaaacaacggaaaa

SEQ ID NO: 3220 - RNA, 69 nt, Homo sapiens
gagacacgggaggagcgccacacccacacacaagcaaaaagaagcccaggaagcgcgcagcgggagaga

SEQ ID NO: 3221 - RNA, 58 nt, Homo sapiens
gcagggacgcacaacgcagagagaccaaaggccaaaaaaaaccaacaacagggggaaa

SEQ ID NO: 3222 - RNA, 85 nt, Homo sapiens
aaagcaccagacgccaccacgggcacccgcgccgggcaccgaggaccagccaagacagggaacccacccaccacccagggcacaa

SEQ ID NO: 3223 - RNA, 75 nt, Homo sapiens
ggcgggcaccgaccagcgacacgcagaaaagcccgagggcacccaccagagcagacaaagaaggaaacccgggag

SEQ ID NO: 3224 - RNA, 86 nt, Homo sapiens
cagccggccaaccgcagccaggagaaggagcggcaggcgacgaggaggcggagcggacaaagcccgccgcccgcagccaaccgccg

SEQ ID NO: 3225 - RNA, 86 nt, Homo sapiens
agcgggcacagggcaaggcggcggacggcgcgcgcccgaggcgaggaggagcgcggcggaggacaaccggaaacacacaggaacag

SEQ ID NO: 3226 - RNA, 89 nt, Homo sapiens
caaggagcccggccgggcaggagggccggacaagaccagaggcaaccgcacacaaggaggccccggcaggccacccggccccagagcag

SEQ ID NO: 3227 - RNA, 77 nt, Homo sapiens
aaaccaaccccagagcaggggccaacccgagagaaacgacacaaaagccaggaagacaagagcagaagaaacagacc

SEQ ID NO: 3228 - RNA, 83 nt, Homo sapiens
ccaaccgcaaccagacgccagcgggacgaggaccgagaccgcggccgggaccgaggggaggccccgaaggagcaaggaaacgc

SEQ ID NO: 3229 - RNA, 67 nt, Homo sapiens
gaccgcaggacccaggccagaccggagcagcggggacaggcgagaacgcggacaagcaaacaaagag

SEQ ID NO: 3230 - RNA, 86 nt, Homo sapiens
gggaggccgaggcgggcggacacgagcccggacccaccaaggaccccgccgaaggaaaagcagccccacaaagggggacccaggac

SEQ ID NO: 3231 - RNA, 61 nt, Homo sapiens
caacacgggcccaggacagcagccaccccccaacagagaggggagcaccccggggagacac

SEQ ID NO: 3232 - RNA, 72 nt, Homo sapiens
cagcgcaccgagggacaggcgccgcggaggcggcgcagaggcggcacacaacaccgcagaacccacgcccgc

SEQ ID NO: 3233 - RNA, 47 nt, Homo sapiens
caccccaccagagggagacaagggcagagccaagcgccgcccgggcc

SEQ ID NO: 3234 - RNA, 71 nt, Homo sapiens
caggaagcgcagccaaccccgaaggaaagaccacagcaagaccacgcccccagccgggggaccaggccgaa

SEQ ID NO: 3235 - RNA, 81 nt, Homo sapiens
acgcgaggggcggaggcgggagaggcgagccgcgagagggccggcaggcccgggaagggccaaaaggcacacagacaaccg

SEQ ID NO: 3236 - RNA, 110 nt, Homo sapiens
aagaaaagcccgggagcagaagggaggcccaagacccacaacaaaagggcacacagggaccaagaagccccggggacacgcgagaaaagacgccgaagggaagaccagcg

SEQ ID NO: 3237 - RNA, 71 nt, Homo sapiens
cacaagacaagaacagaaaaacagcagccaagcggagaaggccagacgggcgccagccacgggacaaccaa

SEQ ID NO: 3238 - RNA, 93 nt, Homo sapiens
gccggaccagcccagaaggcagcggcggcccaggccagcacccgcagacccagcagccagcgaagccccaaggaagccgggacgcccacagac

SEQ ID NO: 3239 - RNA, 53 nt, Homo sapiens
agccgagggcgggccgaggcggaaaggggggcagaaaagagcccgccagagaa

SEQ ID NO: 3240 - RNA, 41 nt, Homo sapiens
gaagcacaagcagcacacaaggagaacaaccgcaacgaaca

SEQ ID NO: 3241 - RNA, 58 nt, Homo sapiens
acacccacgggacggaacaccccgagaggcgccgcagaggggggcgggccgagcaccc

SEQ ID NO: 3242 - RNA, 85 nt, Homo sapiens
gccgcggcggcgcgcgcgcaggggacaggggcggcgaccggcggcgccgaggagacagcaagaaagcaccagccaagcagaaggg

SEQ ID NO: 3243 - RNA, 87 nt, Homo sapiens
agaaggagaacaccccgagcgaggccaacccaggaggaggagacacggcacagcgaggagaacgcacccaaccagagaaaggagaaa

SEQ ID NO: 3244 - RNA, 82 nt, Homo sapiens
ccaacacgcgggcagcgaacaagcgggagcaaggagggcgaagagcgaggagaacagaaccaaagacacccaaggaggcacc

SEQ ID NO: 3245 - RNA, 54 nt, Homo sapiens
gagggagcaaggacaccaccagggagccaggagaggcaagcaccgacgaagcag

SEQ ID NO: 3246 - RNA, 77 nt, Homo sapiens
ccaccggcaaaggagaccagccaagaggaccgggcacccggagcggcacagaaccccaccccaggagccgaccccga

SEQ ID NO: 3247 - RNA, 62 nt, Homo sapiens
gacgacccaacagcaagaggcagagcaacagggacacaagcaagaagaaagggaccgacagc

SEQ ID NO: 3248 - RNA, 120 nt, Homo sapiens
cccagcgccaccaccacgccagccgcaccagccgcccaagccgcacagccgcggcggcagcagcaggagagaccgggaaaaccggaggccagcccacccagagaggccgaaaaccggcga

SEQ ID NO: 3249 - RNA, 54 nt, Homo sapiens
cggaaagcagaagcgcgcagcaacggcggcccccggccacgcagggcggcacaa

SEQ ID NO: 3250 - RNA, 76 nt, Homo sapiens
ccagacaacccggacggccggccaaaggagagcacaacaggaaccagagaaacaaggagccaggcgcagagaaggg

SEQ ID NO: 3251 - RNA, 73 nt, Homo sapiens
aaaaggaagcacaccagagagcgcgacagagggagagcacccgccacaggccacaaaggaggcaggcccggga

SEQ ID NO: 3252 - RNA, 73 nt, Homo sapiens
gccggaggggcgcgggacacacccccaggaggcccggcagagcagggcgagggcagacaccccaggagcgggg

SEQ ID NO: 3253 - RNA, 73 nt, Homo sapiens
gacaagagagccacccaaagccacaccgacccaggcgagggccgggcacccacccgcgcggaccaacacaacc

SEQ ID NO: 3254 - RNA, 75 nt, Homo sapiens
aggagcggcggccaggccagacccgaaggccaggagacccgaccccaaggccccagcaggaggacccgccggacc

SEQ ID NO: 3255 - RNA, 79 nt, Homo sapiens
ggacggagaacgcagaacagggcaaggcgaacgagcaaaaggaagccacagaagcaacggcgagagaggccggaaaagc

SEQ ID NO: 3256 - RNA, 82 nt, Homo sapiens
gacaagaagggaagcaggcggccaaggagaaggcgagagaaccccaagcgaaggaagaagcaaggaaaggagaccggacgga

SEQ ID NO: 3257 - RNA, 53 nt, Homo sapiens
accacgccgccacgacccccagcggcggagaaaccaccacaaacacgaggcca

SEQ ID NO: 3258 - RNA, 65 nt, Homo sapiens
caacgcccagcgggccggcgcccggggccccggagagggaggggcggccacggcaaagccaggca

SEQ ID NO: 3259 - RNA, 73 nt, Homo sapiens
acaggaagaaaaggacagaccagacagaggagaaacaccaagcacgggggcacaccccggaagcgggccaagg

SEQ ID NO: 3260 - RNA, 91 nt, Homo sapiens
cgggcccgcgcccggccggacccgggcccgaggggggacgcgagcgaagggcgcagggacccccagggagccccagcacgccggacgagga

SEQ ID NO: 3261 - RNA, 70 nt, Homo sapiens
aggaaagaccgaccaggacacgagcgggaacgcaaacgaaggaacggggagggaggcggcaccacacgga

SEQ ID NO: 3262 - RNA, 77 nt, Homo sapiens
gcgcccgcgaccccaggccgggccggcgaccccgcgggcccacagagaagacaggaggagggaagaaggccaccaaa

SEQ ID NO: 3263 - RNA, 74 nt, Homo sapiens
ccacaaaagacacgccacaaccggaccagaaccgcagcaccacgaaccgcaaacccggccgcaaagccaaagcc

SEQ ID NO: 3264 - RNA, 78 nt, Homo sapiens
caacgcaaccacagaaacaagggacaggaaggcggccccgcagcagaggcgagccgccaggggaagggggcaacgcag

SEQ ID NO: 3265 - RNA, 68 nt, Homo sapiens
cgcgggaagggcggggagcggagccaggccccggagagaagaccaagaggcggagaagaggagaaaag

SEQ ID NO: 3266 - RNA, 68 nt, Homo sapiens
aaagacccaccaaggaagcagcggccacgccagcaaaccagccggcgggcgccacaacggacgacgaa

SEQ ID NO: 3267 - RNA, 55 nt, Homo sapiens
gcagcacaccagggggcaggcccgggagagaacagcgacgacgagagcgccaccg

SEQ ID NO: 3268 - RNA, 72 nt, Homo sapiens
cgcacccggggacaagcgcgggaacggcgcggaagaccggaacagaacagcagacgcccccccgacagggac

SEQ ID NO: 3269 - RNA, 84 nt, Homo sapiens
aaggggcccgaagcccccgcaggaaccacaacccaaccaggaggagagggcaggagagaaggaacccccaggcagaccaaacag

SEQ ID NO: 3270 - RNA, 75 nt, Homo sapiens
agcgccccgaaccccgcccagcccgcccggaggaggacaagcagcaaaggcacaccaaggacacaagaaaaagcc

SEQ ID NO: 3271 - RNA, 76 nt, Homo sapiens
gggcaagaagcccccgggcccagaaccaggcccgaaaagcaccccccaaagccggagcggaaggaagagcacaggg

SEQ ID NO: 3272 - RNA, 76 nt, Homo sapiens
gacggcagcacacaacaaaacacaggagggggaaccggagaaacacagcgcacaacgaagagagggaaacaaggga

SEQ ID NO: 3273 - RNA, 74 nt, Homo sapiens
acaccaagacaccaggggagaccccaaaagaagcaagggaaagaccaggagccagaaaccaaccaaagagggag

SEQ ID NO: 3274 - RNA, 79 nt, Homo sapiens
ggaaagcaaaggagcagggaggcccccagaaccccaggggcccgcgacgggcaggcagcagacccgggcaacaacgcag

SEQ ID NO: 3275 - RNA, 75 nt, Homo sapiens
caaaggagagcacaaccacgcagggaagcccaggggcaggcagcgcaccgcaaaggccccagggagccccgcgcc

SEQ ID NO: 3276 - RNA, 39 nt, Homo sapiens
aacccggcccggacaagagagagaagagacagggagacc

SEQ ID NO: 3277 - RNA, 62 nt, Homo sapiens
caaaaggcgccgaagcaggacccgaagccaaaccaggaggggccgcgagggcccggaacagg

SEQ ID NO: 3278 - RNA, 81 nt, Homo sapiens
cagaaacaaagacgaaggccaaagagcagaagacaaaaacaccaaaccaacaccggcacaaaagaaccaagcccaaaaagc

SEQ ID NO: 3279 - RNA, 76 nt, Homo sapiens
aacacagaccccgcgcagggacagccacccagcaacaacaagggagcgggacagagacaaccccacagagcaggcc

SEQ ID NO: 3280 - RNA, 72 nt, Homo sapiens
ccgggagcacagccgccgagaccaagcccaggaagagaagaaagaaccaacaaaggccggacccaaccaacg

SEQ ID NO: 3281 - RNA, 75 nt, Homo sapiens
cagacccccaccaagcagggcgagggggaaaaaccgaagcgagcggggaccgaggaagccagcgcgaggcgcagg

SEQ ID NO: 3282 - RNA, 72 nt, Homo sapiens
accaaaccagaccccccccgcgaagggaaacacagaagcaaggaggccgcccagccccacacgggagcacac

SEQ ID NO: 3283 - RNA, 66 nt, Homo sapiens
aagccacgaacgaaggaggccagaaaggcaaaccaagcggaagacgagcgacaggcgacgaggaag

SEQ ID NO: 3284 - RNA, 73 nt, Homo sapiens
ggaagacgagccgcacagacgaccaagggagcgcaccggccgggggcgaggaagagacaggcgggggagaaga

SEQ ID NO: 3285 - RNA, 72 nt, Homo sapiens
cggggcccaggaacccggcccgcaagcaacagagcccaaaaggcagagcgaggagagaagaaggagggaaag

SEQ ID NO: 3286 - RNA, 83 nt, Homo sapiens
ccgcaccgccaacccccgagcaagacgggcccgacgccgccgcaggaagagggaagcggaggcggagcgcgcggggcaggagc

SEQ ID NO: 3287 - RNA, 80 nt, Homo sapiens
aagaaacggaagccaccaccagcccggccgggccgaggccacgggcaagcccgggagggaaagccagaccgccaaccgga

SEQ ID NO: 3288 - RNA, 69 nt, Homo sapiens
cagcgggaggccagaggaaggcgggcaaggagaggggcaaaggaaagcccgccccacaagagaagaccc

SEQ ID NO: 3289 - RNA, 76 nt, Homo sapiens
agggaaacgcggccgcgccgcgccgcgcggggcggcgccgggccgcgccgaggcaaaagcgaggagacaggcgagg

SEQ ID NO: 3290 - RNA, 53 nt, Homo sapiens
cgcggaaaaccgacacaacagccacaaacaacccccaccacgccaagagaagg

SEQ ID NO: 3291 - RNA, 81 nt, Homo sapiens
cggacaaccccagcggcccaagaaacaaaaaaaggaaacacacaaacgcagacgaaggaagaccaaggaagaacaggcaag

SEQ ID NO: 3292 - RNA, 83 nt, Homo sapiens
ccggagcaaccccccaggacgggcggaggcggggggaccggcgggcggaaccgaaaaaagcggcagcgcaacccagaagaggg

SEQ ID NO: 3293 - RNA, 70 nt, Homo sapiens
agaagaccagagaccaccacaaaaagaacagagacaaaggacccagaaggaaagaaacccacacagagag

SEQ ID NO: 3294 - RNA, 72 nt, Homo sapiens
aagcgcagacgaaaccgccaggcgccgccagaaggaaaaggggcagcgaaagaagacaagagagggaagcgg

SEQ ID NO: 3295 - RNA, 59 nt, Homo sapiens
cacggcacaccgaccgacgggcggagaacggaaaagcaccaggaagcagagaggaccgc

SEQ ID NO: 3296 - RNA, 100 nt, Homo sapiens
agggcggcagcggcggcgggcgggggggaaggacgggcgggccggcgccggagacgagccgaggcgggggcgagaccgcaaccagggcgaggaacaaaga

SEQ ID NO: 3297 - RNA, 80 nt, Homo sapiens
aaagccgagaacggcacgaggcgggaggagaggaagggacggaagccccaagacacggcccccacagaccccacaaacca

SEQ ID NO: 3298 - RNA, 67 nt, Homo sapiens
ccaaaaaaaaacgaacagacgagcgaagagacccagaacaggcggcagaagcaaagagacagcggga

SEQ ID NO: 3299 - RNA, 75 nt, Homo sapiens
gagaggagcagagacaacaacacaaaggcaccgggcagcgcaccagccagggagcagaagcgagaaccgaacaac

SEQ ID NO: 3300 - RNA, 78 nt, Homo sapiens
acgcgccacgaaggccaggccagggaggagcaggcccagaaagaacagacaaagaccgaaaaacacgaggaaagcaga

SEQ ID NO: 3301 - RNA, 77 nt, Homo sapiens
agaccaccccacagcaaccaaacaaagagaagggcgcccaaggagacaccagccgccagcccgaccggaccccgggg

SEQ ID NO: 3302 - RNA, 82 nt, Homo sapiens
ggcgcccgggcgcccgcaggcggcaggaaccccccggcgaaggagcagagccccgcagccacccgggagccagcagaaccag

SEQ ID NO: 3303 - RNA, 76 nt, Homo sapiens
ggaaaaggggcagcgaaagaagcagaacggagagcagggccgagggagagacggacacacaacacaagggaagcca

SEQ ID NO: 3304 - RNA, 83 nt, Homo sapiens
caggcccacggagaagaggaggagcaacagaaacagaaagaccccaggagaagacaggggaaggcggaggcaaggcgccaccg

SEQ ID NO: 3305 - RNA, 69 nt, Homo sapiens
gagagggacgaacagcaaaaggaaagaacccagagaaaaaagacccacacgacaaaagggagcgaacga

SEQ ID NO: 3306 - RNA, 75 nt, Homo sapiens
gaaaagcgggcggaggcgaagcaaacagagaggacgagggcagcgcaagaccccgcacggaagcagcaagcacag

SEQ ID NO: 3307 - RNA, 68 nt, Homo sapiens
ccaacaagagagggaggccccggggcaaggccaaagggcaccgggacgagcaaaccaggaaaacagac

SEQ ID NO: 3308 - RNA, 66 nt, Homo sapiens
caagaaaccacaacggccacagcggccggcgcgaacggcggaggcaaaaaaggagaaagaacacca

SEQ ID NO: 3309 - RNA, 54 nt, Homo sapiens
gagcaaccacagaacgcggacaagaaaccgcacccaagcggaagcagcgcagca

SEQ ID NO: 3310 - RNA, 53 nt, Homo sapiens
ccgacaaggggacaaggaggagaagaacggaaggaggcaaaccgacaccagcg

SEQ ID NO: 3311 - RNA, 80 nt, Homo sapiens
cgaaggacgggagagccacggagaagaagcgcggcccacacacccagccgggacgcaggaggaccagagaaggcagaagc

SEQ ID NO: 3312 - RNA, 74 nt, Homo sapiens
gcggacaaagcagacaggccaggcacacagaaaaggacccaacaaaccacacaaggcccgacaccgaaaaggga

SEQ ID NO: 3313 - RNA, 77 nt, Homo sapiens
gacccgggagcggagaacaaaaacagggagacaaagccgccacccacgcgcagcgaagcaggcgaacgaggccccga

SEQ ID NO: 3314 - RNA, 69 nt, Homo sapiens
acccagcccacaccaccaggaggcgcggccaccagagcggaaaaaaaagagcggaccacaccagaaaaa

SEQ ID NO: 3315 - RNA, 78 nt, Homo sapiens
gcaccccaacaagaggaaagacacaccaccaagaagccagcaagcggccagaccggagagaacagaaaaaaagcggcc

SEQ ID NO: 3316 - RNA, 92 nt, Homo sapiens
gcgccggcgcgggcccgggccccgagcgcccgaacagaaaaaggcacaaacccagcacagagaagacggcgacaagcaaaagacgacgcaga

SEQ ID NO: 3317 - RNA, 85 nt, Homo sapiens
aaaagagaagcccaaaacaccaggaaggaacagacagaggacaggaggaaaaccaggggagacaaccagggcgagggcgaaccac

SEQ ID NO: 3318 - RNA, 51 nt, Homo sapiens
cggcagacaggccacgccgaccgcagccaggggggcaggccccccaggagg

SEQ ID NO: 3319 - RNA, 62 nt, Homo sapiens
cccaacagggccaccacggaacaagcacaaggcacagggcgggcagccccaggcccagagac

SEQ ID NO: 3320 - RNA, 64 nt, Homo sapiens
gccgacaggcaggcagaagaacaggacaagccgccgccgggggcaccccgcggcaggccggcgc

SEQ ID NO: 3321 - RNA, 82 nt, Homo sapiens
ccccgccccaccggcccccggcgccgccagcccggagggaccggaccagccccgaacccgccaccaccccacggaaggccgg

SEQ ID NO: 3322 - RNA, 68 nt, Homo sapiens
ggaagaggacgaacccagagcgcacaagaccaaaggggcagaagcgggagccggcaccgagggaggag

SEQ ID NO: 3323 - RNA, 57 nt, Homo sapiens
ggcaccaaaaagaaccgcagacagagcggagccgcggagcccgggccagaccacagg

SEQ ID NO: 3324 - RNA, 84 nt, Homo sapiens
acgccacaggcacaaaaggcacgggacagcgaagcgcaaggcggagcggaggagcgggagaaggcgaccacgagcgagaggcgc

SEQ ID NO: 3325 - RNA, 78 nt, Homo sapiens
ggaggaaccggcccgcgcccgcccccgggagcccgcacggccgccagggagaaaagacgaggaagcccaaaaaccgca

SEQ ID NO: 3326 - RNA, 53 nt, Homo sapiens
cacgcaagcgacagggaggcaacaaagaagggcaggaagagagaaggccacgc

SEQ ID NO: 3327 - RNA, 63 nt, Homo sapiens
cccaaaggcccggacccaaaacaggaagaaaaccagagacccagacacgcgaaggaacgaaag

SEQ ID NO: 3328 - RNA, 78 nt, Homo sapiens
cgcgccgccggccgacggccggcgggcgggggccccgcgccgcggccgagcagcggacagaagaggagcacggcggcg

SEQ ID NO: 3329 - RNA, 71 nt, Homo sapiens
ggaggcggagccagaaggccggcgaccaagcgccacccgggcaaaggaaacaggagaaaggcaggaagcgc

SEQ ID NO: 3330 - RNA, 99 nt, Homo sapiens
ccaacaaaccgggcaaaccaaaccgcgaagacgaacaaacccacagccagagccagaggcagcaagaaacggagcggaaacggaaaaggggaagccgag

SEQ ID NO: 3331 - RNA, 61 nt, Homo sapiens
gaggcaccacaaggcccgaaggagcggaggacacagccaagggggggccgaagaagccagg

SEQ ID NO: 3332 - RNA, 72 nt, Homo sapiens
aggcgcggcgcggcgcggcgagacaagggaagcagggacaccccccccagcgggcagaccggcaaggaggag

SEQ ID NO: 3333 - RNA, 39 nt, Homo sapiens
gcccacgcagcgccggacaagcagccaagcgacgaggcc

SEQ ID NO: 3334 - RNA, 78 nt, Homo sapiens
gggagagggaacgcagcgaaagcggaacgggaggcgagacgcgaaggaagaagaccccggacagccccagcccagaaa

SEQ ID NO: 3335 - RNA, 105 nt, Homo sapiens
gaccagggcaacaccaaaaacaaaacgaaccaggacggcaaaggaacggagaggacacgaggaggacacgccaggaggaaagcccccacccacggaggaggagca

SEQ ID NO: 3336 - RNA, 69 nt, Homo sapiens
gaacgggaaaaaggaagaagacccgaaggaacaaacagaaaaggagagagagagcacgaaagaaagcag

SEQ ID NO: 3337 - RNA, 73 nt, Homo sapiens
accaaaaacccgcaacagcccccgcccaaggaaagcaccgaaaaaacgaagaacgaaacggagaaggaacgag

SEQ ID NO: 3338 - RNA, 70 nt, Homo sapiens
ccaacccgcccaggacaagccgcgcggggacccgacgcccgcacggcgagaacgcggacaagcaaacaaa

SEQ ID NO: 3339 - RNA, 41 nt, Homo sapiens
gaccgggaaaagccaagcaagcaacaggacacggaaaaagg

SEQ ID NO: 3340 - RNA, 76 nt, Homo sapiens
cagggccccccagcacagcgaacccacgagcaaccagccggagcacagagcaacccggcgcgcaccccggggaaga

SEQ ID NO: 3341 - RNA, 75 nt, Homo sapiens
ggaagggaggagacccgaccccagaaggaacccaacgccaccaagcgccagaacacgaaaggaacaaagagcccg

SEQ ID NO: 3342 - RNA, 60 nt, Homo sapiens
agccccaaaagaaaggcagcccgggaacacagagcaccaagacagccgcccgggggaggg

SEQ ID NO: 3343 - RNA, 57 nt, Homo sapiens
gccgccgcccaaacccaccagccccggcccagccacgacagagagccgacgcccacg

SEQ ID NO: 3344 - RNA, 62 nt, Homo sapiens
gggcccgcagggagcgccgccagcaggaccacaccaaggagaagaagacccgggcagagacg

SEQ ID NO: 3345 - RNA, 76 nt, Homo sapiens
gacacccaagagggcgagcaggacgaagcgcccgccaccaagcgagcacacaagaaaagaacagaacagccaggcc

SEQ ID NO: 3346 - RNA, 80 nt, Homo sapiens
ccgcaggccgccccgaccgccgaacaaggcccacacgcagccacgcacagccaaaaaaacgccacccgacgggaggacac

SEQ ID NO: 3347 - RNA, 70 nt, Homo sapiens
ggagccccgcgccgagcccggggcgaggaggccccaagggcgagcgggaccgagggaaaagcaggacagg

SEQ ID NO: 3348 - RNA, 32 nt, Homo sapiens
cacgcgagggcagaagcaaaaaagccaaacca

SEQ ID NO: 3349 - RNA, 76 nt, Homo sapiens
ggaccagggaccagcaagaaagacaaagccagcggaggacaccaagacggccccggagacgggggcaggggagcag

SEQ ID NO: 3350 - RNA, 74 nt, Homo sapiens
cagggagaggagcgggaaacgggagggaaccagcaacaagccgacagggaaaggacccggccaaggcgcaacag

SEQ ID NO: 3351 - RNA, 84 nt, Homo sapiens
gcaagcgcgccgcgccgcagcggcgccgcggacaagcacgagggcgcgccgagacgcccgaggacacccggcacaccacaaagg

SEQ ID NO: 3352 - RNA, 73 nt, Homo sapiens
agcccaggagaaaccggacgcgacggggagcggacaagagaaaaaggccaggagaagagaagaagcagccaca

SEQ ID NO: 3353 - RNA, 37 nt, Homo sapiens
agcgccgcacaaaaagcagagaggagagccgagagcc

SEQ ID NO: 3354 - RNA, 88 nt, Homo sapiens
ccaaagagagaaccggagagcacccaacagcagaagccccagaggagcccgaaacccccaggcgggcaggaaggagagccccagcgag

SEQ ID NO: 3355 - RNA, 73 nt, Homo sapiens
gccccgacaacaagaacagaggcagcgggaagagcaccacaaggaacccgaaaggaaagaggaagaagaacaa

SEQ ID NO: 3356 - RNA, 77 nt, Homo sapiens
acacggaagaacagaaaaccagagaagggaaacgacacgagcaaaaacggggcaccgccagcaccgcagaacacaca

SEQ ID NO: 3357 - RNA, 57 nt, Homo sapiens
ggaaaaaaaaaaacacgggcggacggaacgcgccggaggaagagcggaaaaggcgga

SEQ ID NO: 3358 - RNA, 77 nt, Homo sapiens
ggcccgacccagcaggacagaaagggagcggcccccaccgacaggcagcgagaacccacgagggacggaggagggca

SEQ ID NO: 3359 - RNA, 76 nt, Homo sapiens
ccaaagcccagccccaggcacagaccccagcgagagggaagcggccaaagccagcagaacaacgccaagcccgagc

SEQ ID NO: 3360 - RNA, 77 nt, Homo sapiens
cggggcggcccaccccccacgcaccgcacaacaagaggccggcggggcgacaggagacagcggcaacccaagcaggg

SEQ ID NO: 3361 - RNA, 77 nt, Homo sapiens
aacagcaacagcagcccagaggcaacagcaccccgcggaacagagggccaaggacagcgccgacgcagccaaaggag

SEQ ID NO: 3362 - RNA, 66 nt, Homo sapiens
gcacgcagcagcggaccagcccaaacacgcgccgcagcacacacacacggggcaccgccgaccgaa

SEQ ID NO: 3363 - RNA, 72 nt, Homo sapiens
agccgccgacagaagaaagacggcggaccgcgggggagaacgcaaaacggcaaacaagggagcgaaaccagc

SEQ ID NO: 3364 - RNA, 53 nt, Homo sapiens
ccgggaccacaggagaaacaggaagaacccgagcgaggagccaacacaggcca

SEQ ID NO: 3365 - RNA, 77 nt, Homo sapiens
ccacccaaaaagagcaaacaaccggggcagacaacagaggaggagacacacagccccagacgggaggaaaaaaggaa

SEQ ID NO: 3366 - RNA, 73 nt, Homo sapiens
cgcacggcgacgccccaggggaaaacccccgggaccaggaaccacacggcggaggcaccgacaaaccagcgaa

SEQ ID NO: 3367 - RNA, 87 nt, Homo sapiens
cagcggacgagcggagaaggccacaccacgcagaacgcaacaccaaggcacaccaccccaggagaacaaccgcaacgaacaaacagg

SEQ ID NO: 3368 - RNA, 84 nt, Homo sapiens
gccaagagggacggacggcgagcgggcaccgacacgacgcgccggcaggaccacgaccaggaggagcggaggacagcggagagg

SEQ ID NO: 3369 - RNA, 79 nt, Homo sapiens
caaagaagagagcaggaagaaggaagaaaaggaccgcagagaaccagggcacagcgcagcggagcgaggaaagcaggcg

SEQ ID NO: 3370 - RNA, 73 nt, Homo sapiens
cggacccgaagaccaggagacgggccccaagagcgaccgcagcacgggggcagaccgcaagccagcggagcag

SEQ ID NO: 3371 - RNA, 80 nt, Homo sapiens
gggagggggcccgggccccagccggcgcggggagaaggaggggcaggaaagcagcgggaccaggacaaaaggcaacccag

SEQ ID NO: 3372 - RNA, 71 nt, Homo sapiens
aagcaaaaaacgcaacaccagcacagagggccacacggcagccccagccccagcaggagcgggacacccca

SEQ ID NO: 3373 - RNA, 79 nt, Homo sapiens
gcagaaccaaaagcaacagccagggccagcacccaggagccagcaaagaaccggggaaaaaagagacaccagaggaaag

SEQ ID NO: 3374 - RNA, 77 nt, Homo sapiens
gcaccccggccgaaagacaagcgcccgggccaggcaacgaagaacggaggaagcgaccggggaggccgcaaggaccc

SEQ ID NO: 3375 - RNA, 43 nt, Homo sapiens
gagaaggcggcagaaaccgacaaaggggaagaaagggaagaag

SEQ ID NO: 3376 - RNA, 69 nt, Homo sapiens
ccccccccccccaaggaccagccaaggaagcaacacagcagcgagagaagcagaaaaagcagaagaaaa

SEQ ID NO: 3377 - RNA, 52 nt, Homo sapiens
gcgaaagcacaccaaggagcccaccaggagccaggcagccagcccccagaac

SEQ ID NO: 3378 - RNA, 73 nt, Homo sapiens
gcaacccaaggaaggaacacaggcccccaacagaggcaccgacaggaaaggagagggcaacgaacgacagcca

SEQ ID NO: 3379 - RNA, 51 nt, Homo sapiens
aggagccaagcaaacagaagcgcggccaaggaacgcaagcacaggaccaga

SEQ ID NO: 3380 - RNA, 78 nt, Homo sapiens
accgagagaacagagagaaagaagcgcaggagaagaaaggaagagacgacagccagcaggcaggagcccgcccagaac

SEQ ID NO: 3381 - RNA, 75 nt, Homo sapiens
agcaaggcacccgggacgagcgagaaagggacggccccaagggacgaccacgaaaaaagagggaccaaaacgcac

SEQ ID NO: 3382 - RNA, 76 nt, Homo sapiens
caggagccaggcaaggacacaaagaacccgccgacacccaaacagaggaagaaggccgaggacagaggacagagcc

SEQ ID NO: 3383 - RNA, 78 nt, Homo sapiens
caagaaagaaaccacgggagacacacaggggcacaggacagaagacgaggaaggaagcaagaaaagagacaaaaaacc

SEQ ID NO: 3384 - RNA, 46 nt, Homo sapiens
ggacaacagcacacgcacccaagcggcgaagaaccaggacgcaccc

SEQ ID NO: 3385 - RNA, 73 nt, Homo sapiens
acagacagacagggagacaggccacgcaggcgcaacgcaaagaccagccacgagagacgccaaggccccaaag

SEQ ID NO: 3386 - RNA, 82 nt, Homo sapiens
aagaggacacgaagacacagacggcgaaaaacgggggagcgaagacggggaaaccgggcgcccccggaacccggagcacggc

SEQ ID NO: 3387 - RNA, 71 nt, Homo sapiens
acaccgaaacccacgccgagagaaaaggggacgccacggacaccgggaccgaggcccgggcagcggggaga

SEQ ID NO: 3388 - RNA, 52 nt, Homo sapiens
caccacggaagcacaacccaaaacgcaggaaccaccacacacgacaccgcag

SEQ ID NO: 3389 - RNA, 71 nt, Homo sapiens
cccccacccagggaaaacgaaaaaccacagaccaggacccaagaaaacccagcggggaccggccacaagga

SEQ ID NO: 3390 - RNA, 74 nt, Homo sapiens
gcccgcgcgcgagacagagcaagaaacggaggcgaccaggcccagaaacgagccacagggagccaagagggagg

SEQ ID NO: 3391 - RNA, 85 nt, Homo sapiens
caaagacgccgcggccgcgacccagccagccagcaaccggaccgagcaccaagcaggacacaggagaccgggcggcggccagcac

SEQ ID NO: 3392 - RNA, 56 nt, Homo sapiens
aagaggcgacgcgaaccgccagacggacggaggcaggaaccggagaagaggagagg

SEQ ID NO: 3393 - RNA, 85 nt, Homo sapiens
cccaaccgccgacagaaaaaagaaccagagcaaaacgacagaaagcaagaccagagaggacagaccccaggaccaagacccgcaa

SEQ ID NO: 3394 - RNA, 77 nt, Homo sapiens
gccgaggccggggagagccgagaagcggccgcgggccccccacacacgcccacaccagaccagaaagaggggacgaa

SEQ ID NO: 3395 - RNA, 42 nt, Homo sapiens
aaccccaagaaagccagggaagagaaggccgacaggggggac

SEQ ID NO: 3396 - RNA, 71 nt, Homo sapiens
caccaggcacaggcagaaaagccaggcacgaacagaggcagccaccaaccaggccaccgccaacccaaagc

SEQ ID NO: 3397 - RNA, 81 nt, Homo sapiens
gagcgcccgagacgccaaaaggaagagagcagagggagaagagaagaccagagaaagaacaaccccgcgcacaagacaaag

SEQ ID NO: 3398 - RNA, 61 nt, Homo sapiens
ccaccgcgggcgccaaggggagcagaaggaccggacacagaacggcggccaaagcgccaga

SEQ ID NO: 3399 - RNA, 111 nt, Homo sapiens
gacggcgcaaccgcgcccgccggcccccccccgcgcccgcgaccgccgcggcgaagagcgagacgacgggaccgaaggaccccgccagagacaaccgagcgccaggagaga

SEQ ID NO: 3400 - RNA, 76 nt, Homo sapiens
ccggcgcgcgcggcggcccgcgcacagggggaggcggaacacaggggccagaagagaccaagaggaccccagacca

SEQ ID NO: 3401 - RNA, 71 nt, Homo sapiens
gcggaaggcgacacaggggcgagggaaggacaacggaaacacgcgagacgacgggaccgaaggaccccgcc

SEQ ID NO: 3402 - RNA, 89 nt, Homo sapiens
gaacggcccggaaacaggaggaccaaagccgaggcgcaccaggacgaggcaggagcggacacacagggaaggcgggcagcggcgcggag

SEQ ID NO: 3403 - RNA, 75 nt, Homo sapiens
ggcaaggagggggcgcccacaagcacggaagacgaaagagagaccgaaaggcccaaccgacagccccacccagag

SEQ ID NO: 3404 - RNA, 72 nt, Homo sapiens
cacagagggggaaagccaaggaaaaacggagagccacaaaaaaggaagcgaaaggacgcggcgcggcagcca

SEQ ID NO: 3405 - RNA, 35 nt, Homo sapiens
gaaacacccgaacagcgaagcccaaacgaccgacg

SEQ ID NO: 3406 - RNA, 80 nt, Homo sapiens
gaccgggcggcgaggaaggcgccccggcacaaacaagcacgaaaagggaacgcacaaaaagcggggaaagcagaaagaaa

SEQ ID NO: 3407 - RNA, 81 nt, Homo sapiens
gcagaaggaaccggcaaagcgcaggaacgggaacgcaggagcgaccagggagagaaggcgcgcaggagagcgcagagaccc

SEQ ID NO: 3408 - RNA, 79 nt, Homo sapiens
accgcaaggaaaggcaaaccggcaccccacacgggacacagcaggcagagcaagcaggagaacaagggacaaagaaggc

SEQ ID NO: 3409 - RNA, 82 nt, Homo sapiens
agaagagcaggacagacgggcggggaaacgggaaagggagcagcaccggccacacccacagcacgaccggaacccagcgacc

SEQ ID NO: 3410 - RNA, 122 nt, Homo sapiens
cgcaagcacccaggaaagacacgacaacaggggccggcacaaaagagggggcaaagacccggagggccagccaggcagccacaccgaagacaaggcacgagggggcgaaccacagccgggca

SEQ ID NO: 3411 - RNA, 75 nt, Homo sapiens
acagagcagaacagccccgcggcccggggagaaggggcccgggcagagggaaagcagaggacggaacaacccggg

SEQ ID NO: 3412 - RNA, 45 nt, Homo sapiens
acgcacggagcaaagacggagcaaacccagacaagaagacccacc

SEQ ID NO: 3413 - RNA, 70 nt, Homo sapiens
cgggccagcccccgccgcccgggagggcaagcagggagcggccacccagccacgcgcaccaaccaaagcg

SEQ ID NO: 3414 - RNA, 74 nt, Homo sapiens
cccgcggcggcgacgcgcccaccacacgagaacggacggccacacagagaccgcggccaggagccaagaagacc

SEQ ID NO: 3415 - RNA, 80 nt, Homo sapiens
cgggggcaacggcacagaaccgcagcagggacgcgggcacgggaccggcgaggacgagcggagagaagaaggaaaaccca

SEQ ID NO: 3416 - RNA, 65 nt, Homo sapiens
ggcaccaaggaaagcagaagacaaaaggcgcagcgccaggccaccagaccgcgacaccagcacgc

SEQ ID NO: 3417 - RNA, 70 nt, Homo sapiens
gcacaaggcaagagaccaaccccagccccgaaaggaccagggaagcaggggaggaaggggccggcaagag

SEQ ID NO: 3418 - RNA, 77 nt, Homo sapiens
aaagaagagacagcccgcagagagaaccgacaggaaccagacacgcaaacagacaacaggcacaaagagagaaggaa

SEQ ID NO: 3419 - RNA, 71 nt, Homo sapiens
ccaggcccagcagccgccaccgaggaccagacccgaaccagcccccaacccaacccaggaaccacaaaaac

SEQ ID NO: 3420 - RNA, 122 nt, Homo sapiens
ggccaaccccggggcagggcaagcacgggaagaagcagcggacccgccaccacacggcaccgggcgccacggccggaacgcacagcggaaggccgccacccgggccaggagccgccgccgcc

SEQ ID NO: 3421 - RNA, 67 nt, Homo sapiens
cccacccgaagagacaacaacaaacaaacgaggaagacgcgacagcgaaagagcagcgagagagaaa

SEQ ID NO: 3422 - RNA, 78 nt, Homo sapiens
ggcggagccgccaaggcggcgcagcgggaaccaagaccaggacaaagaagacccggagagacaagccggaggacgcaa

SEQ ID NO: 3423 - RNA, 81 nt, Homo sapiens
agacgaagagcagagcccacagaaccgagaaagagagacgaccccaccaacaacgaacgcggcaggcgcacaaggaaggaa

SEQ ID NO: 3424 - RNA, 82 nt, Homo sapiens
caggaccggacggcccacagaccaagccccacagagggcgagccagggggagaagagccagcccagggacacaaaagcaacc

SEQ ID NO: 3425 - RNA, 77 nt, Homo sapiens
ccaacgccgcgcccgcggagggaaaagccagcagccaagaaacagacccgcgcccgggagccaggagggccgccacc

SEQ ID NO: 3426 - RNA, 40 nt, Homo sapiens
aagaaggggaaggacgcgcgggaaacgacacagcgggcag

SEQ ID NO: 3427 - RNA, 83 nt, Homo sapiens
ccaagcgcacgccgagggggccaccagagccccacccagaaaggcagaggggagagccagagcaccccaacccggagagccgc

SEQ ID NO: 3428 - RNA, 81 nt, Homo sapiens
gggaggaaaaaggcaaacgcaaaggagagaggaccagaaccagaccggaaagcaccaggcaaagaaaaaaacaggagccaa

SEQ ID NO: 3429 - RNA, 80 nt, Homo sapiens
ccccgaaaacggaagcgcagggagaaggaagaggggaaaagaagacgcgaggagcgccagaagaagaagagagcgaacaa

SEQ ID NO: 3430 - RNA, 70 nt, Homo sapiens
aacacgggaaacggagccccaccccccgccaggcaggccccccgggcgcaacccccacccacagcagacc

SEQ ID NO: 3431 - RNA, 82 nt, Homo sapiens
acaagaacagaaccaccgggcacaagacgcggccgcgggcccacagcaggcgagaccccgcgccggcagccccccgggcccg

SEQ ID NO: 3432 - RNA, 70 nt, Homo sapiens
acaagaagaagagcgccacagcggcaaacaggcagacaggaaagacccccgaagcaccaaagcgggaagc

SEQ ID NO: 3433 - RNA, 50 nt, Homo sapiens
acaacggaaagaccaggacacagagccacaaaagaggaaacaaacaggaa

SEQ ID NO: 3434 - RNA, 84 nt, Homo sapiens
aagacacgcgacccggagacagcccaaaacccggaagagcgccccaggagaaacaaaagcggaaccacaaaaccaaacaggcca

SEQ ID NO: 3435 - RNA, 78 nt, Homo sapiens
ggcaaaacggggaaaacagagcgaaacaagggacccaggggacaccgggacaaggcccggggcccacaggggaccgcc

SEQ ID NO: 3436 - RNA, 85 nt, Homo sapiens
acaaaggaggcaccagacgccggcaacaaagaacacacggaagcaaccccaaggccaggggaggccacgaagggggagcccgcag

SEQ ID NO: 3437 - RNA, 79 nt, Homo sapiens
gaagagaacgcccgggaccgagcacccgccccgggcaccaacggaaaggaggacaaaaggaaaaaaaaaaagggaagac

SEQ ID NO: 3438 - RNA, 55 nt, Homo sapiens
acccaaaggccagcaaacgcgaccggaaaggagagagagacagaaccacagacaa

SEQ ID NO: 3439 - RNA, 76 nt, Homo sapiens
ggcccaagggccccccgggaacgcagcgcgcaggaccacggggaaagccaagacacagggaacaccagaggcggga

SEQ ID NO: 3440 - RNA, 104 nt, Homo sapiens
ccgcgccaccccagcgccgccgcgcgcgcaagccgccaaacaggcggaggagcccagagggggggccccagcccggccgaacgggcgcacgacacaaacacaac

SEQ ID NO: 3441 - RNA, 73 nt, Homo sapiens
cgcaaaaggcagaggaacggaaggacgccgcgcaggcggcacagaagagaagagaagacagacgcgcggaccg

SEQ ID NO: 3442 - RNA, 74 nt, Homo sapiens
ccacagaagcaagaaagcaggccaccagaaggggaggagacgggaacagaaaagggaacaaccccaaaaaaccg

SEQ ID NO: 3443 - RNA, 54 nt, Homo sapiens
gaggaacccgcgacccgggcacccagagcagggaggaccagacaaagggagcac

SEQ ID NO: 3444 - RNA, 72 nt, Homo sapiens
gagacaaaagagaaagcaggccacgaaaacacaaggacgacgcagcacagagaggaaacgaggaaacgacca

SEQ ID NO: 3445 - RNA, 60 nt, Homo sapiens
ccacaaagggaagcaagagaaaaagaacaacgcggagggagccacaccaaagccggaccc

SEQ ID NO: 3446 - RNA, 76 nt, Homo sapiens
ccgagccccgcgcccggcgggcgggccaagcaggacacgggcgcgggcccgcccggccaaaaggcacacagacaac

SEQ ID NO: 3447 - RNA, 80 nt, Homo sapiens
gacgccaaggagagaaggaaagcaacgaggaagaacacagacagaggggcaccccccaccccgggacaccccagggcacc

SEQ ID NO: 3448 - RNA, 69 nt, Homo sapiens
gacgacccccaggaccccgcagagaggaagcacccccgcacccagaggaaacagggccagacgagagaa

SEQ ID NO: 3449 - RNA, 67 nt, Homo sapiens
gcggaagaggcacgaccagaaaaccggagggaagaggggcggcagggggaccagccagcaacccgcc

SEQ ID NO: 3450 - RNA, 64 nt, Homo sapiens
gaccagggcggaacgcacccagggaaagggagcagcaccggccacacccacagcacgaccggaa

SEQ ID NO: 3451 - RNA, 54 nt, Homo sapiens
aagacaagcgaaaaagggcagaccaaggggagaagcagaccgcaccaggcggga

SEQ ID NO: 3452 - RNA, 77 nt, Homo sapiens
cccgcgcgacggggaaccgcgaccgagacggcaggcggcggaagcgggcagcggagcagaaaaggaaacgaggcgca

SEQ ID NO: 3453 - RNA, 56 nt, Homo sapiens
cgcacgcggaggcggcgcccgcgaaaggagaagcagggcccaacaagagagggaag

SEQ ID NO: 3454 - RNA, 73 nt, Homo sapiens
ggagaaaccggggcaacacgggagcgaacggcgacgaggcacaaagccaagaagccggcccaccaagagggca

SEQ ID NO: 3455 - RNA, 70 nt, Homo sapiens
accgaaagccaccaaagcaaaaagcgaagagcacaaggagaagaacaagaaacccacgagaagagaaggg

SEQ ID NO: 3456 - RNA, 79 nt, Homo sapiens
ccggaggcagagcggcgccaggagcacccacgggaacagcccagaaacgagggaaaaacgaagccgaccggaacagggc

SEQ ID NO: 3457 - RNA, 78 nt, Homo sapiens
ggccccagccaccacccgcacggcgcaggccggaacacgggcggccacgaggaggcaccagaaacgccacacgggcgg

SEQ ID NO: 3458 - RNA, 100 nt, Homo sapiens
agaggaccgcacgccgccagccagcaggaaccaaagcggacagagagggcaccggaagaagccggcaaggagggagacggcgagcagaggcgccccacca

SEQ ID NO: 3459 - RNA, 32 nt, Homo sapiens
gcaggggaccgcgaagcgcccaggggcacggg

SEQ ID NO: 3460 - RNA, 69 nt, Homo sapiens
cggcggaccgggagacaccccgcacacacacccaagaaagccagaccaacgagcgagcacgcgccaagg

SEQ ID NO: 3461 - RNA, 71 nt, Homo sapiens
acaagaaaaccggcccgaggggacgggggaacccggggccagagccgcccggggagaggaaccaaccacca

SEQ ID NO: 3462 - RNA, 60 nt, Homo sapiens
ccgaggcgcggcgcgccgaggcgcccaccagcgccgaaaagcgaaaagaaacaagccgcg

SEQ ID NO: 3463 - RNA, 71 nt, Homo sapiens
gagacagagggccaaggcaacacccgacggggcgaccacgaccgaagagccagagacaagccccacgagac

SEQ ID NO: 3464 - RNA, 72 nt, Homo sapiens
cccccggcacgacaccgccccaacccacgagaggacagcccaggaaacaaacaaggaccaagcgggcaggga

SEQ ID NO: 3465 - RNA, 70 nt, Homo sapiens
cgagcagacacaacacaggggaagaccgggaggcaacgaggcaccaggaaccaccacccaccgaaggggg

SEQ ID NO: 3466 - RNA, 62 nt, Homo sapiens
ggcgggaggcccgcggagccgaggcgggaggacaaagagggaaaaaccaggcgacacaaagc

SEQ ID NO: 3467 - RNA, 54 nt, Homo sapiens
agacgacaagaacagaccagaggggacgcgaggcaccgaccaccacaggaccca

SEQ ID NO: 3468 - RNA, 83 nt, Homo sapiens
gagaccaaggagaccaagaccagaagggaaaagggaaaacacccaaaggggaaccgcccaaaagcccgccagaagaaggacgg

SEQ ID NO: 3469 - RNA, 79 nt, Homo sapiens
ggaacaggcagcaggaagcacggcgggcgaaacaggggaaagacgcccagcccgccgccaagagagggggggccggccg

SEQ ID NO: 3470 - RNA, 70 nt, Homo sapiens
agacgcagaaaaccaggaaggggaccaggcacagacaccacgaacagggaggaaagccaggaggagagca

SEQ ID NO: 3471 - RNA, 71 nt, Homo sapiens
aaggaagcgacagccaggaccaggcacccgggaagagaccaagaagcgcaggaaagcgagacaccacaaaa

SEQ ID NO: 3472 - RNA, 82 nt, Homo sapiens
cacaacaaagaagaccacacacgggaaacacaaaacgagcagggcgccaagcaggaccgaccaacagaggggggagaaggga

SEQ ID NO: 3473 - RNA, 76 nt, Homo sapiens
gaaagcagaaaaaagacacaagcaaccggagggagcaaaagacgaagaagcgcaagcgagaaagcaccaaagaaac

SEQ ID NO: 3474 - RNA, 72 nt, Homo sapiens
gaggcgggaagccccagcgccgggccaaggccaaggccagccggacaaaacaaagaacaaaacggaacaggg

SEQ ID NO: 3475 - RNA, 105 nt, Homo sapiens
gcgcgcgaggccgggccggccgcccagacgcgcccgcgggcccggccacggcggagccaagaaaaggagaacaaccccgccacgcccaagcacccggaagcccgc

SEQ ID NO: 3476 - RNA, 75 nt, Homo sapiens
gcacccgaaccaccccacagcagaggcgagggcgccggcaccagggcgcaaccggaaagggaaggccacaagacc

SEQ ID NO: 3477 - RNA, 78 nt, Homo sapiens
caccggaacaagagcggaggcagccgcgcccaggaggcgcccccccccgcccagccgcgagccagacccaggcccgcc

SEQ ID NO: 3478 - RNA, 72 nt, Homo sapiens
gccggaaacggacaaacaggccaaaacagaagaggcaaagcccagccacagcagcagcccagcagcaaacaa

SEQ ID NO: 3479 - RNA, 84 nt, Homo sapiens
aggacgaggaaaccgagcgcggaccccgagccagcgggcggcgggagggcgcgggaagggacgccagggcaccggacacaggcg

SEQ ID NO: 3480 - RNA, 71 nt, Homo sapiens
ggggccggacacgccgccgacaaggacgagcagaaggacaaggagaggaggagacccggcacagagccccc

SEQ ID NO: 3481 - RNA, 43 nt, Homo sapiens
gccccacgagggagccaggaaacccgcagaccgcagaaccggc

SEQ ID NO: 3482 - RNA, 85 nt, Homo sapiens
ggcgcggagagcaacgccgggacagcgcaagagggcgaagacaggacggcccaggcagacacggaggaggaggaagaggaggagg

SEQ ID NO: 3483 - RNA, 80 nt, Homo sapiens
gcaaggacggccacggcagaagaaaggaccaggcgggcccgagacaagcggccgcacaccaaggcagcaagcacaccgag

SEQ ID NO: 3484 - RNA, 84 nt, Homo sapiens
cccccgaaagcgggaacaggcgccaagccccagagacccgagaaaaagcccaaccaggaacaagcaggcagaccgcccagccca

SEQ ID NO: 3485 - RNA, 77 nt, Homo sapiens
agcggggggggaagcggaggcacgggcggcccgcaggaccggaccgggggaggaggagcacggcgaaccgcaaacag

SEQ ID NO: 3486 - RNA, 67 nt, Homo sapiens
accccaaccgcgccgggcaaacgaaggaagagcagcaaaggaagagagggggaaaaagaaaagggcg

SEQ ID NO: 3487 - RNA, 122 nt, Homo sapiens
ccgccgagccggcacaaccgcacgcccgcgccggagcgcgggcgagggccaccgccacccccaggcccggggccccagccggcccgggcacccggcagaggagagggccggcccggcccggc

SEQ ID NO: 3488 - RNA, 89 nt, Homo sapiens
ccaaggcggcccggcgggcgacggacggccggacagggcaaggagcgagcccccacaggggcccagggagagcaggacaaaggaaacag

SEQ ID NO: 3489 - RNA, 81 nt, Homo sapiens
cggcgcaagaggaccgagccgagcaggcaggccacaccggcaagccaacaccccagcagcaaaagccccagagcagcaaga

SEQ ID NO: 3490 - RNA, 66 nt, Homo sapiens
gcccccagccgccgcccacgcagcagggacagcagcagggccccccgaaccggcccagggggagcg

SEQ ID NO: 3491 - RNA, 110 nt, Homo sapiens
ccgaaccaggacccagaccggacaacccccagcaagagcgcacaggaaaacacgcaacagccagacgccgcacgccagcccagcccaccacccccccccgccagcagggc

SEQ ID NO: 3492 - RNA, 33 nt, Homo sapiens
ccacggagagaagcagggacagccggaaacagc

SEQ ID NO: 3493 - RNA, 63 nt, Homo sapiens
ggagcggaggagcaggccgagaccgacccgcccgcccgcggccccgcagcagcccaagaagga

SEQ ID NO: 3494 - RNA, 79 nt, Homo sapiens
ccacggccagggccaccaaccccaacccggagagcggcgagacccgacagggacagcggcaccacccaaaagaaaaggc

SEQ ID NO: 3495 - RNA, 79 nt, Homo sapiens
ccggcaggagggcaagagccgaaggaccggagccaaagagagaaggaagagaaaccggccaacccgcaggagccgggag

SEQ ID NO: 3496 - RNA, 77 nt, Homo sapiens
aaaggaagcgcgggccagcgacccgcgccagcgcccagggggggaaaccaccgagcggacggccaaggaggaggagc

SEQ ID NO: 3497 - RNA, 55 nt, Homo sapiens
caacccaacggacacggaacaccaggcagcacagcaccagaagcagcacgagccc

SEQ ID NO: 3498 - RNA, 73 nt, Homo sapiens
aagaaaggagaacaccgacggcgagggccgcgggagacaagaaaggaacccagaggagcagcccaaggaccag

SEQ ID NO: 3499 - RNA, 77 nt, Homo sapiens
gaagagacgccgggcaccccaacacaaagaccacacagggaaacgaccagggagagaccaacaggaaccacagcggc

SEQ ID NO: 3500 - RNA, 65 nt, Homo sapiens
aagcccccgcagagagaacaaaaaaaagaacggaaaaaaaccaggggagcggcgcgacacacccg

SEQ ID NO: 3501 - RNA, 129 nt, Homo sapiens
ccaacaaggagaagaaagacccacacggggcgcagacgcgcacccagccgggcggccgacggagcaaggcgagcagaaaaccaggaaaggaggacccaccccgcagccacgccgcccggcgcacgaaca

SEQ ID NO: 3502 - RNA, 78 nt, Homo sapiens
gcaggcacgggcaagaaccgcacacgcaccaccccgcgccgcgccaacaaccagagaccaccgcacggaaaccagacc

SEQ ID NO: 3503 - RNA, 61 nt, Homo sapiens
ggccggcccccgacagccaggcccgcgagaaggcaacagggcagcggccaaccgggcgggc

SEQ ID NO: 3504 - RNA, 79 nt, Homo sapiens
aaagaaccggaagacagaggcggagaacggccgagcgaccaggagaggagcccccgcccgaagaccggggagggccccc

SEQ ID NO: 3505 - RNA, 70 nt, Homo sapiens
aaaccggaaaacacggcaggaccgacaacacagaaacagcacaaacggcagaacgaagcccccggcacca

SEQ ID NO: 3506 - RNA, 71 nt, Homo sapiens
aaggggcggcgggggagcgggcggaaggggcggagacgcccgcggcggacggagcaccacccccacaccca

SEQ ID NO: 3507 - RNA, 70 nt, Homo sapiens
aagacaggcagagggaaaaaagagaggagcgaacgagacagaacaggaaaaagggcagaccgaccaaaca

SEQ ID NO: 3508 - RNA, 77 nt, Homo sapiens
cccaggggcagccaccgccaggaccccagaaaggcacagagcagaggacaccacaggaaggaggcgcagagagaagg

SEQ ID NO: 3509 - RNA, 76 nt, Homo sapiens
gaggcaggcacgggagccgaaggacgcggaagcaggggcagggaccaaagggacagacagcgacaaagagcaaaca

SEQ ID NO: 3510 - RNA, 74 nt, Homo sapiens
cgcccagccagcccagcaaggagcccgggagaaagacaggcaacggaaaaccaaaggcagggacaaacaaacgg

SEQ ID NO: 3511 - RNA, 83 nt, Homo sapiens
cgcaaggaaagccaaccagacaacagaccgccacacaaaaagaaccacaaacacacagagaaacaaccgcaccacccggggca

SEQ ID NO: 3512 - RNA, 76 nt, Homo sapiens
ggcgcccggagggcagcgaggacccagagagggaccagggccaaagaagagccggggggcaggcggacagcaagcg

SEQ ID NO: 3513 - RNA, 77 nt, Homo sapiens
aggaagaacaagacacaaagaaccgaggacaaaaagaccaagggaacggaagccccagcccgcgcgagccaggcgcc

SEQ ID NO: 3514 - RNA, 63 nt, Homo sapiens
gaccccgggcagcccaacgagaaccggagggcaccggaggaaacaaacagaagcgcacgagaa

SEQ ID NO: 3515 - RNA, 60 nt, Homo sapiens
gccgcgacaccaccggagccgggggaccggagcaagaggaaggggaggagggccaagagc

SEQ ID NO: 3516 - RNA, 70 nt, Homo sapiens
caaccgcgcaaacaagcagaagggagcaccaagcggaaaacgagacgaaggacaagggaccaaaaggcgg

SEQ ID NO: 3517 - RNA, 75 nt, Homo sapiens
cccccagcgggaacaggcaccacaagcggagaaaggcacagcagaagaagaaacagaagaagaagagcagaggag

SEQ ID NO: 3518 - RNA, 117 nt, Homo sapiens
gccccagcaacaaaagcacccggagaggaggaaaaaaaggaccaccccaacaggaaacaagcaacaagacccaggagagcacaaagaccaacaaagaacgaaccaaaaagcaacaga

SEQ ID NO: 3519 - RNA, 74 nt, Homo sapiens
ggaaaaacacaaacgaccaacagggaagagacccagacgaagagcgcacagaaagagggaaaacaaagaaccaa

SEQ ID NO: 3520 - RNA, 69 nt, Homo sapiens
acggaggaggaggagaagaagagaggccaggggcaagcaccacccgagcaagagagcccagaggaagaa

SEQ ID NO: 3521 - RNA, 40 nt, Homo sapiens
cggggcagacaacggagcccgggagagagcaggcagcccc

SEQ ID NO: 3522 - RNA, 70 nt, Homo sapiens
aacaccggcccaagggaacgaagaaccgacagacacaggcggcaccagcaggcgggcgccacggaaagga

SEQ ID NO: 3523 - RNA, 75 nt, Homo sapiens
caaaacaaacacaccgacaacagcgccaaaaaaaaaaggaaaacagaagggcgcaggggaaaaccggacagacaa

SEQ ID NO: 3524 - RNA, 75 nt, Homo sapiens
agccagacgaaaagccggacccaggagaagaggggagagggaccacacagaaacggcgacacggcgaccgccggg

SEQ ID NO: 3525 - RNA, 78 nt, Homo sapiens
cagagcaccccgggcagcagcagggcacgacaaaaggcgacacagaaggaacagcagacaagacgagcccaccacgga

SEQ ID NO: 3526 - RNA, 85 nt, Homo sapiens
cccccggcagggagaaggaggaggggccaaggaccacccgacgcgggcggaaagacacccccaacccacagccccacagccacac

SEQ ID NO: 3527 - RNA, 79 nt, Homo sapiens
gaaagcgacaagggaggcgccgccagcggccgggaccgaacaggcgagagagaagaaacagcaaaacacaaaggcaaga

SEQ ID NO: 3528 - RNA, 74 nt, Homo sapiens
ggcaaaccaggggacaagggcagacaaaagaacccaacaaagcaggacccgaccaacggggaagaccgggaagg

SEQ ID NO: 3529 - RNA, 62 nt, Homo sapiens
gggaaaaagcgcggaggggcccggcagcggcccgaccccgggaacgagcaggaacggaagcc

SEQ ID NO: 3530 - RNA, 100 nt, Homo sapiens
ggaggaggcgaccgcggcgcagcgacccccgccaggcaaaaggaaggcacaagcagaggaaccagggaaccgccgccagcaaccaacaggcacgaggaag

SEQ ID NO: 3531 - RNA, 81 nt, Homo sapiens
ggggcccccgcggcgccgggaggaggccggggccgcgcgagggcgcccagcgggcagcggggaagaagaaaaggaaccgag

SEQ ID NO: 3532 - RNA, 52 nt, Homo sapiens
acaaaaacaaacccaggaaaaagaaaggagcgcaagacacagggcacagaag

SEQ ID NO: 3533 - RNA, 78 nt, Homo sapiens
acccacgcagaggcgaagacggggagccacgagggggagaggcaccagcaacagaccaaccgcagcaagcacagagac

SEQ ID NO: 3534 - RNA, 54 nt, Homo sapiens
caggagagacccaagcagcagggcgagggcacccgcccaccccaccacacagcc

SEQ ID NO: 3535 - RNA, 71 nt, Homo sapiens
cgcgggaagaggcggaacaggcaccaagccggcggggcgggccccagggggaaaggacgcagaaaggagca

SEQ ID NO: 3536 - RNA, 41 nt, Homo sapiens
caccgcccaggcaacaaagacacacggcgcagcccggcacg

SEQ ID NO: 3537 - RNA, 57 nt, Homo sapiens
agggacgccgcccgccaggcccggcaaagcgaaaaagaccgcagggaaggccgccac

SEQ ID NO: 3538 - RNA, 68 nt, Homo sapiens
cgcaagcgaggcagccagcacccgcgagaagagcgaggccccccagccccagcgcgcgcgccaggagg

SEQ ID NO: 3539 - RNA, 60 nt, Homo sapiens
gagagaggagccggaggccaagggacaagcaaggggccaaggagccaaggaggaaaccca

SEQ ID NO: 3540 - RNA, 87 nt, Homo sapiens
cgcggcgggacaagcgcgacgcccggcgcgagccaagcgcgcgccggcacacggaagcaggcgaacacggaggcgcgcacgaggcgg

SEQ ID NO: 3541 - RNA, 68 nt, Homo sapiens
aaagggccaaagaagggagagaggaggcgcaaacgggcgcaaggcgccaaaacaagagaccgcagagc

SEQ ID NO: 3542 - RNA, 95 nt, Homo sapiens
aggacagcacccggcacgccacggcgccccgcaaggggaacaaagcgacgagggcgagaagaacaggaccccgaagacaacacgccacacgccca

SEQ ID NO: 3543 - RNA, 73 nt, Homo sapiens
acccagccgcgggacgccggccggccaggcgaccgagagcccaccgagaccgccagcgccacagcaaagaaaa

SEQ ID NO: 3544 - RNA, 78 nt, Homo sapiens
cggaggcgaccgccaggcgcccaaacccggaccaggggaagcaagcaggaccaccgacagaccaagcaacgcgcagaa

SEQ ID NO: 3545 - RNA, 69 nt, Homo sapiens
gaaagcgcacgaaggccgaccagggccggggaggagaaaggacgcaaaagaaggacaaggagaacacca

SEQ ID NO: 3546 - RNA, 84 nt, Homo sapiens
caccacgcggggcccgcggcacgccgggcccggcggccgaagggacccaaccgcggaggcggccgcgacagcaccagcagcaca

SEQ ID NO: 3547 - RNA, 74 nt, Homo sapiens
ggcaggggagcacgccaaagccaagaaagaggcccaacagcggaacggggggcaccagggacccgccagcacgg

SEQ ID NO: 3548 - RNA, 87 nt, Homo sapiens
caaaaaccagaagacaagcagcgccaggcggccccgccgagcccgcgcgccaggccgcggcccgaggcgcagcagcaggaggaggac

SEQ ID NO: 3549 - RNA, 32 nt, Homo sapiens
ccgcgaagcgggaagcgccacagagccgggac

SEQ ID NO: 3550 - RNA, 50 nt, Homo sapiens
ggcccagaaaaaccagcaaggcgcagagaagcacagagaagccaccaaca

SEQ ID NO: 3551 - RNA, 59 nt, Homo sapiens
ccagagaccaaaaaaaaaacgcgaacaccgacggagccaggggaaggaggaggagaaga

SEQ ID NO: 3552 - RNA, 72 nt, Homo sapiens
ccagcacagagaccaacgggaagcccacagacagaagaagagccgaaacgcgcggccaggggagacagcccc

SEQ ID NO: 3553 - RNA, 71 nt, Homo sapiens
cccacccaagcaagaagacacagagaagcccggccggaacccggagaaagggcgaagagagaacacgcacg

SEQ ID NO: 3554 - RNA, 44 nt, Homo sapiens
cccaaggccagacaaaaccacgcggcagcgaaggggaaccaccc

SEQ ID NO: 3555 - RNA, 76 nt, Homo sapiens
cgcccgggccagcggccgcgcacccccggccggaggcaccagcagccggaaaccggccggcgcaggcacacaccgg

SEQ ID NO: 3556 - RNA, 72 nt, Homo sapiens
cagaagagcagcccgccgacaagggcccaaccaagaccgaacccaagccagggaaacacgcacggcccagcg

SEQ ID NO: 3557 - RNA, 79 nt, Homo sapiens
ccggcggcggcgcgggcgagcggcgagccgaaaagcgagcgcgaggaaaaggcggcgggagccagcaggggggaaagaa

SEQ ID NO: 3558 - RNA, 84 nt, Homo sapiens
ccccccggaggcggcgggcggaggcggcgggaaggacgcccagagaccggcagcgcaaacacccggggaggaagcccacacacc

SEQ ID NO: 3559 - RNA, 79 nt, Homo sapiens
cacccacccggcagcgggggcagcagagcggagccaagagcgaaggggccccggggcagaagagcggcgccgaggagaa

SEQ ID NO: 3560 - RNA, 79 nt, Homo sapiens
aaacaggacagaaagaaggaaaaagcagaaagccagaggaaggcaagaacggaagcacgggcggaggaaagcacaagca

SEQ ID NO: 3561 - RNA, 56 nt, Homo sapiens
ccggacaaccagaggcagccagcagggggagaaaaagccaccacaaggggacaacg

SEQ ID NO: 3562 - RNA, 75 nt, Homo sapiens
cgcagcacagcagccccggaggcgccaccgcaccaggaggaggcgaggagggcgaggcagggcaaggcaacgaac

SEQ ID NO: 3563 - RNA, 86 nt, Homo sapiens
cgcagccgcaaagggggccagaaccgcgccggcaacgccaccggccacgcacgggaacggaagcaccggccccccagaggcgccgg

SEQ ID NO: 3564 - RNA, 77 nt, Homo sapiens
gaaccggacagcacaccagggccgggacacacgagcgagagcagcaggaagaagaggaagaaaaaccaagcggcacc

SEQ ID NO: 3565 - RNA, 93 nt, Homo sapiens
cggagccgaggcgagcgccgcgcgcaccacggcaaccacgagaaaacggaaccgaaagcaagaggacaagaagaggggaaaacaagaaaaggg

SEQ ID NO: 3566 - RNA, 75 nt, Homo sapiens
acaccgcccagcgggcaaccccacccggccccgagccccgacacgcacggaagcagacgggcacaggaggacacc

SEQ ID NO: 3567 - RNA, 78 nt, Homo sapiens
gaagggcgagcacggcgcggcgagcagagacacaccgccgggcaccgggcgccccagcacgcgacagggacgggggcg

SEQ ID NO: 3568 - RNA, 71 nt, Homo sapiens
ccgccgaccgaagccgcaaaaagcaaacccaaggggaggacggacaaagaggaaaccgcacaccaaaagga

SEQ ID NO: 3569 - RNA, 83 nt, Homo sapiens
ggggccacgccggcaggcggccggccagacaagcagaccggaagaccgacggaagaccacaccccgagggagcccaggacacc

SEQ ID NO: 3570 - RNA, 58 nt, Homo sapiens
acagaagcaacaaaggaccgcccccagagagaggcccggagcggggggaaaaccccca

SEQ ID NO: 3571 - RNA, 76 nt, Homo sapiens
cccaagcgacgcaggcagaagcgagacggcaagggcgaccgcagaacaaggacagcagaaagacccaacaaacggg

SEQ ID NO: 3572 - RNA, 86 nt, Homo sapiens
cagcccgggacaccaagaaagaacaccaaaagccccaacagcggcaagaccagcacacagaggccagagcacccagcgcagcagcg

SEQ ID NO: 3573 - RNA, 62 nt, Homo sapiens
gggacagaaccgggcaggggaccacgaagaaacagagccaaggaagggccccacaccaaacc

SEQ ID NO: 3574 - RNA, 67 nt, Homo sapiens
ggggaagaccgcgcccgcggagagcccaaacaccaccaccaagagggcggacaacaggccgagggcg

SEQ ID NO: 3575 - RNA, 85 nt, Homo sapiens
accaagaacggagcaagcccaggcacagccgacgccgcgggggccccagggcagccaaccccgcggcaggcacggccaccggaac

SEQ ID NO: 3576 - RNA, 68 nt, Homo sapiens
gaaaaccagaagagcaaaggcgagagccacaaccaaggaacccagccagccggcggaagcaagcagca

SEQ ID NO: 3577 - RNA, 82 nt, Homo sapiens
cggaccccagaccaggcgggggcccgaccgaccccgacaagggaggcgaggacggacaaaaggaaacggacgggaggccagc

SEQ ID NO: 3578 - RNA, 62 nt, Homo sapiens
ccgacgccaggcagcgcccccaaacggcgagaaaggcgcacaccaagcggcgcacaggaacc

SEQ ID NO: 3579 - RNA, 80 nt, Homo sapiens
gaacccgggaggcggagggcggcgcacagcagaggggaaagaagagccagcaggaaaggaagaagccaaaagcaagaaaa

SEQ ID NO: 3580 - RNA, 70 nt, Homo sapiens
agaacggccggggagggcccccaggcaagacacgaagaccgagccacaggacaggacaccacaacggcca

SEQ ID NO: 3581 - RNA, 84 nt, Homo sapiens
ggcgccccgcccggcaccggcgacaagcagggacgcaccaccagggcagaacagcacccgacggccgcggaagggccacaccac

SEQ ID NO: 3582 - RNA, 77 nt, Homo sapiens
ggccccggagccaggcaggcaggccaccaacggcggggggcgaggagcgagcaggagccgggcggcggccggggagg

SEQ ID NO: 3583 - RNA, 63 nt, Homo sapiens
cccgggggggcagcgcacggaggagcggcgggccagacagggcccgaagccagcagagagcgg

SEQ ID NO: 3584 - RNA, 75 nt, Homo sapiens
aggaaacaggaacaggacgacccaggagacgcaggccaaggagaaagcagcaagagccgccacaacaaacaccaa

SEQ ID NO: 3585 - RNA, 69 nt, Homo sapiens
cggccagcaggggaggaaaagacacacccgcacgaagcccagaaggcacgaagagggacggacaggaga

SEQ ID NO: 3586 - RNA, 53 nt, Homo sapiens
caacagaacagccagagcagcagacagcagaaaagcagacaggccacaggccc

SEQ ID NO: 3587 - RNA, 56 nt, Homo sapiens
gaaagccaagacaaacacacgccgaggagccaagccgcggcgccggcgcgcccgac

SEQ ID NO: 3588 - RNA, 50 nt, Homo sapiens
accgggccagcacccggacagacccacagcggggccgggccccgaccacc

SEQ ID NO: 3589 - RNA, 83 nt, Homo sapiens
ggcaggccccgagaggaacccagccgacacgacgccgccggcaggcccgcgcaccaggcacccgggggagcgcccaggacaca

SEQ ID NO: 3590 - RNA, 79 nt, Homo sapiens
gggagaccagcagagaccaacagaccaccggcgcaggagaggccaacaagaccgccagagcggaacgaccccagagcga

SEQ ID NO: 3591 - RNA, 30 nt, Homo sapiens
gaaacacacaagaagggccgccggccaggc

SEQ ID NO: 3592 - RNA, 89 nt, Homo sapiens
agagcggagggagccccagacacgggcgaggaaccaaagccccggcgcgcaacagaagaggagcggagcaggccaacgagagggaggga

SEQ ID NO: 3593 - RNA, 73 nt, Homo sapiens
aacgccccggggcggacagaggggaagcaagaggcacagcggagcaaagcggcaccgaggcagcgcgaaggag

SEQ ID NO: 3594 - RNA, 80 nt, Homo sapiens
acgcccggaggcaccacaggacgcagcccccagcacgacgccaccccgccccaccgaggccggcgggccacagcaggcgc

SEQ ID NO: 3595 - RNA, 76 nt, Homo sapiens
gccaccagaccaggagcaccaggaagccccaggcgcaagggccaagagcagcgccgaaggcacagagccagagagg

SEQ ID NO: 3596 - RNA, 74 nt, Homo sapiens
ccaaggcaagacccaaggcgacgaccgacaggggggaaaggggacagcccaccacaagcaggccccaagcccaa

SEQ ID NO: 3597 - RNA, 49 nt, Homo sapiens
ccagagaccacagcgccgcaccgagaaggcagggaacagggcagcaacc

SEQ ID NO: 3598 - RNA, 57 nt, Homo sapiens
ggacagaggccgcgcgcaggcgaggagcgccagggacacgggagccccgcaggaccc

SEQ ID NO: 3599 - RNA, 106 nt, Homo sapiens
agccccgcagcccagcagccccgcagcggcgccgaggacaggcagccgaggcgcccccgcgcgaggacaaagcccagccaccacccccaccgacagaacaagccca

SEQ ID NO: 3600 - RNA, 60 nt, Homo sapiens
aaagcgcgggaacaccccacaaggggccccacggagcggaccaggaggagcgaggcggcc

SEQ ID NO: 3601 - RNA, 90 nt, Homo sapiens
cgaggcgaccgcggaccggcgccccggcgcgaagaggcggaccggacggccgaggaacccaaggaccgcaaagaaaacccagagaacacc

SEQ ID NO: 3602 - RNA, 81 nt, Homo sapiens
caaggaacaaaccgaagaacagcgggaaagaaggcaaaacacggagcaacgccaggagcagcacagccacgcgaaacaagg

SEQ ID NO: 3603 - RNA, 70 nt, Homo sapiens
cgggaacggcacccgaaggccagaggaaagagaggaacaaccagacaaaaggggagcagaccagaacaaa

SEQ ID NO: 3604 - RNA, 69 nt, Homo sapiens
acacggaccgcccagcacaggggagaggcaggcagcgaaaccaggaaaagcccggaaaagcagccaagc

SEQ ID NO: 3605 - RNA, 77 nt, Homo sapiens
aacggcccccccccagcccgccccaaaaggacaaccacaccgaaggccaccccaagaagaggggacagaaagacaga

SEQ ID NO: 3606 - RNA, 77 nt, Homo sapiens
ccacgggccgagacacgcagcggcggccagggaccaaacgagaaggcaaccccggcggccacacagacccgacggac

SEQ ID NO: 3607 - RNA, 67 nt, Homo sapiens
cgccagggccacggcccaccacccgcgagcaacagcagaaaagagaagagacccacgcaacgaagca

SEQ ID NO: 3608 - RNA, 112 nt, Homo sapiens
aaccaaccaaaacagccagccgcagagaccccaaaccccggcccgacaggagcacaggagggagccgagcgcgcccagaagacgacagggcagagagagaaaaacggcaaga

SEQ ID NO: 3609 - RNA, 55 nt, Homo sapiens
gcgggccggcgagcgcagcgcgaccgggaggcccagcgccccccccaacccaacg

SEQ ID NO: 3610 - RNA, 78 nt, Homo sapiens
cgcccggacacaagaaaaagagcgaaaaagacacgccgggagaagacggaacaagaaaggaccaggagccccgggcaa

SEQ ID NO: 3611 - RNA, 79 nt, Homo sapiens
gcccccggcccaagggcgaccccagccgggcccgcgaaggcacagaccggacacggaagcagaacgccgggcaggaacc

SEQ ID NO: 3612 - RNA, 80 nt, Homo sapiens
ccaggccaagacaaaggagagagagcggggacagacaggcaagggagcaaaaacaaccaaaagaagcccgggacgcagac

SEQ ID NO: 3613 - RNA, 74 nt, Homo sapiens
caccccagcggcagcaccagagaggccgggcggcgaaggggcagaggcaaaagacaagaagaagggacagcagg

SEQ ID NO: 3614 - RNA, 77 nt, Homo sapiens
ggcagaaggaacacagggaagggggcagggaaccagagagaagaggaagagaagaagaagaacgcccccaggaaaag

SEQ ID NO: 3615 - RNA, 74 nt, Homo sapiens
caaaacacacacccgcagacaagaacggagaggggaggcaggaaaaagacacaagacagcaggaccgggaccag

SEQ ID NO: 3616 - RNA, 80 nt, Homo sapiens
gccgcgaagacaggcagcaacccaaacagggaccaaccaaagacgccaaggagaaggcagaccgggagaggaagacgagg

SEQ ID NO: 3617 - RNA, 88 nt, Homo sapiens
gggcacgcacggcccgggccggcgcccaaggcccgcccgggagggccggggccgcgccaggacgcggcccagagaccccccacgggaa

SEQ ID NO: 3618 - RNA, 77 nt, Homo sapiens
gcgcccgagggaggggggagagagacacgagaccagaagccaagaaacgaggagagccaccaccaaggagacacccg

SEQ ID NO: 3619 - RNA, 76 nt, Homo sapiens
cccccaagagagccgcagccgccagggacgggggccaccggacaggcgggacaagggcgcaccggggcgcagcgag

SEQ ID NO: 3620 - RNA, 64 nt, Homo sapiens
aaggaaccagacaagcaaagaaccaggacaaaaaggaaggccaagaccccaaacacaggagaaa

SEQ ID NO: 3621 - RNA, 56 nt, Homo sapiens
gcggcaccacacacccagcgcacaggcgaaaaccaaagcagcgagagaagagacgc

SEQ ID NO: 3622 - RNA, 66 nt, Homo sapiens
gagcgaagaaagcccgagaagacgggcgcagaagaaagaccagaaggaggcccagaggaaaaagac

SEQ ID NO: 3623 - RNA, 99 nt, Homo sapiens
accaccggccaaggaaaccccagggcccgcccaggacccccaagccgccgcggacgcaggacccaaagacaggaccacgcaccagcagagaaggaaagc

SEQ ID NO: 3624 - RNA, 97 nt, Homo sapiens
cccgcgcgagccggagaagccgcagcgcgaggccgccgcgcgcccggggccggccagcaggccccggaacgcgcgcacggaaagccagccccgacca

SEQ ID NO: 3625 - RNA, 69 nt, Homo sapiens
gcccggcggccgggcccagcaacggggcggcacacaaggagcgaagggcagggagaacgccaggcacag

SEQ ID NO: 3626 - RNA, 83 nt, Homo sapiens
gcgggaccacaaagcacgacggcacccgggggccacacgcaggccccgcgccagggcagaagaaaccagacaagagcggagaa

SEQ ID NO: 3627 - RNA, 81 nt, Homo sapiens
cgcgcaccgcagcagccccccccaacccggaaaaggggcgaaacccacaaggagaaagacagcaaagaaaaggagaagaaa

SEQ ID NO: 3628 - RNA, 65 nt, Homo sapiens
ccccaagacgaacgccccgcagggagaaaaaagcgaaaccggaccaagaaaaaacaaaagcaaaa

SEQ ID NO: 3629 - RNA, 62 nt, Homo sapiens
gacacaaagaaacggacccagggccacccagacaggacgcacaaagaaaggcagacagagca

SEQ ID NO: 3630 - RNA, 76 nt, Homo sapiens
ccacaccaagaagcaagggacagaaggaagaggcagaaaccaggcagaacgaacgggaaagagcagaaaccacaac

SEQ ID NO: 3631 - RNA, 72 nt, Homo sapiens
cgaagcagagcccgcggcacaaacagaggaaacaccagaaaggaagagcggaacggagaagaaaccccaagc

SEQ ID NO: 3632 - RNA, 69 nt, Homo sapiens
gacaaaagggccaaagaagggagagagagaggacagagacgaggcgggcccaagggcaccaccggcacc

SEQ ID NO: 3633 - RNA, 78 nt, Homo sapiens
gaagacacggcggagcaggagacgccaccacagccgcgcagagggaggacgccaacgaggagcgccaggaaagaggca

SEQ ID NO: 3634 - RNA, 55 nt, Homo sapiens
agcggaacgacgacaccgagcagaccccggccgcccccagcggggagcacgcgcc

SEQ ID NO: 3635 - RNA, 74 nt, Homo sapiens
acaaccaagaaaccgggaacaagaggcggccaagcagggggcaaggagcaggaggagaagaaaccccaagacca

SEQ ID NO: 3636 - RNA, 85 nt, Homo sapiens
cgcggcagacggcgacagggcggcggcgccaggcagggcgcagacccgccgggcaggaggagggaagccgggcgaggccggcggg

SEQ ID NO: 3637 - RNA, 57 nt, Homo sapiens
acacggcacccacagcgaggggaagagaccgggagccggcaagagccgacggaaaca

SEQ ID NO: 3638 - RNA, 113 nt, Homo sapiens
cgcgacgcgcgccgaggccacaggaaaggggccgcggcgccgccagacagcgagcgaggcggagaaaccccccccagagggcagagaaacagaggccacggaaacagccagcc

SEQ ID NO: 3639 - RNA, 75 nt, Homo sapiens
ccccgccagcaagggccaagacaacgacaagagaacaaaggaggggaccccggcaaaaaaaacccacaaagaacc

SEQ ID NO: 3640 - RNA, 72 nt, Homo sapiens
gccagcagaggcggagcccgcagaccgcagaaggccggagacaccagcaggcgggcgcggacggcaggggcg

SEQ ID NO: 3641 - RNA, 73 nt, Homo sapiens
gcaagaaacgggggaagcagagcgcacaaagggaaaggaacccaaagaagcaaggacagagacaagaacggca

SEQ ID NO: 3642 - RNA, 73 nt, Homo sapiens
cgaaagaccgggccgcagaagaggccccaacccgggccagacaaaggacaaagcggaggcagggcggaccggc

SEQ ID NO: 3643 - RNA, 59 nt, Homo sapiens
ccggccacccaaagcacgggggcaacagagccggaaacgaaacagcgcagccaggaaca

SEQ ID NO: 3644 - RNA, 81 nt, Homo sapiens
cgggcacccgaggcggacgagaagagaacacaccggggaagggcaccgggagggcgagacagcccgcccgaggcccacgga

SEQ ID NO: 3645 - RNA, 55 nt, Homo sapiens
cccagcgacccagccagcgcgccagagagggggcagcagaagagccaacaaggag

SEQ ID NO: 3646 - RNA, 76 nt, Homo sapiens
ggaccaggaggcgagcaacaggagaaagacagcaaagaaaaggagaagaaaggaaaaaaacaaccccgggcacccc

SEQ ID NO: 3647 - RNA, 59 nt, Homo sapiens
aacacaggaggggcagcaagcgccccagcaaaccaccccaaccgagccagaggacgaaa

SEQ ID NO: 3648 - RNA, 77 nt, Homo sapiens
ccccacgcggggggacgcccacccgggccacccgcccacgcggggaccgcacgacacgggggcagccgaccaagggc

SEQ ID NO: 3649 - RNA, 75 nt, Homo sapiens
gccccggcgcagcgcgaccgcgggcccgcccgggcggaacgacccggggccgacgagaagaacaggaacaaccga

SEQ ID NO: 3650 - RNA, 82 nt, Homo sapiens
cccgggccggcggcgaccaggacccgggcccgcgcaccccccagcgccggccgagcccgaggagagacaggaaggccgaagg

SEQ ID NO: 3651 - RNA, 58 nt, Homo sapiens
cccgacaaagcgaaagcacaccaagagggagcacagcgcggaagccccgaggcagccc

SEQ ID NO: 3652 - RNA, 76 nt, Homo sapiens
ggacaagagaacagccgcgcggcgagcggcccgcacaaggccggcaggccaacgggaagagacgcccaaagaaccg

SEQ ID NO: 3653 - RNA, 75 nt, Homo sapiens
agcaagagcagcaccggacgggcccaccgcccaagaccggcccgcccgaggaggcccgacgccaaggggaacaca

SEQ ID NO: 3654 - RNA, 81 nt, Homo sapiens
ggacggcggagaaggccagcaacccacgcagaaaagaaggcaaacagggggcaccgacccgcacgcaagaacccaagagaa

SEQ ID NO: 3655 - RNA, 73 nt, Homo sapiens
cggggcggaaacgccccgaggagcaggaaggagaagacagaggagccagaccaagagacagcacaggcgagcg

SEQ ID NO: 3656 - RNA, 68 nt, Homo sapiens
aaaaccaggcaccaggcacaagaccccgccgcacaacgcaggagcagcaccaacacacagcgagacgg

SEQ ID NO: 3657 - RNA, 95 nt, Homo sapiens
gagaggacgggcgaagacaccaaagagggggaggggaaggcccccacagggcaggaagccgccgcccagccaggacggggaggagcagcagccac

SEQ ID NO: 3658 - RNA, 77 nt, Homo sapiens
ccccccaccggggacccccgaaccagaaaacgcccacccggaccacagaaccaaggcacagagaggaacagcagagc

SEQ ID NO: 3659 - RNA, 75 nt, Homo sapiens
ccgcccaacagaaaaagagaggagggagaacacagaaacccgccccggaacgagaaggaaaagcagaaaaaagaa

SEQ ID NO: 3660 - RNA, 54 nt, Homo sapiens
gaaaccggagcgcgcagcaggggacggaaagagagccgcagcgcagaacaaggg

SEQ ID NO: 3661 - RNA, 42 nt, Homo sapiens
gaaagaaaccccagaaagcgggcggagaaaccacaccaccgc

SEQ ID NO: 3662 - RNA, 95 nt, Homo sapiens
cgaacgcagacgaaggccacagaagacgacggacagagagacacaggggcaaagaaaaaggagagaaaaagaggcaaaacaacaagaagaaaaga

SEQ ID NO: 3663 - RNA, 80 nt, Homo sapiens
ggaaagagaaggcgaggaaccagcaaccagcagcaccgagagggccacagagcaaccaaaaaccggccgcaggcacaaaa

SEQ ID NO: 3664 - RNA, 81 nt, Homo sapiens
gcaaaaaacccagagaaaccagaaaaagacgacgcccggaagaggcgaaacgcccagggggcccaccacacccaccgagcc

SEQ ID NO: 3665 - RNA, 76 nt, Homo sapiens
ggaaggggcaagcgaacaaagcagccccaaccacacccagagaagccagaaagagaaggagacccgcccagaccca

SEQ ID NO: 3666 - RNA, 115 nt, Homo sapiens
cccccagcgccgaagcacccggaagggaaggccagaagcacaaagcgcccgaggagagcagagccggagccagggcaggccaggagagaaggcccggcccaggccaagagagaag

SEQ ID NO: 3667 - RNA, 59 nt, Homo sapiens
cacagaggaccaaaggagcacagggcggcagaaaacgggaagagaggcaacggagagga

SEQ ID NO: 3668 - RNA, 52 nt, Homo sapiens
cacgagccccaagaaagggagagaaaagcggaggggaaggaccccccacagc

SEQ ID NO: 3669 - RNA, 72 nt, Homo sapiens
gggcaggaaccaccgcccaaagcccccaaaacacaagaggacggagaagcgacgaaagaagccgggacaagg

SEQ ID NO: 3670 - RNA, 54 nt, Homo sapiens
cggaaaaaggagaaaaaccccggaggaaaaggcagaagaaaccagacaagagcg

SEQ ID NO: 3671 - RNA, 74 nt, Homo sapiens
aaaacggcggcccacgcaacacgcaccgaggagaggagccaagcccaacgggacgggaaaacggccacagccaa

SEQ ID NO: 3672 - RNA, 78 nt, Homo sapiens
agggggacgcagacggcgcacgcgggcggggaagaagaaccccaagcgaaagaacggacacacaccgccgccgaccga

SEQ ID NO: 3673 - RNA, 85 nt, Homo sapiens
ccaaagccgacggccgccggcacgcgaagccacgaggcggccccagcgcgggcgacaggccgacacccccagagagccgggccaa

SEQ ID NO: 3674 - RNA, 76 nt, Homo sapiens
aggacaagagcaagagggagagagacaagcggccaaagaggaaacgaaaaacggccaacggcccccgacgggacag

SEQ ID NO: 3675 - RNA, 58 nt, Homo sapiens
aagaaagaccacaagaccaaggggagacaagcggagacccagacaaccaggagcgagg

SEQ ID NO: 3676 - RNA, 75 nt, Homo sapiens
ccgccgcggcgagcgccaccgcaggcgaggggcacagaggcaggcacaaaaccacaagcgacaacagaagacacg

SEQ ID NO: 3677 - RNA, 79 nt, Homo sapiens
agagaagccgagcaagaagaggacaaggaggccaagcagcgggaagcaggcgaacaagaaaaccaagaacacagagaac

SEQ ID NO: 3678 - RNA, 95 nt, Homo sapiens
cgagggaagaggggaaagcccaggggacaggaggcccggggaaggcagaggcaacagggggagaacggagcacgaaaggaaagaagaggagaagg

SEQ ID NO: 3679 - RNA, 103 nt, Homo sapiens
gccgagagccgcccgggccagcggccgcgcacccccggccggaggcaccagcgaggcagcacggcaggagacgaggagaggacagcaggacacccggacccca

SEQ ID NO: 3680 - RNA, 69 nt, Homo sapiens
ggagcgcccagacacccccgaagcgacgggagagccccacacgcgacgacacaggaacggccgaacaca

SEQ ID NO: 3681 - RNA, 42 nt, Homo sapiens
ggcccagaagaggcggaggcggggacagccgaaggaacgcac

SEQ ID NO: 3682 - RNA, 93 nt, Homo sapiens
gggagaagggccggcggacgggaacgacgcgagcagaagaggggcccagagggcaggagagggaagaagagaaagccgaaaaagacaagggga

SEQ ID NO: 3683 - RNA, 49 nt, Homo sapiens
gagccgcaaggacagacaggaaagaacaggggacacagaacagagagcg

SEQ ID NO: 3684 - RNA, 74 nt, Homo sapiens
agaagaccgcgaaaggcccagaaagccagggccaaaacacccaaagacccaccccgcccagaaccacaaagacg

SEQ ID NO: 3685 - RNA, 81 nt, Homo sapiens
cggggagaggccccagggccgcggcggggccgaagggagagaagaaaggcagacaacagccgagcggacaacacagcccgc

SEQ ID NO: 3686 - RNA, 76 nt, Homo sapiens
gaccaagacggccccgggacacaaggcaaacaccccacccaaacgcacacgaaaaggcacgcaaagcaggggcacg

SEQ ID NO: 3687 - RNA, 59 nt, Homo sapiens
ccgagcagccagaccgacccacccgcgcggggcggaaaacaccccaaaagccaaaaggg

SEQ ID NO: 3688 - RNA, 56 nt, Homo sapiens
agagaggaagacagagcgaaggacccgagccccaaagacagaaaagccccgagacg

SEQ ID NO: 3689 - RNA, 78 nt, Homo sapiens
caggcaaccccaccggccgacagccgcgacggcgagcccgggccgcgcccgagggaaagaaaggcaaagcgagcaaga

SEQ ID NO: 3690 - RNA, 74 nt, Homo sapiens
acacaccgagagaacagagagaaagaagcgaagcgggaccggggcgggacgaggagaggcgggacaaggaagac

SEQ ID NO: 3691 - RNA, 76 nt, Homo sapiens
agaaagaagaaccagacaaaaccgacgaaggaacgggaaaaaggagcgcaaggaacagcaagacaagccgcaccaa

SEQ ID NO: 3692 - RNA, 64 nt, Homo sapiens
gcacggacggcacagcccgccgaacccgaaaggaggggacaaacaacggaaagggcgaagacaa

SEQ ID NO: 3693 - RNA, 72 nt, Homo sapiens
aaaaaaggcggaaagacgagccaaagaggggcgcgccaggaagcacccaaagggaggcccgcccccccccac

SEQ ID NO: 3694 - RNA, 75 nt, Homo sapiens
caacgaggagcccgccacagcagacagcggagcagaccaccgcccagcaaaaagcggcggaaagaaagacaaaag

SEQ ID NO: 3695 - RNA, 79 nt, Homo sapiens
ccggcggcggcgcgggcgagcggcgagccgaaaagcgagcgcgaggaaaaggcggcgggaggaccgacaggagcggacc

SEQ ID NO: 3696 - RNA, 76 nt, Homo sapiens
cgaacgaggaagaggaggacccgaagagcaggacagggggcaaagaaaaaggagagaaaaagaggcaaaacaacaa

SEQ ID NO: 3697 - RNA, 81 nt, Homo sapiens
cacgcggcccccgcccgccccgccgcccgagccggcgccaagcgagcagcgagcagcgacaggcgcgccagcggcggcggc

SEQ ID NO: 3698 - RNA, 59 nt, Homo sapiens
ccccccaacaccccacgaaggcggcaccaaggggaagagacgaccagagggccagggag

SEQ ID NO: 3699 - RNA, 79 nt, Homo sapiens
cgcgccgcgccccaaggggggcggggggccaccgaacgcgcacgccggcagggaaagacaaggagccgggccgagaaac

SEQ ID NO: 3700 - RNA, 75 nt, Homo sapiens
aaagagcagcccccacaagcgaagagcaaaagcacagaaaggacacaaagcaaacgaacacaagagacagggaac

SEQ ID NO: 3701 - RNA, 72 nt, Homo sapiens
ccgaggagaagaccccaaacggcaccaaaaacgcgaccgggcagccagaacagcacacagcaccggacggca

SEQ ID NO: 3702 - RNA, 63 nt, Homo sapiens
cgaaccccaaggccaacagagagaagagaccaggaccccacgagcgcggaaagaacaggggcc

SEQ ID NO: 3703 - RNA, 72 nt, Homo sapiens
ccagaaggaagacaaggcaggcacaccgaacaaccaagagaagaagcccaggaaacgagaagaagagacagc

SEQ ID NO: 3704 - RNA, 67 nt, Homo sapiens
cccaccagcccagacaaaggccgcagaaggaacggcagccacacagcccggcaacaccaggaaaaaa

SEQ ID NO: 3705 - RNA, 72 nt, Homo sapiens
ggggcgagaccgcggcggggccaccggacaacaccgccccagcccaccagacaagcgagaaggaccaagaac

SEQ ID NO: 3706 - RNA, 67 nt, Homo sapiens
aaaccaagcgcgggggaagaagagaaagaaaaccagcagcaagcgcagaaccagacaggcagaagga

SEQ ID NO: 3707 - RNA, 71 nt, Homo sapiens
gacccccaagacggcagacacccagcaggggacagagaacaacggcggaaggaagagaaaaagcaggaaag

SEQ ID NO: 3708 - RNA, 87 nt, Homo sapiens
cagacccgggagcgccgggacgcggagcccggagcggggcgacgaggcgagcgggggccgggcagaacacagcccggccagcgggcc

SEQ ID NO: 3709 - RNA, 55 nt, Homo sapiens
ggaggaaacagaaacaggccaggccagccggcgcgaaaccacgggccagagacga

SEQ ID NO: 3710 - RNA, 75 nt, Homo sapiens
caccgccccaacccacgagaggacagcccagggcccgagaaacagccagagcaaccagccagagagggcggggca

SEQ ID NO: 3711 - RNA, 78 nt, Homo sapiens
ggcgagcggggggacgccggcggagacgcgggcgaggggcccgggcagagggaaagcagaggacggaacaacccgggg

SEQ ID NO: 3712 - RNA, 79 nt, Homo sapiens
caagaagcagcggacgcgcccccaagaaaggaaacgccaagagcgagcggacgaggagcccggaagagaccaggaagca

SEQ ID NO: 3713 - RNA, 82 nt, Homo sapiens
gccgcgccagcccggcccccccagagcagcgccgcagcccgaggaaacacgacaccggaagcccggcacgcgggagcagaaa

SEQ ID NO: 3714 - RNA, 83 nt, Homo sapiens
cagcccagaggcgaagccggaagaagaggcaaacgacagacaaaagaggacgacccagccaacggcaagcagcaagcagccac

SEQ ID NO: 3715 - RNA, 86 nt, Homo sapiens
gaggccacagcagccagccggcccgaggacaccgacaccagcagggacccagacaggagcgcgggaagaagccggcccggggccgc

SEQ ID NO: 3716 - RNA, 52 nt, Homo sapiens
ggcccaacaagaaacacagaccaggaacagcagccaagggcaaggggcagcg

SEQ ID NO: 3717 - RNA, 67 nt, Homo sapiens
gaagaggaacaagggggggaaacccaccgggaaaaggcacgaagggacagagggcaggaaccccaca

SEQ ID NO: 3718 - RNA, 81 nt, Homo sapiens
gaccaggggcaggccgcggccgccaagggaaaccagccaacgaccagcgccagggacacaggcaaaacggacaaagaccgc

SEQ ID NO: 3719 - RNA, 83 nt, Homo sapiens
gccaacaccacacaaagcagccgagagacagagaaggaggaagaaaagaaccacaagagaacacggagagaaagccccaacaa

SEQ ID NO: 3720 - RNA, 56 nt, Homo sapiens
cagcccccaaagccaaaagcgggccgggcacagggacgacgacaaaaacccagaac

SEQ ID NO: 3721 - RNA, 83 nt, Homo sapiens
gcgcggagagcaacgccgggacagcgcaaggaccgaaaagacgcggccccaaaggaaacacccgaagaacacagcgccagccc

SEQ ID NO: 3722 - RNA, 68 nt, Homo sapiens
ccgccgcccggcgcgcgcaacaaggaagccccacagccaacagaaagcacaagcaaccccacccaacg

SEQ ID NO: 3723 - RNA, 38 nt, Homo sapiens
gggaagacagagcagccacacaaggaacagagacagac

SEQ ID NO: 3724 - RNA, 75 nt, Homo sapiens
ggaccagcagcgccgagggaaacccggagaccaaaccgaaaacacgagccacgaagaccgcacaccacagacccc

SEQ ID NO: 3725 - RNA, 37 nt, Homo sapiens
acgggacagagcaacaggaccgaaccccaagcccgac

SEQ ID NO: 3726 - RNA, 81 nt, Homo sapiens
gaacccgagcggagcgaagcgcaggcgcggggcgcggagcgggaggagggccagacaaggggaacacaagaggagagaagg

SEQ ID NO: 3727 - RNA, 67 nt, Homo sapiens
aaaacggcacagaaaggaagaaacggaagacaccggagccagagcggaagcacgaccagcagagaaa

SEQ ID NO: 3728 - RNA, 57 nt, Homo sapiens
gggggaggacaagccggaggaagcagacgaccacacagaaagcaacagcagaaaaca

SEQ ID NO: 3729 - RNA, 74 nt, Homo sapiens
gcagcggcgggacggcacaccgccaccggagcgcgcgcggccagcgccaggggcacccccccaacagcaccaac

SEQ ID NO: 3730 - RNA, 75 nt, Homo sapiens
ggagcccccggaccacacagcgcccaggccagagaaggggaaggaggggcagcgaacgccaaacaggacccaaga

SEQ ID NO: 3731 - RNA, 58 nt, Homo sapiens
gaaacgaaacaagaaacccaaccagacacaggaacgccacaagaaacaacagcaaggc

SEQ ID NO: 3732 - RNA, 71 nt, Homo sapiens
gcgccgcccaaggcccaccccccgagagaccgacagagccacaagaaacaaaggcacggcacggccggcac

SEQ ID NO: 3733 - RNA, 75 nt, Homo sapiens
acacaaggaacacggggaaccccgaaagccagcacacaccccgcaggacccgccagcagggagaaaaacgacaaa

SEQ ID NO: 3734 - RNA, 70 nt, Homo sapiens
gcggcgccggcggcgcgcgacccccgcgcagacaagagcgagcaagccgccgcagcaagccagagaccaa

SEQ ID NO: 3735 - RNA, 78 nt, Homo sapiens
ccgggggcccccacggacgcgcgagacaagaggaggcaacagagagcaggaaagaagaacagcgggagaggcaggcca

SEQ ID NO: 3736 - RNA, 39 nt, Homo sapiens
gccgagcccagcacgggaggcaagaaccgaaccagggaa

SEQ ID NO: 3737 - RNA, 57 nt, Homo sapiens
ccaaaagccgacaaccccagaaacagcgccggaggaagagcggaaaaggcggagacg

SEQ ID NO: 3738 - RNA, 76 nt, Homo sapiens
accacgccggcagacaggccacgccgaccgcagccaggaacacccaacgccccccaggcaacagccagccgccagg

SEQ ID NO: 3739 - RNA, 80 nt, Homo sapiens
ggcaccaggccaccacagaaacaaaagcaacaaagagggaagcgggcaccaacagacaaccagggcaagcagaggcaaag

SEQ ID NO: 3740 - RNA, 74 nt, Homo sapiens
cacgcgaggccccgccagggacacggcacagggacgggccaagaaccccaggaggagggaaagcggacccgcca

SEQ ID NO: 3741 - RNA, 56 nt, Homo sapiens
ggacgggaaagaccgacccaacaagacagacaggggccaaggcgacagcaaaacgg

SEQ ID NO: 3742 - RNA, 78 nt, Homo sapiens
cacccaccggcccacccacaagcgcacaggaccggggaaccccggaacgaagaaaagaaaggccaagaccaggaaagg

SEQ ID NO: 3743 - RNA, 76 nt, Homo sapiens
gcggccagacggccagcggcagcaagaacccgaggggagagagcggagccgaaaccaagccggacccgaagaccag

SEQ ID NO: 3744 - RNA, 78 nt, Homo sapiens
cgaaaagcggcccggaccgaaggcgcaagagggaggcgcacacacagggaccaagaaaggcccagggaccaaagcccg

SEQ ID NO: 3745 - RNA, 75 nt, Homo sapiens
acgaaggaaaaggaacagggcgagaagccagcgaacgaacaaaggaagagcaacaaagacagcacgcaaaagcaa

SEQ ID NO: 3746 - RNA, 68 nt, Homo sapiens
ggagcgccacgcgcggaaggcagcgcccagcagcgcagccccaacccacagagagagcagcaggaacc

SEQ ID NO: 3747 - RNA, 90 nt, Homo sapiens
cgagccccgggaaagagcagcgacgggagacagccgggcgcgcaaggagcgagaacccgagcagcgccagagcaacacaccgcgccccag

SEQ ID NO: 3748 - RNA, 37 nt, Homo sapiens
cggagcggcggaccccggcaggacgcagaaccccaga

SEQ ID NO: 3749 - RNA, 85 nt, Homo sapiens
cgggcccaccgcaagacggagagcgccggccgagaggaggacacccggcgccgcagggcaagcacagcccccaggaccccccaag

SEQ ID NO: 3750 - RNA, 92 nt, Homo sapiens
aggcgcgaaggcgcacccagaccggccccccacgcaggcaggcggagcgggggacgggacaaacaacaccagggccacggcacagccacgca

SEQ ID NO: 3751 - RNA, 70 nt, Homo sapiens
cacaaaggggaaagcagggacaaccagccacagacccaggggcgccagcaaagggaagaaaccccaacag

SEQ ID NO: 3752 - RNA, 86 nt, Homo sapiens
agccgacgagcgcgcacaacgcaggaccggcgccgaaggcccgccaggacagcagggaagaacggaaaccagagaaagaaacgccc

SEQ ID NO: 3753 - RNA, 68 nt, Homo sapiens
gaagacaggcagagggaaaaaagagaggagcgaacgagacagaacaggaaaaaggagagacggcaacg

SEQ ID NO: 3754 - RNA, 86 nt, Homo sapiens
gaaagcccggcgaagccacagaaaccgcccgcacagagcaggaggccgcagccccaggcgagacaggacacaagacaggagagaaa

SEQ ID NO: 3755 - RNA, 104 nt, Homo sapiens
ggagaacggacaaagaaggacagggaaaaccgacgaccggaagaggccagaggcaagcaccagcacccagagagaagacgcaaccaacaaacagaccgcgcaga

SEQ ID NO: 3756 - RNA, 73 nt, Homo sapiens
ccacccagaaccgagaacgaggccacgacagcccgaagaggacacggaggcagaggaagcagaccagagaccg

SEQ ID NO: 3757 - RNA, 68 nt, Homo sapiens
ggaaccaaccaaccgaagggggacccgaagcccgcgagaaggaggcgcaaaaaagaccagaacaaggg

SEQ ID NO: 3758 - RNA, 74 nt, Homo sapiens
accaagcccgaaagagcaacccccagcacaaagcaggcaagagggagaagacagcgaccagggaggcaacaaca

SEQ ID NO: 3759 - RNA, 77 nt, Homo sapiens
ccacagagaggaaccccaagccaagcccaagacaaaaacgcaccacagggagcagcagcggaggacgggaagggggc

SEQ ID NO: 3760 - RNA, 62 nt, Homo sapiens
ggccaggcccagcagcaggccggcagcccgaacagaagaaagcggcgagaaccgagcgcagc

SEQ ID NO: 3761 - RNA, 80 nt, Homo sapiens
ggaaaaggagacgagaacgcgacgcggaggcacgacgcccaccggccaccagccccgcccggggaaggcccgcgcacacg

SEQ ID NO: 3762 - RNA, 78 nt, Homo sapiens
caggaaaaaaaaggaggcgacaagcaacaacaacaagcgagaggcaagaaagaagcgaaaaaaacacggagaggccag

SEQ ID NO: 3763 - RNA, 70 nt, Homo sapiens
acccaccgagggaccaggaaagaggagccgaacaaccaaaaaccaagggagcaaggaacgccgaagcagg

SEQ ID NO: 3764 - RNA, 88 nt, Homo sapiens
gccacaacaacgacaccccacccgaaagcgcaacaccaccaaagcaacgagggcccaagggcaggacaggaagacagacagagaacgg

SEQ ID NO: 3765 - RNA, 56 nt, Homo sapiens
caaacgcaacgcgacaaagaggaacaggagagagaaggagagaagaggcagaggag

SEQ ID NO: 3766 - RNA, 77 nt, Homo sapiens
cccaggccagcgccccaggccaagagggacccacccggcggaggaacagcacagcagcgggccggaaaagcgagcgc

SEQ ID NO: 3767 - RNA, 57 nt, Homo sapiens
ccgacacaagggacccagcgagccagaggacacaaaacgcagaacagaccgcaggaa

SEQ ID NO: 3768 - RNA, 72 nt, Homo sapiens
cagaagacacaccaaggaaaaggaaaacacagcaaaggcagaaacaagagaggcgggcccagcccgaaaccg

SEQ ID NO: 3769 - RNA, 75 nt, Homo sapiens
ggcaacgagcggcagaaacacaagaaccacaaggaaacagacaggaccagaggccgaggagggcggacccccagg

SEQ ID NO: 3770 - RNA, 55 nt, Homo sapiens
gaagacgccgcgaaaacaaacagagcgcacagcaggggaaaacgcaaaaccagaa

SEQ ID NO: 3771 - RNA, 74 nt, Homo sapiens
aaggaccaagaaccagccggacaggacaaaaggacacaacccacacaagaggagaagagaacaggccggcccac

SEQ ID NO: 3772 - RNA, 82 nt, Homo sapiens
acaagcacaaaagcggaggaaaaggcgaaaagccagcacggaggccaccgagcgcgcagaaaccgccaggcaaaggagcgag

SEQ ID NO: 3773 - RNA, 42 nt, Homo sapiens
gacgcccggcgccagcacacgcagcccagaaccgggacaacc

SEQ ID NO: 3774 - RNA, 78 nt, Homo sapiens
cacaagaaacaaacaccagacgacggccaaccaagcccgccgcgggaaggaggaagaagaggagaagacaggaacaaa

SEQ ID NO: 3775 - RNA, 75 nt, Homo sapiens
aggcccccccccgaagcagagagccacgcaaacgcccccagcacaagggggcaccaggcggagaaggacgccaca

SEQ ID NO: 3776 - RNA, 73 nt, Homo sapiens
cgaagaggcaccaaaaagaaccgcagacagaggagcgggggacaggagaccaacggcgagaggaaaaggaaag

SEQ ID NO: 3777 - RNA, 66 nt, Homo sapiens
cacgagagcaaccgacacagaagcacggagcccaagaaacggcaagagaccggggccgagcagaca

SEQ ID NO: 3778 - RNA, 84 nt, Homo sapiens
ccggcgccgccggcccgcgggaccgacagccgggcagagaaacgaaggaggcccaaccacaaaaggagccgacggaacccagac

SEQ ID NO: 3779 - RNA, 82 nt, Homo sapiens
gagcgggaggccacagcagccagccggcccgaggacaccgacaccagcagagcgccgcccggcgggcgccgggagccgccag

SEQ ID NO: 3780 - RNA, 74 nt, Homo sapiens
gccccagcacccccagcgggcagaggggcgcggaacagaaacagcaacaaagagcgagcgaacagacaaaaacc

SEQ ID NO: 3781 - RNA, 73 nt, Homo sapiens
cccacgcagccaaccagcgaaccagccaacccgccggggagaaaccgaaacgaacccagccagaaacacaaaa

SEQ ID NO: 3782 - RNA, 83 nt, Homo sapiens
cgcacagcgcagagaagaaagggccgagaaagaagagaggaagaagaggaggaggaggaagaggaggaagacgaggagagaca

SEQ ID NO: 3783 - RNA, 76 nt, Homo sapiens
cccaaacaagcggagcggacccagggccggcccagggagaacgcaaaaccaccacccccacaaaaaacgcagggag

SEQ ID NO: 3784 - RNA, 71 nt, Homo sapiens
gggagaaggcaggcaccacaaaaaggacaggaccagaggaaggcggggaggcggaagaccaggagaaagca

SEQ ID NO: 3785 - RNA, 80 nt, Homo sapiens
agagcgaagacgccaaaaaaaagcccgacgaggaggagaacaccaacaccagcagcagaggcccccagacccgagccagc

SEQ ID NO: 3786 - RNA, 83 nt, Homo sapiens
gcgacaggggagggacccagccccaacgaaacccccgaggcccccagccaccagcaccacaggacaccgaaagacacccaacg

SEQ ID NO: 3787 - RNA, 44 nt, Homo sapiens
agccacggcgggacaggaagccacacaggggccgaagaccaaaa

SEQ ID NO: 3788 - RNA, 79 nt, Homo sapiens
gccagcggaaaaccggcccacccgacgaccgacaacgaaaacaaacagagagagaacggaaggagagaaaaggcgaacc

SEQ ID NO: 3789 - RNA, 67 nt, Homo sapiens
acccagggggcaggacgaccagcgggaggccagaggaagggcaagcggacgggcgcaaaccagggcg

SEQ ID NO: 3790 - RNA, 63 nt, Homo sapiens
aagcagcagaaccggggcaggcacaaggcgcggccaacagagacaggagaaagagagagagag

SEQ ID NO: 3791 - RNA, 73 nt, Homo sapiens
ccgcgcacccagggaccgcaccgcggccgggcgccagcgcggcgcaggccaagaacagccagcaaagacaaga

SEQ ID NO: 3792 - RNA, 36 nt, Homo sapiens
aaaagaaggaaggagagcgagcagcagaggaaccgc

SEQ ID NO: 3793 - RNA, 81 nt, Homo sapiens
ccaaaaaccgacacccgaagaaggcagcccacgaacaccgcagcaccacccagcagcagaagggaacagaggaacaaaggc

SEQ ID NO: 3794 - RNA, 71 nt, Homo sapiens
gggaggagagacagaaacacaacaaaggaggccggaagaacccaagacggcgaaagaggagaacagaagcg

SEQ ID NO: 3795 - RNA, 65 nt, Homo sapiens
ggaccaagaaccaggaccggagacaaagagagaagacccgacgaacagaaagccagcacaaggga

SEQ ID NO: 3796 - RNA, 56 nt, Homo sapiens
caagcggccccaaaaacacccaccaggcagggggaagccaacacaaccaggacaag

SEQ ID NO: 3797 - RNA, 74 nt, Homo sapiens
gaagaccaccaaaaagaaagcaggcgcgaaagcacgagaggaacagaaagagagcgaaacaggagccccaagac

SEQ ID NO: 3798 - RNA, 40 nt, Homo sapiens
caacaagggccggaccacccaggcagagcccgcccagaac

SEQ ID NO: 3799 - RNA, 39 nt, Homo sapiens
cgaggcaggccagaacgggggcggagaacggaaaagcac

SEQ ID NO: 3800 - RNA, 101 nt, Homo sapiens
gagggacaaccggaaaaaaacaagcccaggacccacgacagggaccagaagcgcaggcccgccaggaggaaacaaccacgccgcggggggagaaggggcgc

SEQ ID NO: 3801 - RNA, 75 nt, Homo sapiens
gcgggacggccgaggaaggaacggcccccccccagcccgccccaaaagaagaagaccacaagcacaaggcagagg

SEQ ID NO: 3802 - RNA, 62 nt, Homo sapiens
aacagacaagccgccccgccaaggaaacagaagaaagaaacgggcaaaagacaccagaggga

SEQ ID NO: 3803 - RNA, 89 nt, Homo sapiens
ggccggcgccggcgccggcgccgcggccccggcgcggacccgccaccggaggaggcaaccacgagaaaacggaaccgaaagcaagagga

SEQ ID NO: 3804 - RNA, 68 nt, Homo sapiens
caggcgaaagaggcggcggcgcgccgcggccggccacgcggccgcaggagggaagcgcacggaaaccg

SEQ ID NO: 3805 - RNA, 82 nt, Homo sapiens
aagcggggcgccggcgcaccggagaggccaggaaaggccaaagaagagacgaagcaaaggcgcccggagccccagaaccgaa

SEQ ID NO: 3806 - RNA, 71 nt, Homo sapiens
aagaaaccagcaacaaaaagaaagcgcgaaggcaaagcagaggaagaacagaggacaaagcggcgcacgca

SEQ ID NO: 3807 - RNA, 78 nt, Homo sapiens
ggagccggggcaccacagagagcggcaccagcccggcgggagagaccccgagggcggaagaagggccggcccgggagc

SEQ ID NO: 3808 - RNA, 52 nt, Homo sapiens
cccacagaggggcgacgccggcagcggaggccggcagaagacagagcaggcc

SEQ ID NO: 3809 - RNA, 74 nt, Homo sapiens
gaaagaagcagaagcagaaacagcaaggacaacagcccagaacggacgcaccgggacggaccggaggacacagc

SEQ ID NO: 3810 - RNA, 86 nt, Homo sapiens
gcccgagggcggacgggccccgcggccgcccgagcaggaggacgaacagaaagggcagcaagacacgaagccgagaaagagcagcg

SEQ ID NO: 3811 - RNA, 77 nt, Homo sapiens
gccaggccagacccgaaggccaggagacccgaccccaaggcgcgagccggcacgaaacaaaggagcgagacagaaga

SEQ ID NO: 3812 - RNA, 73 nt, Homo sapiens
gcaacacaccacaagcccccgccacgcgggcccaaacacgacggacaacggaaggagagcccggacccaccca

SEQ ID NO: 3813 - RNA, 73 nt, Homo sapiens
gaccaggacacgagcgggaacgcaaacgaaggaaacgggaagaacgggaagacgcagaggcccgaagaaggcc

SEQ ID NO: 3814 - RNA, 79 nt, Homo sapiens
aagaggcaaacagggaaacgaggaccagagaggacggcgagcaaaacacaagaaccaaaagcacacggagaagccaaac

SEQ ID NO: 3815 - RNA, 114 nt, Homo sapiens
gggcagaggcaccaccaacgcacagaggcagccagagggaggggacacgcacgaagacagcaaagcagcccgaggaggcacgcaaaacaacagggggcaaacaagaccagggga

SEQ ID NO: 3816 - RNA, 83 nt, Homo sapiens
aacagggccgcggacaagcggccaaggagaaccaggacaccggcgcgcaggcccagcgcagcaggccgaaaggagaacgacca

SEQ ID NO: 3817 - RNA, 82 nt, Homo sapiens
ccagacgagaaaagaccgcaaccgccagcaccgggaagagaaagaaaagccgaaggcaccagacaggagacggcgcaggacc

SEQ ID NO: 3818 - RNA, 85 nt, Homo sapiens
ggggcagcgcgagcgaggaggagccgagccgcgggcacaggagcgacagacagcaccaagaagaagcaaacggacacacccaggc

SEQ ID NO: 3819 - RNA, 46 nt, Homo sapiens
caaacagaagcgcggccaaggaaacagcagaagaaagaagcgacaa

SEQ ID NO: 3820 - RNA, 56 nt, Homo sapiens
caagaccacagcagcacccagggcgccggagccgagagcgccgcgcggcgcgcccg

SEQ ID NO: 3821 - RNA, 72 nt, Homo sapiens
gaggcccaacagagcacggcgaggccccaaggaacgcacagacagcgggacacgcacaccacgcagccaaag

SEQ ID NO: 3822 - RNA, 88 nt, Homo sapiens
ggggcggaagaaaaacaaacacacgcaaaggagaaaggaaccgacaggcgagagcccgaaaacacacccgcagcccagggaggaggaa

SEQ ID NO: 3823 - RNA, 40 nt, Homo sapiens
acaggaccgagggccccgccagcagcaggcgagaggcaga

SEQ ID NO: 3824 - RNA, 56 nt, Homo sapiens
aaaagacgggcgccgcgggcagcgcgcggcccgggcagcagacagcaaggaacgca

SEQ ID NO: 3825 - RNA, 87 nt, Homo sapiens
agagcggaacgggagaaagcacgggaggagagggaaagcccgaaaaggaccagcgaagcaagcacagggaggaaacaggccaaagac

SEQ ID NO: 3826 - RNA, 64 nt, Homo sapiens
ggcagcaggcccagaaacgcacacaagaagaagaagaggaggagcaccgcacagcacggagacc

SEQ ID NO: 3827 - RNA, 83 nt, Homo sapiens
aaccccaaccgcaaccgggcaacccgaagaagaaagaagaagcaaaaacccccgaaagaacaccccaccagaccacccagcaa

SEQ ID NO: 3828 - RNA, 70 nt, Homo sapiens
gcgacgaagacaaaaccccggaaaaccgaaggaccgggcccagcaaagcggagaagagagcggaaagagc

SEQ ID NO: 3829 - RNA, 73 nt, Homo sapiens
cggagagggagcgccgccggagcgagaaaaaagcacgcagaggaaacgagcgcgcgaggagaagaaccaagag

SEQ ID NO: 3830 - RNA, 91 nt, Homo sapiens
gggcgagcgggcccgggggccggggccgcgcgcccgggccgcgaggacgaggcggcgccgccgggcgggagagcggggcccggcgcaccca

SEQ ID NO: 3831 - RNA, 52 nt, Homo sapiens
gggcagcagcccagcggcagcagaaagagcacaagggggaacaggcaaaggg

SEQ ID NO: 3832 - RNA, 72 nt, Homo sapiens
agaaaaagaagagagagacacggacaagggaaaaccagcaagaccgcaagaagaagagacaggaaaagaaga

SEQ ID NO: 3833 - RNA, 77 nt, Homo sapiens
caaggaaagccagacaccgccagagagcacaagaagaaggacacacccaggggacacaacaacgggagagcggacca

SEQ ID NO: 3834 - RNA, 77 nt, Homo sapiens
ggcggaagaccccaaagaagggagccgaagcgaggcggaaaacgaagacagcagcgacgcaccagaaacggaccgag

SEQ ID NO: 3835 - RNA, 74 nt, Homo sapiens
gacacgacgacggaaggagcagaacaaacggccaagaagggccaccccacagacgcgggacggccgcacaagcg

SEQ ID NO: 3836 - RNA, 74 nt, Homo sapiens
aacagaaagcacacgcaaaaacgggaagagaagaggaacacgaaacagccgccggcccagcagccagaaaaaag

SEQ ID NO: 3837 - RNA, 78 nt, Homo sapiens
aagcgggcgcgggaagcaaggaaagagaacgcgcccagccgcccggaccaggagagggggagacgcccaccggccgcg

SEQ ID NO: 3838 - RNA, 72 nt, Homo sapiens
aggagccagagcgcagaaagggagagggagagcgaacagagacgacccacgcgaaaggagagagacagcaga

SEQ ID NO: 3839 - RNA, 77 nt, Homo sapiens
ggcggagcccgcagaccgcagaaggccggagacaccagcaggaaccccgagaagcaggggccaaaggcgggaagagg

SEQ ID NO: 3840 - RNA, 80 nt, Homo sapiens
ggaacccaccgggggccacgcacaggcacacaaggccggcccccagcagagaagggccacgccgcccccagaaccccgac

SEQ ID NO: 3841 - RNA, 46 nt, Homo sapiens
gcagggcgcccccgcacaccacacaaagaggagaggaagaggagag

SEQ ID NO: 3842 - RNA, 75 nt, Homo sapiens
cgccccccccacgggcagccggaccgcgccagaagggggcagccacaagagggacaccggaggagaccacagaga

SEQ ID NO: 3843 - RNA, 64 nt, Homo sapiens
caaaagcagcaaaaacacagaccaggcaagccaaccgagagagccgggcccgccgcgagccgga

SEQ ID NO: 3844 - RNA, 70 nt, Homo sapiens
gaaccaccaggggacccaggccaccaccgcccagcaagaacccagaagagcggagacaaaggcacaacag

SEQ ID NO: 3845 - RNA, 76 nt, Homo sapiens
gccggggagacagcacgagccagcccgccagggggagagaaggggcggagggggcagggcagaaggaccaggggcg

SEQ ID NO: 3846 - RNA, 65 nt, Homo sapiens
ggggggcggcggggcgggaggaacgggggagcccacaggagccaggaagaaagggcaggcgagag

SEQ ID NO: 3847 - RNA, 80 nt, Homo sapiens
agccaaagaccagcgaagccccaggaacgagaaaaaaccaggagcgagcagaggggaaacaaaagaaaaagccaaggaag

SEQ ID NO: 3848 - RNA, 76 nt, Homo sapiens
gccaagcaacaacaggcccacacaggcagcaaaaggagcacgaaagaaagaagaaccggggagaccagacacaaac

SEQ ID NO: 3849 - RNA, 72 nt, Homo sapiens
gcgaccaaggaggagccgccagaacgcggaagcgagggaggagcgggagcacccgagcggaagacccggaca

SEQ ID NO: 3850 - RNA, 84 nt, Homo sapiens
gaaagaaggaaccccgaccgcagcccccgggcacgaccccggacacgggcaggcagaccgccagagcggaacgaccccagagcg

SEQ ID NO: 3851 - RNA, 77 nt, Homo sapiens
aggacagagaggagaagccagacccagggcggacaacgagaagcgcagcaacagacaacgagcaaccagaagaagga

SEQ ID NO: 3852 - RNA, 75 nt, Homo sapiens
ggcggggcggcaccggcgagccagcgccgaccggaccccagcggggacaccaccagaaggaaagcagagcaaaac

SEQ ID NO: 3853 - RNA, 74 nt, Homo sapiens
ccacacacccgacacaaagggaaaaccacaaggacgcggggaccgagcggcacaaggacggccggaaacggaaa

SEQ ID NO: 3854 - RNA, 51 nt, Homo sapiens
cggaggaggaagaagaaggaagccaaagaaggcaggacagggccgaggagg

SEQ ID NO: 3855 - RNA, 118 nt, Homo sapiens
agccaggacacggggaccgaaacagcccaccgccccagaccacgggagcagcaaccggggaaaagaggagcaggagaacaagacccaacccagaaagaggaaagaccaagagccccag

SEQ ID NO: 3856 - RNA, 74 nt, Homo sapiens
agaagacacaaaggcccaccgccaaaacagaaccaccgggagccaggaaaggacgcagaaagacccgagaagac

SEQ ID NO: 3857 - RNA, 57 nt, Homo sapiens
gcgcacacagcaagcacgagaaaggcggagccaaggccagaccaagggaaaccaccc

SEQ ID NO: 3858 - RNA, 75 nt, Homo sapiens
cggcccaacgaggcgagggcgccccaggagacgcagggagaagaaaaagcagaaaggaacagaaaacaaaagaac

SEQ ID NO: 3859 - RNA, 85 nt, Homo sapiens
gagggccaagaccgcagcacacagcaaccaaaagagcccacagggaccagggagacggaacccccggagccccaggacccgaaga

SEQ ID NO: 3860 - RNA, 80 nt, Homo sapiens
aaacccgcagaacggcgccaaacagcaaccagagggacacggcacagggacgggccaagaaccccaggaggagggaaagc

SEQ ID NO: 3861 - RNA, 73 nt, Homo sapiens
ccaagaggccccagggggaccagggaaccaggccccgggaaaaaaggcgggagcgaccccggcaggaaggcga

SEQ ID NO: 3862 - RNA, 88 nt, Homo sapiens
cgccgcccgccacacccgccgccagcgccgcgccaggacggcagccagacgagcagggccgcagcaggccgcagcgccaaagaccaca

SEQ ID NO: 3863 - RNA, 39 nt, Homo sapiens
aaccggccacgaggagggggaagggcacaaggccaaagg

SEQ ID NO: 3864 - RNA, 82 nt, Homo sapiens
gggcacaggagcaaacaggacgggaaggagacagccaaagagcggccagagaggccagccagggcagcagcaaggagaacac

SEQ ID NO: 3865 - RNA, 40 nt, Homo sapiens
cccggccccgagacagaagccgagaaggacgaaccagaag

SEQ ID NO: 3866 - RNA, 82 nt, Homo sapiens
cgccccagcccgccggcggcggcgggggccagcagcccccccgagggcgcagcaacgaggggcccaggaggacgcagggccc

SEQ ID NO: 3867 - RNA, 76 nt, Homo sapiens
ggaaaccacccacccggaaaggagaggaacaggcggcgggcgagcccaccccgcagcagcacaccagaacaaggcc

SEQ ID NO: 3868 - RNA, 83 nt, Homo sapiens
gggcccgggccccagccggcgcggggagaaggaggggcaggaaagcagcgggaccaggacaagcccaaccagggaccaggcca

SEQ ID NO: 3869 - RNA, 57 nt, Homo sapiens
caaaccgccagcgaagagcagggcagcacgccaaaggcaaagaagaaaaaagccaaa

SEQ ID NO: 3870 - RNA, 77 nt, Homo sapiens
aaaccggcgcaaagaagacaaagacgcacaccaaagcaggagccgaagaggagagaaacagagaagacaagagagag

SEQ ID NO: 3871 - RNA, 82 nt, Homo sapiens
gcccgggccagacagggcaagaaaaccccgaggagcccgccaaagccccggaccgccaagaagacagcacaccagcacaccc

SEQ ID NO: 3872 - RNA, 70 nt, Homo sapiens
cgagcccgggagcgacccgcgcaaacaaacagggccagaacgaagcacaacaggcagcgggaaaaccgac

SEQ ID NO: 3873 - RNA, 66 nt, Homo sapiens
ggcggacaagagaagccgccagcgagacgacgggaccgaaggaccccgccagagacaaccgagcgc

SEQ ID NO: 3874 - RNA, 68 nt, Homo sapiens
gggaccgaaggaagagccaccagcgacaaacaggaaaggaagccgcagacggggagaaacaagaaaca

SEQ ID NO: 3875 - RNA, 93 nt, Homo sapiens
aggcccaaacacagccaaagaaaaaaggaagaccagcagggagagccacaagaggagccaccaccccgaagacgagccacgcccagaaggcag

SEQ ID NO: 3876 - RNA, 77 nt, Homo sapiens
ggggacacgacgccccaaaccgccaggagaaaaaaggagcagggccgccccgaggagagcgacgcccgggcgcgccc

SEQ ID NO: 3877 - RNA, 77 nt, Homo sapiens
aaacggaccaccacgagcacacgcagaagggggaaagagaccgggacagaacagggcggagaacggaaaagcaccag

SEQ ID NO: 3878 - RNA, 75 nt, Homo sapiens
acccagcacaggacgaaaggacacaaaccggacccaaagcccaggaaagaagcgaggagggaaaagacaaacaaa

SEQ ID NO: 3879 - RNA, 75 nt, Homo sapiens
caaaaggaacgaaggcgggggcagaggggcgggcaaaggagaggcacaggaagcagaggcaagaaacgaaggcag

SEQ ID NO: 3880 - RNA, 60 nt, Homo sapiens
cggcgccgaaaaaaagaggagaggcgaggagaggagcaacggaaagaagaagaaaaagaa

SEQ ID NO: 3881 - RNA, 82 nt, Homo sapiens
gccccggccgggcgaccaagcggaggcgcgcggaacagcgccgaggcgacccgcccaggccccccccccggaggcagccggc

SEQ ID NO: 3882 - RNA, 77 nt, Homo sapiens
ccagggaaaggagcagagagagagagcagaaggcacccaaaaagaacaagagcagccgaggaaaaaggagccagggc

SEQ ID NO: 3883 - RNA, 83 nt, Homo sapiens
cgaagcccccgcaggaaccacaacccaaccagagcgacaacaaaggaaaaaaaaaagacagagacacagccaaaagcagacag

SEQ ID NO: 3884 - RNA, 78 nt, Homo sapiens
gacagagccagcgagcgaaccagaccaaaaacgcaacaacagacgacaagcagaccggaagaccgacggaagaccaca

SEQ ID NO: 3885 - RNA, 83 nt, Homo sapiens
aagaccccacggaaagacaccggccagcggccagagcgagcagcccaagaacacaacgcaaaagcaggagacagaaaaaagga

SEQ ID NO: 3886 - RNA, 85 nt, Homo sapiens
ccgaggccaaggggagaggcccaggcgagggaaggagcacccaggagcgaagggccgcaacgggagcgcccgccaagaggagggc

SEQ ID NO: 3887 - RNA, 80 nt, Homo sapiens
gcaggggcgcgcgaaggagcggaagaaggcaggccaaaccaccgaccagggccaccacagaagcaagaggcgaaccaaac

SEQ ID NO: 3888 - RNA, 67 nt, Homo sapiens
caccgggccaacagacgggaaagcggaggggaacaccaggccaggcgcgacggggagaccgaagaag

SEQ ID NO: 3889 - RNA, 38 nt, Homo sapiens
agagaaggcccgaggagagaacaggaacaagcagaaag

SEQ ID NO: 3890 - RNA, 59 nt, Homo sapiens
cccccgagagcgagaacagcacacaggccacccacggccgggcagaccccaagagaaag

SEQ ID NO: 3891 - RNA, 70 nt, Homo sapiens
caaaagcccgacgcccaggaggaggagaagcggagcagaacaaagggagaaaaacggaagcgaagaccag

SEQ ID NO: 3892 - RNA, 68 nt, Homo sapiens
cccagcccagaaagccggcgggaggggggcaaggagaagaccgacgaaggaagaccaaggaagaacag

SEQ ID NO: 3893 - RNA, 80 nt, Homo sapiens
caaaaaggcaacacaccagaagacgcagccacacacacgcccacgaggcaacgcccaccaagaaacagagggaggaccaa

SEQ ID NO: 3894 - RNA, 79 nt, Homo sapiens
cagcacagaaccgcccggaaaccaggcgggcacccaccccggccgagagggaaaaaggcccgacccgccaaccaccggg

SEQ ID NO: 3895 - RNA, 72 nt, Homo sapiens
caccgagagagaggacacgaaacagagaggggaaggagcccagcgacaaccgagaagaaggcacacaagaac

SEQ ID NO: 3896 - RNA, 89 nt, Homo sapiens
cacagccaagccagcagccgggcaaggaggggaggcgagaacacgaggagagcagacgaagaaagagaagcagaacgaagaaggaaaaa

SEQ ID NO: 3897 - RNA, 74 nt, Homo sapiens
gccgcccgcagcaagacgcgggcgcgcgaggacggaaaaccagacgagagacagaagacgaaagggcaagaaag

SEQ ID NO: 3898 - RNA, 68 nt, Homo sapiens
gaggcaaaacgagagggaagacaaggccgcagcacagccaccaaaacggagaagagagaaaacgacca

SEQ ID NO: 3899 - RNA, 67 nt, Homo sapiens
aagccacccgacgagagcaacccaggggaggacggaaagaaaagaccaaacgaaagaagcagaggca

SEQ ID NO: 3900 - RNA, 79 nt, Homo sapiens
ccgcaagaaaacaagcagccgcacgacgcacggcccaggaccgcacaagccaggagacgacaaggcgggcagggggagc

SEQ ID NO: 3901 - RNA, 84 nt, Homo sapiens
gcggaggcgccgcccggggccccgcggcgcaggaggcggggagcgcagagcgggcgagcgcggccaagccgacgccagcgggcg

SEQ ID NO: 3902 - RNA, 76 nt, Homo sapiens
gacggcccagcaggcggggaagagaaaggacggaccagagacgcagccaccacgacagcagggacaggcccccagg

SEQ ID NO: 3903 - RNA, 68 nt, Homo sapiens
gcccgcgggccggcccggcacagggaccgggcgggcagccgagcccgggggaggcgagcacgcaagcg

SEQ ID NO: 3904 - RNA, 82 nt, Homo sapiens
gaccacaccccaaaaaggagcccacagcaccacaaggcacacaggaccagggacaggcgcaccccggcaccaaggacccccc

SEQ ID NO: 3905 - RNA, 72 nt, Homo sapiens
agagaggccaaagaacccggacaccagacaggccagaccgacgaagagccggaaggaaaaaccagaagagaa

SEQ ID NO: 3906 - RNA, 76 nt, Homo sapiens
ggaaaaaaagagaaagccaaaaaggcccagacacagaaaggcagaacccaagagccaaaggacggaggaagagaag

SEQ ID NO: 3907 - RNA, 53 nt, Homo sapiens
ccgacgcgagccgccggagcgaacgaacagcggagcagagaagagcaaagaga

SEQ ID NO: 3908 - RNA, 78 nt, Homo sapiens
cgggcaggggacgccggccacccacgccccccccggggggccacaggcccggacacagggcagcggacagggacgagg

SEQ ID NO: 3909 - RNA, 73 nt, Homo sapiens
cagaaacgggggcccccgagaaggagaggagccccacagaaccaggaaaggcccgagccaaaagacccagaga

SEQ ID NO: 3910 - RNA, 57 nt, Homo sapiens
ggagaaagagcccaggagagcagaggaagagaagcggagagccaggagaagaaagac

SEQ ID NO: 3911 - RNA, 77 nt, Homo sapiens
ggcgacgcgcacgcgcggcgcgccacgacagcccgaagacgagcagcgcgaacaggccacgaaagaaagccccggaa

SEQ ID NO: 3912 - RNA, 112 nt, Homo sapiens
agcacgggccgagagccgcccgggccagcggccgcgcacccccggccggaggcaccagcggggagaggcaccagcaacagaccaaccgcagcaagcacagagacaggaagcc

SEQ ID NO: 3913 - RNA, 78 nt, Homo sapiens
caggacacccaggacccacggaaacccgaagaggggagaaaaggaacaagaaaacaacggaggaacaggagcaccacg

SEQ ID NO: 3914 - RNA, 79 nt, Homo sapiens
cgaagagaccgaagacagaaagacaaagggagacggacccgccgagcgccgaacgcccagaaaagccaagccagcaggg

SEQ ID NO: 3915 - RNA, 75 nt, Homo sapiens
gagcccccggccaccgcgaccacaagaacagacacgggacacccagacaaaccaagagggacaggggacgcgagg

SEQ ID NO: 3916 - RNA, 72 nt, Homo sapiens
cccgcccagccccggagagcgggaacaggagcgcagcgagcacggccacaagaccacccagcccaccgcgcg

SEQ ID NO: 3917 - RNA, 81 nt, Homo sapiens
caccaccaacacacacgacaaacccacgccacaccgggcacgaggagacggaggagaagccaccccaccacccaccagaag

SEQ ID NO: 3918 - RNA, 77 nt, Homo sapiens
gcaaaaaagggacgcaagaagaaccaccagacacgggggcgccaaacggacaaaacaggacaaagacgcgaggccga

SEQ ID NO: 3919 - RNA, 68 nt, Homo sapiens
aacgagagacagaaacaccgaaggcaagccgaccacaaagggcagcgcaagaccccgcacggaagcag

SEQ ID NO: 3920 - RNA, 66 nt, Homo sapiens
agagaaaacagagaaacgcccaagcacagaaagagaaggcagaacagaggaagaccagaaacccag

SEQ ID NO: 3921 - RNA, 79 nt, Homo sapiens
cgaccacaagccacaggcacccagggaagagcgggccaacaaaagaccacacagggaaacgaccagggagagaccaaca

SEQ ID NO: 3922 - RNA, 57 nt, Homo sapiens
agaaggacgacgcagccacagcgaggagcgaggaaaaaccgcccccaaccggccccg

SEQ ID NO: 3923 - RNA, 72 nt, Homo sapiens
ccgcgcgcgcgcccccgcgcgcccccaggccgggagagacagcgcggagaccacccagccggcgaaacacaa

SEQ ID NO: 3924 - RNA, 92 nt, Homo sapiens
caccgacggagacggccggggccagggcgcccccgcaggggaccggaggacccccaacgccccacagaggaggggcggcaggccacggggac

SEQ ID NO: 3925 - RNA, 76 nt, Homo sapiens
acgagcagaaagaagccagcggaaagcaagagagaagaaaaacccagccacggcaggaccaacaaccagcaaagga

SEQ ID NO: 3926 - RNA, 73 nt, Homo sapiens
cgccaccgggaaggcggggaggaggccccaaagggcgagcccagaaccgggacaacccagcaaacaggccaga

SEQ ID NO: 3927 - RNA, 75 nt, Homo sapiens
cgaaggaggcagaaggacagcccccaaggcccccacagagagcacacaaacaaagcgaaaccacggaagaaaagg

SEQ ID NO: 3928 - RNA, 77 nt, Homo sapiens
gggggaccgcggcgcaggacgccgacacgggccgcgccagcccacagacacacccaaagcagcccacacagggcaga

SEQ ID NO: 3929 - RNA, 63 nt, Homo sapiens
acgcccaacgcaacgaacaccccaagagaacgccacgaaagacggccacaggaacggggccca

SEQ ID NO: 3930 - RNA, 66 nt, Homo sapiens
cagcccaccacccacacggccacagcgcccagggcccagggaaacccagacgacaaggaaggccaa

SEQ ID NO: 3931 - RNA, 69 nt, Homo sapiens
cgcagggcccacgacgagacaaaacagcagaccagaggcccaggccccgcacggcagccgccagccagc

SEQ ID NO: 3932 - RNA, 79 nt, Homo sapiens
aaggaggaaccagcacccacagggagggggccaagcaccccaggagagaagcagaagagggacacccagagcaacaaac

SEQ ID NO: 3933 - RNA, 57 nt, Homo sapiens
gcgaggcagcggcggccgccgaggaggaacagaaagacaacggacaaggcaggaaga

SEQ ID NO: 3934 - RNA, 86 nt, Homo sapiens
acgaggaggcggacccccggcgcagcgcaagggccacacggggagcgcgcaagaacggacaggcgcgagcaccgggcgacccgaca

SEQ ID NO: 3935 - RNA, 91 nt, Homo sapiens
ggcggacccggagagccccggaggagcggagagcgagcggcaacccggagcaccacccagccgggcccagcccccgagcaggcagcccccg

SEQ ID NO: 3936 - RNA, 59 nt, Homo sapiens
ccaaaacagcgccgcgcacgaggggaggccgcccagacgggccacgacgccccgggcgc

SEQ ID NO: 3937 - RNA, 72 nt, Homo sapiens
ccgccccgaggggaaggccagaccaggagaacgggacacgaaggaaagcagagaaagcaagagacgcaaccg

SEQ ID NO: 3938 - RNA, 84 nt, Homo sapiens
aggaaaccagcaacgaagaagacaggccaacccagcgaacaaaaagagccggagccaagacagccccggaggaagaagagcacc

SEQ ID NO: 3939 - RNA, 71 nt, Homo sapiens
ccagcggcagcagaaagagcaaggccaagggagagaaacaacgaaggcaaagacagcgccgaggaagaaga

SEQ ID NO: 3940 - RNA, 67 nt, Homo sapiens
accccacgaccggacgcccacgaccccagcaggggaagacacagcgagaagaggccaccagaaaacg

SEQ ID NO: 3941 - RNA, 70 nt, Homo sapiens
aggcacaacacagcagagaccgagggaacccacccccacccaggaagcgggagaggccacccgcccacga

SEQ ID NO: 3942 - RNA, 79 nt, Homo sapiens
cggcgcgcgcgcccgccgccccgcccacgaggagcacagccgggccgcgcgaagaggcccacgcggaccggcagcgcca

SEQ ID NO: 3943 - RNA, 75 nt, Homo sapiens
cgcccggacccgcggcaccgcgccccacgccgagggacgccagccgacagcacccaacaaccccaccaacgagca

SEQ ID NO: 3944 - RNA, 84 nt, Homo sapiens
cgggcggaggccgccaagacggcccagcagcaaagaaaccggaaacacgcgcaacaacccagaaaggagcaagaggaaacaaga

SEQ ID NO: 3945 - RNA, 73 nt, Homo sapiens
gccaacaccaccggcacaggacggccagagggcgggagcgaccccggcaggaaggcgacccaggagaggacga

SEQ ID NO: 3946 - RNA, 56 nt, Homo sapiens
ggccccgccagcccccggcggaaaggcggcaaggaagaggcccggaaagggaaaaa

SEQ ID NO: 3947 - RNA, 67 nt, Homo sapiens
cgacccaccacaccacgggcggccccagaaggcgaccggcccgaggaccgccgcacgaccaaacgca

SEQ ID NO: 3948 - RNA, 110 nt, Homo sapiens
gacgcgccggggccgcccccccgcacggacccagaaccagccgggcggcgcggcggcccgcaggagaccaagacacaccaccccagggggggcccaaccaccaggacgaa

SEQ ID NO: 3949 - RNA, 71 nt, Homo sapiens
gcaaagcccacagaggccaaggcaagccagagaacacccgccgcgcaaaaggaaaccgccagaagcgcggc

SEQ ID NO: 3950 - RNA, 53 nt, Homo sapiens
gcgagaccggcgcagcacagagaaaaaaccagcgagaaacgggaccagggaag

SEQ ID NO: 3951 - RNA, 83 nt, Homo sapiens
aagggacccggaggaccagaaacgaggaggaagaggggccaaccggaccgcccccaacaaccagcaaccacccgaagaccaag

SEQ ID NO: 3952 - RNA, 72 nt, Homo sapiens
ggacccaaagggcgcagcgcagccgccccacggagggcacgcagggcaggcacgacgagagagcgaaaagcc

SEQ ID NO: 3953 - RNA, 54 nt, Homo sapiens
acgcaccagcagccaccaggagcccgagagagaaggggaccaccaggaagaccg

SEQ ID NO: 3954 - RNA, 58 nt, Homo sapiens
gagcccccgaggccccagaacaccggcacaacgaggccccggaggaggcgaagagaga

SEQ ID NO: 3955 - RNA, 73 nt, Homo sapiens
ggcccgaaaaacggagacggagagggaaagacagggccaagcgacagggcgcccgaaaacaccgaagccagca

SEQ ID NO: 3956 - RNA, 87 nt, Homo sapiens
ggggccgcaaggccggagaaggccgccgggcccgggcaggggcggggcaacgcggaaggaagggaaaaggccgaggcacagcgggaa

SEQ ID NO: 3957 - RNA, 78 nt, Homo sapiens
gcaccgggacggaccgagaccggaccgagagcggaccgagagcgcgaaacgcacgagaagaggaaggcagggacggga

SEQ ID NO: 3958 - RNA, 45 nt, Homo sapiens
cgcgcccggaccgccgcggacacgggcgagaaccgccgcgaggcg

SEQ ID NO: 3959 - RNA, 80 nt, Homo sapiens
gaccccaggaccagacacggccggacagagggcccgccccgaaaggccacaaagggcgagacggagagacacgagagaag

SEQ ID NO: 3960 - RNA, 109 nt, Homo sapiens
acaagcccgaagccccgacccccaggaaaaccacaaggaccacccccacaaggaggaaagccacaaggaccacccccacaaggaggaaaccagcccaaggcccccaccc

SEQ ID NO: 3961 - RNA, 80 nt, Homo sapiens
gcagaggaggaaagcaccagggcaagcccacgcagcggcggggaagagaggaccacagggcaagccacaaccagacgaca

SEQ ID NO: 3962 - RNA, 73 nt, Homo sapiens
ggggcccacagaaagacacacggagacaaaccgcgccaaggcacacagagaaaaaaagggaacaaaacacagc

SEQ ID NO: 3963 - RNA, 74 nt, Homo sapiens
caacgcccccggcccgcagcccccgccggccgcccaacaccgaacaccggagcaggcgaagcgagccagggaag

SEQ ID NO: 3964 - RNA, 78 nt, Homo sapiens
gcggcgcggggcccccagaaggacgccagcggagaacgcggcaaagcgaggaaaagaccaggcacggacacggaggcg

SEQ ID NO: 3965 - RNA, 71 nt, Homo sapiens
aaaagaaagcgaccccaccggacgacgggaccgcccacccccccacgagcacaaaaaaccccacaccagcc

SEQ ID NO: 3966 - RNA, 83 nt, Homo sapiens
ggagcgcgggaagaagccggcccggggccgcggacgaggaccagcagaggccagcacgagaacccaggggccgcccagaccga

SEQ ID NO: 3967 - RNA, 61 nt, Homo sapiens
cgcgaccccggaggccggcggacaggccgcacaaaaagcgagcgacgcgcccacggaggag

SEQ ID NO: 3968 - RNA, 84 nt, Homo sapiens
gcgagccgcgaaccgagcgggcggcgggcgcgcgcaccagggggagaaacccgggaccaggggccaaaccaggcccgccacccc

SEQ ID NO: 3969 - RNA, 64 nt, Homo sapiens
caggaagaccccggaagcagcagacacccaaccccaacgcaacggggcggcacacaaggagcga

SEQ ID NO: 3970 - RNA, 74 nt, Homo sapiens
ggaaagccacgcggaaaggagccccgggaacgcaagaaggagaaggcgagcggccagacaaaggaaacaaccgc

SEQ ID NO: 3971 - RNA, 81 nt, Homo sapiens
ccggccgccaagaagaccgagagcaccacaaggccaagggcaaggagacagaaccacgaccagccgcacgccgcggacaca

SEQ ID NO: 3972 - RNA, 78 nt, Homo sapiens
aaacgaaacaaccgaaaagccacaaagggaaccaggaaaagcaggaagaaccggacccggcgaaccggaagggaccag

SEQ ID NO: 3973 - RNA, 80 nt, Homo sapiens
agcagaaaaacccccaaaacccggaacaaagcgcaaagccgaaaaacagcagcagaggaaagaaaagaccagagcaaggg

SEQ ID NO: 3974 - RNA, 67 nt, Homo sapiens
agggccagaagacaccgccagagacgccgagcaaaagcccagaagggggaccgaggagaggcaccaa

SEQ ID NO: 3975 - RNA, 47 nt, Homo sapiens
aacaaacggcaccaacgcggggacgagagccccggcacaaacggacc

SEQ ID NO: 3976 - RNA, 58 nt, Homo sapiens
ccaggacagccagggccccggaccagaaaccgaggagcgaacagcgaccggagagcag

SEQ ID NO: 3977 - RNA, 71 nt, Homo sapiens
acccggccagcgacgcaccgagaaaggaaggaaaaccgacgaagccaggacaaaaccaggcagaaccaaca

SEQ ID NO: 3978 - RNA, 75 nt, Homo sapiens
agcgggaaggcgcaggaggcaggcaggccggcgaccgagcagaggacagaagagcacagggggacgccagggggc

SEQ ID NO: 3979 - RNA, 59 nt, Homo sapiens
agaccgaacccagaaacagagggaggaagacagccagcacccagggaaaccgcagaaag

SEQ ID NO: 3980 - RNA, 58 nt, Homo sapiens
gaaaagcagcccaacgaaaaccgcgggggagaagagaaacaaagagagcagaagcccc

SEQ ID NO: 3981 - RNA, 79 nt, Homo sapiens
gaagaggaagcgacgcgaggagcgcacgaacagaaggggaggaaggaaccggcgccgagaggcaacaagggcgcgccag

SEQ ID NO: 3982 - RNA, 61 nt, Homo sapiens
gcaaacacgaacccggcgaagggacagaggaagaagaggagaagacaagagggaacgaaag

SEQ ID NO: 3983 - RNA, 70 nt, Homo sapiens
ggagaaggaccaagaaccagccaaggagaccgggagagagacgaaggacgcgcaggggcagcagacacgg

SEQ ID NO: 3984 - RNA, 84 nt, Homo sapiens
cggaaacagggcccacacaggaacaggcaaggagagacaagagagacaccccaaccgacaaagagcaccagacagccgggaacg

SEQ ID NO: 3985 - RNA, 62 nt, Homo sapiens
gacggccccgggaaggagacaccacggaaagaggcgaaaagacagaggcagcacaaaggaac

SEQ ID NO: 3986 - RNA, 65 nt, Homo sapiens
acccggccccaagccggaagaaccgcagccgagcggggccggccacagaacaacgcaaacgccca

SEQ ID NO: 3987 - RNA, 73 nt, Homo sapiens
caggcgaagccaaagcagcacgcgaggaggaaaggcaccccaccaggcccacggagccagaccacaaaagagc

SEQ ID NO: 3988 - RNA, 72 nt, Homo sapiens
cgaggaccggcgggagagagagcgcccagaaagccagggggggaaaaaaacacaacggacggagaaaggaca

SEQ ID NO: 3989 - RNA, 81 nt, Homo sapiens
gcgccacaagcagcaggccaaggagacagaacagacagaaaaaacaacaagaaacccacaaccaagagaaccaccagaagg

SEQ ID NO: 3990 - RNA, 51 nt, Homo sapiens
ggaaaacgccggccgaacagcccacgccaagagagggccaccagcggcggc

SEQ ID NO: 3991 - RNA, 80 nt, Homo sapiens
gggccgggggcccgggccgggccggggcgcggaccgggccaggcgcgaagagccaggacaaaaccaggcagaaccaacac

SEQ ID NO: 3992 - RNA, 110 nt, Homo sapiens
cccaaagcgcgggaaacaggcggagccgcgcccgggccaccccgaggaagcacagggagagagaaagagcgcagaaggcaccaccacaggcaacacaaggaggcacagaa

SEQ ID NO: 3993 - RNA, 81 nt, Homo sapiens
ggagcaggcggagcgagaggacgggagcaggcgcagaacagcggagagccgaaaaccagccccgcccacacacaccaacag

SEQ ID NO: 3994 - RNA, 73 nt, Homo sapiens
aacaagacaacgagcgaaagcgaaaaacagcgaccagaggccgaacaaacgcaagaaaccggccccagaacaa

SEQ ID NO: 3995 - RNA, 89 nt, Homo sapiens
gggacggggacaagaagaggggagaaggcggaagccaggacaagagacaccaggcgccgagaaggccagcagagaaacaggcaggagag

SEQ ID NO: 3996 - RNA, 60 nt, Homo sapiens
ccgggcagcaaggagggacccgaacccacgacacggccgggagccaggaaggggagcagg

SEQ ID NO: 3997 - RNA, 49 nt, Homo sapiens
ccagacgagcccagggggcacgcggaaacggggagacagggaacgcgcg

SEQ ID NO: 3998 - RNA, 118 nt, Homo sapiens
ccgccagagagcgcgcccaggggccccgagaacggcggcagccggggccccccggagcggccaggccagcgacggccggaagggaagcgggaccaccccccggaccaagcagacaccg

SEQ ID NO: 3999 - RNA, 64 nt, Homo sapiens
gggaaaagaacagaacccaggagcacagcagcgaagcagcagacgcggagaaaccaccgacaaa

SEQ ID NO: 4000 - RNA, 82 nt, Homo sapiens
cagcagagagcagcaccccacccgccggacgacgaccggacacaagcagaccggggaaggagacgggcagaccagaccggag

SEQ ID NO: 4001 - RNA, 81 nt, Homo sapiens
agaacccaacacagggaaaggaaccgcggacagcaaaacaggcagcagacgccagcggccggagcccggagaaggcggaag

SEQ ID NO: 4002 - RNA, 60 nt, Homo sapiens
aggcagggagaccagacggggaggggcccagcagggccccgggaccaaggacacgcagac

SEQ ID NO: 4003 - RNA, 74 nt, Homo sapiens
gcggaaccaccggcgcagcacagcgacggaacgaggcgcgacacaccagcggagcgggggaacccccccgggca

SEQ ID NO: 4004 - RNA, 74 nt, Homo sapiens
aaacaaaggacccacgcaaagccagcgacccaaagggagacgaaagagaccgccagcagacagacccacccccc

SEQ ID NO: 4005 - RNA, 109 nt, Homo sapiens
gagacagacagcaacgaaggggcaacaccccggaaacacgacaagccaaagcaagacaaaaagcgagcccgagaacacagggcgcggcagcgaaacagcagagaaggaa

SEQ ID NO: 4006 - RNA, 54 nt, Homo sapiens
acgcaggcaccccggccccagccccaaaagcacgcacgaaaccggcaagccagc

SEQ ID NO: 4007 - RNA, 91 nt, Homo sapiens
ccaccgacaaggccagagaaagaacaccaaccaaagcgccaaagaaaagaccagcaaccagggcaagagccagggacacggaagagaaaca

SEQ ID NO: 4008 - RNA, 71 nt, Homo sapiens
ccccccccccagccagagaggggcagaggcaacgcagcaccgaagaaccagcccacccacccgcagaaacc

SEQ ID NO: 4009 - RNA, 102 nt, Homo sapiens
cgacccgcgacgccgagcacccaggcgacgcccaccaagcggggagcagggaggagcccggcccgcccaggaccagggaggaacaccaggacagggagagca

SEQ ID NO: 4010 - RNA, 81 nt, Homo sapiens
ggggcccgggaccacaggccccggcccagagagcagcgcaacgagacacagcggccccagcagaaggcaggaaaccacgag

SEQ ID NO: 4011 - RNA, 38 nt, Homo sapiens
aacgccgagaagcccaaaaggaacagaagacaccacca

SEQ ID NO: 4012 - RNA, 78 nt, Homo sapiens
ccggagaagagcgaccagccacaagaacagccgagacacaagccccaaggggaagcacccggacccgagccggagcgc

SEQ ID NO: 4013 - RNA, 85 nt, Homo sapiens
caaacaggaagcagaaacaaggagggaacaggcaagacccacaaaccaccaccaacacagaaagccagaacggccgagacaccga

SEQ ID NO: 4014 - RNA, 80 nt, Homo sapiens
aagaacaagacaggagcgaagcgaggagcagaagccagaggcggagccgggcgcccagaggcaggcgaaccgcagaagcg

SEQ ID NO: 4015 - RNA, 74 nt, Homo sapiens
gaaagccaccacaccagacccaaggaacacagcaagccgccaacaggcagaccacagaaacgaagccgggagaa

SEQ ID NO: 4016 - RNA, 84 nt, Homo sapiens
cggaggaggagaaggaaaaggagcacagccaaccggagccccaaggacaaccggggacccaggcccagaagaaaagacaccagc

SEQ ID NO: 4017 - RNA, 61 nt, Homo sapiens
gcgagccccgcaccccgagagcggagaagcccgacaaacaacagaccaaggggcggaaaac

SEQ ID NO: 4018 - RNA, 70 nt, Homo sapiens
caagaaacggagggaagagcccagcacaaggaagcccaggaaacacagaaacgagaagcacaccgaagag

SEQ ID NO: 4019 - RNA, 71 nt, Homo sapiens
aaccgggagcgaggaaccagaacgaaaagcgccagaaagcccacagggacacaagcaggcaccaccacagc

SEQ ID NO: 4020 - RNA, 75 nt, Homo sapiens
aaacgagaagcgcagaaccaacgaggggccgaaccccaggaacaaggggcaaggccacaggccccaagaaccgac

SEQ ID NO: 4021 - RNA, 121 nt, Homo sapiens
acaggcccaggaggacgacgggaccgggaccgcgcggacccggccgggagaagcagcagcgcaaggagaacacgagacccgcacaaaaccccgccccccaggccacacaggggccgagacg

SEQ ID NO: 4022 - RNA, 69 nt, Homo sapiens
aaaggccacgggaggaagacccaaaaggaaagaccacagcaagaccacgcccccagccgggggaccagg

SEQ ID NO: 4023 - RNA, 88 nt, Homo sapiens
acaggggcccccaccacccggaggagcagcccgccccgccgggggagacgacccccgccaggggccagacccaagaggacgcagaggc

SEQ ID NO: 4024 - RNA, 75 nt, Homo sapiens
cagacccaaggacggagagaagggcacaagaaccaagcaacagaagaccagccaaggaagcaacacagcagcgag

SEQ ID NO: 4025 - RNA, 72 nt, Homo sapiens
caagggaaccgggcccaggccagagaaggacaagaagccaagccgaaaggacagccagccacccaagggggg

SEQ ID NO: 4026 - RNA, 76 nt, Homo sapiens
cgacgaggcgcgggcgcgcacccgagccgcaaggacggggagaaggaacaaaagcgggcacagccccaggagccag

SEQ ID NO: 4027 - RNA, 80 nt, Homo sapiens
acccgagagccaggacgcaggaaagccaaccagacggcaccaccagcccacagagcagacagcgggacaccggaacagac

SEQ ID NO: 4028 - RNA, 72 nt, Homo sapiens
ccgcgccggcccgaccaggccccgcagacccaacggccaaacacacaggaacgccagaccccagccgaggga

SEQ ID NO: 4029 - RNA, 64 nt, Homo sapiens
ggaggaagaccaggcagaccggccagacccccaccccaggagcaacccagccccaaggccaacc

SEQ ID NO: 4030 - RNA, 76 nt, Homo sapiens
ggaccggagccccggggacgcgaaggccgacggcacacaggacgacagaaaggggagaagcagaccgcaccaggcg

SEQ ID NO: 4031 - RNA, 73 nt, Homo sapiens
aaaagaggaaaaccaaccgcacccgcgaacgaggccaaggcagagcccccacacccaggcccagcccagccgc

SEQ ID NO: 4032 - RNA, 60 nt, Homo sapiens
accaggggagagcgcgaaacgcagggcggaagaaacgggcagaacaccacggagaaggaa

SEQ ID NO: 4033 - RNA, 38 nt, Homo sapiens
cccaccccagagcaccggcacgcccacagcagggcagc

SEQ ID NO: 4034 - RNA, 76 nt, Homo sapiens
ccggccgggcaccaacgcaagagaacaacaagaccggacccaggccaagccaccaagcgacagaagggcccgagaa

SEQ ID NO: 4035 - RNA, 73 nt, Homo sapiens
gcaaccggcgacaaagaagagcagcccagaaaaaccgggagaagcggacagcaagaagcacccaagggccaca

SEQ ID NO: 4036 - RNA, 35 nt, Homo sapiens
gaagacgccgcaacagagagaggagcgagaggaag

SEQ ID NO: 4037 - RNA, 91 nt, Homo sapiens
cgggacggaccgagaccggaccgagagcggaccgagagcgcgaaacgcacgagaaggaaaaaccagaagagaaaaaacaaaggggagaggc

SEQ ID NO: 4038 - RNA, 84 nt, Homo sapiens
ggacaccggaaccgggaaaggaagaagccgagaagagagcacagaagagaggcaccaggacgagaggcaccaggacgggaggca

SEQ ID NO: 4039 - RNA, 62 nt, Homo sapiens
cccaaaacaaaacaccacgagaaaagaaaaccggagcccggagcaaaagggccgggaggaag

SEQ ID NO: 4040 - RNA, 78 nt, Homo sapiens
cacgcaaccccgcccccaggaaccgaaggaaaagcacagaaaagagacccaccaagggcagaagcgaaggccaagccg

SEQ ID NO: 4041 - RNA, 78 nt, Homo sapiens
gcccagccagagacagccacaaagggaagcaagagaaaaagaacaacgcggaccgcagcgaagcacagcagaaggggc

SEQ ID NO: 4042 - RNA, 78 nt, Homo sapiens
gaagacagggcggcgggccggacgacaaggaaaccacgccgggacgggggagaaggaaaggcagaccgagagaaccca

SEQ ID NO: 4043 - RNA, 73 nt, Homo sapiens
accgagcagccaaaaaggacacagaggccgcgcggcccaggcgggaagaggagcccccaggacccccaggccc

SEQ ID NO: 4044 - RNA, 74 nt, Homo sapiens
aggggagcgcgcggcgggcagagccgacggaccgacccaaccgaagaaagccaaaagaaaaaaaacaagaggaa

SEQ ID NO: 4045 - RNA, 94 nt, Homo sapiens
caaaacccagagagccaggacaggagagagggaagggaaacaacgacggagggaggacaggacaggagacaaggggcccggaagagaaccagcc

SEQ ID NO: 4046 - RNA, 77 nt, Homo sapiens
ggaaagggaagacacgaaaaaagagaaagggccaacgagcacgagggccagccgcacggacaggacgagaaaggaga

SEQ ID NO: 4047 - RNA, 58 nt, Homo sapiens
cgcgaacccagccagccgggccccaggcgaacgcccaggaagaagcgggcggagaacc

SEQ ID NO: 4048 - RNA, 72 nt, Homo sapiens
cgggcccggaaagcgccgcccagcagccgcaggaggaacgagagaagcgggcaggaagagagcaaagagccg

SEQ ID NO: 4049 - RNA, 77 nt, Homo sapiens
gccggcggagggaagaagacggcgaagcaccaacgccaagaacagacacaccaacagcagcagcggagcgaggccgg

SEQ ID NO: 4050 - RNA, 80 nt, Homo sapiens
cggggaccgcaggggcgcgcgaaggagcggaagaaggcaggccaaaccaccgaccagacagaagacacaccacccacgcg

SEQ ID NO: 4051 - RNA, 69 nt, Homo sapiens
ccgacggaaaaggagaagcacgggagggggcgagggcaaacagcaaccggacgacaccaccaagagcca

SEQ ID NO: 4052 - RNA, 81 nt, Homo sapiens
aaggcgccaggagaaacaaggcgaacgggagaaacgaggaggaagagaaggaccgaacacagaagaaggaacgcagagaaa

SEQ ID NO: 4053 - RNA, 72 nt, Homo sapiens
ccagcggccagcgcaggaggacgaccggggggcaggaggcacccggggcagaaacgaacggacgaagcgagc

SEQ ID NO: 4054 - RNA, 82 nt, Homo sapiens
cacagacacgccacgggcccggcccgcggggcgggggagcgggaggagccagagcacaccgcaccacggccacaggcgcccg

SEQ ID NO: 4055 - RNA, 72 nt, Homo sapiens
cgcggggacccgacgcccgcacggaccagccccgaacccgccaccaccccacggaaggccggccccccgcgg

SEQ ID NO: 4056 - RNA, 83 nt, Homo sapiens
agaccagccacggagcgaccgagcgccccacggacgaacgacaccgggccccccccggcgaggacccacgcgcagcccaagaa

SEQ ID NO: 4057 - RNA, 101 nt, Homo sapiens
aaagccaaaagaaggcccgggaaagcacaaagcaagagacagcgaggacagaaggaaggcaccgacgagagggcgcaccgcgccggagcccgaccgcgggg

SEQ ID NO: 4058 - RNA, 72 nt, Homo sapiens
acccagggggacacagcggaaaacacggaggagaagagcaggggagcagcaagccgggaaacagcgcgccca

SEQ ID NO: 4059 - RNA, 57 nt, Homo sapiens
aacggggacgagacgggccgggcgcaaccacacgcaagcaagagaaaggacagagaa

SEQ ID NO: 4060 - RNA, 78 nt, Homo sapiens
gcccaaggggcccccgggcaccccggaccgcgcagccaccgcggcccccgcggaccccacggaagaaccaaacagcgc

SEQ ID NO: 4061 - RNA, 72 nt, Homo sapiens
gcgagggagcgagcgggcagcgcgaggcccacgcggaccggcagcgccaccggaccaccagacaaggacacg

SEQ ID NO: 4062 - RNA, 73 nt, Homo sapiens
agaaacaaacagacccaacacaccaaagacggagagaaacaggaggccggaaaacgaaggagaaagacaagca

SEQ ID NO: 4063 - RNA, 33 nt, Homo sapiens
agcccggggggaaaggaaggcaaagggcaacag

SEQ ID NO: 4064 - RNA, 75 nt, Homo sapiens
ggcaaggcagcgccgaagggcgagcggaaaacgcaaaaccagaagcgcgccgacacggcccgggcagccaggagg

SEQ ID NO: 4065 - RNA, 77 nt, Homo sapiens
aagcacgccaccggcggcgggcacacagacacgcacggagggcccaacccacagcgccccaggcccgaaggaagaaa

SEQ ID NO: 4066 - RNA, 74 nt, Homo sapiens
gcgggggaccaagccgagccaaccgcgaaaggagaagacggaccaggggagacgcgcggccgagggcaaaaaag

SEQ ID NO: 4067 - RNA, 66 nt, Homo sapiens
ccggacaggggcccagcaggagaggaaagaagccaaaaagaggcccggaacgcaccggaaaaacag

SEQ ID NO: 4068 - RNA, 81 nt, Homo sapiens
caagcaaccacacagaaagagcaaaagacggacggaaccacaaacaaggcgcagaggacagacccacgaagcaagcagcgg

SEQ ID NO: 4069 - RNA, 85 nt, Homo sapiens
agagaccaagaacgcggcggagcacaggaggaacgcaggagcaagggcgcgagcgaggaggagggccgccgaccagcaggagagg

SEQ ID NO: 4070 - RNA, 88 nt, Homo sapiens
gacgacgccccgccggccaaacccccagccccggcgcccaccgcagcaaggacgccgcagcagcacccgagggacccgaggagcccac

SEQ ID NO: 4071 - RNA, 69 nt, Homo sapiens
aacgggccgaaccgggagcgaggaaccagaacgaaaagcgccagaaaggaaggagggccccggagcagc

SEQ ID NO: 4072 - RNA, 81 nt, Homo sapiens
aagaggaggagagagcggggcggagagccaccagggaggagcgaggcaaagcagaggagaacgccaagccaaccgaaaaag

SEQ ID NO: 4073 - RNA, 60 nt, Homo sapiens
ccgccgcccgcgcccgcggccggggggaaagggagcagcaccggccacacccacagcacg

SEQ ID NO: 4074 - RNA, 77 nt, Homo sapiens
gcgccgccgcccgccccagaccgcggcgaaagggcgaagacggaaagacaccagaacgaacacgcaaggagggcaac

SEQ ID NO: 4075 - RNA, 79 nt, Homo sapiens
gacgcccgccgcgcccccccccagggcggaccagggacgagcgcccccggagagggccggcccaggccaggcagagggg

SEQ ID NO: 4076 - RNA, 76 nt, Homo sapiens
gaagagcaacagggagaaacgagaaaagaagaaacccaagaaaagagcccaaggaagggcccccaagccggcaggg

SEQ ID NO: 4077 - RNA, 40 nt, Homo sapiens
gacgccaagaccacagaagcgggcagacacccagagggca

SEQ ID NO: 4078 - RNA, 84 nt, Homo sapiens
caccaccaacgcggccgacaacagccggcgccgccacgggcaacaagcgcggaacaagaccgagaaaaaggagccaggcaaaca

SEQ ID NO: 4079 - RNA, 54 nt, Homo sapiens
cgcgcagggagcaacagccaagccaaagccaagggcagggagccagcaccggcc

SEQ ID NO: 4080 - RNA, 73 nt, Homo sapiens
gacgcaggggaccagcacaggcgaagcacacagcagaggcggaccagacgggaagagcccaccccggagccaa

SEQ ID NO: 4081 - RNA, 75 nt, Homo sapiens
ggaccacaaacgccgcgcggaaggcagccaaaaggggggcaaaagcccagccagaaagggcaggaggaaccaaac

SEQ ID NO: 4082 - RNA, 77 nt, Homo sapiens
ggaaagcgcaagggcgggcagggaggacggaagggcccgcaacgaacgaacgaaccgagagaaggggaaaaaaggaa

SEQ ID NO: 4083 - RNA, 95 nt, Homo sapiens
cggcggaaaagaaaaggcaaaccgcccgcccccacaacacacagcaaagaacagcgaacgacaagaggagaggaagaagagaagaagaggaaacg

SEQ ID NO: 4084 - RNA, 74 nt, Homo sapiens
acaggaccaaacaagacagaacgagagcagaagaggcggccacccacgagccgacggcaaacgccagggagcca

SEQ ID NO: 4085 - RNA, 73 nt, Homo sapiens
aaacaaaagacagcacaaagaagccgagacaaacggcaccaagagggcaggacccgaggcgccagcagcagca

SEQ ID NO: 4086 - RNA, 70 nt, Homo sapiens
cgccccccccccggaaaaggcccacgccgggcgaggagggccgggcccgcccggaggagcgcaaccccag

SEQ ID NO: 4087 - RNA, 73 nt, Homo sapiens
aaaagaaccagacacacaaccgcgcaaaccgcaggaccggcacaagagaaaaagggccccagaccagcgacaa

SEQ ID NO: 4088 - RNA, 78 nt, Homo sapiens
cccaccagaagggccccgcaacacaggaaaacagagaaagaaggaaggagggccgaggaagcccggggcggcgacgga

SEQ ID NO: 4089 - RNA, 80 nt, Homo sapiens
gccggcgggccgcgagcccgcggggagggcaggagggcccccggacccgggagcggacccggggcgggaagcccgaggcg

SEQ ID NO: 4090 - RNA, 74 nt, Homo sapiens
cccacaccgaccaacgggaacccccaaagaaggaggagacgagcaagacagagacaggcggacaagcgcagcaa

SEQ ID NO: 4091 - RNA, 82 nt, Homo sapiens
agagcggaaaggcaaaaggacagcacaggccaaagagcaccaagagaccaccaagaagagagaagaagcgaagaaaagagaa

SEQ ID NO: 4092 - RNA, 84 nt, Homo sapiens
gccaccccgggcgcagaggccacacccacagagaacccagacaacaggacgccgccaaggcagacagcaagcgcgggcggcgac

SEQ ID NO: 4093 - RNA, 73 nt, Homo sapiens
cacccagccgcgggacgccggccggccaggcgcggcaggggcgagcggaccagcgaaaaggaacaacgaagag

SEQ ID NO: 4094 - RNA, 53 nt, Homo sapiens
gggcagcccggccgacaaccacggacgaccgaaaacccagccagacaaaagag

SEQ ID NO: 4095 - RNA, 83 nt, Homo sapiens
ccgccaagcgcggccgccgcccccgcccagacaagcagaccggaagaccgacggaagaccacaccccgagggagcccaggaca

SEQ ID NO: 4096 - RNA, 88 nt, Homo sapiens
gcaagcggcggcggcggggcagcggcggaaaccgaaggggagccaggcggcgacagcgggaggagaaagacaaaacagaggagaccag

SEQ ID NO: 4097 - RNA, 76 nt, Homo sapiens
aaagggacccaacacagaagaggcaagcggggaagcgccccagccaaagaaagagagacgggggcaccagagccag

SEQ ID NO: 4098 - RNA, 76 nt, Homo sapiens
ccccaccgagccccagacggcaagcgggacgcaacacagcaaccaaccccaggcaaaagaccggacagcgagcaag

SEQ ID NO: 4099 - RNA, 40 nt, Homo sapiens
ggccggcccaggagccgcgggccgagagacggggcgccgg

SEQ ID NO: 4100 - RNA, 62 nt, Homo sapiens
agagggacgaaagaagcgcagcggaggaaggcgagcgaacggaggaaccacgcacagaggag

SEQ ID NO: 4101 - RNA, 78 nt, Homo sapiens
gagaagcgccccagaaaggaccaaaacagggcagaagccaggaggacgacgaccaaaagggaaaggacaacgggaaaa

SEQ ID NO: 4102 - RNA, 71 nt, Homo sapiens
agacggccccgcgagccgacccgcacaggaaagacaagagaagcagcaggagcccccaggacaggcacacc

SEQ ID NO: 4103 - RNA, 57 nt, Homo sapiens
cagaggaggaggcgggaccaggcaagggccagcaaaacagcggggcgcccaaaaagc

SEQ ID NO: 4104 - RNA, 57 nt, Homo sapiens
gaaagcgcggccgacaccagaggagaagacgagcagaagagccaggccagaagaggc

SEQ ID NO: 4105 - RNA, 81 nt, Homo sapiens
cggagaaaacaacaagagaaggacagcggccaacaagaagcggaacccacaggagagaaccacccagagccgccaccaggg

SEQ ID NO: 4106 - RNA, 85 nt, Homo sapiens
agccgaccaaagacaccgaaggaggagggaacgggagccacacgacggagagcagggcggaaagcagcccaggagggaaagccaa

SEQ ID NO: 4107 - RNA, 42 nt, Homo sapiens
aagcggccaacaacacgcaccaggagcgaagaaaccgcaaag

SEQ ID NO: 4108 - RNA, 81 nt, Homo sapiens
caaagggcgagacacaccgcacccaaccaccaccaaggaaaggcagacacaagacgagcacccccgagaaaagaaagagac

SEQ ID NO: 4109 - RNA, 101 nt, Homo sapiens
ggcagccagcggcccccgcgcagccgggccccacgaggggggacggccaggccagagcgggagaagcccagaccgcgggacggcacgccaagccacacaag

SEQ ID NO: 4110 - RNA, 36 nt, Homo sapiens
aagcagccccagcagcccggcgacagagaagagagg

SEQ ID NO: 4111 - RNA, 85 nt, Homo sapiens
cacgagagcccggcccgccggggacggccccagggaaaggaccgaggcaggaaagaggccagacgcagggaccggcaccgacggc

SEQ ID NO: 4112 - RNA, 74 nt, Homo sapiens
caccccaccagacggcgccccaagaccagaaggagagcccggacccacccaccggccaacaaacccaaaggaag

SEQ ID NO: 4113 - RNA, 71 nt, Homo sapiens
ccgcccccgccccgcacaaagggagacgcgcacggaccggaaccagaacaagacgaaagacaacgagcgca

SEQ ID NO: 4114 - RNA, 74 nt, Homo sapiens
ccgcgacaagcaaaagacaagaggacgggaagcaagaagccgaagcccagaaaagggaagcaagcaggaccacc

SEQ ID NO: 4115 - RNA, 72 nt, Homo sapiens
gaaaacagccgggcagagcagcagaggagaggcccacgcggaccggcagcgccaccggaccaccagacaagg

SEQ ID NO: 4116 - RNA, 81 nt, Homo sapiens
cagagccgccaggcagaaggccccccgaacagcaggcgccaccagcccggagccggacgcgggcccgcccggacgagccac

SEQ ID NO: 4117 - RNA, 58 nt, Homo sapiens
gccaccggccgccgcccgggagggaggaacaaaacgggggaaagacacccgcaccagc

SEQ ID NO: 4118 - RNA, 66 nt, Homo sapiens
ccgcccaccagcgcccgcccccgccccgcacaacccgagcgggaagaagccgcagcaagccgcagc

SEQ ID NO: 4119 - RNA, 54 nt, Homo sapiens
gggcggggcagagcaggggccggaagcaccaggacagaacggcgaggggacggg

SEQ ID NO: 4120 - RNA, 70 nt, Homo sapiens
aaaaaacagaagaggcggcaaaaaaggggcggagaaacaacagaagaacgagcagaaagaacagaccacc

SEQ ID NO: 4121 - RNA, 78 nt, Homo sapiens
agagacgaggcggaacaccgcacagagcagccggacgccccgaccaagacaagcagaccggaagaccgacggaagacc

SEQ ID NO: 4122 - RNA, 75 nt, Homo sapiens
agggaggagacccaccagaaccccaacgggcaacaaggaggaccagaaaacgggcaacacccccagggagcgggg

SEQ ID NO: 4123 - RNA, 71 nt, Homo sapiens
acagcgcccaaccaccgaagaagaaagagaagaaacgccaggcgggaagaagaacaacagccgaggccaac

SEQ ID NO: 4124 - RNA, 105 nt, Homo sapiens
gaccggaggaggcgggggcgccggcagaggaccaggcaccaccggccccggaaggacagcagaccacagcccggcaggcccaaaaacccaaagggacagaagcac

SEQ ID NO: 4125 - RNA, 85 nt, Homo sapiens
ggcccgcccaccagcaagcgcacccagcaggaggcccaaggaacagcacagcagcgacacacggaccggagcagcccacagccac

SEQ ID NO: 4126 - RNA, 61 nt, Homo sapiens
cagcgaaggggagcccagggaagcccgggaccgaaaaaacggaaaagcaacggcgcaagag

SEQ ID NO: 4127 - RNA, 59 nt, Homo sapiens
ggcgaggcagaccggagccagaagcacagaccccaaacgaggcgggaagcgaggacggg

SEQ ID NO: 4128 - RNA, 78 nt, Homo sapiens
cagggacgagccaccagaggaaacccaccagagaaggcgcggccacccaggacccgggggaggcagcgaagaaaacaa

SEQ ID NO: 4129 - RNA, 83 nt, Homo sapiens
agggcgcaggggagaaacaaggcgccggagcagcaggacagcggccgaagccagagccggggcggcgccaggccccacacggg

SEQ ID NO: 4130 - RNA, 61 nt, Homo sapiens
gcgaaggagcggaaaccgagccagggcgagccggcgacaacagaggccaccaggcaccgga

SEQ ID NO: 4131 - RNA, 65 nt, Homo sapiens
accgggccagcgcgcagcccacaccgagcagcagccaaggggccgcaaggccaggcgcgcagagg

SEQ ID NO: 4132 - RNA, 55 nt, Homo sapiens
agcaagggccaacggaagccagagaaagaagaccggagacccgaaagaggaagag

SEQ ID NO: 4133 - RNA, 63 nt, Homo sapiens
ggaaccacagccaccccaccgcgcgccaagcaaacggggacagcgccgaccggaacagggacc

SEQ ID NO: 4134 - RNA, 78 nt, Homo sapiens
agagcgagccagcgcccggagcaagcggagccccccaagagccggaaaggaagaagagagggcgaaggaggccacaca

SEQ ID NO: 4135 - RNA, 81 nt, Homo sapiens
gggcggggcggccgaccgggagaacgcaaagccaaagaagaacgacccgaaaagagagacaaaaccagacaaagcaaaaaa

SEQ ID NO: 4136 - RNA, 82 nt, Homo sapiens
aagagccgcggacgggcggccccgggcaacgacggaaccggacacgacagggaaaggacccggccaaggcgcaacagaacag

SEQ ID NO: 4137 - RNA, 80 nt, Homo sapiens
agagcgcggaacaggacgccccgaagggaacaggcacgccccacccgccagccgagcccccgacgcagcacaaagccccc

SEQ ID NO: 4138 - RNA, 77 nt, Homo sapiens
ggcgggagaaggcgcaacgcggcgcgaacggggggccacgacgggccaaagcggagaagacacaaggcgcagcgcgc

SEQ ID NO: 4139 - RNA, 82 nt, Homo sapiens
caccaccaggaccagaggccgccacaaccgccagacaaccggagccacgccccacgaccgccagaagggccaccagaacaca

SEQ ID NO: 4140 - RNA, 68 nt, Homo sapiens
caccaagcaagcccaaaccacaccaagagcgcgaagcagaaggccgcagccaacagcaggcaggggcg

SEQ ID NO: 4141 - RNA, 61 nt, Homo sapiens
ccggaaaacccgcccaagcaacagaggagcccagagcagagcccagcaacacaacagcccg

SEQ ID NO: 4142 - RNA, 66 nt, Homo sapiens
acaagccagcagcggaagcaaccagagcccaggaagaggcgccaccgcaccagccaagacagacgg

SEQ ID NO: 4143 - RNA, 72 nt, Homo sapiens
cgcggagacaagagaaggcagaccggcgggccgcccaccacacagcgagcgggagaaggcacgacccaagcc

SEQ ID NO: 4144 - RNA, 86 nt, Homo sapiens
gcaaaccaccagggacgaagaagacaagagcaggaaaaaaccaagggcggaacaaaggaaacagcaagcccaagccacagaccaaa

SEQ ID NO: 4145 - RNA, 71 nt, Homo sapiens
aacacgcccggaggcgggaccgcaaacggccccgaggggggaagacacaaagcgaaggacgcaccggacag

SEQ ID NO: 4146 - RNA, 73 nt, Homo sapiens
cacgcccgcggggccgccacgccgcgggccccacacagcccagccaggggcacccgagggacccgaggagccc

SEQ ID NO: 4147 - RNA, 75 nt, Homo sapiens
cccgccgcccagaggacgcccaacaccacccacccaccacgggaccgacggggcggacaagcacggagacgagac

SEQ ID NO: 4148 - RNA, 63 nt, Homo sapiens
gaggccaaagcaaagaagagcagagggggagacgacagagaaggaagggacgcaaaaaggaag

SEQ ID NO: 4149 - RNA, 74 nt, Homo sapiens
caggaggcgcggaggacgccccaccgccgacgcccccagccaccagggagagaacgccgagccgcgccgcagcc

SEQ ID NO: 4150 - RNA, 92 nt, Homo sapiens
acagaggccaggcgacgcgcgcaagcaggcccccccagaagagcagcaggcgagaggcagaacccggaaagaaggaagggaccaccacaagg

SEQ ID NO: 4151 - RNA, 80 nt, Homo sapiens
acccaccgggggcagggcgcaccacgaaaacaacacagcagggaagcagaaggcaacacagcacccggcggcaaaccaaa

SEQ ID NO: 4152 - RNA, 81 nt, Homo sapiens
ccgggagaggacaagaccacgagccagaaagagaagagagcggagagaccagggccacggcccgagggacggagcagccga

SEQ ID NO: 4153 - RNA, 73 nt, Homo sapiens
ggcggcagcccgagaccgcagcaggccaaggaaaaggaacagagagagcagaaccgaaacggggaaagaccga

SEQ ID NO: 4154 - RNA, 80 nt, Homo sapiens
aaggcccgggaaagcacaaagcaagagacagcgaggacagaaggaagccgaaccgaacgaaaacggccaggcaaagcaga

SEQ ID NO: 4155 - RNA, 74 nt, Homo sapiens
aggaaccgccccgagaggaaacacccccagaagagagacagaaagagaaaagggacagagcgaggaaaaggcac

SEQ ID NO: 4156 - RNA, 67 nt, Homo sapiens
gccaccccgaggccagaccagcgagagagcccagggaccaaacgcagcgcgcacgcagccgccgacg

SEQ ID NO: 4157 - RNA, 63 nt, Homo sapiens
ccggccgcacggaggaggcccggcgcgcccaggcagaggcagcgacagagaaaaccccggagc

SEQ ID NO: 4158 - RNA, 75 nt, Homo sapiens
gagcgcaacagcagcaccagggccagagaggcagaagaccaaacagaagcgcaggacaaaacggaaagcaagaaa

SEQ ID NO: 4159 - RNA, 63 nt, Homo sapiens
caaaacagagcggaaccgaggagagagaggacaagcggagggagggcgggggcgacacaaacg

SEQ ID NO: 4160 - RNA, 61 nt, Homo sapiens
caacccgacccgacgaggcacacaaagcgggaaagggaaagccccaaagcagccgcacgga

SEQ ID NO: 4161 - RNA, 93 nt, Homo sapiens
cgcgggggggacacgcaccgacagcaccgggaacaaccgagcccccccgcagcggcccggccaggccccaccgccacaagcaggggaacaccg

SEQ ID NO: 4162 - RNA, 41 nt, Homo sapiens
gggggcggcccggccccgcaggaagaaggaccggggagaca

SEQ ID NO: 4163 - RNA, 74 nt, Homo sapiens
cgcagcagggcggaagcgggggcaccagcaccccgcaccacagccagcgcccacaggacaaacagcgaagaaca

SEQ ID NO: 4164 - RNA, 92 nt, Homo sapiens
cggagaccgggcggagccggacgagcgcggccggcccgcggggcggaggcacgggcccacaacggaaccaacgccagcaagaagagcgcagc

SEQ ID NO: 4165 - RNA, 68 nt, Homo sapiens
aaacccgcaggcaagaagacccccgggacgggaagaggccggacacaaaaaggcaccaaaagccgcac

SEQ ID NO: 4166 - RNA, 68 nt, Homo sapiens
cccaggaagaccgcggcgaggacgaggagagacggaaggacagaacggaaaagagaaaacaaagccac

SEQ ID NO: 4167 - RNA, 76 nt, Homo sapiens
gaacaacccgcgcccaggccagcgccccaggccaagagggacccacccggcgggcagcgcaagccacaggaacgag

SEQ ID NO: 4168 - RNA, 42 nt, Homo sapiens
ccagcccccccagccgacaggcagacgagagcacacaccccc

SEQ ID NO: 4169 - RNA, 75 nt, Homo sapiens
gggcaaacgccggacagccacaaagacccccagacacacacacccaacccaaaccaagaaaacccggacaaccag

SEQ ID NO: 4170 - RNA, 70 nt, Homo sapiens
aggcaccaggccagcaagaccggagcagggcagcccaggaacacagaccaccaggagccagccggccacc

SEQ ID NO: 4171 - RNA, 95 nt, Homo sapiens
cgccacgaccgggagccccgcacccgcccggccccacgggccgagacgaaccgcacaaacggacccgccccccacgccccagggcagcccaagag

SEQ ID NO: 4172 - RNA, 80 nt, Homo sapiens
cggccccaccgccgcacgccgccggggcgcggccgcccgagggcagcagaacaacgaggaagacagccccgccccccgcc

SEQ ID NO: 4173 - RNA, 52 nt, Homo sapiens
aacaagccaaaccagccaagagccaccggaacaaggcggggaaggaaaacag

SEQ ID NO: 4174 - RNA, 85 nt, Homo sapiens
gagggaacgccgcggacccggagccgcacaaaccagggccgccagaagccagccccgacaagggaccgggcgggccccgcaggaa

SEQ ID NO: 4175 - RNA, 72 nt, Homo sapiens
aaccgccgagcagagagaaacagaacgcgaacagacagaggggcgaagaaggcccagcacgacagagacccg

SEQ ID NO: 4176 - RNA, 77 nt, Homo sapiens
gagacagcgacaccaggaaggaaggaccaacgagcccacgccacggggcacggcccaggggcacgggcacagcccag

SEQ ID NO: 4177 - RNA, 34 nt, Homo sapiens
cgcaaagaccagccacgaggaaagaaagggcggg

SEQ ID NO: 4178 - RNA, 76 nt, Homo sapiens
gcaacaaaagcacccggagaggaggaaaaaaaggaccaccccaacaggaaacaagggacgcacagccaggccaaaa

SEQ ID NO: 4179 - RNA, 75 nt, Homo sapiens
caccccagacaccccggcccccaggcagcgaggagggaagcgcagccccggagccacacccaagaaggccccgag

SEQ ID NO: 4180 - RNA, 68 nt, Homo sapiens
aggccgagacgcgcgcaggccggagacaggaagagaagcacaaagaagaagaaagaaggaaaccacac

SEQ ID NO: 4181 - RNA, 65 nt, Homo sapiens
acacagcacaagaggggagaaaaccagagggagggaagagacgaagggaaaacgagaggggaaag

SEQ ID NO: 4182 - RNA, 72 nt, Homo sapiens
aagaagcagcggcagaaaacagaagccagccgccagcagggcaacaaggacccagacaaggcggggcccgcc

SEQ ID NO: 4183 - RNA, 96 nt, Homo sapiens
cgcaagccgggggccacgcaaacacggccaggaagagacaacggcaacacgacaagaagccggcccaccgcagcacaggcgcgaggaaaggcaggc

SEQ ID NO: 4184 - RNA, 72 nt, Homo sapiens
cagcaggcaagcaacacagagggcgcccaaccaaccccgacaaaagacaacccagaaaagaaaaggccaggg

SEQ ID NO: 4185 - RNA, 69 nt, Homo sapiens
agacccgcaggacaggaacaggccaaggccacggggagacacacgggaagaaaagaagaacgcccgcaa

SEQ ID NO: 4186 - RNA, 80 nt, Homo sapiens
accgaggacgggcgcgccgggccgccccaacacccagggccccaccgcagcgaggggcccaggaggagacgcgccaggga

SEQ ID NO: 4187 - RNA, 86 nt, Homo sapiens
cgaccgcgcgcccgcccggcccgcacgccaagcacggggggcaggccaccgcggagaagaagcaggcgccccccaccagccacaga

SEQ ID NO: 4188 - RNA, 76 nt, Homo sapiens
cccggaggaggcgaagcgagaggacaggccccccaggccacccaggaccagcggcacacccccccgcggcccaaaa

SEQ ID NO: 4189 - RNA, 57 nt, Homo sapiens
gcccagccacgacaggcgggcccgccaggcccccaggcccccaaacgggcggaccca

SEQ ID NO: 4190 - RNA, 83 nt, Homo sapiens
cgccgcgccgccacaggacaccagccgggcagccacaagcggccaggggcggggaacacagaggaaggacggcgggggcaggg

SEQ ID NO: 4191 - RNA, 81 nt, Homo sapiens
cccggggagacgaggggaaagacgaagaggaggagaaaaaccagcggagagagagacggaggagcaggcagcgccaacgca

SEQ ID NO: 4192 - RNA, 71 nt, Homo sapiens
cggccagccccacagcgggaaagcgaagccaacaaagaaaggaccggggcaaaacggccagaaggcccaag

SEQ ID NO: 4193 - RNA, 62 nt, Homo sapiens
ccgccaggcagcaggacggaaacccaacaacagacgccaaaaccagaggaacaaggccccca

SEQ ID NO: 4194 - RNA, 78 nt, Homo sapiens
aaagcagagaggagcggggagcaagcagggaaacacaaagaagacaccagaagggccagcaccacgacaacacggcga

SEQ ID NO: 4195 - RNA, 81 nt, Homo sapiens
gagagcacaccaggcacccgggcccagccgggaacccccacgcggccagcgaaaacgcccaggcgggggagcgggaggagc

SEQ ID NO: 4196 - RNA, 114 nt, Homo sapiens
accaggggcggacgcccaccccgccgagccaaaaaggcaggaccgccccccgagccagcagggggcagcagcaggaaggaaaagaagacggcaagaaaacagaacagaagcaaa

SEQ ID NO: 4197 - RNA, 87 nt, Homo sapiens
ccagggcccgcgggccaggagagcgccggcggacaggccgacggcgcaaggccacggcaagcaccgggagcagcagcgaagccagcc

SEQ ID NO: 4198 - RNA, 45 nt, Homo sapiens
acacagcaccccaaaacaggggaggcaagcaggggggcaaaggaa

SEQ ID NO: 4199 - RNA, 72 nt, Homo sapiens
gaagcgcgacaacacacacacagcgacagcacaagaagagagggggagcggcacgccacaggaaacacagca

SEQ ID NO: 4200 - RNA, 66 nt, Homo sapiens
gcgcccccccggggacgaggagacgcaccgccaacgcgggagagcaccaacaagcccccaaccccg

SEQ ID NO: 4201 - RNA, 76 nt, Homo sapiens
ggcagaggcacgggagaagaggaggagcggccgggggaggcaggggcgcggcaggcggcacccccgcgagcggcgg

SEQ ID NO: 4202 - RNA, 74 nt, Homo sapiens
ggagaggagcgggaaacgggagggaaccagcaacaagccgggccaaccgccccccagcagcaggcacgggcgaa

SEQ ID NO: 4203 - RNA, 86 nt, Homo sapiens
gcgcccccacgcgcgggggccacggcgcggacgccagcccgaagagccaaccacaggagggaaaccacgcaggcaaacgagaaaaa

SEQ ID NO: 4204 - RNA, 75 nt, Homo sapiens
acaccgacccgggcgcggcccccccagcgggacaaccgaggaggcccaggacagacccacgcccagacgcccgag

SEQ ID NO: 4205 - RNA, 80 nt, Homo sapiens
cagaggcggccagcgcaaggaccgggggccgacacaccggacaggccacccgaccggggccagaaacccaacacaagcac

SEQ ID NO: 4206 - RNA, 38 nt, Homo sapiens
gcccccgagggcgggaacaggccggcagaaaccaccac

SEQ ID NO: 4207 - RNA, 81 nt, Homo sapiens
ggagggaagagcgagggagaggagagacagagagaggagaaagcggccaaccccagaagagagaacagaagaagagagaaa

SEQ ID NO: 4208 - RNA, 72 nt, Homo sapiens
gagccggcaacacagcccaagaacagaagccaagagaagagcgaagaggcgggaagaaaacaccgaaggacg

SEQ ID NO: 4209 - RNA, 76 nt, Homo sapiens
gcacggagagcaacaaagccgacccaacccaagggccaaaggacacaaagcgagaagacccagcaaccagcagcaa

SEQ ID NO: 4210 - RNA, 32 nt, Homo sapiens
aggccaggccagggaggagaaaccagaggcaa

SEQ ID NO: 4211 - RNA, 57 nt, Homo sapiens
acccaggccaacagccaacacaggcacgccaggacaccgacaacacccggccggaaa

SEQ ID NO: 4212 - RNA, 75 nt, Homo sapiens
gcccagacgcggggagccgccggagcgagaagacagcaaccggaaagggccaaccggcgcacagggagcagaagg

SEQ ID NO: 4213 - RNA, 78 nt, Homo sapiens
gagaggagacccaacagacgaaaacccagggacagagccagccaaaccaggacaaccgccgccccgaaccgacacggg

SEQ ID NO: 4214 - RNA, 63 nt, Homo sapiens
aggaggaagggcagcggcagagcccaggccagggcaggacagcagcccgcaacaggccggcca

SEQ ID NO: 4215 - RNA, 57 nt, Homo sapiens
ccgccgcgggagagaggacccccccccccccccaagcaacagaaccggaagaccgga

SEQ ID NO: 4216 - RNA, 70 nt, Homo sapiens
caaccggcagcaggcgccaccaaggcaccgacaggacgacccggacaaccacccacaagcggccaggcgc

SEQ ID NO: 4217 - RNA, 76 nt, Homo sapiens
agcccccaagagcgggacacaggggaaaccaaaaccagagaagccggaacccaaggccccaccagaaaagacaaca

SEQ ID NO: 4218 - RNA, 75 nt, Homo sapiens
gaagcaggccggggccgaccgccacacagccacaacgagggggaaccaagggcggacagcccaacgacaacaaag

SEQ ID NO: 4219 - RNA, 69 nt, Homo sapiens
ccacgccgagccgacgccggggcgaggaccgacggaggcaagcggcagccacacccggagaaggagccg

SEQ ID NO: 4220 - RNA, 111 nt, Homo sapiens
cgccccgccggccaaacccccagccccggcgcccaccgcagcaaggacgccgcagcagagacagagaagacggaagaggcaaaccaccagagagcgaagaccaagaacccg

SEQ ID NO: 4221 - RNA, 86 nt, Homo sapiens
cggcgacagccaggcccggaagcgagggcggccgcgccggcccagaggcgaggggacggcggggagcgcaggacagacgcccccgc

SEQ ID NO: 4222 - RNA, 67 nt, Homo sapiens
gaacagaggcagacagaacggagaaaaccaggaagaaaggcaacggaaagcacagggcgaaaaccag

SEQ ID NO: 4223 - RNA, 52 nt, Homo sapiens
aacagagccccgaaaaggaacggaagacaacacagcgccaccgccacacacc

SEQ ID NO: 4224 - RNA, 70 nt, Homo sapiens
gaacccacaagagccccagaaaagagcaggagacagccacaacgacccagggggagaaaacacaacgggc

SEQ ID NO: 4225 - RNA, 109 nt, Homo sapiens
gaaaacagaacggaagagggaaggcacgaggaagagacaacaccagagggccccagagaaagcagggaaggcaaccacagaaccagagacaagccacagcgaaagaaag

SEQ ID NO: 4226 - RNA, 82 nt, Homo sapiens
gcggcggagagcggccgcgggcgacgggccgaggcaccagaaccgaggccacaaagccaggaagcacaaccccgggggcagg

SEQ ID NO: 4227 - RNA, 67 nt, Homo sapiens
gggaccgggaggggcgaaggcgggcggcagaggcgacaggcggcggccggggcagcgccgcgagcca

SEQ ID NO: 4228 - RNA, 66 nt, Homo sapiens
gccgccaccaccgggaggcaaagcgggacagggagaaaacgggccggaggaaaagggcggcagggg

SEQ ID NO: 4229 - RNA, 69 nt, Homo sapiens
gggggacagggggacggacacgcccagccccgggcacggaaagaagcacacagcaaaaccaggacgaaa

SEQ ID NO: 4230 - RNA, 72 nt, Homo sapiens
aaggaggaaccaacaacaacacaaacaagggcaaaaaaagacccagaagcccaaccaagggcagaaggaaag

SEQ ID NO: 4231 - RNA, 80 nt, Homo sapiens
ccgggcgcccgcccggcgccagcgagaacgagcgaagaaggaaaaaaaggaacggaaccgaacagaagaaagagaagacc

SEQ ID NO: 4232 - RNA, 57 nt, Homo sapiens
cgggccacacgggcggagagcgcgccgcccagcacagagaaaaaggagagacaaaca

SEQ ID NO: 4233 - RNA, 79 nt, Homo sapiens
agcggcagaccagacgcacacaaagccaggcggcaggcgcgcagcccagagaggacgacaggagcacaagacccgaaga

SEQ ID NO: 4234 - RNA, 68 nt, Homo sapiens
accaggcggcgcaagagacaaagccagcccagaacaaagcaggccacggaaggagcacacaaaacaag

SEQ ID NO: 4235 - RNA, 80 nt, Homo sapiens
ggcggcggggcggaggggaggaaggggacgcaggggccaacccgaaccacccaacaaccccgcggcgccgggcgggagag

SEQ ID NO: 4236 - RNA, 52 nt, Homo sapiens
aacagacgggaccgaaagacgacaaaccggcgaccacacacggggacgacgg

SEQ ID NO: 4237 - RNA, 73 nt, Homo sapiens
gcgacacaaacaaaaggaaaccccggggcagcggggggcgaagaggcggcccccaaccaagggaacaagccaa

SEQ ID NO: 4238 - RNA, 80 nt, Homo sapiens
gaacgggaagaagcagggaaaaagaaaacagccaaagccaaccccaggcacgagaaaaaaagacaggaaggagagcgcca

SEQ ID NO: 4239 - RNA, 74 nt, Homo sapiens
cccagaagacacccccagggcagaaaagcgaccaggcgagggcaggaaaggagggcgaaacacaagcaccaccc

SEQ ID NO: 4240 - RNA, 77 nt, Homo sapiens
cccccagcccgccgccgccccgccgcggcgcacccgccccgcgccgcagacggcaccgaagccgcacccggccacgg

SEQ ID NO: 4241 - RNA, 80 nt, Homo sapiens
ccccccccgcccgggcccgcgcaacccgccagaggccacccacacagaaagccagggccggagggagaacagagcggccc

SEQ ID NO: 4242 - RNA, 74 nt, Homo sapiens
gccaacccaaaaccaaccaagaaagcgcaagaaaaacccacccaccgagccccgacccagggccacgcaccacc

SEQ ID NO: 4243 - RNA, 67 nt, Homo sapiens
cacggagcaaagaaggacccacaggggaggaacccgcaccaggcccaggccgcgcccccccggaccg

SEQ ID NO: 4244 - RNA, 74 nt, Homo sapiens
agacaggcagaccggggcacagccagggcgccacaggaaggcaaaccacgcggagggggagaacgcaggagcgc

SEQ ID NO: 4245 - RNA, 59 nt, Homo sapiens
gcagaacccagcgaaggacgcgaccaacaagacggggggagccggggcaaccgggcacc

SEQ ID NO: 4246 - RNA, 39 nt, Homo sapiens
ccaaaaggcaaggcacaaggcgaccaacgacgaagagca

SEQ ID NO: 4247 - RNA, 113 nt, Homo sapiens
gcaacgcccgccggggagccaagaggcaggcccgagggccccccggggccccccgggcaaggacccaggaagccacccgcagaggggcaaggagaaagggcaaacgcagcaca

SEQ ID NO: 4248 - RNA, 83 nt, Homo sapiens
gggacccggccccggcccacaggggggggcaaacccgagagaacggggaagcccagaggcacggggcagaacaccaacagagg

SEQ ID NO: 4249 - RNA, 80 nt, Homo sapiens
cagcccccggcgccaccagcagccaaaggccaggcaagacccgcccgccaagcgagcaggaaaggccagcacagaagaac

SEQ ID NO: 4250 - RNA, 67 nt, Homo sapiens
gaaggcaaagaccccagcaccacagaaaaaagacaaaagcacccagacaaaaaccggcaagagacaa

SEQ ID NO: 4251 - RNA, 79 nt, Homo sapiens
gaagaggcgaaaacagaaaaaaaacggaaacagacggaggacaccaggaaccagaaggcccagacaggggccagcaagg

SEQ ID NO: 4252 - RNA, 67 nt, Homo sapiens
cagcgacgcaccgagaaaggaaggaaaaccgacgaaaggagaccaagcccagccagagggcaccagg

SEQ ID NO: 4253 - RNA, 71 nt, Homo sapiens
gaccagccccggcgggagcccccaaaagaccgagaagaaaaaggagagacaaacaggcagaagaaaagaaa

SEQ ID NO: 4254 - RNA, 67 nt, Homo sapiens
ggagggcgaccgagccggaggggccacacgcggacccggagggaccagacgggcgccacaggcgacg

SEQ ID NO: 4255 - RNA, 115 nt, Homo sapiens
caaaccacagggacccagacaccgggcagagcaggaaggaaccgcggaaacacgaagagaccaccccgcaaccgggggcggcccgccgggggcaccccaggccgcagccccggcc

SEQ ID NO: 4256 - RNA, 81 nt, Homo sapiens
gacacggggaagcgcaaaaacaagacggggcgccccacagaggggcgacgggacggaccggacccagacacggccacccca

SEQ ID NO: 4257 - RNA, 80 nt, Homo sapiens
agcaagcgggacagagggaaagggaccaagcccaaagaggagaaagagccaaggcaccaagagaagaacaaggagaaaag

SEQ ID NO: 4258 - RNA, 65 nt, Homo sapiens
aacaccacaaacaccggagcccagaggacagaaccccagcccagagccaacaccccacaagaaaa

SEQ ID NO: 4259 - RNA, 66 nt, Homo sapiens
gaccagaccggggggaaaggcggcgcgcagagacgaaccgggagaagggagaggaacacagaaagc

SEQ ID NO: 4260 - RNA, 75 nt, Homo sapiens
gagacaggcagcacaagcaggggaaaagaaacaaacaacaagaagaaggacaaggaacgaaggcaaggaggcggg

SEQ ID NO: 4261 - RNA, 79 nt, Homo sapiens
acaaaggcaggggcgccagggcaccagacgggcgggaaagagaggcccgcccaagaagagaaaggagcggacaacaaag

SEQ ID NO: 4262 - RNA, 79 nt, Homo sapiens
gaaaaaagaaaccgagaacggaaggcagaaagggccagagccagacccgggaggagccccccaaggcgggaacggaggg

SEQ ID NO: 4263 - RNA, 84 nt, Homo sapiens
gggggcgcgccgccgcccgccccagaccgcggcgaaaggaaaaagaggaaccagcgggccggggccacaccaaacccagcacgg

SEQ ID NO: 4264 - RNA, 63 nt, Homo sapiens
ccccaggccgcaaaacagaccaaacccaagaaggcagaagccagccccgcaggccgccacccg

SEQ ID NO: 4265 - RNA, 82 nt, Homo sapiens
gcgggccgggagcggacgcggggaggaagccgcagcagccagaggagagcggagcgaagaggggagggagacacccaggcag

SEQ ID NO: 4266 - RNA, 78 nt, Homo sapiens
ggcaggcacagccagggcagccacagggacccaagccaccgaacggaccccgccacccaaaacaaggaacaccagccc

SEQ ID NO: 4267 - RNA, 73 nt, Homo sapiens
aggcgggaagagccccagcacagagggaccgggagccgcaccaacgcaacccccaggaccgggcagacggcgg

SEQ ID NO: 4268 - RNA, 53 nt, Homo sapiens
gagagacaacccacccagaggccggcaaacggagccgacaggaacgaagaggg

SEQ ID NO: 4269 - RNA, 77 nt, Homo sapiens
agaaggcacagagcggccgcgccagcgagaagaagacggcacgggacccccagcacaggcagcaggccgggagagaa

SEQ ID NO: 4270 - RNA, 65 nt, Homo sapiens
aggacacgaaaggaggaaagcaagaaaagccccccaaagcggcggcaacacccagcacacaaagg

SEQ ID NO: 4271 - RNA, 78 nt, Homo sapiens
gcgcaggaaccccccaaacgcaaaagccgccccaaggaggcagcacggcaggagacgaggagaggacagcaggacacc

SEQ ID NO: 4272 - RNA, 65 nt, Homo sapiens
gaccgggcaagggaagaaaagccagaacacaaggacagaaaagaggaaaaaacggaccgcaaaca

SEQ ID NO: 4273 - RNA, 70 nt, Homo sapiens
gggggcggcggcccccagcggaggcggaggagagcggcagcggagagccgcccgaccaaccggcacggaa

SEQ ID NO: 4274 - RNA, 80 nt, Homo sapiens
ggcccccaccacccggaggagcagcccgccccgccgggggagacgacccccgccagggaccagaagcagcagccccagaa

SEQ ID NO: 4275 - RNA, 47 nt, Homo sapiens
gaaagaggacaacagacgcaaggcaacaaggaacgaggacaaccacc

SEQ ID NO: 4276 - RNA, 72 nt, Homo sapiens
aaccagcagcggcaaagacccgacagggacagcggcaccacccaaaagaaaaggcccacggcgggcccccac

SEQ ID NO: 4277 - RNA, 65 nt, Homo sapiens
cccccccggaggcggcgggcggaggcggcgggggccggccgcgcgaagacgcggaccacggccac

SEQ ID NO: 4278 - RNA, 72 nt, Homo sapiens
accccccacgcaccgcacaacaagaggccggcggggcgacagggggacaacagcccaagcccagccggggac

SEQ ID NO: 4279 - RNA, 78 nt, Homo sapiens
ggaccgggacacgaaaacccagagacaagggaggcgaggacggacaaaaggaaacggacgggaggccagccagcagaa

SEQ ID NO: 4280 - RNA, 73 nt, Homo sapiens
cgagaggagcgaagggggccagaggcaacgggccccgcaggccaggcgagggcagacaccccaggagcggggg

SEQ ID NO: 4281 - RNA, 54 nt, Homo sapiens
aaacaggcagaaaacaacggaagccgcagaaggaccggccagaagcaagccgga

SEQ ID NO: 4282 - RNA, 83 nt, Homo sapiens
ccggggcggcggaggcgcacgagcgggaccgcgagcagcgcgggcggcagcccgggggaagcggaagcagagacacaacaaaa

SEQ ID NO: 4283 - RNA, 58 nt, Homo sapiens
ccccgcccagccacccaagaagcgggaccacagggccacgcacaagccgcagaagaca

SEQ ID NO: 4284 - RNA, 80 nt, Homo sapiens
aacgacccaccggaaggggacgaggaaggaaacaggaaccaggcagaaacgagggcaaaggagggcccaaaaaaggcccg

SEQ ID NO: 4285 - RNA, 88 nt, Homo sapiens
ggcgaggggacggagccggacaggagccgccgccgccaacaggcagacggcagaaaacagacgaagcaacagcgaacaaaaaagggac

SEQ ID NO: 4286 - RNA, 81 nt, Homo sapiens
caagcacgaaaaagcaacaacagccacgacaaccaagccgaggccggcaaaccgggcacgagaaagaagaagaggaggaag

SEQ ID NO: 4287 - RNA, 73 nt, Homo sapiens
gcaaaaacaagacggggcgccccacagaggggcgacgagcccggaggcagaggcgccacaccacgcaaagagg

SEQ ID NO: 4288 - RNA, 88 nt, Homo sapiens
agcacagaagagcgaggagaacgacaaaccccaccccgggccaagccaacacaccaaccccaaggaacgacgccccaacccaggcacc

SEQ ID NO: 4289 - RNA, 83 nt, Homo sapiens
gccaaggccaaagcacagaccgaggaaccgcggacccgagcggcacacaaccagaggaggccacggagccgccgcgcccaggc

SEQ ID NO: 4290 - RNA, 80 nt, Homo sapiens
accccgaaaacggaagcgcagggagaaggaagaggggaaaagggcagaggcgagagccccgaaggaaacaagggaccagc

SEQ ID NO: 4291 - RNA, 70 nt, Homo sapiens
gaggaggggaagccggacccgccagagggacgcagacacccacgaacgccacaggaccgcaaacccgaag

SEQ ID NO: 4292 - RNA, 40 nt, Homo sapiens
caggaagcccccgcggaccgaaagagaagaccgggaggac

SEQ ID NO: 4293 - RNA, 76 nt, Homo sapiens
aacgcagcgaggacagaaacacaagcgagggaagcagaaagagaaggaaggcagacaacgacaaaccacaagaagg

SEQ ID NO: 4294 - RNA, 75 nt, Homo sapiens
cacccaccgcccacacacgcccaccgggcaggacaccagcagccgcaacggcacacacgcccgccaccaccccag

SEQ ID NO: 4295 - RNA, 82 nt, Homo sapiens
gcgcagacggcgccgacagacgggcacaggaaggcgccgggcccccccggaagcaccaaacacaggagcgaacgcgacccag

SEQ ID NO: 4296 - RNA, 75 nt, Homo sapiens
caaaccacaaaaacaacaaggccaccaaacgagagcagccaacgagagggacaccagggggaaaacaggaaacga

SEQ ID NO: 4297 - RNA, 72 nt, Homo sapiens
cggcggccggaggagcggcgcgcgcgcgcgcgcggggccccgcagagccagcagaggccaaggcagcagcga

SEQ ID NO: 4298 - RNA, 80 nt, Homo sapiens
cgaacacacgccgccaccgggaggcccagggaaggacccaaagacaggaccacgcaccagcagagaaggaaagcaaaccg

SEQ ID NO: 4299 - RNA, 73 nt, Homo sapiens
gggagggaagccgcgcccacgaaaacaagagaggggcggaccccacggcgggcggaagaagcaagaaggcccc

SEQ ID NO: 4300 - RNA, 70 nt, Homo sapiens
acccagaacagcagcgacaggacagaaacagaagcggggaacaagaagagacgcaggggcacagcagaaa

SEQ ID NO: 4301 - RNA, 80 nt, Homo sapiens
gcaggagccgcaggagaaaacgcagcccgggcacacggccagacagagacaggggccaggccaggggcaggggaagcacc

SEQ ID NO: 4302 - RNA, 86 nt, Homo sapiens
agaaaaccgaaagggaagaaggcgcggggcaggagcgacagaggagggaaacgcggagccaggccgagaggaacggcaagaacccg

SEQ ID NO: 4303 - RNA, 79 nt, Homo sapiens
cgcgggccggcgcccgcgcgcgggaagaggcggaacaggcaccaagccggcggggcggaggacacgagcccagccaggc

SEQ ID NO: 4304 - RNA, 80 nt, Homo sapiens
caacagccaggggccccagcagccgaccgaacaacggggcccgccgaggcacacaggaaaagaaccaaaaggcaacagca

SEQ ID NO: 4305 - RNA, 50 nt, Homo sapiens
aagcacgcagaggagacaggaaaaggccaaaggggaaccagaagaggcca

SEQ ID NO: 4306 - RNA, 78 nt, Homo sapiens
caagaacggccagcaaccggcccggcacgccacaaaccaagccaggaccaggaccgggccacccaccccaccagagcc

SEQ ID NO: 4307 - RNA, 69 nt, Homo sapiens
cacacgaagccagaaaaacggcgaagcgaaagcaggcaaacacaagccgggcaagcagggagaacacga

SEQ ID NO: 4308 - RNA, 84 nt, Homo sapiens
cgcaccgcaggcagacaaaagggccaaagaagggagagaggcgagaaccacgccgacaacggcggaagaggaacgggaacgggg

SEQ ID NO: 4309 - RNA, 79 nt, Homo sapiens
cggagaccaggagaccccacggagcgggcgacgagcgacccgggagacacgacgacgggccaccgcggccggagaagga

SEQ ID NO: 4310 - RNA, 80 nt, Homo sapiens
caccccggaccccacagggcagaaggagccagccacggcacccccccaaaggcacgccccaccggaggaagcaaaaaaag

SEQ ID NO: 4311 - RNA, 85 nt, Homo sapiens
ggagcaggccggcggcagggggggcggcggcgcaaggggagggcggccccagaaccccagaaggacagaaaccgaagggagaaga

SEQ ID NO: 4312 - RNA, 81 nt, Homo sapiens
agcaggacacgaaccgccagagggcggcagcggcaccacggggacgcaaaggcgacaaacgggccacaaagcacggaacga

SEQ ID NO: 4313 - RNA, 56 nt, Homo sapiens
gggaaggagagcagccagcaggagaggaagacgaggaagcagaagaacaccaagcc

SEQ ID NO: 4314 - RNA, 78 nt, Homo sapiens
ggaccaccaacacaaggaaacaaacaacaaaaacaaaagccagaaaaccccaaagcaaacgggaggcgggacagaacg

SEQ ID NO: 4315 - RNA, 75 nt, Homo sapiens
accgccgcccccccggcggcagcccccgggacagggaggccgcacagaggaggagcaccaaaccgagggagggca

SEQ ID NO: 4316 - RNA, 80 nt, Homo sapiens
gggaagcaccaaagcgcgccaagaagcgccggaaacaggccagaaagaacacgaggcccagagaaaacacacccacagaa

SEQ ID NO: 4317 - RNA, 73 nt, Homo sapiens
ccaaccgaacccagacgcagaacgcgcacaaaagaaaagcaaaggcacgaacaaagcggccagagggaaaacc

SEQ ID NO: 4318 - RNA, 80 nt, Homo sapiens
gcaaacccaagcaaagaccaaagccacagccaagagcccacggacaccacccaacggcagaaacccaacgggaacgaagg

SEQ ID NO: 4319 - RNA, 68 nt, Homo sapiens
gaggagagaaaggaccccagcagccaccgagcgaagacccgagaacaagacgccgggcaggcccccag

SEQ ID NO: 4320 - RNA, 70 nt, Homo sapiens
cgagccacgaaacacaaggaaagcgacgacgaacagcgcaaaccagcaaagaaagaaacaagaaccaaag

SEQ ID NO: 4321 - RNA, 59 nt, Homo sapiens
gcgggcgggagaacggaaaaccccaacccgacggcgccaaggggccaagccacccgcag

SEQ ID NO: 4322 - RNA, 76 nt, Homo sapiens
ggaaggacaggcaggagaggcagcaggacaaggaccaccacaggcagggaggacgggggcgggagggcgacccgag

SEQ ID NO: 4323 - RNA, 78 nt, Homo sapiens
ccgacagccgcggccgggcccgaggaccacgcaacaacgggaagggaggccaacgaagggagaggaagagaaggagcg

SEQ ID NO: 4324 - RNA, 55 nt, Homo sapiens
aagagagagaggcagccaagcaaaccagcggcgcgacgagggcggacggagggaa

SEQ ID NO: 4325 - RNA, 69 nt, Homo sapiens
accaggagccacggacaagaccaaaaggcgagagccccaacgagagagaaggcccaagacccgcagaac

SEQ ID NO: 4326 - RNA, 75 nt, Homo sapiens
aggaacaagagcaggagcagggaggacacaaaggagcggcgggaggaaccgccagccaggagccaaggaaagaaa

SEQ ID NO: 4327 - RNA, 74 nt, Homo sapiens
cggacgacagaacccggccgacccggaccaacaaccccaaggaaggaagcccacccccagaagagcgcgcaaaa

SEQ ID NO: 4328 - RNA, 81 nt, Homo sapiens
ccggacggcagcccaaacccaggaaggcagcagcggccacagcgcggccgcaggcccgcacggagacaaacgccggacgcc

SEQ ID NO: 4329 - RNA, 79 nt, Homo sapiens
gagccgggcgccacccgaggacaagaaagaaggggacaaccgaaagagccaaccaacgcacacaccgaccaccgaccga

SEQ ID NO: 4330 - RNA, 57 nt, Homo sapiens
cagaggcaaggggccaccaggaggccagggggcgccaggggaggacgcgagcggaag

SEQ ID NO: 4331 - RNA, 54 nt, Homo sapiens
caaaagcccgagacagcgaaacgggcaagaacagacccaggcccagcacgcagc

SEQ ID NO: 4332 - RNA, 77 nt, Homo sapiens
gcggacacaagcaggacgccccacacacgggaaaagccgggccacagaagcaccaccacaagccacaccaacaaacg

SEQ ID NO: 4333 - RNA, 61 nt, Homo sapiens
agagcaagacaccggacaccgagggcccccaaaagggaaagaacgccggacaacagcggcg

SEQ ID NO: 4334 - RNA, 71 nt, Homo sapiens
cagaagcgcggccaagggcggagaacggaaaagcaccaggaagcagagaggaccgcagaagggaaggagag

SEQ ID NO: 4335 - RNA, 81 nt, Homo sapiens
caacacaccaaacagcacccggcaagaagaacacagggggaagccaagcagaacaaggacaaggaagaggggagagcagaa

SEQ ID NO: 4336 - RNA, 66 nt, Homo sapiens
gggcccggccacccccacccgaggcgcagccgagccaaagaaaaagccggccagggcggaaaaagg

SEQ ID NO: 4337 - RNA, 72 nt, Homo sapiens
agcccagccgcgcagacagcagacacgaccgcaggaacagccaaccgaaaaccagggcgaaaaaagaaagca

SEQ ID NO: 4338 - RNA, 82 nt, Homo sapiens
aagcccaagcccaggccggcgaggaacccagccagcccaaccggagcccggccaaaaacaagggcggccggaggaggccaac

SEQ ID NO: 4339 - RNA, 55 nt, Homo sapiens
agcagccgccagacaagagggggacagaggagccaaaggccaaaccaccagcaga

SEQ ID NO: 4340 - RNA, 66 nt, Homo sapiens
gcggcccggcccagggcagccggacaacgagggggccaaagggcgagggcacaaaaaaccacaccc

SEQ ID NO: 4341 - RNA, 69 nt, Homo sapiens
agcgccagaaagagagagcagagaccggacaacagggccaacaaaaagggcaggggacccacaggacgc

SEQ ID NO: 4342 - RNA, 79 nt, Homo sapiens
aacaagagaggaacggagcaagaagcgacacaaggagaaaagggaaagagagggacgaaaccccagacacaagaaaacc

SEQ ID NO: 4343 - RNA, 83 nt, Homo sapiens
gaccagaagaaaccagaaaagaaagagggaaaggggaggggcgcacaaaagacgcccccgcaaaacggcccaacacgaagcgg

SEQ ID NO: 4344 - RNA, 71 nt, Homo sapiens
gggacacagaagaaaagagcaagggggaaagcaagcacagaaaacgaacgagaaacgagggagaagaagca

SEQ ID NO: 4345 - RNA, 93 nt, Homo sapiens
gaagaagcggccgagaccacaaggccacgaggagggcacgcggaggagacgaagaggaggccggcagaagaaacacacggaagcgcaagcgag

SEQ ID NO: 4346 - RNA, 78 nt, Homo sapiens
ccacccccggcgggcccgaggcggcgagagaggcaggcggagccgaccgggccagccgcccaacagcacaagaagcgc

SEQ ID NO: 4347 - RNA, 51 nt, Homo sapiens
cacgccgaccggacaggagcaggcagaaaccccagaacccagcccgcacac

SEQ ID NO: 4348 - RNA, 57 nt, Homo sapiens
gccagcgcaggggaagccgcaaggaccaacggaacaaaaaagaagccaacgggggca

SEQ ID NO: 4349 - RNA, 74 nt, Homo sapiens
aagacccacgacaccacaccacgaggggccccccggagcacccagaaacggccccccgcccgggccgagccaga

SEQ ID NO: 4350 - RNA, 75 nt, Homo sapiens
cagggaccacagcaccgaaaacaccaggaaagacaggagaccaaaaaggacacgaggaggggacggcccgccaca

SEQ ID NO: 4351 - RNA, 75 nt, Homo sapiens
agccccggaggggaccggccaaggaggacgggcaaagagagaaagaggggagcacaaacagcaacgagaagaacc

SEQ ID NO: 4352 - RNA, 78 nt, Homo sapiens
gacgcgccggcccacgcgcggccaagcagaaaaaaggccaggagacaaccagaccccggggcccagcggagcacagga

SEQ ID NO: 4353 - RNA, 77 nt, Homo sapiens
cgagacgaggccggcaacccacaggcaacgaaagcaaaccgagagcaggcgaaggccgggacccaggcccaccaccg

SEQ ID NO: 4354 - RNA, 59 nt, Homo sapiens
ccagcccaggaaaaggagaggggaggcaagcaggggggcaaaggaaagaaggcagaaag

SEQ ID NO: 4355 - RNA, 74 nt, Homo sapiens
ccacgccggaggcgccggaggaccgcccccccccaaaagcaggagcggaggggacggaaggcaaggagcgaaaa

SEQ ID NO: 4356 - RNA, 53 nt, Homo sapiens
ggcagacaaaagggccaaagaagggagagaggagagccacagcgaaacaacac

SEQ ID NO: 4357 - RNA, 66 nt, Homo sapiens
ggaccgcgaaaaaccggacgaaaagcgcgagacaagaaacaaaccaaggcaggcacggggacacaa

SEQ ID NO: 4358 - RNA, 48 nt, Homo sapiens
caaacacaggagaaaagccagggcaacacgaagagaaccgaaagccca

SEQ ID NO: 4359 - RNA, 78 nt, Homo sapiens
aaaggcccgacagcccccccgccaagagagccccggacaccgcgcggcggcccaggaaagaccacagcaagaccacgc

SEQ ID NO: 4360 - RNA, 53 nt, Homo sapiens
caggggcgacgaaaccgcagaccagaacaggggggccagagcacagcacgaga

SEQ ID NO: 4361 - RNA, 116 nt, Homo sapiens
gaaaccgagcaaaaaagaacccaggcaaagaacccacgcagcagcgcacacacaaagcgccaaggagaaggagaagcccaaggaagaagaagggagaagcccaaggacgccgcggg

SEQ ID NO: 4362 - RNA, 76 nt, Homo sapiens
acaagcccagaccggaagcaaggcgggcagaccaagcgaggaccgagccccgaacgcggggaaccaccacgcagac

SEQ ID NO: 4363 - RNA, 51 nt, Homo sapiens
ccggaaagcaggaagaggaaggacgccgccccaacagcagagacccagaag

SEQ ID NO: 4364 - RNA, 54 nt, Homo sapiens
gaagacaacgcagcggcagaaacaaggcgcaggaaccccaaacccaccagaaaa

SEQ ID NO: 4365 - RNA, 64 nt, Homo sapiens
gaacaacgccagcgggaaaggagagcgcagaggcaaggggaccaacagggcggaacagccacag

SEQ ID NO: 4366 - RNA, 69 nt, Homo sapiens
cccgcccgcacggggacgagccaccggaacccggaggacgggggcgcacgcgccgggcgcggggcgcgg

SEQ ID NO: 4367 - RNA, 77 nt, Homo sapiens
gaaagccccccaggcgaggcggcagacccacaccgaaggcagaagccaggacacgaagggagacccaggacgaaagc

SEQ ID NO: 4368 - RNA, 79 nt, Homo sapiens
gcaaaaggcggacaggcaggaccacggccgagccgggacaagccgccgcgccgaccagggagggaagggccgacagcaa

SEQ ID NO: 4369 - RNA, 73 nt, Homo sapiens
gagacgggcacaccgacaaaggcagaagcacaggcagaaccggcgacgcggcgcgcgcagcgcggcccagacc

SEQ ID NO: 4370 - RNA, 74 nt, Homo sapiens
acaaagaacagccacaccagggcccacacaacgcaaggaaagagccgggacagaccggagcggggaggagcgcc

SEQ ID NO: 4371 - RNA, 54 nt, Homo sapiens
gacggggcggggggaacgaagggaacacccgcacagaaagaccagggaaccaca

SEQ ID NO: 4372 - RNA, 81 nt, Homo sapiens
ccagcgggacagcaggcaaccccaggaaagcacagggaccccaggaccgcggcaggaaagcccgcaggacagaggaggccc

SEQ ID NO: 4373 - RNA, 66 nt, Homo sapiens
gaaaagcgcgccaaaaggacagcggcagaaagaccgaagcaaggaagaggaaccccccaaggagga

SEQ ID NO: 4374 - RNA, 77 nt, Homo sapiens
ccggaccgagagcggaccgagagcgcgaaacgcacgagaagggccccacccaaccagaagccggaacaaccggagaa

SEQ ID NO: 4375 - RNA, 81 nt, Homo sapiens
gcaccgcgcggcggcacacaacacggcgcaagcggcgcgccagagcggcacgaggcgcacaagagcagggaccccaggcgc

SEQ ID NO: 4376 - RNA, 59 nt, Homo sapiens
cccaccaccagaggcaagacagccggcaggcgccgcgcccggggagacagaaacgaggc

SEQ ID NO: 4377 - RNA, 85 nt, Homo sapiens
cgagccgagcccccgccgcgccagggccagaacgaccgagggcacggccgaggaccgccgaccaggagcagggcaaaggcaacca

SEQ ID NO: 4378 - RNA, 76 nt, Homo sapiens
agacggggcggaagaccaagacacgagagaacagcagcaaacggaggcaagcacacacggagacagggaaggaacc

SEQ ID NO: 4379 - RNA, 71 nt, Homo sapiens
agcgaagaagaggaagaacgaccagagcgacccgagcagcgcagaccccgagagcgcaaccaacccacgac

SEQ ID NO: 4380 - RNA, 71 nt, Homo sapiens
ggaaggagaaacaaaccagccgaaaagaagacgcaaggcgagcaggagcacgaaggggagaaaagggaagg

SEQ ID NO: 4381 - RNA, 81 nt, Homo sapiens
gaggagggaggaaaacaaccgagggcagaacacaaggaaagcccccaacagcgaccggcgcggcaagcacaggacaccgaa

SEQ ID NO: 4382 - RNA, 59 nt, Homo sapiens
gagggcccacggggaagcgagagaggaggccagcgacagcccaccacaggaggagcagg

SEQ ID NO: 4383 - RNA, 83 nt, Homo sapiens
gcccaccaggcacggccacccacaaaaggagacggcgaagaacagaggaacaacgccaacgacaagacgaggaccaacgccag

SEQ ID NO: 4384 - RNA, 73 nt, Homo sapiens
cggcagcaaagagggaacagcacacgggggggcccacgaccgagcggccacaagggcgccaacaaggggccaa

SEQ ID NO: 4385 - RNA, 82 nt, Homo sapiens
gggagaaccagccgacggagcaggcagcagcccagaacccgaagagcccaagcagccaagaaaaaggcaaaaaaaaagcagg

SEQ ID NO: 4386 - RNA, 63 nt, Homo sapiens
ggggggggcccgccaacgaaccacaggcgagaccgagacaagggagcaaggcaacagcacccc

SEQ ID NO: 4387 - RNA, 80 nt, Homo sapiens
cagggcagaggacagcaagggacaacagaaggaaacccgggcgaggcaaaaagcaagcaaggaagggaagaagaacgaag

SEQ ID NO: 4388 - RNA, 80 nt, Homo sapiens
gcccgggcgcggcgggcgcgcccgccagcgcccggagaacgggaaagaacgccggacaacagcggcgaagaaggcaaacc

SEQ ID NO: 4389 - RNA, 80 nt, Homo sapiens
gacgagccgggaggaacggcccggaaacaggaggacagcgccacagcagccaaacggggacgcccagagagccgaagaag

SEQ ID NO: 4390 - RNA, 74 nt, Homo sapiens
cacaaggcgcagcaggggacaagcggaaccagagccagaacggagcacgcaggaagcaaaacccacggaaggaa

SEQ ID NO: 4391 - RNA, 79 nt, Homo sapiens
ccaagagggggagggcagagagagcaaaagaagacgaccccgacgcaggccaggagccgcggacagaagccgagcacgg

SEQ ID NO: 4392 - RNA, 89 nt, Homo sapiens
cggagcgggcggccgccaccgagcggcgagcaaccgcagccccgcggccgagaggcagcgagaaaaaaggacccgggaaaagcggcacg

SEQ ID NO: 4393 - RNA, 36 nt, Homo sapiens
gcggcgcgcgacccccgcgcagacaaggggaaccga

SEQ ID NO: 4394 - RNA, 78 nt, Homo sapiens
ccacagaacccagggaccagacagaaaacaggacaaggggcccaacgcagagagaaggaagcacagcaaggaagggga

SEQ ID NO: 4395 - RNA, 84 nt, Homo sapiens
gagggggagcggccagcgagagccagggcccaaagaaccgcccaggaccgacagcagaggagcgcaagaacggagaacaccgac

SEQ ID NO: 4396 - RNA, 72 nt, Homo sapiens
cgagaagacaccccgcgacccgggccaggagcccggaggggaccgagcgcagcaccgagaggaggaaccaag

SEQ ID NO: 4397 - RNA, 71 nt, Homo sapiens
ggcgccgacggcgaccgcggcccgagagccaaggaaagaccacagcaagaccacgcccccagccgggggac

SEQ ID NO: 4398 - RNA, 63 nt, Homo sapiens
aaaccacgacgagcgaaggcagagcaacagggacacaagcaagaagaaagggaccgacagcac

SEQ ID NO: 4399 - RNA, 76 nt, Homo sapiens
gccagaaacagcaagaaaagcacaacggagcagcagacacgggacaggaagcgaaaagagacacacaacaaacaag

SEQ ID NO: 4400 - RNA, 32 nt, Homo sapiens
ccggacagccggcgggacagaaagcgggacac

SEQ ID NO: 4401 - RNA, 78 nt, Homo sapiens
gaagagacacccaagagcgaggcagcgaggcgccaagaaaacaaaagcagagaccgaggaacagagaaaagaccagag

SEQ ID NO: 4402 - RNA, 75 nt, Homo sapiens
agggaggcaggggcagaaacagagaaggaacagcgagacagcccaggaaacgagacccagaagcggggagggagc

SEQ ID NO: 4403 - RNA, 80 nt, Homo sapiens
gaccagagacacgccaagcagccagcccaggagagagcccacggcaacagcccccccagcgaccccagcacaggacacaa

SEQ ID NO: 4404 - RNA, 117 nt, Homo sapiens
ccgccaaccgcaaccagacgccagcgggacgaggaccgagaccgcggccgggaccgaggaccccaagaagaagcggaagaggagccgcggaaccaagacacaaggaacagaagacag

SEQ ID NO: 4405 - RNA, 79 nt, Homo sapiens
ccggagcccggccccggggaacagggagcgcccggcgcacagcgccaggccaggaaacgaacacacagggacgcacccc

SEQ ID NO: 4406 - RNA, 71 nt, Homo sapiens
cgcacccggggccaaagcagcagaagaagagggggagacccgcgcacacaagcggcagggccggagaagag

SEQ ID NO: 4407 - RNA, 112 nt, Homo sapiens
ccccgggacccccccggaccgagccgacgccgcggggcagcgggccggcgccggcgcggacagcaaaggcggggagacacccaagaaaacaaagaaggggcagagagcgaac

SEQ ID NO: 4408 - RNA, 89 nt, Homo sapiens
ccgggagaccggggaacgagccaaagaagagcgaagcagggcacacacacccccgagaccaaacagaaagggacccaaaggaagaacaa

SEQ ID NO: 4409 - RNA, 84 nt, Homo sapiens
aagcagccgcggagaggccccccagccagaccggggccccacccccacagacagagccacaagcacagagcagcagaagggaaa

SEQ ID NO: 4410 - RNA, 85 nt, Homo sapiens
gcagggggggcgcaccaggacacgcagagcaccagagagggacgggcaccaaaaaaggcaccacgaccaacgccacgccaccacc

SEQ ID NO: 4411 - RNA, 66 nt, Homo sapiens
acaaaccggggacccacgggccaaaaagcacagaagagccgagagaagaacaccaccagagcagac

SEQ ID NO: 4412 - RNA, 93 nt, Homo sapiens
gcggaggccgcccaggaccgaccggagccgcccaggacggcaggggaccgcacagaccgggcacagagaacagaagaagaagcggcgagcgcc

SEQ ID NO: 4413 - RNA, 78 nt, Homo sapiens
aaacaccaggcccgccaacagaaccagccgaagcaaagaccaaacagaaccaccaggcacgggaggggagagagaacc

SEQ ID NO: 4414 - RNA, 73 nt, Homo sapiens
gaaggccggaagagaaggggaaaagacgcacgcaagaggcagggagggaagcggagagacaggaaccaggggg

SEQ ID NO: 4415 - RNA, 75 nt, Homo sapiens
aaggcaccagaaccagggccaggagcaacaggcagggcacagagcgggaaggagccacaacaggaaccggagccc

SEQ ID NO: 4416 - RNA, 76 nt, Homo sapiens
agcgccggaagcagcgagggaccagacgcgaaggacgccggccaaacccaggacaaggacgcgcaggcggaacagg

SEQ ID NO: 4417 - RNA, 84 nt, Homo sapiens
aaaggaggcggggggcggagaacccgaagcacccccggcgccgggacgcccggcgaaccgaccaagaacaacacccagagggcc

SEQ ID NO: 4418 - RNA, 84 nt, Homo sapiens
gaggcggcgggaggaggcggcggccggaggccccgggggccgcggcccggccccaccaggagccagcgaggacgacacagcacc

SEQ ID NO: 4419 - RNA, 87 nt, Homo sapiens
gagagagcgcggccccaggagcaaggcgcgcaagacgcgagcaaaaagagaaaacaaagaagcaaagcccgacccacgccaccggag

SEQ ID NO: 4420 - RNA, 77 nt, Homo sapiens
acggccccggccagcccaggacaagaacaaagggcggggaccaaaacaaaacgagagcaagaggaaagaaaaagaac

SEQ ID NO: 4421 - RNA, 55 nt, Homo sapiens
cccccgggagcgggacacagaccgggaacgggcgggcgagacagagaggccacgg

SEQ ID NO: 4422 - RNA, 75 nt, Homo sapiens
agggaccacggcaccgccccagcaggaggcaaagggaccccaagaaaccaaagggcaagagccgcagcccggcag

SEQ ID NO: 4423 - RNA, 76 nt, Homo sapiens
gaacggagccagagcggccggcccccagacaggcccgggaggagccagccaacgccgaccccaaaccagaaccagc

SEQ ID NO: 4424 - RNA, 82 nt, Homo sapiens
agagaggggcgggcgcggaagccgcgcccgggcagaggacgggcgccgaccgaaggacgcgcagcaacaacagccgagcagc

SEQ ID NO: 4425 - RNA, 84 nt, Homo sapiens
caccgcaggaagccaaggagcacaggggcccgaaggccgcaggcagcccggggaggagcggagaggggaagaacaaaagcgcag

SEQ ID NO: 4426 - RNA, 76 nt, Homo sapiens
caaagccagacacagcggcgaagcgcgaggagaaaaccacaacccagagcaagaaaaggaaaaccacacagacaaa

SEQ ID NO: 4427 - RNA, 83 nt, Homo sapiens
ccccgccccggggccccggccggccaagcagacaagcagaccggaagaccgacggaagaccacaccccgagggagcccaggac

SEQ ID NO: 4428 - RNA, 81 nt, Homo sapiens
acacgcgcacaagcccaacagccagggccaggcgcagacccccaagaggagagacaggggccaggccaggggcaggggaag

SEQ ID NO: 4429 - RNA, 90 nt, Homo sapiens
gaagcgcgagcgcgacgagaaagcggagcccgcagcgggacaagcagcagccgcacaacacgaccaggacagggacgagcacggggaagg

SEQ ID NO: 4430 - RNA, 57 nt, Homo sapiens
ccgagcgcggacggccaggccccgggccaggaccgcgacgagaagagcaaaacggag

SEQ ID NO: 4431 - RNA, 123 nt, Homo sapiens
accggcggccccaccagcagacgcagccgagacaccagcccgaaacaccaccaagggagcagcagccccgagaaggaagaggaggaagcgagggcccgcgagggcgcaggaccgagggagcca

SEQ ID NO: 4432 - RNA, 39 nt, Homo sapiens
gcgcacgggcccaggggaggggaagaaacgagcgagccc

SEQ ID NO: 4433 - RNA, 59 nt, Homo sapiens
agaggaccgaacccaacccgcaggaagcgccgcacaaacacgcagaggcaagaagagag

SEQ ID NO: 4434 - RNA, 54 nt, Homo sapiens
gccgggaagcaagacccaaccagagccgcaacagaacacagacagcaggcaaag

SEQ ID NO: 4435 - RNA, 76 nt, Homo sapiens
ccagcaggaggcccacaagcagacacaccggacaagaccgacgaacacacgagaccgggaccccgacggagagaca

SEQ ID NO: 4436 - RNA, 61 nt, Homo sapiens
aggcggcgcacaggaagcacgaacaccccaccagaccacccagcaagcccacaaaaaaggc

SEQ ID NO: 4437 - RNA, 90 nt, Homo sapiens
ccgcggccacggcccccggcgcggacaagcaggagcggcgggcccacccagagggaacgccagaggccggcccaggcggaggcaaggcac

SEQ ID NO: 4438 - RNA, 78 nt, Homo sapiens
cagagacaaggacaccgagccagaagaacacgcacaggccaaaacgaacggggaaagcagaaccgaaacaggaagcag

SEQ ID NO: 4439 - RNA, 76 nt, Homo sapiens
cgaacaccacacgaccgaagaacaccaaggaggagacaacaggcacaaagagagaaggaacacccacagggcagac

SEQ ID NO: 4440 - RNA, 75 nt, Homo sapiens
agccaggccgccagccaccacgcaccccccccgcaagccacacccagggcaagccagcgacgagacaccagagga

SEQ ID NO: 4441 - RNA, 78 nt, Homo sapiens
gcacgggcggggcgcggggacccggcccggcggggcgcgcccccgcccaccccgagccacgccagcgaggggggccgg

SEQ ID NO: 4442 - RNA, 84 nt, Homo sapiens
ggcaccacgggggccccagaaaggcagaaaggcgaccaggccgcgggaagcgcggacgccccaccaacggcgcggacccgaccg

SEQ ID NO: 4443 - RNA, 72 nt, Homo sapiens
agggacagcgcaggcagcagaccgacacaaggacagagcaccaagaccgaagaaacggcacaaaagcaagga

SEQ ID NO: 4444 - RNA, 39 nt, Homo sapiens
ggaggaggagagcagcaccaacacggcggaggcaaacgc

SEQ ID NO: 4445 - RNA, 76 nt, Homo sapiens
agcggggggaaggagcgaaagagaggggacaaggagaagaaaccgccgaccagaggggagcacacaaagaagaaag

SEQ ID NO: 4446 - RNA, 86 nt, Homo sapiens
cggcgccgccgccgccgcccggccgaccagggaccgcccgccgcggcgcccgggggaggggcgaccccggggcccggccagcacga

SEQ ID NO: 4447 - RNA, 66 nt, Homo sapiens
ggggcccggagccaccacccagccgggcccgccgcaccccgcagccaacgccaagaaccaagaaag

SEQ ID NO: 4448 - RNA, 63 nt, Homo sapiens
ggggcacggccgaccgcgccgagcagcacacaaaagagggacaacacaagccacagcgcccag

SEQ ID NO: 4449 - RNA, 121 nt, Homo sapiens
aagaggggcggaaaaaagaggagagaagaaaacgcgggcacacggaaggaaggaaaccgaaacacacaagaggagggaagcaccaaacaaaccgaaaaagggaaggagaaagaaaagaggc

SEQ ID NO: 4450 - RNA, 52 nt, Homo sapiens
agcaggggagagaacacgagcaaaagcggggaaaacgacccccaggaaaaag

SEQ ID NO: 4451 - RNA, 103 nt, Homo sapiens
cccgagagaagcccgggccacccaaggcaaccgcgcaagccccaggccaagaagggacaagagggcaggagggcccgggagcggacaggggcagcagcaggac

SEQ ID NO: 4452 - RNA, 86 nt, Homo sapiens
gccgagccagacagcggaggaggaaccgaaccaggaccaggccccaagcccgaggcccagaggaggagggagcagagagcggaaag

SEQ ID NO: 4453 - RNA, 82 nt, Homo sapiens
cccggcgccccaaccccggcagccccagagccacagggagcaccggacagcacacaaaaaacagaagaagggcagccaaaac

SEQ ID NO: 4454 - RNA, 80 nt, Homo sapiens
agccagagccgcacggacccggagaagaaggcaggaaagggacacagccggcgcgagcgggaggccccagggaggagagg

SEQ ID NO: 4455 - RNA, 72 nt, Homo sapiens
gaaagccgaaaaagaaccaaaacccaacagaaaggagaaaagaggcgcggaccaggggaaggcaaaaggccc

SEQ ID NO: 4456 - RNA, 76 nt, Homo sapiens
cccacaacaggaggccccccgggacccccacccagagccaagacaagcaaacccaggaacacccggccggcccggc

SEQ ID NO: 4457 - RNA, 64 nt, Homo sapiens
ggccagcaagacccgagcccagaaggacacagacaaaagaccaggagagagcagcaaagcaccc

SEQ ID NO: 4458 - RNA, 77 nt, Homo sapiens
ggaagcaaggaacaaaccgaagaacagcgggaaagaaggcaaaacacggaaagcgaccagagaccgaggaccgcgga

SEQ ID NO: 4459 - RNA, 88 nt, Homo sapiens
ccgagagcccacccccaacgcgacggaaaggcacgaaagccagagcgaggaaaacgccacgacagacacaaccaagcaccggagaaaa

SEQ ID NO: 4460 - RNA, 74 nt, Homo sapiens
aagaccaggacccgaggcgacaccaagccaagacgcaggcagagacgacaacccggcccaagcgggggagcgcc

SEQ ID NO: 4461 - RNA, 85 nt, Homo sapiens
cagcaccaagaaagccaaagacaggcaaagacacggggaccaccagcacggacacaagaggaagcggaaaccagggccacagcac

SEQ ID NO: 4462 - RNA, 71 nt, Homo sapiens
agaaggagcccacaacaaccacagagcaaaacgcacccccaggagggacgggaaaacgcagcacagacagc

SEQ ID NO: 4463 - RNA, 74 nt, Homo sapiens
gacagggaaaggagcggggagccccgcgccacaggagccgcagaagccgccgcgggaagcaacgggaaacggag

SEQ ID NO: 4464 - RNA, 82 nt, Homo sapiens
cgacaacagggcaaaaaaagggcggaaaccgcacaggagacagaagcccagaagaaagacaggggagggccaagccgaaccc

SEQ ID NO: 4465 - RNA, 77 nt, Homo sapiens
aagcgcccggccagccggcggagcccacgacgagcggaaaagggagcagagcaagaacgggacgagacaaaaagaac

SEQ ID NO: 4466 - RNA, 77 nt, Homo sapiens
gaacccacggaggggagagacagagaacaagggcacagagcagggagacagagccggggaaacagcggaacagagga

SEQ ID NO: 4467 - RNA, 101 nt, Homo sapiens
ccgaagcggcacagagagcgaccggaacggcagaggagcgggcgagcccagaaggaaggagacccaacaccccggccagacgggccaccaggccggcgccc

SEQ ID NO: 4468 - RNA, 99 nt, Homo sapiens
cggccacggcaacccgccccaggcaagcaacagcccagccccagagagcaggaacagaacgagaaagggaacgaaccgaggaacccggccccacagggc

SEQ ID NO: 4469 - RNA, 85 nt, Homo sapiens
gcacccaaacaacaacggcaaggcaagagaccagaagccaaaagacagagccagggaacgcagaggaaggaagaagaaagaaaca

SEQ ID NO: 4470 - RNA, 75 nt, Homo sapiens
cgggcgagagagggagcgccgaaaccaggaggcacaagacacgaagagcaccccagagcgggacacagacagaaa

SEQ ID NO: 4471 - RNA, 56 nt, Homo sapiens
ccaccagccccaaaaggcggcaacaggccgacccacccaccagcagaccaaggacc

SEQ ID NO: 4472 - RNA, 63 nt, Homo sapiens
acccggagcaagcaaagcgccaaaccaaggcggcacaggcaccaagagccaaccgagggcgcc

SEQ ID NO: 4473 - RNA, 51 nt, Homo sapiens
gcccccccacccagggaaaacggaccagccagcaagaccgagcgacagaag

SEQ ID NO: 4474 - RNA, 72 nt, Homo sapiens
agaaggccggagacaccagcagagcgagggcgcggacaggacggcgagcgcccgaagggacgggcacccacc

SEQ ID NO: 4475 - RNA, 75 nt, Homo sapiens
accgcaggacccagcagcgcagcagccaaggagacaccccagcccagaggagaggaaaacgaagaaaagggaagg

SEQ ID NO: 4476 - RNA, 70 nt, Homo sapiens
cccagaaccaggccggcggcagggaagggagcaccggagaggaaagagacgcccaaccacagggcagaag

SEQ ID NO: 4477 - RNA, 75 nt, Homo sapiens
caagaagaagacagaacgcccccaccaccgcaaacaaagagacaacagccacaagggacaaaaggaagacaaggg

SEQ ID NO: 4478 - RNA, 77 nt, Homo sapiens
ggagaccgaacaaaagggggcaagaggaggagaacaaagagggaaggagaacggagccgccgcacccaggcggaggc

SEQ ID NO: 4479 - RNA, 55 nt, Homo sapiens
ccaggccgcacggacggggggggggggcccccaaagggaagccaaacacaaagga

SEQ ID NO: 4480 - RNA, 55 nt, Homo sapiens
gcaggcaggaaaacaagccagggccccacggacacaagggcgcaggccaggcagg

SEQ ID NO: 4481 - RNA, 39 nt, Homo sapiens
ccagaccgccagcccgcaggaagagagaagaacacgaag

SEQ ID NO: 4482 - RNA, 77 nt, Homo sapiens
cggggccgcaagcggacgggagacaacaccgccacgagagaaaccccagagaacacacccagggggagccgggccaa

SEQ ID NO: 4483 - RNA, 68 nt, Homo sapiens
gcgaacacaaccagagcaaaagaacagaagggagaagccacaaccaaggccaagcccaaaaacagaaa

SEQ ID NO: 4484 - RNA, 75 nt, Homo sapiens
ggagcaagcggcgcaccagggacaaaccaacaaaacacaaagacgaccggcgcacggaagaccaggagagagagg

SEQ ID NO: 4485 - RNA, 53 nt, Homo sapiens
aggagcgcaggcggaacgaccaagaagaaaaggagaggcccacacccaggccg

SEQ ID NO: 4486 - RNA, 78 nt, Homo sapiens
cacaagaacgaggcgcccccacgacccccgaaacaaagagcgcccggaaagaggcagaggaaacgagcccccgcagaa

SEQ ID NO: 4487 - RNA, 75 nt, Homo sapiens
agagcagccaccacagccagcgagcacggaccggcaaagggaacagccaaaccaggaaaggaaccagaggaaagc

SEQ ID NO: 4488 - RNA, 52 nt, Homo sapiens
acaggacacccccccccgaagcaacacccaaggggcccgagggcaggacagc

SEQ ID NO: 4489 - RNA, 40 nt, Homo sapiens
cgcgcagcggcaggggagcggggaacccagaaagccagac

SEQ ID NO: 4490 - RNA, 63 nt, Homo sapiens
gggccacccccccaggcaagggaggcggaaccaacccccggccagggaggggccgggggacga

SEQ ID NO: 4491 - RNA, 72 nt, Homo sapiens
ggccaaaaaacaacaaggaagccagacagcacaagaaaaacggggaagaaagaagagcaaggcacccgaaaa

SEQ ID NO: 4492 - RNA, 76 nt, Homo sapiens
gcagaaacgcaccaggccaaagaaagagaaacacgagaggcgagggacgacagagcaagcggcagagggcaagcgg

SEQ ID NO: 4493 - RNA, 78 nt, Homo sapiens
cgagggaagaaaaaagaagaaaagaagcaaacaagaaaaaggcaggaacaaccacaaggccacacacccccacggcga

SEQ ID NO: 4494 - RNA, 77 nt, Homo sapiens
ggcagccgccgccaccccgcggccgcacccccgccccaggcgcgagaccgcacagcaaggaaagcacccagagaagg

SEQ ID NO: 4495 - RNA, 88 nt, Homo sapiens
ccgggacgcccgcggagagagccaccccgcccacgcccacgcccccgcgccggagccccgggccagccacgacacaggacagcgccag

SEQ ID NO: 4496 - RNA, 84 nt, Homo sapiens
ggcgggcgggccgcaaagggcggggccgggcccggcgcgggccgggagcagaggccgagacccgcaggaccgggcaaagagcca

SEQ ID NO: 4497 - RNA, 73 nt, Homo sapiens
aaaccggagagccccggaagacccagggaagagaagagaacgaccgggccgagaagacagaggcccagcccag

SEQ ID NO: 4498 - RNA, 65 nt, Homo sapiens
gaagccgcaagacgcacagacaccgcacaagccccaaggagaggcagcagaaaaggccaaagcag

SEQ ID NO: 4499 - RNA, 80 nt, Homo sapiens
caaaagacaaggaagcaagggacggaggaccggagcagacgcccgggcccaaaggggcacaaaacgccccgggagagaag

SEQ ID NO: 4500 - RNA, 74 nt, Homo sapiens
aacagcagacccaagagcagcggaaaagaccagcacaggcggcgcgagaaaggaaaaggcagagaaagaaaccc

SEQ ID NO: 4501 - RNA, 73 nt, Homo sapiens
aagaggcggagcgcgggacagccgcgacacacagaaggccagcgccacccaaagaggcaagaaggcccggcca

SEQ ID NO: 4502 - RNA, 78 nt, Homo sapiens
gagccgaggcccggcggcgcaccgggcggcagcaacccggagacaaaagcacaggcaacccggaaaccagggaaaggc

SEQ ID NO: 4503 - RNA, 66 nt, Homo sapiens
cagaaaccagagagcacagaagcaaagagcagcacaccgggaaacggggcaagcagagggaagacg

SEQ ID NO: 4504 - RNA, 83 nt, Homo sapiens
gagcgggccgggaccaggacggggcgaaccgagcaccagccagagcaagacccacgaagggcacacaaaggacccaccgggaa

SEQ ID NO: 4505 - RNA, 76 nt, Homo sapiens
gggacgccccggcaacccaggggcggccacgaccaccaggcgccaggcccgcacccaaccagccaaaggaggaacc

SEQ ID NO: 4506 - RNA, 81 nt, Homo sapiens
cacgcccaagccaccagagcggcccccagcaccacagcccgcagccccgccagccacccccaggacccagggggggaccag

SEQ ID NO: 4507 - RNA, 82 nt, Homo sapiens
cgcccacgagcaaccaagaaacaccacgacagcagcagcagaggacccaggagaacccccggacgagcagaacgcaccggaa

SEQ ID NO: 4508 - RNA, 73 nt, Homo sapiens
gaccaggaacaagagagaaagagggacagccgcacggaggcgaaacacaaagggggggcagcacgccgaagga

SEQ ID NO: 4509 - RNA, 75 nt, Homo sapiens
acggagaccaggcaggcagcgggcccgaccagcccggccgcgaggacaaaaacccaggagcggggccgagaccgg

SEQ ID NO: 4510 - RNA, 75 nt, Homo sapiens
agacggcgccccaagaccaaacggacaagcagcccaggaaccacccccagcaagcagaaccccaacgagacaccg

SEQ ID NO: 4511 - RNA, 81 nt, Homo sapiens
agaagcggccagcagcccaagagagagaaggccgaacgagccaccgacacggccccgagcagaagggccgcacggagccag

SEQ ID NO: 4512 - RNA, 83 nt, Homo sapiens
ggacgcgggccgcagcgcggagcagaaagcagaacccgcagaagggggcagcggagcaaccacccccccgcgacccaccacag

SEQ ID NO: 4513 - RNA, 80 nt, Homo sapiens
cgggacggccccggcggcgcggcggcggggacgagaccggagaccggaggaacggggcgcgaaagacacggacaacgcaa

SEQ ID NO: 4514 - RNA, 42 nt, Homo sapiens
aaacccaccagcgcgaaaggacagaaggaagcaaggcaccaa

SEQ ID NO: 4515 - RNA, 72 nt, Homo sapiens
gcaccccagcgccaccgccaggacagagggagcacagccaaaacgaggagaagagccgggaaaacagagagg

SEQ ID NO: 4516 - RNA, 52 nt, Homo sapiens
gcaaacggcaaagaaacgaccagaagagagagaggagccgccggcccaggcg

SEQ ID NO: 4517 - RNA, 90 nt, Homo sapiens
aagccacggagaaaaacggccaagaggcagaccaggaaagggagacgaaacgcgagcaaacgcagaaaaagccagcaggaagaggcagca

SEQ ID NO: 4518 - RNA, 78 nt, Homo sapiens
gcggacacggagaggaaggggacacggagccaaggccccaggagacgaccgcaccgagggagggaagcagaaggacag

SEQ ID NO: 4519 - RNA, 68 nt, Homo sapiens
gaaaaggggagaacaaaggggaaaaagccacaggccacacaaccgaaaccaccacccgacaaaccaaa

SEQ ID NO: 4520 - RNA, 53 nt, Homo sapiens
gagagaacgcgagggaaggaccagaagcaccagaaacaggaagaaaaaaaggc

SEQ ID NO: 4521 - RNA, 68 nt, Homo sapiens
aagaaaagacgcaaagaggcgaaggagcacgcaagcagggaaaagggcaggaaaacacccgaaaaaaa

SEQ ID NO: 4522 - RNA, 48 nt, Homo sapiens
accggcggcccaacccaccgggcgaaaacgcaaacaagagagcggggc

SEQ ID NO: 4523 - RNA, 62 nt, Homo sapiens
cggaagcaccagcgaggaagacaccagaccagagcacgggcagcagcgccaagacaaggcag

SEQ ID NO: 4524 - RNA, 72 nt, Homo sapiens
cccaaggccgcagcaggaacagagacgccaagcccgggcccggaggcacgagacaccagaagaaagggacca

SEQ ID NO: 4525 - RNA, 83 nt, Homo sapiens
cggacacaaggacgagccgggcagaggcgaccccccgcgccagcgcacagggacaggggcaccgggaaaacgcagaggaacga

SEQ ID NO: 4526 - RNA, 69 nt, Homo sapiens
accgaggcggcgaaacgcgaaacgaaacaacacaacagggaggcacccaagacagaggaaggaaaggag

SEQ ID NO: 4527 - RNA, 99 nt, Homo sapiens
cagggaagacgccgcgccaccgagccggaccggagacggggccaacaggagcacaggcggaggcagcggaggccccgccgcgccgcagccgcccgggga

SEQ ID NO: 4528 - RNA, 72 nt, Homo sapiens
acacggccgcaaagaggagcaagaaagaaaaagaggaagaggcaccaggcaggaagaggagaggcggacgca

SEQ ID NO: 4529 - RNA, 79 nt, Homo sapiens
cccccgagagccccccaggagcgaggcccagcacccaggagggcaaacccaaggggggggaagaccaacaccccaggcc

SEQ ID NO: 4530 - RNA, 70 nt, Homo sapiens
gcagaaacaccagaaaagacaagcacgggcccagacgcagacaaacgagaagagagaagagggacagaaa

SEQ ID NO: 4531 - RNA, 58 nt, Homo sapiens
acaccaggccaacaaagcgcgggccaaaggaaaaggcaagaacggaagcacgggcgga

SEQ ID NO: 4532 - RNA, 73 nt, Homo sapiens
gacgacgggggccccggaggccgcgcggagcgaccgaaaagcagaccagcaaggacgccagaaacccgaagac

SEQ ID NO: 4533 - RNA, 64 nt, Homo sapiens
ccgcagggcggagagaccagaaaaagcagagagacgcaagagagaaaagccagaccagaagaac

SEQ ID NO: 4534 - RNA, 89 nt, Homo sapiens
ccaggccaccacagcgccccaggggcagcgggacaggcccgccagccgcagcaggacccaacgagcagcaacacaagcgagggagaagc

SEQ ID NO: 4535 - RNA, 78 nt, Homo sapiens
ccgcgccagggcgcggggccgcggccgcgcgagcagcgccgcggagacacagcaaagaagccgcccggagcagaggga

SEQ ID NO: 4536 - RNA, 91 nt, Homo sapiens
gacggcgagcgcgagcggcgcgagaaaccacgaggcggccccagcgcgggcgacaggccgacacccccagagagccgggccaagcaggcgc

SEQ ID NO: 4537 - RNA, 75 nt, Homo sapiens
agccgggagcaagaagaacacccagagacaaggccgacgcgcacgaacacgggggcaaagacagggagagaggag

SEQ ID NO: 4538 - RNA, 120 nt, Homo sapiens
cgcgaaggccgggacccggccccggcccacaggggggggcaaacccgagagaacgggagaaaaaggcagccccggagacgaaaagacaaagcaccaccaacagacgaggaacagcgaagg

SEQ ID NO: 4539 - RNA, 77 nt, Homo sapiens
cgcggacggggccgcccagggcagacacaaggaacagccagccaggagaaaaacgaacccaacagaccaccccagcc

SEQ ID NO: 4540 - RNA, 74 nt, Homo sapiens
gccagcgccgcccccgccaacaggcaggcaagaaaagcagccccaaagaaagacacaggaggaggccaagaaga

SEQ ID NO: 4541 - RNA, 75 nt, Homo sapiens
aacacgacacccgccacacccgacccgccaagaagccgcgagcaccacagagacccgccaacacccacccacccg

SEQ ID NO: 4542 - RNA, 52 nt, Homo sapiens
gaggagagaagaaaaagcagcggaagcccgccgacacagccaccaagaaggc

SEQ ID NO: 4543 - RNA, 83 nt, Homo sapiens
gcgcgagccacaaggagagcgaagcaaggcccggcgcaaggccagaccagagccacgcacacagaaacagcgagacggagggg

SEQ ID NO: 4544 - RNA, 67 nt, Homo sapiens
gaacggagcaccgcgcaaaaaaacgggccccccacccggcgccccgggccagcgggacaccagcaag

SEQ ID NO: 4545 - RNA, 74 nt, Homo sapiens
cccacggaaaaaaacacgggaccaaggaaaaggagaacgggaccgggcagaagaaaacgcaccaaggggcaaca

SEQ ID NO: 4546 - RNA, 84 nt, Homo sapiens
gagaacgccaagaggggggcccggagagggggaccggagcgaggaggaaggagacccgcccggcaccaaaggccagcgccaccc

SEQ ID NO: 4547 - RNA, 76 nt, Homo sapiens
ggggccacaaaggaccccggaacgggcgggcggcccccgggcggcgacggcggcgcgaggaccgaccgggcccgcg

SEQ ID NO: 4548 - RNA, 79 nt, Homo sapiens
cagcccccaagagccaggaacaggaaaggcagcaacaggggaagcggagggaggcaaagaagccaaaaaaaccaaaggg

SEQ ID NO: 4549 - RNA, 77 nt, Homo sapiens
gaaaccaggacagaaggagaaggagacccggaacaagcaaaggcaagaagaccaaggaagaaaaagccaggagaaaa

SEQ ID NO: 4550 - RNA, 80 nt, Homo sapiens
gcaggcaaaacaagggagaggggaccaaaagaacccagccaacccgcagagggaggggaggggcgagcggaggagagcgg

SEQ ID NO: 4551 - RNA, 77 nt, Homo sapiens
gcccacccggccaccccccagggagccgaagccaagggacggccaccccaggagaaccagggcacagcgcagcggag

SEQ ID NO: 4552 - RNA, 86 nt, Homo sapiens
cacgggccccgagcccgacccaccccccagcgagaggacacccgcggcacccccgggcagacgcagggaccgagcccagaacccgg

SEQ ID NO: 4553 - RNA, 81 nt, Homo sapiens
agaacagcgaaacaagaggccccagccaacccgaaaaccccccagcggccacagagagcacaaagagcccacccggaaaag

SEQ ID NO: 4554 - RNA, 77 nt, Homo sapiens
ccggaccgagcgcccgacccggcgagaaaagagaggccgccagcgaaaacacaagagaaccaccccaagggcagcag

SEQ ID NO: 4555 - RNA, 76 nt, Homo sapiens
aagccagacaaaaccccagacccagaacagaaaacacggggaagagaaagccaaaaagaagccaacaagccgcgga

SEQ ID NO: 4556 - RNA, 79 nt, Homo sapiens
cgaggcggcggcgcgaggcaggccacagacaagagagccccaggccaaccacggacgcaggaccccagcgacacgccag

SEQ ID NO: 4557 - RNA, 90 nt, Homo sapiens
cggcagccagcggcagggacgaccccgcgcggcccagccccgcaaagggaacaggaagcagccacggaggggacgcccagacccaccgca

SEQ ID NO: 4558 - RNA, 74 nt, Homo sapiens
cgccacgcgcccggcgcccagcccaccagcacggcagcaaagaggccggaagagcgggagcgggagccaggcag

SEQ ID NO: 4559 - RNA, 61 nt, Homo sapiens
ccggcccgcgcgcgcaccccgcggacgccacagcgcggcggaaacagcagaagagcgcggc

SEQ ID NO: 4560 - RNA, 69 nt, Homo sapiens
ggccgcgcacccccggccggaggcaccagcagaagacggaacaagaaaggaccaggagccccgggcaac

SEQ ID NO: 4561 - RNA, 76 nt, Homo sapiens
ggcggagcagggcccgacccgcagagcccggacgagggccagagcccaaagcacccagggggcgggaagcgccgac

SEQ ID NO: 4562 - RNA, 40 nt, Homo sapiens
cccagcacgggaggcgaggaggcagcagcaagcccagcgg

SEQ ID NO: 4563 - RNA, 82 nt, Homo sapiens
agagaggcggagcagaacaccaagcacgccagcaccagcacaacaaagagagcagggagagaagggggagaaaaggaacaga

SEQ ID NO: 4564 - RNA, 79 nt, Homo sapiens
acaaaggcccaagcgccgcagagacaagaccgccgaacaacgccacggagggccggaaccagcagccaagaagagggaa

SEQ ID NO: 4565 - RNA, 68 nt, Homo sapiens
cccgacgcacaaaagggaccgcaagccaagagcaccaggaacccagaagcggcagagagacggaacag

SEQ ID NO: 4566 - RNA, 78 nt, Homo sapiens
cgcgcacccccggccggaggcaccagcagagaacccgaagccccagaggagggcaccgccgagggcaccgcccaccag

SEQ ID NO: 4567 - RNA, 41 nt, Homo sapiens
ccgaggagagcggaggaggggcagaagaccgaagaagcagc

SEQ ID NO: 4568 - RNA, 60 nt, Homo sapiens
agccgaccagccgcggagccgggggcagggagcacggcccaggcagccaagaaggcagag

SEQ ID NO: 4569 - RNA, 74 nt, Homo sapiens
cgccggaacccgggccccgccagggaagaggacgaaggaggaagcggcaagaacaagacaggaaccagaaaagc

SEQ ID NO: 4570 - RNA, 76 nt, Homo sapiens
acacagaacacacaaggggaccagagaaaaagcaccccaggcacgggaacggaggccacgagcaagccagaccaca

SEQ ID NO: 4571 - RNA, 60 nt, Homo sapiens
gaaaaagcgcccgagacgggcccgccgaaagggagaaaccggaggccaggagggacaggg

SEQ ID NO: 4572 - RNA, 76 nt, Homo sapiens
aggcgagacccccgcccacgcaaacccaaagaccccgccggagacgagagaggcagcccccagagcccccaggaga

SEQ ID NO: 4573 - RNA, 76 nt, Homo sapiens
gcgaccagagaagaagggcaaacaagagagaaagcaaaacagaggagaaaaggccgaggaggagccaggaagagac

SEQ ID NO: 4574 - RNA, 97 nt, Homo sapiens
agcgaggagcccagccagaccagaccgggcacagcaaagcgaggaccagaccagccgcaagaacggcaccgaaggcaacaagaagagaagaaggacc

SEQ ID NO: 4575 - RNA, 83 nt, Homo sapiens
gcgagagcgaagccgccacccaaaccagcaaaccaggaaacccagcggcggcagaaccagccggcacaaagccgaaccagaga

SEQ ID NO: 4576 - RNA, 83 nt, Homo sapiens
gaacgccacgcgggccggcgaaagcgaaacggcgaggaaagagaggagccccggaaagaaaaggacagacccggccagaaagg

SEQ ID NO: 4577 - RNA, 69 nt, Homo sapiens
ggagggggaggagccgaacgagccccagccagggccgaggacagaagggcagcccggggacgaaggcag

SEQ ID NO: 4578 - RNA, 75 nt, Homo sapiens
agcaacgccagagcccagggcccagaggaccccagccgcgcccgggagagcaagccggaaacgaaacagcgcagc

SEQ ID NO: 4579 - RNA, 48 nt, Homo sapiens
gaggaagaagacaccggggacagacaggcgagcaggagcacgaagggg

SEQ ID NO: 4580 - RNA, 75 nt, Homo sapiens
gcccgcaccaccggaccaagccaacaacagaagggaccacagaccagcacgccggcgccacgaaccgagcgacag

SEQ ID NO: 4581 - RNA, 54 nt, Homo sapiens
cgccccgggggcgaagccaggagggaagcagagccccgggccgggaaggggaaa

SEQ ID NO: 4582 - RNA, 73 nt, Homo sapiens
gagaggcggccggaaggaaaagggaagaacagacacagcaccgacacgcgcaaaagcacgacaggaccccgaa

SEQ ID NO: 4583 - RNA, 56 nt, Homo sapiens
caacgaaaaggcaggccccagggaaggcccgaacaggggccgagaaacagggaccc

SEQ ID NO: 4584 - RNA, 72 nt, Homo sapiens
gaccccccaaccccgaggccacaccacgagcggcagggaagacccggcccggaaaggcccagagaagcgggg

SEQ ID NO: 4585 - RNA, 61 nt, Homo sapiens
ggaaccagaacgaaaagcgccagaaagaccaacagagaaaagccagaggagaagaggagga

SEQ ID NO: 4586 - RNA, 84 nt, Homo sapiens
gcagagacagccaacacggcacccacagggacaggcacaaggcagccacccgcccaggaagagaggagccaggaagagaggagc

SEQ ID NO: 4587 - RNA, 64 nt, Homo sapiens
ggagggcggagacacggggcgggccggacagcccagagcaagcacacggaggcccgggagccag

SEQ ID NO: 4588 - RNA, 77 nt, Homo sapiens
gcagcccgagggaaagccagcggagacgcgggcaccaggccgcaggaaacagcaaccaaggacagagcagcccccac

SEQ ID NO: 4589 - RNA, 90 nt, Homo sapiens
ggggccggcgggagcgcgaacgagcgacggcggaacccggggccgggacgcagcccggcggcagcagggccaaccgccccccagcagcag

SEQ ID NO: 4590 - RNA, 82 nt, Homo sapiens
ccgcacggccccccggacaggccaagggccagcagccagccgccagcagagacacaggaagcgaccgggaggaagaggagac

SEQ ID NO: 4591 - RNA, 73 nt, Homo sapiens
ggcaaagcggagagaaaggagaaacccccgcacggcacaaaacgggccacgagaaccaggccaggaaacaggc

SEQ ID NO: 4592 - RNA, 79 nt, Homo sapiens
gggcaccccacaccggaagcacagggcagaacgggaccccgacggagagacaaagaagacggagggggggccagccacc

SEQ ID NO: 4593 - RNA, 75 nt, Homo sapiens
cgcaccaaggagacaggacgaagcccaaaccacaagccacaaaagaaagccgacaagagacaacccccaaaagca

SEQ ID NO: 4594 - RNA, 81 nt, Homo sapiens
agcagcgaagaagaggcccaacccccaccccgcccaaggaggcccagcggaggccccgggggccgcggcccggccccacca

SEQ ID NO: 4595 - RNA, 81 nt, Homo sapiens
acaaagccccccggagacgcaaccaagggaaccgggcgggggacggccggcccgggcccacgaccggggggagcgagacgg

SEQ ID NO: 4596 - RNA, 82 nt, Homo sapiens
gaagggaaagggagaaacaggcacccccgaggccaacggccaccaccccgagagaggaaccacgggccccgacacggcaggc

SEQ ID NO: 4597 - RNA, 70 nt, Homo sapiens
gagacgggcggagccaggccagcggaagacgcagcaaagagaccccgcggaagacaccagaaggggcagc

SEQ ID NO: 4598 - RNA, 64 nt, Homo sapiens
cggagagcaggaagacaccgggggcccccacgccccaaggaggcccgccgacgacgaccaggcc

SEQ ID NO: 4599 - RNA, 80 nt, Homo sapiens
cagcggagggacggcaggcccaagcacgaacacaaacaccggccgaccggagcgcaacaaggcaccaccacgaggaccgg

SEQ ID NO: 4600 - RNA, 75 nt, Homo sapiens
aaccgacaaggagaaaacaagagagacgggacgggcaggcaaaccgacaccagcgacacaagcgcgagggaacca

SEQ ID NO: 4601 - RNA, 74 nt, Homo sapiens
ccgacgcaggcacccccagcgcgccggcagggcgcggggcagagcacggaggcagcagagagaggccagcaacg

SEQ ID NO: 4602 - RNA, 70 nt, Homo sapiens
gcgggaggcccggagcgcccggagccggagagccgggggccccacccgccaagggccccgccgaaagccc

SEQ ID NO: 4603 - RNA, 61 nt, Homo sapiens
acaagcagagccggcaccacaggaagccgagcagggaacccgagcagaacacagcacaaac

SEQ ID NO: 4604 - RNA, 80 nt, Homo sapiens
caggagaagaggccccagaccggacaagccccagaacggccaacgggcaggaaggaagaccgggaggaacagagaaaaga

SEQ ID NO: 4605 - RNA, 49 nt, Homo sapiens
gcaccaaggcagaaaaccccaaaagcacgcacgaaaccggcaagccagc

SEQ ID NO: 4606 - RNA, 53 nt, Homo sapiens
ggcacaaaaaccgacgagccagacacaagacacggacaggagacaaccagaca

SEQ ID NO: 4607 - RNA, 73 nt, Homo sapiens
agccaaggagaggggcggcccagcacaggaggccgaagggagaacgaaggacagcagaccacagcccggcagg

SEQ ID NO: 4608 - RNA, 83 nt, Homo sapiens
gccgccccgcgagcacagagcccgccgccgaccgccgcccgccacacccgccgccaggggcggccgagcccgggggaggcccc

SEQ ID NO: 4609 - RNA, 52 nt, Homo sapiens
gccccaaaagaaaggcagaaaaccagaaggcaccgacaggaaaggaaaagga

SEQ ID NO: 4610 - RNA, 74 nt, Homo sapiens
cacagccaagagagaccacaggcagaacggagggcacaagccaaaaagcacaaagaaggaaggcagagcccaca

SEQ ID NO: 4611 - RNA, 83 nt, Homo sapiens
cgccggacgccggccccgcgggagcaccaaaacagcggccaagggaggccgccagccgaggcgaggagcgggggagcggcgcc

SEQ ID NO: 4612 - RNA, 91 nt, Homo sapiens
cacagcgagaccgcggcgcaggaggaggaggagcaggcaaggccagcaaggaggggggccgagccggcggcggcggcggcagggggcagcg

SEQ ID NO: 4613 - RNA, 56 nt, Homo sapiens
caacccgggcccgcgcacaagaacgaggcagccggcacccgcacaacccagggggc

SEQ ID NO: 4614 - RNA, 83 nt, Homo sapiens
cccccggagcccgaagacagcaccgccagccaagggaaggagacgagacagcccgcacagagcagagcgcagccgccaggccc

SEQ ID NO: 4615 - RNA, 75 nt, Homo sapiens
gcaggagacgaggggcaacgaccgcggggaagaaggccgcgaaaccggacacaagagggcaagaaaggcgcgacg

SEQ ID NO: 4616 - RNA, 42 nt, Homo sapiens
gggcagaacacaagcgcaaagaggcgcacaaggcacgcagaa

SEQ ID NO: 4617 - RNA, 53 nt, Homo sapiens
ccagacggcaacagagggagaagcaaagcaacgccaagccaggaaccagaacg

SEQ ID NO: 4618 - RNA, 40 nt, Homo sapiens
ggcaggacccgccgcagcagcaggcgcagagacaaggaag

SEQ ID NO: 4619 - RNA, 85 nt, Homo sapiens
acggcggagaccccgaaggcgcaaacgacaccacccgaccggagaccgaggagcccaggaggaggaacccacagacccccagcga

SEQ ID NO: 4620 - RNA, 76 nt, Homo sapiens
cggaccacgggaccaagcagacaaaccaaggggcgggacaggccagggacagcccaacccagcgcgaagccagagg

SEQ ID NO: 4621 - RNA, 85 nt, Homo sapiens
agggggaaaaaacccaaggcgcaaaggagagcgcaggaaagggccgccgagagcgaggaggccccgggccccgggcccagcgccg

SEQ ID NO: 4622 - RNA, 101 nt, Homo sapiens
cacgggaaacagacccaagcggccgggcccggcagccccgacgcagccgggaagaaacgaaggaggcccaaccacaaaaggagccgacggaacccagacgg

SEQ ID NO: 4623 - RNA, 82 nt, Homo sapiens
gcacagccgcggcggcagcagcaggagagggggaagcgaagccagagagccgggccaaggacaggcacacagcacacagggc

SEQ ID NO: 4624 - RNA, 73 nt, Homo sapiens
ggccacgcagcccaaccgcccaaggacccccaccagccccaagagcgggaccacagagagacgggggcaccag

SEQ ID NO: 4625 - RNA, 41 nt, Homo sapiens
cgacccaaggacgcacggcaggccacaccacgccccgagcc

SEQ ID NO: 4626 - RNA, 71 nt, Homo sapiens
agagggaaaaaagagaggagcgaacgagacagaacaggaaaaagggaaaaccgagccaaagcagagcaaac

SEQ ID NO: 4627 - RNA, 55 nt, Homo sapiens
gccccgggcccgaggaggaacagcggggaccagagacgagggaagacagggaggc

SEQ ID NO: 4628 - RNA, 75 nt, Homo sapiens
gggcagggaagcagaggcacccacgcccacaagccggacccagcagggcccccggaacaaacccgggagccacgc

SEQ ID NO: 4629 - RNA, 99 nt, Homo sapiens
gcgagaccgcgcgcgaggagaggagcgcaacagcagcaccagggacgaaggacagagagggacgggcagacgccccgacacgcagcgaaagacaccaga

SEQ ID NO: 4630 - RNA, 70 nt, Homo sapiens
aaaagagaggagggagaacacagaaacccgccccggggcgcccccaagcccacagcgaagaagggccacc

SEQ ID NO: 4631 - RNA, 74 nt, Homo sapiens
ccggacgccggagaggcaccggaccgagcaccagaggcagcaaaggaaccaccagacgaaaaaccaggacacac

SEQ ID NO: 4632 - RNA, 62 nt, Homo sapiens
acgcacggacggaacgacgaacggcagacggaaaccaagggggaaagcggaccaagaggaaa

SEQ ID NO: 4633 - RNA, 84 nt, Homo sapiens
ggacaacccagaggcaacaaaggcgagaagagaagccagccgaggcgcgcccgcagcggaggcagcccgccagcccggcggagc

SEQ ID NO: 4634 - RNA, 57 nt, Homo sapiens
gaagccaaagcagcacgcgaggaggaaaggcaccccaccaggcgccggagacccagg

SEQ ID NO: 4635 - RNA, 42 nt, Homo sapiens
ccccaagccaagcccaagacaaaaacggaggagagccccaca

SEQ ID NO: 4636 - RNA, 67 nt, Homo sapiens
ccgaaacgaggaacacaccaggaaccacagacaggagccaaggcaaagagggaccacggccaggacc

SEQ ID NO: 4637 - RNA, 80 nt, Homo sapiens
acgaagcaaagaggaaagcagacccaggccaggcaagagggcagaagaaagaaaggaaagagagggacaggcaaaaaggg

SEQ ID NO: 4638 - RNA, 77 nt, Homo sapiens
gggcaggcccgaggggccggacagcagccggcggggacccacgagcagccaaaaaaagaagcaaaagacgcagaaac

SEQ ID NO: 4639 - RNA, 97 nt, Homo sapiens
caagaggacacgacggcgaccggggggacagcggagaggaagaggcaggccgccggcccaggcggaggcagggcacaacacggccacgcgcccaacc

SEQ ID NO: 4640 - RNA, 67 nt, Homo sapiens
acgccaaaccaagccgcagggggaagcgcccgcggacaccgggaagacacaggggccacccggggag

SEQ ID NO: 4641 - RNA, 65 nt, Homo sapiens
cgggggggccaaacacgggacaggcaggcagaaaaccgaaggaaaacacagaaggaaaaacaaac

SEQ ID NO: 4642 - RNA, 90 nt, Homo sapiens
ggaagggacaaccaggaccccccgaaccagaggcgaagagcagagcggcggagaaaccaccacaaacacgaggccagcaacgaccaacaa

SEQ ID NO: 4643 - RNA, 80 nt, Homo sapiens
aacagaaaacgcaaggagaaacccaagagcagcggcaggaccgaagaacagcggaggaggaggaagcgccaggcagaagc

SEQ ID NO: 4644 - RNA, 75 nt, Homo sapiens
agacgcagaacccagcaacggccggaaccaccaaacgccacagaggcgcacaagacacccacagcaaggagaggg

SEQ ID NO: 4645 - RNA, 86 nt, Homo sapiens
aagcggcaaggaaagagcggaaaagcaccagagacgagcgcccacacgcgcagcagaaaacaacagccgacacagagacacaaacc

SEQ ID NO: 4646 - RNA, 85 nt, Homo sapiens
cacaggcccgaggcggcggccgcccgagggaccccgccaggccgggccgaggccacgggcaagcccgggagggaaagccagaccg

SEQ ID NO: 4647 - RNA, 80 nt, Homo sapiens
agggacacacagcaggagaaacccgcaagcaccaccacgagggagggaccaaaggacaaccggaccaagggaccccgggc

SEQ ID NO: 4648 - RNA, 84 nt, Homo sapiens
gggggaccggccgcggcacaccggagagcgacgggacccccccgcagaagagccccaggagggacagcgggaaccaccagcgcg

SEQ ID NO: 4649 - RNA, 75 nt, Homo sapiens
caggccgaaacaacaaagccaaacccaggcaggcagaaaaggaagacagcagagacaacaacggaaggggaagaa

SEQ ID NO: 4650 - RNA, 68 nt, Homo sapiens
caaccgacggggcccggcggccccagaacaaaggacagagggagaaccagccaaaaaagggcagaacc

SEQ ID NO: 4651 - RNA, 56 nt, Homo sapiens
ggcccagaacagcgaaaccagcggcacccagcaacacacgcaccaggaggcagcag

SEQ ID NO: 4652 - RNA, 107 nt, Homo sapiens
ccgagccgggccgcggcgccgagcgaacggggagccgagcggagcgccgcggcgcagccagggggggccccagcccggccgaacgggcgcacgacacaaacacaacc

SEQ ID NO: 4653 - RNA, 73 nt, Homo sapiens
ggaaagcggcgcgcgggaccgccaccgggcggggccgcggcggcggagcggcaacagcagaagcgggggaccc

SEQ ID NO: 4654 - RNA, 79 nt, Homo sapiens
caagaagcggcaacacagcacaagcaacgaccagaccaagaagaagcagggccccagcagggccaggccgacgagaggc

SEQ ID NO: 4655 - RNA, 62 nt, Homo sapiens
ggacagggagagaagccaagaaagacaggaccaaagacgaccaccaaagccagcccccagaa

SEQ ID NO: 4656 - RNA, 74 nt, Homo sapiens
agaccgggggcacgcccgcgggacaaccggggccgcacaacggaggagggacagagcgccacacagcccgcgcc

SEQ ID NO: 4657 - RNA, 75 nt, Homo sapiens
ccgggccggcccgaggcccccaggaccccaccccaagggagccagaaaccacgaagaggcccgaaagcggagcca

SEQ ID NO: 4658 - RNA, 76 nt, Homo sapiens
gagaagcaagcccggcacaggaagaacgggcaggagaaacgaccccgcaggaaggggcgggcgaacggaccagaca

SEQ ID NO: 4659 - RNA, 83 nt, Homo sapiens
gaacaaggcacaacacagcggcaaccagcacagcgaaccagcaacaggagacagcgccacgcagagccccgccaggaagacac

SEQ ID NO: 4660 - RNA, 85 nt, Homo sapiens
ggcgcagcggaagcccaggaaacacaggcagcgggcgagggaaaaagcgggaggaggcgggccagaacacgaccggggcacaggc

SEQ ID NO: 4661 - RNA, 87 nt, Homo sapiens
cgccgccgccgcccgggcgggagccaggagcgacgcaccgccaggcaggcacaaagccccccccggcccgcccagcccacgagcggg

SEQ ID NO: 4662 - RNA, 80 nt, Homo sapiens
ccaaaccggaggggggaaggaaagggcgcaggacacagacccaacagaggaagccgcaagaaacgggacgacaggaaggc

SEQ ID NO: 4663 - RNA, 55 nt, Homo sapiens
acacgggggcagacacgaggccgggaacgggaaacgcgcgccgagaagccacccg

SEQ ID NO: 4664 - RNA, 87 nt, Homo sapiens
aggaggcccccagccagggaacgggcgcgagaggaacccagccgagaggccgcagcagcagcaggagccgacccgggaaggacgcga

SEQ ID NO: 4665 - RNA, 74 nt, Homo sapiens
aggaaccgagcaacgcggccccagccgcggagacacaacaacagaggcagcaacggcgagcccaggcagagaac

SEQ ID NO: 4666 - RNA, 81 nt, Homo sapiens
gacggcgcccgccccccgccgccgcccaaggaagggagagacgaggacccagccaagaacccaaaagaagcccacggggcg

SEQ ID NO: 4667 - RNA, 77 nt, Homo sapiens
acgaagacagcggagaggagagcgggcggaggacgaggcgggggcagagggaagcggacccccggggcccgcgagcg

SEQ ID NO: 4668 - RNA, 86 nt, Homo sapiens
gcgccgaggcggccacccgagacgcggcgcgcacgcccggccgcgaaaccaaagagccaggcgacccccgcgcccgaggcccagaa

SEQ ID NO: 4669 - RNA, 74 nt, Homo sapiens
cccggaaagggcgcgggccaggcacacagaaggccaaaacccgcaaacacgagagaaaagaaagagagacgcag

SEQ ID NO: 4670 - RNA, 74 nt, Homo sapiens
acagagggcgaccagaaaaacaaaaaggacgaccagagcaacagggccaaagggggacgggaggagcgcccggc

SEQ ID NO: 4671 - RNA, 71 nt, Homo sapiens
caggaggacccaaacgaagcccggaacgaccaggagacgcgggaaggacagaagacagccgcaaccaaagg

SEQ ID NO: 4672 - RNA, 49 nt, Homo sapiens
gagcggagaaacgggaaggccacgggcgacgagggcaaaacaccaggac

SEQ ID NO: 4673 - RNA, 73 nt, Homo sapiens
cggccacgccgggccggagccgggcaggcccaacacgcaaaagacaggcacacagcaacagaagaccggccgc

SEQ ID NO: 4674 - RNA, 69 nt, Homo sapiens
gaccgacaacgacgcaccgcgcggccgccgaaacgcaggccaacaaaacgagcaaaagggaccggggca

SEQ ID NO: 4675 - RNA, 78 nt, Homo sapiens
ccacgcaaccgaccccgggccaagcggccacacccagccccccagagcgaccacaggggccgacagcccagcccccgg

SEQ ID NO: 4676 - RNA, 70 nt, Homo sapiens
gagcggcacccgccgccacccacaaggcacaacaggaagggccccaggcccagggcccaggaaagaagga

SEQ ID NO: 4677 - RNA, 85 nt, Homo sapiens
acgccgcccaccaggcccgcagcaccccacccaagaacagaggaggagagaccgccgggcgcaggcacaggaacaagccaccacc

SEQ ID NO: 4678 - RNA, 80 nt, Homo sapiens
gcccgcgaacgcgagcacgcgcggaaacccaaagggcagggaaggagaccacggagggacgccaagagggcaacaagcgg

SEQ ID NO: 4679 - RNA, 70 nt, Homo sapiens
gagggcagagagacacaaaagaagaaaaagaccccaaagacccaaaaccaccagagagacagggcgccac

SEQ ID NO: 4680 - RNA, 77 nt, Homo sapiens
ggggaaacaagacaacaaggggcagaaaccacaggcgaaccaaaccgaaagccgacaggggaccccacaagacccaa

SEQ ID NO: 4681 - RNA, 71 nt, Homo sapiens
gccaggagagaagacgagaccaaagaggaacacaaacggcgcacaggagagggaagccggcaccagggggg

SEQ ID NO: 4682 - RNA, 70 nt, Homo sapiens
cagggcccgggcacaaaaaccgacgagccaggacagggggagaggcaaggaaacgacaagagaagaacac

SEQ ID NO: 4683 - RNA, 66 nt, Homo sapiens
agggcagaggaaagccggagaaagaagaagaacaggcagccaaaggaccgagcaaacagaggacgg

SEQ ID NO: 4684 - RNA, 106 nt, Homo sapiens
ccaggggaagacacgaggggcagaaagagaccgcagagacagccaacacggcacccacagccagccggcgggacaccaagcaggcagagaagccggaggaccgcag

SEQ ID NO: 4685 - RNA, 81 nt, Homo sapiens
cggaggaagaaacaccgcaaaaacggcgaggaaagagaggagccccggaaagaaaaggacagacccggccagaaaggaaga

SEQ ID NO: 4686 - RNA, 55 nt, Homo sapiens
agaaagcagcccagggacgcaaagccgggcggcgccgaaaaacaggaaagcgcgg

SEQ ID NO: 4687 - RNA, 55 nt, Homo sapiens
cgagccggagcggacgacggcacccggaaaggcagcggacagaaaggaagaacag

SEQ ID NO: 4688 - RNA, 62 nt, Homo sapiens
gccacacgcccaagccaccggcaagggcagcaggaaagacgagaccgggcacgccaacaacc

SEQ ID NO: 4689 - RNA, 73 nt, Homo sapiens
ccgaggagcaaccaggcacacgaccaagacgcaagcggcagccggacaaaaccaagaagcaaaagaccggggg

SEQ ID NO: 4690 - RNA, 79 nt, Homo sapiens
gccccgcccccgcgggggacgggcaccgggaccgcacaggacgagcgaagacagggaaaagaaaagggcgccgaagaag

SEQ ID NO: 4691 - RNA, 52 nt, Homo sapiens
acccaggcccaagaaggaacaaccgcacagaaaagggaaggcacagcgaagg

SEQ ID NO: 4692 - RNA, 73 nt, Homo sapiens
acggcagaccgcagaacacccagccaggagacggagcgcagggccaggcccagagacgaagaacccaacggag

SEQ ID NO: 4693 - RNA, 76 nt, Homo sapiens
cagcaccccgaggcccgacccagacgggaacaaaggagaaagggcacgaagagagaggagacaacaaaaagaaaca

SEQ ID NO: 4694 - RNA, 68 nt, Homo sapiens
cgggcagccgcgacggccagaccacagagaagcaggcgaccaggcgcgcgggcaagaaagcagacgcg

SEQ ID NO: 4695 - RNA, 77 nt, Homo sapiens
caaaagaggaagcagcgccagcagcaaaaacggagcagaaaggaggccagcaaggccaggcagcggccgacgggggg

SEQ ID NO: 4696 - RNA, 69 nt, Homo sapiens
accggacaaggacaaagaacaacacggaggaaaccaccgagcccgagcagccaaaagaaaggaacagcg

SEQ ID NO: 4697 - RNA, 70 nt, Homo sapiens
ggacaccaacgcaggacccccagggaacacaacagaagagaccccagaccccgcacaagagagaaaagcc

SEQ ID NO: 4698 - RNA, 79 nt, Homo sapiens
gaccgagaccaacgcagggcccaagaaaaaggcaagcgcgcggcaggacccagaccggaagggaggcaggagagcagac

SEQ ID NO: 4699 - RNA, 61 nt, Homo sapiens
cggggccagggaacccggcaccgccccagcgggaggccaccgccccaccagcaggcaacgc

SEQ ID NO: 4700 - RNA, 73 nt, Homo sapiens
ccagaacagagcgccaaagaaaaacgccacggagagaaccagaccaggaggcgggcgagcaggagccacgcca

SEQ ID NO: 4701 - RNA, 63 nt, Homo sapiens
caagaggcgccggcgggaaaacaacagccgcgaggaacgaaaagaaggaaacacaagaaggcg

SEQ ID NO: 4702 - RNA, 79 nt, Homo sapiens
cgacgcaaaccaaggacggggaccgcacacccaagcccacagaacaacgagaagccaggagagcccggcaccgcagacg

SEQ ID NO: 4703 - RNA, 84 nt, Homo sapiens
gcggagcagcgaccccggcccggaggaggccagcgggacaagcggagggagcaacaacaaggagcaagcacagcgcgagccagc

SEQ ID NO: 4704 - RNA, 98 nt, Homo sapiens
cagccccccccaccccgagcaccaccagagccaccacccaccaccccagccagggcaacacgcaggacacacggcacaaggggagcgcgcgagccaca

SEQ ID NO: 4705 - RNA, 77 nt, Homo sapiens
aagcgccaaagagggaaacccaagacgacaagaccacacccccccccgacgaaagaaagaagagagaggaaaagaaa

SEQ ID NO: 4706 - RNA, 52 nt, Homo sapiens
gaacgcgcagaccggggagggaaagaaagccggggcagcagaagaggacaag

SEQ ID NO: 4707 - RNA, 55 nt, Homo sapiens
cgaagcgcggaaaacccagggggcgaacacggaaggaaggagggccccggagcag

SEQ ID NO: 4708 - RNA, 83 nt, Homo sapiens
caggaaccagacgggggcgagcgagcaccgagcaacacacgcagaaaagacgaggaacacaggagcagccgaaagagagccca

SEQ ID NO: 4709 - RNA, 79 nt, Homo sapiens
caagaaagcagaggagcagagaaagcaagacgccacaagggaaaagcaccccccagccaaacaagccgccagaccacag

SEQ ID NO: 4710 - RNA, 78 nt, Homo sapiens
gggacccccggacagccaacaccaaagccgcgggcacagcggccgcagcggcacgcagggcagagcaccgcacccagg

SEQ ID NO: 4711 - RNA, 70 nt, Homo sapiens
gcaagaacaacagcaggccaagcccgccggagggaccgaaaacaaggacacgaggcacaagcacaaaacg

SEQ ID NO: 4712 - RNA, 69 nt, Homo sapiens
aaggggccgacaaaagcgcagcaagacggccgcgcggcccgcaggcgagagagagaccaacggcaacaa

SEQ ID NO: 4713 - RNA, 75 nt, Homo sapiens
cgagaaagggaggcggaacaggcagagggacagaacaccagcggggagacgggcgccgcagaagaccacgcgacc

SEQ ID NO: 4714 - RNA, 76 nt, Homo sapiens
aaggggggccaggaaacgccaaaacaccagaaccaaccggaaaacaggaaaagccaaccgggagaggacacagagc

SEQ ID NO: 4715 - RNA, 71 nt, Homo sapiens
cagacaaagaagaccgcacacaagccaacaacaaggcgccgacaaagaaggcaaacacggcaaccgggcac

SEQ ID NO: 4716 - RNA, 68 nt, Homo sapiens
aaacaccagacaagagaagagagaaggccacgcccgaccccaagcaacaacggggcagggacaggcgc

SEQ ID NO: 4717 - RNA, 67 nt, Homo sapiens
gcccccaggagacagcaagcccagacaagacaagaggaaaagggagaaccaacaaagagggcaccac

SEQ ID NO: 4718 - RNA, 77 nt, Homo sapiens
gcggagaacgcaaagagcgccggcgcggcgcggccgggccgcgccccccggcgggccggacgcccacaccgcggaca

SEQ ID NO: 4719 - RNA, 51 nt, Homo sapiens
cagaaaaaaggggccaccccaggaggaaggccaacaaccaggaaggcggga

SEQ ID NO: 4720 - RNA, 80 nt, Homo sapiens
ccggagcgccggcaaccgggaaagcaaccccacaagccacacacagaagacccaaagagaacacaggagaggcaagaggg

SEQ ID NO: 4721 - RNA, 70 nt, Homo sapiens
ccaccagcccgagacgagaaccccacacaagagcccggcgaacaggcgcacacagagaaagcgagaaggc

SEQ ID NO: 4722 - RNA, 74 nt, Homo sapiens
cacgcgggaagagaccagcgaagaaggcccgaggaaaggcggcccagggcagcagcacacaaacaaccacaaac

SEQ ID NO: 4723 - RNA, 77 nt, Homo sapiens
agggaggcaccaggagcgaccaagcaccgaccagacggcacgggagacacagggccccagcaaggagaccaaacaca

SEQ ID NO: 4724 - RNA, 64 nt, Homo sapiens
ccccgggccacgggcgcgaaagaggaggagacggggccagggagaaaggaaggccaggagcaaa

SEQ ID NO: 4725 - RNA, 76 nt, Homo sapiens
ccagcaaaagccgaacaggaccagaaacccgagaggagcaggagcaaccgacaggcgggccggacagcgcgcccag

SEQ ID NO: 4726 - RNA, 85 nt, Homo sapiens
cgacgcgagggccgagacggcgcggcaaggcaggcgacacgagccaggcccagaccagggcccgggcacgcaaacaagagaagaa

SEQ ID NO: 4727 - RNA, 74 nt, Homo sapiens
cccaaagcacagcggcagcgaagcaaaccaacaccccccgggaacaagaaggcagcacaccccccacaacaaag

SEQ ID NO: 4728 - RNA, 83 nt, Homo sapiens
gggaagcaccaaagcgcgccaagacaccggcccccagaagccccacagcccaggagcccgcacaccgaggagaccaggaagcg

SEQ ID NO: 4729 - RNA, 59 nt, Homo sapiens
accccgagaaccgcaggagccagaggaggaaagacaagccccaaaagcagccgggaaag

SEQ ID NO: 4730 - RNA, 76 nt, Homo sapiens
ccagcagacaggagagcacagcaggaaagaggaacaaaccaagggcacggaagggacggaggaaaagaacaagaac

SEQ ID NO: 4731 - RNA, 79 nt, Homo sapiens
ggcgaccccagcacggcaaagcccggagacaagcgcggccacgcagacacgacagggaggagaaaagagaaggagaaac

SEQ ID NO: 4732 - RNA, 74 nt, Homo sapiens
gacggaaccgacaagacacgaaaaacaagagccagaaccgaaagggggcgaagccaagagggaagccaggagac

SEQ ID NO: 4733 - RNA, 101 nt, Homo sapiens
agagagcgacccggggggagcgcggggcgacgcggcgcagggacccgggacagcggagagaagccgaggcgccagaggaggaagggaagaaacagagcggg

SEQ ID NO: 4734 - RNA, 83 nt, Homo sapiens
cgcaggaggacgcagacggagagcaaagaaggacgcagagccagccacacagccccacaggcccagccacagggaacccccgg

SEQ ID NO: 4735 - RNA, 74 nt, Homo sapiens
cccggccgacagggcagagcccagggaccacacgcaacggaccgccaggacaacaaacgagcacggagaaccgc

SEQ ID NO: 4736 - RNA, 83 nt, Homo sapiens
ccaacaaagccccccagcccccacgagaaaaccacccaaagccaaagcaaagaccggaacgaacgcccagaaaaccgcacgca

SEQ ID NO: 4737 - RNA, 63 nt, Homo sapiens
aaagcacaggcacggaaagccccggacaacagccagaacccacaaaggcacggcaccgacacc

SEQ ID NO: 4738 - RNA, 80 nt, Homo sapiens
gaggacagcggccacggacaggcaagaacgcaaggggaaagggaacgacggggacggaaaggggccccgaacggaacaca

SEQ ID NO: 4739 - RNA, 74 nt, Homo sapiens
acacgagagccagaggcagcaggacgggagaagagaaaccacaacaacaaagagaaaaccccgcccaccgaggg

SEQ ID NO: 4740 - RNA, 79 nt, Homo sapiens
gggccccgcgggaccgcggccacggacggaacccggagggcggaccacaagcaccgccggccaggaggagagcgcacca

SEQ ID NO: 4741 - RNA, 78 nt, Homo sapiens
agaaggaagcaaagcaccaaagacgagaaagaaacagcaggacgagcacagcccgggggagccgggagacaacacagc

SEQ ID NO: 4742 - RNA, 77 nt, Homo sapiens
aacacaaagcacaccgccaaacccaggccagagcacagggacagggccagagcagagaagagcaaaagaaggggaaa

SEQ ID NO: 4743 - RNA, 60 nt, Homo sapiens
cgagcagcaagcggaggaaacgcaggcaagcggggacgggaaagagggcagaagcagcaa

SEQ ID NO: 4744 - RNA, 99 nt, Homo sapiens
gaaaagaaaacgaaacaaccgaaaagccacaaagggaaccaggaaaaggaaaggaaacagacagcgcgaggagagaagccacaagcaacgaaagcagag

SEQ ID NO: 4745 - RNA, 59 nt, Homo sapiens
gcaaagagagcagacccgaggagcccgcaggaaaccccccaggcaagaggcgcaggacc

SEQ ID NO: 4746 - RNA, 70 nt, Homo sapiens
aggcgcgcaggagccaaggggagggagacgcggagcggggccaggaaggcccggacggagcaggcggacc

SEQ ID NO: 4747 - RNA, 69 nt, Homo sapiens
ggcaaaacaaccagaaggggagaaggcaggcaccacaaaaaggacagagcaccacacccaggcgaggca

SEQ ID NO: 4748 - RNA, 76 nt, Homo sapiens
cgacacaaagcaacaccgcgcagagacacgaggagaaagacagcaaagaaaaggagaagaaaggaaaaaaacaacc

SEQ ID NO: 4749 - RNA, 82 nt, Homo sapiens
ggccgcggggggcggcggcgcgagccagcggggccgcaggaggcaaagggaccccaagaaaccaaagggcaagagccgcagc

SEQ ID NO: 4750 - RNA, 77 nt, Homo sapiens
cggcccaaggagaaaaaaggacgacagagaaaggaacaagcgacggaaggcaggacagcggggccaaagccgcggac

SEQ ID NO: 4751 - RNA, 52 nt, Homo sapiens
cggagccggaacagggggaaccaggggaaagagcagggaaccacccaaggcc

SEQ ID NO: 4752 - RNA, 63 nt, Homo sapiens
ccccacagagcggggaacaagcacccacgcggaaacacggggcacacggcacggacagggcgg

SEQ ID NO: 4753 - RNA, 55 nt, Homo sapiens
ccaagcaggaccacccaccagccaccagcgagacgacgggaccgaaggaccccgc

SEQ ID NO: 4754 - RNA, 72 nt, Homo sapiens
gcacgccgcgagaggcgcccagcgaccagaaggcacccaagaacgaggccgcagaggacccacagccgcgcg

SEQ ID NO: 4755 - RNA, 72 nt, Homo sapiens
cgagggggggcgcgccggaaaccggagcgcgcagcaggaaggccgcggacccccccccccccaccccacagg

SEQ ID NO: 4756 - RNA, 82 nt, Homo sapiens
acgccgaagcaccgccggggggaagccccgcgccggccgcccgggccaagcgaagcccagccaagacggcagcccgaaggag

SEQ ID NO: 4757 - RNA, 40 nt, Homo sapiens
ccagacaggggcgacggcagaggaaggggaaggcgccagc

SEQ ID NO: 4758 - RNA, 76 nt, Homo sapiens
gcccggccgcccgcgggagaggccccaagggccaagaagagaaacacacaaacaagcacgacagaccagccgggac

SEQ ID NO: 4759 - RNA, 73 nt, Homo sapiens
gaccagagaaccagaagagaagacaggccccagccaacgaagccgacagaacagaaaggcaaaaagagacaca

SEQ ID NO: 4760 - RNA, 75 nt, Homo sapiens
aaggaccgagacggagaaggagcggacaggcagaacagaggccaaaagaagaagagcaccacaacggaggagaaa

SEQ ID NO: 4761 - RNA, 71 nt, Homo sapiens
cacaggggggaccaacggagaaacgccagcacacacgacagggagcccagaaggaagagccggaagaccaa

SEQ ID NO: 4762 - RNA, 75 nt, Homo sapiens
cggaagggaagaccgacaccggcgcagccagcgaacccacgcggagccccgcagaggggggaccacaggccaccc

SEQ ID NO: 4763 - RNA, 87 nt, Homo sapiens
ggcccaggaggagcgggcaaggcgagggagcgagggagcccggaggccagggcacgccggacaggaggcggggccagcggggcagga

SEQ ID NO: 4764 - RNA, 59 nt, Homo sapiens
aaaaagagcgacgaaaagacaggaggggaagaaaaacggcccacagaacaggaaagcac

SEQ ID NO: 4765 - RNA, 75 nt, Homo sapiens
gaaacaccaggaccccacagagaacaaaggacagaaaccaagaggaaaccgagaaaagagaagagggaagaccag

SEQ ID NO: 4766 - RNA, 76 nt, Homo sapiens
aggacccggcggggcagaggagggggccaccaggggccagcagcaggcgcaaaaacgaacccacaaccgaacgacg

SEQ ID NO: 4767 - RNA, 40 nt, Homo sapiens
ccaaaccacccagcaggaagagcaaggagcaaaccaagac

SEQ ID NO: 4768 - RNA, 70 nt, Homo sapiens
cccggaagcaccacagcaaacaacaagcagccacccaggagcccagaccgagaaccgggggaacgcgggc

SEQ ID NO: 4769 - RNA, 57 nt, Homo sapiens
cgacaggcgggaggccccccgcgccgggaaccaggggggcaaaccgagggacaccca

SEQ ID NO: 4770 - RNA, 40 nt, Homo sapiens
cccagagggaagaggaaaacgcaggcaggcagccgaaaca

SEQ ID NO: 4771 - RNA, 72 nt, Homo sapiens
ggaaaaggagaaggcaagacagcgccagggacaagaacagggggaggggggcgaaaccgagcgcggggcaga

SEQ ID NO: 4772 - RNA, 69 nt, Homo sapiens
ggggccggggccccgcgccacggcgagggcccgcgcgagggaagcggcggacacgaccccgcccagcgc

SEQ ID NO: 4773 - RNA, 117 nt, Homo sapiens
gggggaggggagcccgcgcccgccgcgggagagaggacccccccccccccccaagggaaagcaggcaggagggagagcgccgaagaaccaccccccgccccgggcgggggaagcgaa

SEQ ID NO: 4774 - RNA, 68 nt, Homo sapiens
ggcggacaagagagggccagcggagagagagcacagaccaggccccgggcgcgggagccagccgaaga

SEQ ID NO: 4775 - RNA, 96 nt, Homo sapiens
gaaaaagcagggcacaagacacgggaccaccacccaaggaacaaggacagcaaggcggcaaggcgggagaccagagagacccagcgggggaggccc

SEQ ID NO: 4776 - RNA, 77 nt, Homo sapiens
gcggcggccagagaagagcaagggcacgagcacgggacccacacaggagcaaggaaacgaccaacaccaaccacagc

SEQ ID NO: 4777 - RNA, 38 nt, Homo sapiens
ccagcgaaacaccaagaggaaacccgcgccagagagcc

SEQ ID NO: 4778 - RNA, 75 nt, Homo sapiens
agcccaccaagaagggccgagcacagcaagcaagcaaaccgacaccagcgacacaagcgcgagggaaccacagag

SEQ ID NO: 4779 - RNA, 82 nt, Homo sapiens
gagagccacgaaccacggcacgacagcgggaaaaggggcacaggagccaagaggagccgggaaaccgaagaaggcagagaag

SEQ ID NO: 4780 - RNA, 87 nt, Homo sapiens
gcggaggacgcgcccggcgccccgagccggccgagcggcgacggaccgcgaggagccacaacgaccgagcggacaggagacagccag

SEQ ID NO: 4781 - RNA, 83 nt, Homo sapiens
gcgaagaaggggacgccgacaagcacgcacagacaggaggaggacccagaagccggagaagcagaagaaaggcggcccagacc

SEQ ID NO: 4782 - RNA, 82 nt, Homo sapiens
ccaaagaccacggaccaaggaagaaaaaagcgggcacgggcagcacaaagccggagggcgccgggcacggggcaggagggga

SEQ ID NO: 4783 - RNA, 70 nt, Homo sapiens
ccacgcgcggaaggcagcgcccagcagcgcagaacaacaggaacgcccaccaccaccgggcaaaaccaac

SEQ ID NO: 4784 - RNA, 83 nt, Homo sapiens
cgaccgccgagcggcggccgaggcggcggggggcgcgcaggccgcgacgagggcgcgagggcccgacccaggcaagcgagcag

SEQ ID NO: 4785 - RNA, 82 nt, Homo sapiens
gaacgcgggggcggggcgggacggaggccgcaaaagaccggccagccgggacacagcaaccgggccgaaggcggaggccgcc

SEQ ID NO: 4786 - RNA, 68 nt, Homo sapiens
cgcccccccagacaagaggacaccgcggaggaagggaccagaccccacaagaaaacacacaaccacag

SEQ ID NO: 4787 - RNA, 52 nt, Homo sapiens
cggcggcgggggacccaccggagacagaggcccacgcggaccggcagcgcca

SEQ ID NO: 4788 - RNA, 39 nt, Homo sapiens
cgccgcacaaccagagcgaggcgcgagcaccgcagggag

SEQ ID NO: 4789 - RNA, 67 nt, Homo sapiens
agcaccagcgggaaccgccacgccaggaaggaaagccccgaccacacgagaaccgcccagagaagac

SEQ ID NO: 4790 - RNA, 45 nt, Homo sapiens
agcaccccacaggggagggcgaccgcagaacaaggacagcagaaa

SEQ ID NO: 4791 - RNA, 75 nt, Homo sapiens
agcaaacacgaggccacggggaaacacagcagaacacaggccagaagaccgaagacagagaagaaaaaaaaagag

SEQ ID NO: 4792 - RNA, 82 nt, Homo sapiens
aggagagccaggaggagcgggccccaacccaccaaaagcacagacgcaggagagagagacgccggaagaaagaaaggagacg

SEQ ID NO: 4793 - RNA, 82 nt, Homo sapiens
gggcagacgaggccacagcccaggcacaggaaagcgcaggagcgccgggaagaccggaggagaacaacaccgccccaccgca

SEQ ID NO: 4794 - RNA, 76 nt, Homo sapiens
acacgggagggaggaagcagggccccgaaggaaagcgaagaaggaacagacaaggaaagccaaggcacgggaagaa

SEQ ID NO: 4795 - RNA, 53 nt, Homo sapiens
cagggacgagccaccagaggacacgccaggaaaaccacgagagggcgacccac

SEQ ID NO: 4796 - RNA, 74 nt, Homo sapiens
cgaagcacccccagcggggaccgcccgggacaacagcgcggggcacaggccgcaagcgcaagagaaaaagaacg

SEQ ID NO: 4797 - RNA, 70 nt, Homo sapiens
ggggggcgaacacgccgcggcccgcgggaaacaaggaaagcaacaaaagaccacagcaaaaaggcgacga

SEQ ID NO: 4798 - RNA, 82 nt, Homo sapiens
aggccagaaggagaaggggcgcacgcggcacagcgcagggcagaggcggccccaacagccacggagaggacgcgaggaacaa

SEQ ID NO: 4799 - RNA, 74 nt, Homo sapiens
cgcggagccggccccaggcagcgggcggcgccagcggagaacagcccgaccacgcgaagccagagggacaccga

SEQ ID NO: 4800 - RNA, 82 nt, Homo sapiens
gcaagcggcgaccccgcggccggccgggcagggccccgagaggcaggcaggggacccggacgcagcagaaaggcagcaaacc

SEQ ID NO: 4801 - RNA, 82 nt, Homo sapiens
ccgagcggccgaaaggagccccccgcccggacacagaagaagagccaaagcccaggacggggaaacagcagagagcagccag

SEQ ID NO: 4802 - RNA, 111 nt, Homo sapiens
cagccaaacccagcacggaggcgaggcgggcagacacgagacaggagcgagaccagccgagggaccggaccagaacagccacacgaacaacccgaggacggagacaaggac

SEQ ID NO: 4803 - RNA, 74 nt, Homo sapiens
acacggcccggcaaccaagaaaggcgaaggaaaaccccagcgaaacaccaagaggggggggaggacgcaccgcg

SEQ ID NO: 4804 - RNA, 84 nt, Homo sapiens
acaggcagccgcggcagggcggccagccccagccagcggacgagggcaaggcgcacaccgaggggcaaccaagagagcagacca

SEQ ID NO: 4805 - RNA, 84 nt, Homo sapiens
ggcgacggcaggcggccaggccagcagcacgagggcggcggcaggagaacggcggccaaagcgccagacaagggccgagccccg

SEQ ID NO: 4806 - RNA, 65 nt, Homo sapiens
agcaaaggaagaacaaaagcgcaggagcggaagaaacccagacgccgacccacacaagcaggggg

SEQ ID NO: 4807 - RNA, 51 nt, Homo sapiens
aacggccacagcaccggggacagggacaagcgcacagcggagaaagcagcg

SEQ ID NO: 4808 - RNA, 78 nt, Homo sapiens
gcagcccagcacacaacccccgccaccagaccccgcacagacaacccagagccacggcggacaggggagaggcagcag

SEQ ID NO: 4809 - RNA, 74 nt, Homo sapiens
agacgccaaggagaaggcagaccggggaaagaccaggagcaggccaagggcgcagaaaacgccaacgaagcaaa

SEQ ID NO: 4810 - RNA, 86 nt, Homo sapiens
ggcccccggcccccccgccggcccgcgggccgccgccggcgcagggcagcgccacccgacagagaaaaacaaaagggacagcgcac

SEQ ID NO: 4811 - RNA, 74 nt, Homo sapiens
ccgccgaggagccacagccagcccagcccgccccggcgccccaaccccggcagccccaggcgaaacagaccccg

SEQ ID NO: 4812 - RNA, 81 nt, Homo sapiens
ggagagacccggaaggccaaaggcgcgcaaggaggaagggacgaagcacggcaccggcccacgacaccggcccacgagaag

SEQ ID NO: 4813 - RNA, 79 nt, Homo sapiens
acgcagccaaggcaccaagggcagagaacacaccgccggaagaggaaaagaaaaaacaaaaaagaaacgccagacaaag

SEQ ID NO: 4814 - RNA, 73 nt, Homo sapiens
agagacaggaaacggcaccggaaaagaacgcagcccaggaggaggggggcagcacgccgaaggagagaccaga

SEQ ID NO: 4815 - RNA, 69 nt, Homo sapiens
agggaaaacagagggaaggaaaagggcaagaggcagcaggcgcacccgacccaaaccggagcaacaaag

SEQ ID NO: 4816 - RNA, 83 nt, Homo sapiens
cgcccgcgccgggcccggaaagcgccgcccagcagccgcagggaaccggaggaaaacaccgggacggacccgaaagaaaagaa

SEQ ID NO: 4817 - RNA, 75 nt, Homo sapiens
gagcgcggaggggagggagacaggaaacggcccccaccgccgccgagacggagggaacggaagacaagggcaaga

SEQ ID NO: 4818 - RNA, 79 nt, Homo sapiens
gcgagcggcgggcgggcgggagcgcccaagggggcggagagcgggggggggccgacgcccgccgcggccggggaacagg

SEQ ID NO: 4819 - RNA, 72 nt, Homo sapiens
aaggagcagggagaagaggagcgcgaggacgccagacgacaaaaggggcgcgcccacgaggacgagagccag

SEQ ID NO: 4820 - RNA, 76 nt, Homo sapiens
cacgcccaagcaaaggacgacccggccaagcggaaaaggagaaggcccaaagggggaaaagcagcaacaaagcaaa

SEQ ID NO: 4821 - RNA, 56 nt, Homo sapiens
cgggaaagcccggggcagggcagagaccgggcacaaccagccagcaacccgcccgg

SEQ ID NO: 4822 - RNA, 54 nt, Homo sapiens
ggaaagggaacgaaaaagcggaaagcaggccaggggccgccgcacgccaacagg

SEQ ID NO: 4823 - RNA, 83 nt, Homo sapiens
ggagaaccgggagccacagaaaagacgccaacgagcccaggagacaggaagcaaccagagcaaacgccaccagcagcagccca

SEQ ID NO: 4824 - RNA, 77 nt, Homo sapiens
acacccccaggccgaaaaaacaaaacagccaccaaccacaacccggaggaaagcccagagggaagcgcaagaagcag

SEQ ID NO: 4825 - RNA, 72 nt, Homo sapiens
cccggccggaggcaccagccgccggcccaggcggaggcaggggccacagccaacccgaccccggacaaggac

SEQ ID NO: 4826 - RNA, 56 nt, Homo sapiens
ccgcagcggagagcgcggccgaggcagaaggagaagagcaaccggccgacccgcca

SEQ ID NO: 4827 - RNA, 77 nt, Homo sapiens
gccaaagaggaaaagcaggggagggaagaccgccccacaaaagcacgggccacagagacgagaccccaacaacaaaa

SEQ ID NO: 4828 - RNA, 63 nt, Homo sapiens
ggaggggccgaacagcaaggcgcaaggaagaagagacgccgcgcggcagacaaggcccggcag

SEQ ID NO: 4829 - RNA, 76 nt, Homo sapiens
cccgccaggccccaggccacccaggggccccacaagaggaacgcgccaggcaaccaagcgccacccagagggcagc

SEQ ID NO: 4830 - RNA, 61 nt, Homo sapiens
cgacaggccgcgcaagccagccaaagagaaagagaaaggagagcaagagaaccgggcagaa

SEQ ID NO: 4831 - RNA, 68 nt, Homo sapiens
ggaacccggcaaagcacaggccaagacaacgaaacggacagcaaacgggcaacggaacacagcggaac

SEQ ID NO: 4832 - RNA, 71 nt, Homo sapiens
agcggggggaggaccagaaacaggggagcaggagaagaagaggggagcaagccggagaaagacggccggca

SEQ ID NO: 4833 - RNA, 79 nt, Homo sapiens
cgcgcgcaacacaagacaagaacccacggaaccagaaagagacaagaagggaccggcgcgggggacccaccacccccga

SEQ ID NO: 4834 - RNA, 70 nt, Homo sapiens
agcgagccgcacacccagggccggggcgcggagagagggcgcaccagacccaggcagaaaaccgcgcggg

SEQ ID NO: 4835 - RNA, 57 nt, Homo sapiens
cgcccgggcacgcccccacacggacaacaggcacaaagagagaaggaacacccacag

SEQ ID NO: 4836 - RNA, 80 nt, Homo sapiens
acggcgccgccgcccgcggcgccccggggggcggcgcccacccgggaggacaggaggaggaggagaggaaggcccgcgag

SEQ ID NO: 4837 - RNA, 53 nt, Homo sapiens
gaaggaccaagaaccagaccaaacggacacaccaacagccacggaggggagaa

SEQ ID NO: 4838 - RNA, 68 nt, Homo sapiens
accacgcagagggacgagcagagaacagcaaaagagcacaagaaaacgacagaagcacgacaacaacg

SEQ ID NO: 4839 - RNA, 91 nt, Homo sapiens
cgccgcgcccaggagggagggacacagccccaaacaggacgaaggcggcgaagggaccagaagcagcagccccagaagccccgaagccggg

SEQ ID NO: 4840 - RNA, 41 nt, Homo sapiens
cggggcccgcaagagaaagcagagcccaggccagccgccag

SEQ ID NO: 4841 - RNA, 76 nt, Homo sapiens
aaaagccacacccaaaaggcaacagagcaagagggacagcccaagaaggggaaaagaaccgcaaaaagcccaccac

SEQ ID NO: 4842 - RNA, 66 nt, Homo sapiens
gacaaaagggccaaagaagggagagagccggagagcccaaagagagcgcccaaccaaacgcaaagc

SEQ ID NO: 4843 - RNA, 78 nt, Homo sapiens
gccaccaaggagcccaccggagagcagagagcggaaaacggcgcagccaacaagggaaacccgcgccagagagccaag

SEQ ID NO: 4844 - RNA, 72 nt, Homo sapiens
gaaaccacgaccagaagaaaaaagaaaacacgggaaacgccggaaacgagagaaacgggaccagaagccaga

SEQ ID NO: 4845 - RNA, 64 nt, Homo sapiens
cgcccgcagccggaggaagcacgaaagccaggcaggagaagggcaccggggaggaccgcgcgac

SEQ ID NO: 4846 - RNA, 81 nt, Homo sapiens
gacaacccagagcgaaccagaagggcacaagcaagccgacgcggagccgggcacaccaggccaagccgacgccagcgggcg

SEQ ID NO: 4847 - RNA, 61 nt, Homo sapiens
caagacaccagcaaccgggcacgccaagaacgggcaggagcaaagaaggacgcagagccag

SEQ ID NO: 4848 - RNA, 80 nt, Homo sapiens
aaaaagacaaagcacaacgcccagggccggaagccggccacaacgaaggagcggaagacgcgagacaggacgccaggccc

SEQ ID NO: 4849 - RNA, 73 nt, Homo sapiens
ggaaagccaggaaaaacacacgcccgggaagaggacgagaagagcgcgcgggaccagacaaagcgccaaaacc

SEQ ID NO: 4850 - RNA, 72 nt, Homo sapiens
acaaaagggccaaagaagggagagaggggcgagaaccagcgacggagcacgcgacggaaggacaaaaaagac

SEQ ID NO: 4851 - RNA, 81 nt, Homo sapiens
gccggcacggaaacacccgaccacccaaccacgcgcccagaccaaggcaccacagggagcagcagcggaggacgggaaggg

SEQ ID NO: 4852 - RNA, 75 nt, Homo sapiens
gagaggggcccccccagaggcagaaaccccccagcaaaggacaagggaaaggcgaggggggcccgaggacgcagc

SEQ ID NO: 4853 - RNA, 83 nt, Homo sapiens
cacgaggaagcggggcagagccgggggagcccagcccagccagccccagaaaagccgccagcccgcccgcggcagaaggaaaa

SEQ ID NO: 4854 - RNA, 51 nt, Homo sapiens
agcgagagcccgccacgccacaccgaccgagagggcgggaagcgagcagcg

SEQ ID NO: 4855 - RNA, 87 nt, Homo sapiens
cggcacaagcagacggcaaaggcaagagaacagcagcgccgcccgccgacagccaggcccgggagaagccagagcgcccccgagacc

SEQ ID NO: 4856 - RNA, 79 nt, Homo sapiens
accccccaaagccacgaagacagcccaggagagagcccaacacggagggcaaagggcaaagagaaccaggagaccccac

SEQ ID NO: 4857 - RNA, 87 nt, Homo sapiens
cggagcgcgaaggccgggacccggccccggcccacaggggggggcaaacccgagagaacgggaagacccacagggaagaggcacgag

SEQ ID NO: 4858 - RNA, 77 nt, Homo sapiens
gagccaaggccagagacggcagaggccagcgggaagcccgggagaccgaggggcagagagcccaccgccaccccaac

SEQ ID NO: 4859 - RNA, 71 nt, Homo sapiens
ggggcggagagggcggcgccgaccacgcacacgggcagcacaagaagaaaagcggcggggggggcgggccg

SEQ ID NO: 4860 - RNA, 54 nt, Homo sapiens
cgggaaaaccaaaaaagcaagcacaccaaagcaccagcagacggaacaacgaga

SEQ ID NO: 4861 - RNA, 78 nt, Homo sapiens
cgagaagagaaaaaacaaaaggacggggaccaaaaaggaaggaagggaacacggacgacgagacacgaccaacacagg

SEQ ID NO: 4862 - RNA, 77 nt, Homo sapiens
gggaaggcgccggggccagcgcagccgcggcggagacgcacaggcccgagagaacccaccgcaagagaccaaaggcc

SEQ ID NO: 4863 - RNA, 43 nt, Homo sapiens
cggaacggaacagaagcaagaaggacagaaaacgggccccaga

SEQ ID NO: 4864 - RNA, 80 nt, Homo sapiens
caaccacagagagagagagggagggaaacagacagcaaaggagcgagcagcgccaagaggcacaagaaacagcacaacag

SEQ ID NO: 4865 - RNA, 80 nt, Homo sapiens
acaagcgagggcaccggggagcgaggcagagaaacaaccggggccgcaggacaagaagaacagaggggacagaacaaaaa

SEQ ID NO: 4866 - RNA, 69 nt, Homo sapiens
aagggaggacgacacaccgcaggggacacacgcccacaccacaacaaggaggacaagacgggcaaacag

SEQ ID NO: 4867 - RNA, 80 nt, Homo sapiens
ccccaagccccagggcgcgccagagcccgccggcaagggaggggaaacaaacaggacccaagaagaacagaaggaagaca

SEQ ID NO: 4868 - RNA, 86 nt, Homo sapiens
ccaagagcagcagaggcagaagcgccggacaagagcgggggggcacgaccgggagaaaggacgccagccggaagaggggagagacg

SEQ ID NO: 4869 - RNA, 71 nt, Homo sapiens
aagagcaagaggaagacgccgcgcccaagcagaaaagaagggcggaaaggcagccacagcagaggaaagag

SEQ ID NO: 4870 - RNA, 66 nt, Homo sapiens
cgcaagggcgcggagccgcgggccggcgagcgcgcgccaccagggggggccccagcccggccgaac

SEQ ID NO: 4871 - RNA, 101 nt, Homo sapiens
acggagccccaaggagaccgcccccagcccacagaggcgcggaaagcacggaagggaacagacagccccgggaacacccgaaggacgggaagaaacagaac

SEQ ID NO: 4872 - RNA, 76 nt, Homo sapiens
acaagacacggagcaaggaggaaaacacacggcgaggcccgggcagcgggccagcgggaggggccccggcccgccc

SEQ ID NO: 4873 - RNA, 55 nt, Homo sapiens
ggggggccaggaaacgccaaaacaccagaaccaaccgcagcccgagccaaaaagc

SEQ ID NO: 4874 - RNA, 51 nt, Homo sapiens
ccggccccagaggcggaaacagccgcagaagccgccaagacaaaccacgag

SEQ ID NO: 4875 - RNA, 71 nt, Homo sapiens
gcgggaaagccacgggaaaaggggggcggcacgcagccaccgaggccacggccggcaacggccagcacccc

SEQ ID NO: 4876 - RNA, 86 nt, Homo sapiens
ggagggaccgacggcacagaaagggcaccagagagggggccagcgccaaccgagacaggagaacacgagacccgcacaaaaccccg

SEQ ID NO: 4877 - RNA, 66 nt, Homo sapiens
aggcaccgcaacaacgcccagcgaggacccaaagaaacccacaaacacaagaaaaggaaacaaaca

SEQ ID NO: 4878 - RNA, 74 nt, Homo sapiens
aacaacaagaggagaagaggaaagggccagcggagcgaagccacagaacaaaaacgaccgaggaaaggcgagag

SEQ ID NO: 4879 - RNA, 52 nt, Homo sapiens
gccgcgggcaggacgcgcgcgcaggcgagggaggcggccggagccaaaccga

SEQ ID NO: 4880 - RNA, 61 nt, Homo sapiens
agcagaccgaggagaggcgagcgcccaggacggggcaccggagacgcgggcagaaaaagga

SEQ ID NO: 4881 - RNA, 77 nt, Homo sapiens
cagaggaggggaacaggaggagaagcccacccagagagagaagaacaaggcggccaaaccaagaccaacaaccaccc

SEQ ID NO: 4882 - RNA, 67 nt, Homo sapiens
acagcgaaccagcagggaaccaagaccaggacaaagaagacccggagagacaagccggaggacgcaa

SEQ ID NO: 4883 - RNA, 76 nt, Homo sapiens
ggaggccacagcggcgaccgggacggggagaaagaagacaaggaaagaacacgaacgagagacagaaggaaaagac

SEQ ID NO: 4884 - RNA, 74 nt, Homo sapiens
acaccaggcacccgggcccagccgggaacccccacgcggccagcgaaaacgcccagacaaccagaagacgacag

SEQ ID NO: 4885 - RNA, 56 nt, Homo sapiens
acgcgcagggggcaccgaaacagacacccaagaacgaggccccgcagcaggcagaa

SEQ ID NO: 4886 - RNA, 134 nt, Homo sapiens
cagcggagggcccagaaccaggggacacaagccggagggcaagagggcgaaacaggccgacgcaaacgagccacccagagccccacgaagacgagcagacccgggacgaggcacgccggacccacgcacaggac

SEQ ID NO: 4887 - RNA, 74 nt, Homo sapiens
agaaacccaagagggaaccacccccaacaaccagggcaaggccgggaacaacaggagagaaaggcccggacacg

SEQ ID NO: 4888 - RNA, 58 nt, Homo sapiens
ccgcccccgcagcagcgccagaaagagccgcagacgcacagcaaccaccggacccgaa

SEQ ID NO: 4889 - RNA, 62 nt, Homo sapiens
aaaaagccggcgacaacgagcacaaaaaggggggacccaggaaaacaccaaagaagggcgag

SEQ ID NO: 4890 - RNA, 83 nt, Homo sapiens
aaacaggagccacaagcagcagaaggggaggacagacacggagaggagcggggaggaacagggcgccacaaaaaagacaggcc

SEQ ID NO: 4891 - RNA, 78 nt, Homo sapiens
gaggaagagcgaggaggaacgcgcaaggcaaagcaccggaaacgggcacaaggacaggcaagagacaaaaaggggaac

SEQ ID NO: 4892 - RNA, 36 nt, Homo sapiens
ccaagcgccggagccgcaccagacacgaaagagcag

SEQ ID NO: 4893 - RNA, 81 nt, Homo sapiens
acaggacccgccaccaaagacacgaagcagaggagccagacccaaagcccagacacaagacacggagccccaagaaaacag

SEQ ID NO: 4894 - RNA, 76 nt, Homo sapiens
gcggagaagccacgcgacggggcgagacccgggcgaagacaacgccggaccccgagaccgcgaaacgacgaaagaa

SEQ ID NO: 4895 - RNA, 78 nt, Homo sapiens
ccaccacccacgcgcccagccccacgcaaaaagcaaaccaagccgcccccaggcggagcaagaagacccaccaagcac

SEQ ID NO: 4896 - RNA, 75 nt, Homo sapiens
aaaaaggagagccggcagccccgcccgcacaccagaacagaagaggaacgacagcgccaccccccagaaggcgac

SEQ ID NO: 4897 - RNA, 83 nt, Homo sapiens
agaaacccagacagacgccggggaggcagcgcgggacccagcccaggcggcgcggacggggcggaaacacaggggaaacacga

SEQ ID NO: 4898 - RNA, 72 nt, Homo sapiens
caacacagaagacaaagcacgcagaaaacagacccggccaacgagcagcacaagaggaaagcagaaggacgg

SEQ ID NO: 4899 - RNA, 88 nt, Homo sapiens
agaccacgcagccacgcgggcgagcggcggggagcggcgaagccgcgggcgagccaagaaggacaagaaggggagaagaaaagaaacg

SEQ ID NO: 4900 - RNA, 68 nt, Homo sapiens
caacaaaacgacacaaaaggagcagagacgccagaaacgcgaaagcgcggccccagaggcgccgagca

SEQ ID NO: 4901 - RNA, 78 nt, Homo sapiens
agacaggaggccgcggggagacgcgggggacggggcaggaccacagcagaaaacacggaggaacacgagggagcaccg

SEQ ID NO: 4902 - RNA, 57 nt, Homo sapiens
gacgagagacaaacgccgaaggggggaaggagacgcacacccacaccgggcaacagg

SEQ ID NO: 4903 - RNA, 35 nt, Homo sapiens
aaccacgacccacagaaagcagagaagaacacaaa

SEQ ID NO: 4904 - RNA, 75 nt, Homo sapiens
gcagaaagacaaacacagccccgacaaagacagagaccaggggccacaacggaaaccaggaaaccgcagaagaaa

SEQ ID NO: 4905 - RNA, 71 nt, Homo sapiens
gagcccgcggggaggcgcggccgccccgcgggggacgaaagacagaaccagcacagcaaaaaaggcagcgc

SEQ ID NO: 4906 - RNA, 69 nt, Homo sapiens
ccacgaggcaggagcgcgggcggcaccggcgagcaccaaaagcgcgaacccgcggaggaggagaccacc

SEQ ID NO: 4907 - RNA, 79 nt, Homo sapiens
gagacacagcagcccagccagacaaccacccagaggcaacggggaggcggcccagcaacagcggcgaagccacaagggg

SEQ ID NO: 4908 - RNA, 73 nt, Homo sapiens
ggacccaggcaccagggacgcaggacacaagggcggggcgcgggccaggcggggggcccggaagcacagcgaa

SEQ ID NO: 4909 - RNA, 84 nt, Homo sapiens
cggcgcgggggcggagaagcagcaccgcgggccggcaggagaaggaggagcgcacaagaagagacaacagccacaagggacaaa

SEQ ID NO: 4910 - RNA, 80 nt, Homo sapiens
gagcacaaaaccaacgggaacagcggacaagaacgaagcacagagaccgaaaagggaggagaagaagcgggcagaggggg

SEQ ID NO: 4911 - RNA, 79 nt, Homo sapiens
gagagccaaccagcaggcccggacagggaccaaccaagaagaaacaacgaccaccaccaaaacagcccacgaagaacca

SEQ ID NO: 4912 - RNA, 77 nt, Homo sapiens
gggaaccagcagggccccaggggagagaaaccaagcaaggccagcacagagaccgaggaaaaagcagcaaagggaga

SEQ ID NO: 4913 - RNA, 78 nt, Homo sapiens
cgagaaagaggagcccgaaggccccagccgcggaggaggcgagaagaggaaaacagaggaagaaacaagcgagaggaa

SEQ ID NO: 4914 - RNA, 75 nt, Homo sapiens
ggggcccagaagcggggacccgagacgcaagccccagcgaccccaagcaaaccggagcaaacagcaagagggaaa

SEQ ID NO: 4915 - RNA, 71 nt, Homo sapiens
ccaaggaaagagaaggcagaaaaaccgagcagagcacaggccagcacaagacagaagcgaaggggacaggg

SEQ ID NO: 4916 - RNA, 66 nt, Homo sapiens
accgaaagaggaggaaaaacgagccaaaccggaaagagcagcgcgcggaggaccgcccccacagca

SEQ ID NO: 4917 - RNA, 39 nt, Homo sapiens
acaggagccccacaccaaaagccaccaaccccaaccgcc

SEQ ID NO: 4918 - RNA, 75 nt, Homo sapiens
ccaacggagacgcaccgcccggaccaccaggagaaaagcccagcgagcggaaaggggaaaggagggcccgcgaga

SEQ ID NO: 4919 - RNA, 62 nt, Homo sapiens
agaacacgaacaaagagcgaccgagaaaaaccgaaagagccaagaaacacacagagaagcca

SEQ ID NO: 4920 - RNA, 75 nt, Homo sapiens
ccgggccgcccgcggcgccaccgaaagacacagggagggcagccagaacgggccaacggaggacgcgaacggggg

SEQ ID NO: 4921 - RNA, 78 nt, Homo sapiens
acccaaccgggggaagaccccagaaggggcagaccaacaccacccagcaaaaaccccgacgaacgcgccagggagcgc

SEQ ID NO: 4922 - RNA, 70 nt, Homo sapiens
cgcagaccgcagaaggccggagacaccagcagagccgcgcaagaccgcagagaagaacacggagaaacac

SEQ ID NO: 4923 - RNA, 83 nt, Homo sapiens
ccgccgccgccaccgccgccagaagaagcagcaaccgcagaagcagcggcaaccagaccggggcagagggagaagaaggccag

SEQ ID NO: 4924 - RNA, 93 nt, Homo sapiens
gagaagcagccgccagccagcagcccgccagccgccgggagcacccgacaggaggacgcccgccaggggagcagacagaacacccgggcccag

SEQ ID NO: 4925 - RNA, 54 nt, Homo sapiens
ggagagaacccccacaagccaggagcccggaagacagccgcagggcagacacca

SEQ ID NO: 4926 - RNA, 69 nt, Homo sapiens
ccggcaaaaaagcaaagaaagaagcaccgaagagccaggcagcgagcgggagcagacagggaaccgaag

SEQ ID NO: 4927 - RNA, 79 nt, Homo sapiens
aaccggagaccccgaaaacggaagcgcagggagaaggaagaggggaaaagagcgccgcaaggcacagccagcccgccag

SEQ ID NO: 4928 - RNA, 80 nt, Homo sapiens
cccgggcggcggggagggagccgcacaaggaagccacaaggaaggcccaagacgcaaagaccaagggcaggcgaacccgg

SEQ ID NO: 4929 - RNA, 61 nt, Homo sapiens
gggcgcagcggggacgcggacgcacgggggcagcacgccgaaggagagaccagacaacagg

SEQ ID NO: 4930 - RNA, 66 nt, Homo sapiens
gcgaggacaagcaaggaccgcaggacccaggccagaccggagcagcggggacagagaggagcgccg

SEQ ID NO: 4931 - RNA, 71 nt, Homo sapiens
cgaacaaagccgccggaaccaaagccagccggcaacgaagacgcagggagcccagaccccacagccagccg

SEQ ID NO: 4932 - RNA, 69 nt, Homo sapiens
aaaacaggcaggcggccacaggaaccaagagaccacagagagcccagaagaccaaagaaaaaaagaagg

SEQ ID NO: 4933 - RNA, 76 nt, Homo sapiens
gacacagaagcacggagcccaaggagaacacgagacccgcacaaaaccccgccccccaggccacacaggggccgag

SEQ ID NO: 4934 - RNA, 84 nt, Homo sapiens
cggggcgccagccgggcaggggcagcgggagccggccgggaagagggaaagacagagagaacgaagcaagaagacagaccagca

SEQ ID NO: 4935 - RNA, 45 nt, Homo sapiens
ggaaagggaggcaagaaggaagcaggacaggagacagagaggaga

SEQ ID NO: 4936 - RNA, 90 nt, Homo sapiens
gcccaaggacacgcaccagaagaaggagaaccagaaacaacaaacacaggaaaaaccggaacgggccgggcagggaaacagaccaaacgg

SEQ ID NO: 4937 - RNA, 60 nt, Homo sapiens
ccagcgcagaacggagcgcccgggagcaggaggagagccgcaggcaccaggacaaaagaa

SEQ ID NO: 4938 - RNA, 72 nt, Homo sapiens
aggagaaccgggagccacagaaaaggcgagacagagggaaagaaccaccaccaacgagacacaaaaagaaaa

SEQ ID NO: 4939 - RNA, 73 nt, Homo sapiens
cgcgaaaaggaacccacaaacaccacacaagaggaccagcaaccacagacagaggcggagcacggcgaccgag

SEQ ID NO: 4940 - RNA, 55 nt, Homo sapiens
agccccaacacagccccggcagcgcaggacaccggagaacagagacagacccggg

SEQ ID NO: 4941 - RNA, 81 nt, Homo sapiens
cacaacacgcaaccagcaacaccacacccccgacaccaagcagcgaacgccgaaagagagaggaaggcaccaaagaacaac

SEQ ID NO: 4942 - RNA, 86 nt, Homo sapiens
cggagggggaaaaaacccaaggcgcaaagccggcaagagcgggaaggagggcgcacagcgcaaggggcagcgcgaaggagaagcgg

SEQ ID NO: 4943 - RNA, 87 nt, Homo sapiens
cggcgagccaccggggagccaccgcccagcccaaaccaggagagcgagggagcgagcgggcagcgcggccaagcccagcacgggcca

SEQ ID NO: 4944 - RNA, 84 nt, Homo sapiens
cccagccggccccccaccccccccggagccaggcggcggaaagcccacagcagcagccagaagcagaggaggagggcgaacgac

SEQ ID NO: 4945 - RNA, 73 nt, Homo sapiens
acacagcgaagcggaacaaaaaaccggcaagggaagcgggaaggcaaagaagaagcgcccacagaaggaagcg

SEQ ID NO: 4946 - RNA, 87 nt, Homo sapiens
cgagcgaggaggaggcggagcggggcccgacggggcacgcccacggaagccccccaaagcgagggacacaagaccccacgaagacac

SEQ ID NO: 4947 - RNA, 59 nt, Homo sapiens
cgagcccgggacccgaaggaacacgcagggccagcaaagcgggccagacacgaagaggc

SEQ ID NO: 4948 - RNA, 87 nt, Homo sapiens
ggccaaagcaagaagggcccaagaagaaagaccacagcaagaccacgcccccagccgggggaccaggccgaacgacccggacacaaa

SEQ ID NO: 4949 - RNA, 78 nt, Homo sapiens
cggcgcggcggcggcgccgccgggcgggcggacaagcagaccggaagaccgacggaagaccacaccccgagggagccc

SEQ ID NO: 4950 - RNA, 108 nt, Homo sapiens
gagccgggacccgagccagcgccgcacaggaccggccaccgcccccgcaccgacggccagagagcgcaagcagaacaaggggagagcccgacgcagaacagcggagcc

SEQ ID NO: 4951 - RNA, 82 nt, Homo sapiens
cgaaagagacgggcacgccagggaacagggaaggagccgggagaggccaggccccccggacgcagccgcccggggcccggag

SEQ ID NO: 4952 - RNA, 70 nt, Homo sapiens
cgcgagcacacaggagaagcaagaggcgcaaagaagcacggaacggggggagagcacacgcccgccaccg

SEQ ID NO: 4953 - RNA, 77 nt, Homo sapiens
aggagaaaagccacacggacaagagaaggaccgaacaccaaaaaaggacgagagaaacaggaaaccagagccaagcg

SEQ ID NO: 4954 - RNA, 62 nt, Homo sapiens
ggcgacagggcggcggcgccaggcagggcgcagaacgaagcgcgcggcaggcgcgcgccgcc

SEQ ID NO: 4955 - RNA, 77 nt, Homo sapiens
acgcccacgcaacacacgacgaagccgccgcaccaggcggaggcagggcagacacagccacgcagggaccggacaag

SEQ ID NO: 4956 - RNA, 79 nt, Homo sapiens
gccaaaccaaacggagcgggcagcaggaagggacggcgcgcggaggccaccggcgagccgcggagaaaggcagaggggg

SEQ ID NO: 4957 - RNA, 79 nt, Homo sapiens
gaaccgcacgccagagaaccgcccgcaacacaacagcagcaagagaagagcgacgcggcagcgagagagagagccgcag

SEQ ID NO: 4958 - RNA, 80 nt, Homo sapiens
gcgggcccgaggagggggaccgaagacgaccgacccgcccagcacgaccagccagcagggcggggacagagagcaccagc

SEQ ID NO: 4959 - RNA, 77 nt, Homo sapiens
cccccgagcagcgggacacaggagaaaggccaggacaaagacaagccaaacccagggaggaaaggaaaggagagaaa

SEQ ID NO: 4960 - RNA, 80 nt, Homo sapiens
accccaagcacccaggaaccggcaacaggaagggaccacagaccagcacgccggcgccacgaaccgagcgacaggacggg

SEQ ID NO: 4961 - RNA, 74 nt, Homo sapiens
ccagcagggcggaagcacaggcgcaaaaaacaaaaaggaagccccggcaccagcaaccccaacacacccccaac

SEQ ID NO: 4962 - RNA, 61 nt, Homo sapiens
gagcggcggggaagaggcgcgagaggccgggaaacgcaagcaagacggaccgaagagacag

SEQ ID NO: 4963 - RNA, 46 nt, Homo sapiens
ggcagggaaccgaaagacaaggacggaggggggaggagcaggcccc

SEQ ID NO: 4964 - RNA, 71 nt, Homo sapiens
ggagaaaacccagcgcacagggaaacccagacgacaaggaaggccaagggacccacgaccaaccaagaaaa

SEQ ID NO: 4965 - RNA, 73 nt, Homo sapiens
aacagcaagccgccagagcgacccagaaagcacaagccaaaagacaaaagaagaccgaggaagcaacgccgga

SEQ ID NO: 4966 - RNA, 85 nt, Homo sapiens
caagaccggaccagccagaggacgcgggccgaggagagcggaggagggggcacaacgcacagagaacaaaagaaaggccacagcc

SEQ ID NO: 4967 - RNA, 77 nt, Homo sapiens
caccgcccggccggcgcccgcaaccgcgacgaagaaaaaaagagcgacgaggcaagaaaaggcacacacacccgcag

SEQ ID NO: 4968 - RNA, 81 nt, Homo sapiens
gaaaccccaagaacaacacgacagagccggcacgacaaagagcaagacgaaacggaggagcccaggaggaagaagaagcag

SEQ ID NO: 4969 - RNA, 80 nt, Homo sapiens
acaggcagagacagcgaaaaggggaagcgccaaagaagcgacgcgaaagaaagaaagaaaagcggagagccgaggcaggc

SEQ ID NO: 4970 - RNA, 79 nt, Homo sapiens
gagcagcagagagccgggccagagccaggggccgggagggcgccagagcgaccaagccagaagaacaaccagaaacaaa

SEQ ID NO: 4971 - RNA, 90 nt, Homo sapiens
ccggcggagcggacccacaccccggaccgagggacgcggggacaagaacccaagaaacaggaaaaaacccaaaacaccaaaaggaccagc

SEQ ID NO: 4972 - RNA, 61 nt, Homo sapiens
gaaggagaaggagggacgcaggcgcaggccagaaacccgaaacccacaaacaagcagaaaa

SEQ ID NO: 4973 - RNA, 38 nt, Homo sapiens
aagagcggagcccaaagccacgagccacaagcccgcac

SEQ ID NO: 4974 - RNA, 71 nt, Homo sapiens
aacggcagaccgcagaacacccagccaggggggagccccccagacccgaaaggagacaagaggacagccgc

SEQ ID NO: 4975 - RNA, 78 nt, Homo sapiens
agaaaccggcagcgaagaaaaagacgggagcacagagggaggaccagaaaaaccccggagacaaaacaaaagagaaaa

SEQ ID NO: 4976 - RNA, 77 nt, Homo sapiens
caggccgcgccggccccgcccaccccccccgcggggcggcagcccgaagccggaccagcagcagcccaaaaaagaag

SEQ ID NO: 4977 - RNA, 82 nt, Homo sapiens
gaagccccgggaggccgaaggcaggacaccgaggggaaaggagcgacaggaagagagaagggcacagaccaagacaacgaac

SEQ ID NO: 4978 - RNA, 79 nt, Homo sapiens
ggaccccacacacacgacccacacagccggcacgcacaccacgcccaagccggacaacccccaagaaagggagcccaga

SEQ ID NO: 4979 - RNA, 73 nt, Homo sapiens
acagccaggccacacaaagccgggggcccccacggacgcgcgagacaagaggaggaaaagaaaaccggaaagc

SEQ ID NO: 4980 - RNA, 98 nt, Homo sapiens
cccacaccaccgcacgcgcgcccgccgcccgaggagccccgcgcgggaagcgggcacggaagaggaccaccacgcccgggcaacaacggaggcgagaa

SEQ ID NO: 4981 - RNA, 34 nt, Homo sapiens
ccacagaggggcgacgcgccccggggaccgcgcc

SEQ ID NO: 4982 - RNA, 75 nt, Homo sapiens
aagaaaagcacagagaagacgaaggaggccggagaagaaagaggccacggaccgagcggcacgcagaggggagcg

SEQ ID NO: 4983 - RNA, 58 nt, Homo sapiens
ggcagcaggcggaggccacaggagggagggggggaacggaacccaggcgcaaagcggg

SEQ ID NO: 4984 - RNA, 82 nt, Homo sapiens
agggacaggagaagagagggggcaggaagcgccacagcgaccaccccagaggccccagagccccaccaggagcaggggccac

SEQ ID NO: 4985 - RNA, 76 nt, Homo sapiens
gacagcaagacaagaaaacaacaggccagccgaggcaacaggaaagaggcgaacacgaaagacaccccaaacgccc

SEQ ID NO: 4986 - RNA, 64 nt, Homo sapiens
ggagacggagccgcagagggcccacggggaagcgagagaggaggcgagggagaccacaaaaggc

SEQ ID NO: 4987 - RNA, 81 nt, Homo sapiens
ggaagggaaagcagcaacacaaccaggaggcccaagccccgaagccgaagccacgccccacaggaacacccaacgcgcccc

SEQ ID NO: 4988 - RNA, 75 nt, Homo sapiens
aagaacccagaaagaaaggagcgccccaaaaggaaacaaagcaccagcaccaagaccagccagggagacgacccg

SEQ ID NO: 4989 - RNA, 85 nt, Homo sapiens
gacagcaccgacccgcaacccagaccacaaagaggaaaggacgccaggacacacggcacaagggaccaagaaaggcccagggacc

SEQ ID NO: 4990 - RNA, 67 nt, Homo sapiens
ggaccacacaagcaaaagaaaccagggggaaggccccgggcagccgagcgccagggaaacaacccac

SEQ ID NO: 4991 - RNA, 77 nt, Homo sapiens
caaagaaaaggagaaaagaagccaaagggacacgggaggaaaagcacgaaggaagccaagcagaacaaaagaaacca

SEQ ID NO: 4992 - RNA, 58 nt, Homo sapiens
ccgggcccggaccgcccccgagcccggaggggggagaaaaggccaccagcagaaaagg

SEQ ID NO: 4993 - RNA, 74 nt, Homo sapiens
gaaaagcacagaccccggaaacacccaccaccgaaccagaccaaagcagggaaaagcggaaaccaacagcaaaa

SEQ ID NO: 4994 - RNA, 75 nt, Homo sapiens
agagaagagagacagaagagcagaggcaccaaacaaagcccaacgccagacaagaaaccaaagaaaagaaaaccc

SEQ ID NO: 4995 - RNA, 76 nt, Homo sapiens
gccagggcccagaccaggcagagcgcagaacaacccgcccccacaagcccagcaccggacagcccccagcacccgg

SEQ ID NO: 4996 - RNA, 67 nt, Homo sapiens
aggcgccggccccgaccacgcccaacgaacgaagagccccagggaaaagacaaagcacgagaacgaa

SEQ ID NO: 4997 - RNA, 103 nt, Homo sapiens
agcaaggacccaccaggccgaagccagccggagcagcggcacagagcagcccgacggccaggaggcgaagagacgaggaagcccaggagcccgaacacaaaaa

SEQ ID NO: 4998 - RNA, 50 nt, Homo sapiens
gaacacagaggaaaccgcaccgcccggagagccgaaaaccagccccgccc

SEQ ID NO: 4999 - RNA, 67 nt, Homo sapiens
ccccaagagcgagaacaggacagaccaaaaagaagcaaaaccacgccagaaccgcaaagaagaacac

SEQ ID NO: 5000 - RNA, 70 nt, Homo sapiens
cagagcccgcgaacaagacaaggacaaaccggcgaccacacacggggacgacggggaagccggacagcaa

SEQ ID NO: 5001 - RNA, 78 nt, Homo sapiens
agagggacagcagagaccaccgaagacgcacgccaagacagggaacggagccaagggggagccggccccaggggaccc

SEQ ID NO: 5002 - RNA, 36 nt, Homo sapiens
aacgaccgagaaggaggaaaagcagaggaaagagca

SEQ ID NO: 5003 - RNA, 73 nt, Homo sapiens
caggaaaagacaaaagcccgagggagcagacaagggcccaaaaaaggaccaagccccagaagcgccgggacgc

SEQ ID NO: 5004 - RNA, 80 nt, Homo sapiens
gagagggggcggacacccacccaaaacgggcccacaggggaccaagaaaggcccagggaccaaagcccggacaaggcccg

SEQ ID NO: 5005 - RNA, 78 nt, Homo sapiens
caggggggggccaagagcgcccagcggacacagccccggaggccaccccaccccagaaaagccgaacccccacacaag

SEQ ID NO: 5006 - RNA, 61 nt, Homo sapiens
ccgcagagcgcgcagaccccgggaaagggagcagcaccggccacacccacagcacgaccgg

SEQ ID NO: 5007 - RNA, 73 nt, Homo sapiens
gaagaagagaagaaagcacaaaccggccaggaggagagaaagaacccacgcaggacgacagaagaggccggac

SEQ ID NO: 5008 - RNA, 75 nt, Homo sapiens
cccacccacgaagggaggaaaagggcagggacagcgcaggcagcagacccagagacacagggcacgcccgagaca

SEQ ID NO: 5009 - RNA, 80 nt, Homo sapiens
gaggagaggcagaaacggaaggcggacacgagaaagggcgcagcacagggaagacagaggcggaagaaagagcacagacg

SEQ ID NO: 5010 - RNA, 61 nt, Homo sapiens
cggggcgcaggacacaaccaaggccgacaaagggaccagaggcaggacgcagaaggaccca

SEQ ID NO: 5011 - RNA, 79 nt, Homo sapiens
gaggccgaggcggcggcgcgaggcagggcggagaacggaaaagcaccaggaagcagagaggaccgcagaagggaaggag

SEQ ID NO: 5012 - RNA, 52 nt, Homo sapiens
cggcccaccccggggagcaacaggaagacagcccaacaaggcgggacgacaa

SEQ ID NO: 5013 - RNA, 73 nt, Homo sapiens
ccgacagcccgggaagaagcagacacaagagcacaacagggagaagacagcaagaccccgaaccgagcagacg

SEQ ID NO: 5014 - RNA, 76 nt, Homo sapiens
gagcgaccccgcacgaccggaaccaagccagagccaggagagagcaggaaccgagagagcggcacgcaagaagaaa

SEQ ID NO: 5015 - RNA, 48 nt, Homo sapiens
gaaagggcaacccacgagagaacagagccagcaccgaaggaggcgcac

SEQ ID NO: 5016 - RNA, 81 nt, Homo sapiens
gacgcaccacaccgggacaggggagaggaacagcgagaagagcaagcaccaggagcagcgagccagcaaacacccgccgcc

SEQ ID NO: 5017 - RNA, 81 nt, Homo sapiens
gaggggaggcaggcgcggcagacggcgacagggcggcggcgccaggcagggcgcagggaggagagcagaaggccaggaagg

SEQ ID NO: 5018 - RNA, 71 nt, Homo sapiens
agaaaacgcagaagaaagaggcacaaagaagaacgggagcgccgcaagacaaaacaccggggcccacagga

SEQ ID NO: 5019 - RNA, 67 nt, Homo sapiens
aaacgcacccaccaagcccacgggcaacaagcgacaggagacaggaacggccgaacacagagggaga

SEQ ID NO: 5020 - RNA, 36 nt, Homo sapiens
ggaggccccagccacgggaaccagaggaaaccagag

SEQ ID NO: 5021 - RNA, 75 nt, Homo sapiens
cgagggacaaaccaacagcacccccgacgccccgccaacgggacagacagaaaggagccaacaacaggcccacca

SEQ ID NO: 5022 - RNA, 37 nt, Homo sapiens
cagggcgggcccggcacccgcgcccccaaagcccacc

SEQ ID NO: 5023 - RNA, 78 nt, Homo sapiens
acagcccgacggaccagcacacgccgacaccagggaccaggcggaccaggacgggaggcagacccacacggggaccgc

SEQ ID NO: 5024 - RNA, 72 nt, Homo sapiens
caagggacggggaccaaacacacaagaacacccaaagaggaaccaaaacaggcccgacacgcgacaggaccc

SEQ ID NO: 5025 - RNA, 76 nt, Homo sapiens
cgcgagccgcgcgcggcccgcgcgcccagacagcgaacaaacagggaacgaagcccaaaaggcagagacggaccga

SEQ ID NO: 5026 - RNA, 59 nt, Homo sapiens
acacggccaagcgccgcgcggcagccaaggaggcgaagccgagaccggaggaccacggc

SEQ ID NO: 5027 - RNA, 84 nt, Homo sapiens
caaccagcagagcccaggacacaagcccagcgggaccagacaccgcggaagcggcgacggggcccggggagacaggcgccagga

SEQ ID NO: 5028 - RNA, 87 nt, Homo sapiens
ggaagagcccggagcaggaggagaaaggaaacagaggagagaacacggacaccagcagcgcaaaacaccaggagcgccaaccggaac

SEQ ID NO: 5029 - RNA, 82 nt, Homo sapiens
cccgggcgccgcgccgcacgagcaccagccagagccagccccgcccaggccgagagaggagccccagaaagcgcgccgggag

SEQ ID NO: 5030 - RNA, 65 nt, Homo sapiens
cagacgcagggcgcccccggggccacccaagggggcagccagagccggacagaggacaaggccca

SEQ ID NO: 5031 - RNA, 80 nt, Homo sapiens
aaaaagagcaggaaacaaagagcgcaacccagaaaagcagacaccgccaggggacagaaccacgagggacggcaacgagg

SEQ ID NO: 5032 - RNA, 85 nt, Homo sapiens
ccaccccggaccaagaggagccaggacgcccgaccccccagcagacgcaaaggaaaagccaaggagacgggccgggaccagggac

SEQ ID NO: 5033 - RNA, 85 nt, Homo sapiens
gaacccccacgcggccagcgaaaacgcccagaggagaggagacgccggagcgggacgaccagagaccgagagcggcgcgcaccgc

SEQ ID NO: 5034 - RNA, 57 nt, Homo sapiens
ccgggcccggaccgcccccgagcccggaggggggagaaaaggggccgacgcccggaa

SEQ ID NO: 5035 - RNA, 82 nt, Homo sapiens
ccaaggcaggggccgccagggacagggaggacagagaaggggggccacgaagaaaagaagccggaggagaaggcagcagaag

SEQ ID NO: 5036 - RNA, 58 nt, Homo sapiens
ccccacccgggccgcccgaagaaagcgccgcgcaaagaggggaaagaccacagcagag

SEQ ID NO: 5037 - RNA, 54 nt, Homo sapiens
agagaaggaaggaaagaaaaacaagccagaaaaagacgacaaggagaaaaagaa

SEQ ID NO: 5038 - RNA, 70 nt, Homo sapiens
aagaagaacaaccagaagaaggcgaaaccgagggaggaagcgccgaaaagcgaaaagaaacaagccgcgg

SEQ ID NO: 5039 - RNA, 72 nt, Homo sapiens
cgggggcgcgacaagcccgagcagaggcccagcccaggggccggcgcacggggaaaaaagcagcggaggaga

SEQ ID NO: 5040 - RNA, 79 nt, Homo sapiens
cgcagccaagaaggccaggggagcggcaggaaggccaccacagggccaacaagcagcgagaccaagggaacggaagccc

SEQ ID NO: 5041 - RNA, 81 nt, Homo sapiens
gacccccaccacgcccgcaacagggcaccaagagaggcgagagaccaggcacccggaagcaaggcggccagcaaagaggag

SEQ ID NO: 5042 - RNA, 64 nt, Homo sapiens
aacccgccgcgcaccgacccgacgcgccggcccacgcgcggccaagacaaacacaccgggaaca

SEQ ID NO: 5043 - RNA, 67 nt, Homo sapiens
agacccggggacccccgacgccaggcagcgcccccaaacggaagcgaccggacaaccagaagggaca

SEQ ID NO: 5044 - RNA, 77 nt, Homo sapiens
gggcgggcgccagcgaggcgacagcagccaggcgagcggcagggagacagcgcacccgcggagcgggcacacagcac

SEQ ID NO: 5045 - RNA, 61 nt, Homo sapiens
cgggacccccgaccccacggcggaagacccaacagaggaagccgcaagaaacgggacgaca

SEQ ID NO: 5046 - RNA, 77 nt, Homo sapiens
aaaagcaaagacaagccgggaagagaaagcggagagggccaagccggaagaagccagccaggagaagaaacagagga

SEQ ID NO: 5047 - RNA, 79 nt, Homo sapiens
cccccccccgggccacccagcccgcccaaccccagcggagagcaaggaagaagagagggcgaaggaggccacacagaag

SEQ ID NO: 5048 - RNA, 40 nt, Homo sapiens
gggggggcaaacccgagagaacggcagaccggggaaccag

SEQ ID NO: 5049 - RNA, 87 nt, Homo sapiens
cagacccagcgagggcgaacaagaggccgcgcagcaggagagaagagacgaggaggaggggagaccgcggcaggacacgaggacagc

SEQ ID NO: 5050 - RNA, 83 nt, Homo sapiens
cagcaaagggccggaaggaaagaagaagaggcccgcaagaccgggaacaccaccaggagggccggccggcggggacagcgggc

SEQ ID NO: 5051 - RNA, 65 nt, Homo sapiens
cgggacccaagccagcaacaagaccggccagccacagagcagagaaagccggaccagcagggagc

SEQ ID NO: 5052 - RNA, 86 nt, Homo sapiens
cgcagagcccggaccgcgacgccggggcaccgcaggggaccgcgaagcggacgaagaagcgaagaaaaacaggacaggagaaacca

SEQ ID NO: 5053 - RNA, 84 nt, Homo sapiens
cacggcgcacgaggggaagggcaggaggaggaggaggggcccggcggcggggaggacgagccacaaccagcgacagaggcccgc

SEQ ID NO: 5054 - RNA, 73 nt, Homo sapiens
gcaaagccccagacggacggggccagacgagggagggccaagaacccggaggagggcaagccggacaggccag

SEQ ID NO: 5055 - RNA, 95 nt, Homo sapiens
ccgagaaagaaggaggaggggggaggcgaacagccggcgcccggacgcgaggggggagggggcggcggccggcgggcaaaggacgccaggaggaa

SEQ ID NO: 5056 - RNA, 94 nt, Homo sapiens
cccaggcggccagaggggacaccaaaaggcgaagagacgccagagaggcggcagcgcggaggacaaagcagggacccgcgcccgggggcaccaa

SEQ ID NO: 5057 - RNA, 76 nt, Homo sapiens
cgcagaagcgcggcagggagcgcgggggcccgcgcagcagcgaccacgaaaaccagaaggcaccgacaggaaagga

SEQ ID NO: 5058 - RNA, 60 nt, Homo sapiens
gaagaaagcaagacccaggacaccccgaagccgagaaagggagagagcccaccaaggaac

SEQ ID NO: 5059 - RNA, 77 nt, Homo sapiens
ccaaaagcaggcaagggggagcacacccagcaaacgaaggcaccgggccggcccagggagaacgcaaaaccaccacc

SEQ ID NO: 5060 - RNA, 46 nt, Homo sapiens
gggagaagagaaagagacgcagcgcgcgcagagaccagcgccgacg

SEQ ID NO: 5061 - RNA, 66 nt, Homo sapiens
acgggacgaagcagaggaacggggcaacgcgagcagaacagcccagccggcgaaccggcacgagca

SEQ ID NO: 5062 - RNA, 71 nt, Homo sapiens
aggcgcccaaaacaagcgaagacggagcccccagcgacagcaaacccccgaaccccaccccccaaggcccc

SEQ ID NO: 5063 - RNA, 86 nt, Homo sapiens
acacagcccgacaagcacgcgggccggcagccagcacggccaaaccccccccgcccgcccaacacagggagaagaaaggggaccgg

SEQ ID NO: 5064 - RNA, 67 nt, Homo sapiens
acccacacaccccaaaggaaaggagaaaggacgagcacgaagcggaacaaagggaaacgacgagagg

SEQ ID NO: 5065 - RNA, 81 nt, Homo sapiens
gggcaagccggggaggggcccaggaaagcgaccccggggccaccgagccaaaaggacggagagccaggccccgaccacaaa

SEQ ID NO: 5066 - RNA, 75 nt, Homo sapiens
aagcaaccggagggagcaaaaggagcacgccggcagccagaaagaggaggaggaaaaaaaacagaaacacaaggg

SEQ ID NO: 5067 - RNA, 81 nt, Homo sapiens
aacaagagaagagacacagaaacggaggacaagaagccggacacaaggcgccacggcagcggaacccgcccacgccagcga

SEQ ID NO: 5068 - RNA, 81 nt, Homo sapiens
ggcgaacggccgggagaggggaagaggggacaaagccgcccacccccagcggcacagacacagcaggagccaagccccccc

SEQ ID NO: 5069 - RNA, 83 nt, Homo sapiens
aaaaccgcacaaagagaacaaaaaaaaaacaagagccgaagaagcacaagcaccggggcaagcccaccaacccgcccaggcgg

SEQ ID NO: 5070 - RNA, 93 nt, Homo sapiens
ccgcaaacgaggaagcagcgaggagggcagcccccaccacccgcccaggccagccccagcagcaacagcagcacaggcgggccaaaggagaaa

SEQ ID NO: 5071 - RNA, 77 nt, Homo sapiens
cccggaaagcccgccacagcggcccggccccccggacagacgccgacgcccagagggcgcgccgggcaccaaagcga

SEQ ID NO: 5072 - RNA, 58 nt, Homo sapiens
aggagccacggacaagaccaaaagagaaagacgaccgccaaccagggagaacacagag

SEQ ID NO: 5073 - RNA, 77 nt, Homo sapiens
ggaagacccgcggcagcaggacacaagcgccgcaaggagcagacgccccgccagaccgaagccaccccaccccacca

SEQ ID NO: 5074 - RNA, 39 nt, Homo sapiens
ccccgagagggggaacagggcgaggaggcccaggccgag

SEQ ID NO: 5075 - RNA, 73 nt, Homo sapiens
agcaaggaccaacacagaagaagcgcagccaggaaaagaaccgcccagccagagacagccacaaagggaagca

SEQ ID NO: 5076 - RNA, 75 nt, Homo sapiens
gccccgccggccgccggccgcgcgggggaagacgaccccgacgcaggccaggagccgcggacagaagccgagcac

SEQ ID NO: 5077 - RNA, 80 nt, Homo sapiens
caacagaagaggagagaggaacccgaagaagaaaggacgacagccagagagaggagaaagcacccagggagagagcagag

SEQ ID NO: 5078 - RNA, 82 nt, Homo sapiens
cgcgggggacgggcaccgggcaccgggaaaacgcagaggaacgagggggagccacgaggagaaggccacgcgggcgccccac

SEQ ID NO: 5079 - RNA, 38 nt, Homo sapiens
cagaccaaacggcaagggcgcggagaccacaggcagaa

SEQ ID NO: 5080 - RNA, 77 nt, Homo sapiens
agagacagggaaacagaaagaacgaggggccacggaccaaccgagagcaccagacaaccggaaaagcgaaggcagag

SEQ ID NO: 5081 - RNA, 80 nt, Homo sapiens
gagcgacagcaaggggggccacgaggaacaaagacagcccaccaggaagagcgaaaagagaaagacagcaaagaaaagga

SEQ ID NO: 5082 - RNA, 52 nt, Homo sapiens
cgaggcgagacggaaagggcaccggagcagagcgccaccagacagaggagcc

SEQ ID NO: 5083 - RNA, 57 nt, Homo sapiens
agaaaagcgccaagcgcagccaaacggacagcccaggacaccccaaagaaggaaaac

SEQ ID NO: 5084 - RNA, 71 nt, Homo sapiens
aagagaggccggggaaagccggaacagcaagaggaccgccgcggagaccacaggaccgaagaagacaagcg

SEQ ID NO: 5085 - RNA, 73 nt, Homo sapiens
gggaccaacgcaccagagccgagaaacgcgaaaaggaagcggaaggaccaaacgcagcggaaacccagacagc

SEQ ID NO: 5086 - RNA, 73 nt, Homo sapiens
caagacggcaaagccccccagaagaccaggccacgcgcagagcgaacaccaccgcgaagacgcagccacccgc

SEQ ID NO: 5087 - RNA, 75 nt, Homo sapiens
agagacgaaaggaaccaaaaccagcccgagggaaaggccagcagaacaccagaagcagccgaaacgaaccaagaa

SEQ ID NO: 5088 - RNA, 64 nt, Homo sapiens
cccggcgccggccgagaaggcagaggcggacccaccacggcgccacagcggcagggggggaaaa

SEQ ID NO: 5089 - RNA, 95 nt, Homo sapiens
agccaagaggaggacagcgcacacagcaagcacgaggaaacagaacgacagcccgcaccgacgccggcggccagccagagagcacgccggccgca

SEQ ID NO: 5090 - RNA, 76 nt, Homo sapiens
gcaacccagccgcaagcccacaggcaggcaggggcagaaggcgacccagcgcagagcaaacagaaccacccagaca

SEQ ID NO: 5091 - RNA, 96 nt, Homo sapiens
cggagaccccaccgccggcgcgggaaacgggcgaagcgacgagccgcgaggagggggcagcacgccgaaggagagaccagacaacaggccagggaa

SEQ ID NO: 5092 - RNA, 72 nt, Homo sapiens
aacaggcacccaggacagagcacagaagcccccacagaccagcaaagaaagggagacaggcagaaccagacc

SEQ ID NO: 5093 - RNA, 41 nt, Homo sapiens
cccggggaaagacagcccacagccaggcccgagccggcaaa

SEQ ID NO: 5094 - RNA, 68 nt, Homo sapiens
gcaagaaagggaaggaacggcaacgaaaagagacacgacgcaaacccccaagagaaacagcacgcgcg

SEQ ID NO: 5095 - RNA, 62 nt, Homo sapiens
caccgccggcgccaccgcccacgcaaggcgcacgccccaagcccacggagcacagcagagaa

SEQ ID NO: 5096 - RNA, 71 nt, Homo sapiens
cgcgcggaggcggcgacacgcaaaaggaggagcccgcggaccggccaggaacgaagcaaacgcaccaccaa

SEQ ID NO: 5097 - RNA, 84 nt, Homo sapiens
gcggagaagacccaagcagcgccgcacccgccaccaggagagaacgccgcgccgcgcgacaacggcccggcaggcaaggccggc

SEQ ID NO: 5098 - RNA, 85 nt, Homo sapiens
agcaacggaagcgcagcaacagcaagccccgggcagggggaaacaggaagagaacagaacggaagaaagcagaagaggacgaagc

SEQ ID NO: 5099 - RNA, 66 nt, Homo sapiens
agaaggaggccggccgacacaaacaggaaacacccaaggaaccaaagcaggccagcagaaaacccc

SEQ ID NO: 5100 - RNA, 66 nt, Homo sapiens
gggacgaaaagccaaccgagcagccgaaagagaacacagaagcggcaaaagcgccacagcacgggg

SEQ ID NO: 5101 - RNA, 63 nt, Homo sapiens
ggagggagaccacagcaagacgccaggaccccggaagccagaaaggcgccgggccaccacccg

SEQ ID NO: 5102 - RNA, 77 nt, Homo sapiens
agcaggaccaaaggccagaagccaggaccaaccaagaagcgaagaaaagagaaagaaacagacaagcgagagagcag

SEQ ID NO: 5103 - RNA, 77 nt, Homo sapiens
agaggacgccagcggcgcgcagccccccccccgcacccccccagccacagcaccggcagcgacggcgcccgacagcg

SEQ ID NO: 5104 - RNA, 76 nt, Homo sapiens
cggggccgcggacgaggaccagcagaggccagcacgagaacccagggacaagagaaaaaaagggcgggcgaacaaa

SEQ ID NO: 5105 - RNA, 91 nt, Homo sapiens
gaacggagcaaaaaacggacaacggaaaaagccagaccagaggagaacaaaacaaggccgcgcaccaggcgcagaacccaagcaagcaccc

SEQ ID NO: 5106 - RNA, 79 nt, Homo sapiens
cggggcaagaagcacagcacaccaaggacgcagcgcggagggccagccgcacgccgagagacacacaagagcagaaggc

SEQ ID NO: 5107 - RNA, 73 nt, Homo sapiens
agggcccggcccgaaaggagagcccgccaaaaccgggacaaggaaagaacggagacgaccggggagaaccggg

SEQ ID NO: 5108 - RNA, 108 nt, Homo sapiens
gggacgcgacccgccagaggggcccacaaggaggagaggggaccagggaaccacccaagaccccgaccacaccccaccagcgggccagaaggacagaagagcaagcag

SEQ ID NO: 5109 - RNA, 59 nt, Homo sapiens
aacagagacagcagccaaacccccagacaacaggcacaaagagagaaggaacacccaca

SEQ ID NO: 5110 - RNA, 60 nt, Homo sapiens
gggcggagacggggcgcccccccgccaaggcccggcgagaagcaagcgcccaagggggga

SEQ ID NO: 5111 - RNA, 78 nt, Homo sapiens
caaggaggcggaagcaacagaaggcaaaacgaagacgaggcaaagcacccagcccaccccggaaaaccagcagagcgc

SEQ ID NO: 5112 - RNA, 66 nt, Homo sapiens
gacgcacccccaaggccaaccaagcgaccaaggaacgaccaaagcagaagccgcaaacagccaaac

SEQ ID NO: 5113 - RNA, 62 nt, Homo sapiens
gaagagaggggagccccggaagagggaggcgggacgcggcaggagggaacccggcgcaaccg

SEQ ID NO: 5114 - RNA, 73 nt, Homo sapiens
cgggaccgcgcgcccacgccgcgccagacagagggaacaggcacgccccacccgccagccgagcccccgacgc

SEQ ID NO: 5115 - RNA, 35 nt, Homo sapiens
cggccagccaccggagggagagacgggggcaccag

SEQ ID NO: 5116 - RNA, 75 nt, Homo sapiens
aaaaacacaaccagagcgccaagaagcaccacaaagaaaggcaagaacgccccggcaaggacggaggcaggcacc

SEQ ID NO: 5117 - RNA, 66 nt, Homo sapiens
cggggagacccggggacccccgacgccaggcagcgcccccaaacggcccgaaggaagaaagacgaa

SEQ ID NO: 5118 - RNA, 78 nt, Homo sapiens
ggggaagcgcggaagcacagacccgccaccacgcggcggaccaagccagcgggcagcaaggccccccgggcaggcccc

SEQ ID NO: 5119 - RNA, 72 nt, Homo sapiens
gcggcgggcaagcgccgggacaagacagcgcagacccacagaacgcaacaagccccagagaccacgcaacaa

SEQ ID NO: 5120 - RNA, 58 nt, Homo sapiens
cacgcgcagggcccacgacgagacaagggaagaacacaaggcacacaaagccacccaa

SEQ ID NO: 5121 - RNA, 37 nt, Homo sapiens
aaaaacagaccagaagaaccaagagacggccggcaac

SEQ ID NO: 5122 - RNA, 68 nt, Homo sapiens
caggaggggagagaaccgaggaagaccaagcccaggaagagaagaaagaaccaacaaaggccggaccc

SEQ ID NO: 5123 - RNA, 73 nt, Homo sapiens
caaccggagccccccaggagggaggcaggggaagcacaaaagcgcacccgcgccagcgaggaccggaacgggg

SEQ ID NO: 5124 - RNA, 76 nt, Homo sapiens
aggccccacaaaagggaagcgggagaacgaaggaagcacagggaggacggaagggagacacccagacacaaacgca

SEQ ID NO: 5125 - RNA, 77 nt, Homo sapiens
ggaaaaggggagcgaagaaggcgaggaacgaccacccgaaccgcaaagcggagcagggccaggagagggcagggacc

SEQ ID NO: 5126 - RNA, 77 nt, Homo sapiens
accacgcaaaaacaacgggaagagaaccacagcgaaaaagaaagccaagaaaagacagcaaaaagcaaaggacaaaa

SEQ ID NO: 5127 - RNA, 52 nt, Homo sapiens
agaccacagcgcgcggcccccacaccacacagagagcgagccagggaacggc

SEQ ID NO: 5128 - RNA, 53 nt, Homo sapiens
ggaggcgaaagcggaacgagggacggaaaaggcgcacacgacccggagaaccc

SEQ ID NO: 5129 - RNA, 68 nt, Homo sapiens
cagcagaacaacgcagccaccagccagaaccagaagagggaaaagaaaagccggcgagaacgccggga

SEQ ID NO: 5130 - RNA, 76 nt, Homo sapiens
agaccccgggacggggaggaagagcgccgggacccggagcaagcaaagcgccaaaccaagacaacaggcacaaaga

SEQ ID NO: 5131 - RNA, 77 nt, Homo sapiens
cgccgccagcggccgggaccgaacaggcgacaacaggcacaaagagagaaggaacacccacagggcagacagagaaa

SEQ ID NO: 5132 - RNA, 78 nt, Homo sapiens
gacgccccggagccggaaccccagcagaagccggaaccagaaccaaacaccggaagcggaagaaagaagagccaagaa

SEQ ID NO: 5133 - RNA, 73 nt, Homo sapiens
acggggcagagcagacaaccagacgccaggccaacaggcaaaacaagacggaacagccaaccaagaaaggggc

SEQ ID NO: 5134 - RNA, 80 nt, Homo sapiens
ggaggagcggacgcggaggccgccggggagcggcggcgggagccggcgccgcagcgggaaggcaaagaagaagcgcccac

SEQ ID NO: 5135 - RNA, 75 nt, Homo sapiens
caaaggcgcccaaagccagaccgccagaagacccgaggaccgggaacgaaggggccccgaggaagcagaagccga

SEQ ID NO: 5136 - RNA, 65 nt, Homo sapiens
gcagaggacacgaggcggcgggcggagacaggaccgcggcgagcaaggagccgcagaagccgccg

SEQ ID NO: 5137 - RNA, 80 nt, Homo sapiens
cccagacggccaccggcgggaggaacaaaaggagcgggacgccccagggagcggcggccagcggcagggggagaggacgg

SEQ ID NO: 5138 - RNA, 77 nt, Homo sapiens
aacgagaaccaaggcggacgcggcgagaagagcgcagaggcaggcgggccgggggcagcgagcccgggcaagagacc

SEQ ID NO: 5139 - RNA, 72 nt, Homo sapiens
aggaaagcagcccgaaaaagacgcgagaagccacacggaagcggcgcgggcccccccacccccaagaaccca

SEQ ID NO: 5140 - RNA, 54 nt, Homo sapiens
gaaggagaaaaagcaggggaagcagcgcacgccagcacaagcccgggggaaagg

SEQ ID NO: 5141 - RNA, 88 nt, Homo sapiens
cggcagagcacgagcggaccgcgagagacgagagcacgacacggccgcacgggcccacgccagcccaggaccacaagccagaaaacac

SEQ ID NO: 5142 - RNA, 87 nt, Homo sapiens
ccccaccaacgggcgcccacacccaaggggcacgcgggcggcggccgaggagagcaccgggaaagcccagagacggggcaccgcgag

SEQ ID NO: 5143 - RNA, 63 nt, Homo sapiens
agcacccaccacaggaggagccgcccggcaaagcgaaagcgcaggaccgaggagaaggagccg

SEQ ID NO: 5144 - RNA, 62 nt, Homo sapiens
cgagaaacaaacgaccaccaaaaaccacaacggaggaaggaagggagcgccacacaccagaa

SEQ ID NO: 5145 - RNA, 104 nt, Homo sapiens
ggaaaaagaaaggaacagaaacaagagaggaacggagcaagaagcgacacaaggagaaaagaacgacccaacccaacacgaggcaccggggacgcccacccagc

SEQ ID NO: 5146 - RNA, 78 nt, Homo sapiens
aaaggaaaccccaaccaggaacaaacaccgccgcaaaaggcccaaaaggagaagccagaacaacagcagacaacccaa

SEQ ID NO: 5147 - RNA, 81 nt, Homo sapiens
accgagggaacccgaccggacccagccccagaaggaccgaaggagaagaaggagaaggggaggagaaggcaagccggaaag

SEQ ID NO: 5148 - RNA, 53 nt, Homo sapiens
aggaaacagaagagggacaacgccaggacacggccaaggccggcgagaacgcc

SEQ ID NO: 5149 - RNA, 76 nt, Homo sapiens
caaagcacccggcggccaaaggccaggacaccaacgggaccagaaggccgcacacaaggcgacggcccggagccac

SEQ ID NO: 5150 - RNA, 74 nt, Homo sapiens
ccccagcccacagggcagcacgaggaacccgaaggcccgaagacaacccgccgccggcacgacggagggcgagc

SEQ ID NO: 5151 - RNA, 73 nt, Homo sapiens
acacccacaggacacgaaggcggcccgccggcagagcgaggacccaaaaaagaggacagcggaccacccgggc

SEQ ID NO: 5152 - RNA, 85 nt, Homo sapiens
ggagagggcaggaaccaccgcccaaaggcggaaacagcaccacaaccaggcaggcggaaccagacccggcccaaggccaaggggc

SEQ ID NO: 5153 - RNA, 84 nt, Homo sapiens
ggcggcgcggcggccagaggaaccccgagaagacgaccccgacgcaggccaggagccgcggacagaagccgagcacggccgaga

SEQ ID NO: 5154 - RNA, 59 nt, Homo sapiens
acaaggaggaagaggccagacaggacaaggacaacaggcccaacccaagccagggggcc

SEQ ID NO: 5155 - RNA, 73 nt, Homo sapiens
aacagaaacacggaccgaaagagggccaaagaggggagaagaagcacggaaaaaccaacaaagagaaaaaaca

SEQ ID NO: 5156 - RNA, 76 nt, Homo sapiens
gccagacaggacccaccggccacgacaagcccacgagacgaacccccagccagcacacgcgagacagcgaacagag

SEQ ID NO: 5157 - RNA, 72 nt, Homo sapiens
gagcccggcaaaagcgcacaaacgcccaaggcacaaccaaccaccgccaggagaggccccaggaaaccccac

SEQ ID NO: 5158 - RNA, 54 nt, Homo sapiens
cccgccgcgacccgggccaaagccgacagaaaaggaagagacccagcgaacaag

SEQ ID NO: 5159 - RNA, 77 nt, Homo sapiens
aagagggacggaaccaccagaagccagcccccaggcggaacgcccgccccgcagagagacggacaacaggaagccaa

SEQ ID NO: 5160 - RNA, 61 nt, Homo sapiens
gacgacgcacaaacgagaaaaaggaaggagcagcagaacgaaaaggccggaggaacgaaac

SEQ ID NO: 5161 - RNA, 85 nt, Homo sapiens
ccaggagcccccgccacgcccggggaagggccgacccacgggagcccgggacccacgggcgcccggaccggggcccaccgccggg

SEQ ID NO: 5162 - RNA, 66 nt, Homo sapiens
ccgccaaaccagagaaagaaacacccgaacagcgacagaaaagagacacacaaaggaagcaaagcc

SEQ ID NO: 5163 - RNA, 72 nt, Homo sapiens
ggccagcgcggccaagacccgccgcaagcagaaacaacgcgagagcccccaagggaccgagcgccagagcca

SEQ ID NO: 5164 - RNA, 78 nt, Homo sapiens
accagaaacacccaaagcaggaccaagacaccaaaaacaggccgaggcccaccgcgcgaccccaaacgccgcacacag

SEQ ID NO: 5165 - RNA, 70 nt, Homo sapiens
gaccagcagcggcgcccgcaacagcccgaccggacagagagaccacagaggaaacaggaaaccggaaaga

SEQ ID NO: 5166 - RNA, 58 nt, Homo sapiens
cagaaccgcgggccccaccaacggccacccaagcacagagaggagccgccgcggacca

SEQ ID NO: 5167 - RNA, 75 nt, Homo sapiens
cagccgggggcgccaggaacccacaaagccccagggaaaggaccgaggcaggaaagaggccagacgcagggaccg

SEQ ID NO: 5168 - RNA, 70 nt, Homo sapiens
gcaggccccagcaagacccgagaccggaagcagcaggcgccaaggagaagggaaaaggaaaccagaagag

SEQ ID NO: 5169 - RNA, 74 nt, Homo sapiens
cccgaagcacaggaaacggaagaccaccccacaccgcgcgcggggaaggggagagaaggcgcaccagaggaaga

SEQ ID NO: 5170 - RNA, 75 nt, Homo sapiens
gaaagcagcaagaaaccccggcaaaccgcagaacccaaggggaaggaacaagcagggcgcccccagcggagcggg

SEQ ID NO: 5171 - RNA, 83 nt, Homo sapiens
ccgagaaccgcaggagccagagaaaaagcgagcccacccccacaccaacccccggaagagagccaacaccagagaggaggaac

SEQ ID NO: 5172 - RNA, 98 nt, Homo sapiens
aaagacaggagacggagggggaagaagagacaccgagacagacagccagagaccacaagacggcacccagcgcacggcagcgagacaaacagaaaagg

SEQ ID NO: 5173 - RNA, 42 nt, Homo sapiens
cggccggagccccagggccgagccagaggagcagccaagaag

SEQ ID NO: 5174 - RNA, 73 nt, Homo sapiens
aggggcaggaggagcgccagaaaaccagacgagagacagaagacgaaagggcaagaaagagagcacggacaag

SEQ ID NO: 5175 - RNA, 73 nt, Homo sapiens
aaccagcccagagaacaagaggaacaaggcacaaggagaggggaccaccaggaagagggacgcggacccgcca

SEQ ID NO: 5176 - RNA, 67 nt, Homo sapiens
aagcccgggaagggaccggcccaggccccccgccccgcgcagcaggggacggaccccggcacccaaa

SEQ ID NO: 5177 - RNA, 76 nt, Homo sapiens
ggcagagcaggccaagccagaaaggagccacacgaccccgccagcgcaggggaggcgccaccgcgcagaagcccac

SEQ ID NO: 5178 - RNA, 77 nt, Homo sapiens
aggaacgccccaaaaccaacagcagccagacccaagggaggaacaggagcaccacgagagaggcaggaagacaaaca

SEQ ID NO: 5179 - RNA, 76 nt, Homo sapiens
gcgccggcgcacagcagagaaaaagaggaggagccaacggccaaggaaagcagcggagcaaccaacaaggggacac

SEQ ID NO: 5180 - RNA, 81 nt, Homo sapiens
gcgcgccgcgccgcccgagcacgccgcgcagcccggccgccggcccccaacagcgccgaaagagacggcgccgaggaagca

SEQ ID NO: 5181 - RNA, 70 nt, Homo sapiens
gagaagaagggagccccgacccacaaaaggcccagaccaagccccaccaacagaagagccccacacacag

SEQ ID NO: 5182 - RNA, 35 nt, Homo sapiens
agaagaccgaggaggcaaaggacagaaagcgggac

SEQ ID NO: 5183 - RNA, 83 nt, Homo sapiens
gggcgacagcgaccgacgccacacggccacccggagaaaggccacggccccagcccaccggaccggaccgcgggcaggggaag

SEQ ID NO: 5184 - RNA, 70 nt, Homo sapiens
aaacaaacacccagaaacaagaggggacaagaccccccccagggaagaccaaagcaagggaggagaagcc

SEQ ID NO: 5185 - RNA, 65 nt, Homo sapiens
gggccggcccacggaccaagaaggaggggaggcagagacgagcggaagaagggacagccgaagga

SEQ ID NO: 5186 - RNA, 86 nt, Homo sapiens
cagcggacaaggggagcagacgcaggagagaagcgcggaagaaggccccgggaggccagagaaggacagggcagaccgccagcagc

SEQ ID NO: 5187 - RNA, 78 nt, Homo sapiens
cgacagcgagacgcgagccccggaccccgaggggacccacggacacaccaccagcggacacccaacccccggcgcccg

SEQ ID NO: 5188 - RNA, 75 nt, Homo sapiens
gaccaggacccgggcccgcgcaccccccagcgccggccggacgacgaacagaacaacccacgagggagcccggcc

SEQ ID NO: 5189 - RNA, 72 nt, Homo sapiens
cagcaacgaccgccccacagccccagacaagcccccccaggcggacaggccagcgcgcgggaggaaaaagag

SEQ ID NO: 5190 - RNA, 60 nt, Homo sapiens
ccaggacccacggaagccagaaagaacggaagccggagcaagcgcgcccacacgggacac

SEQ ID NO: 5191 - RNA, 67 nt, Homo sapiens
acacccccggcacccccacaggagacagacccagcacggaccccccccccagccgggcgaggccccg

SEQ ID NO: 5192 - RNA, 35 nt, Homo sapiens
gccccgagagcggaacaggaggccacacgagcacc

SEQ ID NO: 5193 - RNA, 73 nt, Homo sapiens
agacagaaagagaccggaccagaaaccaggagccacggacaagaccaaaagaaacgcacgagaccgaacccaa

SEQ ID NO: 5194 - RNA, 71 nt, Homo sapiens
aaagacaagaagaaaggggaaagcaagaaaaagagccaaacggagaagaggccagcaccaacccaaacggc

SEQ ID NO: 5195 - RNA, 85 nt, Homo sapiens
ccgggaggagcagcagagcggaggggcaggcgccagcagaaccggcggggagccgcagaacccagcggcagcaaggccgccgccg

SEQ ID NO: 5196 - RNA, 85 nt, Homo sapiens
cacgccagccgcaccagccgcccaagccgcacagccgcggcggcagcagcaggagaggacggcggacgaacccaaccccagagac

SEQ ID NO: 5197 - RNA, 66 nt, Homo sapiens
cgaaggcccgcggcgccccggcgcagacgccccgagccggacccccggaaacgacggggagaacga

SEQ ID NO: 5198 - RNA, 87 nt, Homo sapiens
cgcagcgcgaggacgcccggagcccggcgaccgcggaccgcgcgccacaacaggaacaaagaaggacaaccaccaacaccgagggca

SEQ ID NO: 5199 - RNA, 85 nt, Homo sapiens
aaccccagggaacaaagggaaggcgcaggagcggagggcgaagaccgcgaagccccccaggggaagaacaaaagcgcagagagcc

SEQ ID NO: 5200 - RNA, 78 nt, Homo sapiens
gaaagggggaccagaggaggagcgaaaagaccaacaacgaaacccggaggcccaggcggacaaggggcaggcccggac

SEQ ID NO: 5201 - RNA, 76 nt, Homo sapiens
cgggaagccggcggaccgcgccgcgccggagcagggaaaagacggacaccagaacagccgggaaaccaggcaccga

SEQ ID NO: 5202 - RNA, 77 nt, Homo sapiens
gaagggaacgcaaggcccccgaccacacgcccgcgcgagcaaaagagccaacacccaggccaggccgcccggaagga

SEQ ID NO: 5203 - RNA, 77 nt, Homo sapiens
acaaggacagcagcgacggggcccgcaccccaggggccggccgccaagacacccccggcccggcacagaaaacacgc

SEQ ID NO: 5204 - RNA, 120 nt, Homo sapiens
aacacggacccaaggaacgggaacaccacaccagaggagggaaaaggcgagaagcaagcccacaaaccggaggacacccccagacgcagaagggcaggagacacagccgaggcaccaagg

SEQ ID NO: 5205 - RNA, 88 nt, Homo sapiens
agcacggcgaccgaggcagccccccaaagcccggccccacaggcccagaaggggaagacccccagcgaacagagacccaaaaagaaga

SEQ ID NO: 5206 - RNA, 86 nt, Homo sapiens
cgcggcgaaggcggccgggccgggcccggacgagaacccccgcgaaccagaggaacccagcgagcgagagcggaccagaggacgga

SEQ ID NO: 5207 - RNA, 74 nt, Homo sapiens
agccagcggggagacgcgcccggcccggggaccacagccgcggcccaggcccaagggcaaggagagccaagcgg

SEQ ID NO: 5208 - RNA, 72 nt, Homo sapiens
cgcgccggcccaaaggagacccccagccaaagcagcccacgccaaaaagggaaaaaagagagccacgacgaa

SEQ ID NO: 5209 - RNA, 73 nt, Homo sapiens
caacagcacacacgggcgaaccggaaccaggagcccccggccacgcagcgccgaggaaaaggcaccggaaagg

SEQ ID NO: 5210 - RNA, 77 nt, Homo sapiens
gagcgaaaagcacagaccccggaaacacccaccaccgaaccagggggcagacccaaaggaaacgcacgaaagaaaca

SEQ ID NO: 5211 - RNA, 72 nt, Homo sapiens
aaccgacgaaggaacgggaaaaagggccacggaaaggggcccagaaggggccagcaaccaaagggagcagac

SEQ ID NO: 5212 - RNA, 79 nt, Homo sapiens
accgggcgcaggccacaggccaaagaagaacaacagaggaggaaagaaggcaccaaccaaagaggggaacaggaccgaa

SEQ ID NO: 5213 - RNA, 68 nt, Homo sapiens
cccgagaccagacaccacaaaaaaagaagagggacacgcaaacaggccagagagggacaaggaaagca

SEQ ID NO: 5214 - RNA, 81 nt, Homo sapiens
gaccacgcacgggccaccgcgacgaccgccgccaacaacaggaaaggaaagcaagccaggaggaaacgacaccaaaccggg

SEQ ID NO: 5215 - RNA, 62 nt, Homo sapiens
gcgggcccgggccaggccgccgccgagccgagcgaaggagaggaaaagaggacaaggcaagg

SEQ ID NO: 5216 - RNA, 79 nt, Homo sapiens
gcaagcaagccagccccagggagaaagaggggcggcagggggaccagccagcaacccgcccccggaccaagcaaccccc

SEQ ID NO: 5217 - RNA, 49 nt, Homo sapiens
caaacgcgaaggggcccgcgacccaaaaggcccagaccacaacagggaa

SEQ ID NO: 5218 - RNA, 70 nt, Homo sapiens
gcaagcggggaagcgccccagccaaagaaagaaaagccgccagcccgcccgcggcagaaggaaaaggaca

SEQ ID NO: 5219 - RNA, 70 nt, Homo sapiens
gggcaggcaggggagcaaaggggcaccaccgcaccaccccggaaaggcagccggccggcccagagaagac

SEQ ID NO: 5220 - RNA, 79 nt, Homo sapiens
aggggcggggacgccaagagaagccagaaccagagaacagcagaggcccaggaaacagccaccaccccggcccccagag

SEQ ID NO: 5221 - RNA, 74 nt, Homo sapiens
gagaagaggaagaaaaaaggagaggacagaaagcgcaaagccgcaaaggaccccaccccccagaagaggagaag

SEQ ID NO: 5222 - RNA, 76 nt, Homo sapiens
agaagaaaaacgaaccacgagcggaagcacaacgggaagaaagccgccgggggaacagagaggcccgcggggcacg

SEQ ID NO: 5223 - RNA, 52 nt, Homo sapiens
agcgccacgcgcggaaggcagcgcccagcagcgcaggaccacggcacgaaca

SEQ ID NO: 5224 - RNA, 84 nt, Homo sapiens
gaagaccggcgcggggcacaggaccggagcggagcccccaggacccaaagacaggaccacgcaccagcagagaaggaaagcaaa

SEQ ID NO: 5225 - RNA, 70 nt, Homo sapiens
acgcaaggcgaggaggaagaacaggccgcgggcccccagcgccagacccgcacgaaagaggaagcaaggg

SEQ ID NO: 5226 - RNA, 75 nt, Homo sapiens
caaggacaccacagccccgacgaacacggggacaccaacaggacccgcccagcggcagagccgaggacccgagcg

SEQ ID NO: 5227 - RNA, 58 nt, Homo sapiens
accgccaggcgcccaaacccggaccagagccggaggaaaccacagagcagccagcaga

SEQ ID NO: 5228 - RNA, 67 nt, Homo sapiens
cagcagagccggcgcgcaaacgaaaggaccagaacagaggaggagacgcaagaacaagagccacacg

SEQ ID NO: 5229 - RNA, 75 nt, Homo sapiens
gcccggcgcggagcaggaggcgacggcggagcggaggaggcgccagcagcccggaggacgaacgacaccgggccc

SEQ ID NO: 5230 - RNA, 78 nt, Homo sapiens
ggacgcgggcgcaaacccgcaaggggggcagaggaagcaccaaccgcccccaggggcagcggggagcgggggccgcag

SEQ ID NO: 5231 - RNA, 79 nt, Homo sapiens
ggcccgcgagaagcaagcggaacccgaggccggacacccaacagcacgcagacaaggcaccaacagaacggccccaaag

SEQ ID NO: 5232 - RNA, 75 nt, Homo sapiens
ggggccgggacgcagcccggcggcagcaggggccagagaacaagcccagacagcaagacgcgagcgcaggggacc

SEQ ID NO: 5233 - RNA, 77 nt, Homo sapiens
gacggcaacaaaccaaaagagccagagggggccaagcaagaggagccaaccgcccacgccaacgggaccccacagcc

SEQ ID NO: 5234 - RNA, 80 nt, Homo sapiens
aagagggggacgccccggcaacccaggggcggccacgaccaccaggcgccaggacagggcagaccgccagcagcacagca

SEQ ID NO: 5235 - RNA, 80 nt, Homo sapiens
cccagagaagaagaggcccgccagggaccgacccagccccccagcagacgccagaaggaaggacgaaaagcgggacaccg

SEQ ID NO: 5236 - RNA, 76 nt, Homo sapiens
ccgcccaaggcccgcgggcgggagaacggaaaaccccaacccgaagggagggcaagcagaaagcagaggaaaacga

SEQ ID NO: 5237 - RNA, 65 nt, Homo sapiens
caaccgcggacacggagaggaaggaagagagaagaagcaaaccgggaccggaagcaccaaggaga

SEQ ID NO: 5238 - RNA, 38 nt, Homo sapiens
cacaggaagacgggacacggccgcaggaggacccaaca

SEQ ID NO: 5239 - RNA, 82 nt, Homo sapiens
ccaccaacccccaggacccgccaaagacgccgcggccgcgacccagccagccagcaaccggaccggacaccccgggccaaga

SEQ ID NO: 5240 - RNA, 85 nt, Homo sapiens
aaaccgcccaaacaggaaagaagaagagaaaccgagccaggagagcaagaaacccaaaacggaggacaagaacagcaggccaaag

SEQ ID NO: 5241 - RNA, 78 nt, Homo sapiens
caacagccagcaaaggaacagcccggcagaacacacagaaccacacaggaacagaaaagacagaaaaaaaaacaaaag

SEQ ID NO: 5242 - RNA, 69 nt, Homo sapiens
accaaaagaagaacggcaagggggagccagacgaccagggaaggcggcagacccggaccgacccaggag

SEQ ID NO: 5243 - RNA, 76 nt, Homo sapiens
ggaccaagaaccaggacagaggcgccagcagcagcgggaggggaagacacgcggcaggcgggggcccccagaaacc

SEQ ID NO: 5244 - RNA, 78 nt, Homo sapiens
gccagagccagcaagcgcagcccggacagggaagaaggacagaaacggaacaggcagcaccacccccccacaggcgcc

SEQ ID NO: 5245 - RNA, 85 nt, Homo sapiens
gcagaccgccagcagcacagcaagccacagagagggccggcagggcgggcaggagccccacgaccgcagaagacacccacgaacg

SEQ ID NO: 5246 - RNA, 79 nt, Homo sapiens
ccgaaagaaagcaggaacacgaacaccaagccccgaagcacacagaaagcacgaggaaaacagaaaagcagaaaaaaga

SEQ ID NO: 5247 - RNA, 76 nt, Homo sapiens
gcgcggggccccgcggcggaggcggggccccgggccgcaccccccaccgcaacccgccgggaagcagccgccaaaa

SEQ ID NO: 5248 - RNA, 71 nt, Homo sapiens
caagccagacgcagagacaaaacaagcccccaggaaccaccagaaacggaaggcagagacaggccagaacc

SEQ ID NO: 5249 - RNA, 79 nt, Homo sapiens
cacgcaccgacagagcccagaagaggggggccgcagcgagccccggcagaacacgaagcaaaggggaacaaaagagaag

SEQ ID NO: 5250 - RNA, 68 nt, Homo sapiens
caagaaaaggaaagcggagaacacacacgcagccaccacgagcagacaacggcaaagggagcaaaaac

SEQ ID NO: 5251 - RNA, 40 nt, Homo sapiens
accgcacggggcacggagggaaccccgacagcagagacga

SEQ ID NO: 5252 - RNA, 71 nt, Homo sapiens
aagaggccgaccggagggcgcgaccagaagaagaacaaacagcagaaagaaaccaaggagacacccccgag

SEQ ID NO: 5253 - RNA, 76 nt, Homo sapiens
ccaccccaggcccccaacagacagccagaaggacgaaggagacgcaggagggagagcagccagaggaagaagagga

SEQ ID NO: 5254 - RNA, 76 nt, Homo sapiens
acgaaagcaccaacgagacccgccacacgaggagaccgaaggaccaccggcagcgggaaaaaacgaccaagacaaa

SEQ ID NO: 5255 - RNA, 66 nt, Homo sapiens
gggcagagcccgagcgagggccaagaggagcagagcacaacaagaaacaggggcacggccgccaag

SEQ ID NO: 5256 - RNA, 72 nt, Homo sapiens
gaagggggaagccgcaaaccagcaaggcccaaaaaagggaaggccggcaggaaaggcaacgagagcgaagcg

SEQ ID NO: 5257 - RNA, 91 nt, Homo sapiens
ggcgggggaaagggagacggcgagacgcgcagcgccggcgcccgggagacccaggaggagcccgcaggggagcgcggccacagacgcacag

SEQ ID NO: 5258 - RNA, 80 nt, Homo sapiens
aaaaaaaagaacaaaagaaaaccaaagcagaccagaaaaaacagcacaccaggaagcaagggccgcagacaggaagagag

SEQ ID NO: 5259 - RNA, 71 nt, Homo sapiens
ggaccaccaacgccgaggcacaacccagaaccgggacaacccagcaaacaggccagacccgacaggagcga

SEQ ID NO: 5260 - RNA, 78 nt, Homo sapiens
agcacaagcggggcggccacaccacaggcgcccggccaccgcacccagcccagggacaagaagagcagaaagaacaaa

SEQ ID NO: 5261 - RNA, 83 nt, Homo sapiens
gaggaaaccacaggacggaagcacaggggccaccagagcgcccgagaacaacaggaacagcggaggccaaccaaggaaaacac

SEQ ID NO: 5262 - RNA, 63 nt, Homo sapiens
gaacagcaagaaacaaacgcacccagaaacaaggaacagaccagggcggcgaggaggaggagg

SEQ ID NO: 5263 - RNA, 75 nt, Homo sapiens
gcaagcacaccgaaagccacagcaagaagggcaagaggagcagcagcggcggggccaagcgggagagcgagaagg

SEQ ID NO: 5264 - RNA, 65 nt, Homo sapiens
agaaaaaagcgggaaaaccacagaccgggagaagacaggaagaccggaaggccagagaagggaaa

SEQ ID NO: 5265 - RNA, 81 nt, Homo sapiens
cgccaagcaccaccaagagccacaccgggccaaaacagaagaggcaaagcccagccacagcagcagcccagcagcaaacaa

SEQ ID NO: 5266 - RNA, 59 nt, Homo sapiens
aaaagcgccaaagcgacaggagcacaccagcacgggaggggcccaagaacccaaagccg

SEQ ID NO: 5267 - RNA, 72 nt, Homo sapiens
gccgggaacccccacgcggccagcgaaaacgcccaggagagaacggagagccccgcccaggaaaccagaacc

SEQ ID NO: 5268 - RNA, 54 nt, Homo sapiens
cagaggcaccggccgaggcaaaggagaggcgccaccccagcggcaccaagcgcc

SEQ ID NO: 5269 - RNA, 60 nt, Homo sapiens
cacagagacacaaaccagacaacccggacagcaaggcgaacacccgcaaacaccacccaa

SEQ ID NO: 5270 - RNA, 76 nt, Homo sapiens
ggagcacggaacagccaggggaaaggccacagaagagcagcagcaggcaagccagcacccaggccacggaccccca

SEQ ID NO: 5271 - RNA, 83 nt, Homo sapiens
cagaacagggaagagagcagcacagcacgcggcaagcccagaagaaaaggaagcaaaaggacagaggcaagccacggacgcga

SEQ ID NO: 5272 - RNA, 61 nt, Homo sapiens
agacaaccaaagacaaaccggcggaaaagagcagagaagcagaggagaaggcaaacagaaa

SEQ ID NO: 5273 - RNA, 77 nt, Homo sapiens
cccaggcccacaaccagcccagcagcagcaagcagcccacccggagagagcgcccgcgcggccaggcgcacggccgg

SEQ ID NO: 5274 - RNA, 84 nt, Homo sapiens
gccggcggaaggggcaggggacgggcggaagcacagcacggacggagaacacggagaaagcaaggccgcacgccccagcaggca

SEQ ID NO: 5275 - RNA, 71 nt, Homo sapiens
ccggacaacaagcaacgcaagaacacgcaaaagagcacaaacacaaaagggagaccagcacgagccgggcg

SEQ ID NO: 5276 - RNA, 74 nt, Homo sapiens
aaaaccacaaacccaagccagaaacccccccaaggcaaggacccccgcccagccgcccagggcgagaacagaga

SEQ ID NO: 5277 - RNA, 56 nt, Homo sapiens
aggaacagggcagacgagcggaggacacccaacccggcccgagagagacgcagcgc

SEQ ID NO: 5278 - RNA, 84 nt, Homo sapiens
caccccaccagacggcgccccaagaccagcacgaggacacaaccacagcaacaggccacaggagcgagacaaaacggacaggac

SEQ ID NO: 5279 - RNA, 75 nt, Homo sapiens
ggcgggggggggagcccgcccccggcggccccccgcgcacagaacggcacagcgacccgaagaaaccgcagcaaa

SEQ ID NO: 5280 - RNA, 74 nt, Homo sapiens
aacagggaggccagaaaagaggcgcgcgcagacggcgcaggacgccgccaggcaggggacacgaccccggagag

SEQ ID NO: 5281 - RNA, 81 nt, Homo sapiens
ccaagagaaagggaagcggagacagccaaggcaaacaaggccaagaaaagaaggaggccagcgggacacacaaagaaagac

SEQ ID NO: 5282 - RNA, 70 nt, Homo sapiens
cgaaggcgcgcaccggaagcaccagcgaggaagaaagaaagaagcagaaaaccagaaacagcacaaggcc

SEQ ID NO: 5283 - RNA, 78 nt, Homo sapiens
aggcagcccgaacacaggagaacaccgaagacaagcccaaagaaaggggaacccgggcaccacgagcagcacggaggg

SEQ ID NO: 5284 - RNA, 73 nt, Homo sapiens
gaaggaccaagaaccagaaccagggccgaaaacccagaagaacggccacccagagacacgcagagcagaggac

SEQ ID NO: 5285 - RNA, 67 nt, Homo sapiens
gggaacgccagcaagggggaacccaagagaccgcgcagacaaggcaggaaccgacgcccagggcacg

SEQ ID NO: 5286 - RNA, 67 nt, Homo sapiens
gacggggggggccgcacaggcagccggcccaagccacaggggcagcacaagccaagcaggcacacag

SEQ ID NO: 5287 - RNA, 66 nt, Homo sapiens
gagccgcccgggccagcggccgcgcacccccggccggaggcaccagcgaccgaaacagcaacaacc

SEQ ID NO: 5288 - RNA, 85 nt, Homo sapiens
cccgcgaccaagcgaggcggacccgaagcggaccccgaggaagcaaccgcgcagagagcaaagaaaggacagcaccggacccgcc

SEQ ID NO: 5289 - RNA, 83 nt, Homo sapiens
gccgggagaaggcccaggcacagccggagacaaaggaaccacccaggcccccaaaaaggccacaaagacagccccaccgcccg

SEQ ID NO: 5290 - RNA, 55 nt, Homo sapiens
gcgacagaggagggaggaaaacaaccgagggcagaggaaacacaaagaagacacc

SEQ ID NO: 5291 - RNA, 85 nt, Homo sapiens
cgggggcagcccggcagcgccggcggcgcggcgagagagcggcgacagaggggagcgagggcgccggccgagcccgggaaaacga

SEQ ID NO: 5292 - RNA, 45 nt, Homo sapiens
gcaccacccccccagggcggggcaggcaacccgcccagccccgca

SEQ ID NO: 5293 - RNA, 77 nt, Homo sapiens
aaggaagagagcacgcagccaggaaaccacgagggaaacgagcacggagcgcccacggagccacggaaggaaacgag

SEQ ID NO: 5294 - RNA, 52 nt, Homo sapiens
agaaaaaagccggcgacaacgagcacaaaaaggacacaggaacgccacaaga

SEQ ID NO: 5295 - RNA, 57 nt, Homo sapiens
ggaaaggaggaaaagcgcacaggccgcagaaaagagagaggcagcgggcacgccacg

SEQ ID NO: 5296 - RNA, 76 nt, Homo sapiens
gaagccccgcgcccgcgccagcgcgcaccccgagccgagggccgcgcgcggccgacagggcgagaaaaagcggaga

SEQ ID NO: 5297 - RNA, 38 nt, Homo sapiens
gggaccagcagcaggcgggaacaggagacagcggagaa

SEQ ID NO: 5298 - RNA, 88 nt, Homo sapiens
gcgggaagaagccggcccggggccgcggacgaggaccagcagaggccagcacgagaacccagcccgaagaggaaggagaaggaaagag

SEQ ID NO: 5299 - RNA, 82 nt, Homo sapiens
ggacacccagcaccccacgcccggccgacaagcacgcaagaaagaccacagcaagaccacgcccccagccgggggaccaggc

SEQ ID NO: 5300 - RNA, 80 nt, Homo sapiens
accagccccacaaaggcgagcgcgaggaagaagcacccgacaccccaaggagagccacagcagaggaacaggaaagggca

SEQ ID NO: 5301 - RNA, 60 nt, Homo sapiens
gagcgagcagacgacaagccgggagcgggcggccaaccagaaagagcccagggaacgagc

SEQ ID NO: 5302 - RNA, 74 nt, Homo sapiens
gggaaaacaaaagccacacgaccacagcggggcagcccaaggcggaggagcaagacggaccacagagaagcagg

SEQ ID NO: 5303 - RNA, 83 nt, Homo sapiens
caccccccaaccccaggccaaaggcaggacgcgacccgcagaagaggaggagagaagagaggaagcgagcagcacgggcaagc

SEQ ID NO: 5304 - RNA, 85 nt, Homo sapiens
cagggcgcgggggcggcgaggcaggggccggaaggcgacacaggcaagagacaagcgcaggcaggcagaaggaacgcagacagcg

SEQ ID NO: 5305 - RNA, 77 nt, Homo sapiens
cccagacaccagcagcccccgggccaccgccccagcgccaccaaagaccgcgacgccagcggaggcacccaccacgg

SEQ ID NO: 5306 - RNA, 76 nt, Homo sapiens
cgagaggggcgagaacgccacgcgggccggcgaaagcgcaccgaggagcaacacccccagggagcccagaccgaca

SEQ ID NO: 5307 - RNA, 77 nt, Homo sapiens
aaccaccagcagcccccagagcggaacacagcaccacgccggaacgggccacaccgcaacaccgcccagcaacgagc

SEQ ID NO: 5308 - RNA, 77 nt, Homo sapiens
gaaccaagcagacccgggcgaaggggagaagagagagaacgacaaaaggggagcagaaacacaagaccacggagcca

SEQ ID NO: 5309 - RNA, 72 nt, Homo sapiens
agccggccggcggcaaaggcagccaacagccgaccgagcacgagccaccgagaaccgccagccggaagcgga

SEQ ID NO: 5310 - RNA, 53 nt, Homo sapiens
ccaggcaccgccaaaaaacgaaaaggaagaggcgccacaccaagaccgaggcc

SEQ ID NO: 5311 - RNA, 77 nt, Homo sapiens
caacacaggggaaggagccacccagagccaagaagaggaaaccagaacacggcaagagcagccaccaccaaacccag

SEQ ID NO: 5312 - RNA, 53 nt, Homo sapiens
ggccacacgggagagaagcacgggaggggagagagaaccggcacaccggagca

SEQ ID NO: 5313 - RNA, 77 nt, Homo sapiens
gagacaccagcacaagggcgcccgcggaccaggggggacggggcccgagcagcccaaacggacggaaggccaaacca

SEQ ID NO: 5314 - RNA, 68 nt, Homo sapiens
ggagagggaaccacccgacacacagccaggcccacgggaaaaggagccccagcacacagaccacacag

SEQ ID NO: 5315 - RNA, 79 nt, Homo sapiens
gacggccggagcccagcggaaggcccaacaccgaaagcagcagcagcacaagcgcagcagcagcagcagcagcagcagc

SEQ ID NO: 5316 - RNA, 60 nt, Homo sapiens
gaggcaaagaaaccaccaaacgagaaagcggggagggaaaagggggaggagccgccggcc

SEQ ID NO: 5317 - RNA, 77 nt, Homo sapiens
ggcggcggaccagcagaccacggaaaagcccgcgaccagccaccgcgcacccaagccaccggcagcgccccacccgc

SEQ ID NO: 5318 - RNA, 74 nt, Homo sapiens
ggacgcacaacgcacggccggcggaccgcgggacagccgaggaacacccagagcgagagacgaccacggggcgc

SEQ ID NO: 5319 - RNA, 71 nt, Homo sapiens
agaggcccagggaggcaggggcagaaacagagaaggaacagaccaacccccaacagacccaagggacgacg

SEQ ID NO: 5320 - RNA, 75 nt, Homo sapiens
cccaaaagacaaggaagcaagggacggaggaccggagcagacgcccggggagacaggagggaccgggcagaagaa

SEQ ID NO: 5321 - RNA, 36 nt, Homo sapiens
aggccggcggggcgacagggacaagcaaggggccaa

SEQ ID NO: 5322 - RNA, 76 nt, Homo sapiens
caacggaagcgcagcaacagcaagccccgggcagagcccaaaaggcagagcgaggagagaagaaggagggaaagcc

SEQ ID NO: 5323 - RNA, 66 nt, Homo sapiens
cggagcgaaggccggaggacaaggggaccaggcggagccccgaagagcggcaggaaacaagacccc

SEQ ID NO: 5324 - RNA, 57 nt, Homo sapiens
ccccagggaaggcaaaccacgcaagaacgaccccggcacaaggcacaaagcaggagg

SEQ ID NO: 5325 - RNA, 79 nt, Homo sapiens
ccccggagccccccgggacccacagcaccccgaggcccgacccagcagagaagccgaacgggaaccagcagaaaacaag

SEQ ID NO: 5326 - RNA, 70 nt, Homo sapiens
ccagaaaccggaagcgaggccacaacagagcagacgagcagaccgaagcgcaggcaaaacgaagaggcac

SEQ ID NO: 5327 - RNA, 85 nt, Homo sapiens
gggcgcacccgccccggcgccgccggcccgcgggaccgacagccgggcagaggagcacggccgggacgggaaagagcaagggaaa

SEQ ID NO: 5328 - RNA, 40 nt, Homo sapiens
gccagagcaggaagcgcgcagacgaagccagcaccccaca

SEQ ID NO: 5329 - RNA, 66 nt, Homo sapiens
ggccacgacaaacagacggcagccccccgcaagcaccgcccaccccgggcggcgaccggcccgagg

SEQ ID NO: 5330 - RNA, 79 nt, Homo sapiens
gggcagcaccggagggaaaacaacacacagcagcacaagcagacagaaaagggagaacagaagaacagaaaagaaagca

SEQ ID NO: 5331 - RNA, 82 nt, Homo sapiens
agagacacggcggggggggaccgcgaccgcacaagcagccgccagcggaaccaagcggcgcggcacacgagaccagggcggc

SEQ ID NO: 5332 - RNA, 82 nt, Homo sapiens
gaagcaccaccaagaagcgcaaaccgggaaccaggaaacagggggcacaccgcacaggacccggcccggccccccccaggaa

SEQ ID NO: 5333 - RNA, 79 nt, Homo sapiens
ggcaggcgagggagcccgcgcggcgagagcccacaggcccccacaggggacgaagggaacccgccgggcggcccggcac

SEQ ID NO: 5334 - RNA, 117 nt, Homo sapiens
gcggcccaagggcccggaggggcgcgggaaaccggcagcgggacggaacagcccaaccagcagccggaagaggacacaccaacaggcagcgaagacacgggacacacgccgcacaga

SEQ ID NO: 5335 - RNA, 80 nt, Homo sapiens
gccgggaacccccacgcggccagcgaaaacgcccaggcccaacaaggcgcaccgagcaccacgacgggagcgccaagccc

SEQ ID NO: 5336 - RNA, 86 nt, Homo sapiens
ccgagccaggggaaagaggaagaccacggagcagcgcaggagaaaaagccagaagcggacccagaagaggggagcagcaaggagga

SEQ ID NO: 5337 - RNA, 80 nt, Homo sapiens
aaccagacgccagcgggacgaggaccgagaccgcggccgggaccgaggcaccgggaaccccaagaggaacagcagggaag

SEQ ID NO: 5338 - RNA, 77 nt, Homo sapiens
gcccgaaagaagcggacggaggaggaccccccccagaaaaccaagcgaaaccccaaagggaagagacgcgaaagcac

SEQ ID NO: 5339 - RNA, 83 nt, Homo sapiens
cggcgccccacccgcccccgcgggcgccgggccaggacggcccggccaggagccccgccagggcccgcgccaggccccagccc

SEQ ID NO: 5340 - RNA, 56 nt, Homo sapiens
aagcagagaagaacagcaggccgagcggccccgagccgggacacccggcggcggcc

SEQ ID NO: 5341 - RNA, 70 nt, Homo sapiens
ccgccgaggcaccgaaggcagccacgcaggagaagaaaaaggaccggcaaaacgaaacagaaaagcccac

SEQ ID NO: 5342 - RNA, 69 nt, Homo sapiens
gaccgaaggaggccgggaccacccagccagcggaagaagacaacggcaagcggagaagagcaaggccga

SEQ ID NO: 5343 - RNA, 78 nt, Homo sapiens
gaggcggccccagcggccgagagaccccgccacaccaaccgcaagagacagccgacaaaccccaacgggcaggacaac

SEQ ID NO: 5344 - RNA, 70 nt, Homo sapiens
gccggaccgcacccgcaccgccaaccacgggcgaggaggcgccgcgcaggagggaaagggcccacgcccc

SEQ ID NO: 5345 - RNA, 70 nt, Homo sapiens
agcggggggagcggcccagaaaagccaaaaaaaacaaggacagcaaacaagcagaagaagaagagacaaa

SEQ ID NO: 5346 - RNA, 49 nt, Homo sapiens
cggccgaaacagaaaacaagagaccacagaaggaggagcacggcgaacc

SEQ ID NO: 5347 - RNA, 75 nt, Homo sapiens
gacgaagagcgggacccgagcccgacgacaaggagaaaaagaagcagaagcaggaaagaagcgcagaagaacaga

SEQ ID NO: 5348 - RNA, 77 nt, Homo sapiens
caggaaccgagagccaggccagagcgccgaggagccggcaggacgcagcaggccagcacacggaccccgggggccgg

SEQ ID NO: 5349 - RNA, 77 nt, Homo sapiens
aaacgaagcaggagagaagaggaggaagaagggaaggacggcaggccaaagggaaacggcgcccacagaggaaagcg

SEQ ID NO: 5350 - RNA, 65 nt, Homo sapiens
gggcaggaggaaaacagaccgcgagacaaaacgcgagaacggagccacgacaccccagcagaaga

SEQ ID NO: 5351 - RNA, 73 nt, Homo sapiens
ccagccagggcccagggcgcccacgacggggccccgccagaggggacacaggacaaggagccaccggagagga

SEQ ID NO: 5352 - RNA, 67 nt, Homo sapiens
cgaagaccacgccggccgcgaccaaggaagcaagaaagagcgacgccagggaccgaaccacgggcaa

SEQ ID NO: 5353 - RNA, 68 nt, Homo sapiens
ggccaggccacaaaggcagcacacaccagagcgaagcgagcccgagccccggccggggcagaacagcc

SEQ ID NO: 5354 - RNA, 84 nt, Homo sapiens
cggagcgggcaggccggcgccgcggaaaaaggccggggggccccccccccgcccccagggcgaagaagcgcaaccggccaaacc

SEQ ID NO: 5355 - RNA, 61 nt, Homo sapiens
ggaggccagacggggcacgcacgcggagcccaggagacagccaacaggaacggggggcccg

SEQ ID NO: 5356 - RNA, 67 nt, Homo sapiens
acacgcggcccacaacagccggaacggacagagagggccaacggaacaagaggggagaccggagaag

SEQ ID NO: 5357 - RNA, 90 nt, Homo sapiens
gagaaggaccaagaaccagaagggaagaaagcggaggcggcggcgcgaaaagagaaaaaagaaaagagaagagaaggaagaaaaaggaag

SEQ ID NO: 5358 - RNA, 81 nt, Homo sapiens
agcgcgcgagcgggggggcgcgcgacggcggcccgaagccagcgccccaccggggcaagcaggaccaagaacgcccagccc

SEQ ID NO: 5359 - RNA, 73 nt, Homo sapiens
cgaggcgcgggcgcgcacccgagccgcaaggcgagcgcagcagcgggaggggcaccaagaaccacccccgcgg

SEQ ID NO: 5360 - RNA, 75 nt, Homo sapiens
ggacacaggcaccagacgggacagaaaaccagagggaagaggagaaaggacggcacgaggcgagcagggggagag

SEQ ID NO: 5361 - RNA, 109 nt, Homo sapiens
gaaaccccgaccgcagccaggccgacccgaccggaccagacaagggacgaacagcggggacgccccagcagaccgcccaggagaggaaagcaggaggaaagaccaccca

SEQ ID NO: 5362 - RNA, 71 nt, Homo sapiens
ggagcgagggagagcaggaacacagagaggaggaggagagaaagaacccacgcaggacgacagaagaggcc

SEQ ID NO: 5363 - RNA, 81 nt, Homo sapiens
gcgacagcccgggacaccaagaaagaacgccagcaaccaggagggagacgagacaacaacagcagcaacgaacacagcaaa

SEQ ID NO: 5364 - RNA, 66 nt, Homo sapiens
ccggcggcagggcaagcggcgacggaccccaagagccgcacccgaaggaccaccccagagcgaggc

SEQ ID NO: 5365 - RNA, 64 nt, Homo sapiens
gagccacggaagccgacagacaaccaggaggcaaagacaaagagagcgaaagagaaagggaagg

SEQ ID NO: 5366 - RNA, 76 nt, Homo sapiens
ggcagggggacacgaccgaaccgggacaccggggaggcacacgcggcacaagggcccaagaggaaacaagagacgc

SEQ ID NO: 5367 - RNA, 38 nt, Homo sapiens
cggggagaagccaaaacagaagagcccggaacgccaga

SEQ ID NO: 5368 - RNA, 56 nt, Homo sapiens
cggagaaaaccaaggcgcggaaaggaagaggacccccccgcggcggcgaggcccga

SEQ ID NO: 5369 - RNA, 78 nt, Homo sapiens
ccggccggcaacaaagacaagcagaccggaagaccgacggaagaccacaccccgagggagcccaggacaccacgagaa

SEQ ID NO: 5370 - RNA, 73 nt, Homo sapiens
ggggaggggagcgcgaccagagaccgccggggcggcacacggagcacaacaggaaccccagagcccagcagac

SEQ ID NO: 5371 - RNA, 75 nt, Homo sapiens
gcgcaacagcagcaccagggggagaagcagaccgcaccaggcgggaccccgaaaaagcccaaacagacaggcacg

SEQ ID NO: 5372 - RNA, 72 nt, Homo sapiens
gggaacaacggagaggaggacgaaaggagcagcggacgcgcagcggcacaagaagaaagggcaggcgagaga

SEQ ID NO: 5373 - RNA, 83 nt, Homo sapiens
accaggaagagagggacaggagacgaggaggagaaccagcagagaagggaccgcgccggcacaccagcaccccaggagaagca

SEQ ID NO: 5374 - RNA, 59 nt, Homo sapiens
aaagcacagcccaaccacagggcaaccaaggcaagcacacccagccagaaaaccaccgg

SEQ ID NO: 5375 - RNA, 37 nt, Homo sapiens
cgggccggaggcaaaaaaggacagacggccagccgcc

SEQ ID NO: 5376 - RNA, 72 nt, Homo sapiens
gacacagcgcagccccggggcggccagacagggacaccaaggaggccacaccacacaacagagagaacaaaa

SEQ ID NO: 5377 - RNA, 79 nt, Homo sapiens
cgggggggcggcggcggagacgcgggcccgagcgggccgcgagcgggccaaggaaagcggagggagccccagaggacgg

SEQ ID NO: 5378 - RNA, 90 nt, Homo sapiens
gaaccccaggaaggggggcggcagcaggagggccccgacgaagcgaggcaccgcagcaccaggcgccccgcacaccaagccaggccgaga

SEQ ID NO: 5379 - RNA, 73 nt, Homo sapiens
accgcggcgggacccgaccagcgcggacagccaccggagcgaagaacaccacagggacgccagggcaccacgc

SEQ ID NO: 5380 - RNA, 74 nt, Homo sapiens
gccgccccagcacccccagcgacacccgcgcccggaggcgaacaagaggcgccagcgggcgcgccggaagaaca

SEQ ID NO: 5381 - RNA, 73 nt, Homo sapiens
ccgaagcgcagcagcgcccccacaagagcccagcgccgaagcgaggcccccccacaagagcccgaaaacggga

SEQ ID NO: 5382 - RNA, 75 nt, Homo sapiens
gacccagcccagaacgaacgaaccggagaagaaacagaaaaaaaaagaagaggagcaagaaggagaagaaagaag

SEQ ID NO: 5383 - RNA, 71 nt, Homo sapiens
aaagaagaccgggaaccaaccaaccgaagggacacaaggacgagcaaaggaggacgaaaagaccaccagac

SEQ ID NO: 5384 - RNA, 76 nt, Homo sapiens
aacacagggagcgcccggacacggaccggacagagaagaacgcgacaagaacggcaggcaagagagaccagcaggg

SEQ ID NO: 5385 - RNA, 85 nt, Homo sapiens
ccgggccgcccgcccgcgcccccgccggccccagccccccagggcagggacgaggccggaaggggccagacgcgggaccgccaca

SEQ ID NO: 5386 - RNA, 63 nt, Homo sapiens
gaagccaaaacaggaaagacgaaagcacaccacaggagaaaacagaacgagggccaacggggg

SEQ ID NO: 5387 - RNA, 76 nt, Homo sapiens
ggaccccggacacgaaagccgggaaaggccgggaacgggaaacgcgcgccgagaagccacccgccgagagggagcg

SEQ ID NO: 5388 - RNA, 76 nt, Homo sapiens
cagccgggaaaggagccggccggcggcaaagggaagagacagcgagcagagaccaggagaagagaagagaacaggg

SEQ ID NO: 5389 - RNA, 71 nt, Homo sapiens
gcgggcagcacaaaacaaggccggacgaaaacggggaaagagacccgcggacaacgacgccaccagcccga

SEQ ID NO: 5390 - RNA, 83 nt, Homo sapiens
gggcacccgggacaaagaaacgcacagcagcggagcccaaacacgcgccgcaccagagcggcgggaccagggacagacacggc

SEQ ID NO: 5391 - RNA, 72 nt, Homo sapiens
aagcggacacgggaaaaccgaagccgaagaggccaagacccacagggggggaggagggacaacacacaacgc

SEQ ID NO: 5392 - RNA, 70 nt, Homo sapiens
aaaagaacgggcacagcagcggaaaaacacagagggcacacggcacagaccaggccagggggcagacagc

SEQ ID NO: 5393 - RNA, 64 nt, Homo sapiens
gcaacccaacaaggccaccacggggagccaagaccacagaggggacccaagggagagagggaac

SEQ ID NO: 5394 - RNA, 76 nt, Homo sapiens
caaggagagggcacaccggcacgggggaacgcacaacagccaccgcagcgaacagacccagcacaaggccagcaga

SEQ ID NO: 5395 - RNA, 54 nt, Homo sapiens
aaagggccaaagaagggagagaggaagcacaagccagcagacgacaacaggcgc

SEQ ID NO: 5396 - RNA, 76 nt, Homo sapiens
gaggaaaccccgggacaccccgagaccagccaccacacagcaaaccagccggcgggcgccacaacggacgacgaaa

SEQ ID NO: 5397 - RNA, 79 nt, Homo sapiens
aaccagaggcagccagcagggggaggacgaacgacaccgggccccccccggcgaggacccacgcgcagcccaagaagac

SEQ ID NO: 5398 - RNA, 76 nt, Homo sapiens
gccagggaaaccgaccccaaaaagggcgcacaaagaaggagcaaagcaaggcagagaagaccacagaaaggccgac

SEQ ID NO: 5399 - RNA, 57 nt, Homo sapiens
acaccacccgaaagaaaggcaccacaacgcaagggcacagaagagacgaaagggcga

SEQ ID NO: 5400 - RNA, 58 nt, Homo sapiens
ccacaaacccgagagcaaccagacagaccagccggggaccagcggcggcacagagcgc

SEQ ID NO: 5401 - RNA, 55 nt, Homo sapiens
ggagaacaacaagcgacgcgaccgaaggagaagaaggagaaggggaggagaaggc

SEQ ID NO: 5402 - RNA, 121 nt, Homo sapiens
aagcaggccggccacgcacagcaagcagccaacaccccacccaggaacggcccggagacaaaaggggagaagaaaggaaaagaacaccaaccaaagggacagaagggaaaggcgaaagggg

SEQ ID NO: 5403 - RNA, 36 nt, Homo sapiens
ccgacacacaggcaagaagcagggaggaaggcaagg

SEQ ID NO: 5404 - RNA, 80 nt, Homo sapiens
agcgagcacaaagcgcagccaagaaggacaagaaggggagaagaaaagaaacggcaaaagaaaaaagaaaagagaaaggg

SEQ ID NO: 5405 - RNA, 61 nt, Homo sapiens
agaggaaccggcccagagcacagaagagagaacgagggccaaagccaacgaagaaaagagg

SEQ ID NO: 5406 - RNA, 106 nt, Homo sapiens
aggcgaggcacagggaaagggcggccagacccaccacagccaacggcacaggaaccgccgcaggcccaggcggcgaaccccagcgaaagagcccccacccggcccc

SEQ ID NO: 5407 - RNA, 83 nt, Homo sapiens
agccagcggcccacccggggggcagcaacggcgacaccagcaagggaagaggaagaacgcgagaaaaaaacgagcgacagaga

SEQ ID NO: 5408 - RNA, 70 nt, Homo sapiens
agcaaacagccccagcggagcgccgagccacacggccagcgaaaccagggaccccggaggaaaagggacc

SEQ ID NO: 5409 - RNA, 82 nt, Homo sapiens
ccggacgcagaagcaaacagggcacacagaggggacccaaggagggcggaccacccgggaggagggagacagcggaccggcc

SEQ ID NO: 5410 - RNA, 70 nt, Homo sapiens
cgggggaccgaacaaggcaaaagggggaccaaaccggaaaacagaaagaagaagcacaccagacacagag

SEQ ID NO: 5411 - RNA, 77 nt, Homo sapiens
gacaccggggccgccgaggcaaaggccacgcccggaacccgcagaaacacgacagcaccaccacccaccacgacaga

SEQ ID NO: 5412 - RNA, 72 nt, Homo sapiens
gagacacagcaaagcaaccaccaggcagagacagccaacaaaaacaggcgagggagagcacaacaggaacca

SEQ ID NO: 5413 - RNA, 75 nt, Homo sapiens
cgcagggcgcccccggcacacacccgggccgagcgaccagagcccagaggggccacagggcaccgcagcagcaga

SEQ ID NO: 5414 - RNA, 84 nt, Homo sapiens
aaggagcgcggcagaagacaagccgcccagcccaccgcaaggacgacgaggccaggcacgagaagagaagcccagagcaaaaca

SEQ ID NO: 5415 - RNA, 103 nt, Homo sapiens
ggaacacagacacacgcccagaaaccagcagaaccgcgggacaagaacagggccacagcgcaggcccgccacaccaaggagaaccgggcggcaaacagaggag

SEQ ID NO: 5416 - RNA, 67 nt, Homo sapiens
gacaagagagcaaaggaacagacagccccgggaacacccgaaggacgggaagaaacagaacccggaa

SEQ ID NO: 5417 - RNA, 64 nt, Homo sapiens
cccaccgagaaacacaaagcaggaacagacagagaaaggccgcaacgggcccaagaagcaacag

SEQ ID NO: 5418 - RNA, 71 nt, Homo sapiens
cgaagcccagcgggccggacggggcggggggaacggaacagagacagacccgggggcccccaaggagaggg

SEQ ID NO: 5419 - RNA, 74 nt, Homo sapiens
aaacagggggccagacggaaaaagaggggaacggaagaacggacccaagaacagaagcgcgcaagacgcaacac

SEQ ID NO: 5420 - RNA, 73 nt, Homo sapiens
gggcgccggccacgccagggccccgaacccccagagcccccggagggaacccacagaggaacacaaaaaacag

SEQ ID NO: 5421 - RNA, 63 nt, Homo sapiens
gagcgcgaaacgcacgagaaggccagaacgaaagagcagacaggcgggagagagagaaacaga

SEQ ID NO: 5422 - RNA, 76 nt, Homo sapiens
ggcgaggcaggaccggcgcccaaggagaggccaaagcgcagagcccgcccggagcaaagccggggcccaagcagcc

SEQ ID NO: 5423 - RNA, 73 nt, Homo sapiens
aaaggagagcaccagcccgggacaaaaaagagcagccacaccaagaggcgcgaccccagggacaaccccaacc

SEQ ID NO: 5424 - RNA, 88 nt, Homo sapiens
gacaccgggcccaaaaaaggccaccccgagggaacagcacaggagaaggaggagagcgaggaccaacagccacgcagagccccggcgc

SEQ ID NO: 5425 - RNA, 60 nt, Homo sapiens
acggaggaacggaggaacaccgacggccgaacccccgcacgcccagccgcagccgcagca

SEQ ID NO: 5426 - RNA, 69 nt, Homo sapiens
cccaagccgcaccgagaaaggaaaggcgcacccaaccgaggacggaaccgagacgcccccccagagaag

SEQ ID NO: 5427 - RNA, 72 nt, Homo sapiens
ccgagagcccacccccaacgcgacggaaaggcacgaaagccaggaaagaccagggaaacaaacccgaaagcg

SEQ ID NO: 5428 - RNA, 84 nt, Homo sapiens
cccgcccgccggagcgcccggagcggccgcgagccaccgaggcccagcacgagccagggagccgccgggaccggcccgggagac

SEQ ID NO: 5429 - RNA, 85 nt, Homo sapiens
ggagagagaagccccccaccgggaggggcccaggagaacgggcccaggcaaccacggcgacaggaacggcccggcccagccaacc

SEQ ID NO: 5430 - RNA, 62 nt, Homo sapiens
gaagagaacaaagaacgcacaagggccggagcaacacccgagacaggacccgggagcggagc

SEQ ID NO: 5431 - RNA, 88 nt, Homo sapiens
ggaggcccccgggcaagaggcgcaaacaagccaacccaggaggaaaaacgcacaagagggccagggaccaggggacgcccaagacggc

SEQ ID NO: 5432 - RNA, 54 nt, Homo sapiens
aacaagaaagggacaaccaaaaagaccccaggacgggaacccacacagggagag

SEQ ID NO: 5433 - RNA, 75 nt, Homo sapiens
gaaacaaccaggcagccggacaaggagcagagcaagcccaagccacagaccaaaaagagaaagggaggcaaaaac

SEQ ID NO: 5434 - RNA, 80 nt, Homo sapiens
cggaggaagcggagcggcgcgcgcgggacaagcaggacaaggcacgaggcgcggcgaccaccacagcagagcccggcgaa

SEQ ID NO: 5435 - RNA, 76 nt, Homo sapiens
caagacgccaggacccacggaagccagaaagaacgaaaacaaacggaagagagggcagcaagaaagaacaagaaag

SEQ ID NO: 5436 - RNA, 78 nt, Homo sapiens
agagggaagcagacgagagcaagaacagccacaggaagagggaacaaagaaggaaacaggagaagcgggagaagaagc

SEQ ID NO: 5437 - RNA, 77 nt, Homo sapiens
cagcgagcgggcggcacgcacgcaggccgcaggagggaagcgcacggaaaccgccccgggaggcacagagcaggaga

SEQ ID NO: 5438 - RNA, 74 nt, Homo sapiens
caacgcagcacagcggcccaacggcaccagggacaccagacacacgccgcagcagagcccccgccgcagacaac

SEQ ID NO: 5439 - RNA, 78 nt, Homo sapiens
agcgaaagaacgccagacaaacagagacacaagcagcgaggaccaggaacaacagagacaagaacaagcaggaaaaaa

SEQ ID NO: 5440 - RNA, 64 nt, Homo sapiens
gggcgggccaaagcgggcgcccccagagaagacagagcggaacagagacaggacggaacccccg

SEQ ID NO: 5441 - RNA, 58 nt, Homo sapiens
aaaaccgagggaaccaccaggaagcccaaaaggaaagaaccagagacgacacccgccc

SEQ ID NO: 5442 - RNA, 73 nt, Homo sapiens
aaggagcggcagaacaaggagcgaaggaaagcgccacacggagagccagggacacccaggcgcgagcgccaaa

SEQ ID NO: 5443 - RNA, 77 nt, Homo sapiens
gccgacagacaaccaggccaccaccaccacagacagagggaagagcggaacaccaacaaaccagcagagccacacgg

SEQ ID NO: 5444 - RNA, 82 nt, Homo sapiens
aaccgaaacggagacaagaaaaacaaccaccagcgagcaaaaaggcaaagaccaagaccaccaagaagcgccccagcggcaa

SEQ ID NO: 5445 - RNA, 57 nt, Homo sapiens
gaggaccaggagcgccccaagaaaaccagacgagagacagaagacgaaagggcaaga

SEQ ID NO: 5446 - RNA, 67 nt, Homo sapiens
cggcgggagagagagcgcccagaaagccaggggaaccagaagaggccaaccagcacgaacgccagca

SEQ ID NO: 5447 - RNA, 76 nt, Homo sapiens
agacgggcagccaaaggagcagacgcccgagaagcccagggacaagagaaaaaaagggcgggcgaacaaaaagagc

SEQ ID NO: 5448 - RNA, 65 nt, Homo sapiens
gacgcaggaacccccaacacgggcacgcgaaaaaagcccaggacccacccggcagagaggaccca

SEQ ID NO: 5449 - RNA, 74 nt, Homo sapiens
caccggacggcaagcacaacggagaccagcacgagccgggcgggacgccggaaggggcacaagacacgcacaag

SEQ ID NO: 5450 - RNA, 80 nt, Homo sapiens
gcgcccgccgcgggagagaggacccccccccccccccaaggggagccccgagcgggaagagaaggaaaccaggaaaaaaa

SEQ ID NO: 5451 - RNA, 79 nt, Homo sapiens
gccgcccccaccggacgaggccccccaaccaggcaagagcaggaaccaaagcagccgcgaggcgacacgaaggaggaaa

SEQ ID NO: 5452 - RNA, 60 nt, Homo sapiens
aggcgacaccgccaaggagaaggacgcgccagaccaggggcacagagaacgacgaagcgc

SEQ ID NO: 5453 - RNA, 76 nt, Homo sapiens
gaggcagacgggacaagcggcgagcagagacggggcgacggggagaggcaggcgaggggacgaccggcaccgccga

SEQ ID NO: 5454 - RNA, 72 nt, Homo sapiens
gcagagcggggcacccacccaaggggaccccgacggagagacaaagaagacggagggggggccagccaccgc

SEQ ID NO: 5455 - RNA, 79 nt, Homo sapiens
agaagggaaagaaaccgaagccccacaagccagggaagaccccgaaggaccaagagggagcccaggcggcaggagagca

SEQ ID NO: 5456 - RNA, 58 nt, Homo sapiens
ccaagaacccagcaagagggaaggaggaagcagcaaagcagcgcgcagcgcagccaag

SEQ ID NO: 5457 - RNA, 78 nt, Homo sapiens
gacggccacagagagcgggagcaccaagggaccagaccccacaagaaaacacacaaccacaggcccaagcaaacacac

SEQ ID NO: 5458 - RNA, 72 nt, Homo sapiens
cggagcgcggcccgaggcccgcccagagacaacacacacgcacaagcgaaaccaagagagagagagaaacag

SEQ ID NO: 5459 - RNA, 68 nt, Homo sapiens
agaagcaaaggaccaaacccgaccgagaaacgaaaacggacgaacaacaacacacggacagcagccga

SEQ ID NO: 5460 - RNA, 74 nt, Homo sapiens
ccccggagaaaaggccaagaaggcagacgcgagaaggaagaagaacacaacagaaagagcggagaaaggcaacc

SEQ ID NO: 5461 - RNA, 88 nt, Homo sapiens
cggccaggcgccggcgaccgaggggagagggaacgcagcgaaagcggaacgggccaccacagagcccgcagggacacagcagaacaag

SEQ ID NO: 5462 - RNA, 71 nt, Homo sapiens
cgcgccccgcaccgcggcaaagagaggacgcagcgagaaagggagcgaggcggccagggccccagaagcaa

SEQ ID NO: 5463 - RNA, 41 nt, Homo sapiens
gcaaaggaccaagcagcaggcacaaaaagggcaagaaagag

SEQ ID NO: 5464 - RNA, 59 nt, Homo sapiens
caagccagcccgcaacagacgacggcgcccgcaagggaacaagaaggaggggggaggcg

SEQ ID NO: 5465 - RNA, 63 nt, Homo sapiens
ccggcgcgggagggcgggaggcccggagcgcccggagccggagacaaaaggacagcgacagac

SEQ ID NO: 5466 - RNA, 77 nt, Homo sapiens
agcaaccccacccccccagcggccgcagggccgacaagcggaccaagccagacccaagaggaagcccgcaggccaag

SEQ ID NO: 5467 - RNA, 72 nt, Homo sapiens
gcacaacaggcagacagacaagcgacaccgaaagaaccgagggaaggagagcccacaaggacaggacggccc

SEQ ID NO: 5468 - RNA, 42 nt, Homo sapiens
cacagagggccccagagggcagacaagcagaccggaagaccg

SEQ ID NO: 5469 - RNA, 77 nt, Homo sapiens
cgcccgccgcccgccgcaggccacccgggaacggaggagggccccagggaacccgagaaggccaacaaaagagcgag

SEQ ID NO: 5470 - RNA, 69 nt, Homo sapiens
cgccaggcagggcccgacgacaccggacggaaaagcaggaaaccgacagccacaacgcacaaagccgga

SEQ ID NO: 5471 - RNA, 73 nt, Homo sapiens
cccccgcaaaacagaccaggcagcagcagcgaaacaccaacacagaaacgacccaggacgcaggccaaacaca

SEQ ID NO: 5472 - RNA, 80 nt, Homo sapiens
cggccaggaacagggacagcacccaccccggagggggaccacaagacccacgacaggggaaccagaagaggccaaccagc

SEQ ID NO: 5473 - RNA, 51 nt, Homo sapiens
gcgcccagccaaaagacccaaaccacacggagcaaagaccgcagcagcgaa

SEQ ID NO: 5474 - RNA, 80 nt, Homo sapiens
gaggaggggcgcgggcccccccggccccgcaagaggagggccccacagaaccggggacccaaagacaggaccacgcacca

SEQ ID NO: 5475 - RNA, 36 nt, Homo sapiens
cggagaagcgcggagggccaaccgccccccagcagc

SEQ ID NO: 5476 - RNA, 75 nt, Homo sapiens
ggaaaaagcagcaagggcaacaaaggacagagcgggagccaccagcgccaaagggaagccaggagcccgggggca

SEQ ID NO: 5477 - RNA, 74 nt, Homo sapiens
accaagaaccagagaacgagaacaagaaaagaggccacaagagagacaggacaggagccgaggaaccaaacgag

SEQ ID NO: 5478 - RNA, 85 nt, Homo sapiens
gggaccaggccgacccgcggagacagacaagacaagaccggcggggaagcggaaaagagcagaaccggaaagagcgaggccccga

SEQ ID NO: 5479 - RNA, 79 nt, Homo sapiens
aagaggagcagcccagccccggcggaccaggggacggagcacgcaagcccggggccggaaccggaccggcgagaccgcg

SEQ ID NO: 5480 - RNA, 80 nt, Homo sapiens
ccgaaaaggcaccgcacggacacaggaaagggcccgacaagaggagggacgcaggggcgccaggggaggcagggcaagac

SEQ ID NO: 5481 - RNA, 80 nt, Homo sapiens
ccaagccagaagccgccgggaagcgccgcaaagcggagagcgcgaagcccaccgaaaggccggcgcggaagaggccggcg

SEQ ID NO: 5482 - RNA, 76 nt, Homo sapiens
gcaccaggcggaacggaggaggagagccacggcaggaagcacagaacccgggccgccagagcccacgcaaccagga

SEQ ID NO: 5483 - RNA, 76 nt, Homo sapiens
agccgagcgggccgacaaggggccaaaggccaacagagcacaggcaaggcaccgagggggggcaacaccaaaacaa

SEQ ID NO: 5484 - RNA, 77 nt, Homo sapiens
ccgcacagaacccacccaggaagaggagcagccgagcccagcaggagagcgggaaagcaccaggcagccccacccgg

SEQ ID NO: 5485 - RNA, 64 nt, Homo sapiens
cacaacaccaagaaaggagcagggcggacaagcaccacggaaacaaccccccagaagcaggaaa

SEQ ID NO: 5486 - RNA, 63 nt, Homo sapiens
ggccgagaaggcagaggcgggggcgggcgcaccgcggcaggcaggacagggacagccggcacg

SEQ ID NO: 5487 - RNA, 77 nt, Homo sapiens
acagccagaagaggcacgcaagcgaggagagacgaggcacacggccggaagacgggaaacgaagcagcagagggacg

SEQ ID NO: 5488 - RNA, 99 nt, Homo sapiens
aaacagcaggggcagcgcgggcagaacaggacaggagggggacccaagacgacaagaccacacccccccccgacgaaagaaagaagagagaggaaaaga

SEQ ID NO: 5489 - RNA, 63 nt, Homo sapiens
gagcccggacagaccaaccgcaggcgcaacagaagaccgaagaagcagccgaacacggagcag

SEQ ID NO: 5490 - RNA, 72 nt, Homo sapiens
ggggaccgggagcggggaggagagggggacggaggcagcgcaccccggccgcggagcagcgacgaaggcagc

SEQ ID NO: 5491 - RNA, 50 nt, Homo sapiens
ccgggaaacccgcaggaccggggaggcaagcaggggggcaaaggaaagaa

SEQ ID NO: 5492 - RNA, 68 nt, Homo sapiens
ccagaagccccggaacacaagcaagcgagcaggcagcagcaaagagagaagcggagagaaagacaaac

SEQ ID NO: 5493 - RNA, 92 nt, Homo sapiens
gggcgacgagaccaacaagacgagggcgcagcacagacaagaggaaaagggagaaccaacaaagagggcaccacgaaacaaagcaagaacac

SEQ ID NO: 5494 - RNA, 54 nt, Homo sapiens
gaccagcaagccgagaaagggaggcggaacaggcacgcaagagcggagcacaga

SEQ ID NO: 5495 - RNA, 71 nt, Homo sapiens
acgacaccagaacaagacaagcaagaggaagaagaacgcacccacgccggggaaaagaacggaaaccccgg

SEQ ID NO: 5496 - RNA, 79 nt, Homo sapiens
agggccaaagaagggagagagcccaggaccgggggccgggcgaggaggccgggagaagccgaagcgccgaaggagagag

SEQ ID NO: 5497 - RNA, 78 nt, Homo sapiens
cggaaccggaggaggggagcggggaagaaccagcagagaagaaacccaaaccaaacgcggaagaaccaagaaacacga

SEQ ID NO: 5498 - RNA, 81 nt, Homo sapiens
aacaccacaaaaccacagccaagagaaaccaggcggggaacaagccagcagcccaaggagaagccccacagagcaagcgaa

SEQ ID NO: 5499 - RNA, 38 nt, Homo sapiens
cagcacgggcagagccagcccacaagaggaacagaacg

SEQ ID NO: 5500 - RNA, 61 nt, Homo sapiens
cggaaccggggaccgaagaagagaacaagcgccagggggggccccagcccggccgaacggg

SEQ ID NO: 5501 - RNA, 82 nt, Homo sapiens
cgccgccaccacccacccggacacagacaggggcaaggccgaggggaacagcacacagagaggaggcggaagcacgccagca

SEQ ID NO: 5502 - RNA, 79 nt, Homo sapiens
agcaaaggagaaggcagcgggacggacaggcagggaagcaacgcagagacagaagaaagggagcccccaagaacagcga

SEQ ID NO: 5503 - RNA, 74 nt, Homo sapiens
ccccccccccccccaagaacacaaggagccggacgaccgaaaggacaaaacaaaaggaaagcccaaaccccagc

SEQ ID NO: 5504 - RNA, 79 nt, Homo sapiens
gacagcagcccaccaagcacagacaagcagagagaaacagaaaggaggacgaacagaacggggaagccagagcacaccc

SEQ ID NO: 5505 - RNA, 79 nt, Homo sapiens
gcggcaggcccgggcacagggagcgacccagcgcgcgccgccggaccccaggcgagcggaaggaggagaaaaaggcggc

SEQ ID NO: 5506 - RNA, 77 nt, Homo sapiens
agaggacgaccggagaacgcgaggcagagcgggagcgcgcagccaggcacgacgacggagagaggaagaagacgggg

SEQ ID NO: 5507 - RNA, 75 nt, Homo sapiens
cccagggaggcaggggcagaaacagagaaggaacaggaaaagcccggaaaagcagccaagcggaagacagagccg

SEQ ID NO: 5508 - RNA, 70 nt, Homo sapiens
acggcgcaggagcaggcagacgggcacagcgagagcccgccacgccacaccgccgacaaggccaaagagc

SEQ ID NO: 5509 - RNA, 77 nt, Homo sapiens
cgagagcgggagccacacgcccagcagccaccaacacccaaaggaacgcaaggcggggaaaaaaaggcagcacacag

SEQ ID NO: 5510 - RNA, 75 nt, Homo sapiens
gaaagaggccaccgggggggaggaagaaggcaaaggacaggcccaaccaggcaacccaaagcggaagcacgcaga

SEQ ID NO: 5511 - RNA, 68 nt, Homo sapiens
gggacccgcgagaggaccaagggacaccgcacccagaaacgacagaggaaccagagaaggagaaacag

SEQ ID NO: 5512 - RNA, 76 nt, Homo sapiens
ggagagcaagggccaggggagcccagcggcgcgccggcagcagaaccccacaaaaagaagaacaggccagagaaaa

SEQ ID NO: 5513 - RNA, 103 nt, Homo sapiens
ggaccgccgcgcagggcagccaccagggcacagcacgaggcgggggccacggagaaccagcgcagcccaacacagaggaggaggcacggccacacacgcccac

SEQ ID NO: 5514 - RNA, 81 nt, Homo sapiens
agaagaccacaacaaaaaggacgaagaaaccggaacagagaaaaggacaagggacgaggagagcacccgggcagagaaggc

SEQ ID NO: 5515 - RNA, 58 nt, Homo sapiens
agcaagcacgagccaagcaaggaaagccaaaaggacacggggggcacacaacccagcc

SEQ ID NO: 5516 - RNA, 57 nt, Homo sapiens
cgacggagcagcagcaggccgcgacaggggggagagggcgagacgacgggaccgaag

SEQ ID NO: 5517 - RNA, 87 nt, Homo sapiens
ggaggcggacggccaggggagaaagagcaccgggccggcggcgagcccccggcaccccccgcacggaagaggggccggacgccaccc

SEQ ID NO: 5518 - RNA, 85 nt, Homo sapiens
aaagacccaggaacaaaccgggggcaaggccaaaaagaagaagagaccggggggacaagggaaaaaggccagaaagagagaccag

SEQ ID NO: 5519 - RNA, 75 nt, Homo sapiens
ccagaacagggggagaaccaggacagggcagaccagaaacgggggcagagccggccaggggcaccggaaggagcc

SEQ ID NO: 5520 - RNA, 59 nt, Homo sapiens
ccaggaggcccaccccgccgggaaagacgcaaacagcagacggaagaccccacggcaaa

SEQ ID NO: 5521 - RNA, 85 nt, Homo sapiens
gaggcaggcgcggcgccggcggcgggacgaagagggacgggcccgcggcgagcgagcccgagagagaaacagcggaaaaaaaagg

SEQ ID NO: 5522 - RNA, 52 nt, Homo sapiens
agaggagcagccccagaagccaagacgcaagcgcaaacacaccagcaccccc

SEQ ID NO: 5523 - RNA, 70 nt, Homo sapiens
gggacgagacagaacaacgagagagagcaaaaacaccagacaagagaaagcgcagaccaggccggaaaaa

SEQ ID NO: 5524 - RNA, 80 nt, Homo sapiens
gagccaggaagagaacaccaacaccccgcggggcccgaccgagagcaggcaggcgcccacgaggcccccgaggaacacca

SEQ ID NO: 5525 - RNA, 61 nt, Homo sapiens
ggccgaccgcccgcggcgacggggccagcgccaccggaccgcacgcgcacggacagcgccg

SEQ ID NO: 5526 - RNA, 76 nt, Homo sapiens
ggcgcggccagaggccgggcggagcgcccagacgcggggagccgccggagcgagaaggccgagcaaccgggacagg

SEQ ID NO: 5527 - RNA, 82 nt, Homo sapiens
cccccaaggggcgggcgcggagagaaggcacacaccccaggagcagccccaggagaggcggcagcccgggacgaccagggcc

SEQ ID NO: 5528 - RNA, 73 nt, Homo sapiens
acacaaggggcccgcgagcaccggagcagaaaaccacagaggaggggacggacaaagaggccaaagagaacca

SEQ ID NO: 5529 - RNA, 75 nt, Homo sapiens
acagaaggaacgacgcggaccagaagccagagcgaggacgccggcagcccgaaaccgggccgaagacgcacacgg

SEQ ID NO: 5530 - RNA, 77 nt, Homo sapiens
agcaaggaaccaaccagaaacacagaccgaagggcacagcacacgaaggacaaagacggaaagcaggcgcgcggaag

SEQ ID NO: 5531 - RNA, 77 nt, Homo sapiens
aagggacgcgaaaaagacaaggaaccaaagagagagcacccaggaaaaagggcccggcacgaggaagggacgagcgc

SEQ ID NO: 5532 - RNA, 51 nt, Homo sapiens
gcccagaacagcgaaaccaggggggaacagcgccaggaggcaggaaagcag

SEQ ID NO: 5533 - RNA, 84 nt, Homo sapiens
caaaaccaacgccggccggagcagcagcccgaggaggagagcaaacacacacggagaaagcgacggcgccggaaccagaccaag

SEQ ID NO: 5534 - RNA, 78 nt, Homo sapiens
acaccccacaggaaggcacacagcagcaagagcccaaacgcagagaaaaggaggaggacggcacaaaaaaaggcagag

SEQ ID NO: 5535 - RNA, 79 nt, Homo sapiens
ggacaccccacccagacccccacccaaggagagagaggcagaggacagaaggaacagagaccgccaggggaaagccccg

SEQ ID NO: 5536 - RNA, 75 nt, Homo sapiens
ccggcgcagaaagaggagcgagggccgccagggagaaaagacgaggaagcccaaaaaccgcaagaaaggcacaga

SEQ ID NO: 5537 - RNA, 59 nt, Homo sapiens
gggagggaagcccagaacagggagcaacagcgagcaacaggcaacgaaaacagacaaaa

SEQ ID NO: 5538 - RNA, 81 nt, Homo sapiens
caacaccaagacgccacgggcaagaccaggccccaggaaccacagcgccagaaggccaggaagagacacccgcgcgcccgg

SEQ ID NO: 5539 - RNA, 61 nt, Homo sapiens
ccagcacggaccaggaggcgagcaacaggccaaagaagcccaggagaccgggaagaccaag

SEQ ID NO: 5540 - RNA, 72 nt, Homo sapiens
cccacagaagagcccccacaacggggagaacagcccaaaaaaggggaacggcgagggaacccaggaaggagg

SEQ ID NO: 5541 - RNA, 82 nt, Homo sapiens
gaacaaaggaagaaacgacgccaccgcccgccacgcacgccagaaccgaggagagaaggcagccagggccgagaaaaggggc

SEQ ID NO: 5542 - RNA, 79 nt, Homo sapiens
ccgggcccgcccccggccagcccccacaacggggaccaccgccccagcagacgcggaaggaccgaaggccccagcagca

SEQ ID NO: 5543 - RNA, 70 nt, Homo sapiens
gagaaaaaaaggaccaagcaagacaaaggaaacaagacaggaggaccaaccgcaacggcagagagagaag

SEQ ID NO: 5544 - RNA, 56 nt, Homo sapiens
ccgaagagccccccaccgaacggagcagggacaagccccccagggaaagcccaacc

SEQ ID NO: 5545 - RNA, 50 nt, Homo sapiens
aacgagcgccaacggagaaaaaaaggagaagcgaaccgggaggggagggc

SEQ ID NO: 5546 - RNA, 59 nt, Homo sapiens
accagcagccaccaggagcccgagagagaagggcgcagagcccggggacagaggaccaa

SEQ ID NO: 5547 - RNA, 74 nt, Homo sapiens
aagacagcacgagaacagcagaaacagcgcccacagaaaggacgagaccgaagagaaggaaggacagcgagaga

SEQ ID NO: 5548 - RNA, 81 nt, Homo sapiens
gcggcccaaaagaaaagagagcccaagaagagccaagccgccccaggagcaggaggaggccagcagaacaaacaagagagc

SEQ ID NO: 5549 - RNA, 89 nt, Homo sapiens
gggcccgcgcccggccggacccgggcccgagccggaaccaaaaagaagccccagagccggggccaggagccccaagcgccccagcagca

SEQ ID NO: 5550 - RNA, 59 nt, Homo sapiens
ggccaccggaccccccaacaccccacgaaggcggcaccaaggagccgcccagcaaaacc

SEQ ID NO: 5551 - RNA, 115 nt, Homo sapiens
gcgcagaaaggaagcgcgggccagcgacccgcgccagcgcccagggggggaaaccaccggaacaagcagaaagcacgaacaacgagaacaagacacgagcaaaccccaccgaggg

SEQ ID NO: 5552 - RNA, 82 nt, Homo sapiens
ggaccggccgagaggaagacgagccgggaggaacggcccggaaacaggaggacagcgggaccgccagcaccgccgcagcccg

SEQ ID NO: 5553 - RNA, 75 nt, Homo sapiens
cgaaggccagagcacgagcacgggaaggaccagaaagggcgggaaccagcgagcaggacccacacccgcgcacca

SEQ ID NO: 5554 - RNA, 84 nt, Homo sapiens
ggagacgacccgaccccggcacacccgaggcccgcccccaccgcggaccccaggggcaccagggcaggggacggaggccaaaca

SEQ ID NO: 5555 - RNA, 87 nt, Homo sapiens
ggcgggccgggcgggccgcgggagccgcacgcggcgaaggaagaggagggcaagaagggcaagaaggcagccaccggcaggggagcg

SEQ ID NO: 5556 - RNA, 73 nt, Homo sapiens
ggaaagcaggaaacggaaagggccagcggggggggccagaaaaaaggagcgaagcccacagcagagcacaagg

SEQ ID NO: 5557 - RNA, 73 nt, Homo sapiens
cagacggagacgcgcacagaagggagagcgggacggccccaaggccacagaaaaggagaccagccccacgcag

SEQ ID NO: 5558 - RNA, 99 nt, Homo sapiens
agagcggcgggacagcccaagggccagcaccgcgcccaggcagagccagaccgggagccgccaccaaaagcagacggaaaacccacggggaagaccaca

SEQ ID NO: 5559 - RNA, 59 nt, Homo sapiens
gaggaggaaggacgagggacgggagaaaaaacagaccaccccaggaaaagagaaccgcc

SEQ ID NO: 5560 - RNA, 92 nt, Homo sapiens
cagcccgaccgggcgcccgcccggagaaggcacagcggcgaccgacgccgcgagcgcggacaccagaggacgcccggcagaagggagcgagc

SEQ ID NO: 5561 - RNA, 105 nt, Homo sapiens
ccaacagcggcgcggagcggaggggagagaggccgaagacaacagcgagagcagcaccaacaccacccaggagagcagcgcaggggccaggcggaccagcaggac

SEQ ID NO: 5562 - RNA, 81 nt, Homo sapiens
ggacccaaccaggaagccccgggccacccggccagcaaggagacagcagaaccagccccagcggacagggaaaccaaggcg

SEQ ID NO: 5563 - RNA, 48 nt, Homo sapiens
gggacaggggcgggcgaaagcagagaccaagggagacgaagaaacaaa

SEQ ID NO: 5564 - RNA, 88 nt, Homo sapiens
gccgggcaccccgagcgcaaggacagcgcgaggccgcgcagcccagcgcagccaccggaaccaaaaagaagccccagagccggggcca

SEQ ID NO: 5565 - RNA, 81 nt, Homo sapiens
gccccggcccacaggggggggcaaacccgagagaacggacggaaggaaaaggacaggaggacccagacccagcaagcagac

SEQ ID NO: 5566 - RNA, 69 nt, Homo sapiens
gaaaccgaagggcaaggagccacaaagaagaaaacacaaaaacgggaaagggacaaggagggacgaaga

SEQ ID NO: 5567 - RNA, 74 nt, Homo sapiens
ccagacacgcgagaaaagaagcgggcagccacgagcggcacaggacagaaccgcaaacaacggagccagaaacg

SEQ ID NO: 5568 - RNA, 74 nt, Homo sapiens
ccggccgacaaccacggcaggagccgggcaccacgaaacacccaacccacagaagggacgggacaccgcaaaga

SEQ ID NO: 5569 - RNA, 70 nt, Homo sapiens
aaacagcagaggggcagagagagagaacccgagcgccgcagcggagaaagaaggaacgagcaagcaaccc

SEQ ID NO: 5570 - RNA, 66 nt, Homo sapiens
aggccaagaaggcagggggaagcggggaggacccccccagagcaacaacagacacccacagcgagg

SEQ ID NO: 5571 - RNA, 76 nt, Homo sapiens
cccaggagccggggccgcagccaccaggacgcaaagcaaaagcaggacgaggagagaggacgagagggaccagaca

SEQ ID NO: 5572 - RNA, 63 nt, Homo sapiens
agagcgagggaggagagagggagagccaaagaagcggacgaaaagaacaagcgcccggagaca

SEQ ID NO: 5573 - RNA, 61 nt, Homo sapiens
cacccccacacgcccccagccaaacaggaagcgcccggacgcgggaccgagcccagagcac

SEQ ID NO: 5574 - RNA, 72 nt, Homo sapiens
aacgagagcggcgaaagggccgcgccagaagggaagaaaggcggaacggcgggccacggccgggggccaacg

SEQ ID NO: 5575 - RNA, 65 nt, Homo sapiens
cacaaaaacaccgacacagaggccccagcaaaggaaaggggagcgacaccagagacgaagcaaaa

SEQ ID NO: 5576 - RNA, 73 nt, Homo sapiens
gccgccggcggccacgggcaaacaggacgcggagagcaggagcccggccacacccgaagccgagaacccgggc

SEQ ID NO: 5577 - RNA, 66 nt, Homo sapiens
ccgacccgacacgagccaagaaaagcggacacgggagcacccccccccacggcacacggccccagg

SEQ ID NO: 5578 - RNA, 39 nt, Homo sapiens
ccccaagggcgggaacaggcggacccaaaggagacaaca

SEQ ID NO: 5579 - RNA, 61 nt, Homo sapiens
aacaccgaaggacgacccagaagggcacccacagaaggagaacaagcagagcaccggacac

SEQ ID NO: 5580 - RNA, 65 nt, Homo sapiens
ggaagggccggcccgcccccggccggggcgcagcggaggcagacggcaagaagaagcgaaaaccg

SEQ ID NO: 5581 - RNA, 57 nt, Homo sapiens
cccggacaaccagaggcagccagcagggggagcccccccgaagggcggaccacccga

SEQ ID NO: 5582 - RNA, 57 nt, Homo sapiens
aacaaagaagaccacacacgggaaacacaaaacgagagacaaagcgaaagaaacccg

SEQ ID NO: 5583 - RNA, 82 nt, Homo sapiens
gccacccaccaccagaggggcccaaccgacagaaggcaagcagcaaggaacaaggaaagagcgaaggccaccacagggagca

SEQ ID NO: 5584 - RNA, 96 nt, Homo sapiens
cagaccacagccgaaacaaccaacgacaacaaggcagaaggacggccagcagaagcaggcgagccccccgagaaaaagaagaaacgcgggaccaca

SEQ ID NO: 5585 - RNA, 64 nt, Homo sapiens
aacccgcgaaaagcaagacaacggcaagcggagaagagcaaggccgaaccgagaggaagggcaa

SEQ ID NO: 5586 - RNA, 72 nt, Homo sapiens
aacggaagaagaaaaacaggccaacaacaggcaaagaagaaagaaagaaagaagaagagacaagcaaaaaag

SEQ ID NO: 5587 - RNA, 82 nt, Homo sapiens
gaagccaccccccaggggcgcaagcccaccaaaacagaaggccggaaaaagaacccccccgagaaacggcaaggaaggcgag

SEQ ID NO: 5588 - RNA, 86 nt, Homo sapiens
caccagggcgccgggagggcagacgcggccgcggcaccccgaacggggccccccgcgcgagcccagaaccgggacaacccagcaaa

SEQ ID NO: 5589 - RNA, 66 nt, Homo sapiens
gcgagagcgcaccggaccccgcaggccggaccggagcaggacccgcggagcacaccccgaggcaga

SEQ ID NO: 5590 - RNA, 79 nt, Homo sapiens
accccgccagcaaacgcacaagagacgcaggcagaaggaaagggcgcagaccgggcagcagcagccgcggaacggccag

SEQ ID NO: 5591 - RNA, 72 nt, Homo sapiens
caggaaaaagacagcccgcagcacgaccagcaggaacgaggggcaaggggagaaaccacagaaaggaaacaa

SEQ ID NO: 5592 - RNA, 74 nt, Homo sapiens
caacacggcgcacggagaaccacagacacacgaggaggagaacacaaaacccagacagccggaaagcacaccac

SEQ ID NO: 5593 - RNA, 38 nt, Homo sapiens
ccaccagcaggaggaagaggccaagggcccaggcggag

SEQ ID NO: 5594 - RNA, 87 nt, Homo sapiens
ggacacggacaccgggcgcccgaagcaccgggagggcacaaagagaacggaagggaaaaggccgaggcacagcgggaagaccgcaaa

SEQ ID NO: 5595 - RNA, 56 nt, Homo sapiens
cagcgaggaaagagggcgcagaagaggaggaccggcccgagggcaggacagcaggc

SEQ ID NO: 5596 - RNA, 81 nt, Homo sapiens
ggagcagccaaccagcagcagccacaggagccccagaggaccagaagaagaagaagggacagagaagcaaaggcagcgcac

SEQ ID NO: 5597 - RNA, 87 nt, Homo sapiens
ggaaccagaaggaacagcaccgacacgaaaacccggacccgcaccgcagcggaaacggccaagaagcggaaagagaccagagcagca

SEQ ID NO: 5598 - RNA, 74 nt, Homo sapiens
gacccgagacggaaaaaaacaggcgacggaacgaggaggccaagccgacgccagcgggcgccacccaacaggcg

SEQ ID NO: 5599 - RNA, 73 nt, Homo sapiens
aaacggcacggcacgaaggggaaaaccaaaagaggccgaacaacgggcaaccgaagagagggaaaagagacgc

SEQ ID NO: 5600 - RNA, 50 nt, Homo sapiens
gaagaaggccaacaaaagacaaggacggcagggaagagagaagcccagcc

SEQ ID NO: 5601 - RNA, 77 nt, Homo sapiens
gcccagcacccgccgccaggcgccgggggccgaacggcccggacacccgcaggggccggcccgagaccacccccggg

SEQ ID NO: 5602 - RNA, 54 nt, Homo sapiens
ccacgaaagccggccacgccgggccggagccggaacaggccgcgagcaagccga

SEQ ID NO: 5603 - RNA, 42 nt, Homo sapiens
acgggggaccaggaggcaaggagcaaagagcaaggaagaagc

SEQ ID NO: 5604 - RNA, 78 nt, Homo sapiens
ggagacccgaccccagaaggggagaccacacccaaaacgaaacgggaggcagccagaaggaagacccacagccagccc

SEQ ID NO: 5605 - RNA, 56 nt, Homo sapiens
accgcagaaggccggagacaccagcaggcggcaccaggacgccgaaaagcgaccgg

SEQ ID NO: 5606 - RNA, 76 nt, Homo sapiens
acacgcaagcgccccacagagcaagacacagggacacccaagaacgaggccccgcagcaggcagaaagggagaagc

SEQ ID NO: 5607 - RNA, 68 nt, Homo sapiens
caccaaccaacagacaaaagccagaggggacagaagaaaaagacaacagaagcagaaaacggggacgg

SEQ ID NO: 5608 - RNA, 76 nt, Homo sapiens
ggagcggagggcagaccggcaggaaaggccaagcaaacacagaaagggaagaaacaagaaaacgcgaaaggagagc

SEQ ID NO: 5609 - RNA, 76 nt, Homo sapiens
gggaagacagaaccagggccgggggccagggccccgggcgcgggagccagccgaagaaaggaaaagagaggcgccg

SEQ ID NO: 5610 - RNA, 73 nt, Homo sapiens
gggcacggacggggaaggggcccacccccgccagcaccaaaaagcccgggcaccgcccagcgcccagaccacc

SEQ ID NO: 5611 - RNA, 53 nt, Homo sapiens
gcagaacagagagacagccagcccagaccaggacgcaaagaagaaaaagacga

SEQ ID NO: 5612 - RNA, 81 nt, Homo sapiens
ggcccaggagcggcggcgaagaaggaggcaggcacgggagccgaaggaggcacgcgcggaccagccgggcccgcagccgca

SEQ ID NO: 5613 - RNA, 77 nt, Homo sapiens
gcggaggcgaaagcggaacgagcggaggcacccaccacgggccaggcgggccagaggcaagccgcgggagccacgcc

SEQ ID NO: 5614 - RNA, 86 nt, Homo sapiens
agcggaccacgagaggaagcgagggagaccgggcgggaaccgacgaggaccccagagacacgcccagaaccaaccaggagcgcagg

SEQ ID NO: 5615 - RNA, 75 nt, Homo sapiens
caaacggaggaaacccggacgaaaaccaaaccggagcgggcggaacaagaagaggcccgacaaaccaaaaagaac

SEQ ID NO: 5616 - RNA, 79 nt, Homo sapiens
gccagaaggaggccagaccaagcgaagaagagcaaaaggcggagcgagccacgagcagcaagcggagccccggccgaaa

SEQ ID NO: 5617 - RNA, 89 nt, Homo sapiens
cggccccgacagcgcccggagggaccgggggagccccaggcgcccggggcagagcagagaccaaggagccaggaaggagaagaggggaa

SEQ ID NO: 5618 - RNA, 102 nt, Homo sapiens
aaaccagcagagacaaggcacggagagcaacaaagccgacccaacccaagggccaaagccaggggaccaccccgagcaaggaccaaggcacgaaggacagac

SEQ ID NO: 5619 - RNA, 91 nt, Homo sapiens
ccagcgccaccaccacgccagccgcaccagccgcccaagccgcacagccgcggcggcagcagcaggagagaccagggaaccgggcagcagc

SEQ ID NO: 5620 - RNA, 81 nt, Homo sapiens
ccagggccgaaccagagcgagggaagaaccgccaaagaggaaaccaaggcacaggaacacaaggaagaagcgaaagacgag

SEQ ID NO: 5621 - RNA, 85 nt, Homo sapiens
cgcgcaccgccaggcgccccgggcgcggcaaggacgagccggggcgcgaagacaccacgccacccaagagagagcaaaaaccgag

SEQ ID NO: 5622 - RNA, 100 nt, Homo sapiens
gcggaagaagcaggaggcaagaaaggggaaccccggagaaaaggccaagaaggcaggaggagggagacaggggcaaaaaacggcagggaagaggcgagac

SEQ ID NO: 5623 - RNA, 69 nt, Homo sapiens
gaaagcaagggaaggcgccccaacaaagggagacgcgagcaggagaagccaaaccccaacacaaaaaga

SEQ ID NO: 5624 - RNA, 67 nt, Homo sapiens
accgaagaaaacaagggcagaaccccagagagggaggagaaggaccgagaggacccagaggaacagc

SEQ ID NO: 5625 - RNA, 84 nt, Homo sapiens
cgacacgcagggcccagcggccagcgcaggaggacgaccggggggcaggaggcacccggggcagagacggggcgacggggagag

SEQ ID NO: 5626 - RNA, 85 nt, Homo sapiens
gggggacggccggcggcacccgcacccggggacaagcgcgggaacggcgcggaagggcggagaacggaaaagcaccaggaagcag

SEQ ID NO: 5627 - RNA, 72 nt, Homo sapiens
ggcccccggccgaaagcaggacccgcagcaccagcggacccaccccgagcgagcagcgaagagcgacagagc

SEQ ID NO: 5628 - RNA, 70 nt, Homo sapiens
aaggaccaagaaccaggccccgagcgcgccgccccggcccgcaggggaaggaggcccagcgcaaacccag

SEQ ID NO: 5629 - RNA, 83 nt, Homo sapiens
acccgcgcccgcggcgcagcggggcggcagcgaggcggaggcgacgaggaggcggacccccggcgcagcgcgccaacggcacc

SEQ ID NO: 5630 - RNA, 39 nt, Homo sapiens
ccccaaaggcggaaacaggcaggagacgagaccaccggc

SEQ ID NO: 5631 - RNA, 69 nt, Homo sapiens
aaaccagaggaggacgcgcgaaaagccccccgggagcagccagaacagagaaagcccagcgcagagaac

SEQ ID NO: 5632 - RNA, 78 nt, Homo sapiens
gggggaggaaagcagacagacccaccaagagggcgggagaaccacgaggagagggcgacccagcacagacaagcaagc

SEQ ID NO: 5633 - RNA, 79 nt, Homo sapiens
cggcgccccggccgaggggcggcggccccagaacgacaaggaaaaaaaaggcaacagcaagcagaaaacggaagaaaca

SEQ ID NO: 5634 - RNA, 75 nt, Homo sapiens
cagaacagagaagaaagcagggagaagaaaaagcagaaaggaacagaaaacaaaagaacaaggcacaacggacag

SEQ ID NO: 5635 - RNA, 68 nt, Homo sapiens
gagacccggcaaaccaccaaaccgcaacaggaagccgggccacgccacaccacccccccggcgggcac

SEQ ID NO: 5636 - RNA, 80 nt, Homo sapiens
cagaagcacaaccagagccggccccggggagaggaacaacaaagaagccacaagcacaggaaaggaaccaggagaagagc

SEQ ID NO: 5637 - RNA, 51 nt, Homo sapiens
cgcgcagaggcaagggagacacagcccacccgcagcagccacccagggagg

SEQ ID NO: 5638 - RNA, 40 nt, Homo sapiens
cccaacacaccgaaaccccagagcccagccaaaggcacgc

SEQ ID NO: 5639 - RNA, 72 nt, Homo sapiens
gaacacagagaaagcagccaacagcaaagccaggaaagcgcacacgccagcccgcgaagaggcgaaaccccg

SEQ ID NO: 5640 - RNA, 65 nt, Homo sapiens
cacccggcgaaccagaggaggcaggggaagcacaaaagcgcacccgcgccagcgaggaccggaac

SEQ ID NO: 5641 - RNA, 87 nt, Homo sapiens
cgcgcgcagccaggccgagaaccccagcggagaaccaccgcacaagagccaagaacaagggccgcgagggaaagcacgcagccgggg

SEQ ID NO: 5642 - RNA, 67 nt, Homo sapiens
gcgcggcacacggggcagccaggccgagccaacaaaagaaaacagcaacgcggagagagcgccaagc

SEQ ID NO: 5643 - RNA, 77 nt, Homo sapiens
cgaggaggagcgagcgcgagaggggcgaccgcacagacccagccgaggcaacggcggcaaccccgccgggaaaccgc

SEQ ID NO: 5644 - RNA, 75 nt, Homo sapiens
aacaagaccaaaaccgaagcgccacagagcaacaacaaacacgcaccccaacaggaccgacaagacggaaaccgg

SEQ ID NO: 5645 - RNA, 71 nt, Homo sapiens
cgggcagaaggagccaccaaccgcccggacccgcggcaccgcgccccacgccggcccacggcccaagacag

SEQ ID NO: 5646 - RNA, 57 nt, Homo sapiens
ccgagacggcggcagcagcggcacagcaggccgagagaggggcccaggccggggaac

SEQ ID NO: 5647 - RNA, 96 nt, Homo sapiens
caagcagaagagcaggagcagccgagcaggcagcacaagggagcaacaaaaaaacgggcgaaaggaccacggaagccggggcgcagaggacccagg

SEQ ID NO: 5648 - RNA, 68 nt, Homo sapiens
gcgggacgacgcggacagcgggcggagccgacgagcggcggagcgaagaagcaggggagaggccgagc

SEQ ID NO: 5649 - RNA, 71 nt, Homo sapiens
ccaacaggaccgggagagaccggcggacagggggacaggagccaggccaagagaaagaaacacagaagcga

SEQ ID NO: 5650 - RNA, 76 nt, Homo sapiens
gcacacaccgggacccgcggcagggacccaagggagagagggaacggcgaaagggcagcccggaaggagcaccacc

SEQ ID NO: 5651 - RNA, 73 nt, Homo sapiens
cgacacccgggagccgccggcaccgccggaaccggcgcaggccccgcgaccagccgagccaccgccaccacgc

SEQ ID NO: 5652 - RNA, 57 nt, Homo sapiens
gggcacccgcgcgcacacgcaggggacaacgacacccacagagggggaacagccagg

SEQ ID NO: 5653 - RNA, 76 nt, Homo sapiens
aggggcaaccagaacccccaaaagccaagaggaaacccagggcggcgacggcggcgcgaggaccgaccgggcccgc

SEQ ID NO: 5654 - RNA, 58 nt, Homo sapiens
ggagaagccgagagccacacagggcagaaggaagcacggcaaagggccccacggagga

SEQ ID NO: 5655 - RNA, 57 nt, Homo sapiens
gagggacacggggcaccgcgccgcagcggaaaaaggccacaggaaggccgacccagc

SEQ ID NO: 5656 - RNA, 70 nt, Homo sapiens
cagagcgaaagccaggggaggccacagacagggcagggaaaggggagaacaggacccaggagaggaaaag

SEQ ID NO: 5657 - RNA, 81 nt, Homo sapiens
cgagacccgccacacgaacgcaaacagcagacggaagaccccacggcaaaaccacacccgaggcgagcccaggacaccaga

SEQ ID NO: 5658 - RNA, 73 nt, Homo sapiens
acaacacaaggcagccacaggccaaaacagagcgggaccagcgacgacgcagaagagaggcacagagagaaag

SEQ ID NO: 5659 - RNA, 76 nt, Homo sapiens
agcacaggaacacccacgcagccaagcacgccaccaagcagccagcacaacccagccacagaacaacaagaaggag

SEQ ID NO: 5660 - RNA, 84 nt, Homo sapiens
ggggcagacagcacaaccagcggcaagaagaaacacacgcgcggccccgacgcccgcaggggggcggccccgcggcgcccaggc

SEQ ID NO: 5661 - RNA, 79 nt, Homo sapiens
agacgagcgcagaccaccaaacccaggaggagacccccggaaaaccccccccgacaggcacacaggagaagcacagcgc

SEQ ID NO: 5662 - RNA, 83 nt, Homo sapiens
agaacgaaggaaagacacaagagaccacaagaccgaccaggaaaaggacggacccacggggaacaacaagacaacaagaggag

SEQ ID NO: 5663 - RNA, 59 nt, Homo sapiens
cgccccggcgcccacccgccgcccgccaggaaaagagcgaccaaggacaacagagcaaa

SEQ ID NO: 5664 - RNA, 60 nt, Homo sapiens
gggcaggaggcccagcggccaggcggcggaggagaaggcaccacccaaaagacaccaggc

SEQ ID NO: 5665 - RNA, 78 nt, Homo sapiens
agcagcagaagccgcaacaggaaagcagcccgaaaaagacgcgagaagccacacgggaaagggagcagcaccggccac

SEQ ID NO: 5666 - RNA, 82 nt, Homo sapiens
ggaccgagaccggaccgagagcggaccgagagcgcgaaacgcacgagaaggccggaaggggggcgacgcggaaggcacaaca

SEQ ID NO: 5667 - RNA, 78 nt, Homo sapiens
gcaacggagaccgcagaaagacagagcacgaaaggcaacgcgacaccacgacagcgaggcagccagcagcagccacca

SEQ ID NO: 5668 - RNA, 103 nt, Homo sapiens
ccaccaacaggaacagggcagacgagcggaggacacccaacccgggaccgaaggagaagaaggagaaggggaggagaaggcaagccggaaagagcgaaagaaa

SEQ ID NO: 5669 - RNA, 70 nt, Homo sapiens
agggcacacgagcgacggaagcgaaacccagaagcagggaggagaaagagccaagaaaaagaaaggaaag

SEQ ID NO: 5670 - RNA, 74 nt, Homo sapiens
gggagcgagagcacacaaagaaggggaagagagacaagggcagagaacggggaggcgagagcaaggaaacccga

SEQ ID NO: 5671 - RNA, 71 nt, Homo sapiens
agacacacagggcaccagaccggaaaaccagagacccagacacgcgaaggaacgaaaggccaaaaggcaaa

SEQ ID NO: 5672 - RNA, 91 nt, Homo sapiens
cacgaggagggccaagacgggagagccacgggcccccggcaacgaacggggaagagggaggaagggaagcgagaaaacagggagcagagag

SEQ ID NO: 5673 - RNA, 80 nt, Homo sapiens
accccagcgcgcaaagcgcgaggggcgaggggcggcaccaggaaaaagaaagacggcacagaacaaggcccgacagggaa

SEQ ID NO: 5674 - RNA, 44 nt, Homo sapiens
ccaggccccggcagagccagagggacacaccaggacaccaacac

SEQ ID NO: 5675 - RNA, 73 nt, Homo sapiens
gcaacagcacgaggccccgacaggcggcgcacggaaacagccacagcaggcgagaggaggagacgacagaaac

SEQ ID NO: 5676 - RNA, 77 nt, Homo sapiens
acagagggagccaggcagagagggaacggaaaaagcaacaaaacacaccaagaaaagggaaccgaagcggacaacag

SEQ ID NO: 5677 - RNA, 63 nt, Homo sapiens
ggcgccgcgcgccagcccaggaaaggcgccgaagaggagcagacaagggcccacaccaaagcc

SEQ ID NO: 5678 - RNA, 89 nt, Homo sapiens
gcagcgggcccggcgggggaccgagggaggagcggggacggcgacccaggagagaccgccaggcaggcccgcacgcgggcaagggagaa

SEQ ID NO: 5679 - RNA, 83 nt, Homo sapiens
cagcacgcgcagggacaggagacccacagaggaaaacaaccccggggccacaaagcgagcgggagagaggaaggaggccgaag

SEQ ID NO: 5680 - RNA, 75 nt, Homo sapiens
gagccacccaaggaccgcaggaaacccgaacccagcggagagccaaagggagcggacaaagccacccgggaaagc

SEQ ID NO: 5681 - RNA, 71 nt, Homo sapiens
gggagcgagaccggagcgccacggccacgccccccgcaacaacccacaagagccggacgagcgggagagga

SEQ ID NO: 5682 - RNA, 83 nt, Homo sapiens
ggaagaagaagcacacagagcgaagcgcgaggagcagcaggagccgagaaggacccagccgggaagggccagagaagacagaa

SEQ ID NO: 5683 - RNA, 81 nt, Homo sapiens
ggaggggggcagcggagcccaggcggcagcgccagccgcggaggggagccggccagccccacgaagccgaacccagaaaac

SEQ ID NO: 5684 - RNA, 74 nt, Homo sapiens
cggacgcggggcgcaccaccacgggaggggcccgcaggaaggacggaccaggggcagcacaggcagaacaggag

SEQ ID NO: 5685 - RNA, 77 nt, Homo sapiens
gaaaggcgaacgccaccgcagagacacagcgcagagggaacgaagcaggaagggaacgagcggcaaggcgaagaagg

SEQ ID NO: 5686 - RNA, 84 nt, Homo sapiens
caacacggaacagacgcaggagcaccgcggacgccccagggcacaccgcgcaccagcgagaggaggagaaccggccaaccgcag

SEQ ID NO: 5687 - RNA, 67 nt, Homo sapiens
aaaaccggaccaggcacgggaagagcccagggcacgggcacccggaccacgcagcagagcgacggga

SEQ ID NO: 5688 - RNA, 73 nt, Homo sapiens
gagaggaaacgaagggagcgacacacacccaaggcagcccagaagaggggcacaggggcacgaaaaacacacc

SEQ ID NO: 5689 - RNA, 81 nt, Homo sapiens
gaacgagcacggcccgggcaggaaagaaccaccgaccaggccaacaagaacgaagcgcgcggcaggcgcgcgccgccccag

SEQ ID NO: 5690 - RNA, 53 nt, Homo sapiens
gagacaccacggaacccgccacccagaggcgggagacaggaaaggaaaacagg

SEQ ID NO: 5691 - RNA, 67 nt, Homo sapiens
agcggggcacccacccaaggggcgaccaacggcggacaggaggagcaagaaaaaaaacgggccagac

SEQ ID NO: 5692 - RNA, 66 nt, Homo sapiens
ccccccagccaggaaacggaacggagggaaagcgacaaacaaccaacccacagagacccagagacc

SEQ ID NO: 5693 - RNA, 52 nt, Homo sapiens
ggaccccggacgagcccggcgaggcgagaaaagccgacgcaagagggaaagc

SEQ ID NO: 5694 - RNA, 34 nt, Homo sapiens
cccaaaggcgaaacaggaggaacaggaaggacaa

SEQ ID NO: 5695 - RNA, 82 nt, Homo sapiens
ccaaagaggagagcagggccccccgaccgaggggccggcagcgaagaaacaggggagaaaccccgcggggaagccgaggaaa

SEQ ID NO: 5696 - RNA, 82 nt, Homo sapiens
gcagcgccagcacagccagacgcaagacaccagccacaaggagaggaccccccgcacaaggaggacccggaaagaccagccc

SEQ ID NO: 5697 - RNA, 61 nt, Homo sapiens
gagggcgaaccacccacagaccagccggaacaagagacccgggcagcgcaagaccccgcac

SEQ ID NO: 5698 - RNA, 77 nt, Homo sapiens
ggaagaagaaacccacgaaccaaaagggacggacaaaggaacaggaccaggccacagaccccaccagcacgaaggga

SEQ ID NO: 5699 - RNA, 63 nt, Homo sapiens
cggccgggccagggccgcggcgccagccggaaggagagaaccaggagaccgaagcaaccaaca

SEQ ID NO: 5700 - RNA, 73 nt, Homo sapiens
cggaagaacagcaaacaaccgagggggccagaaaggaggcccacagccgaccgagcggggcaggacacggaag

SEQ ID NO: 5701 - RNA, 83 nt, Homo sapiens
cccagaaggcggcgaccgggcgcgggcaaggcggcaggcagcggaagagaaagaccgaggcaaagaagcaggagcacacaaag

SEQ ID NO: 5702 - RNA, 77 nt, Homo sapiens
cgaccaagaacggaagagaggaggagaacaccggacacaggcagcaccaaggggggccagcggaaacaggacacaga

SEQ ID NO: 5703 - RNA, 68 nt, Homo sapiens
ggaacagaaagacgcagaagacagggcaaagggcccacaaaaggagcggaacgaagcgcccacagaag

SEQ ID NO: 5704 - RNA, 82 nt, Homo sapiens
ggaacaagagagcaggagcaagaacgcagcgaagagacgagaagaccacagcacagaaacaccacaaaaagcgcagagggcc

SEQ ID NO: 5705 - RNA, 76 nt, Homo sapiens
gggggaaagccaaggaaaaacggagagccacaaaaaaggaagcgaaaaaggagaacccggagggacgggcagagag

SEQ ID NO: 5706 - RNA, 82 nt, Homo sapiens
cagcccagccggaaaggcccccacccaagggcacaggggaccgcgcacacagcacccaacaggggagaaagaacccaagggc

SEQ ID NO: 5707 - RNA, 66 nt, Homo sapiens
acccccacgcggaacacaggcaaaagggaaaggggggaaggcgccaaggccagaaaggaggaacag

SEQ ID NO: 5708 - RNA, 72 nt, Homo sapiens
aggcagacacaccgcagagaaagaagaggaggggaaggacgggacgaaaaagaagggacaaaaagcagaccc

SEQ ID NO: 5709 - RNA, 74 nt, Homo sapiens
cagagcagaaccaaaggcagcgcaaaaaacagccaccgagcagccgagcgcgagaaaaaggcgcgcagagagaa

SEQ ID NO: 5710 - RNA, 77 nt, Homo sapiens
acggaggagaaagcagaaagaccaaggagccccaaggcaaacaaccgagcacaaaaaaggcacccggagaacagaca

SEQ ID NO: 5711 - RNA, 81 nt, Homo sapiens
cccccccgccgcacacgggccagaaggccagggcgacagccgggcacgaggggccggccgcgcgaagacgcggaccacggc

SEQ ID NO: 5712 - RNA, 33 nt, Homo sapiens
agccgcccaacccagggccacccacgcccaggc

SEQ ID NO: 5713 - RNA, 76 nt, Homo sapiens
agaaagcaaaggcgccgaagcgcacgaccccgacacccccaaggcccagcggaagaacgccgcagagagcagagag

SEQ ID NO: 5714 - RNA, 78 nt, Homo sapiens
acgccaccgccgcagcggcgcagcccacgccagacgaccccacccgcgccgcgacccgacccccaggccaaggaaagc

SEQ ID NO: 5715 - RNA, 69 nt, Homo sapiens
cacgcccgagcaaaaaagaaaaggccccaacagagccccagcaagcagggcagaaaagaacagacccag

SEQ ID NO: 5716 - RNA, 82 nt, Homo sapiens
ccacacccagcccgcaggacggggcccaggaagggccaaagacccacagacgagggggacgaacagcgacgagaaccggggc

SEQ ID NO: 5717 - RNA, 100 nt, Homo sapiens
cccggcgcccggcgcggagccgcgccgcacgcgcgaccccggacaagcagaccggaagaccgacggaagaccacaccccgagggagcccaggacaccacg

SEQ ID NO: 5718 - RNA, 71 nt, Homo sapiens
cacgaacagacggcggccccgggaccccgcccggcagcccagaccagccagccccaagcagccgcacgaca

SEQ ID NO: 5719 - RNA, 73 nt, Homo sapiens
agggccagacccgacgggagaggggcgacaggggggcgggggcgaaagaacagcgccaagcacaaccgacggc

SEQ ID NO: 5720 - RNA, 72 nt, Homo sapiens
acagcccacacccggcgcggagggggaacaagcaagaaaagccccagaagggccgaaccgaaacccaagccc

SEQ ID NO: 5721 - RNA, 73 nt, Homo sapiens
acggcggacccgggggaaaccgcaaaagaagcacaccgacccccaacgggccccaggggaagcagggagacca

SEQ ID NO: 5722 - RNA, 40 nt, Homo sapiens
gccacaggagagagcaaggaaagggagcggccccaccaaa

SEQ ID NO: 5723 - RNA, 80 nt, Homo sapiens
gaggggacggccgccccgcggcgcccggggagagcccagggagaagaggacggcaccacggaaagagacccccaggcggc

SEQ ID NO: 5724 - RNA, 67 nt, Homo sapiens
ggaagagagcacaagggggcccccaaagggaagccaaacacaaaggaagaagcccggagacgaccaa

SEQ ID NO: 5725 - RNA, 78 nt, Homo sapiens
cagacaccccgagccgaaggacagacaccaagagagcccacagacccagccacgaaggagcccagaccagccaaaagg

SEQ ID NO: 5726 - RNA, 65 nt, Homo sapiens
aaccaagaggccagaaaagagcacccaacagaaaacgaagaggagaccagaagaaaaaaaaacag

SEQ ID NO: 5727 - RNA, 76 nt, Homo sapiens
aaaaggggaagagcaggccaccagaaggggaaccacagacaacccagaaaagaaaaggccaggggcgccgaaaaac

SEQ ID NO: 5728 - RNA, 73 nt, Homo sapiens
gaaaggagggaagccagaggccaaaggcaggagaggaggagagaaagaaagccagcgcaacgagagaaccagc

SEQ ID NO: 5729 - RNA, 68 nt, Homo sapiens
gcaccacggggcccacacagagagcgcagcaagaaaccaagagggagcaagggcagccccgggcaacc

SEQ ID NO: 5730 - RNA, 84 nt, Homo sapiens
cgacacccccgggaccgcggagagaagcagcggacagcagaggcgcagcccagagggcacccgcaaacagcgggaccccaccag

SEQ ID NO: 5731 - RNA, 87 nt, Homo sapiens
cggccgacgcccccccccgcccggaaagcgcccagccaccagcaaccccccagggcggagaacggaaaagcaccaggaagcagagag

SEQ ID NO: 5732 - RNA, 68 nt, Homo sapiens
agaaaagaccgaaggaccaggagagccaggaggggccagagagaaacaagaagaacacaagcccgcgc

SEQ ID NO: 5733 - RNA, 41 nt, Homo sapiens
gcagaggcagaccaggacgcagaaaggcccggcagggcaga

SEQ ID NO: 5734 - RNA, 90 nt, Homo sapiens
caccacgcccggggggacgcccccaccacaccgggaggggacgacaccggagaaggcagcgacgacagcgacagcgagaagaggaggccg

SEQ ID NO: 5735 - RNA, 77 nt, Homo sapiens
gaacagaaggaacgacgcggaccagaagccagagcgaggacgccggcagggcaggcgccgggaggggccgggggcca

SEQ ID NO: 5736 - RNA, 81 nt, Homo sapiens
gcgccggcgcggaaggagagagagcgaggagaacggaagaggcaaaggaaacaacccagacagagggacaaaacaaggaaa

SEQ ID NO: 5737 - RNA, 73 nt, Homo sapiens
cgaccgaccgagcagggcacacccgcgaggaaggagaaagcgaagaggaccggaaaaaccccccgcccggcgc

SEQ ID NO: 5738 - RNA, 53 nt, Homo sapiens
gacaaaagggccaaagaagggagagaggaccagcgaagcccacaccaaagccc

SEQ ID NO: 5739 - RNA, 74 nt, Homo sapiens
gcggccccaagcagaacacgcgggagccaaaaccgcgacaggaaggaagaagagagggcgaaggaggccacaca

SEQ ID NO: 5740 - RNA, 99 nt, Homo sapiens
ggcaaaggaacaacccagccgaaggaggaacaccagaccaaagccaggacacggacgacaccgagcccaaccgaccaaccacaacaccccaaaggaagc

SEQ ID NO: 5741 - RNA, 71 nt, Homo sapiens
gaaacaccgcaggaaaaaggaaacgacccggacagccagcagcaaaacaccgaggaacacaagaagcaagg

SEQ ID NO: 5742 - RNA, 82 nt, Homo sapiens
gaaacaaaagcaacaaagagggagcgacaggacccaaacccgggccgcccggagcgccagcagcccgcccgggagcggcaaa

SEQ ID NO: 5743 - RNA, 79 nt, Homo sapiens
gcgaaggcggagagcaacgaggcggaaccggacgaggacagccaaggcagggccggcgcgcccaccgggacccggggcg

SEQ ID NO: 5744 - RNA, 50 nt, Homo sapiens
gagcgcgccggaccggcgcccggacaacccgcggaagcgaagaacgggga

SEQ ID NO: 5745 - RNA, 69 nt, Homo sapiens
gaacaaaccagaggaagcccacacacgccagcagaccaccccgggagggaagaggaccggcacggcgcc

SEQ ID NO: 5746 - RNA, 103 nt, Homo sapiens
gaacgagaagacgagagaacgacagggagccacaggaagaaggccacaggcaaaacaacggaggcccaaggcaggagccagcacgccagaaccccccgacaga

SEQ ID NO: 5747 - RNA, 54 nt, Homo sapiens
gagaagcggacacgacacaccacgcagcacgagggagcgcaccagcccaccgac

SEQ ID NO: 5748 - RNA, 77 nt, Homo sapiens
cccgccgccaagaggagcgagcggacccgcgagggaccaaaggcgaccaggagagaaaaccaaacacacagggggag

SEQ ID NO: 5749 - RNA, 87 nt, Homo sapiens
gcaccgggagaccagaaggaaacgccaggcccggaggccaggagagaaggaacccagccagccggcggaagcaagcagcagaggaag

SEQ ID NO: 5750 - RNA, 76 nt, Homo sapiens
gccgaaaccaagccggacccgaagaccagacacggccacacagaccgaacacaaacagccaacaggacaaaggaca

SEQ ID NO: 5751 - RNA, 79 nt, Homo sapiens
gcaaacaaaggcggccacgcgcggcgccgccgaacccaggagaaacgagagggacagcaaggaagacgccagagagcgg

SEQ ID NO: 5752 - RNA, 82 nt, Homo sapiens
cggaggggcagccacccccggcaagaaggcggcggccaccagggcgggggcacagagccaccagggcgagccgcaagcagcc

SEQ ID NO: 5753 - RNA, 92 nt, Homo sapiens
ccccgcaacgcccccggcccgcagcccccgccggccgcccaacaccgaacaccgcgaccggaacgcacaccaccgagggaacagagagcaga

SEQ ID NO: 5754 - RNA, 73 nt, Homo sapiens
ggcgaggagcaacccaggccgggggcaagacggagagaacggcccaggaagcccacggccgaacccaggaagg

SEQ ID NO: 5755 - RNA, 74 nt, Homo sapiens
gcaggaaacgcagcaaagccacgggggagaagacacagggcagccagaaacagcaaacaaacaggccaaggaca

SEQ ID NO: 5756 - RNA, 76 nt, Homo sapiens
gcgggcccagcgggaagcagagaagggcaccacacccagaagaaaggaggaaggaagggaacacggacgacgagac

SEQ ID NO: 5757 - RNA, 61 nt, Homo sapiens
cggcaagggggcaacgaggaagccaagagcgcggccggaaagcaggagcacccacgggaga

SEQ ID NO: 5758 - RNA, 83 nt, Homo sapiens
ggaacacagcccaggaagggaaaggaaacgcagaagagcagaaaacaacacgacagccaggcagaaaaagagaagcgcagcga

SEQ ID NO: 5759 - RNA, 74 nt, Homo sapiens
cgggacgaccgacaccgacaggagaagagaaaagggaaggcacggaggaagcccgagaccacgaggcagagaag

SEQ ID NO: 5760 - RNA, 73 nt, Homo sapiens
cggaaccgcgacaccaagagggaagcacagccaccaaagccggcacgcaaaggcaacgcagaaaggaaggaaa

SEQ ID NO: 5761 - RNA, 71 nt, Homo sapiens
aacgcaccaggccaaagaaagagaagcgagcgggacgcccggccagagccgaaaggggacgcccacccgcg

SEQ ID NO: 5762 - RNA, 61 nt, Homo sapiens
aaaggcccaggagcggaacacaggaccgaagcagcgaagggacagagagacgggacaccag

SEQ ID NO: 5763 - RNA, 82 nt, Homo sapiens
gccgcaacgaaaaccggaaaagggacagcccagagcaagcacacggaggcccgggagccagaccgggagcccgccccagcca

SEQ ID NO: 5764 - RNA, 68 nt, Homo sapiens
cacgccccaacgccggagggcaggcacgagcaaggaggagccccgaaaagcaaagaaaaaggaaggac

SEQ ID NO: 5765 - RNA, 81 nt, Homo sapiens
aaggaccaagaaccagagagaggaccagaaccagaccggaaagcaccaggcaaagaaaaaaacaggagccaagaaggccag

SEQ ID NO: 5766 - RNA, 44 nt, Homo sapiens
ccacaccaaaacacagacgggaggggaaggcccacgcggaccgg

SEQ ID NO: 5767 - RNA, 80 nt, Homo sapiens
acaggaaccggagcgggagccaggacaaaaccaggcagaaccaacacgaacccaagcacaaacaagaaaacgagcaggca

SEQ ID NO: 5768 - RNA, 80 nt, Homo sapiens
agaaccgcccggggaacacccaggggagaacagacaaaccccacaagcacgcaacgggcgacgcgccacagagcgggcgg

SEQ ID NO: 5769 - RNA, 79 nt, Homo sapiens
gggacaccggaagccgagaaaggcacagcagcggccaagggaggaacccgacacgggcacggagcaaagaagggaaccg

SEQ ID NO: 5770 - RNA, 76 nt, Homo sapiens
gaaacaaggcccaggccaagagacaaagacaagcacgagaccggcaaagggcccggcggaaagccccagagcccac

SEQ ID NO: 5771 - RNA, 95 nt, Homo sapiens
gcgggaccacaaagcacgacggcacccgggggccacacgcaggccccgcgccaggggaccccgacggagagacaaagaagacggagggggggcca

SEQ ID NO: 5772 - RNA, 70 nt, Homo sapiens
aagacgaggaaagcgaaagagagcacagagcagccagggccggggaaacaggacaaagggggcgggagag

SEQ ID NO: 5773 - RNA, 103 nt, Homo sapiens
gcgcgcggaggcgggagcgcggaaacggaaccgggaggcgacgcacacgagcggaggcgaagaaagccaacaggcagaccagagacagcgccacgcacccggg

SEQ ID NO: 5774 - RNA, 84 nt, Homo sapiens
aagcgagaggacaggcggaggccccagggaagcgcagaaagcaggcgaacccgcggcgcaaaacgcagcaggaggaccaggaca

SEQ ID NO: 5775 - RNA, 73 nt, Homo sapiens
gaacaggcagcaggaagcacggcgggcgaaacagagggaagaaagagccaaacaggcgagaggaagaagcaaa

SEQ ID NO: 5776 - RNA, 87 nt, Homo sapiens
cccaccccaaccgcggccccgaggccaaggcgccaggcaggacgacagcagcagcagcgcgccccaggccacacggcacacagccca

SEQ ID NO: 5777 - RNA, 80 nt, Homo sapiens
caacagccaaggaaaaaaagcagagaggagcggggagcaagcagcaaaagaacagaagggagaagccacaaccaaggcca

SEQ ID NO: 5778 - RNA, 67 nt, Homo sapiens
ggcaaagcccacaaaccggaaaaaaaaggcagcaagcagaggggaaaccacaaacaaaacagagcag

SEQ ID NO: 5779 - RNA, 65 nt, Homo sapiens
acaaggcaacaaacgaggaggaggcgaaacaaggcgaccacaacccagcacggaaaggaggaaac

SEQ ID NO: 5780 - RNA, 67 nt, Homo sapiens
cgcccaagcgcccggaggcccacagcagggggcagggagaaaagcccagaaccgagacagagcggaa

SEQ ID NO: 5781 - RNA, 37 nt, Homo sapiens
agggaacagcacgcaaaaggaaagaagggggcgaaag

SEQ ID NO: 5782 - RNA, 71 nt, Homo sapiens
cggggcacaaggacgagcgacaagaagacgaagaagcaaagcaaacgccagaaggacaaggccgccagagg

SEQ ID NO: 5783 - RNA, 81 nt, Homo sapiens
aggacaccacagccccgacgaacacggggacaccaacaggacccgcacccgacagcacaaaggcaagaaagaaaaagcccc

SEQ ID NO: 5784 - RNA, 76 nt, Homo sapiens
ggcgacgccccaggggaaaacccccgggaccagccccgccgacccacgagcccggcgacagcccagggagccccag

SEQ ID NO: 5785 - RNA, 66 nt, Homo sapiens
cagaagcacaaccagagccggccccggaggaggaggaagagcagccgcaggcagcacagcccccac

SEQ ID NO: 5786 - RNA, 62 nt, Homo sapiens
cgccacccccccccacagcaggaaccaagggggggccgaagaagccagggggaggaaagcag

SEQ ID NO: 5787 - RNA, 84 nt, Homo sapiens
gccccccgcggagcggcgccgcgagcccaccgccagcgccagagcgagcgccccgcccaggaacaagacgccaaggagacgccg

SEQ ID NO: 5788 - RNA, 73 nt, Homo sapiens
cgcaagggggaccagacggggaggaaaaaaacagggggaagagagaaagacacaaggcagacaaagaagcacg

SEQ ID NO: 5789 - RNA, 64 nt, Homo sapiens
cgcgaagcaacaaccgcaccaccaggcagaggaaccgcggggggagaaaccagcccgggggccg

SEQ ID NO: 5790 - RNA, 42 nt, Homo sapiens
cggggaagccacggcgcccagcgggcgcaaagacaccgccag

SEQ ID NO: 5791 - RNA, 73 nt, Homo sapiens
cccccccaccccacaacccccccccaacggcaacccagaggcagagcaacagggacacaagcaagaagaaagg

SEQ ID NO: 5792 - RNA, 76 nt, Homo sapiens
ggcgagagaggaagaagaggcgaggggccaaagacgcaggaaaccacacaacaagaacgcgccagaagacccacca

SEQ ID NO: 5793 - RNA, 70 nt, Homo sapiens
ggaggagccccaagaagaggcagcaggagaaggggagccaggaagcaggaacgacgccaccagacggcag

SEQ ID NO: 5794 - RNA, 69 nt, Homo sapiens
ccagagaggcagaccagaaggcgagagcgcgccgaaaagcgaaaagaaacaagccgcggcaacagcgac

SEQ ID NO: 5795 - RNA, 63 nt, Homo sapiens
cccagcggaccgaacagcacgccaggaaagagagaagaaaaccgaacaacaaaccagaacaag

SEQ ID NO: 5796 - RNA, 105 nt, Homo sapiens
gccagacccagaagcaccagaaacgagccaaaaagacaagcgaaaaagggcagaccaagagcagaaaaccaaggagcaggccccgcgccaccgccagggaagagc

SEQ ID NO: 5797 - RNA, 76 nt, Homo sapiens
aaaacacgagcaaaaacgcagagcaacggcgccggggaaagagaagacagggaccacgccagagcgccaaagaaaa

SEQ ID NO: 5798 - RNA, 80 nt, Homo sapiens
ccccagccacgccgacagccgcagaacaaaccccagcaaaaccagcgaagaagccagaagcacagacagcagagaagaaa

SEQ ID NO: 5799 - RNA, 75 nt, Homo sapiens
aagcccccaaagacgggaacacaaccgaccaaaagcaacgagagagccaggccagaaggaaagcggggcaaggag

SEQ ID NO: 5800 - RNA, 84 nt, Homo sapiens
ccgcggccaagaagcagaagcgagcaggacgagaacagcaaccagaccccggagacgagaaacaacaggcacaaagagagaagg

SEQ ID NO: 5801 - RNA, 78 nt, Homo sapiens
ccagagacgcggggacgggccggggcccccggaacgagagagcgacagggaaagagacgacacaaaaggaggcgccga

SEQ ID NO: 5802 - RNA, 70 nt, Homo sapiens
cccagaagcaggcccccagccgcagccacaacaccggcaggaaccaccaggacagacaacgaccgaagaa

SEQ ID NO: 5803 - RNA, 78 nt, Homo sapiens
acgagggggcagagcagaaagagaagcaaagccagagaagcagaaagagccagaggcagcccggacacgaaggcccgg

SEQ ID NO: 5804 - RNA, 72 nt, Homo sapiens
agcagagagcaaccgaaggacaaaccaccccgacccaggaaaccggagaagacacaccacagagcacccaga

SEQ ID NO: 5805 - RNA, 57 nt, Homo sapiens
caagccacaggaggaggcagcaggcagcgcacgggaaagcgccgacgacagacggag

SEQ ID NO: 5806 - RNA, 62 nt, Homo sapiens
ccggaaggagggcccgggcccaaggaggaggcagcccaaggcgccccccggcaccgcccgcc

SEQ ID NO: 5807 - RNA, 34 nt, Homo sapiens
gaagcgcagccagaggaaaaagaaaagggcagac

SEQ ID NO: 5808 - RNA, 77 nt, Homo sapiens
ggagacgggacaccaacccaaaaacagcaggaagcccaccagaaaggacagggagggagcccggcaaagacgaagcg

SEQ ID NO: 5809 - RNA, 73 nt, Homo sapiens
cgcaagaaagacgccgccccaagggcgaaccaaagaaggaaggcgacccaaaaccacgaagcacaggcagccg

SEQ ID NO: 5810 - RNA, 79 nt, Homo sapiens
ccgggccaacgaaaggaagcacaagaagagagcccagacagccacaacaagcccacacaggcagcacggcgcgagaaga

SEQ ID NO: 5811 - RNA, 69 nt, Homo sapiens
agaaggcagcccacgaacaccgcagggagaagcaaacgcgaaacgagaaagagaagaacagcgaaaaag

SEQ ID NO: 5812 - RNA, 103 nt, Homo sapiens
ggagaaaacgaagagacggaggaaaccacaggacggaagcacaggggccaccagagcgcccgagaaagccccggaggcgagagcaaacggcgcacaggaaccc

SEQ ID NO: 5813 - RNA, 81 nt, Homo sapiens
cggagcggagcccggagggaaggaccagccacaagaaggcccgcaaggggcgggccccacggaccacccaaaaaaacaccc

SEQ ID NO: 5814 - RNA, 90 nt, Homo sapiens
ccgcaggcggcggggcagggcagacaacaccgacgaggacggcgggacccggaggcggagaaggccaaggccgcaaacgacgccggcggc

SEQ ID NO: 5815 - RNA, 69 nt, Homo sapiens
ccggacaagagaccacacccaggaagccaggcacgcacagccacaggaaagagaggagaggagcgccgg

SEQ ID NO: 5816 - RNA, 70 nt, Homo sapiens
gcgcccaggaagccaaagaaaaaaaaacggagggacccaaccaagagccccgagccaggaggcagccagc

SEQ ID NO: 5817 - RNA, 77 nt, Homo sapiens
gacccggcaaaagcagcccagccgcaggccagcccagcccagagaaagcggaacgcccgggaaacgccacggagaac

SEQ ID NO: 5818 - RNA, 70 nt, Homo sapiens
cacaccggcacacccacggaagcacaccggccaggcgcagagccagcaccccggccgcccagagcagacc

SEQ ID NO: 5819 - RNA, 64 nt, Homo sapiens
ccgcggcacggggcaaccgggcggccacgcccgcgcagggccaaccgccccccagcagcaggca

SEQ ID NO: 5820 - RNA, 80 nt, Homo sapiens
gggaagcaggacgcgccgcgccccaagcgcggccgccggagccgccgcgcgcgacggccgggccggccgcgcgcgggccg

SEQ ID NO: 5821 - RNA, 80 nt, Homo sapiens
gcgccccaaaccgcccaggccgagaggggaaggagggcgaaacaaaggaccagcacgggaaccggccgcccagcgcagcg

SEQ ID NO: 5822 - RNA, 72 nt, Homo sapiens
cagcaaaacagggcagaaaagaacggccagacagccaccgaaggggcccagggaccgggaccgcgcaccgcc

SEQ ID NO: 5823 - RNA, 74 nt, Homo sapiens
gccccgacggagcgccaggacggcaaagcgaaggcggagcaggagaaagcggcacagaccccagaggaaaaacc

SEQ ID NO: 5824 - RNA, 59 nt, Homo sapiens
acgcggccgagcccaccagagacgccaagagcgcacagagcaaacggggacagcgccga

SEQ ID NO: 5825 - RNA, 64 nt, Homo sapiens
gacccaggcaaggccgcaagcggcagaagaaagaggaggccaaggcaagcggcagccacacccg

SEQ ID NO: 5826 - RNA, 79 nt, Homo sapiens
aggacagcacaagagcaggcgaccaagagagaaacagaacaaagaagagcagaaaacaaagacaagaaggcaagaaaag

SEQ ID NO: 5827 - RNA, 78 nt, Homo sapiens
aaggacagcccgcaaggagcgccaaaaaagagggggcgaagggaaaagccccgcaggaggccgaagcagcaaaaacgc

SEQ ID NO: 5828 - RNA, 82 nt, Homo sapiens
gcggagggaaccgggcgcggcggccgaggccgggggccaagcgacaaaggaacggaagagccaagaaagaaaggccccccgc

SEQ ID NO: 5829 - RNA, 81 nt, Homo sapiens
agcgggacgaggaccgagaccgcggccgggaccgagggcaccggcccgaccagccacgacacccacgaaaggacaggcagg

SEQ ID NO: 5830 - RNA, 64 nt, Homo sapiens
agaccaaacacagccacacaccagagaacaagcagaggaaagacacgccagagaagaacaggac

SEQ ID NO: 5831 - RNA, 54 nt, Homo sapiens
acagaaggccaccgagcaagaagcggaaaccccggaggggaccaaagcaggaag

SEQ ID NO: 5832 - RNA, 78 nt, Homo sapiens
aaccccgagggaaacaagaaaacacaaagaggcagcaaaggaggagccgaggaaggcgccaccacgaccgccgaaccg

SEQ ID NO: 5833 - RNA, 55 nt, Homo sapiens
ccccgcacagagacacgggaggccaagggaggacaccaggcccagcacgagagag

SEQ ID NO: 5834 - RNA, 78 nt, Homo sapiens
cacgcgcggagaccaggccagcacgacaaaggaaccaaggaagagaaaaggagcagccacggcgcagaggaacagcca

SEQ ID NO: 5835 - RNA, 80 nt, Homo sapiens
agggagagcaagaccacagcgcgcggcccccacaccacacagagagcgacaacagggaaaagaaggaaaacgggcccaga

SEQ ID NO: 5836 - RNA, 74 nt, Homo sapiens
gggaccggcgggggcagaacgagcccaggccacagacccacacgccggcggccaagaggaagacggggcccaaa

SEQ ID NO: 5837 - RNA, 80 nt, Homo sapiens
cgaacaggagaaagaaggcggaacaccacaaggcaccgcaaggaaccccgagcccccggggcaaggccacccagcaggag

SEQ ID NO: 5838 - RNA, 80 nt, Homo sapiens
aaacaaaaaacaaggaaggagggaagaccgcccggcggaagaacagcaaacaaccgaggggggaggacggacacgggagg

SEQ ID NO: 5839 - RNA, 68 nt, Homo sapiens
gcaaaaagcgccagcacaaacaacaggaaagccgaaggagaaagggcgcaagagagcgggccacggga

SEQ ID NO: 5840 - RNA, 78 nt, Homo sapiens
gccggacccggaacagcaagaacgcaccgaaccagggaggagagcagaaggccaggaaggggcaaggggcgggacccg

SEQ ID NO: 5841 - RNA, 69 nt, Homo sapiens
ccacagcccaagaacaggacgaaagaaacggaagccccaagcaaaaaagagcacgggacccccagacca

SEQ ID NO: 5842 - RNA, 39 nt, Homo sapiens
caagagagaccagggggggaagccagccccaggccacgg

SEQ ID NO: 5843 - RNA, 78 nt, Homo sapiens
gcgggaacagaggagccaccgcccagcccaccgaagggcccccgccagacagcgccagacaagagcagagaggcaaga

SEQ ID NO: 5844 - RNA, 61 nt, Homo sapiens
cgggcgggggacggcaccggcgcgggggcaggacacaccggaacaaagaaaaccaaaacgc

SEQ ID NO: 5845 - RNA, 105 nt, Homo sapiens
aagcacagaagcaaaagcgcagcaaagcgggaagacaaaaaacgcacaaggcagagaaggaaaccccacagcaacagggagagaaaagccccgaaaacggagagg

SEQ ID NO: 5846 - RNA, 72 nt, Homo sapiens
accaacaacaaaagagacaccgaaaggcgcaaggggacggaaaccaaggaaccaaagagcgagcagggcggg

SEQ ID NO: 5847 - RNA, 75 nt, Homo sapiens
cgacgaccgcacaacagaaggagagcagaaagacgagccgccggggaaaaagcgcagcaaagagacaagccaaag

SEQ ID NO: 5848 - RNA, 56 nt, Homo sapiens
cggcgaagaaggaggcaggcacgggagccgaagggaggcccaagcagccccaaaaa

SEQ ID NO: 5849 - RNA, 72 nt, Homo sapiens
acaggaaaaaaaagaaaacaagcgcacgaaacacgaaaggcagagcgcgcagggccagccacaaggcaagca

SEQ ID NO: 5850 - RNA, 77 nt, Homo sapiens
aaaaaaacccgaacaacgaccaagagaccacagaccagaagagagcaacaggaggcagcccagaacgcagcagaaca

SEQ ID NO: 5851 - RNA, 85 nt, Homo sapiens
cacccagccaggagacaggaggccgcggggagacgcgggggacggggcaggaccacagaagccaagacaagaagcggagaagcga

SEQ ID NO: 5852 - RNA, 73 nt, Homo sapiens
gaacccccacgcggccagcgaaaacgcccaggccgcgaagagccccaaggggggaggcggcccggcagcggga

SEQ ID NO: 5853 - RNA, 80 nt, Homo sapiens
gcaaaggaagccggacccggccacaagaccagcacaaggacagacaagggaggcgaggacggacaaaaggaaacggacgg

SEQ ID NO: 5854 - RNA, 60 nt, Homo sapiens
caggggcagccacaaccgaaacaacagcgagcagagccgaggcaagaggaggaagaaggg

SEQ ID NO: 5855 - RNA, 67 nt, Homo sapiens
ggccccaggcagggcgacgggccaaccacaaagccgagccgccagaaacgaagcccccaagaccaag

SEQ ID NO: 5856 - RNA, 78 nt, Homo sapiens
ccacaggagaggcacaggaccagaccaagacacacaaccaaacaggagaaaaagcaagccacacccagaaccagcagc

SEQ ID NO: 5857 - RNA, 58 nt, Homo sapiens
cgacagcgagggcggacaacacaaagaggggcacgacaacaccagaagggaagccgag

SEQ ID NO: 5858 - RNA, 70 nt, Homo sapiens
agggccggaaaagccaacgccggcgaagggccagggcaggcaggccacacggggagcaggccgggggcga

SEQ ID NO: 5859 - RNA, 101 nt, Homo sapiens
gcacccgcaggagagggaggcaggccgaggcacggagcgcccccacaggagaggacccaaagacaggaccacgcaccagcagagaaggaaagcaaaccgaa

SEQ ID NO: 5860 - RNA, 69 nt, Homo sapiens
ggcccccaacggcccagcacaccagcgcgcagacccggccgcacccagaacacaccacccccccaagac

SEQ ID NO: 5861 - RNA, 77 nt, Homo sapiens
ccgggggccggcaaggaaacccaaccccaggagcgcgggggaggaaaaggaccgagcaaacacgaccacaaaagaaa

SEQ ID NO: 5862 - RNA, 73 nt, Homo sapiens
cggcggggccgccggcccccgacagcagagcggggcccggcgcacccaccaccgccgcccacggcagcccagg

SEQ ID NO: 5863 - RNA, 75 nt, Homo sapiens
gagaagaaaacgagggcacagaaggcccgggaacaagaaagcaccagggaagcgccaaaccacgagcgccaagcg

SEQ ID NO: 5864 - RNA, 56 nt, Homo sapiens
cgccagacaacacccaggcagaagcggaaaggaacgcaagcacaggaccagaaacg

SEQ ID NO: 5865 - RNA, 112 nt, Homo sapiens
cgcgggcagccaacgagcgcggaggacgagggccagcgacggagagggcagaagaggaggagacaagcagaccggaagaccgacggaagaccacaccccgagggagcccagg

SEQ ID NO: 5866 - RNA, 56 nt, Homo sapiens
agaaggccaccaaggacagggcagcaaggagaaggaaggccagaaaggagcacacg

SEQ ID NO: 5867 - RNA, 77 nt, Homo sapiens
ccacggcacccggccccgcccccagcggaggggcccacccgaggaaggagccagacgacaggaaaacccgcaaggaa

SEQ ID NO: 5868 - RNA, 84 nt, Homo sapiens
gccagcgcgacgagaggcacgacaacaggcacaaagagagaaggaacacccacagggcagacagagaaagaacacaaagagggg

SEQ ID NO: 5869 - RNA, 72 nt, Homo sapiens
ggagcccaagccaggcgacagcggcagagccacagagcaggggagcaagaacaggccaacagacccgccccg

SEQ ID NO: 5870 - RNA, 79 nt, Homo sapiens
aacccaaccaagaaggcccagagccagagccgccagccccaagcaaagacacagaagagaggaagcagaggggacgcgc

SEQ ID NO: 5871 - RNA, 79 nt, Homo sapiens
cccggccccggcgagcgggcggagagcgggggccgcacggggagggggcgggccgcaggaagaagagagggcgaaggag

SEQ ID NO: 5872 - RNA, 70 nt, Homo sapiens
ccgagagcgggaacaggagagagcgaagcaccgcgcagaccgaaaggcacacggagcgaaacccaagaca

SEQ ID NO: 5873 - RNA, 68 nt, Homo sapiens
accggaacaacaggaagaggcaaagaagagaaagcagacaggacgagacaaggaaagccaagagaaag

SEQ ID NO: 5874 - RNA, 75 nt, Homo sapiens
cagggaagagaagaggacgggaggcacaagaccgcaccagcacaaagagcccaacccggcagcggcccacagaca

SEQ ID NO: 5875 - RNA, 50 nt, Homo sapiens
cagacggacagacccacaacaccaggcgccagggagggccgaacaggggg

SEQ ID NO: 5876 - RNA, 88 nt, Homo sapiens
ccagaaacagcggagacagcaagcagagcagagagccaagcacggacacaggaggacgggagaaagacgacggacagacgaagaggag

SEQ ID NO: 5877 - RNA, 78 nt, Homo sapiens
gagacacacaagggcagccaaacgaggcaaaaacccagccaggagagagagagcaaggagacagagacaggaacacaa

SEQ ID NO: 5878 - RNA, 107 nt, Homo sapiens
cgcgcgccgccgccgccgcccagagacgcgagcccgccgccgccgccaccacccacccggacacaggaaaacaaagagggaaaacggagaaaagcccccccaggcca

SEQ ID NO: 5879 - RNA, 63 nt, Homo sapiens
ccaggaccgaccggagccgcccaggacggcaggggaccgcacacaccggcgcagggaagaaag

SEQ ID NO: 5880 - RNA, 77 nt, Homo sapiens
caacgggcccccgagacaagcacccccgcgagggagagcacagagccgggaaagcagaagaagaaaggagcgccaca

SEQ ID NO: 5881 - RNA, 67 nt, Homo sapiens
ccaacaagaggaggagagggggaaaacgccggccgaacagcccacgccaagagcgggggggcacgac

SEQ ID NO: 5882 - RNA, 58 nt, Homo sapiens
ggaggcggggggaccggcgggcggggcgaccagacgaggggagacggacgggggagag

SEQ ID NO: 5883 - RNA, 81 nt, Homo sapiens
cgccgccaccacccacccggacacagaaaccaagggagggaaccgggaacggcgcggcaaaggagagagaaagggccagaa

SEQ ID NO: 5884 - RNA, 85 nt, Homo sapiens
gcggggaaccggggagaacacgggacaccgcggaagccgggaaagagggaacaggcacgccccacccgccagccgagcccccgac

SEQ ID NO: 5885 - RNA, 69 nt, Homo sapiens
cccgagggcgggcagagggcgcagccagcccgacagggcgccacgggcacaccagcagaaccccggagc

SEQ ID NO: 5886 - RNA, 51 nt, Homo sapiens
gaagccgaaaaaccggaaagacccacaaagggcccgagggaccgccaacaa

SEQ ID NO: 5887 - RNA, 45 nt, Homo sapiens
agcccccgagacgggcacacccccggagggcgaacgcggcaaggc

SEQ ID NO: 5888 - RNA, 84 nt, Homo sapiens
agcggaggaaaagcgaccaaccagggacgccagacaaaggccgcagggcgagggcaggaggagagcggcaaccacgccaccggc

SEQ ID NO: 5889 - RNA, 104 nt, Homo sapiens
caccaagaggcggacggcccggagagacgaaccgaagcgggcgggcccccccacccagaggagcagaacagaaggcgcacaaaggaaagagaagcaaaaccacc

SEQ ID NO: 5890 - RNA, 76 nt, Homo sapiens
cgaccccaagaccacaaagggaggagacagagcagaaaaaagaaaaagggaagaacggaagcgccgccagaaaaca

SEQ ID NO: 5891 - RNA, 86 nt, Homo sapiens
acggagggcagccggggggccggaaggcgcggccggaggacaccccacggcagacgagccaaaccaggcgaccgagcagccaagca

SEQ ID NO: 5892 - RNA, 76 nt, Homo sapiens
caaaggcaacccgggccccaaggccccgggagaccaggagagaagccacaaacaggccgcacagggagagagagac

SEQ ID NO: 5893 - RNA, 67 nt, Homo sapiens
aggaagaggccaccgcacccgcagaaaccaaaacaagggaaagccaaggacacgcaggacgaagaag

SEQ ID NO: 5894 - RNA, 73 nt, Homo sapiens
agggaaggcaagagccaacccaaaaccaaaaagcaccgggaggaaagagagccacacgaagaacacggccaaa

SEQ ID NO: 5895 - RNA, 35 nt, Homo sapiens
gacacagccgaacccccacaggggcaggcccggac

SEQ ID NO: 5896 - RNA, 67 nt, Homo sapiens
ccagaaccgaccgggcaggagaaaaccggaagagaaaggccgggaagcaggaaagaaaaaaacaaca

SEQ ID NO: 5897 - RNA, 86 nt, Homo sapiens
gaaagcagggagcagaacaggcccacccggcccggcccacgcaacccagcccagccgcagggaacacaagaaacgaagggaaaaca

SEQ ID NO: 5898 - RNA, 71 nt, Homo sapiens
gccacggcgccagagccggggacgaaagggaaggacaggcagagcaaacaagacgacaaggagaaaaagaa

SEQ ID NO: 5899 - RNA, 82 nt, Homo sapiens
ccccggcccacaggggggggcaaacccgagagaacggaaggccggcccacagcccaaaaagaaacaggaccgaaagccagag

SEQ ID NO: 5900 - RNA, 72 nt, Homo sapiens
cagagcaaaacacacgaacgcgagaaagcaaacccaggacccaaagacaggaccacgcaccagcagagaagg

SEQ ID NO: 5901 - RNA, 71 nt, Homo sapiens
aaacagcagaaacgcaccaggccaaagaaagagaaccaggacccgaaaagccagcaagcgagaccaacacc

SEQ ID NO: 5902 - RNA, 82 nt, Homo sapiens
acgaggacaaggaccgccgggcaagacccaaggaaaaagcagcaaagggagaaaagaaggccaaacagaagcaggcccagcc

SEQ ID NO: 5903 - RNA, 59 nt, Homo sapiens
cacgggccaccgcgacgaccgccgccaacaacagaccacacccacgggcaaaggacagg

SEQ ID NO: 5904 - RNA, 73 nt, Homo sapiens
caggcgacccacagcacgggcgacaacgcaagaggccagggaaggacacaccgcggaaagaacaagaagcaaa

SEQ ID NO: 5905 - RNA, 72 nt, Homo sapiens
gggcacgcgccacgccacgccgcgggcggacaccagcagccgggaaacagccaaaggccaggaggacagagg

SEQ ID NO: 5906 - RNA, 71 nt, Homo sapiens
ggcggacggaggagcaggcgagaagagaagaacagagaaaaggaggccggacaaaaacccacaacgccgca

SEQ ID NO: 5907 - RNA, 71 nt, Homo sapiens
cccacaggcccccgccgagcaccgaggggaagcgaaccaaccgaggccaaaagaaaggaagaaaaccccca

SEQ ID NO: 5908 - RNA, 75 nt, Homo sapiens
ggaaaggagcggggagccccgcgccacagggaagcccagaggcacggggcagaacaccaacagagggccgaccgg

SEQ ID NO: 5909 - RNA, 82 nt, Homo sapiens
ggagacccgacgcaacgcggagcgcaaggcgagggacgagaacgagcgagagaggaacgaggggcacagaaaccagaaaaac

SEQ ID NO: 5910 - RNA, 79 nt, Homo sapiens
gggccgaacggcccggacacccgcagggggccgaggccccggccagacgcggggaggacaaccaagcggaagaggggcg

SEQ ID NO: 5911 - RNA, 79 nt, Homo sapiens
ccaaggaggggacccccaggaccacaccccggagaagacaagagaaaggacaccagagagcgcaggaagggaaccacga

SEQ ID NO: 5912 - RNA, 78 nt, Homo sapiens
aaggagacgaagaaagaagagaaagcagcagcacccaaaccggggagaaggcgaacgaaggagggcgagggagcaagg

SEQ ID NO: 5913 - RNA, 84 nt, Homo sapiens
gccaaccccagcaaaaagcccgcaacaagaagcagggaagagagaagggcacagaccaagacaacgaaccccggccaggacagg

SEQ ID NO: 5914 - RNA, 58 nt, Homo sapiens
ccaaaaacagggaaagggccagcacaggagagcgccccacaggaagcccgcagaaggc

SEQ ID NO: 5915 - RNA, 76 nt, Homo sapiens
cgacccgacgggccaccgggcgcacccccgagagagccacggaagggcgccaaggagccaccgccaccacggcgcc

SEQ ID NO: 5916 - RNA, 69 nt, Homo sapiens
aggggaaaagaagacaaaagaaaaaaaagaggaacggaccaaaaaagacaggacaggaaacaaagagcg

SEQ ID NO: 5917 - RNA, 71 nt, Homo sapiens
cgcggaggacgccccaccgccgacgcccccagccaccagaacggcacagccaacaagagaacggagcggac

SEQ ID NO: 5918 - RNA, 70 nt, Homo sapiens
gcaaaggagcaagcaagaaggaaggccaccaccgggcagaaacgggagacaccagcagaaaacgaagaga

SEQ ID NO: 5919 - RNA, 81 nt, Homo sapiens
cccaacggaagcgcggacggccaccaagagccaggaggccgggacgaggccaagccaaggaaggcagagcccacaaaccca

SEQ ID NO: 5920 - RNA, 79 nt, Homo sapiens
gcgccgggacggggccccagagacgcggcgcgcccgcccgcagcgcccaagcagacagcggagacagccggaagaaacg

SEQ ID NO: 5921 - RNA, 76 nt, Homo sapiens
ccagaggacaagaagaggcacaaaggagacacaacacaggcagaaaagaaccaggaaggaagcaggcaaaaccaga

SEQ ID NO: 5922 - RNA, 65 nt, Homo sapiens
accccccggcgccgcgccggcggcgcggggacgacgagcccacggcacaacggaccgacagagca

SEQ ID NO: 5923 - RNA, 75 nt, Homo sapiens
gcgccagaaggaagaggcggacggaggagcaggcgagaagagaagacgggacagggagaaaacgaagcggagcca

SEQ ID NO: 5924 - RNA, 83 nt, Homo sapiens
ccgcacacaccaagcagaggaacaagaacgcgcccccgccgcgcccgggcgggggagggacagcgagagcacggcacgacccc

SEQ ID NO: 5925 - RNA, 78 nt, Homo sapiens
caggacccccaacaccagcaccgcagaggcaaggggccaccaggaggccagggggcgccagaaaaacagccaggaccc

SEQ ID NO: 5926 - RNA, 37 nt, Homo sapiens
ggggcccgaccgaccccgacaagagcgagcaagccgc

SEQ ID NO: 5927 - RNA, 76 nt, Homo sapiens
acggcgagcagccaggccaggagaggacaccgcgaccagcaccacccaaacaagaccacaagaccaaaaagcaagg

SEQ ID NO: 5928 - RNA, 34 nt, Homo sapiens
gaaacaacaccaaccagacagaaggacagagaag

SEQ ID NO: 5929 - RNA, 77 nt, Homo sapiens
gaaaaacggagagccacaaaaaaggaagcgaaagggcacaacagcaggacgcccagaacagcgcaccggaccaccac

SEQ ID NO: 5930 - RNA, 70 nt, Homo sapiens
accgggaccccggaagccaaaaaggaagacgcaaacacaaggaaggaaccaaccgaggcagaaacggagc

SEQ ID NO: 5931 - RNA, 77 nt, Homo sapiens
cgaacaaacagcaagaaagaccacaagaccagcacaggaaccgggcacaaccggggcgagcagcaagaaacagcgag

SEQ ID NO: 5932 - RNA, 76 nt, Homo sapiens
caacggccgagccaccgcaaaggggagaggcaccagcaacagaccaaccgcagcaagcacagagacaggaagcccg

SEQ ID NO: 5933 - RNA, 72 nt, Homo sapiens
cagaccacagagccggacggcgggcacgcccacaggaacgaagagggaccgcgagaagagggcgagacaaca

SEQ ID NO: 5934 - RNA, 81 nt, Homo sapiens
ggcggagcggggcccgacggccacgagcggcacaggacagaaccgcaaacaacggagccagaaacggcaacgggccacagc

SEQ ID NO: 5935 - RNA, 66 nt, Homo sapiens
cacaagaggcgccggcgggaaaacaacagccgaggcagagcaacagggacacaagcaagaagaaag

SEQ ID NO: 5936 - RNA, 76 nt, Homo sapiens
agcagaacaggagggaagcagaggacagagaagcgccaggccgccacagaaaggcacaaaggacaggaacaaagaa

SEQ ID NO: 5937 - RNA, 39 nt, Homo sapiens
aacggacgagccgcaggacacagacgcgccagcaacagc

SEQ ID NO: 5938 - RNA, 80 nt, Homo sapiens
gcccagcacgaccccgggcagcccaacgagaaccggagggcaccggaggcagcgcacgggaaagcgccgacgacagacgg

SEQ ID NO: 5939 - RNA, 72 nt, Homo sapiens
aaacggccaggagcgaccagcccccagaacagagccaaggcggaagagaaacaacgaacgagcaaggaaggg

SEQ ID NO: 5940 - RNA, 70 nt, Homo sapiens
aaacagacaagacaccagaaagacagcacccaggggcaggacacggggaacgcggaaagggacgagccga

SEQ ID NO: 5941 - RNA, 70 nt, Homo sapiens
cccagccccgaagcgggacacagaacaacaacagggcacggaagcaggagcgaaagccagcaaagcaagg

SEQ ID NO: 5942 - RNA, 56 nt, Homo sapiens
caggcaccaccggccccggaagggccacagagccgaacacagcagagggggacaag

SEQ ID NO: 5943 - RNA, 84 nt, Homo sapiens
ggcagaagcgacaccgaggcagaaccgcaagcgaaccagccggccgacgaggagcagggcccccggacgcacaccacaagcgac

SEQ ID NO: 5944 - RNA, 83 nt, Homo sapiens
cgaggcggaggccgaggacccggggccgaggagcgggaagaggcgggagaaggagggggcagagcacggcaggcagaaggggc

SEQ ID NO: 5945 - RNA, 117 nt, Homo sapiens
gggacaaaagggggaccagccaggccgaggaaccagaacacacagcaggaggagcagcgggaggggaggagcaggcaggaccagcagcagcccggaggggaccagagcggacacagg

SEQ ID NO: 5946 - RNA, 80 nt, Homo sapiens
gggcgacggcccgaggccgagggcggccgacagagccccggcccccccgcagacccccggaccagccaccagccgaagca

SEQ ID NO: 5947 - RNA, 78 nt, Homo sapiens
agcccaagccagaaggacaggacgcaacgaaaccggcacggccgcccggccccccggaggccagccccccgcccccag

SEQ ID NO: 5948 - RNA, 72 nt, Homo sapiens
cacaccaagaaggaacagggaaaagccgggggccaccccggagcgaacacgggaagagcggagggccaggcg

SEQ ID NO: 5949 - RNA, 68 nt, Homo sapiens
acaacggggagaacagcccaaaaaaggacggaccagcgggggagacacgcaggggggagcacgcgaag

SEQ ID NO: 5950 - RNA, 85 nt, Homo sapiens
cgcacaccggcagcaaaagagggccggccacggcggccgccccaccacggcccacccccaccggggcaacagccagcgcccagcc

SEQ ID NO: 5951 - RNA, 75 nt, Homo sapiens
ggaccaaggaagaagacagagaccccacaagaagggaagcgggcggcagccagccaggagaaagaagaaacaaag

SEQ ID NO: 5952 - RNA, 76 nt, Homo sapiens
gcccggcgcgcgcgcggccccccccccggcgcccccaggcccagagcgcggcccaggggccaacggacagaggccc

SEQ ID NO: 5953 - RNA, 76 nt, Homo sapiens
agaaagagaccaaagaaggagcgaagaaggcaagaaagggaccgaaaggaacgacacaacaggggcccagcccaaa

SEQ ID NO: 5954 - RNA, 72 nt, Homo sapiens
gcggcgccgacgggccccgaggccgcgggcggcccacagggacacaagcaggcaccaccacagcaaaaaaaa

SEQ ID NO: 5955 - RNA, 78 nt, Homo sapiens
aggaaagcaggagacagcaaagaagacgccagaacaagaaagagaaagcgacagcagaagagcgagggggaacggaca

SEQ ID NO: 5956 - RNA, 38 nt, Homo sapiens
cgcaacagcagggacaaaagagacgaggccacaggccc

SEQ ID NO: 5957 - RNA, 75 nt, Homo sapiens
ggggggaccgaccgcaacagaacggacccgggccagggagcagaagacccaaaagaaacccacaaaaaaccacgc

SEQ ID NO: 5958 - RNA, 74 nt, Homo sapiens
caggccagcgccccaggccaagagggacccacccggcggggaccccgggcccgggcgggggagaagacagaccc

SEQ ID NO: 5959 - RNA, 85 nt, Homo sapiens
ccgggaacggcggcgggacggcggccccgcgcagcccccggccgcagcgcaggcagcccagcaggagaagacagaggagccagac

SEQ ID NO: 5960 - RNA, 78 nt, Homo sapiens
caaaacaggacagcacaggcacagaaggccaaaaaggcaaccacagagagagagagggagggccaggaaggaggaggg

SEQ ID NO: 5961 - RNA, 73 nt, Homo sapiens
acagaaccaaaggcaaacgagaggacgcaaagagaaccagggggaagagaaggaaagggccgacacgaacacg

SEQ ID NO: 5962 - RNA, 70 nt, Homo sapiens
gcaaaggaaaaaagcccggggcaaaaagaagacacggagcggccgcgccagaagggaagaaaggcggaac

SEQ ID NO: 5963 - RNA, 77 nt, Homo sapiens
cccgggagacggagcgaaggccggagagggaagaaagagccaaacaggcgagaggaagaagcaaagacaaagcaaga

SEQ ID NO: 5964 - RNA, 64 nt, Homo sapiens
aggagccgagaccccaaccgaggcgggaagaaaccggaaggggccgccaggcggggggagcaag

SEQ ID NO: 5965 - RNA, 40 nt, Homo sapiens
ggcaggcacgggagccgaagcggagaacgcagcgcaagaa

SEQ ID NO: 5966 - RNA, 115 nt, Homo sapiens
ccgaggaaagcgacaaagaggaccacaaacgccgcgcggaaggcagccaaaagggcaggaagagccaggcgggacacaaggccaccagccagcaagaagaagacagaaagaggag

SEQ ID NO: 5967 - RNA, 81 nt, Homo sapiens
ggcgagcaacagcagcgaagcgcaggaggacccaagagcccccccccaaagaaaccacaacaaagggcgcccaggccccgc

SEQ ID NO: 5968 - RNA, 50 nt, Homo sapiens
gagcaaacaaagggaagggggggagccgcacgacccgaacgccagagaca

SEQ ID NO: 5969 - RNA, 70 nt, Homo sapiens
caacgagacgcacaagaaaagcgcaagaagaggaggaagccagcgaggcaggacaagcggcagaaaaaac

SEQ ID NO: 5970 - RNA, 65 nt, Homo sapiens
ggagaccgcggaagcagacacacccggagggcggcccggaagggaaccacaagcaccagccagac

SEQ ID NO: 5971 - RNA, 85 nt, Homo sapiens
ccgcgcgcgagccacgcagcccccaggcccagagaaggacgcagcgcgagcggagacacccgcgccccggaggagaccggcccag

SEQ ID NO: 5972 - RNA, 75 nt, Homo sapiens
agacgaagacggccgggagagggggaagaggaggacgccgggagccgcccccggaaccaaaaagcgcacacggag

SEQ ID NO: 5973 - RNA, 84 nt, Homo sapiens
aggcgggaccgacccggagcacccaggaccagacccagcccagagcagcacacaccggaacaccggcagagagagagacacacc

SEQ ID NO: 5974 - RNA, 80 nt, Homo sapiens
gccgccaccaagagagcagggcccgcggagccgcgccgaggggaagagaaggacggagaagcgaaagccagaccggcaag

SEQ ID NO: 5975 - RNA, 75 nt, Homo sapiens
ggagcaggcgggcgcgaagcccagggaaccaccaaccccaggcgccacaggagccgcagaagcaaaggcaccgcc

SEQ ID NO: 5976 - RNA, 107 nt, Homo sapiens
acgagcaccaagaagaagaagcgcggaagcccagacaccaggaagggagaccgacacagaaaaagagaaaccgagaccaagaacccgcggaaagcagaacggcgccg

SEQ ID NO: 5977 - RNA, 73 nt, Homo sapiens
aggcccaggggcgagccacagcgaaaggagaaacaaggaagagcaacgcgcgagggacagaaaaacagaagca

SEQ ID NO: 5978 - RNA, 59 nt, Homo sapiens
ccaagcgcccaggacaggacaccggagagagccgccgcccgggagccggacggcccgaa

SEQ ID NO: 5979 - RNA, 79 nt, Homo sapiens
acccgggggccaaagccgccgggaacaggccggcggaagagggacaaggcaggaaggccgcccgggccgccccagcggg

SEQ ID NO: 5980 - RNA, 88 nt, Homo sapiens
ccccgccaccgcaagagccgcagcagcgccccgcagggcacggccgagcagagaggacggggacgaccgggccagacaccgggaggaa

SEQ ID NO: 5981 - RNA, 78 nt, Homo sapiens
gaagaggccgcgcggagccgccggccgcgcgccaaccgcgcgagccagaccaggaccaggcggggcgaaccagcgcgg

SEQ ID NO: 5982 - RNA, 88 nt, Homo sapiens
cagcgcgccggccgcgaggccacggagagccgccggagagcccaggagcaggggagacagggcccaaaggaccagccaaaacccaccc

SEQ ID NO: 5983 - RNA, 70 nt, Homo sapiens
cgcaggaagggccccagccccgcgggcgcggggagaaagaagcggaagacaaggagccccccaccccaga

SEQ ID NO: 5984 - RNA, 56 nt, Homo sapiens
gggggaacgccaggaagagaaaaagagccacagagaggcaccaagcagccgaagag

SEQ ID NO: 5985 - RNA, 83 nt, Homo sapiens
cccagagcgccacggagaagccgccgaagagaaggaaggggagcacccgcacggccgggccaccggagaggagcaaacaccgg

SEQ ID NO: 5986 - RNA, 79 nt, Homo sapiens
gaaagcagaagaaaagggacgcaagaaacccaggacgagaacagcaacaggacccacgaggaagcggccgcggcgaacc

SEQ ID NO: 5987 - RNA, 58 nt, Homo sapiens
cccaagagccagaaagaaggcaggcagcggaagagaaagaccgaggcaaagaagcagg

SEQ ID NO: 5988 - RNA, 77 nt, Homo sapiens
ccccggaggagggacaaaaacccagccggaggccacagcggcgaccgggacggcaaaaacgaaccaagggaaggccc

SEQ ID NO: 5989 - RNA, 81 nt, Homo sapiens
ggccgcgccccaaggcggcgcgaagccacaagaaagaacagcggagagcaccaggagggcaagacgagccccgacaaggac

SEQ ID NO: 5990 - RNA, 79 nt, Homo sapiens
aggaccgcccccgcgggccgccgccccgggaaaacgcgcaacacacgaaaaagcgcggagcgacaaccaggcccaaccg

SEQ ID NO: 5991 - RNA, 82 nt, Homo sapiens
gcagagcaaggggcaaggagcagaagcagcccacaaggcaaaggcaacagagacccgagcggaagagaagccaaggaacaag

SEQ ID NO: 5992 - RNA, 74 nt, Homo sapiens
agaaaacaagggcagagaaagaacagagacaaaggaccaaaggacaggcgcaacagccagacccgccgaacccc

SEQ ID NO: 5993 - RNA, 75 nt, Homo sapiens
acccggaggagccggccaagaaaaaggcgaggaagaagcgaggcaagcgaggaggcgacaggagaggcgggcccc

SEQ ID NO: 5994 - RNA, 61 nt, Homo sapiens
cgaagagaagcaaggcccaagacccaggcgggccaaaaccacaccaaaaccaagggacaga

SEQ ID NO: 5995 - RNA, 79 nt, Homo sapiens
gcccaaggcaagacccaaggcgacgaccgacaggggggaaaggcacaacagcaacgccagaaagagacggccccgaaac

SEQ ID NO: 5996 - RNA, 73 nt, Homo sapiens
agagcacgaaccaggaacaagaagacaacagagcagacaggggcgacacggcacaagcggacacccaaggcga

SEQ ID NO: 5997 - RNA, 75 nt, Homo sapiens
cacccagagggcagaaacggggaacaaagagcagaggccagcagccaccgacagcccgcggcgaggaaaagccca

SEQ ID NO: 5998 - RNA, 75 nt, Homo sapiens
aaaggagacaaggcacagccggggaaaacccaagaaacacagaacagccagcaaagacaagagcagaccagcagc

SEQ ID NO: 5999 - RNA, 73 nt, Homo sapiens
ccgaggaccgcgaagaggaacaaggagcagaaacacgggccagggcgccacaaagagacacaaaaacaagccc

SEQ ID NO: 6000 - RNA, 74 nt, Homo sapiens
ggcgcccagggccaccaagccccaagccccgcggggggcaagcccccgggcgcgccggacaggccgccgcggcg

SEQ ID NO: 6001 - RNA, 69 nt, Homo sapiens
acaaggccccgcaaaaagggcagaaacgaaggcgggggcgcaacacacagagggagaaaacccccagcg

SEQ ID NO: 6002 - RNA, 63 nt, Homo sapiens
gggagagcacagcaagagccaggaccaccggaagccagaaagggccggcccagggagaacgca

SEQ ID NO: 6003 - RNA, 75 nt, Homo sapiens
aaagcagcgaagaagaggcccaacccccaccccgcccaaggaggcccagcggcacagggaaggacccagaacaga

SEQ ID NO: 6004 - RNA, 89 nt, Homo sapiens
aagaacaaccgcggacacggagaggaagggagcgaaggggaacagacacgagaaccacgcccggggaccagaggacgagggacgcacac

SEQ ID NO: 6005 - RNA, 62 nt, Homo sapiens
gcgggccaccaccggaccgggccgagccgcacagaagacgaaggggaggaccaggcggcgag

SEQ ID NO: 6006 - RNA, 74 nt, Homo sapiens
accgggggcaggccaggccgcaggaagcgcggaaaagccagagagaggacaagacaggaggacacccgaaacaa

SEQ ID NO: 6007 - RNA, 86 nt, Homo sapiens
gacgaccggggggcaggaggcacccggggcagggcacagcgaccaccgcggcagccaccaggggcgccaggccgcagacggcaacg

SEQ ID NO: 6008 - RNA, 78 nt, Homo sapiens
gagagagggacaagcagcagcgcaggcaagggcccaaacagaccagaggcgaggggacggcggggagcgcaggacaga

SEQ ID NO: 6009 - RNA, 72 nt, Homo sapiens
cggcagagacacccggcccgggaccgacacaacccaaaagcagaaacaaccgggaccgggaagaagagaccg

SEQ ID NO: 6010 - RNA, 80 nt, Homo sapiens
agcagcccccggagcaccaacccggcgggaggcagaaaccaacaagcacccccagcaggacagcacacccaaccagacac

SEQ ID NO: 6011 - RNA, 67 nt, Homo sapiens
aaaacgccaagacaggagcgcgcaaggaagcgcgggggcaggccgggcgaccagcccgagggcggcg

SEQ ID NO: 6012 - RNA, 76 nt, Homo sapiens
acggcaggagcacagaaaggagcagacgggagcaaagccccacaagggagaccgcaaggccggggcaggccagaaa

SEQ ID NO: 6013 - RNA, 77 nt, Homo sapiens
agcgcgagagaggagagggcagacggacaagagcgcggaacaggacgccccgagacacggacaaaacccgcgcagcg

SEQ ID NO: 6014 - RNA, 70 nt, Homo sapiens
acaggaagaccaacaacaggccacccaaccgaaaacggaccagaacccagcacggggccaaaaaggcacg

SEQ ID NO: 6015 - RNA, 63 nt, Homo sapiens
caaagccgggaagacaaaggggagggagacgcggagcggggccaggaaggcccggacggagca

SEQ ID NO: 6016 - RNA, 81 nt, Homo sapiens
cgcacgggaggggagcgcggacgccccccagccagggcaagacaaggagcggcagagaaacagaaaacagccaaaaggaca

SEQ ID NO: 6017 - RNA, 80 nt, Homo sapiens
cgcgaccccccccgggagagcaagccgggcggccgccccgccggagcagcacacaagacacgaagacgagagaagaagaa

SEQ ID NO: 6018 - RNA, 73 nt, Homo sapiens
gaagccgcacgcccagcgcgcacggcgacggcgcccacccccaggcaccgacaaaagcggcaagagaagacaa

SEQ ID NO: 6019 - RNA, 90 nt, Homo sapiens
aaaggaacagccccagcccggccccaggaacgaggccggaagagcgggagcgggagccaggcagaaggccaaccaaccccaggaaaagcc

SEQ ID NO: 6020 - RNA, 58 nt, Homo sapiens
aagcccccgcaggaaccacaacccaaccagcaagccccagccaagacccaccaggcag

SEQ ID NO: 6021 - RNA, 83 nt, Homo sapiens
cagaagggaggaggacccccagccaaacagagagaccgaaggggcagcagagagaacacagcacggggaagacacgacgaaaa

SEQ ID NO: 6022 - RNA, 64 nt, Homo sapiens
aacccacacccagcccaaaaaaacacagcgggccgggaggggaaggagcaggagaagagggggg

SEQ ID NO: 6023 - RNA, 78 nt, Homo sapiens
cccaaaagcaggcaacggccagacacagggaaagcggagggcaccgccagaacccgaccgccaggaagaaaagaccca

SEQ ID NO: 6024 - RNA, 59 nt, Homo sapiens
gggaaaacgaagagagcagaacagcaccgagaccagcacccagccaccaggcaacccac

SEQ ID NO: 6025 - RNA, 80 nt, Homo sapiens
aggccagcacgggaacgcgaagcgccaaagccagacaaaacaagcaaagagcggcaggggcccggaggcacgggcagcca

SEQ ID NO: 6026 - RNA, 82 nt, Homo sapiens
gacaccgcggagcaaggaagaaaaccgaccagaagagaaagagagaagccaaaccccagagacaaagcaggaggacacaaga

SEQ ID NO: 6027 - RNA, 80 nt, Homo sapiens
gggcgaagcacgacacagaaggggaggggagggaaaggcccaggaaaaagaccgcagcccaccaaagaaaccgcccgccc

SEQ ID NO: 6028 - RNA, 67 nt, Homo sapiens
gaaaccgacagcgcagccagccgcaacgcaccaggacaaaagaagggcagcacaaaggaaagcccca

SEQ ID NO: 6029 - RNA, 67 nt, Homo sapiens
agaagaacccaaggaaaaacaggacaaaggaagccaagcaggaggcgggaagcgagagaagcagcaa

SEQ ID NO: 6030 - RNA, 78 nt, Homo sapiens
ccagagaacgaccaagagagagcccgaacggcagaagccggcaaacagagaaaagagaaaggagaacgggagaggagc

SEQ ID NO: 6031 - RNA, 78 nt, Homo sapiens
aggagaccggagccaccaaaaacgaagaggaaaccgacagggaagaagaccgcaacacagcaacccagaccacaaaaa

SEQ ID NO: 6032 - RNA, 74 nt, Homo sapiens
gacacggcaagagagcccaaggccgcaacacccacaaaccggaggacacccccagacgcagaagggcaggagac

SEQ ID NO: 6033 - RNA, 57 nt, Homo sapiens
gaagagacagaagcaggggaaccaacagaagggaagggggaaaggaagaaaaggcca

SEQ ID NO: 6034 - RNA, 80 nt, Homo sapiens
gcgcgggagccgggcaggacgccgagcgggacccccgccgccccgggggccggacgacaacggcaagcggagaagagcaa

SEQ ID NO: 6035 - RNA, 73 nt, Homo sapiens
ggggagaaccccagaagaagcaaagaaaaacggagagacaccaacccagaccagggaagggacgagacagacc

SEQ ID NO: 6036 - RNA, 78 nt, Homo sapiens
gcagacccccaccacccaaccggcggcgcagacccgaagggggggccacagaacacgcaccgcagacaacaagcagac

SEQ ID NO: 6037 - RNA, 72 nt, Homo sapiens
agaaaacacggaacaaaggcaaaccgacaccagcgacacaagcgcgagggaaccacagaggacaggcgaggg

SEQ ID NO: 6038 - RNA, 77 nt, Homo sapiens
cagggcacggacaacgcgcagaaggagagcaggggccaggagggccgaagcccacagcgaggcagagaagcgacccc

SEQ ID NO: 6039 - RNA, 118 nt, Homo sapiens
cccccaacaggcaaacaagaagcacagagcagagaaagagaacacacagagagaggacaacaccacgacccggagacgggcagccgaaccggcgaggggcacccggagcacaagcgaa

SEQ ID NO: 6040 - RNA, 79 nt, Homo sapiens
cagaccacgccacagcagccacaagggagcaccagccgaagcagaagcgcccagacccaagggacccaggcagccaggg

SEQ ID NO: 6041 - RNA, 65 nt, Homo sapiens
cgacgagcccgcaagaagacggcaggagaagaaacaacggaaacacagaaccgcggaaaaggagg

SEQ ID NO: 6042 - RNA, 77 nt, Homo sapiens
acccccccagcggccgcagggccgacaagcggaccaagccagacccaaggccaagcccgcaggccacgcaagcgggc

SEQ ID NO: 6043 - RNA, 80 nt, Homo sapiens
ggaggggaggcggaggcggcgccggaggcggaggcgcccagccgcagcccgcgaagcacgccgaagccccgaacacaaga

SEQ ID NO: 6044 - RNA, 65 nt, Homo sapiens
aaggagcggagcgccaagcccggccaaaaagggggacacaggacaacgagagaagccgaagcggg

SEQ ID NO: 6045 - RNA, 60 nt, Homo sapiens
gggagcggcgggaggccaccgccagggccggcccagggagaacgcaaaaccaccaccccc

SEQ ID NO: 6046 - RNA, 78 nt, Homo sapiens
ggaccacaagagcaggaaacaaggagccaaacaaagaccacagcaggagaggaagaggagagaagcccacccaaagaa

SEQ ID NO: 6047 - RNA, 72 nt, Homo sapiens
acccgcagcggagcccaagcggagacaaagaccaccacaggacacggcagagaagagaagaggcgaaagaga

SEQ ID NO: 6048 - RNA, 69 nt, Homo sapiens
gggggaggaaagaagggggcgagggcggagccgagcgaggccccagaaggacaagcacaagaaaaagcc

SEQ ID NO: 6049 - RNA, 73 nt, Homo sapiens
gaggggcgcaaaacgccccggcgcacccgaccgagggacccggagcagcgacgcaaaagggcacaggcgaaga

SEQ ID NO: 6050 - RNA, 72 nt, Homo sapiens
accaagggagcccgaacaagggcaaggagaccaggaaagacaggagagacaacggaggcaagaaagacggag

SEQ ID NO: 6051 - RNA, 58 nt, Homo sapiens
agggagggacacagccccaaacaggacgaaggcggcgaagacggcaccaaacggcaag

SEQ ID NO: 6052 - RNA, 70 nt, Homo sapiens
gagggcacgaaggccaagcggacaccaacagcgaagaccaggcgggaaaaagacccgcagcacgagccac

SEQ ID NO: 6053 - RNA, 65 nt, Homo sapiens
gagcgcgcggccccggaagcacccgacccggggaagagaggacaccgcagggccggggagacccc

SEQ ID NO: 6054 - RNA, 77 nt, Homo sapiens
gggaggaagaacagcaagggccaacggaagccagagaaagagaagaaggaagagacgggccccccacaagaaaacga

SEQ ID NO: 6055 - RNA, 79 nt, Homo sapiens
ccgggcacgaaccaccggggacaaggagcagacagggagggggaccaaggcagcaaaagaacaaggagaccgagaccag

SEQ ID NO: 6056 - RNA, 73 nt, Homo sapiens
gagggagcagcgcggagggagagccagggggagaaggacggacccccaggcgccacccgagcaccgcaggccg

SEQ ID NO: 6057 - RNA, 65 nt, Homo sapiens
gcggagcgcccagaggcgagcccggggaggaagagggggcccacggggcagggaagagcacaagc

SEQ ID NO: 6058 - RNA, 80 nt, Homo sapiens
acgagagaccacgcgccaagcagggaacacagccgcacccgggcggccagcgggggcaggcccccagccagcccgggcgc

SEQ ID NO: 6059 - RNA, 59 nt, Homo sapiens
ccccccccgaaacagaaagagacgcccgggcaggaggcagcccccagagcccccaggag

SEQ ID NO: 6060 - RNA, 51 nt, Homo sapiens
acgacacggcggaaacgacgcaggaggaagaccgcaggaaagcaggaaggc

SEQ ID NO: 6061 - RNA, 57 nt, Homo sapiens
ggaaccgcagcacaaaaggccgcgggagggcccacaaccgagcggccagcaagggcg

SEQ ID NO: 6062 - RNA, 57 nt, Homo sapiens
ccgaacgggcgcggaacacgcaccgggacaggcccaggacgaggacccccggcggcg

SEQ ID NO: 6063 - RNA, 80 nt, Homo sapiens
cggggcccgcgaggccaagcgagagaggaccggaggagggagcccagacgcccagagcagccagacccagaggagccgag

SEQ ID NO: 6064 - RNA, 73 nt, Homo sapiens
cgaacagcaggccaaagaccagaggagcagacaagggcccacaccaaagccaccagagcaagacagggacgga

SEQ ID NO: 6065 - RNA, 72 nt, Homo sapiens
agcggccagacggccagcggcagcaagaacccggccgccccccccacacaccagcccgcgcagaccacagaa

SEQ ID NO: 6066 - RNA, 77 nt, Homo sapiens
agcaacgcagaggagaaggagaggcgcggcgaaacagcaagaacgccggcaggaacaggagagcaaagcgcggaggg

SEQ ID NO: 6067 - RNA, 86 nt, Homo sapiens
acaaaccgaagaacagcgggaaagaaggcaaaacacggggggcgacgcaaacccggacacaagcagccaagagaggaaaagacagg

SEQ ID NO: 6068 - RNA, 73 nt, Homo sapiens
ggacagaacacgaagccagaaagcggaaggccaaagacagacgggcccagcacacagggacaacgccaggggc

SEQ ID NO: 6069 - RNA, 79 nt, Homo sapiens
ccgcgcccgccgcgggagagaggacccccccccccccccaaggagaccccccggcgaagggccgccccggcccgcggcc

SEQ ID NO: 6070 - RNA, 72 nt, Homo sapiens
ggcccggcagcaaggcgagaagaaagaggccagacaggaggccagcacaaagcgagaaggagggagaagggc

SEQ ID NO: 6071 - RNA, 58 nt, Homo sapiens
gggccgccccaggacacgccggacccccccgggacagagcagaagggcgaaagaccgg

SEQ ID NO: 6072 - RNA, 74 nt, Homo sapiens
cgcggcgcccccacgagagggcaaacgcgcgcagcagggagaccagaggccagaccgccgggggagaagcacgg

SEQ ID NO: 6073 - RNA, 59 nt, Homo sapiens
ccacagacccacagcgaaagcaacagacaggagacaaaccagcaggcagaaaacaacga

SEQ ID NO: 6074 - RNA, 65 nt, Homo sapiens
cagccacggacgccacagagggaagaccccaagcccagaaacaaaacgacacccaagaccaagag

SEQ ID NO: 6075 - RNA, 76 nt, Homo sapiens
gccaaacggaaagacgaaggggccccagagccaaggaggaaggggccggcccccaggacaagggaaggaacacgaa

SEQ ID NO: 6076 - RNA, 69 nt, Homo sapiens
ggaggaccgagggaaccgaagaacgggggagaggggcagcgcccagccccgggcccggcagccgaccgc

SEQ ID NO: 6077 - RNA, 76 nt, Homo sapiens
accccagcaacgggacgggccccaccggccgcgaaagccacacacgaggaggggcacggaagcaaaagccacgccc

SEQ ID NO: 6078 - RNA, 69 nt, Homo sapiens
ccgcccccgccccacgaagccagaaagaagccacccagagagaaccagcagcaggcgagaggcagaacc

SEQ ID NO: 6079 - RNA, 74 nt, Homo sapiens
gaccccacgcggacgggcgaggagaacacccggaccggacacgccgagcaagcgcagaagggaccagggacgag

SEQ ID NO: 6080 - RNA, 59 nt, Homo sapiens
ccgggacccgccgcgagggacccgggggaggaggacacaccaagcgagccacggacagg

SEQ ID NO: 6081 - RNA, 80 nt, Homo sapiens
gggcgcgcggcgccggcggcgcgcgacccccgcgcaggagaaacaggcgccaaacgacagagaccccaccacgggccggc

SEQ ID NO: 6082 - RNA, 84 nt, Homo sapiens
aagaggcccagccggcccgcgggggagccccgggagccgcacgggcggagaacggaaaagcaccaggaagcagagaggaccgca

SEQ ID NO: 6083 - RNA, 75 nt, Homo sapiens
cccgggcccagccgggaacccccacgcggccagcgaaaacgcccaggccaagcccaacaggggacaccggccagg

SEQ ID NO: 6084 - RNA, 33 nt, Homo sapiens
cccacccgcaggccccaggagaaagaggacacg

SEQ ID NO: 6085 - RNA, 67 nt, Homo sapiens
gggccggagaggggaaccagcagaaggagccagcacgaacgcacccaacggggagccggggaacacc

SEQ ID NO: 6086 - RNA, 59 nt, Homo sapiens
gcaagaagcgacacaaggagaaaaggcaggccccccgggcgcaacccccacccacagca

SEQ ID NO: 6087 - RNA, 71 nt, Homo sapiens
ccggccagcagcgggacccaaagggcgagccgagaaccacaggggaaaagaaacggcaaaaagaagcgccg

SEQ ID NO: 6088 - RNA, 76 nt, Homo sapiens
cgggccacgagagcgaccggcggcgggagaggcgccggggccgcacaggaagacgagggagaccggaagcagaaga

SEQ ID NO: 6089 - RNA, 74 nt, Homo sapiens
cagcgccagggagagccaggccaccgacgagagcaggccaagagagaagggagaccgagccaggccaggagaga

SEQ ID NO: 6090 - RNA, 82 nt, Homo sapiens
ggcgaccaccaaaaaaacgggaaccagggccaccagagaagcgacagaccaggaaccagggggaagggagggcgggagccgg

SEQ ID NO: 6091 - RNA, 54 nt, Homo sapiens
gcaggaaacgcagcaaagccacgggggagaaggagggcgcgcgcccagaagagg

SEQ ID NO: 6092 - RNA, 88 nt, Homo sapiens
ccgcggccgaggaggcagcgcgaccccgcacggcagagccagagcccaagcccccgcagggagcccaccgcgaccaggaccaccgcca

SEQ ID NO: 6093 - RNA, 62 nt, Homo sapiens
ccgcgcgcgcccgccccgcccaccggcgcagaggcgagaacagagcgagaagacaagcagaa

SEQ ID NO: 6094 - RNA, 80 nt, Homo sapiens
agcaccaggaccgggccggaacgagacgcacgacggcccgccacgggccccgcagccgcgcccgagcgcccgagcaggga

SEQ ID NO: 6095 - RNA, 72 nt, Homo sapiens
acgccgagcgcaccgacacgccgccaaaggagagccaagaccgccaggggaaagccaaggggccggaccagc

SEQ ID NO: 6096 - RNA, 79 nt, Homo sapiens
agggaggagggcagccaaccaccagcccgggggcagcagaacccgaccaggagcgcaccccccccaacgaccccaggcc

SEQ ID NO: 6097 - RNA, 68 nt, Homo sapiens
caggagggccaggccgacccggacgcacccagggcggaagaagcccagaggaccagaccagaagaaaa

SEQ ID NO: 6098 - RNA, 55 nt, Homo sapiens
gacgagcggaggacacccaacccgggaacagagacaacaaaaaggaacgaaaagc

SEQ ID NO: 6099 - RNA, 39 nt, Homo sapiens
gcggcacagagggccgccagggagaccgaaggaccaccg

SEQ ID NO: 6100 - RNA, 84 nt, Homo sapiens
cagaccagaccgagccacccagaaccacagccaagagccaccccagcagcagggccacccgggagccaccacgcggccggcgca

SEQ ID NO: 6101 - RNA, 70 nt, Homo sapiens
accgggggccaccaccgaggaacccccaagccggcacagagaaacaaggaaaaagagaagaaacgacagc

SEQ ID NO: 6102 - RNA, 34 nt, Homo sapiens
cccgccacaacaaacagcaaccagccaggaaaac

SEQ ID NO: 6103 - RNA, 87 nt, Homo sapiens
acgcccaggcgaagggaccgagcccccagaccaacaaggaacggacgccaccccgccccaccgaggccggcgggccacagcaggcgc

SEQ ID NO: 6104 - RNA, 65 nt, Homo sapiens
cacgacccccgaggagccaggaagcgacccaagcccagaaaacgaggcccgagaacaccccagac

SEQ ID NO: 6105 - RNA, 76 nt, Homo sapiens
aagaagaaaggggaaagcaagaaaaagagccaaacggagaagaggaagaaccccgagagcccaggaagaagagggg

SEQ ID NO: 6106 - RNA, 57 nt, Homo sapiens
acagggcagcgagaggagccaggagccgccagaggacccaggagcgacaccgaaccc

SEQ ID NO: 6107 - RNA, 75 nt, Homo sapiens
aaggacagaacaggaccggaaagacagggaggccgcacagaggaggagcaccaaaccgagggagggcagccacac

SEQ ID NO: 6108 - RNA, 58 nt, Homo sapiens
gacccggaaaaccggcccccaacgacaaaaggcacgcagaaaagaagagcgaaacggg

SEQ ID NO: 6109 - RNA, 75 nt, Homo sapiens
cagcccagaaggaaaacggagcgaaggagaaaagccagacaggaaaaagcaagccagggggaggaaaccggaacg

SEQ ID NO: 6110 - RNA, 85 nt, Homo sapiens
gagaggcggaccggaccacggcgcggagcgccgccagaggagaaggacccagcagccagcgaagccccaaggaagccgggacgcc

SEQ ID NO: 6111 - RNA, 83 nt, Homo sapiens
ggcgcgagaggggcgcggccggagcgggcggcgagacaaaggcgacgagccgcccccaggaccggcagcaaaaagagacaccc

SEQ ID NO: 6112 - RNA, 75 nt, Homo sapiens
gaggggagcaccaggaccgggccggaacgagacgcacggagaagacagaggagccagaccaagagacagcacagg

SEQ ID NO: 6113 - RNA, 84 nt, Homo sapiens
gcagcagccgcgccgccgccgcgggagccgcgcccgaaccccggcccgaacccaggcaccgccagggaggagagcggggcacgc

SEQ ID NO: 6114 - RNA, 79 nt, Homo sapiens
cgcgggccccaccgcaccgcaccagacccaggaccccaggcacggacagggcgggagccaaccggaagcaagaagcaga

SEQ ID NO: 6115 - RNA, 84 nt, Homo sapiens
cccgccgccaccaggacccgggcagcaggcagcggcagcaccgggagcagcagaggaaggagagagagcggagacaaggccaca

SEQ ID NO: 6116 - RNA, 59 nt, Homo sapiens
acggacacgaggagcagaagcagggaagaagcccagcggaggcgaacggcccccgccaa

SEQ ID NO: 6117 - RNA, 79 nt, Homo sapiens
ccgccgcacgccgccggggcgcggccgcccgaggaaacccggggaggcgggagcgcccacagcgcccagcgaagaaggg

SEQ ID NO: 6118 - RNA, 66 nt, Homo sapiens
agcgccgacccagccagcacagggccaagaggcggcacaggaccacaaacaacagcaccagcaagc

SEQ ID NO: 6119 - RNA, 78 nt, Homo sapiens
gggagaccacagcaagacaccgggaccccggaagccaaaaagaaaaggagcgccccacagcaaggcgggcaggagggc

SEQ ID NO: 6120 - RNA, 54 nt, Homo sapiens
ggaagaagaacgacccgcccggggcagcagggaccgaacagacgaacaggggag

SEQ ID NO: 6121 - RNA, 71 nt, Homo sapiens
aggcggaggcagaggggaggcgcgaaaggggcgacgagaggccaggggccggaaccaccaggacgagagac

SEQ ID NO: 6122 - RNA, 69 nt, Homo sapiens
gaggcaccccgaagaggcgaggagcaacccagacacggggggcacacaacccagccagccgccggggcc

SEQ ID NO: 6123 - RNA, 72 nt, Homo sapiens
aggcaagggcagaggcaacagaacaacaggaacaggaaggagaagcagaaacacaaaaaaacaaggaacaag

SEQ ID NO: 6124 - RNA, 57 nt, Homo sapiens
caggagcagccagcggacgagcgaggacaaacaagaccgcgcagcgggccgggaccg

SEQ ID NO: 6125 - RNA, 69 nt, Homo sapiens
accagaagcgaagccaggggccgccccacgaccagggcgcagcaagaaacaccacaaagaaccgaacca

SEQ ID NO: 6126 - RNA, 63 nt, Homo sapiens
cgcgcggcagcagaacaggacgccgggaggacggcggggccaccagacaagaggcaaagaccc

SEQ ID NO: 6127 - RNA, 61 nt, Homo sapiens
aggggggcaccaccccaacggagcaacaagggagcaggggcaacgcgcaccaccagggcac

SEQ ID NO: 6128 - RNA, 67 nt, Homo sapiens
acggacagaaagcaagaggaaaacaagaacagaagagccagacagcagggccagggcggaagaggag

SEQ ID NO: 6129 - RNA, 67 nt, Homo sapiens
ccgggaagaaggaaaggagggaagaaggccgccccccacccgccagacaagccgacgcccccagccg

SEQ ID NO: 6130 - RNA, 71 nt, Homo sapiens
gccagaagaacagcaagcgcacaggccgggcacagggagccccaaaaacagccaagcggagaagcgaaacc

SEQ ID NO: 6131 - RNA, 77 nt, Homo sapiens
cccaccgccaagacggaaaccagagagccaaaccggcgccaagccccaacacaggccaaggaccacaaagcccgccc

SEQ ID NO: 6132 - RNA, 80 nt, Homo sapiens
gaacgcggagcggacggacgacaacggggccggaccgcgcgcgcaggagcaggccagggagaccagggggcaggggagga

SEQ ID NO: 6133 - RNA, 76 nt, Homo sapiens
agccaaacaaaaaggaaaggagacaagcagagacgaaccaggcaaagagagcggcaaaggaagcgaagccagagca

SEQ ID NO: 6134 - RNA, 74 nt, Homo sapiens
aaaagcccggaaacagcagccagcgaaccagggccagaagagaccgagagggacgccgccaagccaagaccagc

SEQ ID NO: 6135 - RNA, 75 nt, Homo sapiens
gaccaagcagaccagagagagcgccggacgcaaagagaagacagaaccaccaaagcgacagaagaaagaaagggc

SEQ ID NO: 6136 - RNA, 73 nt, Homo sapiens
caagcaaagcccaaaccaaggcccaccagaccacgcggggccacgaggggagagacaccaagaacgggcggga

SEQ ID NO: 6137 - RNA, 89 nt, Homo sapiens
agcacacgcccgacgaggagagcacgacggaccaagacgagcccagcgcaaccccaagcgcccaaaggcgaaggggagcaagggagaaa

SEQ ID NO: 6138 - RNA, 55 nt, Homo sapiens
gccccgagggccagggcaaccaagagaagaagcacagaacaaaagaagcaagagc

SEQ ID NO: 6139 - RNA, 80 nt, Homo sapiens
ggagggggggaccacgaaaggagcaagagcaagacaccggacaccgagggcccccaaaaggagggcgacagaccagagaa

SEQ ID NO: 6140 - RNA, 81 nt, Homo sapiens
gcccaagcagaggaacaccagccccagcagcgcagcagcccaccaccagggaaggacaccacggaccagcgcgccaggccg

SEQ ID NO: 6141 - RNA, 53 nt, Homo sapiens
aaggcaagagccaacccaaaaccaagcgagcccacaccaaccggcccacccac

SEQ ID NO: 6142 - RNA, 62 nt, Homo sapiens
ggagggggcgcgcgaccgcccccggcgggagccagcgaaggggaccagaagccaggagaggc

SEQ ID NO: 6143 - RNA, 63 nt, Homo sapiens
gacgcacgccacccgcgaccaggggagccacgaagcccccacccacaggcgacagaggcaccg

SEQ ID NO: 6144 - RNA, 42 nt, Homo sapiens
ccaggagaccccgagaggagacgaccgccagagcggaacgac

SEQ ID NO: 6145 - RNA, 70 nt, Homo sapiens
ccaagcaaccaggaacagaacgggggaaaagacgggaccccccgaggccagaggcaacaaggaaaaacgc

SEQ ID NO: 6146 - RNA, 83 nt, Homo sapiens
aggagagcacggacgccaagacacgacaagacgaccgggaaagccagggaggccgcgaaggacaacagaaagccgggaaggac

SEQ ID NO: 6147 - RNA, 76 nt, Homo sapiens
caaaaaaacagcaccagcaaaacgaaaaccaggcaccccacgaaccaggggagaagcacgacagcagcaaggcgac

SEQ ID NO: 6148 - RNA, 72 nt, Homo sapiens
gagacaaaggcaccaggccaccacagaaacaaaagcaacaaagagggaaagaccacagcaagaccacgcccc

SEQ ID NO: 6149 - RNA, 74 nt, Homo sapiens
acagggacgcccggaaagagcagccagcaagggaagccaaggccaccgagccacaagaccacagcaccgacccc

SEQ ID NO: 6150 - RNA, 53 nt, Homo sapiens
cgcccggacaacccgcaccgaacgaccggagcgagcacagaggacacacccca

SEQ ID NO: 6151 - RNA, 74 nt, Homo sapiens
gccagcgaaaacgcccaggacaggaaaagccagagagcggcagagaagaagggaggcccaaagagcaaacaaag

SEQ ID NO: 6152 - RNA, 79 nt, Homo sapiens
cgccgggcccgggcggcgggagaagcggagggaaccccggaaaaggagacagaagcgcaagaacccgacaagaaggaac

SEQ ID NO: 6153 - RNA, 68 nt, Homo sapiens
aacacaggacacgcggcagagaggaccgggggcccgcgcacagaccaaacgggcccgaggaagcaggc

SEQ ID NO: 6154 - RNA, 105 nt, Homo sapiens
aggcaggcgcggcgccggcggcgggacgaagagggacgggcccgcggcgagcgagcccgagcgcagaaggccagacacagaaccaggaaagcaccaccacaaaga

SEQ ID NO: 6155 - RNA, 71 nt, Homo sapiens
gggaggaaccaacaacaggagagcaagaaaggccgaggcgaacagaaccgcaggcacgccccccgaccgag

SEQ ID NO: 6156 - RNA, 57 nt, Homo sapiens
gcagagaacacacaaaggaccagaggaaaaggagccggagcagacagcgaagacccc

SEQ ID NO: 6157 - RNA, 90 nt, Homo sapiens
ggggaaaggcgccgaaaacaagccggaaggcagaaggccgccacgccccaggaagccaacagccgaaggcaagggaagccagagggcacg

SEQ ID NO: 6158 - RNA, 80 nt, Homo sapiens
gaaaaaagaacacagggagcgagaacgggccaggcaggaagcagagccaagcacaggggaaccagaaagcacgggaagga

SEQ ID NO: 6159 - RNA, 76 nt, Homo sapiens
cggggcggcggcaccaaggcccccaagccccccggcgacgacgcccgagaggagaccgccagaggacaggagacac

SEQ ID NO: 6160 - RNA, 84 nt, Homo sapiens
cccgccgcgcgcccgacgccccgcgggaccccccgccggaccccacagcaacaagagaagacgcgcaagaccgagcaagacgcc

SEQ ID NO: 6161 - RNA, 69 nt, Homo sapiens
cacagcaaggaaagcaacggcggggaccaaggacagagagaggcagaagaaaaagcacccccaagcgag

SEQ ID NO: 6162 - RNA, 62 nt, Homo sapiens
cagagcggaagcccaaacgggaaagaggagcgcaagccgagggaggaaggaggaaccggagg

SEQ ID NO: 6163 - RNA, 39 nt, Homo sapiens
gccacaggggaaagaagcaggagagcgaaagcaggcgag

SEQ ID NO: 6164 - RNA, 34 nt, Homo sapiens
cccgcgcaccgcccagagaacgggcccgccagaa

SEQ ID NO: 6165 - RNA, 56 nt, Homo sapiens
cgagaagacaccggcagaccaaacgcagcggaaacccagacagcgcacacaccaag

SEQ ID NO: 6166 - RNA, 83 nt, Homo sapiens
gagacgggacaagacagggcaaaggacagaccaggaaggagggccccggagcagccacaccaccgaggccccacccagcacga

SEQ ID NO: 6167 - RNA, 81 nt, Homo sapiens
cgcgcggcaggcggcgagccgggggccgcagacacacaccagagggagcaccgacggcaacacggaggggccgcgccgggc

SEQ ID NO: 6168 - RNA, 34 nt, Homo sapiens
agcgacaaacaggaaagccaggagaaggagaggg

SEQ ID NO: 6169 - RNA, 72 nt, Homo sapiens
gacgaacaaagcgccaaacccgcggaaccagcagaagaacagcaagaacaacaggacagggacccagacgcg

SEQ ID NO: 6170 - RNA, 72 nt, Homo sapiens
ggagcccccaagccccaaaaaagacggggaacaacaggcaaagcaaaaagaagaacaagcaacccacgcagc

SEQ ID NO: 6171 - RNA, 59 nt, Homo sapiens
agcccccaccagagcgacgcagcgaaagcaccagccggcaaacaccaggcgccacaacg

SEQ ID NO: 6172 - RNA, 78 nt, Homo sapiens
ggaggagccagacgacaagcacacacaggcgcgaaacggaaaaaggaaccaagaacagagaccagcacaaccagggaa

SEQ ID NO: 6173 - RNA, 63 nt, Homo sapiens
cgagcagcgcacagggagcggggggggagacagcgaacaagcggaaagcaccaggaaggcaag

SEQ ID NO: 6174 - RNA, 52 nt, Homo sapiens
gccgccaaggagagaagaacacgaacgcggcagaacggaggcaggcagcacg

SEQ ID NO: 6175 - RNA, 52 nt, Homo sapiens
acgggggcaacgccagcggacccggagagcacgccaaccggcagcggagcgc

SEQ ID NO: 6176 - RNA, 73 nt, Homo sapiens
agacaaaagagagaaaagaaaggagagcaagaaccaagcccaggccacacacagagaccccacgggaagggca

SEQ ID NO: 6177 - RNA, 57 nt, Homo sapiens
ccggccaggcacaagggcaccacaaagggacagcagcagaaaaagcaaaggggaaaa

SEQ ID NO: 6178 - RNA, 63 nt, Homo sapiens
cccgacaggcgccggagcgaccccggaggaggagcagagccaccagaaagggcgggacgaccc

SEQ ID NO: 6179 - RNA, 61 nt, Homo sapiens
agagggcgcccagagacaacgagagaacgaaaggagaagcagggcccaacaagagagggaa

SEQ ID NO: 6180 - RNA, 61 nt, Homo sapiens
gccagacgcaaggcgaggaggaagaacagaaaaagcggggaaaacaaaaaaaagaaggagg

SEQ ID NO: 6181 - RNA, 65 nt, Homo sapiens
cacccggccacacggagagccaaagggacgccagcaggcaaccagcaccccgggcagcgacggca

SEQ ID NO: 6182 - RNA, 87 nt, Homo sapiens
gagcggcgcgcgcagagcacggccaacacgacccccaaggacgacccaagaaaaccggaggacaacgaagccgggacaaaaacagag

SEQ ID NO: 6183 - RNA, 77 nt, Homo sapiens
cggggcccagcagacagccgaggggagcgcggggcccggcagaaagcgcccaccccacgggaggccgggacgggaca

SEQ ID NO: 6184 - RNA, 106 nt, Homo sapiens
gcgccgagaggccggcgggacgcgggcgccaggaccggccgaacgcagagaaccagaggaccggcaacaacccgaggacgaaccaccccgcgccagcagcacagca

SEQ ID NO: 6185 - RNA, 78 nt, Homo sapiens
gccgggcaagacggcgaagcgcgcgccgcgcccggaccccagggggagagccagcaaccggaagcaggagaagaggag

SEQ ID NO: 6186 - RNA, 68 nt, Homo sapiens
cccagcagcggacaccaccaaaaccccggagaccgggacgagcagggccaccccagccccggagaccc

SEQ ID NO: 6187 - RNA, 66 nt, Homo sapiens
gcaccgcaggcagacaaaagggccaaagaagggagagagggcgcgagggaacgagaaagggaacgg

SEQ ID NO: 6188 - RNA, 84 nt, Homo sapiens
agccccgggaccgcggagcggagccggccgacgcgggcgcgagggcagaaccgggagcgagcgaagaacagcaccacaaggacc

SEQ ID NO: 6189 - RNA, 77 nt, Homo sapiens
gagaccacaaaagagcagaggaggaacaccaggcacaagacaggaagagaaggaagaagagggcacagccaggaacc

SEQ ID NO: 6190 - RNA, 84 nt, Homo sapiens
cgcccaggcgcagagcgggcccgcggaccagccagggcacggccgggacgccacagagccgaaaacaggagccgaacacagagc

SEQ ID NO: 6191 - RNA, 83 nt, Homo sapiens
caacagcaaaccggggcccccccaggacacaggagcaagacggcggaaaacccgaagcagaagcccgacacaggcacaagacc

SEQ ID NO: 6192 - RNA, 78 nt, Homo sapiens
acagacgggcacccggcacacagagccccgaggcaggcaccggggaggaagacggccgccgccaaagaagagacggga

SEQ ID NO: 6193 - RNA, 88 nt, Homo sapiens
gggcccgaggcggcgagagaggcaggcggagccgaccgggccaggaaaaagaagagcacaagaccagcagacgaccacagcaacccca

SEQ ID NO: 6194 - RNA, 80 nt, Homo sapiens
ggacccgcccagcagaagaagagaggagggagaacacagaaaccggccccagcccacagaagaagggaaaaaagagcgcg

SEQ ID NO: 6195 - RNA, 69 nt, Homo sapiens
gcccaccaggaagagcgaaaacagagaacagcgcgacacccgaacgagaacaagacagggcaagacggg

SEQ ID NO: 6196 - RNA, 80 nt, Homo sapiens
aaagcgcgccgcagcaaaacaggcagaaaggaagcaagagggaacagcaagagaaagaaggaccgggaaccccggacaaa

SEQ ID NO: 6197 - RNA, 85 nt, Homo sapiens
gccggcgcggcggccgggagcgccgggacggggcgcgaagccggaggcccgggacgggaacagacgagcacgaagcggaacaaag

SEQ ID NO: 6198 - RNA, 78 nt, Homo sapiens
gaaagcacaagaaagaacaaaggggcaagaggccggcgccccgggacagccggcccggccgacgcgcacagcgccccg

SEQ ID NO: 6199 - RNA, 60 nt, Homo sapiens
cgagagcggcccgcagaacgccagcagaagggagcaaggaccacagaaacgcagaaaaag

SEQ ID NO: 6200 - RNA, 77 nt, Homo sapiens
cacagaggagaggccgggccgcaggaaacgcaagcccggaagcagaagcagagaaacagaaaacagccaaaaggaca

SEQ ID NO: 6201 - RNA, 75 nt, Homo sapiens
agcagacccaagaggacacgcagaagaacacaagagggcgccacaggagccgcagaagcaaaggcaccgccaaac

SEQ ID NO: 6202 - RNA, 73 nt, Homo sapiens
gccaggagcggcccagcgagccgagggccggcggggagaggagcagcacacaggggcgcggacgcccggacgc

SEQ ID NO: 6203 - RNA, 89 nt, Homo sapiens
aaaggaagacgagggacccccaggcccaggaagcccacccagccccgccacgcagagcccagaaggaaagaaagcccagccgagccgag

SEQ ID NO: 6204 - RNA, 54 nt, Homo sapiens
acgccaccacaacccccagacgcaagccaagaagaaccgcgggggcgaaccgac

SEQ ID NO: 6205 - RNA, 77 nt, Homo sapiens
caagcgacaggggagggacccagaggaccggcaaaaagcggaaaccaacaggagaccacccccaaagaagaaacaag

SEQ ID NO: 6206 - RNA, 99 nt, Homo sapiens
gacgccgcgccaccgagccggaccggagacggggccaacaggcgcgcaccacccggagcaagggagcgcccacagccccacacgccggccccaggaccc

SEQ ID NO: 6207 - RNA, 85 nt, Homo sapiens
aggagacaacaaaaccaagacaaggaagaagcaaagaaagaacaagagaccgggaaaaggcgcgggacggccgggcggcggggag

SEQ ID NO: 6208 - RNA, 84 nt, Homo sapiens
aggcaccgggacggaccgagaccggaccgagagcggaccgagagcgcgaaacgcacgagaagggggagcgggaagacccggaca

SEQ ID NO: 6209 - RNA, 71 nt, Homo sapiens
aagaacagaaaccaagccaacaaaagaagcgccgcaggaccccgcgcccacccaacaaggcaggcgaaaca

SEQ ID NO: 6210 - RNA, 92 nt, Homo sapiens
ccaaggccgagagccggaacaaacgagggcccgggaggaccgacgcagccagagacagagaagacggaagaggcaaaccaccagagagcgaa

SEQ ID NO: 6211 - RNA, 58 nt, Homo sapiens
caagaccagcagcaccaggagccccccgcccagacaaggaaccgaacacagggagggc

SEQ ID NO: 6212 - RNA, 80 nt, Homo sapiens
aaaaggacgaacaaagcgccaaacccgcggaaccagcagaagaacaggaagagaggagggagcaccggacaaaagagaga

SEQ ID NO: 6213 - RNA, 71 nt, Homo sapiens
gagaacaaagaagaggcgggcggagggcacaccagagggggaaaggccaccaagacagccagggcaacccc

SEQ ID NO: 6214 - RNA, 55 nt, Homo sapiens
caaaccgaagcaacccgcaaggccaggacacagaaccgaggcaacacaaacagcc

SEQ ID NO: 6215 - RNA, 72 nt, Homo sapiens
cgccaggcgggccgcggcggcccggacaggggccccagaggaagaaagggcaggcgagagagggggaacagg

SEQ ID NO: 6216 - RNA, 81 nt, Homo sapiens
gagccccagccaggacgagaggagcggagcccgcagaaccccacagcaagaggacggaggaagacgcacgccggaccgaga

SEQ ID NO: 6217 - RNA, 76 nt, Homo sapiens
aacaagcacggaagaaagacaagggaccagaaagagaaccagaaaagaccgagggaaaaacggagccgccgcaccc

SEQ ID NO: 6218 - RNA, 79 nt, Homo sapiens
agccgcacccaggagagacccggaaggccaaaggcgcgcaaggaggaagagccgagcagcaccaaccaaagagaccgcc

SEQ ID NO: 6219 - RNA, 77 nt, Homo sapiens
aagggaacgcccggcccagccccggagggcaacagagagaaaagcgaacacccaggcgcgcagagaccgacaaggaa

SEQ ID NO: 6220 - RNA, 84 nt, Homo sapiens
ggccgaaaggcgccagaccccagccaccgcccaggaagccaggcgggcaccaggcccgacaccagagggaggaaagagccagaa

SEQ ID NO: 6221 - RNA, 81 nt, Homo sapiens
caggccaaaaggggaccggcggagcgaggagggccagcggagagacacccacaccccacgagaaggagccgaggcgggaac

SEQ ID NO: 6222 - RNA, 74 nt, Homo sapiens
gaccccacgcggggggggccaagagacagggcacaccaaacccacggagaaggcaggcgccgaggcgggccagc

SEQ ID NO: 6223 - RNA, 68 nt, Homo sapiens
agagagcggagaagcccaagcccaccccaaaggcagaggcacacccagaagccacaggagaagcaaga

SEQ ID NO: 6224 - RNA, 80 nt, Homo sapiens
cgaccccggcaccggcgcccagcgcgcccgggccgcgccgccccgccccaggaagaccgggagcacagaagaaaagaaca

SEQ ID NO: 6225 - RNA, 79 nt, Homo sapiens
gcccaaaacccggaagagcgccccaggagaaacaaggggccaaagggcgagggcacaaaaaaccacaccccccaccgag

SEQ ID NO: 6226 - RNA, 70 nt, Homo sapiens
gagggcagcggaaaagcaaagacaagccgggaagagaaagcggggcagaagcgggagccggcaccgaggg

SEQ ID NO: 6227 - RNA, 71 nt, Homo sapiens
cccgcggagacagcgagacccgccaggagcaaaggaaccagaaccacagaggacaaacccagcagaaaacc

SEQ ID NO: 6228 - RNA, 83 nt, Homo sapiens
cccgccagacccgcagaccaccaaccccgacggagcgggagacaagcccgcgcccaacacccagagaaccgcacacagggcac

SEQ ID NO: 6229 - RNA, 80 nt, Homo sapiens
aagagcccaaaagaagaggcacaggcccaggcagaccgcagcaaaaggaagcgcagcgggaaagaaagcagccggcgccc

SEQ ID NO: 6230 - RNA, 109 nt, Homo sapiens
gcccagcgacgcaccagcaagacggcaggcgagagccgacccaggccgccggccccacaggggaggcaccgccccaacccccccccgcccggagaaccccgcggaacga

SEQ ID NO: 6231 - RNA, 35 nt, Homo sapiens
gaagcaggaaagggaagaggagagaaagaacccac

SEQ ID NO: 6232 - RNA, 74 nt, Homo sapiens
gaggagccagacgacaagcacacacaggcgcgaaacggaaaaaggcgggaaaacggcacaaggcgacgagggag

SEQ ID NO: 6233 - RNA, 85 nt, Homo sapiens
ggagaaaagcaaacaaacgggggacaacccaagagaagaagcgcgaggacgccagagcacggagacgaaaggagaacccagcacc

SEQ ID NO: 6234 - RNA, 66 nt, Homo sapiens
cacagaaagagaccgggagcgaaggaacgagggaaaccccaaaacggggaagcgaaaagaacgcca

SEQ ID NO: 6235 - RNA, 54 nt, Homo sapiens
caaagaaccccaccggacccggaagcaggggaggcaagcaggggggcaaaggaa

SEQ ID NO: 6236 - RNA, 45 nt, Homo sapiens
aggagaagaacggccgcccagggcagggagggcacgacacagcca

SEQ ID NO: 6237 - RNA, 75 nt, Homo sapiens
gagagcggaccgagagcgcgaaacgcacgagaagagacaagggcagagccaagcgccgcccgggcccaagcaccc

SEQ ID NO: 6238 - RNA, 64 nt, Homo sapiens
ggagagaggaccacccagaggagcaacgaacaggcgacaaggccagaaacagggaaaaacacac

SEQ ID NO: 6239 - RNA, 76 nt, Homo sapiens
cagaaccccaagaggagacccacaacaacccaagaagcgcgaccacaggaaaaacacaacaggcacaaagagagaa

SEQ ID NO: 6240 - RNA, 59 nt, Homo sapiens
cccgaagcaagagccccccagcgcagcccaccagccaaggccaccgagccacaagacca

SEQ ID NO: 6241 - RNA, 71 nt, Homo sapiens
ccccgccggcgccgcaaccccgccagcgcggcccgggcagggggagaaccccgacaggaaaaagagaccaa

SEQ ID NO: 6242 - RNA, 60 nt, Homo sapiens
cgagccagccgcggccggaggagcccccaggccggaaacggggcggaccagaccaccggg

SEQ ID NO: 6243 - RNA, 78 nt, Homo sapiens
gcagggaggcccccaggaagggaagggaggcggaaaagaaggggggcccaaagccaagacaacagaccaacagcggga

SEQ ID NO: 6244 - RNA, 71 nt, Homo sapiens
ccagaggagggcccagagcgcgaggggaaccaaacccgcccgaccacccggaggagcgcacgggggcggaa

SEQ ID NO: 6245 - RNA, 77 nt, Homo sapiens
gcggggcgccaagaccagcagcaccaggagccccccgcccagacaagggacccacccccaccccacccagagaccag

SEQ ID NO: 6246 - RNA, 68 nt, Homo sapiens
gcccgaacgccgagcagaggcacagaaaacgaacgagaaacgagggagaagaagcagaaaaaggggga

SEQ ID NO: 6247 - RNA, 88 nt, Homo sapiens
gggagagcggagccccgcgcagcgcgacgcgcgaccagaccggcccccccgaggacggaaaaaggacaaggaggaaagaaacgcacca

SEQ ID NO: 6248 - RNA, 79 nt, Homo sapiens
acaaagccgaagaccccggagccccagccagggaaccacggagcacgagaaaacggcgggcaaacccgaaacagcgcga

SEQ ID NO: 6249 - RNA, 63 nt, Homo sapiens
ggcgcggggacaaggagcgggacacccaccaccagcagcccccagacaacaaaggggccgaga

SEQ ID NO: 6250 - RNA, 98 nt, Homo sapiens
ccagacgcggcacagagagggccgggagcgcgcagccaggaacgcacaccagcaccagcccaccaaaccagcacgaccccggagcagaagaaggagcg

SEQ ID NO: 6251 - RNA, 66 nt, Homo sapiens
accgaacagcaccggcgcaaaaacgagacgccagaagcagcgaaaaagaacacaaaacggcagaac

SEQ ID NO: 6252 - RNA, 85 nt, Homo sapiens
gccggggaggcagcgcgggacccagcccaggcggcgcggacggggcggacgaggcgaggaaccaaaggccaccccgccgagccca

SEQ ID NO: 6253 - RNA, 56 nt, Homo sapiens
gggcccgagaaacaagaaacgcagcgccagccccccagggggcgagagccccacac

SEQ ID NO: 6254 - RNA, 73 nt, Homo sapiens
ccaggggaaaaaggacacccgagacccgagaccaaaagagaaggcggggggacgagcaagcgaacacaggaca

SEQ ID NO: 6255 - RNA, 65 nt, Homo sapiens
gaaaccacagacagacgagccccagaagagagggcccccggacccgggagcggacccggggcggg

SEQ ID NO: 6256 - RNA, 73 nt, Homo sapiens
caacccaaaagaccacacacagccgacacaacaagacagacgccagggggcggagaacggaaaagcaccagga

SEQ ID NO: 6257 - RNA, 87 nt, Homo sapiens
acgagacccgcagaccacgccaggaagacggaagaaaggccgggaagaaagaaaaccccgccggaccaccgcaaaaagaagagccag

SEQ ID NO: 6258 - RNA, 83 nt, Homo sapiens
gcccagaaagccggaaaccacgggcaaaacagaagcagacgagaacggcagccaaggggccaaccgccccccagcagcaggca

SEQ ID NO: 6259 - RNA, 87 nt, Homo sapiens
ggggacagcagacccccaccacccaaccggcggcgcagacccgccgcgggcggcaccagcgccccaggccaacacacgggagacaga

SEQ ID NO: 6260 - RNA, 73 nt, Homo sapiens
cgaccgggcgcgggcaaggcgcagcaggaagggaggaaagagggaaccaccaggccaccaccgaagcgcccga

SEQ ID NO: 6261 - RNA, 79 nt, Homo sapiens
gaaagccaaggaaaaacggagagccacaaaaaaggaagcgaaaaccagaaaggaggccaggggggaagggacgacaaga

SEQ ID NO: 6262 - RNA, 64 nt, Homo sapiens
cacaccaccgagacccaaccccacaacgccggccgcgagccggagcgggcagggcacacaaccg

SEQ ID NO: 6263 - RNA, 60 nt, Homo sapiens
ggaccgagagcggaccgagagcgcgaaacgcacgagaagggggcccccaaagggaagcca

SEQ ID NO: 6264 - RNA, 47 nt, Homo sapiens
cacagcaagaggcacgcccagagcaagaaggacaggagagacaacgg

SEQ ID NO: 6265 - RNA, 69 nt, Homo sapiens
cagaggccaaaggcaggagggcggagaacggaaaagcaccaggaagcagagaggaccgcagaagggaag

SEQ ID NO: 6266 - RNA, 85 nt, Homo sapiens
cccagccccggccccagaagagggcggacacggggaaagcacgaagggagcccagcgacacaccagcagcagccaaagaccaacc

SEQ ID NO: 6267 - RNA, 85 nt, Homo sapiens
ccagaggcccagggaggcaggggcagaaacagagaaggaacagggcggagaacggaaaagcaccaggaagcagagaggaccgcag

SEQ ID NO: 6268 - RNA, 57 nt, Homo sapiens
ccccgcccggcgccggcccgggccgccagggcagggaaagaacccaacgcggagagc

SEQ ID NO: 6269 - RNA, 77 nt, Homo sapiens
ccggcgcggggcccggcagagcccgcggcgccgggagacggggacagaagacccacgccgagccgcggcagaaccac

SEQ ID NO: 6270 - RNA, 53 nt, Homo sapiens
gaccaagaaccagggccgaggagcccaagagaagaaaaggagagagccgagaa

SEQ ID NO: 6271 - RNA, 86 nt, Homo sapiens
gccccacggcgcaccaccacaacaggggagagggacccagaacgggggaacggcacccccccccggcagccaggggcaagaaccac

SEQ ID NO: 6272 - RNA, 67 nt, Homo sapiens
ggccccaccgcgggaagaaagggagcaagcccggcgagcaacgagaagacgacccggccggaggcac

SEQ ID NO: 6273 - RNA, 83 nt, Homo sapiens
ggggaaggcgagcgccccccccaaccacaaaacaggcggagggcggcgagggacagcgagagaaagccaaaaagaagaaacaa

SEQ ID NO: 6274 - RNA, 54 nt, Homo sapiens
caaggaagccacggcagacacacaacccgacccgacgaggacaagacggacaga

SEQ ID NO: 6275 - RNA, 74 nt, Homo sapiens
ccaccggccaagaaggacaagcaaaaaccaaagaacacaagaaaccgcgagagggaaagggccccaagagccgg

SEQ ID NO: 6276 - RNA, 73 nt, Homo sapiens
gggcaggcggcggggacacccggacacggcaagagggaaaacaaaccacgcggggagcaggggccaaggccca

SEQ ID NO: 6277 - RNA, 77 nt, Homo sapiens
agaacagaagccagccgacaagggcagaacgaacaggaacaaagccagacgggcggagaacggaaaagcaccaggaa

SEQ ID NO: 6278 - RNA, 75 nt, Homo sapiens
agaggcgcggccggaggaaaccaagacagcccaaacgccccacgaccagacacgaagcagaggagccagacccaa

SEQ ID NO: 6279 - RNA, 79 nt, Homo sapiens
cagcccagcccgcccccagaaaccagagaggcagaaacgaagcgaaaggaaaccaaaaggaaaaaacagaagaaccaaa

SEQ ID NO: 6280 - RNA, 79 nt, Homo sapiens
ccaaccccagccgaccgagcccaggagcgccacgcgcggaaggcagcgcccagcagcgcagaaagcagaaacaggcccg

SEQ ID NO: 6281 - RNA, 105 nt, Homo sapiens
ccaggaggccagccacccccaacgaagcacccaagggcgggagaaccaggaagccggaccccaacacaggaaaaacccagaaaaacagggaaaaaccgacaaagg

SEQ ID NO: 6282 - RNA, 109 nt, Homo sapiens
ccccccacaaagggacaacgggcccggagagcccgaacggggcaaaaaggcggcgaacggaaggacacccaagagaaaggagagaacgaaagacacagcacccagaaaa

SEQ ID NO: 6283 - RNA, 53 nt, Homo sapiens
gccgcggagcagaccggggcgagaaccgggcacaacacgaaggagaaagccgg

SEQ ID NO: 6284 - RNA, 37 nt, Homo sapiens
gagccagcccccaccccacagcgaccggacagaagac

SEQ ID NO: 6285 - RNA, 71 nt, Homo sapiens
gacgacgcaccgcaggcagacaaaagggccaaagaagggagagagggagccaggcaggccaagcgcggccc

SEQ ID NO: 6286 - RNA, 78 nt, Homo sapiens
gcaacgcagcggcagcgaggggcacgagaaagcggaaaggaggaggcccaggcccaggggccccgggcgggggcaaca

SEQ ID NO: 6287 - RNA, 71 nt, Homo sapiens
ccagacacacacacccaacccaaaccaaggacgaaaaggcccaggccggcggaaaacccaccgccaaaaga

SEQ ID NO: 6288 - RNA, 74 nt, Homo sapiens
aagagaccagcaaaaaaggggggaggcaccacccaggaccgcggcgcagagcgaagcagggaaacccagggagg

SEQ ID NO: 6289 - RNA, 64 nt, Homo sapiens
cagaggcaaagaaagccacacagccacaaacaggacagagagaaacacagaaaacggagacaca

SEQ ID NO: 6290 - RNA, 74 nt, Homo sapiens
cggacgagcagaggagaccgaacgggggagccccaacaggaaaacacaggccccccaccggcagaaaagagaaa

SEQ ID NO: 6291 - RNA, 73 nt, Homo sapiens
gcaagcgacaaggaaaagaagaaacgccggcaaagggagacgcaagggcggaccggcccaacgcgagcggaag

SEQ ID NO: 6292 - RNA, 75 nt, Homo sapiens
ggggcaagaaaagacggcacgcaccgagaggccagggccacagccaggagaaaaagcgggaagggcacagcacca

SEQ ID NO: 6293 - RNA, 87 nt, Homo sapiens
aaaaacgagccgcccagaagagccgacagaggcagacacagaaggccgacacccgcaccggcgaagcggccgacagaagcagaggca

SEQ ID NO: 6294 - RNA, 54 nt, Homo sapiens
aagcaccaaagcgaaggagggccgcaagcagcacagcagaccgcgaagacgcca

SEQ ID NO: 6295 - RNA, 87 nt, Homo sapiens
gccccccccccgggggcccgggaggagagaaaaacggcgcacgaccccagagccgcccaacagggaaggagacccacccccaccccg

SEQ ID NO: 6296 - RNA, 82 nt, Homo sapiens
agcgcagccacgggcgcgcagcaggacaggcaaaaagacagccgaaaaagggcggaaaagcagaagccccgggaaggaggag

SEQ ID NO: 6297 - RNA, 69 nt, Homo sapiens
ggcaggaggcggaacagagacaagaacagaagcgaacaagcacaaagcccaagggaagagaccgcaaga

SEQ ID NO: 6298 - RNA, 75 nt, Homo sapiens
agcaaccaaggaacaagagagcaagaggacaacagggaagcggaaccaaaaaaagacaaaaacaacacgggaagg

SEQ ID NO: 6299 - RNA, 61 nt, Homo sapiens
cgcagggcgcccccggccacaccacgaggcgagccaagagcgaggcagccgccggaccacc

SEQ ID NO: 6300 - RNA, 57 nt, Homo sapiens
aggacgcagcacaaaagagcagggacaacaggggaagagccagggccgcgcagagga

SEQ ID NO: 6301 - RNA, 82 nt, Homo sapiens
gggggagcgcgggcgaagcacgcacaccgggcagggccgagaggacgccagcggcgcgcagaacaacagagggcagccggga

SEQ ID NO: 6302 - RNA, 85 nt, Homo sapiens
gccgcccgcagagcaagcgcggggaaccaaggagacgcccggcacgcaggaaacgaaagagcccagacacccaagagggccaagc

SEQ ID NO: 6303 - RNA, 62 nt, Homo sapiens
gccgcgaggagacgcggcagcagacaaggaggcgaaccgcgagcccagaaggcgagggacga

SEQ ID NO: 6304 - RNA, 67 nt, Homo sapiens
gaggggacccccgaaacaccccccagggggacaggagccaggccaagagaaagaaacacagaagcga

SEQ ID NO: 6305 - RNA, 77 nt, Homo sapiens
aaggccggagacaccagcaggaaacaggaacacgaaagaggaaaaacgcacaagaaaccgaagccaaggaggagagg

SEQ ID NO: 6306 - RNA, 75 nt, Homo sapiens
agacagaccaacgcagccaggcaaagcagcaaccaaacagacaaccgcacccacaaaggccaagacggcaaacgg

SEQ ID NO: 6307 - RNA, 58 nt, Homo sapiens
ccagaccggaggacaaccacacccagcagggcaagacacagcagcagccaagcgcagg

SEQ ID NO: 6308 - RNA, 87 nt, Homo sapiens
cgacccggagcacccgaccccgaaccagaggacaagacaaagggagcaagacaagccaaagaggaaaagcaaagcccaggggcaggg

SEQ ID NO: 6309 - RNA, 85 nt, Homo sapiens
gccgaagaggggcggcacccccgagaccgaaggagcagacgaggcacgagcgccagcgcgagacagacggggcgcagaagcggcg

SEQ ID NO: 6310 - RNA, 74 nt, Homo sapiens
gggaacaaaaccagcacccaaggcagccggaaacgaggacacaggaacgccacaagaaacaacagcaaggcgag

SEQ ID NO: 6311 - RNA, 85 nt, Homo sapiens
gcgcagggccgcagcgggagcggacggcgagcgcgagcggcgcgagaaagggcccccggagggccacaagccagagcgccccggc

SEQ ID NO: 6312 - RNA, 64 nt, Homo sapiens
cggacggaagaaaaggcggccggggggcccgacgaagaggggcgcaaggcccagagcagcgacc

SEQ ID NO: 6313 - RNA, 71 nt, Homo sapiens
cggagagacaacaagggccacggacggcaagaacggaagcacgggcggaggaaagcacaagcagagccccc

SEQ ID NO: 6314 - RNA, 54 nt, Homo sapiens
acagccggaaggcacaaggacaaacccacccacaaaggggacccagcaggacga

SEQ ID NO: 6315 - RNA, 68 nt, Homo sapiens
gagagcgggagccacacgcccagcagccaccaacacccaaaggaccaagaaggcgaacaggaaagcag

SEQ ID NO: 6316 - RNA, 75 nt, Homo sapiens
aacccaggggggaggagaaggcggcggcccggccgcagcggcaacagaacgaaaaacagggccggaacgcagggc

SEQ ID NO: 6317 - RNA, 74 nt, Homo sapiens
ggcggccccgcgggcgccagcagaaccgccgcgcccgggaaaggaggaaagaaagagaagaagagcaaccaagc

SEQ ID NO: 6318 - RNA, 76 nt, Homo sapiens
agcaggagcgccggggccggggcgaacgcggccgccgagaaaccggggagagagagccaagccaaccacaaacggc

SEQ ID NO: 6319 - RNA, 79 nt, Homo sapiens
ccgccccccgccaaaggaggacacaaaagaaaccaaacacagaaaacaccagcaggcggagagaccgaggccaccaaga

SEQ ID NO: 6320 - RNA, 32 nt, Homo sapiens
cccgcacacacacccaagcgcccgaagacaac

SEQ ID NO: 6321 - RNA, 54 nt, Homo sapiens
caaagcaccagaagccgccaggaagcgagaagacaaagcgaagagagaagcaga

SEQ ID NO: 6322 - RNA, 74 nt, Homo sapiens
ggcagagacccggcagggcgggggcccggggaaagcaaaccaaccccccgcccgaccagagggaaagaaaagaa

SEQ ID NO: 6323 - RNA, 68 nt, Homo sapiens
ggacacccgggcggggcagagcagcccccagccagccgcgagggcccggccaggccccaccgccacaa

SEQ ID NO: 6324 - RNA, 52 nt, Homo sapiens
accaggacccaggcgcgggcagccacagccaaaggaagcgggcaccaacaga

SEQ ID NO: 6325 - RNA, 83 nt, Homo sapiens
ggaacgcgacgcgagagaaggacccacggcgcgcgaagagaaaggacagggacaggaaagaaagaaaaagaaaagaaaaacag

SEQ ID NO: 6326 - RNA, 84 nt, Homo sapiens
cgggggcagcggaggagccaccccaacgcccgcggggcgcgaacaccgaggcccgggcaggccaccgcgggcaccgcgcccaga

SEQ ID NO: 6327 - RNA, 62 nt, Homo sapiens
ccggcccgagccccggcggcgcagacaccacccaaacgccggcgaccccaagaggaagccca

SEQ ID NO: 6328 - RNA, 78 nt, Homo sapiens
gcaaggcgacgggagcggacacgcccgggcagggcccaccccgcgcccgacagacaacggcaagcggagaagagcaag

SEQ ID NO: 6329 - RNA, 74 nt, Homo sapiens
cagagggccggggccaaaacacgacccgaggcgaggccacacccaaggccaccaagagacagccaccggcccag

SEQ ID NO: 6330 - RNA, 60 nt, Homo sapiens
gccgaaacagaaaacaagagaccacagaaggcaagaaggcggcggccaccagggcggggg

SEQ ID NO: 6331 - RNA, 113 nt, Homo sapiens
gggcagcgcccggaccggccgagaggaagacgagccgggaggaacggcccggaaacaggaggacgaagggccgggccggggcacgggcccacggccccccaccgggccacccc

SEQ ID NO: 6332 - RNA, 72 nt, Homo sapiens
acacggccgccacaacagccagaaccggagagaacggacgagaccaacgcggaaaccagcaagaaaaccagc

SEQ ID NO: 6333 - RNA, 53 nt, Homo sapiens
caaacaggaagggcacaaaggaaaagcacaagaaggccggggagagcaaaacc

SEQ ID NO: 6334 - RNA, 76 nt, Homo sapiens
accaccgccgcgcagcgccgccaccccacccaaaggaagcagcggccaggagaaaacagggaaaagcaaaacaacg

SEQ ID NO: 6335 - RNA, 38 nt, Homo sapiens
ccaaggagccacccgagccagggccgccgcgcccaggc

SEQ ID NO: 6336 - RNA, 51 nt, Homo sapiens
gggcgcaggagaagaggcggcccacaggcaaaaggccaaaacggaagaacc

SEQ ID NO: 6337 - RNA, 79 nt, Homo sapiens
aaggaaaccaagcaccagcgagacccagggaagagccagaagacaccagaccgcggggcaaggagacaaaagaaaggga

SEQ ID NO: 6338 - RNA, 61 nt, Homo sapiens
gcagaacaaacggaccagcgaccgggcagacccgggaagaccacgccgagacccggcgaac

SEQ ID NO: 6339 - RNA, 82 nt, Homo sapiens
cgcggaccgcggcccgacgaggaagcacgaaagcaccaacgagacccgccacacgacaccccccggggaaagacacgcccca

SEQ ID NO: 6340 - RNA, 81 nt, Homo sapiens
gcagagcccaagcccacacagaacgccggagaagcagcgggcaagaaagacgcaagcccagaggagaggcggaaaaaagcc

SEQ ID NO: 6341 - RNA, 76 nt, Homo sapiens
cgacaccgccagcaaaaaacaggcacgcagagggcggacgagagccaccagaccggcgcgcagaaggccgcacccc

SEQ ID NO: 6342 - RNA, 57 nt, Homo sapiens
cgcccacggcccccagaacccagagacgggcaggagaggagccaagcccaacgggac

SEQ ID NO: 6343 - RNA, 63 nt, Homo sapiens
cagggggacacagacaacggcagagcacaaaacggagcacagagagcgagagaagaagagaag

SEQ ID NO: 6344 - RNA, 77 nt, Homo sapiens
agccgaccgagcccaggagcgccacgcgcggaaggcagcgcccagcagcgcagacggcagcccagccacgcacagac

SEQ ID NO: 6345 - RNA, 54 nt, Homo sapiens
ccacaagggacaggcaaggccgggcaccagccaccgaaggaggagggagcaccg

SEQ ID NO: 6346 - RNA, 86 nt, Homo sapiens
ccagaggacaggcagcccagaggaaagccaggccagaagaaggaaggccggggaggggacaggaaagacacaccaccccaccgaac

SEQ ID NO: 6347 - RNA, 65 nt, Homo sapiens
ccgagcagaaggacgcaggcagcgggcccaggcccagcagaggagcacgcagcgaacaagaagag

SEQ ID NO: 6348 - RNA, 80 nt, Homo sapiens
cccgcgccgccgaccccccggcgccgcgccggcggcggcagccggcgaggggggagcccagcaggagcgggaaaaccgag

SEQ ID NO: 6349 - RNA, 76 nt, Homo sapiens
cccgaccaagcaccagcacccggaggggaagacgaagggcagcaaggaacgcagccacagagaaagcaagacagca

SEQ ID NO: 6350 - RNA, 72 nt, Homo sapiens
gcgcacacaaagaacggggaaacggaccgaaagaaagcgaaaacacaaacaccggagcaagagaagaaacaa

SEQ ID NO: 6351 - RNA, 74 nt, Homo sapiens
aagcccggaggacgaaacgcgaaacccgggccaaaggcagaaggaacacagacacagaaagacaagggaagagc

SEQ ID NO: 6352 - RNA, 79 nt, Homo sapiens
cccaaaagaccaacggcacccacagcccccccagaagccgcgcagaccacccaaccgccgcacagggccagccagaagg

SEQ ID NO: 6353 - RNA, 62 nt, Homo sapiens
cccggaccggagaggaggggaggaaaccccccaggcaagaggcgcaggaccgggaagaccaa

SEQ ID NO: 6354 - RNA, 79 nt, Homo sapiens
acaagcagaagaacgcagaaagagacacaccgacgaaaaagcggacaagaaccgcaagagcgaggacccagcacacacc

SEQ ID NO: 6355 - RNA, 51 nt, Homo sapiens
aaccaccaccggccgccccgaggaaaacagcgcgaacaagccagcccaaaa

SEQ ID NO: 6356 - RNA, 86 nt, Homo sapiens
cgagagaggcaccgggacggaccgagaccggaccgagagcggaccgagagcgcgaaacgcacgagaagaccagaaggaaaacacac

SEQ ID NO: 6357 - RNA, 57 nt, Homo sapiens
ccgggcagccagcccaggcaagcaagaggaaggggaggagggccaagagccacggag

SEQ ID NO: 6358 - RNA, 79 nt, Homo sapiens
gacaacaagcagccaagcccagacaagccccagggaagccacagcaccccagcacccaggggcccacaaggacacaccc

SEQ ID NO: 6359 - RNA, 81 nt, Homo sapiens
gggaaacgcggccgcgccgcgccgcgcggggcggcgccgggccgcgccgagagcaaacggagaccgggacagaccaaaagc

SEQ ID NO: 6360 - RNA, 67 nt, Homo sapiens
gggaccccggagcccagaagacagagggcgagaccacaagaagaaacaaccgaccgaacaacgcccc

SEQ ID NO: 6361 - RNA, 58 nt, Homo sapiens
cccacccccaacgcgacggaaaggcacgaaagccaggccccgagccccggccccaaag

SEQ ID NO: 6362 - RNA, 71 nt, Homo sapiens
accacccggcgaagcacgcagaaacagcagacggaggccgggagcaggcaaaggcggaggcagggcccgac

SEQ ID NO: 6363 - RNA, 66 nt, Homo sapiens
ccgggaggagaaggaaggcaggaaagccagccggcgagagcaggagaacacgagacccgcacaaaa

SEQ ID NO: 6364 - RNA, 74 nt, Homo sapiens
cgagggaaacccaccgcgacaagagggaccagccccagcaaaaccaggcgaccggcccgaggaccgccgcacga

SEQ ID NO: 6365 - RNA, 74 nt, Homo sapiens
ccggcaccccagcaggccgcggacagagaagaggacgcggagacaagaggaggagagcaaaagacaacacccag

SEQ ID NO: 6366 - RNA, 80 nt, Homo sapiens
caaggaggaggcggagcagacggagcagggagggcccagaagaaggagacccagaagggggccaggggccggcccgggcc

SEQ ID NO: 6367 - RNA, 82 nt, Homo sapiens
gacgccggggcgggagcgcccaagcgggcacccccgagaccaccgcacggaaaccagaccacggcagccacgacccaccgcg

SEQ ID NO: 6368 - RNA, 50 nt, Homo sapiens
ccgcgggggacaacaggcacaaccgggggaaaccacaccacccgccacag

SEQ ID NO: 6369 - RNA, 66 nt, Homo sapiens
aagggagcaggggagacccaaaggaacgcagcaccagcccacgagacccaagcaaaaccacagcag

SEQ ID NO: 6370 - RNA, 76 nt, Homo sapiens
caaaggcagcgcggcagggcgggaagcacggcagcaaaggaacccaaagaacggaacccaccaaccccgaaggaaa

SEQ ID NO: 6371 - RNA, 73 nt, Homo sapiens
caagaggaacccgcacagaagaccacgggagaaacaaagaccacaccagcgccagccgcagccggcggacgca

SEQ ID NO: 6372 - RNA, 77 nt, Homo sapiens
acgccacgcgcagggacgggggacacaggccagcaggggcgaggcggcggcaggccacaggggggccgcagcggagg

SEQ ID NO: 6373 - RNA, 79 nt, Homo sapiens
gcggggcaacacacaccccaaagcagggaagcccgcagcgcgaagaaggacagcagacggaggaaaaagggcgccgagg

SEQ ID NO: 6374 - RNA, 76 nt, Homo sapiens
cagacgcagggcgcccccgacagaccagccacaccacagcggcagggacaggacacccagcgacccgagagcagga

SEQ ID NO: 6375 - RNA, 89 nt, Homo sapiens
agcagaagagcggaaagcaaacgggagggcaagaggagcagcagcggcggggccaagcgggagagcgagaaggcggaacaggagaggcg

SEQ ID NO: 6376 - RNA, 60 nt, Homo sapiens
accacagagcaaaagcccagggaaaggacccaaacaggcaggaaagggcaaaggaaggag

SEQ ID NO: 6377 - RNA, 68 nt, Homo sapiens
gcaagacacgacgcgcagcgcagacgcgcgaccggcaaaaagggccagaagaagagcccaaacaagga

SEQ ID NO: 6378 - RNA, 80 nt, Homo sapiens
agaaacaaaaggacagagaaaaggcccaggcaaagaaagcgaacgcgaaaagaaaagccgagagcagccagaccggcgaa

SEQ ID NO: 6379 - RNA, 57 nt, Homo sapiens
gggggaagcggcccagggagggaagaccgcaggaaagcaggaaggcaagaaagccaa

SEQ ID NO: 6380 - RNA, 80 nt, Homo sapiens
ggcgaggaggcgccacacccccccgacgccgcgcggggacgcaagaaaagcgcccaggaagcggaaaaacaaaagagccg

SEQ ID NO: 6381 - RNA, 79 nt, Homo sapiens
ccgaacaccagccgaaagggcccaccgcaaggacggagaaggagagccaagaaggaacagcagcagagcccggagagac

SEQ ID NO: 6382 - RNA, 74 nt, Homo sapiens
accgacagcacagagcagaggaggaaagcaccagggcaaacaggaaagggggaggaaaaggggcagacagacag

SEQ ID NO: 6383 - RNA, 51 nt, Homo sapiens
cgaggagccaacaagagaccacaacacaacagggggcagaaacgggacggg

SEQ ID NO: 6384 - RNA, 89 nt, Homo sapiens
aaacagacagaacagaacccaaaagccgacaaccccagaaacagagagcccagccaagccagaaccaggggcaacagacacagccacca

SEQ ID NO: 6385 - RNA, 95 nt, Homo sapiens
ccgcccagccacccccaggacgcccgcaacccgacacgacccgccggacagaaagaggaggcccaggcacgaacaacagagagcacacccagagg

SEQ ID NO: 6386 - RNA, 75 nt, Homo sapiens
ccgccccacaccgagcacccgcagaacaggagagggagcccacagaaccaaagcagccaagggaggaggagggga

SEQ ID NO: 6387 - RNA, 37 nt, Homo sapiens
ggcggcccccaagcagaggccacaggccaacgacaac

SEQ ID NO: 6388 - RNA, 114 nt, Homo sapiens
ccagcgggccagcgcccgccccacgcgccccgccggccaggccgacgggcaccccgaggaaacgaaaagagacagcagggcaaaacgggccacacacagggcaaaaagaacggg

SEQ ID NO: 6389 - RNA, 71 nt, Homo sapiens
gaccaagaaccagggaagcgccaaagaagcgacgcgaaagaaagaaagaaaagcggagagccgaggcaggc

SEQ ID NO: 6390 - RNA, 80 nt, Homo sapiens
agcaacaaagagagaaacagcagcaacagaaaaagggccaaccgccccccagcagcaggcacgggcgaaccccgagcccc

SEQ ID NO: 6391 - RNA, 58 nt, Homo sapiens
acccccgcgacacagccgaaaagacgaggcgaggaggcgagacacccaacccacccca

SEQ ID NO: 6392 - RNA, 58 nt, Homo sapiens
gagacgacacgcaagcaggcaaccgaaacagggcgcccacccaagcagaggcagggcc

SEQ ID NO: 6393 - RNA, 72 nt, Homo sapiens
gcgggcgcgcaggccgcggggagcaccgggaaggacgaaggaccggggacaccacacagccccaggcggccg

SEQ ID NO: 6394 - RNA, 81 nt, Homo sapiens
aggacccaaaaggcgcaggggaggccggccccaggacccagaagaccccaccccaccccgcccggaggacaacggacacga

SEQ ID NO: 6395 - RNA, 66 nt, Homo sapiens
gcccgccaagaaagaggcgaaacagaccccgaaaagcccggaaggacaagccagcccaaacgaaca

SEQ ID NO: 6396 - RNA, 86 nt, Homo sapiens
gaaggagcggagaagcacggagcgggggaggcacagaagggacagccgccaggaagcaacgcagcgcggaaaggcacaaccaagga

SEQ ID NO: 6397 - RNA, 67 nt, Homo sapiens
gaggaaccagaagccagcaggaaaggcgaagcgaaagagaggaacaggacgagacaagggcagagcc

SEQ ID NO: 6398 - RNA, 84 nt, Homo sapiens
agcggcaaacggcagagcaggccgcggcgacccagcgagccagaaccagagaacagcagaggcccaggaaacagccaccacccc

SEQ ID NO: 6399 - RNA, 80 nt, Homo sapiens
ggcaacacagggacgcccagaaggaacgcagaaagccaaggacacgcaggacgaagaaggaggagagcccagaagaaacc

SEQ ID NO: 6400 - RNA, 76 nt, Homo sapiens
agccacaccgcgcacaacaccaggaaggggacgggcgaggcaaacaaaacacaacagaagggcaaagacagcccaa

SEQ ID NO: 6401 - RNA, 74 nt, Homo sapiens
acggcgcggccacggagaagggcgcggggcgcccgagagccgaagcacagggaaagcaacgaagggagaccaag

SEQ ID NO: 6402 - RNA, 40 nt, Homo sapiens
caggaccaccggaagccagaaaggaaaaagaacgaccagg

SEQ ID NO: 6403 - RNA, 74 nt, Homo sapiens
gccagacagccacacggggggcccggaacgccaccacggaaagccaaaggcggaccgcagcgcgcccggcacag

SEQ ID NO: 6404 - RNA, 70 nt, Homo sapiens
ggccccccgcccacgcagccgccaaggaacgaggaaacaacagcggagcccggaaccccaccagagaaga

SEQ ID NO: 6405 - RNA, 73 nt, Homo sapiens
gaccagacaacgccaccgagccccgaccccacaaggaagggaagaagaagaagcacccccgaaaggagcacag

SEQ ID NO: 6406 - RNA, 87 nt, Homo sapiens
ccggaggccaccggcgcgggaggaggccaccgcagaggaggccggacacccaacagcacgcagacaaggcaccaacagaacggcccc

SEQ ID NO: 6407 - RNA, 83 nt, Homo sapiens
gaggcaccgcaacacgcagcccgcccaggaaagaccacagcaagaccacgcccccagccgggggaccaggccgaacgacccgg

SEQ ID NO: 6408 - RNA, 78 nt, Homo sapiens
aggaggcccgaaagccagccagaaagagacaagaaagccaacagggggagagacaaccagagcggaaagggagaaaag

SEQ ID NO: 6409 - RNA, 60 nt, Homo sapiens
cgccaggcgccgaagaaaccaaacccgacagcaagagcccaggccggcaggccccagaac

SEQ ID NO: 6410 - RNA, 82 nt, Homo sapiens
gagcaccgccgaggcgcgggccagcccgaggaagaccgaggagcagggagcaaccacaaggaaaggaaaccaccgaaccgag

SEQ ID NO: 6411 - RNA, 59 nt, Homo sapiens
ccacggacgccgacacacagccgcgccaggaacgcacaccagcaccagcccaccaaacc

SEQ ID NO: 6412 - RNA, 75 nt, Homo sapiens
ggcgagcgcccgaccacaccaagcggaaaaaagacaccagcgacaaggacaggaaggccgaaagaaggaaaacac

SEQ ID NO: 6413 - RNA, 40 nt, Homo sapiens
cggagcccaaagccacgccgaacccccgccaacaaacaaa

SEQ ID NO: 6414 - RNA, 78 nt, Homo sapiens
gggagccggccacccaccggacagccagcagccagcaacacacgccccaccgaaccagacagcgcccaagggcagaca

SEQ ID NO: 6415 - RNA, 76 nt, Homo sapiens
acgaaagcgggagagggaccggaacggcggcgacaaggggcccgaacagaggggacagaggagaggcacaaagaag

SEQ ID NO: 6416 - RNA, 86 nt, Homo sapiens
ggcggcgcaccccaccgccaacccacggcgagaggaggagcccggaagcgcgagaagaaaccaacgcggagagcgcggcaggagcg

SEQ ID NO: 6417 - RNA, 74 nt, Homo sapiens
caagcgaaaaagcgggaacgcaggacccaaagccccacaccgcggacagagcaaacagcaacaaggagcggggg

SEQ ID NO: 6418 - RNA, 83 nt, Homo sapiens
cgcgggcgccggggagccagggcggccagagggacaacagagaaggagcgcgcacgaggcaaccacacaacaacacaggcccc

SEQ ID NO: 6419 - RNA, 96 nt, Homo sapiens
ggaccaggcacagaagcacgaaaaagcgggaaggccggaaaggaccagaccgcccaggaaacgggcagagccggagagccccaagaacccagcagg

SEQ ID NO: 6420 - RNA, 59 nt, Homo sapiens
aggcaaggaccggagagaggacagggcaggaaccgcaggggcgaaaggcaggagccaaa

SEQ ID NO: 6421 - RNA, 72 nt, Homo sapiens
gggcccacacaacccaggcaaccaacaggaagagaagcccagacacgaagaagagagccagagcacaagaaa

SEQ ID NO: 6422 - RNA, 75 nt, Homo sapiens
caaccaccacacgacccagggagacaccgaaaagaagagaaaccagcgcggggaagaagaaccaaaggcaagaac

SEQ ID NO: 6423 - RNA, 89 nt, Homo sapiens
aaacaccccagcccacagagagcaaaacacaagagagcagggaggaggggcggaaacagacccgccagaagaacccgaaagggaccgcc

SEQ ID NO: 6424 - RNA, 71 nt, Homo sapiens
gggccaggcccaggggcccaaagcagaaaagggaggccgacgcgcacagcgccccgcggaagccaaacaca

SEQ ID NO: 6425 - RNA, 79 nt, Homo sapiens
aaccccacagcaagaggacggagcaggccgggcccgccagggcacgcgcccgccacgggaagcccgagaagccgcgcag

SEQ ID NO: 6426 - RNA, 105 nt, Homo sapiens
ccgagagccagaggccgacgcgaggagcggagaacgcacagaacacccgggcgcggccgaacccagcgagaaaccaggaaccaccccgggagccgagcccacccc

SEQ ID NO: 6427 - RNA, 96 nt, Homo sapiens
caggaacagggacagcacccaccccggagggggaccacaagacccacgacagacaagcagaccggaagaccgacggaagaccacaccccgagggag

SEQ ID NO: 6428 - RNA, 79 nt, Homo sapiens
cgcaagaggcggagccgaccaggccgacgagagcaaggcccagcagcacacaaggagcaagccaggagaaagcaacagc

SEQ ID NO: 6429 - RNA, 77 nt, Homo sapiens
acagggacaacggcgccagaaagaagaaacccaacaggccaaccgagcaggcggaaggaggagagagaggaaacgcc

SEQ ID NO: 6430 - RNA, 60 nt, Homo sapiens
ccgacggaccgggaaggagcacccaggaccaccagaacggacccgacaaacggacagcag

SEQ ID NO: 6431 - RNA, 61 nt, Homo sapiens
acaggaaaggagggacggcggcaggagaccagaggcaaaccccagaaagaagcagacagcg

SEQ ID NO: 6432 - RNA, 61 nt, Homo sapiens
acgggacaaaaaccagaccagaggcagaaacggggacacaagcgaaaggcaacggcgcaca

SEQ ID NO: 6433 - RNA, 79 nt, Homo sapiens
ccgagcagcagccccacagaccaggcagccaggaccgggcacagagaacagaagaagaagcggcgagcgccagcccccc

SEQ ID NO: 6434 - RNA, 70 nt, Homo sapiens
caacagcagcggcagccaaggaccgacagcacgaggaggagagaagaaaagcggcccgagacaacaaggg

SEQ ID NO: 6435 - RNA, 82 nt, Homo sapiens
cggaggcgaagcagcacgaccagccaagcgccggagcaaggaagccggccaggggcaaaggagaggaagaggaagaggaaga

SEQ ID NO: 6436 - RNA, 74 nt, Homo sapiens
accccagcaaccgagaagcagcaagcaaagacggaggagcagacggcggccaggagagaaccagacgaccaccc

SEQ ID NO: 6437 - RNA, 54 nt, Homo sapiens
acggcaagccacagaacccaacacagagccaaagggcaccaagcccgccggaaa

SEQ ID NO: 6438 - RNA, 73 nt, Homo sapiens
cacaccaagcggaggggacgccacgcaacgccgacagcgaacccacccaacacggcaaaacaaagacaccaca

SEQ ID NO: 6439 - RNA, 64 nt, Homo sapiens
gacaagcgcacagcggagaaagcagcgcggccaggaggcgggaaagcgcggcaacgagaagcgg

SEQ ID NO: 6440 - RNA, 79 nt, Homo sapiens
gcgcgagcacgggcggagcgaacggagaagcggccgaggagaacagacaggccaaggaccagaagaaccggagccggaa

SEQ ID NO: 6441 - RNA, 65 nt, Homo sapiens
acggcaaacgcgagggaaacaacggaagaccaaggcaagggaggccgcgggaacgggaccaaaag

SEQ ID NO: 6442 - RNA, 37 nt, Homo sapiens
ccaccaaaccacaaaagaggcagcaaagaagccaaac

SEQ ID NO: 6443 - RNA, 56 nt, Homo sapiens
cacaggccccggcagaccaagaacaccgaggagacaaaggacaggcagaaaccaga

SEQ ID NO: 6444 - RNA, 69 nt, Homo sapiens
gacggaaaaaccagccgcacgccaaggaaacagggggccaaagggcgagggcacaaaaaaccacacccc

SEQ ID NO: 6445 - RNA, 68 nt, Homo sapiens
agaagcagcagacggcacacgcagcagaagcccggagagcagaaggcaagaaagggagaagccagaaa

SEQ ID NO: 6446 - RNA, 65 nt, Homo sapiens
gagcccagaagacagagggcgagggaccaggcagacgaccaaggagcaggcggggcaggcccaaa

SEQ ID NO: 6447 - RNA, 75 nt, Homo sapiens
agacagcaaacaccgaggggaccgagacggaaccagacaggcaggcaggccaaggaaaaggaacagagagagcag

SEQ ID NO: 6448 - RNA, 85 nt, Homo sapiens
caagccgggcagccgaagaggggggaagaagagcgcaacaggaggaaaccaggggaagacgcaaggagagagcccagcgggagcc

SEQ ID NO: 6449 - RNA, 77 nt, Homo sapiens
gaagcgcacaggaagccggaaacgcgagaaagagaaaagaaacccaaagcagcccaggaagcaaaagcaacaacgag

SEQ ID NO: 6450 - RNA, 87 nt, Homo sapiens
gcgagcgagaagaggaggacaacagcacaaccgggggagccgaggaaggacagggcgggaggggccaccgccaggccgcagcggccg

SEQ ID NO: 6451 - RNA, 74 nt, Homo sapiens
caggcggagccgaccgggccagagaggcgcggcgggggcgagcgacaggacaaccaaaccaggggaagggggga

SEQ ID NO: 6452 - RNA, 71 nt, Homo sapiens
gggcgcgcagacccaagcaacggcggcacaagaaaggagagcaagacccccggacagacgccgaaaacgga

SEQ ID NO: 6453 - RNA, 61 nt, Homo sapiens
gacagaacagaacccaaaagccgacaaccccagaaacaggccccccaggccacccaggacc

SEQ ID NO: 6454 - RNA, 103 nt, Homo sapiens
aagggaaaaggagagaaaagagcagaacgaagaaacccgcagggggaaagcccaccgacacccagaacgggaagcggaaggcaaacacgaggaagcagaggag

SEQ ID NO: 6455 - RNA, 70 nt, Homo sapiens
cgagggaggagagagggagagccaaagaaggagacggacacaggcagggcggaaaaagaacgagaagcca

SEQ ID NO: 6456 - RNA, 73 nt, Homo sapiens
gaccagagagaccccggaggaggagcacggcgaaccgcaaacagaagagggagccagaagaacaaggaaagaa

SEQ ID NO: 6457 - RNA, 74 nt, Homo sapiens
acagaagccagaccggcgcgagaacaacggaagaccgcaggaaagcaggaaggcaagaaagccaaggacgaaac

SEQ ID NO: 6458 - RNA, 66 nt, Homo sapiens
cacgagccgccagcgcagaaacacggcccagccccagaaaaggaacacaaggaaaagggggccagg

SEQ ID NO: 6459 - RNA, 85 nt, Homo sapiens
ggcgaggcgcagaaaccccggacaaggcacgccagacgggcggagaacggaaaagcaccaggaagcagagaggaccgcagaaggg

SEQ ID NO: 6460 - RNA, 75 nt, Homo sapiens
accggcgggcccggacggagaagacgaggagggcgccgcacaaaagaccccacagcgagagagagcaaacgaaac

SEQ ID NO: 6461 - RNA, 74 nt, Homo sapiens
gcccagaggaagaaggggcaccagcgacagaaggggcacaggccacccgagaggggaaagcccgccgaaacaag

SEQ ID NO: 6462 - RNA, 71 nt, Homo sapiens
agcagggcaggaagaaacagggaaccacaccaccacgaccacacgacagcagcagcgcggcccgagcccca

SEQ ID NO: 6463 - RNA, 78 nt, Homo sapiens
aaaacccggacacaagcgccagaaaaggaggcccaagccccgaagccgaagccacgccccacaggaacacccaacgcg

SEQ ID NO: 6464 - RNA, 74 nt, Homo sapiens
agagacgcgggaaagcgagggaagagcggagggaggaagaggcgcggcaagggcgcggcaagaaaaccggggcc

SEQ ID NO: 6465 - RNA, 82 nt, Homo sapiens
acaagaagacggacagcggggacgaggcggacgacgaccggccaacaagagaggagcgggaaggccccgcacccggagaccg

SEQ ID NO: 6466 - RNA, 71 nt, Homo sapiens
acagaaaccaagccaacaaaagaagcgccgcagggggggaccagggcaggccccaagggcggaaccggcac

SEQ ID NO: 6467 - RNA, 45 nt, Homo sapiens
gcccccccgccagccgccaggcggcccaaccgggggaggaaacaa

SEQ ID NO: 6468 - RNA, 67 nt, Homo sapiens
ccggaccggggcgcccgcacgacggagagccgacccgacacgagccaagaaaagagggcccgcggcc

SEQ ID NO: 6469 - RNA, 70 nt, Homo sapiens
agacccacagaggcgagacccaaagcccagaaacccggacaggacgaggaacaaaacaggaagcggaaaa

SEQ ID NO: 6470 - RNA, 75 nt, Homo sapiens
accgggaccagcgcggaggaggcggggaccgggaccgggacggaccgggaggccagcagacacaaagagacagaa

SEQ ID NO: 6471 - RNA, 66 nt, Homo sapiens
aggggcacgggcggagagcccaggaaacgagcgagagagaagagggcacaggggcgacagaaggac

SEQ ID NO: 6472 - RNA, 58 nt, Homo sapiens
cggaagggcagcgccaacaggccccccgggcagaagaaacaccaccagcgagcacccc

SEQ ID NO: 6473 - RNA, 36 nt, Homo sapiens
ggccggcaacccacagaacagaggagacccagcgca

SEQ ID NO: 6474 - RNA, 83 nt, Homo sapiens
gcacggaggacacggcaagaaggaagccaccagccgccaagagaagccgaagacaagggccgaacaccaacagaggaagaaag

SEQ ID NO: 6475 - RNA, 76 nt, Homo sapiens
agagccgcgcgcaccgccacccgcagagcacacgcggagcaggcgaggcgaggggccccgaaccgaggaccagcgg

SEQ ID NO: 6476 - RNA, 75 nt, Homo sapiens
cgaacaaacagcaagaaagaccacaagaccaaggcgcaaaacaaggaccggacagagcacgcacagaagccacca

SEQ ID NO: 6477 - RNA, 53 nt, Homo sapiens
ggaagccaaacccggaaaccagccccgaaaggggggccgcccgcccaaggcag

SEQ ID NO: 6478 - RNA, 65 nt, Homo sapiens
ccagcaggcagccaaggggggagagcacgaaggaagcaggcccccaggcccccaggggcgagaaa

SEQ ID NO: 6479 - RNA, 72 nt, Homo sapiens
gaaagccacgcacaagccaaggcgacaccggaagcagaccaggcgcagggagcaggagaagcggagcgaagg

SEQ ID NO: 6480 - RNA, 78 nt, Homo sapiens
ggaagacaggccacccagcggggagcacggcgagcagccaggccaggagaggcagacccaggaaaagcgcaagcaaca

SEQ ID NO: 6481 - RNA, 71 nt, Homo sapiens
gagaaggaccaagaaccaggaaaagccaagaaagacccaaaagaccccagaccagaaagaggcgccaagcg

SEQ ID NO: 6482 - RNA, 77 nt, Homo sapiens
agcacggccacacagccccagcgccagacaaagaagacaggcagaaagccaaacagggaggcccagagcaggaaacc

SEQ ID NO: 6483 - RNA, 78 nt, Homo sapiens
cgaccgggagcacaccacaggcaagggacccagacagcgggcccgcccggccagacgaggaggaggaggagacacgcc

SEQ ID NO: 6484 - RNA, 68 nt, Homo sapiens
caggagacaaacagcccaaaaccagcgccaggacggccaacaaccagggaacaagagcgaccgggagg

SEQ ID NO: 6485 - RNA, 39 nt, Homo sapiens
cacaccgcaacccagcacgggacaccccgcggaggccag

SEQ ID NO: 6486 - RNA, 73 nt, Homo sapiens
aggcccgagcagccgagacggcagccagcggccccaccggagccccggcccccaggaaagccgcagcggggag

SEQ ID NO: 6487 - RNA, 95 nt, Homo sapiens
aggacaggacgcgccgagagcaaaaccgccggccggaccagaccggggggaaaggcgacaagaggaaaagggagaaccaacaaagagggcaccac

SEQ ID NO: 6488 - RNA, 72 nt, Homo sapiens
ccagaagccagaccccagggacaagaaaagacaccacaaggcaggcccgggaacaggcaacgacaccaaaca

SEQ ID NO: 6489 - RNA, 79 nt, Homo sapiens
gaagaaggacaaggacagaacaccagcacggcgaaggaaacacaagaccccggacagaccacccagcgccccggggcga

SEQ ID NO: 6490 - RNA, 89 nt, Homo sapiens
accggcgcagacaaccaaaacggcggccggggacagcgcgccggcgagcgacgagcgaggcaacaaggaacgcggcggaacgacccgcc

SEQ ID NO: 6491 - RNA, 52 nt, Homo sapiens
aaagaacaggacccaggggccaggcagaagaaaccagacaagagcggagaaa

SEQ ID NO: 6492 - RNA, 74 nt, Homo sapiens
cacggcccccggcccgcgcccccaaccgcgaagcacccagcggcggcgccggagcgcgagaacacaaggaacga

SEQ ID NO: 6493 - RNA, 75 nt, Homo sapiens
gaaggggcggcgcgcgccgggcgccggaggcaaggaggagaagacgaaagaggccaggaggagcgaggaggcagc

SEQ ID NO: 6494 - RNA, 68 nt, Homo sapiens
cccggcgcagaaagaggagcgagggacaccaccccacaacaccgagcaaagaaaagaagagaagaccg

SEQ ID NO: 6495 - RNA, 71 nt, Homo sapiens
gagccagacacgaagagcgagaaaacagaaagaagaaagcgcgaacggcagcggacgagggacaacaggcg

SEQ ID NO: 6496 - RNA, 74 nt, Homo sapiens
acacaccaaagcgcagacacaacaagggaacgacacgggacaaagggaaggcaacagacgcggggccacgagag

SEQ ID NO: 6497 - RNA, 42 nt, Homo sapiens
gcaggagacgaccgcaacggcaggggacgcggaaagcaaaac

SEQ ID NO: 6498 - RNA, 56 nt, Homo sapiens
accagaggccagcccacagcagaagagcaaccagcccagcggcccgggcagacgcc

SEQ ID NO: 6499 - RNA, 57 nt, Homo sapiens
cagccggcagaccaagcaaccaggcacaaacagcagacaaaaggaaaaaggcgaggg

SEQ ID NO: 6500 - RNA, 75 nt, Homo sapiens
ccacccaagacacaaacggcgacacagaagaagaacgaaggcgaggacacagaagggggcagaacgggaaggcgg

SEQ ID NO: 6501 - RNA, 68 nt, Homo sapiens
caccaacacaacaaccagcccaaaaccagcgcgcaagggccaaacagaagaggagaagcaagaagccc

SEQ ID NO: 6502 - RNA, 72 nt, Homo sapiens
ccgcgagacggcgcgagaacgagcgcagggagcggaggaaaagggccagggaaaggggccaaagaaccggcc

SEQ ID NO: 6503 - RNA, 76 nt, Homo sapiens
aaaagaggaaacggaccaagaacggaaaagaacgacagacggagagacccagaaggccaccgagcgacggacagca

SEQ ID NO: 6504 - RNA, 114 nt, Homo sapiens
gccaacaacggaacgacgaggcaggacagaaagccagaaaaaaggagcagacgcaggcgaggacgagaagagaagcccagggcgcaccagcaagagccccgaaagaaacacaac

SEQ ID NO: 6505 - RNA, 78 nt, Homo sapiens
gcacacagagaaccagcgcggaaccccgcacaggcacaccagcagacgccagaagcagcgaaaaagaacacaaaacgg

SEQ ID NO: 6506 - RNA, 85 nt, Homo sapiens
gagaggggagggggaagggcgagggcgaggagagggaaggacagaaagagcaggcgacagagaagcaacggccaggccccccaac

SEQ ID NO: 6507 - RNA, 80 nt, Homo sapiens
cggccaagggggacgggagcggggccggcggccaccggaaccgcaaccgggacagcaagggaggcagcagacgggaagaa

SEQ ID NO: 6508 - RNA, 73 nt, Homo sapiens
ccccggcccggagcaacgagcgcagcgccggggacgaagggaacccgccgggcggcccggcacccagcccccc

SEQ ID NO: 6509 - RNA, 78 nt, Homo sapiens
caccagggccagccaacacgaaagagaagccaagcagaaaaaccaaagcacccgaaagaaagggacggagcgaaccag

SEQ ID NO: 6510 - RNA, 78 nt, Homo sapiens
ggagggagaacaccaacggaaaaccgagaggcaaaccgagaaccgggccaaggcgacaaggacagagagccgagcggg

SEQ ID NO: 6511 - RNA, 58 nt, Homo sapiens
cgggagaccagaacaagccgagcagacgaagcagccggcaagagcgggaaggagggcg

SEQ ID NO: 6512 - RNA, 72 nt, Homo sapiens
aagacaagccccaaaagcagccgggaaaggagccggccggcggcaaagaacaacgccagaaagaaagccacc

SEQ ID NO: 6513 - RNA, 42 nt, Homo sapiens
cggggcagaggccgcggccaacgggagcgaaccaacgggccc

SEQ ID NO: 6514 - RNA, 78 nt, Homo sapiens
aaaagacagcccgcagcacgaccagcaggaacgagacagcgccgcgcaagagcaggagggacagaccgcagccacgga

SEQ ID NO: 6515 - RNA, 71 nt, Homo sapiens
gaagaccaacacaaaacaaacccagaaaggaggaacccaagagggacagaaaaaaaccaagacgcccagaa

SEQ ID NO: 6516 - RNA, 53 nt, Homo sapiens
agcgcccaggcaagcagcgcgcaggagcccagagcgacgggcccaaccgacca

SEQ ID NO: 6517 - RNA, 78 nt, Homo sapiens
aacaacagcccagaggagaacaaggccgggcgccagcaacgacaggggcgacagacaaaggcagaaaagcgagccacc

SEQ ID NO: 6518 - RNA, 72 nt, Homo sapiens
acgacaagagcacaaccccggcaaaacacgcagaaccaaccagcaacgccacgggagccaagagaaaacaca

SEQ ID NO: 6519 - RNA, 81 nt, Homo sapiens
ccgccgcggggccacccccgggacgcgcccacggcgccccggcgcgggaacaacgagagcgccccaagggagccagcgcag

SEQ ID NO: 6520 - RNA, 54 nt, Homo sapiens
gaagcggccagagaaaggaggcaggcagagcccccgccaggcccccaaaccaac

SEQ ID NO: 6521 - RNA, 65 nt, Homo sapiens
agagggccagggaaacagacgaaaacccggcgccggagaaaccagagagcaagacaaagaaacag

SEQ ID NO: 6522 - RNA, 75 nt, Homo sapiens
acaacaagcaagcagcagcacgcgaaaggagcacagaggggaagcaacgcggcagcagccaggcccggacggcca

SEQ ID NO: 6523 - RNA, 80 nt, Homo sapiens
ccaccaacaggaacagggcagacgagcggaggacacccaacccggcaaacagcgacaaagagcaaagaagcacgaaaaac

SEQ ID NO: 6524 - RNA, 67 nt, Homo sapiens
gacacccagagaagaagggcaacgaacaagggcaagcccgaagcagcgacccgaccaagggagcaag

SEQ ID NO: 6525 - RNA, 77 nt, Homo sapiens
gcaggagaaagcaaaggcgccgaagcgcacgaccccgacacccccaagacgacgcagccagagcagcaagaggccaa

SEQ ID NO: 6526 - RNA, 38 nt, Homo sapiens
cccagggcaccccgcggacgaaccgaccaggcaacaga

SEQ ID NO: 6527 - RNA, 84 nt, Homo sapiens
cagcccgcacagcaagccagagcaggggcccgaagggagcaccgaagacgagcagcagcacgcagcagccccagagcagccagc

SEQ ID NO: 6528 - RNA, 87 nt, Homo sapiens
cgagccgcaggaggcgcggccgagccccgacggccacccggcgggagcgcgggggaggaaaaggaccgagcaaacacgaccacaaaa

SEQ ID NO: 6529 - RNA, 72 nt, Homo sapiens
gcggccgcggcccacaggcgagggaaaacagcacaggaaacacagaagaagagaaaaagcaccgccccagac

SEQ ID NO: 6530 - RNA, 76 nt, Homo sapiens
ggccccggcccaaccgcccgcgaccccccgcgccgcgccgccgccgcagcgccaaaagaacgaagcaaacaagcgc

SEQ ID NO: 6531 - RNA, 83 nt, Homo sapiens
cgccgccacaacagcaggcagaggggcaggggcgcggggaagacagagaccaggggccacaacggaaaccaggaaaccgcaga

SEQ ID NO: 6532 - RNA, 76 nt, Homo sapiens
ggaaagccaaggaaaaacggagagccacaaaaaaggaagcgaaaggagaagcagacacggccaacacgcgccagca

SEQ ID NO: 6533 - RNA, 60 nt, Homo sapiens
gagcggaagagaccagagaagacacaaggggcaggcggccagcagcagcagagcaggcag

SEQ ID NO: 6534 - RNA, 74 nt, Homo sapiens
cagaaagagaaacagacccggaagaggacgaagaaagggagagagacacgagaaaggagaagaacacgggacac

SEQ ID NO: 6535 - RNA, 72 nt, Homo sapiens
ggagccgaaagccaccacaccagacccaaggaacacagcaagccggacagccagccaaagaaccagccagca

SEQ ID NO: 6536 - RNA, 36 nt, Homo sapiens
gaggccagcagggggaaggaaaccgcagcaccagaa

SEQ ID NO: 6537 - RNA, 82 nt, Homo sapiens
ggcaaggacgagccagccacacgcaacgaggcgaggcggcgacggcggcgcgaggaccgaccgggcccgcggacgaagaagg

SEQ ID NO: 6538 - RNA, 66 nt, Homo sapiens
ccaaggagcccaggcgggaaggagccaggggggagcagggccacccagccgggaacagacgaaacc

SEQ ID NO: 6539 - RNA, 36 nt, Homo sapiens
ggccaacccaggaggaggaggaaacaaaaagccaac

SEQ ID NO: 6540 - RNA, 79 nt, Homo sapiens
ggagcacgcggccaacgagaaggaacaagaggacaagcaccgaggccgcggccacgggcacccggcaagcagaaccgag

SEQ ID NO: 6541 - RNA, 74 nt, Homo sapiens
aaaaaaaagggaaggaaaccccacacagggggacgaacccaacagaggaggaagaaacagcgcacacccgaacc

SEQ ID NO: 6542 - RNA, 78 nt, Homo sapiens
cccacgcacagccagcacccccagaaggccccaggaagaagagacacagcaggcgaaccacgacagcagagaagaaag

SEQ ID NO: 6543 - RNA, 75 nt, Homo sapiens
gggaccaaggccgagagccggaacaaacgagggcccgggaggaccgacgcagccagggaaagaagaaagcacccc

SEQ ID NO: 6544 - RNA, 65 nt, Homo sapiens
gcagacagcaggcaagaggggagaccaaagagagaacgaagcccgcagcgaggggggagagcgcc

SEQ ID NO: 6545 - RNA, 84 nt, Homo sapiens
gccggcgcaacccgcaccgcagagccggcgcccccggcaggccagccaggaaagcgggagcgcgggagcaaaggaaagaagaga

SEQ ID NO: 6546 - RNA, 79 nt, Homo sapiens
aggccgccagcagaggcggagcccgcagaccgcagaaggccggagacaccagcaggaaaaagacaagggcagagcagcc

SEQ ID NO: 6547 - RNA, 71 nt, Homo sapiens
gccaacaggcccacccagggaagcaacgaccagcgaaccacaggagacgaagagaccgcagaagcgaaaag

SEQ ID NO: 6548 - RNA, 81 nt, Homo sapiens
acgggccggcaggcggcacgacaccgcccaggcaacggcacggccccggcacgacacaaacgaagcgcgcggcaggcgcgc

SEQ ID NO: 6549 - RNA, 50 nt, Homo sapiens
ccacccacgagcccggcaaaagcgcacaaacgcccaagagggcccccaga

SEQ ID NO: 6550 - RNA, 73 nt, Homo sapiens
cagcaccggaagggccacgacaccccccagcagccgccaggagacaagacccggccgccggcaaccaacgcca

SEQ ID NO: 6551 - RNA, 81 nt, Homo sapiens
gccgcaccagcgcccagccacagaacagagccggcgggcccagggggagcagggccaaggacaagaagacaaaggcgcgac

SEQ ID NO: 6552 - RNA, 75 nt, Homo sapiens
cccaaaggcgggaaaggcggagccaccggccggcgaagagcccaaaagcaaagcagggcagcaaagaacacaaag

SEQ ID NO: 6553 - RNA, 87 nt, Homo sapiens
ccgaagcgcgcccggaacagcagcaccgcaagcgcccggcagcggcccgcgagggcgcccgcgccggcagaggaggcgagcacccgc

SEQ ID NO: 6554 - RNA, 69 nt, Homo sapiens
aaccagggcggcggccagcgccacgccgcaaggccacgcgggaaagggggaagcgacggaagcgcgagc

SEQ ID NO: 6555 - RNA, 44 nt, Homo sapiens
ccccgccagcccacagagggagaggccaacccccaaggagcgaa

SEQ ID NO: 6556 - RNA, 72 nt, Homo sapiens
gaccgagccccccaccgcagcgccaacgaggggagacagaacagcagcccggaggagccccgcagacaaacc

SEQ ID NO: 6557 - RNA, 70 nt, Homo sapiens
aggcggagcacccaccacggagggaaagaccaggcaggacgagggcgcacagaacgggaagaaagccaaa

SEQ ID NO: 6558 - RNA, 81 nt, Homo sapiens
ccggaccgggcccggaggagcgaacaaggcgacaacacagacaacaggcacaaagagagaaggaacacccacagggcagac

SEQ ID NO: 6559 - RNA, 80 nt, Homo sapiens
ggacagacagcacccaccggggacaggacaaagcccccagaacaccggggaaccacccggccccagaggcccggacaaag

SEQ ID NO: 6560 - RNA, 82 nt, Homo sapiens
gcggcaaccgaaagccagcagcgggcggacgaaagaaagaaggagcaccaacgcaaagaaaaagaccaagaagaccagggac

SEQ ID NO: 6561 - RNA, 68 nt, Homo sapiens
gaagacccagacccgcccgccagaaccgcgcgccacccacaaccagaccagacaaagggagcaccagc

SEQ ID NO: 6562 - RNA, 58 nt, Homo sapiens
accggagcaaccagccagacaaaaggaaaggaacggccacgaaccggaacagaacagc

SEQ ID NO: 6563 - RNA, 57 nt, Homo sapiens
gggcgccgagcaacaaccgccgagcggaaagaccacagcaagaccacgcccccagcc

SEQ ID NO: 6564 - RNA, 87 nt, Homo sapiens
ccagcgcacagcagaagcgccccggacccgcccggaggcagaaacacccaaagcgagaaaacccgcagcccaaagggcagaagaaga

SEQ ID NO: 6565 - RNA, 56 nt, Homo sapiens
ggcaaagggaccacggcaccgccccagggagccgggcgggaacacgcagggcccca

SEQ ID NO: 6566 - RNA, 76 nt, Homo sapiens
aaaaagagccgagggcaggggaacccaggcaggaacgcaggacacggacgacaccgagcccaaccgaccaaccaca

SEQ ID NO: 6567 - RNA, 73 nt, Homo sapiens
acaccgaagccaacaaaccaaggaaagagcaggaaaaggagcagagaggcaaagagcacacgccggagccggg

SEQ ID NO: 6568 - RNA, 83 nt, Homo sapiens
cagcgcagcagaagagcggaaagcaaacgggagggaccaaaagagcgcccgacacagcagggcgaggaccaccagacgcgccg

SEQ ID NO: 6569 - RNA, 81 nt, Homo sapiens
cacacagaacaaaagcaaaggagcgagggacaaaacaaagaggaaaaaaagaagagaacgcgaggaacagaaacaagaaaa

SEQ ID NO: 6570 - RNA, 76 nt, Homo sapiens
ggaccaggcagaagggagagcagacgcaaagaagccgccaggaggaagaaagcgggcaaaaggccgccgagggaag

SEQ ID NO: 6571 - RNA, 78 nt, Homo sapiens
acacggggcacccggaccggagaggaggggagaggaagaggaggccgagagacccagacgcacagggcgcgcgagccg

SEQ ID NO: 6572 - RNA, 73 nt, Homo sapiens
gaaaagagaaggcagggggagaaggaccacgaaaaacacacaacacgacgcagaccccaaaaggaagagggaa

SEQ ID NO: 6573 - RNA, 38 nt, Homo sapiens
cacggacccgccgcccgggggagagaaggaagagagaa

SEQ ID NO: 6574 - RNA, 75 nt, Homo sapiens
gcccacggagaacgccgcagggagagcccgaccagagaaaaggcggaagaccgccaaaaaggacacggagccagg

SEQ ID NO: 6575 - RNA, 80 nt, Homo sapiens
aaacgcaagcacgaagagcgaggaacccgacccagaaaaccagcgggaaaacacagagagaaacgaagcccaaagagaaa

SEQ ID NO: 6576 - RNA, 77 nt, Homo sapiens
caccccccacgcaccgcacaacaagaggccggcggggcgacaggcgagcggagacagaaagacgcccggagccagga

SEQ ID NO: 6577 - RNA, 65 nt, Homo sapiens
ggaggaggaccacgccgcaccccacaagaaaccagacggagacgggagagcgggcgaagcaagga

SEQ ID NO: 6578 - RNA, 81 nt, Homo sapiens
cccagaccccgggacggggaggaagagcgccgggacccggagcaagcaaagcgccaaaccaagggaagaagacaagagcag

SEQ ID NO: 6579 - RNA, 67 nt, Homo sapiens
agacagagggcgagaccaggagaggaaggaccaagacacggcaaggcccaaaacaccacccagagac

SEQ ID NO: 6580 - RNA, 79 nt, Homo sapiens
agacccgccagcagggggagaggcaaagacaccggcagagaaccaaagagcaggggagagaagacagaagaggggagag

SEQ ID NO: 6581 - RNA, 75 nt, Homo sapiens
cgaggccaggacagagagccagcaagccccagaacaaccacccaaaccgccaggacagcccgagccaagcagccc

SEQ ID NO: 6582 - RNA, 82 nt, Homo sapiens
gcgaccccagacgacgagaccggcgagggagcccaggcggcaggagagcaaggggcaacgaaggagacacacggccaagcgc

SEQ ID NO: 6583 - RNA, 71 nt, Homo sapiens
ccgcagccgcgcaaaaaaaaaaccaggacgggaccacgccagaaggaccagccccccaccaccccaagaac

SEQ ID NO: 6584 - RNA, 75 nt, Homo sapiens
gggggcgacccgggggcccgggcagcagagggcaccagaaaaaagaaaccacacacacgaagaaaaggaagaacg

SEQ ID NO: 6585 - RNA, 75 nt, Homo sapiens
gcccgccgggacacaccccaggaaaaagacagcccgcagcacgaccagcaggaacgccggaagaaaacccgagcg

SEQ ID NO: 6586 - RNA, 101 nt, Homo sapiens
acagacaccagaagacagcagacagaagaaaagacgaacaagaaaacccaggaggaacggggagaggaccacccgagcaaggcggcgccagacggcccccg

SEQ ID NO: 6587 - RNA, 66 nt, Homo sapiens
aaggaccaagaaccaggcacaggaagagggcggcacgcggccagagagcacaacgggaggaaggga

SEQ ID NO: 6588 - RNA, 58 nt, Homo sapiens
ggccggcaagagcggcggagcgcaggggagaaccggaagggccggagacaccagaaac

SEQ ID NO: 6589 - RNA, 86 nt, Homo sapiens
gcgccgggagcccccccccagaagccaagcggaaggcggaggaggacccggaggccgcggaagcgggggagagggcacagcgaagg

SEQ ID NO: 6590 - RNA, 61 nt, Homo sapiens
caccgccggcgcgggaaacgggcgaagcgacgagccgcgaggagggaaacccagacgacaa

SEQ ID NO: 6591 - RNA, 76 nt, Homo sapiens
acaaccacaggcagagagggaaggcaagacgccaccaaacccaaaagcaaggcaaggggccacccaccccaaagcc

SEQ ID NO: 6592 - RNA, 54 nt, Homo sapiens
cagaagcgcaacaaacgggggagaggcaccagcaacagaccaaccgcagcaagc

SEQ ID NO: 6593 - RNA, 70 nt, Homo sapiens
cagaaagggcgacaggccaccaacacacgggacaacaagagccaggacgccagcaaacaggcaacggcac

SEQ ID NO: 6594 - RNA, 80 nt, Homo sapiens
ggccaaggccacccaagaacggcccgccaccggagacaacgagaggaggacccaaggccagccagccccaggcaccagcg

SEQ ID NO: 6595 - RNA, 95 nt, Homo sapiens
cgcagccacaacaaagaaaagcagggcacagaggacaaaggccagcgcaacggaaacagaaaagagcgggaaccagccaacagaaacaacacaag

SEQ ID NO: 6596 - RNA, 78 nt, Homo sapiens
gcccacacacagggaaaaaggagcagcccgggcaccacagaaaaggcggcagaggagaaagagcacaaaagaggcggg

SEQ ID NO: 6597 - RNA, 76 nt, Homo sapiens
ggggcccggggaaggcccgccgcccgccccagggaaggagccaagacccaaggaccgccccagaaccacaacaccg

SEQ ID NO: 6598 - RNA, 79 nt, Homo sapiens
agcggcgcggcagaggcggcgcagcgcagcccgaggcccaggcagcgcagagccaacagacgagcagaagccgcaagga

SEQ ID NO: 6599 - RNA, 40 nt, Homo sapiens
ccccggcccccgcggcaggaggcgaaggcagggcggacgg

SEQ ID NO: 6600 - RNA, 82 nt, Homo sapiens
aaccgacacaggcaccgcaccagcccgcggaccggagaagccccagaacaacagcacccgaagcgggcccgaagccaagcag

SEQ ID NO: 6601 - RNA, 71 nt, Homo sapiens
ccgccaagccaaaccgccaccagggcagccaccaaccgcagccagcagcgcagcgcccgcagccacgcaac

SEQ ID NO: 6602 - RNA, 75 nt, Homo sapiens
ccgagggcgggacacagaaccgaaagggaaccgagaggagacgaggaaacccagcagcagagaaagacccaacgc

SEQ ID NO: 6603 - RNA, 82 nt, Homo sapiens
cggcagcaagaacagagagagaggggacagacgagagaacgagacccggaggagcgcaccgccaggggaaacggagaagagc

SEQ ID NO: 6604 - RNA, 83 nt, Homo sapiens
gcacagggggaagcccggagcccagggcccccgggcagcggcaggaccacgcaggacgccaccccaggcgagcagacgccaag

SEQ ID NO: 6605 - RNA, 55 nt, Homo sapiens
aggaagccacggcagacacacaacccgacccgacgaggcgcccgaccaggagcac

SEQ ID NO: 6606 - RNA, 74 nt, Homo sapiens
accacaaagagagagaaagcccggaccggggcgaggagagaggaaccacccaggaggaggggcgcagaccccca

SEQ ID NO: 6607 - RNA, 123 nt, Homo sapiens
ccgacagcccccaggccaccggaaacccgggggcagcgggccgaccaacccgaaaacagcagaaacacccgaggacccagagaccccacggaccagagagcaggagcacaaagccgccgacaa

SEQ ID NO: 6608 - RNA, 66 nt, Homo sapiens
cagacccaaacaacggcagaagcaggggaaaccgcacgcaacagccaagcacagcgccacgggaaa

SEQ ID NO: 6609 - RNA, 61 nt, Homo sapiens
gcaagaaaaggagccggaaacggacaaacagggcaggccaacacacgggacgcggggcacc

SEQ ID NO: 6610 - RNA, 75 nt, Homo sapiens
aaaaggggacggagcacaaacggaggaaacgacaaaacggagcaggacccaggcccaaaaggaaaagccagacac

SEQ ID NO: 6611 - RNA, 74 nt, Homo sapiens
acagaggaaaccagacccggaggaacggaccagagagaccccggaggggcggaagcgaacaacagcacggccag

SEQ ID NO: 6612 - RNA, 53 nt, Homo sapiens
agccggccgaggaccagggacaacagagccagacgagacgacgggaccgaagg

SEQ ID NO: 6613 - RNA, 71 nt, Homo sapiens
acccccaagagcacaggcagaaggcacaaggaggcccacgcggaccggcagcgccaccggaccaccagaca

SEQ ID NO: 6614 - RNA, 80 nt, Homo sapiens
cccggccagcccccacaacggggaccaccgccccagcagacgcggaagggcaacacacagaaggaagccaggaagaagcc

SEQ ID NO: 6615 - RNA, 78 nt, Homo sapiens
ccagcgaaaggacggcccccgagccgcccaagcccgggccagggccaccccggcgaggcaaacacgcgagagggagaa

SEQ ID NO: 6616 - RNA, 62 nt, Homo sapiens
ggaccagaccgaccaccaaaaaacagaagggaaaagacagcaacagagcgccaaagaacagc

SEQ ID NO: 6617 - RNA, 73 nt, Homo sapiens
cccgccgggacacaccccaggaaaaagacagcccgcagcacgaccagcaggaacggaacagagacaacaaaaa

SEQ ID NO: 6618 - RNA, 42 nt, Homo sapiens
cagcccgagaccgcagcagcagccccgcaaagggaacaggaa

SEQ ID NO: 6619 - RNA, 82 nt, Homo sapiens
gggaagaaggaacacgaggcagggggccacacgcaaggggaacagaaaaacaaccaccagcgagcaaaaaggcaaagaccaa

SEQ ID NO: 6620 - RNA, 53 nt, Homo sapiens
ggagacggggagaagcgcaggagaagaggaggacaaacagaggcgaagaaaca

SEQ ID NO: 6621 - RNA, 69 nt, Homo sapiens
acaaacccaggaaaaagccaagagagaccggagaacgcgacagcaacggggcggcacacaaggagcgaa

SEQ ID NO: 6622 - RNA, 81 nt, Homo sapiens
caagaggccaaggcgacagccacaggagacacgcgcgcacgaagcccagaccggccggacagaaacggaacacaaccgcag

SEQ ID NO: 6623 - RNA, 75 nt, Homo sapiens
ggcacgcggcccaacagaaggcaccaccccaagaaaagaggaggaggagagggaaccagagcgccgggaagcgga

SEQ ID NO: 6624 - RNA, 68 nt, Homo sapiens
gaccagaaacacacagaccaaagcgggggccgccacaagccaacgaggggaaggaccaaaaaacagag

SEQ ID NO: 6625 - RNA, 79 nt, Homo sapiens
gcgcaggggccaaacacagaacagcaaagaggaggccagcgcggccagcagaaggagagggcggggacacagcgggcag

SEQ ID NO: 6626 - RNA, 56 nt, Homo sapiens
ggagaagaaacggcaacgcggaaaaaagccggggggacgcggacagcgcccaaggg

SEQ ID NO: 6627 - RNA, 78 nt, Homo sapiens
gagaaccccacagcgaaggaaaagaagaaacaggacgagaagaggccccccaaaggacacaggacagaccgagaacga

SEQ ID NO: 6628 - RNA, 92 nt, Homo sapiens
gcagcgcggccccgaccccaaggcggggaccccggcgaaaaaggcccggagaagaaggggacagccaccggaggagaaggagcgaaggagcg

SEQ ID NO: 6629 - RNA, 69 nt, Homo sapiens
acacccgaacgggggacaaggaggccagcccagaacaaagcaggccacggaaggagcacacaaaacaag

SEQ ID NO: 6630 - RNA, 78 nt, Homo sapiens
gcaccccggaacagcgccgaggcccaaggcagaggcgaggcggaagggcaccccacccgagaacacgcgaacgagaac

SEQ ID NO: 6631 - RNA, 66 nt, Homo sapiens
ggcggccccccgcgcacagaacgaccgagacaggggcccggcaccgcgcccgagcccacccacaga

SEQ ID NO: 6632 - RNA, 39 nt, Homo sapiens
acacaccccaaaacggcccacgacccagccgcagggaaa

SEQ ID NO: 6633 - RNA, 67 nt, Homo sapiens
ccaagaaaaaaaccacaaagcggccgaaacagaaaacaagagaccacagaagcaaacgccacgcacc

SEQ ID NO: 6634 - RNA, 91 nt, Homo sapiens
ggcggagggcgcgggccgaccgggcgcaccgaccaggccccaaagccccaaggcgacaagaccggaccgcccgccaggagcccggaagggg

SEQ ID NO: 6635 - RNA, 38 nt, Homo sapiens
gacacaaacacccagcgcagagcacgaaagcccaaaac

SEQ ID NO: 6636 - RNA, 71 nt, Homo sapiens
caaaaacaaaacgaaccaggacggcaagacgcggcgcagcaacaaacagcggcgacaaaccgagacagcac

SEQ ID NO: 6637 - RNA, 72 nt, Homo sapiens
gcccagcagccggccaggaagacaggaagggaaggggcggagacgggcggaacgcaggaggccagaggacag

SEQ ID NO: 6638 - RNA, 72 nt, Homo sapiens
cccaccgggcaaaccgcggacacaggaagggaaggggcggagacgggcggaacgcaggaggccagaggacag

SEQ ID NO: 6639 - RNA, 57 nt, Homo sapiens
ggcccaccagccaccccaccgcgcagggagacgggggcggccagccaggaagaaacc

SEQ ID NO: 6640 - RNA, 62 nt, Homo sapiens
aggacccgcccagccccccagagccgggaacagcgaccacagggccgagaagcgcgcggcgc

SEQ ID NO: 6641 - RNA, 84 nt, Homo sapiens
ccgcccacgcccaggagaggcacaagacaaaagaccccggggggcaacgaggaggaccaccgcgggcacccagcagaagggggg

SEQ ID NO: 6642 - RNA, 77 nt, Homo sapiens
ccggcgcacggaagaaacagcccaggggcagcgccccccgaaacaagacgcaggccagcagaacgaagcggggaaca

SEQ ID NO: 6643 - RNA, 73 nt, Homo sapiens
cgacgagcgcaaggagagggcacggagcgagcagaggaggaggaaacccggaacacgcagaagaagcaagaca

SEQ ID NO: 6644 - RNA, 53 nt, Homo sapiens
gccccagcccgagcccccccaggcggagcgcagggcacgaccaaccaggcaac

SEQ ID NO: 6645 - RNA, 85 nt, Homo sapiens
ccccgacagagacggcggagaccccgaaggcgcaaacgacaccacccgaccggaagaagagagggcgaaggaggccacacagaag

SEQ ID NO: 6646 - RNA, 77 nt, Homo sapiens
ccaacaccagcaccgcagaggcaaggggccaccaggaggccagggggcgccagggccgcggcaccacacagaaaccc

SEQ ID NO: 6647 - RNA, 55 nt, Homo sapiens
gccgccaccaccgggaggcaaagcgggacagggccccgggcgcgggagccagccg

SEQ ID NO: 6648 - RNA, 76 nt, Homo sapiens
gaagacggcccaaaacacagcgcaccacacacagagggaaacggaaaggcagagcgaaggaaaaccagagaaaaaa

SEQ ID NO: 6649 - RNA, 70 nt, Homo sapiens
gcaagggaaagaacccggcggggaaaagggaaggaaaagagacgcagaggagaagcgcggcgaggagacc

SEQ ID NO: 6650 - RNA, 39 nt, Homo sapiens
gaacaggcacgagcgaaccgccgcggagagaacggacca

SEQ ID NO: 6651 - RNA, 72 nt, Homo sapiens
acgaacacggaccgcagccgccaggcggcccgcaccccgcgggggcagggaggaaagcaagcccgaagaaaa

SEQ ID NO: 6652 - RNA, 56 nt, Homo sapiens
cgagaacaaaggagagccaggcagccagcacgagcccccccaccaccacagccccc

SEQ ID NO: 6653 - RNA, 81 nt, Homo sapiens
gggcccggaccggcacccggacaggaggagccagggcccggcccgaaaggagagccacaggccggggagaacaggcaggag

SEQ ID NO: 6654 - RNA, 75 nt, Homo sapiens
ggcgcggcagcggagggacggcagccgcgcgggcaagacggacgagacgcgcgggcagaggcagaacggcgggag

SEQ ID NO: 6655 - RNA, 72 nt, Homo sapiens
ggacggggacgagaaaccggaggagcaggaaagaaaccccagaaagcgagaagagagcggacccacaccagg

SEQ ID NO: 6656 - RNA, 60 nt, Homo sapiens
gggaagcaggacgcgccgcgccccaaggaagcccggggcggcgacggagcacgacccaag

SEQ ID NO: 6657 - RNA, 51 nt, Homo sapiens
agcggccgcgcacccccggccggaggcaccagcgcggggagaccgcggggg

SEQ ID NO: 6658 - RNA, 79 nt, Homo sapiens
cccagcggcacccgcccagcgggggggcagcagaagcccagagcccagacgcagcggacaggcaagacaggccaccacg

SEQ ID NO: 6659 - RNA, 81 nt, Homo sapiens
cgaccccggagaagcggaggaacgcaagcaccaccacacccgacacaggacacagaacagagaagaagcagacgagacaga

SEQ ID NO: 6660 - RNA, 51 nt, Homo sapiens
ccaggaacaaggagcgccagaaaccgggagaagccggccaggcaggcacac

SEQ ID NO: 6661 - RNA, 111 nt, Homo sapiens
gcgaaccgcccgggggacagggagaaccgaacaagcccagcgaagcgggcacggggcgggggagaggcaccagcaacagaccaaccgcagcaagcacagagacaggaagcc

SEQ ID NO: 6662 - RNA, 59 nt, Homo sapiens
ccgccacaccagaaagagaagaggagagaaggcgaggaagcccaagcacaaaggagaag

SEQ ID NO: 6663 - RNA, 38 nt, Homo sapiens
cccggagcggccgccccagcgcacagccagggcgaaag

SEQ ID NO: 6664 - RNA, 75 nt, Homo sapiens
gggacagggggccgacgcaggaaaggcaaacgaccgccagaagcagcgcgacggagagccaagcccggggaagaa

SEQ ID NO: 6665 - RNA, 63 nt, Homo sapiens
ggcaacacagggacgcccagaaggaacgcaggagccaggagcaggggcgcggcagaggcgcgg

SEQ ID NO: 6666 - RNA, 74 nt, Homo sapiens
ggcccaccgcaaccggcccgaacgccggcggagaaaccaccacaaacacgaggccagcaacgaccaacaagaca

SEQ ID NO: 6667 - RNA, 65 nt, Homo sapiens
gaggccgcgcggacaaggcagcgccaaaccgggccaacgaccaaaaaaacgagggccagacagag

SEQ ID NO: 6668 - RNA, 89 nt, Homo sapiens
aaagaggccgccccggcccgcgcagggagccaaaaggaggacgcggcgccgggagagcgggcggaaagcaggagcccggaaaggagaag

SEQ ID NO: 6669 - RNA, 54 nt, Homo sapiens
cccagagaagagaagcacgggccagcccaaggaccaaaggccgaaaccagcgca

SEQ ID NO: 6670 - RNA, 84 nt, Homo sapiens
gggcaacacccgagaacggcgggaagagaagacacgagcacaaacgaaagccaacaggcagaccagagacagcgccacgcaccc

SEQ ID NO: 6671 - RNA, 57 nt, Homo sapiens
agggggaagcggcccagggagggaaaagaacagcaggaagaggccgacccccccgga

SEQ ID NO: 6672 - RNA, 86 nt, Homo sapiens
gagcagagagaccgcaccacccgggagccccccaacagagcgagagaggcacggagcgcagcaggaccagcgagagccccgccccc

SEQ ID NO: 6673 - RNA, 77 nt, Homo sapiens
gacagcaaacggaaacccccaggcaacccacacccgcagaacacaaccgcaacaaagcaaacaaaggcacaccaacg

SEQ ID NO: 6674 - RNA, 84 nt, Homo sapiens
gggaggcccgccagaccagcaagaggaggggcccggagagggggaagggcccaaagccagaagaggagccgccgcgcccaggcg

SEQ ID NO: 6675 - RNA, 76 nt, Homo sapiens
gaaagcaaggacaggcacgccacacacagggagcgagcacaaacgacacacgcaaaccacaaagcccagcaacccg

SEQ ID NO: 6676 - RNA, 73 nt, Homo sapiens
gggaaagcagaaaggaacagaggcagacagaacggaaagagcgaggccggaaccaccgcaggcacggggaccc

SEQ ID NO: 6677 - RNA, 100 nt, Homo sapiens
aaccaaccagcgacccggaccagccgggggcagggggacagaaaacccccagcccagggaagagaacggaccgcagcagcaaacagaaggccgagcaccc

SEQ ID NO: 6678 - RNA, 72 nt, Homo sapiens
acccccgacagggacacagggagccccagacccacagggcggagaacggaaaagcaccaggaagcagagagg

SEQ ID NO: 6679 - RNA, 75 nt, Homo sapiens
gaagagcggagagaaaagaacaggggggcgagggccaaagaagacagcaaaacaaccaaccgaagaagaggagga

SEQ ID NO: 6680 - RNA, 84 nt, Homo sapiens
cagaaagcccacgggaccagcacggcgcccacacaggaaccagggcacccacaagcccccacccacccggcccacaccaagacc

SEQ ID NO: 6681 - RNA, 85 nt, Homo sapiens
agcccccgcggcgacagcggaggcgccgggccgagccagggcccccagaggagagaaggagggaccgccgggccaccagaaagag

SEQ ID NO: 6682 - RNA, 45 nt, Homo sapiens
aaccaagcaaagcccaagggcaacgcggggcgagccacagagaca

SEQ ID NO: 6683 - RNA, 41 nt, Homo sapiens
agcgccgagcaaggagccgagaggaacaagagccaacaagg

SEQ ID NO: 6684 - RNA, 102 nt, Homo sapiens
ggaccaaaggccgggcgcagaacccccagaccacacaaacggggacagcgccgaccggaacagggaccacggaagcccaggaccagccccgacaagcccaag

SEQ ID NO: 6685 - RNA, 79 nt, Homo sapiens
ccaccaggaggcggcacacaacaacgccaggggacccaagggagagagggaacggcgaaagggcagcccggaaggagca

SEQ ID NO: 6686 - RNA, 35 nt, Homo sapiens
cggacagaagccacagacgaggaggcgagaccagg

SEQ ID NO: 6687 - RNA, 80 nt, Homo sapiens
aagacaacgaccccacagaaacaagccaccaggagaagcaaaagaggggacccccaaaagacaagggcaaaacggaccag

SEQ ID NO: 6688 - RNA, 67 nt, Homo sapiens
cgcacaccacggcccgggaggacaccaggaaagcaaacccgaacaagaaaggaaccggagacggcca

SEQ ID NO: 6689 - RNA, 81 nt, Homo sapiens
cggggcgaagaagcagcacaaggcgagccaggcggcggccggggcagcgccgcgagccagcaacgggggaaggccacaaca

SEQ ID NO: 6690 - RNA, 40 nt, Homo sapiens
accaggagcccgagagagaagggaggcgaaggacaccaag

SEQ ID NO: 6691 - RNA, 83 nt, Homo sapiens
gggcaaccagacgggccaagcagccccaggagcagaggcccgaaggaggccaccaaggagggcacacccaggcagagaagcga

SEQ ID NO: 6692 - RNA, 76 nt, Homo sapiens
gcagacagcggcaacagaagccagaccggcgcgagaacaacgggggcaagcccaggacaccaaaacaccagaacag

SEQ ID NO: 6693 - RNA, 75 nt, Homo sapiens
ggcggcgcgcgcggcgcgggacgcgcgcgggcacccacggagccccggggcgagaagaggggcaaggccaggccc

SEQ ID NO: 6694 - RNA, 68 nt, Homo sapiens
acggagaaaacccgcgacgccaaccacgacgaagcggaaggcagaaggggcgagcaacaaggaacgaa

SEQ ID NO: 6695 - RNA, 57 nt, Homo sapiens
acgggagacacagacacaccgcgccgcccaagagagagaagagaggcgcgagggcag

SEQ ID NO: 6696 - RNA, 72 nt, Homo sapiens
ggcgaacgagggaccaagcacgccagaaaggaacgggcgcaccacgccaccccgccacgagagcaggaaacg

SEQ ID NO: 6697 - RNA, 90 nt, Homo sapiens
gcgcgcgcaccagggggagaaacccgggaccaggaccagggagcaacaagagcaagcccaaggagccagccagcggcgccgcagccggag

SEQ ID NO: 6698 - RNA, 63 nt, Homo sapiens
ccggcgcagggcggaaggacaacagcccgacaaccagaccgggagaagacaggaagaccggaa

SEQ ID NO: 6699 - RNA, 71 nt, Homo sapiens
gagggacaacccgaaagaacaacgccgaaccaggcaggaagcgccccgcgacagcccccaggaagcgagac

SEQ ID NO: 6700 - RNA, 108 nt, Homo sapiens
agagaccccagacgccgaggccccagaacaagcggagccaccggcaccacgggcccaagcccgcaggcacagcgagcacaccacggccccgacccagggccagaagcg

SEQ ID NO: 6701 - RNA, 59 nt, Homo sapiens
ccgggcggagagaaccagcgaggacgaggaccgccagcagcagccgaaaacgcacaaga

SEQ ID NO: 6702 - RNA, 72 nt, Homo sapiens
ggaccaggcgggcccaggccgcaagagcccgggaagcgcagagggaacacggccacgaggggaacgggacag

SEQ ID NO: 6703 - RNA, 35 nt, Homo sapiens
cccccccccccccaagggaaggcaagaagaagaac

SEQ ID NO: 6704 - RNA, 101 nt, Homo sapiens
ccgagagaggaggagccagacgacaagcacacacaggcgcgaaacggaaaaaggaacgcgaagagacccccaggccaaagcacccaaaaaccagcccaaac

SEQ ID NO: 6705 - RNA, 72 nt, Homo sapiens
cagacggccaaaacaacccgcagccaggaacgagcagagcgacagcgaagcgcagcaacacaagccccaggc

SEQ ID NO: 6706 - RNA, 73 nt, Homo sapiens
aagcgcaggacgagaaggaggacgcaaaagagggaaacgcggccgaaacacagaaggaaaacgcaccacaaac

SEQ ID NO: 6707 - RNA, 83 nt, Homo sapiens
cagcccccacaacagggaagcagccccaaggccagcggagccagcacccccacaagcagcaggcaccccacggcaacgcgggc

SEQ ID NO: 6708 - RNA, 88 nt, Homo sapiens
cccggagcccggagaaggggacgcggagggcgacgccgagggccagcgggacggagcagggagaggagcaagcaagggagcgacagga

SEQ ID NO: 6709 - RNA, 71 nt, Homo sapiens
ggcaggaaccagaggaagagaggacaccgacagagcaccagacaaagcagagcccacagacaaggccaaag

SEQ ID NO: 6710 - RNA, 73 nt, Homo sapiens
gggaagaagacggcagaagggcccacacagacgccgagagaagcgaaaggaaggaaacagaacgacagcccgc

SEQ ID NO: 6711 - RNA, 72 nt, Homo sapiens
agcccgcgccacaaggaggacagaggcacagcgccagagcaaagaggaggcgacagaccgcgcacagaaagc

SEQ ID NO: 6712 - RNA, 68 nt, Homo sapiens
ggaacaggcagagaaaaaccgccccaccgggagaggacgccccgcccccagagaggaacgccccaaag

SEQ ID NO: 6713 - RNA, 40 nt, Homo sapiens
ggccgggagcggaggaaaaaacagaaaagggacgcggaag

SEQ ID NO: 6714 - RNA, 84 nt, Homo sapiens
aaccccccaaccaaaaccagaagcagggccgcccgcagccggaggaagcacgaaagccccccaaggagaggccacgcacgggcc

SEQ ID NO: 6715 - RNA, 67 nt, Homo sapiens
aaaacagaagaacacggcacaccaacccaagaggcgaagaggcgaaagcccgcaaaaaggccacggg

SEQ ID NO: 6716 - RNA, 36 nt, Homo sapiens
accagcgacccggcccagggacaaagcaaaaaacca

SEQ ID NO: 6717 - RNA, 65 nt, Homo sapiens
aagaaaaacaaacacacgcaaaggagaaaggaaccgacagggggagagagggagcaggccaccgg

SEQ ID NO: 6718 - RNA, 67 nt, Homo sapiens
cgggacccgacgaggcccgcccccgccgccgcccgcagcccagcgcagaggcgagggcgccggcacc

SEQ ID NO: 6719 - RNA, 77 nt, Homo sapiens
gaaggcaggggcgaagacacaggccaggcggaagaagagaggggcgccaggcggcacggggaggccgagagaggcgc

SEQ ID NO: 6720 - RNA, 79 nt, Homo sapiens
gagaaggacgaacaggagaccccacccggagggcaagcagcccggccagggacagcgcacagcagggaaccacgaacgc

SEQ ID NO: 6721 - RNA, 78 nt, Homo sapiens
ggacgcccagaaagggcgacaggccaccaacacacggaagaagagccaaagcccaggacggggaaacagcagagagca

SEQ ID NO: 6722 - RNA, 70 nt, Homo sapiens
gacaagagacagcagaacgagggaagcggcgaaggggggccacgaggggagggagcggagagaaaggcaa

SEQ ID NO: 6723 - RNA, 56 nt, Homo sapiens
ccaacaccagggaagagacacacccagagacaagggcagagccaagcgccgcccgg

SEQ ID NO: 6724 - RNA, 84 nt, Homo sapiens
agaaaggagccggccagaccccaccaaggagggcaccaacgccgccagaccgccagagcggaacgaccccagagcgagcccgca

SEQ ID NO: 6725 - RNA, 76 nt, Homo sapiens
agagcaaggcgcagaagacagacccacggaaggggcagggaagaaggggcagagcgggaacacagccccacgggcc

SEQ ID NO: 6726 - RNA, 60 nt, Homo sapiens
ggagggcaccgaaggagcaacgcggagcgcgggagcacgcgccgacccaccagaccaagg

SEQ ID NO: 6727 - RNA, 79 nt, Homo sapiens
accccgaaaacggaccaccaaccacaaaaaaaaagaggggaaccaccagaacagggaccaagaaaggcccagggaccaa

SEQ ID NO: 6728 - RNA, 71 nt, Homo sapiens
gcaagacgccagccacaggacggaaagaaagccaggaaaggccgaaggagcgcgagccacaaccagcgcac

SEQ ID NO: 6729 - RNA, 57 nt, Homo sapiens
gcaagcggcgcgagcggcgaggaagaacaagagcaggaaacaccaaaaaacccagag

SEQ ID NO: 6730 - RNA, 63 nt, Homo sapiens
cacaggacggagggggcacagacaggcagaagcaccaccgggagaaaccggaagaggaaaccc

SEQ ID NO: 6731 - RNA, 74 nt, Homo sapiens
gagcaaaggcagccgagcccgaagaacaacagaagaagaaagcgaagaaagccagacggagaaggaaagcacac

SEQ ID NO: 6732 - RNA, 80 nt, Homo sapiens
cccagaagagaccaacgccaccaaccaaccggacagcccgaagaaggagacaggagaagagcggaagaagcacaagagaa

SEQ ID NO: 6733 - RNA, 68 nt, Homo sapiens
gaggccccagcggaccgaacagacaacgaagagaggaaagaagcggaaaggagggagcacacaacaag

SEQ ID NO: 6734 - RNA, 80 nt, Homo sapiens
cgggcgccccgcaggacacaagggacacgggaacacagaggagccaagcgcccgccggacaacaagagccccaacagagg

SEQ ID NO: 6735 - RNA, 76 nt, Homo sapiens
gcagaagaaaagggacgcaagaaacccaggacgagaacagcaacagcgcagaaccggccgaaaagcacaaacagca

SEQ ID NO: 6736 - RNA, 76 nt, Homo sapiens
gggcacgggagcaggaagggggccccaggacccggacagacccaaaagggaaaaaggaaaaccagaagccagccgc

SEQ ID NO: 6737 - RNA, 82 nt, Homo sapiens
gaacaagacagccagagaggcggcaaacaggacaagagggaaagacagggccaccaggagggcggaggaagccaaaaagcag

SEQ ID NO: 6738 - RNA, 86 nt, Homo sapiens
cacacaggagaccaggcaccagcaccacggagcacaagaaaagcaggagcccggaaaggagaaggaaaagacggcaggaggaagag

SEQ ID NO: 6739 - RNA, 61 nt, Homo sapiens
acacaagcaagaacagaagcaggccgagcggccgggcccaagaagcacgaagcgggggcag

SEQ ID NO: 6740 - RNA, 77 nt, Homo sapiens
aagcacgcaacaagaggaacccgcacagaagaccacgggagaaacaaagaccacaccaggacggggaggacgcacga

SEQ ID NO: 6741 - RNA, 97 nt, Homo sapiens
acacccagggaggggaggcacagaaacgacgggcacacggagggagaacgaggacaagaagacacaaggcagaagcccaggcgagagcccgcccccc

SEQ ID NO: 6742 - RNA, 81 nt, Homo sapiens
ggccccgagccggcccgggcgaggaaaagccaagaaagacccaaaagaccccagaccagaaagaggcgccaagcgagaacg

SEQ ID NO: 6743 - RNA, 72 nt, Homo sapiens
aaaggccaaagaagccaaagacgcacagaagcacaaaacgaccgcaagacgaaggacgaccacgcagcaaaa

SEQ ID NO: 6744 - RNA, 73 nt, Homo sapiens
agaagaaacaagcccaggaagaaaaacaaggcgaaagcgcccgcaaacgcagggcgagaaaacaaaaaagcag

SEQ ID NO: 6745 - RNA, 68 nt, Homo sapiens
gcgggaaggagccggaggcggcgaggagcgccgccgaggagagcagaaccaccgggaggaacgggcca

SEQ ID NO: 6746 - RNA, 73 nt, Homo sapiens
ggaagagggccgccaaaccaggaggggccggccggacgacccccgccaaggacacacgacccccgggcgccgg

SEQ ID NO: 6747 - RNA, 71 nt, Homo sapiens
gaaggaccaagaaccagaaccggaagagccacccgagaaacccgcagagccagcccgcagccagaagccac

SEQ ID NO: 6748 - RNA, 66 nt, Homo sapiens
agcccgcaaagcggagaccgcccaacgcgaccggaagacaaggcaagcaccggcagaccgagcagg

SEQ ID NO: 6749 - RNA, 77 nt, Homo sapiens
cggcagaaccaaacccaccgcaagacagggaagcgaaacccccaaagagaaagaagaagaaaacgagacccaaaagg

SEQ ID NO: 6750 - RNA, 83 nt, Homo sapiens
ggcgcgcaggccgcgacgagggcgcgagccacagggcaggcggccagcgcgcgaaagcacgaaggcggcagccaggggcccgc

SEQ ID NO: 6751 - RNA, 65 nt, Homo sapiens
ggagcccgcgcccgccgcgggagagaggacccccccccccccccaagacaccgaaaacgagaaac

SEQ ID NO: 6752 - RNA, 71 nt, Homo sapiens
cacagagacgagcaggacaggacagggcgagaccacagaaacccacacccccacccaggccacagcagcag

SEQ ID NO: 6753 - RNA, 75 nt, Homo sapiens
aaacaagacccagcagaccgaggcccccagccggccccaaccaaggcgggccgcagagagcaccggagagcacca

SEQ ID NO: 6754 - RNA, 76 nt, Homo sapiens
cacagagcacaccaaaggagacccccggggccccaagacccccaggcggagaagaccgcagcgaaggagagccgcc

SEQ ID NO: 6755 - RNA, 74 nt, Homo sapiens
ccaccccagcccagaaagaggagccccgacccccggccccagcaaacgcaccgcaccaacgaccgaagcaccag

SEQ ID NO: 6756 - RNA, 71 nt, Homo sapiens
aacggaaccagcgccgaggcccccgcgggcgcacacaggaaggcggagggaagaagggaaaacggagacac

SEQ ID NO: 6757 - RNA, 72 nt, Homo sapiens
ccacagccaagagacagaaaaacagcggcaggcagggggagaggcaccagcaacagaccaaccgcagcaagc

SEQ ID NO: 6758 - RNA, 88 nt, Homo sapiens
aaaaccccccccaagaagccagaacccaggcacaacgcccggggaaagaagaagccacacacagaagacccaaagagaacacaggaga

SEQ ID NO: 6759 - RNA, 77 nt, Homo sapiens
cagacggaagcaagaggcagagcaggggcagccacaggacaaagcaaagaacaccagcacccagacaggagcgaaca

SEQ ID NO: 6760 - RNA, 69 nt, Homo sapiens
cggaaacgaccggcagggagggaaggcaagagccaacccaaaaccaagaggagaaccaggaccaaagca

SEQ ID NO: 6761 - RNA, 76 nt, Homo sapiens
acccagacagaaggggacaagaagcgcgacgggaccacaaaaacggaagacgggccgaagaccagacacaggaccg

SEQ ID NO: 6762 - RNA, 74 nt, Homo sapiens
ggagggaaccagcaacaagccgagagaacccaccgcaagagaccaaaggccaagagcaccgcagccaccagccc

SEQ ID NO: 6763 - RNA, 70 nt, Homo sapiens
acgcacgcgaagcaaggagagaagacggaaggagccgagacagggggagcgggaaaaacaggaccggaga

SEQ ID NO: 6764 - RNA, 85 nt, Homo sapiens
cccaacccggaccggggacgcacggaccaaaaacccgcaacagcccccgcccaagcgcaaaacgggaacgaaaggcaacgacaac

SEQ ID NO: 6765 - RNA, 75 nt, Homo sapiens
gaaaaagcgcggaagggcccccgggggagccggcggcggaccccgccgaccaggaaggggcaggaccagcgcccg

SEQ ID NO: 6766 - RNA, 85 nt, Homo sapiens
gggcaggaacccagaaagaagaaagggaccaagaaaggcccagggaccaaagcccggacaaggcccgagcaccaggaccgcagaa

SEQ ID NO: 6767 - RNA, 86 nt, Homo sapiens
ccaggaggacgacgggaccgggaccgcgcggacccggccgggagaagcagcagcgcaaggggacacgagcagcggaccccgcggcc

SEQ ID NO: 6768 - RNA, 51 nt, Homo sapiens
aacagagcggaacgaacaaggggcaccaagaagagagaaagagaccaagca

SEQ ID NO: 6769 - RNA, 79 nt, Homo sapiens
acacggggaagcgcaaaaacaagacggggcgccccacagaggggcgacggggaaccgcccaaaagcccgccagaagaag

SEQ ID NO: 6770 - RNA, 80 nt, Homo sapiens
aaaagcaacaaagagggggaagaagagggaaggcgaccagccacgcaaccccccacaacaacaaggacagcagccacaag

SEQ ID NO: 6771 - RNA, 65 nt, Homo sapiens
gcgccccagcagacgcccccgccaccccacaccggagcccccaaaggaccaaaacgcaaccaagg

SEQ ID NO: 6772 - RNA, 73 nt, Homo sapiens
gcagccacacaccccgagaaagcggaggacaaagaaaaaaggaaaggcagcagcaccaaagaacacaaggaac

SEQ ID NO: 6773 - RNA, 76 nt, Homo sapiens
cgcccaaaccaaaggagaagagaccacccacacaggagaggccaggaggaacagaccagcacagggggcagacgag

SEQ ID NO: 6774 - RNA, 78 nt, Homo sapiens
gaggaaaacaaacaaacgcaaacgggaacgaagggagagcaagacaggcgccaaacggccacaggcggagcaaggcga

SEQ ID NO: 6775 - RNA, 84 nt, Homo sapiens
agggccgaacgccagggacgagcccgcacagggggaacccacgagccggaaggcagcgaacaccgcccacggccggagcgcacc

SEQ ID NO: 6776 - RNA, 79 nt, Homo sapiens
agggagcccccaccaagccccagagcgggaggggcaggacggggcagggagaaaggaaacagcagaagcggagagagcg

SEQ ID NO: 6777 - RNA, 35 nt, Homo sapiens
acccaggaggcagaagccaggaaagcacaaagcgc

SEQ ID NO: 6778 - RNA, 82 nt, Homo sapiens
ggacacgagccgagggaggggaaaggcgcagggccaaaacagaagaggcaaagcccagccacagcagcagcccagcagcaaa

SEQ ID NO: 6779 - RNA, 80 nt, Homo sapiens
aggccccggcgagcaggacagcagcgccgagaaacccaccgcccaccacacaggacacccagcggagcaacccaccccgg

SEQ ID NO: 6780 - RNA, 79 nt, Homo sapiens
aaagacgcacagaagcacaaaacgggagagagaaggcccaaaagccaggggccgacggacaagaggaagaccaggcccc

SEQ ID NO: 6781 - RNA, 76 nt, Homo sapiens
aggaaggagggggcgcacaaacgagcgggaggccaccgccccaccagcaggcaacgccacagaccgccagcgccag

SEQ ID NO: 6782 - RNA, 74 nt, Homo sapiens
gccagaaaccgcccggagcacgaccgaggcggggaccaaaacaaaacgagagcaagaggaaagaaaaagaacag

SEQ ID NO: 6783 - RNA, 68 nt, Homo sapiens
ggcgaaacaaaaaccagcaggggcagaaagggggaaccgccaaaggcagacaggaaggcccgcgaaag

SEQ ID NO: 6784 - RNA, 29 nt, Homo sapiens
cgaagacgggcaggcgcgccgcccagggg

SEQ ID NO: 6785 - RNA, 68 nt, Homo sapiens
cggacgcggcacgggcacaaagccacggaggagagcagcacacagacggagccagaagacgagacggg

SEQ ID NO: 6786 - RNA, 58 nt, Homo sapiens
gaaaacaagacgaggacgcgaggacccaaagacaggaccacgcaccagcagagaagga

SEQ ID NO: 6787 - RNA, 71 nt, Homo sapiens
ggggaccaacgaaggcacaccgcccgagcaagcaacagggagaaacaggaggccggccgaagcaccgacaa

SEQ ID NO: 6788 - RNA, 56 nt, Homo sapiens
ggccaaagaagggagagaggaccagaggcccacagcggggagagcaggcccaagac

SEQ ID NO: 6789 - RNA, 75 nt, Homo sapiens
gcggccggacccccccccggcgcccaagcggaaggacccccgcacaacccgcccgagacgagaacaccaagccgg

SEQ ID NO: 6790 - RNA, 97 nt, Homo sapiens
cgcgaagcgccgggcagccgggaacaggcccggagcggccgccggcccaaagccacaacacagcagcccccaggagagcaggaaaagccggagaagc

SEQ ID NO: 6791 - RNA, 79 nt, Homo sapiens
gccaccccacaagaaacaccaagccaggcccacacaccagccagaggaaaaacagaacccaacaaaccaaaaacaacaa

SEQ ID NO: 6792 - RNA, 83 nt, Homo sapiens
ggcggggccgcgggagcggcgcggggccgccgggggaggcggcaaacgccaggggcagagcggccccaaaaaaggacagagaa

SEQ ID NO: 6793 - RNA, 80 nt, Homo sapiens
cgccgcgccccggcgcccccccgaggaagccaggagggaagcccagaagacgcacaagagagaccgaccaaaccccggaa

SEQ ID NO: 6794 - RNA, 74 nt, Homo sapiens
cgcagggcgcccccggcaccgaagggggcaccccaaaccgagggagggaagagccagaccggaagccgaagggg

SEQ ID NO: 6795 - RNA, 83 nt, Homo sapiens
caacccaacccgccaaggagccaccggccacaaggcccgagggggacaccgaacagaaagggacaaagggacagagagccacc

SEQ ID NO: 6796 - RNA, 77 nt, Homo sapiens
aaaccgaggaaggacagacggccagccagcacaaacacggcgagcaaaacacaagaaccaaaagcacacggagaagc

SEQ ID NO: 6797 - RNA, 81 nt, Homo sapiens
gaacggcagcacgccaggacgagcagagccccccccaccagaggacgggaggagcagcaacagccaaacagaggaaagagc

SEQ ID NO: 6798 - RNA, 86 nt, Homo sapiens
gcccgccagcccccagcggccccggggacaccagcagccgcgcggagcgggaggaggaccgaaaggagaaccagggcacagcgcag

SEQ ID NO: 6799 - RNA, 82 nt, Homo sapiens
acagcccccgaaaacgcacggagcgggcccgggccagaggcagaaaacggacggaagaaaaggcggccgaggggggagaagg

SEQ ID NO: 6800 - RNA, 72 nt, Homo sapiens
cacaagagaaacaccaaacaagagaggaaaacccaagacaaggaagggcaaagcccacagcacaagaggcgg

SEQ ID NO: 6801 - RNA, 68 nt, Homo sapiens
ccacgggcaccggagacccaggacgcaaaacagaacccccccaggacagcaagaagaccagaagaaga

SEQ ID NO: 6802 - RNA, 90 nt, Homo sapiens
cgggaagcacgcgaggcgcccggagccggaaagccgggcgggagcccccggccagcccagggacccagaaagacaggagaaggaagcaaa

SEQ ID NO: 6803 - RNA, 76 nt, Homo sapiens
ggcggagagggcacccgggaacgggacgagcgcaccggcgaggacacccccccaaggggccgggagaggaaggccc

SEQ ID NO: 6804 - RNA, 55 nt, Homo sapiens
aggaccccagggcaacgcaacggcagccccggcccaagagaaccagccaagggcc

SEQ ID NO: 6805 - RNA, 82 nt, Homo sapiens
cgccccccagcgcccgggcccgaggaggcagccaagccaggccgccacgcggcgagcggcgcgcggcaagcaagaggagcac

SEQ ID NO: 6806 - RNA, 72 nt, Homo sapiens
gaaaacaggggaggaacgcacgccagcaagcacagacaaccagggaagaacaccgggcagcgggccggccgg

SEQ ID NO: 6807 - RNA, 58 nt, Homo sapiens
gcggcaacgcccccgggacagcacgccccggaccccaagccaaaaacaccgagcggcc

SEQ ID NO: 6808 - RNA, 83 nt, Homo sapiens
gcggcccgcaggagagcaggcgggagcgaggccagcggaagagcgagaaggcgaagcggcaaccggcacgcaccagagcagcc

SEQ ID NO: 6809 - RNA, 75 nt, Homo sapiens
gagaggaaaggcgagggaagcgccggggcacaagcccacgggggagcggcgggggagacccgaccggcgcagccg

SEQ ID NO: 6810 - RNA, 76 nt, Homo sapiens
gagcagggggcagaaaagagcagagcagaaaagcgaggcaagggcggcaggggggggcgcaaaccgaaccaagggc

SEQ ID NO: 6811 - RNA, 76 nt, Homo sapiens
gcagcccccggcagcacgaggcgcagcccacgagcacacaaggaaaaggcgaaagaaggaaccaaacggcggagac

SEQ ID NO: 6812 - RNA, 82 nt, Homo sapiens
agaaagacccaccacaggagcggcccgaaggacccgcaacaggcacgcagcagcacacgagaagccaaggcacagcaggaga

SEQ ID NO: 6813 - RNA, 85 nt, Homo sapiens
caccaacgagaggcaacgcgaggagggcaacgagacgggggcgaacaaaggcagcagcgggggcccgcaacagaggacagagacg

SEQ ID NO: 6814 - RNA, 76 nt, Homo sapiens
ccgccaacaacaggccccacaaggcacaccaacaggcccgggaaaggaagacaaccacccgcagccccagaccgcg

SEQ ID NO: 6815 - RNA, 73 nt, Homo sapiens
aacaacaggcacgacgccagagcgacgaacgccggaaccacagcagcaaaccagcacagcaccgcacccaggc

SEQ ID NO: 6816 - RNA, 79 nt, Homo sapiens
gaccagccaagccccggggcaaggagagaggacgccagaacgcgaagacggcagggccggaccggagcaggagaccagc

SEQ ID NO: 6817 - RNA, 78 nt, Homo sapiens
cacgggggaaacaagcgaaaaacaggcaagggaacaaaccgaaggcaacggcacaaaacagaagcaggccagcccccc

SEQ ID NO: 6818 - RNA, 71 nt, Homo sapiens
gccggaaaaacgaacagacgcacaccacgacccaaagacaggaccacgcaccagcagagaaggaaagcaaa

SEQ ID NO: 6819 - RNA, 72 nt, Homo sapiens
gagagacgaagccgcagcagcagggaaggaacgcaaaacacgggaaaagagcagggcagagcggcgggaaac

SEQ ID NO: 6820 - RNA, 76 nt, Homo sapiens
ccgccccgggaaccggaacgcaggagggcaacccgggcgcagcaccgcggagccggggggggagaggcgccggggc

SEQ ID NO: 6821 - RNA, 76 nt, Homo sapiens
ccagggcacagcggaggcgacacccagagagcccagacccagaacgaaaaagaccaagcgagagcccgaacaccgg

SEQ ID NO: 6822 - RNA, 85 nt, Homo sapiens
gaagaccagcaggaaagcaggagcccacagggacagagcagaagggcgaaagaccgggccgcagaagaggccccaacccgggcca

SEQ ID NO: 6823 - RNA, 83 nt, Homo sapiens
aaccgcgcggaggaggaaacaagggcagagccagcaaaggagaagacagaggagccagaccaagagacagcacaggcgagcga

SEQ ID NO: 6824 - RNA, 70 nt, Homo sapiens
agaacacccccaaagagcaacgaagacaacgcagcggcagaaacaaggcgcaggggaaaacgacccccag

SEQ ID NO: 6825 - RNA, 70 nt, Homo sapiens
cagaacccaggcccacggaggaagagccgggcagcccggagcgggccaggaaaccccccaggcaagaggc

SEQ ID NO: 6826 - RNA, 70 nt, Homo sapiens
acccggagcccgccgcggcccccggcacaggcagcggaggagcccgaccgacccggaacaagcgggaaac

SEQ ID NO: 6827 - RNA, 94 nt, Homo sapiens
aaccagcgaggagagaaaccacagagacccaagagaagaggcccaggcagcgcagacgaaacagcgcgcagaagccaacagaccccgcgacgga

SEQ ID NO: 6828 - RNA, 74 nt, Homo sapiens
aagccaagccgggcgcgccacaaggagggaaacgacaacagcaccagaagaaagaagagaccaagcgcacagga

SEQ ID NO: 6829 - RNA, 81 nt, Homo sapiens
cgagacccggaggaggcgaagcgagaggacagggaccaagaaaggcccagggaccaaagcccggacaaggcccgagcacca

SEQ ID NO: 6830 - RNA, 63 nt, Homo sapiens
cccaggcgccgcggcgaggagcgagcgcgcgaggggcggccgaggagggcacccagcaccagg

SEQ ID NO: 6831 - RNA, 85 nt, Homo sapiens
agaaacccggagggcgccggggaaggagggccccggagcagccacaccaccgaggccccacccagcacgagcacagccccaccag

SEQ ID NO: 6832 - RNA, 81 nt, Homo sapiens
ccacaggacacaaaaccccaagaggagcaacccgcagcagcgaggaaggaaacagcgggagcaccgaagacgagcagcagc

SEQ ID NO: 6833 - RNA, 77 nt, Homo sapiens
ccagacagagaagccggccaacggagaagcacaggcagagacacaagcagccgaaaaacaggcaccaaccgacaggc

SEQ ID NO: 6834 - RNA, 63 nt, Homo sapiens
aggaggcgcggcccgggcagcagggcggcagcgcccgagagagaggcggagaagaacccaacc

SEQ ID NO: 6835 - RNA, 64 nt, Homo sapiens
agcaaacggaccagaccgaccaccaaaaagaccaagaagcgcaggaaagcgagacaccacaaaa

SEQ ID NO: 6836 - RNA, 46 nt, Homo sapiens
aacggcccggaaacaggaggacggcgcacccacgacgcgcacacca

SEQ ID NO: 6837 - RNA, 77 nt, Homo sapiens
ccagaagacgagagccaacgcaaccaggcgcaggacacacagagagccgacaagcaccgccaaagaagccgccaggg

SEQ ID NO: 6838 - RNA, 58 nt, Homo sapiens
gcaccagaaggaacacagagacccgagcccccacccaggaaggaacaaccccacacca

SEQ ID NO: 6839 - RNA, 85 nt, Homo sapiens
gagcccggagcggcccggcggccgcggagccggagaacagaggagccaccacagcgagacccaggcaccagggaggcacgggcag

SEQ ID NO: 6840 - RNA, 74 nt, Homo sapiens
cggccagggccaaggccaggaaggggacggaaaaagcaaagagagcggaccacaccgaccccaacaggaacccc

SEQ ID NO: 6841 - RNA, 75 nt, Homo sapiens
ccgggaggaaaccaggacgcagagggagcagccaaggacccagccaacagaaccaggaggaagcacagcagacaa

SEQ ID NO: 6842 - RNA, 73 nt, Homo sapiens
aggcggccccacaggccccggaagccccacaggcccaacacagagaaccagaagaacgcaggaaaaaaacaca

SEQ ID NO: 6843 - RNA, 73 nt, Homo sapiens
acccaaacgaacccaaaggccccaacaagaagagacaggggaaacaaggcagaacaagaaagcaacaaccaca

SEQ ID NO: 6844 - RNA, 79 nt, Homo sapiens
gccgcaggagacgagaggacgggaccaggcgaagcggccgagcaggcgagcgaacgacggcacgcagcacgggggcagg

SEQ ID NO: 6845 - RNA, 74 nt, Homo sapiens
gagcgagggaggagagagggagagccaaagaaggaaaagcagggaaccagggagaccaggacaaggaacagaaa

SEQ ID NO: 6846 - RNA, 77 nt, Homo sapiens
gcccgcgcggcgcggggaccgcggcccggcgaagccgacgagcccgaacagacgcaccagcgggaggaagagggacg

SEQ ID NO: 6847 - RNA, 76 nt, Homo sapiens
aagcagccggggccccgagaagaaagacccaggcaaagacacaccagaacacagcagggccgcaaggccaggcgcg

SEQ ID NO: 6848 - RNA, 71 nt, Homo sapiens
acgaccagaaaaggcagccccgaaagccaacaggaaacagggacaagggaaaacaacagggaggaaaaagg

SEQ ID NO: 6849 - RNA, 67 nt, Homo sapiens
cggagccaccggcaccacgagacggccggcaacaagcgaggggggaggccaggcgcccagaacggcc

SEQ ID NO: 6850 - RNA, 58 nt, Homo sapiens
ggaaagcaccgaggcacaacaggggaggcaagcaggggggcaaaggaaagaaggcaga

SEQ ID NO: 6851 - RNA, 74 nt, Homo sapiens
acaaagcaagagacagcgaggacagaaggaaggaccaaggaaacacacagaagaacccaggaaagaacgacccc

SEQ ID NO: 6852 - RNA, 79 nt, Homo sapiens
cacgaacaaagacaggagggggacaaaaaagaccagaagaggaggaggaagcaggccaggggaagccaggaagggacca

SEQ ID NO: 6853 - RNA, 56 nt, Homo sapiens
aggggagggcgagccgccaggggcgacagacaaaggcagaaaagcgagccacccca

SEQ ID NO: 6854 - RNA, 43 nt, Homo sapiens
cagagaaggcaaaccgagccaagcgacagcaagcaagcccccg

SEQ ID NO: 6855 - RNA, 83 nt, Homo sapiens
acagcccggacaccgacagcacagacagaacccgcaccagccgagaaacagacaacccacagaacaaagcggaccaaggcacc

SEQ ID NO: 6856 - RNA, 80 nt, Homo sapiens
acccagcggccggccccaaacgcacgagcgcccagcacaacccgcaggcgccaggggagaggaggcagaaggagaccgcg

SEQ ID NO: 6857 - RNA, 57 nt, Homo sapiens
gcggcaaacgaacgagcgacccggacaggcgacgaaaacccagaggaaccaaagccc

SEQ ID NO: 6858 - RNA, 73 nt, Homo sapiens
gaagaagaagcaaagggccagacgcagcccgagcgcagaaacaggcaggacacaggaacgccacaagaaacaa

SEQ ID NO: 6859 - RNA, 77 nt, Homo sapiens
agcacccagcccggaccagcacgacaccccccgaggagccaggaggaggaaaggacaggcaacaagcaaggaaacgc

SEQ ID NO: 6860 - RNA, 72 nt, Homo sapiens
ccaggacaggcaggcacagggaacggagcacacccggggggaagaaagaaggcaaagcagcggcaccgaacc

SEQ ID NO: 6861 - RNA, 71 nt, Homo sapiens
gagcccaggagcgccacgcgcggaaggcagcgcccagcagcgcaggcagaaacagcaaagaaaacagacaa

SEQ ID NO: 6862 - RNA, 78 nt, Homo sapiens
agaaccacagacacccccgcagaaggaacgagggagcacggagggaaaagaagccgccgacccccgccccagagagcc

SEQ ID NO: 6863 - RNA, 65 nt, Homo sapiens
gacccagccaggccgccaggagcagggacacaaacggaagagacccaacaaccggggaaaagaac

SEQ ID NO: 6864 - RNA, 81 nt, Homo sapiens
ggaccccaaggaagccacggcagacacacaacccgacccgacgaaccgccagagcggaacgaccccagagcgagcccgcag

SEQ ID NO: 6865 - RNA, 86 nt, Homo sapiens
gcgcccagcgccggccggaggcagacaggcggaccgcaggccccccgagaaggaggacgagagccagcgccccaccggccaggcgg

SEQ ID NO: 6866 - RNA, 78 nt, Homo sapiens
cccgggaagaaggaaaaccgggcgaagaggaagaagaacaagaacacccgccagcagccacaagcccagccagccggg

SEQ ID NO: 6867 - RNA, 78 nt, Homo sapiens
gccgccccgcacccaagccccggggcaccacgccagcaccggcccgcaccagccaggaccccgcgcccacccaacaag

SEQ ID NO: 6868 - RNA, 91 nt, Homo sapiens
agcaccaggaacgggaccccaccccccacacgggggaccagcagggaccaagaggaaacgggccacaggaacgcgccgaaacacgcaccac

SEQ ID NO: 6869 - RNA, 80 nt, Homo sapiens
ggcggcaagacacggggcgacgccacagagaaaggccagaaagggcacggcagacgagcaacccaacaaagcccccagcg

SEQ ID NO: 6870 - RNA, 65 nt, Homo sapiens
ggcacacaaaacaccaaccaaaagacaccggacacgcaggacaggccgccagggggacagaagga

SEQ ID NO: 6871 - RNA, 81 nt, Homo sapiens
agcagccccaaggccagcggagccagcacccccacaagcagcaggcggggcggcaccaccgagcccacgggcacggcaccc

SEQ ID NO: 6872 - RNA, 76 nt, Homo sapiens
ccggcgcagcggggaccggcggcggcgcccaggcacccggcccgggaggggaaggggccacaggcagcaggacacc

SEQ ID NO: 6873 - RNA, 81 nt, Homo sapiens
gcccccgagaaaagagcgccagcagccaggaacccgggacagcaggagggggccacggccaagacccacagccaacaaaga

SEQ ID NO: 6874 - RNA, 71 nt, Homo sapiens
ggaggagccagcgccgcgacgcggagcggaggcagacacacacggggggagagggagggggggacacggcc

SEQ ID NO: 6875 - RNA, 86 nt, Homo sapiens
gcgccgcgccccggaccgggccgcgcacgccgcccagcaggcgagcccgggcgccaccagccgggacagcccagcaacgcaggcca

SEQ ID NO: 6876 - RNA, 79 nt, Homo sapiens
cccacccagggcggcgccaaggagacggggaaaaagaaaagggcgaagacccgaagcagcgcaggaacagaagagaaga

SEQ ID NO: 6877 - RNA, 73 nt, Homo sapiens
gaaaaaacggcaaagagagaaacaacgcaaaacaaaaggggccaaggacgcacacaccagagaaggcagacca

SEQ ID NO: 6878 - RNA, 81 nt, Homo sapiens
ggaaggcacagaacaccggggcgcgggaacagccgcgacggcccacaacccacggggaaagccccgggacagcgggcgagc

SEQ ID NO: 6879 - RNA, 79 nt, Homo sapiens
cgcagggcgcccccggggagaggaggaaaaagccagcggcaccacacaggaccacagagccgcgggccagccagagacg

SEQ ID NO: 6880 - RNA, 88 nt, Homo sapiens
aaaaccaagacaaaacagagccaccccaggaacagcaaagcaacaaggcaagcaaggacagggaccagagaagaccggccaccagcaa

SEQ ID NO: 6881 - RNA, 75 nt, Homo sapiens
gaggcggcgcggccagaagggccaggcagcgaagaagacaaagaagaaaacaaagccagccagaagaagaggcag

SEQ ID NO: 6882 - RNA, 73 nt, Homo sapiens
gaaaaaaaagggagaaacagaccaaggggggaagggacaagaaaggaagaagacaccaaacgaaagaggacgg

SEQ ID NO: 6883 - RNA, 75 nt, Homo sapiens
gcaggcaccacaaaaaggacaggcaagaacaacccaagaaggacagcgcgacagaaggacagcagccggggagaa

SEQ ID NO: 6884 - RNA, 67 nt, Homo sapiens
ccgagagaccagggcgaccgcggaaacgcagcagaggcagaacggaagggacacagaagagccagag

SEQ ID NO: 6885 - RNA, 67 nt, Homo sapiens
cggacggaggacaggaaggaggcaggacaagcgaagggcacagcggaagcacacgggcgagaagccg

SEQ ID NO: 6886 - RNA, 68 nt, Homo sapiens
cgggggcaagagggggaaaaccacggaaaggaccaacaagcccgggcaacccagggggcaggacgacc

SEQ ID NO: 6887 - RNA, 85 nt, Homo sapiens
cggggaacggaagcggagcagggaagacggagcggcggcccgaaggccagggccgacccacagagcaccccagccacgcgagccg

SEQ ID NO: 6888 - RNA, 79 nt, Homo sapiens
ggggaggagaaacaaacagaccggaagcacggagagggagccggccgaggaggcacagagaagaggaacggacaaccca

SEQ ID NO: 6889 - RNA, 91 nt, Homo sapiens
gccaagcgcacacaaaagaggagaaaaccgggcgcagccagacccggaaaagaaaaccagaggggcgaagagaaagaaaacgaagaagccg

SEQ ID NO: 6890 - RNA, 80 nt, Homo sapiens
aagaggccaaagacgacagaacggcagcggagaaaacaaccagagaaccaggagcggcagaccgccgccaggaggaggca

SEQ ID NO: 6891 - RNA, 92 nt, Homo sapiens
accggaacggacagcccccccaggggagcggaagagcccagaggaagcgaccaggcccggcagaaggcagaggagcaggaaggacaacgagc

SEQ ID NO: 6892 - RNA, 78 nt, Homo sapiens
gcccgggccagcccaggaccccaggggaacaagaggccacgcagagccacgccgagcccgcggccccaaaaagcggcg

SEQ ID NO: 6893 - RNA, 75 nt, Homo sapiens
agaaacacaacaaaaaagagagggaagcaaagaggacacccccggcaccgaggaaaacaagcccaaggaggaaag

SEQ ID NO: 6894 - RNA, 77 nt, Homo sapiens
ggaacaaacagaagacagcaggagccgcccgcacccaggcggaggcaaggcggaccggcgcaccaacccgcccccag

SEQ ID NO: 6895 - RNA, 81 nt, Homo sapiens
cagccagcaacgaggacgcccccagccaggggaacaggcaggccggagacaagagaagcggaagcaaaaacagggaagaga

SEQ ID NO: 6896 - RNA, 72 nt, Homo sapiens
caaaaggcggccagccaccgaggccaacaacacaggcagaagagaaggcagagggggcgagggaggaaaggg

SEQ ID NO: 6897 - RNA, 82 nt, Homo sapiens
gaggaaggaggaagaggagccagcagaacgcacaccagccccggcccaggacccccaaaagaaaacaggaaaagccaaccgg

SEQ ID NO: 6898 - RNA, 74 nt, Homo sapiens
gaaacggaggagaaacacaggaaggggccaccgcgacacaggacggaaccgacaccaaagcgaggccccgacag

SEQ ID NO: 6899 - RNA, 76 nt, Homo sapiens
aaaggaaaaaagagaggcccaaagacgaaagcgcgcgcgcagggagcagcacccccaccgcaggggcagaagggag

SEQ ID NO: 6900 - RNA, 75 nt, Homo sapiens
ccacccagggccggaaaagccaacgccggcgaagaaacacgaggaagaggagcagcaagcaggaagagagaagac

SEQ ID NO: 6901 - RNA, 82 nt, Homo sapiens
gcgccaaagcgagagagggaagcgcccggccgaagcaggagcggccaacagccggagcgaccccccagaccggccgcccccc

SEQ ID NO: 6902 - RNA, 64 nt, Homo sapiens
cggggacaggaccccggacgagcccggcgaggggaaacaccacaaagcgagcaaacccaccaaa

SEQ ID NO: 6903 - RNA, 71 nt, Homo sapiens
agacgggaaggacggcgaaaccagaacaggaaagccccggaaagccacgcgaagccagcccagcccacgag

SEQ ID NO: 6904 - RNA, 57 nt, Homo sapiens
agcgaacacccagaaacggagcgaaagcacacgaagaggcagcccagaagaagaaag

SEQ ID NO: 6905 - RNA, 72 nt, Homo sapiens
agaaccagaccggcacccagagcacccgcccacgcggagaggggggcagaaggccagggacgcggacgcaga

SEQ ID NO: 6906 - RNA, 55 nt, Homo sapiens
gcccggcaccacccacgagacgacaacgaagagaggaaagaagcggaaaggaggg

SEQ ID NO: 6907 - RNA, 59 nt, Homo sapiens
ccagagaacgagaaagcaaaagcgcgcgccaaggcgggaaccccaccacagcagcacag

SEQ ID NO: 6908 - RNA, 80 nt, Homo sapiens
cagagccaacccagaggccacaccgcaccaccgcggacccacccggcgcagccccacagggcaccccaccacagagggcg

SEQ ID NO: 6909 - RNA, 76 nt, Homo sapiens
aacggaccccagggaaagagggggggccgggacagccggcagaagcagaagagcggcccagccagcggaacccccg

SEQ ID NO: 6910 - RNA, 74 nt, Homo sapiens
gcgaagcccagcgggccggacggggcggggggaacgacgcaggagagagagacgccggaagaaagaaaggagac

SEQ ID NO: 6911 - RNA, 81 nt, Homo sapiens
gggcacgcgcggaaacggagggggaagaagaaaagcgaccgggacccccccccggacacacagaacaagaaacagcaggga

SEQ ID NO: 6912 - RNA, 43 nt, Homo sapiens
gaggaccgacgcagccagggagcaaggcagaggggaccccaga

SEQ ID NO: 6913 - RNA, 76 nt, Homo sapiens
cacccccaagggagacgcgcaggaggccgcaagaagggccgaccgcggaaggccgcggacccccccccccccaccc

SEQ ID NO: 6914 - RNA, 34 nt, Homo sapiens
cgggagagagcagacaggaggaaaaccaagaggg

SEQ ID NO: 6915 - RNA, 38 nt, Homo sapiens
gacagcgaggagacaacccccagaaaggacagagaaaa

SEQ ID NO: 6916 - RNA, 57 nt, Homo sapiens
aggaccaagaaccaggcccggaacgcgaaaccccggaacaacagacaggagggccag

SEQ ID NO: 6917 - RNA, 104 nt, Homo sapiens
gcaacgcccgccggggagccaagaggcaggcccgagggccccccggggccccccgggcaaggagcgaagcaacgggagagcaagaggaaggaagcaagaacccg

SEQ ID NO: 6918 - RNA, 71 nt, Homo sapiens
gagaaggcagggcaaaccagaaagacgagcgcggcgcccaggcggagacaaggcacaccacccacccaacc

SEQ ID NO: 6919 - RNA, 57 nt, Homo sapiens
cgcacgaaaggaaagacggacgcccaccccacgggaggccgggacgggacaacgaac

SEQ ID NO: 6920 - RNA, 54 nt, Homo sapiens
cgaccaccggagagccccgggagggaagacaggggcggagggacccggaacgac

SEQ ID NO: 6921 - RNA, 78 nt, Homo sapiens
cgaaggagccagcgccccgaagaagcaaacgaggaccccaccacaagaacgcaggaagaggcaaagggggaaggacaa

SEQ ID NO: 6922 - RNA, 69 nt, Homo sapiens
agcccgacaacgcaaagacacaaaaacaagcccggaaccagagaaaaagaagaaagaaacacgggacga

SEQ ID NO: 6923 - RNA, 77 nt, Homo sapiens
gggcgagaggggaagaggcgccgggacaggacccgcagcacgagccaccagcacagaagaagacagaagcggaagcc

SEQ ID NO: 6924 - RNA, 72 nt, Homo sapiens
agagcgacagcccgggacaccaagaaagaacgcgcaaggcaagcacaaaccacagcaccgagagcggcccgc

SEQ ID NO: 6925 - RNA, 56 nt, Homo sapiens
cgcgcccgccccccagcaccgggcggacggaagaagagagggcgaaggaggccaca

SEQ ID NO: 6926 - RNA, 73 nt, Homo sapiens
cgcaagagccggcccggggcccgcagggggcacccggcaggacgccgccggcaaaaaggcaaaaagagcgcga

SEQ ID NO: 6927 - RNA, 79 nt, Homo sapiens
gaacccggacccggcgagcgggaggcccaggaacacaccaccaggaaaagccgaaggaagcgacaggaaggggaccaga

SEQ ID NO: 6928 - RNA, 78 nt, Homo sapiens
cgccgagcaaggggacccggaggagaaaccaccaagaaagaaaaaggagaagaagaaagccccgccccaacaaacccg

SEQ ID NO: 6929 - RNA, 85 nt, Homo sapiens
agaggcaacagacagaggaccaggagcaccgcccagacagcgcgcgaagaaacacacggaggacacagcagcgcacgagaccgcg

SEQ ID NO: 6930 - RNA, 74 nt, Homo sapiens
agagagaacccgggagaaaggcggagaagagcgaacgcccaagcaaaaacagggacagacaaaaccgccccacc

SEQ ID NO: 6931 - RNA, 52 nt, Homo sapiens
cgaaacaaggggccagagaacaccaagggaaagaccgaaccaacaacagcaa

SEQ ID NO: 6932 - RNA, 75 nt, Homo sapiens
aaagcccgacagggcaacacccgacaaagggaggcccaaggaacagcacagcagcgacacacggaccggagcagc

SEQ ID NO: 6933 - RNA, 73 nt, Homo sapiens
aaagaccacgggagccaccaaaaccacaggcgcccaagacccagcagcaggggagaacagcaaccagggggac

SEQ ID NO: 6934 - RNA, 57 nt, Homo sapiens
ccacgaggagcagaggcggagccaggacccgaaaagccagcaagcgagaccaacacc

SEQ ID NO: 6935 - RNA, 54 nt, Homo sapiens
gccaaaccgagcacagaaagagaccgcccgcccaacgcaggcccgcgcgggagc

SEQ ID NO: 6936 - RNA, 68 nt, Homo sapiens
cgaacaaggcaaaagggaaacaacggacacccccgggaacccaccaaaaaggacaccgaaagacggga

SEQ ID NO: 6937 - RNA, 61 nt, Homo sapiens
agaacacacagagccaccaggaaaagcggccaggaccaccaggcggccacgggcccccagc

SEQ ID NO: 6938 - RNA, 59 nt, Homo sapiens
agaaaacaaaggagaacggcaaaaggacagaccagagagagaaagggcacgaacaagaa

SEQ ID NO: 6939 - RNA, 71 nt, Homo sapiens
accgcgcccgcggagagcccaaacaccaccaccaagcaaagaaggccgagggacgaggaccggaggagccg

SEQ ID NO: 6940 - RNA, 84 nt, Homo sapiens
cgggcgccaagccgcggagccccagacgggcgcggggaggcccagcccgccgcagggccaccccgcggcccaccgccgccgccc

SEQ ID NO: 6941 - RNA, 70 nt, Homo sapiens
aggcaaccgcaaacgaaaagaaaagaacgcccaacaaggaacccaaccgcggagaggagcacaccgagcc

SEQ ID NO: 6942 - RNA, 78 nt, Homo sapiens
ccccgccagcaaggcggcgcgcccaggagggcagaagcggaagcggagggggcaagacaacacagggcagcccaagac

SEQ ID NO: 6943 - RNA, 68 nt, Homo sapiens
gcagccagggcacaaggaagggcgagaagcccaaagggggcagcacgccgaaggagagaccagacaac

SEQ ID NO: 6944 - RNA, 78 nt, Homo sapiens
agcccggacaccgacagcacagacagaacccgcaccagccgagggagcaacaagagcagaaaggaagaaccacccgcc

SEQ ID NO: 6945 - RNA, 84 nt, Homo sapiens
accgagaagcgagagaaagagccccgcaccacaaagaacggagaccaaccgggcgaagaaagaagaaaagcgaaacaggaaccc

SEQ ID NO: 6946 - RNA, 64 nt, Homo sapiens
gaggaacaaggcggaggaacgagacgcgaaccaggcaaaggaaggagaacggagcagaggagcg

SEQ ID NO: 6947 - RNA, 80 nt, Homo sapiens
aagaggaagaggaaagaaaaggagcagggaggcccaccagggccggggaccgcggcgggagaaccgcccacacggcaacg

SEQ ID NO: 6948 - RNA, 83 nt, Homo sapiens
ccggacggagggggaggccggcccgcggacccggccccagccgggcagggcgcagggacacgccgcagagcagacgggccacc

SEQ ID NO: 6949 - RNA, 77 nt, Homo sapiens
ccagcgccgaggggggggaaccacacggaggacgaccggcgagcggcccccagcagacgagacaggccgagagaccg

SEQ ID NO: 6950 - RNA, 72 nt, Homo sapiens
ccacagcaggcagcccaagaagcaacggcaaccagagacacgaaggaaaacacccggcagggaaggaaggaa

SEQ ID NO: 6951 - RNA, 37 nt, Homo sapiens
caagcagagcaggaacacaggggggcaaaccgaggga

SEQ ID NO: 6952 - RNA, 82 nt, Homo sapiens
cccgccccagccacccaggccccgccgcccgggggcgccgcccaccgcgcccgccggcgggccggagaaggggcgacgcggg

SEQ ID NO: 6953 - RNA, 69 nt, Homo sapiens
agagaagacagcgagaaacaggacaacccgagaggaaagcaaagacacgaacgaacacccaggaaaacc

SEQ ID NO: 6954 - RNA, 62 nt, Homo sapiens
gcagaaacaaccagaggagaccccagccccacaaagcagcaggagaaacgagaagaaacaga

SEQ ID NO: 6955 - RNA, 77 nt, Homo sapiens
accacacccacgggccaggcggggcaccacacggccaccgcaccagggcgccagcagcgggagggcccggggggacc

SEQ ID NO: 6956 - RNA, 70 nt, Homo sapiens
acgccccggagcccagaaggaaggaagggaacacggacgacgagacacgaccaacacaggcgaccaaacg

SEQ ID NO: 6957 - RNA, 79 nt, Homo sapiens
gacacggccaaggagaagacgggaccgccccaaagccccacacggcccccagaaaacaggcccggcagaagagaacccc

SEQ ID NO: 6958 - RNA, 78 nt, Homo sapiens
gcagacacaagagcaagcccgcacgggaaggcaccacgaagaagagccaaagcccaggacggggaaacagcagagagc

SEQ ID NO: 6959 - RNA, 70 nt, Homo sapiens
ggagcagaagaagacaaaccgcgcaaaacaggagcgggcacagagaagacagcgaacccacccaacacgg

SEQ ID NO: 6960 - RNA, 46 nt, Homo sapiens
cccagggcccccccggagaaccagggagcggggagcaacggaggag

SEQ ID NO: 6961 - RNA, 85 nt, Homo sapiens
ccggacccgcggcgaccgagcagagccggagcgcgagccgccacaggacccagaccagccaaagagaagaagaaaggaagcaaaa

SEQ ID NO: 6962 - RNA, 79 nt, Homo sapiens
aggcagaggcccaaaaagaaaagagagagagaccaccccccaagcaacacaccgaaaaaagggaagcggagaggagcag

SEQ ID NO: 6963 - RNA, 56 nt, Homo sapiens
cggagggcggaagcggacaagccgccccggggagggcggaccaacgggccgggggg

SEQ ID NO: 6964 - RNA, 44 nt, Homo sapiens
gcccaaaccaacacgcagaagaggagccggcccaggagcagcag

SEQ ID NO: 6965 - RNA, 80 nt, Homo sapiens
agagggacaacaggcaggagaaagggagcgcaccccaggaaacaggggggagagaaaacaacgaaaagcacaaggaaaag

SEQ ID NO: 6966 - RNA, 75 nt, Homo sapiens
gcgggcaggagcagccgcagcgacggcggcgacagcagggacaagagaaaaaaagggcgggcgaacaaaaagagc

SEQ ID NO: 6967 - RNA, 60 nt, Homo sapiens
ggagaaccacccggaggagacggggcagacaacggagcccgggagcaggcacccccagac

SEQ ID NO: 6968 - RNA, 86 nt, Homo sapiens
cggcagccacccaccgccgccgcccccaggacagagcgggagccaccagcgccaaagggaagccaggagcccgggggcacggggag

SEQ ID NO: 6969 - RNA, 102 nt, Homo sapiens
ggagggggacccaggccgcacagacccaaggggccggcagcaggaaggaagcacacacagaggggaggccagaaggccccgggggcggccacgaccaagaag

SEQ ID NO: 6970 - RNA, 86 nt, Homo sapiens
gcaagagagccaggaaggagaccaaccaaggggacaggcacaggccgaccaaagaggcagaagaaaaagaccgaggaagccaaaag

SEQ ID NO: 6971 - RNA, 66 nt, Homo sapiens
cccaccaccgcaaacagacaccagcaccccaaccgcacggggaacacgcaccaaggaaaaaacaag

SEQ ID NO: 6972 - RNA, 79 nt, Homo sapiens
ggagaaggggaggcagcgcggcccaggagagaccggaagaagggaaggaaggaccccaggacaggaagggaggcccgcc

SEQ ID NO: 6973 - RNA, 71 nt, Homo sapiens
acggcggcagaagacccggaagcaaagaaaaagaacccaaacaagacgcaagaggagaaccaggggaaccg

SEQ ID NO: 6974 - RNA, 62 nt, Homo sapiens
gcagaaccccacagcaagaggacgaccacaggagcagcaacccagccccggaaccacgccag

SEQ ID NO: 6975 - RNA, 79 nt, Homo sapiens
gaccgagagcgcgaaacgcacgagaagggaaagaaacacccggaaaagcaaagacacgccaaacgccaccgaccaccca

SEQ ID NO: 6976 - RNA, 45 nt, Homo sapiens
agacccacccccagcggaaagggcccagcaggagaagacagacac

SEQ ID NO: 6977 - RNA, 77 nt, Homo sapiens
acaacaggaaaacaaaagaggagaaaggggagcaccccccagacggcgccagccgacccccgccgccacaccagggc

SEQ ID NO: 6978 - RNA, 63 nt, Homo sapiens
aacccgcgaaagcaggaaagggcaaaagcggcaaagggaaaaaggcggagcagccgcaacagc

SEQ ID NO: 6979 - RNA, 72 nt, Homo sapiens
gaagagaacgcccgggaccgagcacccgccccgggcaccaaccccccggggccacacgagcccagcccagcg

SEQ ID NO: 6980 - RNA, 83 nt, Homo sapiens
cagaaaacaaagaagccagaggcagccggcccagcccaccccaggcccccccagcccagcaccaccagcagaaaacaacagag

SEQ ID NO: 6981 - RNA, 45 nt, Homo sapiens
cccaaaggggcccaggcggccgagaagggagccccggggaaggac

SEQ ID NO: 6982 - RNA, 80 nt, Homo sapiens
cagcgaaggggagcccagggaagcccgggaccgaaaaaacgagagaacccaccgcaagagaccaaaggccaagagcaccg

SEQ ID NO: 6983 - RNA, 76 nt, Homo sapiens
agaccacacagcagccaaaacgagaagaagaagaaggagaccaggggccaggacagacaaacaaacaaggagaggg

SEQ ID NO: 6984 - RNA, 67 nt, Homo sapiens
agcccaaagcgcccaggcacccccagcagcaagggaggagcgggagcacccgagcggaagacccgga

SEQ ID NO: 6985 - RNA, 80 nt, Homo sapiens
ggccacccggccgcagcagcagcagggcacaaggaagccacgaggagcaggagaaccagcgcgcgacgcaagcccgccca

SEQ ID NO: 6986 - RNA, 73 nt, Homo sapiens
ggagcacgagacgaaaccacagaacccccaaagagaaaggagaaaaagcagcagagcccgacggagcagcagc

SEQ ID NO: 6987 - RNA, 59 nt, Homo sapiens
ccccacccagcggccagaccccgcacccgaggacgaagccccagcaggcccaggcccca

SEQ ID NO: 6988 - RNA, 80 nt, Homo sapiens
accacgggggcgcagaccgccagcgggagaacagagacccaccaagaaaccagaacccggacaagggaagggcccgagga

SEQ ID NO: 6989 - RNA, 78 nt, Homo sapiens
ccccagcagagcccgcgaccagaccgccgggcgaagggggggcagagccgggccccagccaggggggacaagcacgac

SEQ ID NO: 6990 - RNA, 58 nt, Homo sapiens
cacaccaggaagcaaggccaaggagggaccccaagaaagcaagcaagaggagaacacg

SEQ ID NO: 6991 - RNA, 74 nt, Homo sapiens
aagagcaaagaaagcgccccaaaagacaggcccaccgaaggcgcacgcgggacagagcacccgaagcgcccagc

SEQ ID NO: 6992 - RNA, 51 nt, Homo sapiens
gccgagcggaccccaagacaacaggcacaaagagagaaggaacacccacag

SEQ ID NO: 6993 - RNA, 56 nt, Homo sapiens
aaagccggcaaaaccacacagcgaaaagggaaagcacaaggaagaagcggacgggg

SEQ ID NO: 6994 - RNA, 71 nt, Homo sapiens
ccgcggcccggcagggggaacgggagggggccccgaaacagccccggagcaaccacagagcagggcggggc

SEQ ID NO: 6995 - RNA, 56 nt, Homo sapiens
gacaagaagaggaaaggggaagaaccacagaaaagcaggaccgacaagacggaaac

SEQ ID NO: 6996 - RNA, 77 nt, Homo sapiens
gcgccgcccgccgcagcgccccggaccggagcgagcaagccgcgacaagcagaaccagacccaaaagagcaaacaac

SEQ ID NO: 6997 - RNA, 77 nt, Homo sapiens
gccggagcagcgagggcccggcgaggagaaccaacggcccgaaagagagaaaagaaaccgacccggaaaagagaaga

SEQ ID NO: 6998 - RNA, 72 nt, Homo sapiens
gaaaggaaagacagaaccgaaaacagcaggaaaaaaggagcagaaggaccggggaaacagagggcagaagaa

SEQ ID NO: 6999 - RNA, 79 nt, Homo sapiens
ggcagacccaagaggacggcccgccgggaggagaaaaaagccaccacggcacgagggcggcgacggcggcgcgaggacc

SEQ ID NO: 7000 - RNA, 72 nt, Homo sapiens
cccccagagacaacccccaaggcccaaagcccagccaaggacccgaaaaacgagccacaccaaaagggaaga

SEQ ID NO: 7001 - RNA, 87 nt, Homo sapiens
gggacccagcaggcaaacagaccggagaccgcgcagaagacacgcccggaagaccagccaacaggggagccgccaccaaaagcagac

SEQ ID NO: 7002 - RNA, 77 nt, Homo sapiens
ccggcgccggcaaggggacccaggcgcccgcacgcgagacagagaagagggcacagaggaagcgaaccgggacgcag

SEQ ID NO: 7003 - RNA, 56 nt, Homo sapiens
agaagcacggagcccaaggacccccgcagcaaacacaagaagaccacacgacccag

SEQ ID NO: 7004 - RNA, 76 nt, Homo sapiens
acacaaaagcaaacaggaagaagggacgggcacccaagccagacaaaggacggaggggggaggagcaggcccccac

SEQ ID NO: 7005 - RNA, 62 nt, Homo sapiens
ggcaacccgccaggcaggccccccggagcggccccgccgcgcacagacgggacacagcaggc

SEQ ID NO: 7006 - RNA, 74 nt, Homo sapiens
gggccacccacaaaagagcagagcgacacgaaaagacagaccgacaacagcccagaagaagccaggaggaccag

SEQ ID NO: 7007 - RNA, 57 nt, Homo sapiens
cgcccagacaaccgaagaaggaaacccaagaaacgaacgggaaagaaacaaacaaca

SEQ ID NO: 7008 - RNA, 78 nt, Homo sapiens
gacagcaacagccgccggcggaagggaaaggaggacaaaaggaaaaaaaaaaagggaagacagagaggcggggaaagg

SEQ ID NO: 7009 - RNA, 86 nt, Homo sapiens
ggaagcaggacgcgccgcgccccaaggcccagcgagagccagccggaggacccagcagcaggccacccaggccgaaggccagcaca

SEQ ID NO: 7010 - RNA, 79 nt, Homo sapiens
agccaagaccaagcgcgaaagcgccaaaaggacagcagaaaacccaacaccccgggagaagggaaaagcacaacacaac

SEQ ID NO: 7011 - RNA, 35 nt, Homo sapiens
agaacagaaaagggacaggggaccgggaggagggc

SEQ ID NO: 7012 - RNA, 79 nt, Homo sapiens
caagacacagcgcgaggacaggacacacacagcggaggacagaaacaagaggaggccacgcgcagccccggaagagcca

SEQ ID NO: 7013 - RNA, 70 nt, Homo sapiens
agaagccgaacacgacagaaagaaaggccaaagcagcaggcaggcgaaaggaaaagagaaaagagcgagg

SEQ ID NO: 7014 - RNA, 55 nt, Homo sapiens
gcagaccgcagaaggccggagacaccagcagaagacgaccccgacgcaggccagg

SEQ ID NO: 7015 - RNA, 85 nt, Homo sapiens
gcgcccgcggaccgagccgacggagccggaggcgggagccgcggcggccgggggccagcacgaagcccgaacaaccgcgacagaa

SEQ ID NO: 7016 - RNA, 78 nt, Homo sapiens
ggccgaggggagaaggggaggcagcgcggcccagggcggagaacggaaaagcaccaggaagcagagaggaccgcagaa

SEQ ID NO: 7017 - RNA, 51 nt, Homo sapiens
cgcagggcgcccccggacaagaccaggcccaagaaacagagaggagagcgc

SEQ ID NO: 7018 - RNA, 74 nt, Homo sapiens
cggccaggacggaaagaagccgcggcgccagcgacgcccaacaccgccaaacaccaagaaacagaccgcacacc

SEQ ID NO: 7019 - RNA, 78 nt, Homo sapiens
gaaggcagcgaaaggacacgggagaaagggagccgagcgagaccacgcaccacgggcggccaggccacagggcaccac

SEQ ID NO: 7020 - RNA, 74 nt, Homo sapiens
gccgggacccggccgcacgcgcgccagagggccacgccaggccggccagacaagccagggagacacgaccaccg

SEQ ID NO: 7021 - RNA, 82 nt, Homo sapiens
cagaagcgagcacagaggagaccaaccgcacccccgagaccccgagggaacagcacgcaaagagggccccgccagcgagaac

SEQ ID NO: 7022 - RNA, 61 nt, Homo sapiens
ggcgaacccccccaaggaccgccaacccccaaagcagaacagggagaagaaccaacaacgg

SEQ ID NO: 7023 - RNA, 74 nt, Homo sapiens
acgggacgggccagccaggggccgacacccggccacgggccaacgagggcaacggggaggacgccagacgaggc

SEQ ID NO: 7024 - RNA, 70 nt, Homo sapiens
cagggagaaagggccccaagagcaagccaaagaccagccccccagcccagcaccaacggccccaacccaa

SEQ ID NO: 7025 - RNA, 91 nt, Homo sapiens
cgggcgaggggccgcccgcgggaaggcgccggcccgggccgccccccgggaacgggagccgccgcgcaggccagagacccagcaggagcca

SEQ ID NO: 7026 - RNA, 75 nt, Homo sapiens
gagcaaacaaccggggcagacaacagagacgaaaccagcaccgaggccgcccccaccgagaggacaccagagcag

SEQ ID NO: 7027 - RNA, 80 nt, Homo sapiens
aagaagacggcgcggcaaccggggagcccgccagggcgcacacgcaggcacaacaagaagcaagggcaaccagaaaaggc

SEQ ID NO: 7028 - RNA, 72 nt, Homo sapiens
gcagcggacaccagggcgaccggggacagaaccacaggccccagggcaggggcccggagagcgcgcccccca

SEQ ID NO: 7029 - RNA, 75 nt, Homo sapiens
cagcagaacgcagcgcccagcaggggagagaagagaagagccccgaggcgccaagaaaacacagaacacaggagg

SEQ ID NO: 7030 - RNA, 81 nt, Homo sapiens
cccgagacacacaccaccgccacacgcgcagcaccgggagcccaggaacgaacacagagaggagcccagaagaaaccaagc

SEQ ID NO: 7031 - RNA, 68 nt, Homo sapiens
caacggagcgcgaggcgggcgcggagaagcgcggagggggcagcacgccgaaggagagaccagacaac

SEQ ID NO: 7032 - RNA, 57 nt, Homo sapiens
cgccacggaccgcgggacaagaaaacagcgaacaagacccaacagcaagagcaacaa

SEQ ID NO: 7033 - RNA, 60 nt, Homo sapiens
gccccgaggcccgcaccagccgcgccgccgccgcaggaagaacacagacaagaagagaaa

SEQ ID NO: 7034 - RNA, 68 nt, Homo sapiens
aaaccccagccgcccgcgcggacgcgaggccgagaaacagcaacgcggagagagcgccaagcgcgcag

SEQ ID NO: 7035 - RNA, 70 nt, Homo sapiens
gcgccgcaaggcccggcaaggggccgggaccggacccccagagccagccgcagccggccaccagcccaga

SEQ ID NO: 7036 - RNA, 78 nt, Homo sapiens
aaacaggcaaacaaagaaccccccaaggacgagacccaggcacaccaaagacaacaggcacgggggaaaagaagaaca

SEQ ID NO: 7037 - RNA, 71 nt, Homo sapiens
ccaacaccacccgagagccccaagcgccaccccaagcaccggcacagcaaaagaagggaaagaggaaaacc

SEQ ID NO: 7038 - RNA, 41 nt, Homo sapiens
aacacccgccgcgcaaaagggcggagaacggaaaagcacca

SEQ ID NO: 7039 - RNA, 73 nt, Homo sapiens
cgcggacaccagaaagggcggaagcgaaacacaggaagagacccaaagagcaccaagaagcagacaaaccgcg

SEQ ID NO: 7040 - RNA, 68 nt, Homo sapiens
acagcagacagcgcaagcggcagcacaaagaggcaggaggcccaaagcccagccaaggacccgaaaaa

SEQ ID NO: 7041 - RNA, 85 nt, Homo sapiens
gccccaggacagcaccagcgggccggaggagccagagcgcagaaagcggcggagaaaccaccacaaacacgaggccagcaacgac

SEQ ID NO: 7042 - RNA, 67 nt, Homo sapiens
gacagcggacgccccagcacccccagcgggcaggaccggccgggccgcagcacacaccggccacacc

SEQ ID NO: 7043 - RNA, 98 nt, Homo sapiens
aaacaaggacccgaagagaaggcaacgaagcacagacaccacaaaggacgcccccgggccaaacggcagcaaaaacagacagaaagggaggaaggccg

SEQ ID NO: 7044 - RNA, 75 nt, Homo sapiens
aggcagaaccagcaaaacccgaggaaggacgagcccccgcggagacagcccgaagaacccgaacgcaagcggcaa

SEQ ID NO: 7045 - RNA, 62 nt, Homo sapiens
ccgccagacagcgaagggacaacagagaccagccaagaggaaagaaggcaaccccaggggag

SEQ ID NO: 7046 - RNA, 76 nt, Homo sapiens
gccacccaacggggcagaaggacccaccgagaggagggagaacacaggaacaggcgcggccggagagggggaagcc

SEQ ID NO: 7047 - RNA, 90 nt, Homo sapiens
ccgggaccgcggagagaagcagcggacagcagagcagccccgcaaagggaacaggaagcagccacggaggggacgcccagacccaccgca

SEQ ID NO: 7048 - RNA, 83 nt, Homo sapiens
caagaagaaggcggagaccccaagagaccaagaaacgccaagccaaccccaggagaaggcagagcccccccaggcagaagccc

SEQ ID NO: 7049 - RNA, 77 nt, Homo sapiens
ggacaaaccgcccagcgaaaacaggggaggaacgggcacacagggaccaagaagccccggggacacgcgagaaaaga

SEQ ID NO: 7050 - RNA, 80 nt, Homo sapiens
gaaacagcaagcgaagccgaaaaagcgcccgagacgggcccgccgaaaggggagaaagaagacaaggaaagaacacgaac

SEQ ID NO: 7051 - RNA, 49 nt, Homo sapiens
gacaaacggcaccaagagccccaaaagcacgcacgaaaccggcaagcca

SEQ ID NO: 7052 - RNA, 39 nt, Homo sapiens
gaggagccgggcccccaagaggaacagcaagccaaagag

SEQ ID NO: 7053 - RNA, 75 nt, Homo sapiens
cggcgggacagccgacgcgcagacacagacgcggccaaccacccaaagaggagcaaccaaggggaaagccaccac

SEQ ID NO: 7054 - RNA, 77 nt, Homo sapiens
ccccaccacccaccccccaggagggagaaggagacagaagggggagacgggagcgggcagcagagaaggccaggacc

SEQ ID NO: 7055 - RNA, 59 nt, Homo sapiens
aaaacagacacgacccaaggcagaagaagaagagcggagaaccgaacaggcgcagggag

SEQ ID NO: 7056 - RNA, 43 nt, Homo sapiens
cggcccgggacacacacccagggaaagcaggcaggagggagag

SEQ ID NO: 7057 - RNA, 72 nt, Homo sapiens
aggagccaccaaagccagcgcaaagccacaaacagaaggaagaggaggccgaccggcgagccgagcccgaac

SEQ ID NO: 7058 - RNA, 34 nt, Homo sapiens
agaagcacagaaaacagagacaaggccacgggcc

SEQ ID NO: 7059 - RNA, 44 nt, Homo sapiens
gcccgggcacggccagcaccccgagagaaggcaccggccaaagg

SEQ ID NO: 7060 - RNA, 72 nt, Homo sapiens
ccaagagccaaacagagaggggaaggaacacgccgccccacccgcaggagacagcaaggaccaggggaaaaa

SEQ ID NO: 7061 - RNA, 76 nt, Homo sapiens
gagcggggcgcgggccgggaagaagcgccgcgcacggaccggcagaggacgaagagcccgggcccgccacagaggg

SEQ ID NO: 7062 - RNA, 63 nt, Homo sapiens
acggccccaggagaagagccagagcgggaggacgacgagagagccgagaccagcaccacccaa

SEQ ID NO: 7063 - RNA, 75 nt, Homo sapiens
caaaccccaccccaaaacaaagaacgagaggagagagggaccacacgcgccaacacagaaaagggccggaaacgc

SEQ ID NO: 7064 - RNA, 35 nt, Homo sapiens
ccccaccgcgcagggaggggaccgccaaccaaagg

SEQ ID NO: 7065 - RNA, 74 nt, Homo sapiens
ggacgccgccgggaggggacacacagccaggcccagcaaaaggggaaggcccagaagaaaaagagaaaaaaagg

SEQ ID NO: 7066 - RNA, 75 nt, Homo sapiens
gagaagaaggagcaggccacgccagcccgcgggacccgcccgaggcgaccacaagagacacgcaggcagggcgcc

SEQ ID NO: 7067 - RNA, 52 nt, Homo sapiens
cgagagacaacagcagagacaggaaggcaaggagggagcaacaacaaggagc

SEQ ID NO: 7068 - RNA, 76 nt, Homo sapiens
gaggacgggaggagaacgaccggagaacgcaggcccgaagggccgggaggggcaacaaggcccagcaagcaaccac

SEQ ID NO: 7069 - RNA, 74 nt, Homo sapiens
gaaaaggaaaaacgaagaacggcgcaaaaccagaggagggcggcgaagggggcgaggaagagacaggcggggga

SEQ ID NO: 7070 - RNA, 67 nt, Homo sapiens
caacagcgaaaaaagcaaaaacccaaaagacgaaaaggaacagcaacaaagaggggaaagacgaagg

SEQ ID NO: 7071 - RNA, 41 nt, Homo sapiens
ccagaagacacggagcccagcgcggaaaaggaacagaagag

SEQ ID NO: 7072 - RNA, 88 nt, Homo sapiens
cgggccagcggagccgggacggagaccccaagcggaccaaggaaaaaagaggaccaaccaccccaagccaagaaggcaaaaggaagac

SEQ ID NO: 7073 - RNA, 73 nt, Homo sapiens
aaagaacagacaccgggacaaaaagacgaagcaacagggaaaaggacacggaggcaagcgaaaagaaacaaga

SEQ ID NO: 7074 - RNA, 68 nt, Homo sapiens
gggcaggggcccgggcaaagggcggccaagggcagcgcccgccagaaagacaccagaagacaccaagg

SEQ ID NO: 7075 - RNA, 81 nt, Homo sapiens
ggagggagaacacagaaaccggccccaggaagagcaagcagcagaccaaaaaccacgggcgggaagcacggaaacagagag

SEQ ID NO: 7076 - RNA, 59 nt, Homo sapiens
aaagacccaccaaggaagcagcggccacgccaggggaaaagagacgaccgaccggccca

SEQ ID NO: 7077 - RNA, 79 nt, Homo sapiens
caagggccaaggacaacaagagaaccgcaaccgccgccccgcagagcggcgaaccggggcaggagggcgcgcacagacg

SEQ ID NO: 7078 - RNA, 85 nt, Homo sapiens
caggcccagcccgggcccagcccaggcaaggaaacggaggcgaccaggcccagaaacgagccacagggagccaagagggaggagg

SEQ ID NO: 7079 - RNA, 69 nt, Homo sapiens
ccaaagggaaaaaagaccagacagacaacggccggaacaacaggaaaggaccacaaagaaagagcgagc

SEQ ID NO: 7080 - RNA, 78 nt, Homo sapiens
acccacagcacacccaggacaacgaaaggccagcaccagggcacgcaaaaaaccacgacaagcaacacgacaaaacac

SEQ ID NO: 7081 - RNA, 86 nt, Homo sapiens
gggccgggaggggacggccgccggagccgcgaggccaagaacgcacaccagcaccagcccaccaaaccagcacgaccccggagcag

SEQ ID NO: 7082 - RNA, 73 nt, Homo sapiens
ccaagggggccagccgccgcgcccgcccgacccgccaccgccaggccagagaagagaggagaggaggaacaag

SEQ ID NO: 7083 - RNA, 72 nt, Homo sapiens
ggagcggcgggaggccaccgccagggcaagggcgcagcacgcagacccgcaagccccaagcagaggacgcgc

SEQ ID NO: 7084 - RNA, 71 nt, Homo sapiens
gccgacgacgacggcgcgaggaggacgagcggcgagggacggaaaggcaaaaagcacaggagggcaggacc

SEQ ID NO: 7085 - RNA, 80 nt, Homo sapiens
aaacgcagccacaccaccgggaaacgcggggacaccaacaaggcccaccgacccagagaacacgcccaccccccaccccc

SEQ ID NO: 7086 - RNA, 40 nt, Homo sapiens
acacgaggacacaagaaggccgaccccgggacacacccag

SEQ ID NO: 7087 - RNA, 61 nt, Homo sapiens
cagcagaacaacgacagagaacaggcccaaaccaggaccaggacgaacccaaacggaggac

SEQ ID NO: 7088 - RNA, 69 nt, Homo sapiens
gcccgggcgccccccacagagaaaggcgccaccaaaagacggagagagacccagccccaaagagaccac

SEQ ID NO: 7089 - RNA, 55 nt, Homo sapiens
aaaagcaagaaacacaacgaaaggaaaaggacggaaggcgaccacaccaccccag

SEQ ID NO: 7090 - RNA, 84 nt, Homo sapiens
cgagccgggaggccggccgggccagcacccggccgagacggcggcagcagcggcacagaacagggagaacagcaccacaagaag

SEQ ID NO: 7091 - RNA, 78 nt, Homo sapiens
gaggaaggaccccacacacaaaaacggaggaaaccacacaacaagaacgcgccagaagacccaccaaaggcaccagaa

SEQ ID NO: 7092 - RNA, 81 nt, Homo sapiens
gccgccccgcgagcacagagcccgccgccgaccgccgcccgccacacccgccgccaggaggccccgggggccgcggcccgg

SEQ ID NO: 7093 - RNA, 81 nt, Homo sapiens
aggaggcaaggaccagaagaagcacaaggcaaccaacacaaaaggccggaccaggggggagagcggggcccacacagaggc

SEQ ID NO: 7094 - RNA, 68 nt, Homo sapiens
cgccagaaggagccgggcaaacgcccaccgccccccaaccgacaggccagcaccaggcaggcacccca

SEQ ID NO: 7095 - RNA, 50 nt, Homo sapiens
cagcgcccccaaacggcaggagacagagagaaagcaacagcaggccagcc

SEQ ID NO: 7096 - RNA, 55 nt, Homo sapiens
acaggcgccaggagcacagaagagcgaggagggacgcaacaaagcagccagagaa

SEQ ID NO: 7097 - RNA, 74 nt, Homo sapiens
acaacaacgacaccaggcacccaacagacaacggacccacccaccaccacacgcggaggagggcgggggcggca

SEQ ID NO: 7098 - RNA, 72 nt, Homo sapiens
cggcagcggccgcgggggccaggacagggacaagcgcacagcggagaaagcagcgcggccaggaggcgggaa

SEQ ID NO: 7099 - RNA, 85 nt, Homo sapiens
cggccccacggcagacaggcgacagacagggccagccgccacccggacagaggcgagaaccacgccgacaacggcggaagaggaa

SEQ ID NO: 7100 - RNA, 68 nt, Homo sapiens
aacagggcgccaaaaacaagacaccgaagcgcgaggcgaccaggcggggcaagcagccgcccgcgggc

SEQ ID NO: 7101 - RNA, 84 nt, Homo sapiens
gcgggcgccagcggccccgccgagagccggaggcaaggagaacagagcgggagaaccaaacacagccggagccgacggaggccg

SEQ ID NO: 7102 - RNA, 75 nt, Homo sapiens
agcgcagcgacgagaggggagacggaagcggaagcacacgccagacgccagcaggccggagcacggcggacccag

SEQ ID NO: 7103 - RNA, 68 nt, Homo sapiens
agagagacgagagaaacccacgaagacgcgcggagaaagagaccaccgagaggaaccagagaaggaga

SEQ ID NO: 7104 - RNA, 70 nt, Homo sapiens
gccaagaggcggccaaggggacgagcaaaggaagcgcgaacagcagcgcagggaaagggagcagcaccgg

SEQ ID NO: 7105 - RNA, 75 nt, Homo sapiens
accgagggcaccggagggaagcgggccaccgcccggcccccaagacggcccccgggcggagacgacaacgaggga

SEQ ID NO: 7106 - RNA, 37 nt, Homo sapiens
ccgacagacaaccagaaggagcggagaacggaccacc

SEQ ID NO: 7107 - RNA, 39 nt, Homo sapiens
caaaggaccagccagaaaaggacccagaccacaagacag

SEQ ID NO: 7108 - RNA, 75 nt, Homo sapiens
ggacccaaagagaagccaacagggcaagaaccgacaagccaccggcggaaagcgcaggccgccaacgcggaggca

SEQ ID NO: 7109 - RNA, 73 nt, Homo sapiens
acgggcgccacagacacaaaagggccgaaacggaggcccgccacggccaggagcccggccgggggccacgggg

SEQ ID NO: 7110 - RNA, 51 nt, Homo sapiens
cagagagaagaaagggggcccagccgggcgcaaaggccgaccgaacacacg

SEQ ID NO: 7111 - RNA, 68 nt, Homo sapiens
cagccagggaacgcagggaaaagaccgcaccccgggccaggaaacaaggagcgacaggacccaaaccc

SEQ ID NO: 7112 - RNA, 60 nt, Homo sapiens
cagcaaaggggccacagagacgggcaacgggagaccgcagaaggagaaaacaaaaaacac

SEQ ID NO: 7113 - RNA, 67 nt, Homo sapiens
ccaaaaccaacgggcaacagaagacgggacgaagcgcgagcgaggcccagcccggcgggcgcagcgc

SEQ ID NO: 7114 - RNA, 72 nt, Homo sapiens
cagccaggaggaggggacagacggaccaaccggaaaaggagccaagacaaacaggaccgcgacagcaggccg

SEQ ID NO: 7115 - RNA, 74 nt, Homo sapiens
accggaaggcagagaaaagaccgacccccaaaccggaccaagagcagagacccacagacccgacgcaaaccaaa

SEQ ID NO: 7116 - RNA, 78 nt, Homo sapiens
agaagccgaaaagcgcagcgagcggagccgccggagacgaagaacggaagcgccccagaggagagggcggagagacgg

SEQ ID NO: 7117 - RNA, 58 nt, Homo sapiens
gaacaagcacaaagccacagcgaccaagaaacggcgaggaaagagaggagccccggaa

SEQ ID NO: 7118 - RNA, 79 nt, Homo sapiens
gccgaaacggaaagcccaagaggagacgacggcgagccagcccccacccagaggagaacgaaaccacgacaaccagcgc

SEQ ID NO: 7119 - RNA, 82 nt, Homo sapiens
ccggaccgagcaacaccgagagaggaggagccagacgacaagcacacacaggcgcgaaacggaaaaagagacggagggaacg

SEQ ID NO: 7120 - RNA, 77 nt, Homo sapiens
gcgaaaaaacaggaggacacaagcaaaagagcaacgccacaagagccacagagccaagcgcagcccagaaagcggag

SEQ ID NO: 7121 - RNA, 68 nt, Homo sapiens
gcaacccaaacacagaaccaaaacaggaccgacagcacgaggaggagagaagaaaagcggcccgagac

SEQ ID NO: 7122 - RNA, 71 nt, Homo sapiens
acggccggagcgcacccggaggagaggacgagcccgaacggacaaggcggacaacggggaccgcagcggaa

SEQ ID NO: 7123 - RNA, 64 nt, Homo sapiens
ccgccccgggggcgccaggcgaccggagcgaacgccacgccgggagaaggagggggcagagcac

SEQ ID NO: 7124 - RNA, 86 nt, Homo sapiens
agcagcccccaccacggccggaccgaagggcggcggcggaggggagccagggcgccccagcagcacccgaaagagcgaaagcccag

SEQ ID NO: 7125 - RNA, 64 nt, Homo sapiens
cagcccagccccccgcgccacggaggaccagagggcgaccagcagcggcgcccaggagaacggg

SEQ ID NO: 7126 - RNA, 70 nt, Homo sapiens
caagaaagagcaggacaagagaaagggaagcccaacacccgcaaggccggccggagagccagggacagcg

SEQ ID NO: 7127 - RNA, 75 nt, Homo sapiens
gggggaacgacgaacagggcaaaccgcaggcacaacacaagccagaggacaaaacccagccggcacaaaccagga

SEQ ID NO: 7128 - RNA, 73 nt, Homo sapiens
gaggcacccacgcccacaagcccaggagagccagggacggcgcacaacccaccagcccgcaccccagcccgca

SEQ ID NO: 7129 - RNA, 74 nt, Homo sapiens
gaaccacgggagacaccaaaagaggagaagccgcaggggggaaaaagagccagaacacgagaaaagaagaagaa

SEQ ID NO: 7130 - RNA, 43 nt, Homo sapiens
ggcggcgcggacggggcgggaaaccccccaggcaagaggcgca

SEQ ID NO: 7131 - RNA, 80 nt, Homo sapiens
aggaacaggcggcgcgcgcggcgcgggacgcgcgcgggcacccacggagccccggggcggcggcgcccagcggccacacg

SEQ ID NO: 7132 - RNA, 91 nt, Homo sapiens
cggcggcgcaggcgggaagaggcggccgcgaccccggccccggcccggccgggcgagcgggaaaaaccagaagagaaaaaacaaaggggag

SEQ ID NO: 7133 - RNA, 96 nt, Homo sapiens
gaaccagcaaagacagaaagagcacaagagaggacaaaaaacaccccgaaaacagagggcagagccaggagggaaacgccacaaaaggcaccaaga

SEQ ID NO: 7134 - RNA, 76 nt, Homo sapiens
cgggggaacgcacaacagccaccgcagcgaacagacccagaaggcggaaaacacaagcggccgaaacgcggaaaaa

SEQ ID NO: 7135 - RNA, 72 nt, Homo sapiens
accgaagcgccgcccaaaggagaaccgcaggaaaggccagcccgcagcgggcccaggcggaggcgccaacag

SEQ ID NO: 7136 - RNA, 89 nt, Homo sapiens
gcggcaggagggccgcaagacccaagaagaagaaggcgaaggaccccaacggggaggccaacggaagaaggaccagcgccagccagcca

SEQ ID NO: 7137 - RNA, 76 nt, Homo sapiens
acaaccgcagaaaggaagagaggggggcggaagcgaggaaggaaggaccagagacgggaaagaagaaagagaaacc

SEQ ID NO: 7138 - RNA, 76 nt, Homo sapiens
agacccgaccccagcggacacaaccagagggaagcacgcccgggcacagcggaagagacgacggaacagccccggc

SEQ ID NO: 7139 - RNA, 74 nt, Homo sapiens
ggccgagcggccaccccaggcaccaagcggccgaagacaagcgccggcagggaacgcgaggacagagcaaggcg

SEQ ID NO: 7140 - RNA, 86 nt, Homo sapiens
gcgcggggagcagggcgcacgaaaaaagcccgggcaaggggacgcgcagcgagcccccgggccacgggcaccagggcccacagggc

SEQ ID NO: 7141 - RNA, 71 nt, Homo sapiens
aaaaggccaagaaggcaggacccagaccagaaaaagagcagcccagcgggggcaggggacaagaccggcgg

SEQ ID NO: 7142 - RNA, 52 nt, Homo sapiens
ccggccgacaaccacgcccgacggagcagcagcgccgggaaggaaagcacac

SEQ ID NO: 7143 - RNA, 80 nt, Homo sapiens
ccaaggaagccacggcagacacacaacccgacccgacgacccagcagggcgccgggaggccacccaccgcaagacaccac

SEQ ID NO: 7144 - RNA, 76 nt, Homo sapiens
ggagacacagggaagcggcaagcagagaaaaccgccaacaagagagaggacagcgaacccacccaacacggcaaaa

SEQ ID NO: 7145 - RNA, 74 nt, Homo sapiens
gacaaggaagagagcgcccaggaaggagccaaagcacaagaagaagacgagcggaagccgcagaaggaccggcc

SEQ ID NO: 7146 - RNA, 85 nt, Homo sapiens
gccaccaaagcagcacagcagcgcagacacagccaaaagacgaccaggagacacaacaggccaaagccaagagaagaaaagcagc

SEQ ID NO: 7147 - RNA, 70 nt, Homo sapiens
gcaaaccacagaaaagcgaaaaacgcggcacccggaaacaagccacgaaggagagaaaaccagcagcagc

SEQ ID NO: 7148 - RNA, 77 nt, Homo sapiens
agcggcggcggcggcagcgggcgggccccgagagcagcagcgcgcggacaccgaagcccgaggccacaggacacgcc

SEQ ID NO: 7149 - RNA, 80 nt, Homo sapiens
cacacgccgacaacgcccaagcagcaacaacgaagccaggagggacaccgcgaccagcaccacccaaacaagaccacaag

SEQ ID NO: 7150 - RNA, 83 nt, Homo sapiens
gagcgggacccgaccaccgcgccaagcccccacgacaggagagagaagaaaagcgggggaagggaagcacccagcccaagacc

SEQ ID NO: 7151 - RNA, 80 nt, Homo sapiens
gggagacacacagccaggggccggagccacccaccgacgcacgcccaggcacacaccccggagaaggacggaagaggggc

SEQ ID NO: 7152 - RNA, 76 nt, Homo sapiens
ggggcgcagagcgcggcgacggggcagaggcgcgccgggaacacagaaacgccccgggccagccgccaaggccgcc

SEQ ID NO: 7153 - RNA, 64 nt, Homo sapiens
ccacgccacagaaaaaacggacaggcggccgacaggaagggaaacaaggcagcagccccgcccc

SEQ ID NO: 7154 - RNA, 69 nt, Homo sapiens
gaccaagaaccagagggaaggggcacgggcacgcagcccagaaagggaggaaggagcaaagaggcagga

SEQ ID NO: 7155 - RNA, 76 nt, Homo sapiens
cggagacgggagaagaaaagacgccaaaaagagagaaaaaccagaaagaaaacagacgggagagagcgccaggcgg

SEQ ID NO: 7156 - RNA, 65 nt, Homo sapiens
agcgagggggggcgcgccggaaaccggagcgcgcagcagaacggagaaacccgcgacgaaccgca

SEQ ID NO: 7157 - RNA, 48 nt, Homo sapiens
acaacaacaggaacccagacagcgcggacaagccccagagagagcccg

SEQ ID NO: 7158 - RNA, 69 nt, Homo sapiens
aaaccgcggcggcgacccaccacgccagccaggccaaaggccggaagaggcgcacaccccggccagggc

SEQ ID NO: 7159 - RNA, 72 nt, Homo sapiens
ccacgacaagaacaggccagaaacaggaccagagagcccagcccacaaaaaggaaccgggccgaggagggcg

SEQ ID NO: 7160 - RNA, 73 nt, Homo sapiens
gacaacaagcaagagacgcgcaggcacagaggcacacacggaccccccaaagagaagcgccggcccaggcgga

SEQ ID NO: 7161 - RNA, 88 nt, Homo sapiens
caaagagcgccccacgagagaacggcacacgcgagcggacaaccggaacccccgaccaacagaagagcaccgggaagcaagacccccc

SEQ ID NO: 7162 - RNA, 77 nt, Homo sapiens
cagcagccaaggcaggaaaaagaaccacgaaagcagggggccggacaaccaaaaagaagaggagaagaaaaggaaaa

SEQ ID NO: 7163 - RNA, 85 nt, Homo sapiens
aggaaccgcccgcaagagcgagccgccgccccgggcgcagacagagcaccagcaccagcagaggaaggagacccaggaagaaagg

SEQ ID NO: 7164 - RNA, 80 nt, Homo sapiens
gcgcagaaaccccggacaaggcacgccagacggggcccgcacggcgccggcccgcaaggcaaagaggcaaagcaccccgc

SEQ ID NO: 7165 - RNA, 58 nt, Homo sapiens
gggagcgggcggccaaccaggggggacaggaacagaaagcgaagaaagaccacaacaa

SEQ ID NO: 7166 - RNA, 85 nt, Homo sapiens
ccagacgcgcgcaacgacaaacccggcccggggacccacgcggaggccgcaaggaggaagaggggccgagagaggaggcgggcca

SEQ ID NO: 7167 - RNA, 65 nt, Homo sapiens
aaccgacaggaaccagacacgcaaacagggcaagaaggagagacacagcgccggaaccggagaga

SEQ ID NO: 7168 - RNA, 80 nt, Homo sapiens
cccgaccgccgccaccccgcccccagcgaagagcaaggggagagccaccacgaaaggcgcaccaggcgcggaaagcggcc

SEQ ID NO: 7169 - RNA, 70 nt, Homo sapiens
ggccgcacgagaaggcaaacgggcagagaccaggcagccacagaagcagggaaggggaagcaggccaacc

SEQ ID NO: 7170 - RNA, 53 nt, Homo sapiens
gaggacccaggcaccgcccgccgacacccaccagagccacccgcaccggggcg

SEQ ID NO: 7171 - RNA, 53 nt, Homo sapiens
gcccaggccgggagcgcacaagagagaagcacgggaccaagagcgccgggaaa

SEQ ID NO: 7172 - RNA, 100 nt, Homo sapiens
gccacaagaccaagaggaccaccaggagacgggcccacaggccaagagaccacggccggccacaaagcgcccggaaggaagcggcgccgaacgcgggcca

SEQ ID NO: 7173 - RNA, 67 nt, Homo sapiens
aagaagagagacccagacggggcgaagaggcgcagggagcaggagaagcggagcgaaggggcgggca

SEQ ID NO: 7174 - RNA, 53 nt, Homo sapiens
caaaaacaccccacagaacagaggggggagcaggggggaggaacaaggcgacg

SEQ ID NO: 7175 - RNA, 80 nt, Homo sapiens
cgcacggggaaccgccgcagcccacacccaggaccccaaggaccaggcccgcccacggaaagaaaggagaccaggcggac

SEQ ID NO: 7176 - RNA, 72 nt, Homo sapiens
gcgagcgagggggggcgcgccggaaaccggagcgcgcagcagcggaggcacccaccacgggccaggcgggcc

SEQ ID NO: 7177 - RNA, 78 nt, Homo sapiens
gcccgcaggaccgggcggaagccccggaggcgccccagccaagcgcccgaagagcggaaagagagaagaaaaccaggc

SEQ ID NO: 7178 - RNA, 81 nt, Homo sapiens
gcaggcacccagagagcccagccccgagggaggcaggacagagcgggagccaccagcgccaaagggaagccaggagcccgg

SEQ ID NO: 7179 - RNA, 96 nt, Homo sapiens
gaaaaagaggacccaaaaaagagagaaaaggccaaagagagggcgaacaagcaagcacaaaaggccaaaagccaaagaaaacaagaaaaagcacca

SEQ ID NO: 7180 - RNA, 73 nt, Homo sapiens
gggacccccagccaaaggcaaagaggaccaaagcgaacagacaggaaaccagaacagcaaaaaagacacccca

SEQ ID NO: 7181 - RNA, 68 nt, Homo sapiens
acgcaccgaagcaaaaccaacgcaaccaccccaggaagcaggaaaaaagaacaagaacgcaaggacaa

SEQ ID NO: 7182 - RNA, 72 nt, Homo sapiens
gaggccagcgggacaagcggggacaggaccggcccaacagggcagccgggccccccgcgccgcgggggccaa

SEQ ID NO: 7183 - RNA, 58 nt, Homo sapiens
ccccgcgcaggcacacagcaaaggggccaaaaagagagaaaaaccagaaagaaaacag

SEQ ID NO: 7184 - RNA, 81 nt, Homo sapiens
cggagggcaagagggcgaaacaggccgacgcaaacggagccgcggccagaaaggaagaaccgacccaaggcgaccaccccc

SEQ ID NO: 7185 - RNA, 80 nt, Homo sapiens
cacacccacccacaggaaacagcgagacagagcaagcccccaacaccagcaaccccgggggagacaagccggacggggca

SEQ ID NO: 7186 - RNA, 86 nt, Homo sapiens
ggagcgcgcagggggcgcgccgccgcccgccccagaccgcggcgaaaggggacagggcggaccccgccaacagagcccaccgggcc

SEQ ID NO: 7187 - RNA, 85 nt, Homo sapiens
cacacacccgcgcgcgcccgggaggaaggaacgaggcaaggagcaaagcagcggcgcagcccgggagaagcgccccagcagcaag

SEQ ID NO: 7188 - RNA, 44 nt, Homo sapiens
gaagaaggaagggcaaggacagacgcaggaggagggagacgcac

SEQ ID NO: 7189 - RNA, 71 nt, Homo sapiens
gcaagaaacgggggaagcagagcgcacaaagggaaaggcgcgaaccaagacaggaagcccacccaaagaga

SEQ ID NO: 7190 - RNA, 75 nt, Homo sapiens
aaccaggccacccaagaaacaaacagagaggaaccagcaggcaaagaaagcaaaagaagagcgaccgacagagga

SEQ ID NO: 7191 - RNA, 59 nt, Homo sapiens
gccgagcaggcgccgccccagcccgcgaacgcggccaagggaggccgccagccgaggcg

SEQ ID NO: 7192 - RNA, 38 nt, Homo sapiens
caacaaaagagccacccaagggggggccgaagaagcca

SEQ ID NO: 7193 - RNA, 68 nt, Homo sapiens
caggcccaccgaccccagaacggaaacacaacacccagccacccaccagcgacaaggcagggccagcc

SEQ ID NO: 7194 - RNA, 75 nt, Homo sapiens
gcagaaggcccgaacaggcacgaaaaaacccagcgaagaccacagaaaccaaaaagcacagcacgaggcgccgga

SEQ ID NO: 7195 - RNA, 62 nt, Homo sapiens
aggcagaggcgaggaaaaaaccacgacaaaaccacccaacaggaggaacagaagggaaaaaa

SEQ ID NO: 7196 - RNA, 74 nt, Homo sapiens
gcggcgggccgggcagcccggccgacaaccacgaccggggggcgaccacagaacaggaaccagaaagacccccg

SEQ ID NO: 7197 - RNA, 77 nt, Homo sapiens
aacaccgaagcaaaaagaagcccggcagaagacagacccgagccccaaagacagaaaagccccgagacggaagagaa

SEQ ID NO: 7198 - RNA, 51 nt, Homo sapiens
aaaaaaaagcaagagagagacacgaacaaggcacccgacaggaggaccacg

SEQ ID NO: 7199 - RNA, 73 nt, Homo sapiens
gaagaccgaccagaagacagggcaagaggcgaaaaaccgagaggcacaagaccggcagggaggaagccaagaa

SEQ ID NO: 7200 - RNA, 89 nt, Homo sapiens
cggcacggcccggccccgcccggcgccgaggacccccggagagcgacgcaggggaggacagggaacggcgaggagccaccgggacggcc

SEQ ID NO: 7201 - RNA, 64 nt, Homo sapiens
gagcccaggggaaaaccggaaacgaaagcaaaaaagggcaacggcgaccccaaaaccaacaaca

SEQ ID NO: 7202 - RNA, 77 nt, Homo sapiens
agcggcaccggcgagccgggacgcgcggaacaaggaaacccaccgaggccaccaaagaacagcacgaccagacccga

SEQ ID NO: 7203 - RNA, 73 nt, Homo sapiens
gaaaagcacagagaagacgaaggaggccggagaagaaagaggccacggaccgcgccgaacgcaacagaccgag

SEQ ID NO: 7204 - RNA, 75 nt, Homo sapiens
gagccacagacgaccggcacacagcagagagccaaagcgaggccaggaacgacacaaggggaagcgaaaccggag

SEQ ID NO: 7205 - RNA, 49 nt, Homo sapiens
gccaacagcaaagccaggaaagaacaagagagaggacgggaaagccaag

SEQ ID NO: 7206 - RNA, 74 nt, Homo sapiens
agccgccacacgggggcaccacccccagccgcagagcgggagggcaagcgggggcaggccgagagggccacccc

SEQ ID NO: 7207 - RNA, 79 nt, Homo sapiens
cccgcaggcccgcgggggagacgcagccgcgcggaaaaggaacagaagaggaaccgaaacccaagaaaaaccacccagc

SEQ ID NO: 7208 - RNA, 64 nt, Homo sapiens
gcgaagagagaagaggcgcgacggaccagagcaggaccaaagaagccaaccgacacaacagcaa

SEQ ID NO: 7209 - RNA, 108 nt, Homo sapiens
aaagcccccacgcccagccaggagcaccgccgaggacccagcacaccgaggagaaggagggggcagagcacggcaggcagaaggggccaacccgggggaacgcaccgg

SEQ ID NO: 7210 - RNA, 61 nt, Homo sapiens
caaagcaaggaggaggcagggccagcggaaagggcacacggcccgaacaagggaacaccag

SEQ ID NO: 7211 - RNA, 64 nt, Homo sapiens
aggggccgcgccgccaccgcgaacaggagcccgacagaagccgaacacaccaccggaacaaaga

SEQ ID NO: 7212 - RNA, 82 nt, Homo sapiens
ggagcgaggggcgccggcgggggggcccgggcccgacccaggcaagcgagcaggcgagcaggagcccacagccgagcagcgg

SEQ ID NO: 7213 - RNA, 69 nt, Homo sapiens
ccaagagaagcgcaagagcaacaccccaccccaagacaggcacaaaaaagggccccaaggggccggcaa

SEQ ID NO: 7214 - RNA, 65 nt, Homo sapiens
ggcggaggggacggcaggcgaggcggaacaggccgggcaccaaggcgcaggcaaccccacggaag

SEQ ID NO: 7215 - RNA, 66 nt, Homo sapiens
cagagacggaggaaacccgacagcaaaggaacgcaagcacaggaccagaaacgaaaggcagcagaa

SEQ ID NO: 7216 - RNA, 77 nt, Homo sapiens
caggaaagcagggcccaggccagacggacgcaggcggcgcgcgcgcgccgcggagggcccaaagcacaagcgaccgc

SEQ ID NO: 7217 - RNA, 65 nt, Homo sapiens
gcacgccgagcaaggaggagacacgcggcgcccacgcacaagaggccaaacgcacagcaaggaaa

SEQ ID NO: 7218 - RNA, 72 nt, Homo sapiens
gagcaaccagagcacacgagagggccgggacaaggaaggaaagcaagaaccagaggcggagccgggggacag

SEQ ID NO: 7219 - RNA, 80 nt, Homo sapiens
ccgccgggccgggcgacgcgcagccccggcgccccggggcccccgggcgagcaaacaggcacaccgaaccacccggggca

SEQ ID NO: 7220 - RNA, 81 nt, Homo sapiens
ccgaacagaaaccccccccccagccaccaagagaaggacccaaccgcggcacacagaaaacccggacccaccccgcccaga

SEQ ID NO: 7221 - RNA, 68 nt, Homo sapiens
cgcacccggggaaccagcaaacaagaaagcgggaacccacaacgaaggaaggaacagaggcacagcga

SEQ ID NO: 7222 - RNA, 75 nt, Homo sapiens
ggaggaagaggcagaggacccaccgccagccacccacgccagcagagaaccagcccccccaagccccggggccag

SEQ ID NO: 7223 - RNA, 60 nt, Homo sapiens
cgcgagccgcagccggcccgccgcccggaacagcgcgacagagggagaccccaagacgac

SEQ ID NO: 7224 - RNA, 55 nt, Homo sapiens
caacacaggaacaagcaccacagagggaccaaggcggagacagcgagacaaggcg

SEQ ID NO: 7225 - RNA, 65 nt, Homo sapiens
gcagggcgcccccgcaaaggaaggaaccgaagaaagaaaaacacggccaagggaaaaaagcaggg

SEQ ID NO: 7226 - RNA, 76 nt, Homo sapiens
acacgccaccccaaggagcacgcagggcgagggaacagagagaaacccggcaagaaagacagcaccagaagcgcgc

SEQ ID NO: 7227 - RNA, 74 nt, Homo sapiens
aagccgcgcaggccgcaaacgaagaggaacagaaaacggcaaaccgccaacaagacccacccgaagaaaacccc

SEQ ID NO: 7228 - RNA, 79 nt, Homo sapiens
ccccggggaccccggccgggggcggcggccgggggcccagcccgggcggcgcggccagaacaaaaccagccaagcagag

SEQ ID NO: 7229 - RNA, 74 nt, Homo sapiens
cagacgaggcgagggaggcagcagaccgcacaaccccagaagcgcgcccgggaggagacgccgcacccaggcgg

SEQ ID NO: 7230 - RNA, 86 nt, Homo sapiens
ccaggccagacccgaaggccaggagacccgaccccaagccaaaacagagggagacgagaaaagggccgagcacaagccaagaaggc

SEQ ID NO: 7231 - RNA, 64 nt, Homo sapiens
cagcgcgcggccccaccggccccacccacagagaacaggcaacaaaacagccggacacagacca

SEQ ID NO: 7232 - RNA, 51 nt, Homo sapiens
gcggaccagagacagggccgcaccaaccaacagcaaccagacggaggggag

SEQ ID NO: 7233 - RNA, 83 nt, Homo sapiens
cgccgaccaacgccggaaaggcgcggaagacacgagaggcgagggacgacagagcaagcggcagagggcaagcgggaaaaaga

SEQ ID NO: 7234 - RNA, 70 nt, Homo sapiens
ccgggcggaaggcgcgcaccacggagcgggcgcggcggcagcaccggaacaacagcccgggcaagagcaa

SEQ ID NO: 7235 - RNA, 73 nt, Homo sapiens
aacagacgagagccgcgagcgaacagagggccccccggagggcaccagaacaaaagaaaggaacaggaagcag

SEQ ID NO: 7236 - RNA, 89 nt, Homo sapiens
agccaccagagaagcggcacagcagagaaggagcagagaacgaccaagaggaggaacaagacgccaaggagacgccgcagagacccccg

SEQ ID NO: 7237 - RNA, 74 nt, Homo sapiens
gacaccaaaaaacacagagagcaacacgagcgcaaaggcaaaagggaaagcaaggggaagggcccaagaagaca

SEQ ID NO: 7238 - RNA, 61 nt, Homo sapiens
gcagccccgagcgccgcggacgcgcacgagggacggggaaaggagaacgcagacagaaacc

SEQ ID NO: 7239 - RNA, 74 nt, Homo sapiens
acgccgcccccggccacgacccccgaagagccgcgccgccagggagggcgaagggaagaagcagaaaccagccc

SEQ ID NO: 7240 - RNA, 78 nt, Homo sapiens
cggaaaaaaaaaaacacgggcggacggaacgaccggccaacgccccaccggcgccacgcggggcacagccacacaggc

SEQ ID NO: 7241 - RNA, 71 nt, Homo sapiens
acaccaggaaaagacagagaaaccagggcgaaggacgaggaccgaaaaagggcagaggacgaccagagcgg

SEQ ID NO: 7242 - RNA, 75 nt, Homo sapiens
gagaggccggaggacaccaacagggcaggaagcgcgggaagcccaggacgggacgacccgggcggaggaaacaac

SEQ ID NO: 7243 - RNA, 54 nt, Homo sapiens
agaccaaaaacgcaagaaccgacgaggccaccggagcaagagcgacaacaacac

SEQ ID NO: 7244 - RNA, 82 nt, Homo sapiens
caagaaggacaaagagacaagccgagagaaagcaagcaaaggcgccacggccggaacgcacagcggaaggccgccacccggg

SEQ ID NO: 7245 - RNA, 74 nt, Homo sapiens
aaacaagcgccaagggcaggagagaaggggcaaaccgccagcagcagacagcgccacagacagcacacaaggca

SEQ ID NO: 7246 - RNA, 73 nt, Homo sapiens
cgaaaaaaaaaggagagaagcgaagcagccaaagcaggggcaacccagaacccccagggcgggccagccaaag

SEQ ID NO: 7247 - RNA, 67 nt, Homo sapiens
gaaggaccaagaaccagaacaacaagaaggagaaagacacaacgacagaagaaaaaacacaagaaaa

SEQ ID NO: 7248 - RNA, 78 nt, Homo sapiens
gcacaaagccgaggccacacaacgggcacccccgacgccccacccgcccaccccagcagggagagcaccacagcaacc

SEQ ID NO: 7249 - RNA, 72 nt, Homo sapiens
agacacgaccgcccacgaagccacagaaggaggagagaaagaacccacgcaggacgacagaagaggccggac

SEQ ID NO: 7250 - RNA, 78 nt, Homo sapiens
cgccgaaaggagcgcgccacagcaccgccccggcgggcagcagaggcagacagaacaagaaagggacaccaaggcccc

SEQ ID NO: 7251 - RNA, 72 nt, Homo sapiens
aaaggcccagagaacagagagagaaggaacaccagaaacggacaagcagaccggaagaccgacggaagacca

SEQ ID NO: 7252 - RNA, 42 nt, Homo sapiens
aacggaaagcagccacgaagaagggaggaagcacagaagcag

SEQ ID NO: 7253 - RNA, 78 nt, Homo sapiens
cccggcccggcccgacaccgcgggccgccagacgggaaggagcggggcccggcgcacccaccaccgccgcccacggca

SEQ ID NO: 7254 - RNA, 63 nt, Homo sapiens
cgggaaaggaagcgcacaggaagccggaaacggccacgaaaaaggagaggagagagcccagag

SEQ ID NO: 7255 - RNA, 73 nt, Homo sapiens
acaggcacacacaggagaccccaaagaaggcccgcagaccgaagcaaagagcaaggaagaagcaccacgacca

SEQ ID NO: 7256 - RNA, 63 nt, Homo sapiens
ccgggagcgaagaaagcgagcaccgaagaaggaaagacggaaaaagcccacgacacagccaaa

SEQ ID NO: 7257 - RNA, 81 nt, Homo sapiens
ggggcagggacggagcaagcaggcgccaagagcggagggcgccacccgaagggcccggaccgccgcgggcgagacccgccc

SEQ ID NO: 7258 - RNA, 83 nt, Homo sapiens
acaagcaggcggagacaggcagggaagagagaccagaaaggacaggacggcggacacgcccccgggccaccaggggagcagca

SEQ ID NO: 7259 - RNA, 56 nt, Homo sapiens
cgagaaccgcaggagccagagccagaaagcgagcgacggaacacaaacaggcggaa

SEQ ID NO: 7260 - RNA, 86 nt, Homo sapiens
accgccaggagaccagagaggagaggagccagccccagcaggcccagagggacccagagggaccggaacgcaggagaacacgacgc

SEQ ID NO: 7261 - RNA, 59 nt, Homo sapiens
cggggcggggagccggacgcgggcgcagcacagggaacaccagaggcgggaccacgggc

SEQ ID NO: 7262 - RNA, 75 nt, Homo sapiens
agaggaaaagaagacacagaccaggacccgaacccgaggcaacaacagcaacaggcccagcacgacagagacccg

SEQ ID NO: 7263 - RNA, 85 nt, Homo sapiens
gaaccggagcaaagaagcagagggcaaagggaagaaggaggaaaagcaggaagcggaaaggaagggcgacgcgccggaaagcccc

SEQ ID NO: 7264 - RNA, 41 nt, Homo sapiens
aggggagaggaggcaggcccgcgggcccacggaaaagacgg

SEQ ID NO: 7265 - RNA, 83 nt, Homo sapiens
gagggggcgcccagcgccaacaccaaggacaccagaggaccagaacccacgagaaacagacgagccaaccagaccccaggagc

SEQ ID NO: 7266 - RNA, 67 nt, Homo sapiens
cacaccaacaggaagccaggggagagaaggccgagacagaggaggggcccgagagaagagaagagcg

SEQ ID NO: 7267 - RNA, 58 nt, Homo sapiens
acacgacacggggccagggaacccggcaccgccccaggggccccagacacgacgcccc

SEQ ID NO: 7268 - RNA, 39 nt, Homo sapiens
cagccccgccagccacccccagagcgagagaacgcaccg

SEQ ID NO: 7269 - RNA, 79 nt, Homo sapiens
aagcagaccgaagcaccacccgccaaaaaagggaggcaccaccagcaaagcgggcaccggggcccacagaacaagcagc

SEQ ID NO: 7270 - RNA, 66 nt, Homo sapiens
gaagaacgaagaacacccggacaaaaagaggagaagggaacaaaccaacgggcacccgaaaagacc

SEQ ID NO: 7271 - RNA, 77 nt, Homo sapiens
caggacaaccaggggaccagagaggacggcaccagccaggagagagaagccagcgagggccacaccccggagaagcg

SEQ ID NO: 7272 - RNA, 55 nt, Homo sapiens
cgccgcgccgcgccgcgccgcaccccgagcgaccggacagcccaaggcggaaaag

SEQ ID NO: 7273 - RNA, 79 nt, Homo sapiens
aaagccagagccggaggcccacgaaaccaaaagaaggaaagaggcagaaggccagaagggcgaagaagaaggaaaaaag

SEQ ID NO: 7274 - RNA, 59 nt, Homo sapiens
aaacgcagaaggacgcccacgagcaaccaagaggacgccagacaaaggccgcagggcga

SEQ ID NO: 7275 - RNA, 54 nt, Homo sapiens
ccccccaaacgacgcagccacggagagagcccaagagacacaggcagaagaaga

SEQ ID NO: 7276 - RNA, 73 nt, Homo sapiens
aacgaacaggaacaaagccagacgagggccagcaaaagaagcgagcaacaagaaagcgcaaggcagagggcac

SEQ ID NO: 7277 - RNA, 85 nt, Homo sapiens
gaaccagagaaaaccaaggaaggaaacgaggcaaaagaagaaaagccgaacaaaagcacacaggggaagggacacgcaaggccgc

SEQ ID NO: 7278 - RNA, 60 nt, Homo sapiens
ccggagcacaccaggcacccaccacggggcacacgggccaaaacagaagaggcaaagccc

SEQ ID NO: 7279 - RNA, 76 nt, Homo sapiens
agggaccagcgggaaggcagacagcgagggcgacgagcacgcagcacgggggcaggggccgacccagaacgccagc

SEQ ID NO: 7280 - RNA, 56 nt, Homo sapiens
acagccgcaggacgacacgcggccaccgggaaaccaaagaagggaaacaaaaaacg

SEQ ID NO: 7281 - RNA, 76 nt, Homo sapiens
gagggcaagacagcgagggacgaaggagaccgcgcagacacacccgaagcagcccaccacggggcagaacaccgaa

SEQ ID NO: 7282 - RNA, 78 nt, Homo sapiens
agagcacaggcaccaagccgccgccaccccgagcgggccccccccggccggcccaggggacggagggacggaccgcac

SEQ ID NO: 7283 - RNA, 71 nt, Homo sapiens
caagaacggaacgaaaccaaagcacaaaccaggagagacaaccgcccacaacgcaagcaagaaagaaagac

SEQ ID NO: 7284 - RNA, 68 nt, Homo sapiens
gacaggagacaaggaacaaagccaagcaccccgggagagcaagaaaggagaaaaggacgacggaacca

SEQ ID NO: 7285 - RNA, 67 nt, Homo sapiens
ggagagaccacaaggaaaaccaagaaccagaacggccacagaacacagcaaaaggccaaaacggaag

SEQ ID NO: 7286 - RNA, 54 nt, Homo sapiens
cgagacagaagcagcacaggaggggaccgagacccagcagcagaaagggccccc

SEQ ID NO: 7287 - RNA, 67 nt, Homo sapiens
gaacggaacccagaacgaaaaaggaaaagccgagggagcagcgaggaaagggcacaagacccagagc

SEQ ID NO: 7288 - RNA, 81 nt, Homo sapiens
ggccgagaggaagacgagccgggaggaacggcccggaaacaggaggacgcgcaaggaagaagagacgccgcgcggcagaca

SEQ ID NO: 7289 - RNA, 60 nt, Homo sapiens
ggggccagggaacccggcaccgccccaggagagacgagcacggcagccaccgacagaagg

SEQ ID NO: 7290 - RNA, 64 nt, Homo sapiens
agccggggacacgcgggccccgggaccgaaggcgaaaacaaggggagggaagcagccaagcggg

SEQ ID NO: 7291 - RNA, 75 nt, Homo sapiens
ggagcggcacacggagagggagacggacggaacgcggcgcgaccagaaaaccgagaaagccgagaaaagaagaag

SEQ ID NO: 7292 - RNA, 72 nt, Homo sapiens
acaccacggagaaaaacgagcagcggcgagacacagaaagggacgcgccgacaaacccagacaagcgccgaa

SEQ ID NO: 7293 - RNA, 66 nt, Homo sapiens
cccagcaccggcgaagccgggccaaaggacgaagaacccacagagggggcggggcagaacccaaag

SEQ ID NO: 7294 - RNA, 79 nt, Homo sapiens
ccccccggccgaaaaggcgaccgccccaaggaaccacgaacaccccaccagaccacccagcaagcccacaaaaaaggca

SEQ ID NO: 7295 - RNA, 45 nt, Homo sapiens
aacacaacaggcaaacccacccacgcgacacagagagacccagag

SEQ ID NO: 7296 - RNA, 81 nt, Homo sapiens
aaaaaccgccgaaaaagagaagacgcacccgaccgggccgaccacagagcgccgccgcggcccccgggagacgacccccaa

SEQ ID NO: 7297 - RNA, 83 nt, Homo sapiens
aagcgacagaaaggggagaacccccagggaccaagaaaggcccagggaccaaagcccggacaaggcccgagcaccaggaccgc

SEQ ID NO: 7298 - RNA, 82 nt, Homo sapiens
cacaaccacagcaagagcaccggcgaccgcaccacaagggacgagaccaaacggaagagagcgacagacagaacgccggagg

SEQ ID NO: 7299 - RNA, 77 nt, Homo sapiens
cccccccccccccaagagagaacccaccgcaagagaccaaaggccaagagcaccgcagccaccagcccggaacccgc

SEQ ID NO: 7300 - RNA, 77 nt, Homo sapiens
aacgcaagaaacccggcaaaccgacgcgaagacccgagagaggaggcccgcccccccccacccccggagcggaagaa

SEQ ID NO: 7301 - RNA, 78 nt, Homo sapiens
ggaacccgccagcaccaccgcccaaccccaggcagggggaaggagccacccccaacccgaaggcaacagcacagggac

SEQ ID NO: 7302 - RNA, 82 nt, Homo sapiens
caagggggacccgccacacaaagacgagggcacgccacgcacagcggcagcccaccaaccggccaagaccagcaccacaggc

SEQ ID NO: 7303 - RNA, 82 nt, Homo sapiens
aaacgccagagagcaaaacgcgacgacaaaacccggcgaagccaggcgagccaccacagcacagcaaaagacgagaggaccg

SEQ ID NO: 7304 - RNA, 77 nt, Homo sapiens
acaagcacgaaagccacaaaaggggagaggcccaggaggacagagaaaggcaagcagggcgagagagcacaccaccc

SEQ ID NO: 7305 - RNA, 54 nt, Homo sapiens
agaccgcccccgagaaggcccccgccccaagcaggaccccaaaggggagccccc

SEQ ID NO: 7306 - RNA, 79 nt, Homo sapiens
cggaccggaggggaccgacgccggcagaacacgcgcgggaccccgggcacggcgcgcgggagccaagggacaccacccc

SEQ ID NO: 7307 - RNA, 80 nt, Homo sapiens
cgcaggacagaccaggcccgccacaccccggcgccggaaaggcagccaaagacgggcccgggacacccagacagagagag

SEQ ID NO: 7308 - RNA, 72 nt, Homo sapiens
aacacacaccgagcagaacagagaagagaagaaaagagcagacagacccaagagggccagagcaggaaaaaa

SEQ ID NO: 7309 - RNA, 52 nt, Homo sapiens
cggaccaccagaaagggacagcgaggaaagccaggcgacagagaagagaggg

SEQ ID NO: 7310 - RNA, 79 nt, Homo sapiens
gccgcggccagggaacggggcacgcggccaacggcccagcacgacagagacccggaaagcgagcagcaaagacccagca

SEQ ID NO: 7311 - RNA, 76 nt, Homo sapiens
aacaacccagaacggaagccccccggaaaagagccgagaaggacagagggccagccccaggcccaggcaaaaagca

SEQ ID NO: 7312 - RNA, 56 nt, Homo sapiens
agcggcggaccgccaaagaccacacagggaaacgaccagggagagaccaacaggaa

SEQ ID NO: 7313 - RNA, 77 nt, Homo sapiens
accagacaggcaggaaaagacagggacagcgacagaagaagaccaaaccaggcccagaagcaccgcaacaaacgggg

SEQ ID NO: 7314 - RNA, 49 nt, Homo sapiens
cacgcagcaaaccacaggagaggaggaagccagcagaccgcagaacggc

SEQ ID NO: 7315 - RNA, 85 nt, Homo sapiens
ccgagcgggaagaagcgcgccagacacagcggaagacgcagagggagacagaacccaggagaaacgagagggacagcaaggaaga

SEQ ID NO: 7316 - RNA, 72 nt, Homo sapiens
ccggagccggcacagccgccaaaggccgaaaaggaaaaggagccagggcggaccccgcgggacagaacgcac

SEQ ID NO: 7317 - RNA, 59 nt, Homo sapiens
caaggagacgcccggcacgcaggagagagagaagaaacacaccaaggagggaagaagga

SEQ ID NO: 7318 - RNA, 68 nt, Homo sapiens
gaaacaccagaaggagcgcaaacaaacggacaggcaaaggagaagagaagggggaccagcagcgaaga

SEQ ID NO: 7319 - RNA, 71 nt, Homo sapiens
gaaggcacccggagacgcagcgaccgcaagaaacccacgaccacagagggagagagccaccaaagaagacc

SEQ ID NO: 7320 - RNA, 72 nt, Homo sapiens
aagacgacggaaccaacacacaaagccgcagaaagcagcagcaagagggcagaagaaagaaaggaaagagag

SEQ ID NO: 7321 - RNA, 81 nt, Homo sapiens
gcgaacgagcaaaggcacgggcagccggaaggacaccaagagcggaccgggccccgagccaaagaagcgcaaaaggccggc

SEQ ID NO: 7322 - RNA, 75 nt, Homo sapiens
gaagcagaacccacagagagccaggaggaggggaggggaggaagcgcccgggacgagaggagggccggcagaccg

SEQ ID NO: 7323 - RNA, 80 nt, Homo sapiens
cccggccccccaccggacacccgcggggcgccagggaaggaccgcacacaagccgcaccggacacgcgcggagcgggagg

SEQ ID NO: 7324 - RNA, 70 nt, Homo sapiens
gcagcggacagcagcgagcaccagcagcgccgaggcgccaggaacgcagagaacagagcacaggagagag

SEQ ID NO: 7325 - RNA, 81 nt, Homo sapiens
agcaaaaaccgaaagagagagccaccggccaaagaccacaccacccgcgcagaggcaccccacacagagccccgcgacaag

SEQ ID NO: 7326 - RNA, 36 nt, Homo sapiens
ccacgaaccaaccaaacaggacagagccgcgcaccc

SEQ ID NO: 7327 - RNA, 70 nt, Homo sapiens
cacgaaacaacagagaccaccagggggaaggcccaccccagagcaaggcacggccacacaagcagcaaaa

SEQ ID NO: 7328 - RNA, 89 nt, Homo sapiens
acgaacaggcaaaaaacaaaagaaaaacggaacaggaacaaaagcaacgggacacccgcggcgccaggcagaaacaggaggccgagaac

SEQ ID NO: 7329 - RNA, 85 nt, Homo sapiens
gacacacgaccgaaagagcaaaacaggaacccagcagaagccagccgccacgccgagccagccagcaccaaccaacgccccaccg

SEQ ID NO: 7330 - RNA, 70 nt, Homo sapiens
gacacacccgagccaaccacagagaagaggacaaaaaaccccaaagaggaaggaaagcgacagacgacag

SEQ ID NO: 7331 - RNA, 80 nt, Homo sapiens
cgaccacccccccgcgcacagccccacaaagcagcggagaagggacaacacccgccacagacacaaacaacacgacccag

SEQ ID NO: 7332 - RNA, 37 nt, Homo sapiens
aaaaccccaaagcaaacggccggagagacacagggcc

SEQ ID NO: 7333 - RNA, 74 nt, Homo sapiens
ccccgacagagacggcggagaccccgaaggcgcaaacgacaccacccgaccgccaggaaaggacacggaacagc

SEQ ID NO: 7334 - RNA, 51 nt, Homo sapiens
aaacccgccacgacaaccgcaccaacaaagacaggggacaggcacccgcgg

SEQ ID NO: 7335 - RNA, 68 nt, Homo sapiens
ggcagaccgaaaacagcaaaagccgcacgggacccagcaaagcagcggcggccagaggaaacagagac

SEQ ID NO: 7336 - RNA, 78 nt, Homo sapiens
ggcagcgcaggccccgacgcccacccacgagaccagagagggaaccacaaccccaccaggggccagcagacccagcgg

SEQ ID NO: 7337 - RNA, 111 nt, Homo sapiens
ggcgcacgcgggcgcacccgccccggcgccgccggcccgcgggaccgacagccgggcagagggaccggagggccggaagcgggccgggacaacgggcaggagccggaaggg

SEQ ID NO: 7338 - RNA, 40 nt, Homo sapiens
cgcagacaccccccagccaggaaaaggaaaccagacgaca

SEQ ID NO: 7339 - RNA, 79 nt, Homo sapiens
ggcgcgcaaaaagaacggcaggaacgggcgaacaggaagaaggcgcggaaggagaagacacagccacaggaaggagggc

SEQ ID NO: 7340 - RNA, 79 nt, Homo sapiens
gagcccgagcggccgccaaacaaagcaaaagagccaacacccaggccaggccgcccggaaggaggccgccacgccccgc

SEQ ID NO: 7341 - RNA, 56 nt, Homo sapiens
aacggccccgccgccccagaggcggggcaccaggcccagacggcgaacccgagcaa

SEQ ID NO: 7342 - RNA, 52 nt, Homo sapiens
acaaaaccccagggagggaacgcacggaagggaacagaaaacccgcacgccg

SEQ ID NO: 7343 - RNA, 53 nt, Homo sapiens
ggggaccgaccgcaacagaacggacccggcaggaaggaacggcaccgaggcac

SEQ ID NO: 7344 - RNA, 86 nt, Homo sapiens
gcaggaacaccgcacgcgcggaggaggaacagcacaccgagcaagaaacagaaggaaggacggaacaaggaacaggaaagagggaa

SEQ ID NO: 7345 - RNA, 68 nt, Homo sapiens
caagcagggggaagcaagcccccaacaagcaaaggaacggccccaggggcgccacagccgaggcagcc

SEQ ID NO: 7346 - RNA, 66 nt, Homo sapiens
cgggagcagcagagcagggagacggaggaggaggagaagaagagagaaaaaaagccggacaagaac

SEQ ID NO: 7347 - RNA, 56 nt, Homo sapiens
caaggaaggcgggcgggcagcaccaccaccccagggacggaaaaggcgcacacgac

SEQ ID NO: 7348 - RNA, 76 nt, Homo sapiens
ggccacgaagcgcccacggacaacccccagccaaagcaagaaacgagggaaagagcacggaccgcggaagcaagaa

SEQ ID NO: 7349 - RNA, 74 nt, Homo sapiens
gacaggacagcacaccccaaaggcacgggaaaagacccaaagacaaaacgaacgaggcgacggccacgcccccc

SEQ ID NO: 7350 - RNA, 84 nt, Homo sapiens
gacggaacagaccacagggaccaccggggccaccagcccccgggccaagagcagcacggagacagagccacacaccggggcgag

SEQ ID NO: 7351 - RNA, 88 nt, Homo sapiens
cggccgcgcggcccgcaggaagggaccccgcccgaagagcgcgggcacagcaacgcagagcggcaaagcccagcggacgcgagcccag

SEQ ID NO: 7352 - RNA, 95 nt, Homo sapiens
ccaagccaaacgcacaaagggagcagggagaggagcgggaaacgggagggaaccagcaacaagccggggggaaaggggcggcgcccgaaagccag

SEQ ID NO: 7353 - RNA, 78 nt, Homo sapiens
ggcagaacccagaggcgggaggggccgggaggcagaggggcaggggccggacccaagccagaagcccgcaaagccccc

SEQ ID NO: 7354 - RNA, 74 nt, Homo sapiens
gcagcgaggaagaaccgccggggacgaaacaaaaagaccggaagcgagaccggcacgaagaacacaaagcaaaa

SEQ ID NO: 7355 - RNA, 75 nt, Homo sapiens
gagacccagcacacaacaaggcccccgaagggcggcagcagcggagagaggagccagcggggacacgaagggcac

SEQ ID NO: 7356 - RNA, 75 nt, Homo sapiens
aggggaaaacccccgggaccaggcggcggccggggcagcgccgcgagccagcaacgggggaaggccacaacacca

SEQ ID NO: 7357 - RNA, 45 nt, Homo sapiens
aagccaacccaggaggaaaaacggaagaaaacacgaagaaacgca

SEQ ID NO: 7358 - RNA, 78 nt, Homo sapiens
caagaagggccgggggcgagccggagcgaccccggcagggggagaagggcgcagagacccccgccaagggccaaggaa

SEQ ID NO: 7359 - RNA, 78 nt, Homo sapiens
cgggccacggagaggagcagcccccggagacagcggcacagagggccgccagaggccaaaccgccgccgggggagggg

SEQ ID NO: 7360 - RNA, 74 nt, Homo sapiens
cgacccggaggcgcgaggggcccgggggcagagagcgcaagcagaacaaggggagagcccgacgcagaacagcg

SEQ ID NO: 7361 - RNA, 81 nt, Homo sapiens
ccgcacagccgcggcggcagcagcaggagagcacaggcagaacaggagggaaaacgacggaacgagaagaggaagagcccc

SEQ ID NO: 7362 - RNA, 77 nt, Homo sapiens
gggagaaaggagaacgggcgacggagccgggaaaggacaaggccccgccaccaaagggagcaagaggagacaacgaa

SEQ ID NO: 7363 - RNA, 81 nt, Homo sapiens
cccaagcaaggccggaagaagagcgcagaggccgagacgcaccagagccggaccggggacgcgaagcaggcccgggagacg

SEQ ID NO: 7364 - RNA, 78 nt, Homo sapiens
cgcgcccagcgccgccccgcgcgcgcccgccacggcgccgagccgcggccgaacgccggcccaagagccgcagggagg

SEQ ID NO: 7365 - RNA, 73 nt, Homo sapiens
ccgccggccggcggccggagaaacgaggagccaggggcagaaaagaagcagacaaagagaacggcccggaccc

SEQ ID NO: 7366 - RNA, 86 nt, Homo sapiens
cggaaggagcgcaggcgaccccaaaaagcgcaagggcgaagaaaagaggcccccaggccaggaggcccaggaggccgggggaccca

SEQ ID NO: 7367 - RNA, 59 nt, Homo sapiens
acgaggaaccagcacaagacaacccccaaaccgaaggacccgacgcagcggccagcacc

SEQ ID NO: 7368 - RNA, 93 nt, Homo sapiens
cgacaaaaccagaaccaacacacgaaaagagagcaaaagcgaggaggggaggcaagcaggggggcaaaggaaagaaggcagaaagggaggcca

SEQ ID NO: 7369 - RNA, 60 nt, Homo sapiens
acagagaaacacagcaccagcgggcgagcgacacagggcagggcacagcagccgggaaga

SEQ ID NO: 7370 - RNA, 80 nt, Homo sapiens
gagccagggcccggcccgaaaggagagcccaaggccagcagagcccaagggcgccagccaccacccagacgaccagacga

SEQ ID NO: 7371 - RNA, 71 nt, Homo sapiens
gggaaccgacagacccaccgggccagagacaggagcaggggaaaaagaaaagggcgaagacccgaagcagc

SEQ ID NO: 7372 - RNA, 80 nt, Homo sapiens
ggaagaagcccaaaaaaacaaggagaaaacaaaggaaaaaccagaaagaagggccccaaacgggggacaaagcaaaaaac

SEQ ID NO: 7373 - RNA, 72 nt, Homo sapiens
agcggaagaggcggggcggcgggcggggcgagcgagacgacgggaccgaaggaccccgccagagacaaccga

SEQ ID NO: 7374 - RNA, 74 nt, Homo sapiens
cagagcgggaccaagaggggaggagcaccacgcccggggcacaacacaacaacaaaacacaacccagccgggaa

SEQ ID NO: 7375 - RNA, 34 nt, Homo sapiens
ggcggggagcgacgcaggcgggaccagcaccgcc

SEQ ID NO: 7376 - RNA, 78 nt, Homo sapiens
ccaaagaagggagagagcgggagggacaggagaacaggcacgaccccaccggcaccaccacggggacagcgaccgcag

SEQ ID NO: 7377 - RNA, 58 nt, Homo sapiens
ccacagcgacagggaaaaaccaccagaccccaaccccggggccccggaccacaacccc

SEQ ID NO: 7378 - RNA, 41 nt, Homo sapiens
agcaagagcccagaaaacacagagacaccccagcagaaagg

SEQ ID NO: 7379 - RNA, 101 nt, Homo sapiens
gaacggcaagaaggcaaaagcccaaccaccaccaggccggagaacgccccaaggagcaagcccgccgacacagccaccaagaaggcacaagcagaacggga

SEQ ID NO: 7380 - RNA, 78 nt, Homo sapiens
acagaagggagagaacagaaggaaagaagccagaaacaccaagacggccacaggaacggggcccaggacaggcggacc

SEQ ID NO: 7381 - RNA, 85 nt, Homo sapiens
ccggcgaggggcaccgcgccagacgcccgagaagccaggcagcaaacacacagaggaaccagacagcaccaggggccagagcagc

SEQ ID NO: 7382 - RNA, 77 nt, Homo sapiens
gacgcgccgcgccccaagcaccaggagacaaagccacaaaaacaccagaaaaaccaagcagaaaaggagcggcagca

SEQ ID NO: 7383 - RNA, 81 nt, Homo sapiens
cagcacgagccgccgccggcagcccgccaccaaggaagcacgcgcccgagaagagccgccgcagggcgaaggcgaggaccc

SEQ ID NO: 7384 - RNA, 38 nt, Homo sapiens
cggacaccccgagagggaaggggcggccacgggggaag

SEQ ID NO: 7385 - RNA, 73 nt, Homo sapiens
cgcagggcgcccccggggcgcgcccgggacacagaagccaggccagccgcaggaggcaccaagggcgaggaca

SEQ ID NO: 7386 - RNA, 76 nt, Homo sapiens
ggaaagcaccgaggcacaacaggagagagagcggagacaaggccacagcaggccacggcgggggcagccagccaga

SEQ ID NO: 7387 - RNA, 77 nt, Homo sapiens
cagcgcgcacaagaagaccagggaccgagggcggcaccacgcccaacaccccacaccaggggaacaaacgacaggga

SEQ ID NO: 7388 - RNA, 77 nt, Homo sapiens
gccagcggagcgaccagaacaccccaccagaccacccagcaagcccacaaaaaaggcacaagcagggacagcccgcc

SEQ ID NO: 7389 - RNA, 88 nt, Homo sapiens
caccgccagcaccgaccaccgaggcggagggggagaacacccagccaagacaggaacacagagagcaacagaccagaacgaagaaaac

SEQ ID NO: 7390 - RNA, 60 nt, Homo sapiens
aagacgagccgggaggaacggcccggaaacaggaggaccaccggccacacacaggacaag

SEQ ID NO: 7391 - RNA, 72 nt, Homo sapiens
gggaggaacgggggagcccacaggagccaggagccaaaaaccgaacacccggaaggggacaagggacggcga

SEQ ID NO: 7392 - RNA, 40 nt, Homo sapiens
gcgaggaggaaaggaggacgagggaaacacaaagaagaca

SEQ ID NO: 7393 - RNA, 76 nt, Homo sapiens
acaccgccagcggggagagaagcacagagggcccagcccacagcgcggccccagcccagagaggaccaggaaaaac

SEQ ID NO: 7394 - RNA, 104 nt, Homo sapiens
cgggcggaccccacgcggggggggccaagagacagggcacaccaaacccacgagcgccacagcagccaaacggggacgcccagagagccgaagaaggaggcggc

SEQ ID NO: 7395 - RNA, 74 nt, Homo sapiens
ccaagcaaaagagccaaagcagcagccccgacagccacggaacagcaacagagagaaagagaagaagcaccacg

SEQ ID NO: 7396 - RNA, 59 nt, Homo sapiens
agcgggaccgagcgaccggccggccgggcaccagacaacaccgacccagcccccaaccc

SEQ ID NO: 7397 - RNA, 77 nt, Homo sapiens
acagaaacaccaacaccccagcgcaccagccaaacccaggaaccgaaggaagaagagaacagagagaaaagaacaac

SEQ ID NO: 7398 - RNA, 72 nt, Homo sapiens
aggaagcaccagagaacagagaaaacgaaggaaggaggacccgaggagagagaagacggaaaggaaacacgg

SEQ ID NO: 7399 - RNA, 55 nt, Homo sapiens
ggacacacggcagggcaggaagcgagccaccagaccgcacaggccgcacaacaac

SEQ ID NO: 7400 - RNA, 88 nt, Homo sapiens
gggccaagcccacgggacgagggcccaaacccaacaacacgcaaccaggggggggagcacgggaggcagcgacaggacaggccgggag

SEQ ID NO: 7401 - RNA, 60 nt, Homo sapiens
ggagcagcggagcagaggacgggggggagcacagcaagcgggagcaggcagaccaaagga

SEQ ID NO: 7402 - RNA, 67 nt, Homo sapiens
ggacgaccggagccgaaccacacgcaccgacgcgacggcaagcggacacaaaaccaagaccaggagg

SEQ ID NO: 7403 - RNA, 90 nt, Homo sapiens
gccgggcagaagcagagagaacgaggaggaagcgcaccaggaagagggaaaaaccacacccgagagaaccggaggcacgggggaagcagc

SEQ ID NO: 7404 - RNA, 61 nt, Homo sapiens
ggaggcaggcggggcgccaccgacccaaagcacacaagagcacaccggaggagcagagggc

SEQ ID NO: 7405 - RNA, 76 nt, Homo sapiens
ccaagggaaacgaagaagggcgggggggggcacccccaaaggaagggccccgggcaaggagaagcccagcgcccag

SEQ ID NO: 7406 - RNA, 73 nt, Homo sapiens
gggggagaggacgcgcgaaccagcagcaggcccagcagccagcggaagggcaccaaccaacaaacacgcaaaa

SEQ ID NO: 7407 - RNA, 75 nt, Homo sapiens
ccacggacaccaggcaggccagagcagcaccaggccagagccagaacagccccccgaagagggcccgagggccac

SEQ ID NO: 7408 - RNA, 72 nt, Homo sapiens
aagaaccaagccccaggcacacaagcaacagaagaaaaggagggaagagggaacagaagggcacacccgaag

SEQ ID NO: 7409 - RNA, 75 nt, Homo sapiens
ggcgggcagagcgagccggagaagagggggcccggggggaggaggggcaggcccggcgagcggggaggagacaaa

SEQ ID NO: 7410 - RNA, 85 nt, Homo sapiens
ccgccccagccccgaccggcggggccaggacgcggcaacacccaagaaaaacaaccaccagcgagcaaaaaggcaaagaccaaga

SEQ ID NO: 7411 - RNA, 82 nt, Homo sapiens
aggaggagccggacgggccagaaacaagggaaaagaaaggcggcgaagaagagccgagagggaggaaagggaggcaagaagg

SEQ ID NO: 7412 - RNA, 75 nt, Homo sapiens
gaggagaaaaaccagaggcgggaaaagcaccacgcaagaagaagaaagaaaaagcagcacgaaggcgaggaacca

SEQ ID NO: 7413 - RNA, 72 nt, Homo sapiens
cccgcggcgggcgcacaccacgccgacagaaaagagagacaaaaagcaaacgagcaacacgagcaaaagggc

SEQ ID NO: 7414 - RNA, 55 nt, Homo sapiens
ccacccgggcgccgggaagcaaggcggaaagaaggcggcacaagaaaagagacca

SEQ ID NO: 7415 - RNA, 78 nt, Homo sapiens
aaacggccaagaagggccaccccacagacggaagaagacggcacgggacccccagcacaggcagcaggccgggagaga

SEQ ID NO: 7416 - RNA, 73 nt, Homo sapiens
cacccccaccggcacagccgaggggccccgagagaacagggcaaagccaaggaaggccgcggacccccccccc

SEQ ID NO: 7417 - RNA, 78 nt, Homo sapiens
gcagcagccccgcccaagccaagccacaggaggccccccggcgaggaacgccggagcccgagcaccgcagagaacgcc

SEQ ID NO: 7418 - RNA, 73 nt, Homo sapiens
gccaaagaaaacccacagacagagaagaggaaccgagcgcccagccagcccagcaaggagagcacaacaggaa

SEQ ID NO: 7419 - RNA, 76 nt, Homo sapiens
ggcgcgagccccgcccccgccgccgcgcacaaccgcacggcagggggggaagaaagaaggagaaggcggaggaggg

SEQ ID NO: 7420 - RNA, 72 nt, Homo sapiens
aagggcagacacaggcacaccaagggacccccgccccaacaagaggccaacggccaagaccgcccggcagcg

SEQ ID NO: 7421 - RNA, 85 nt, Homo sapiens
gccgccggagagggagggcccacacccagcccagccacagggacgccccaaggaacgcagacgaaagcgcgcgcgcagggagcag

SEQ ID NO: 7422 - RNA, 65 nt, Homo sapiens
cacgcccggcacccagcacaagaagacaagacagagaagcagccaggccacacggagcagggcag

SEQ ID NO: 7423 - RNA, 38 nt, Homo sapiens
acaaaggcaggaagagaaaaggcggccgccacccccgc

SEQ ID NO: 7424 - RNA, 54 nt, Homo sapiens
cccacaccacacagagagcgagggcaagacgccaagagaaaaggcgagagcaca

SEQ ID NO: 7425 - RNA, 92 nt, Homo sapiens
aggccgcggcccgggccgcaccagagcgcccggcccacgacacaggaagaagacagggggcagacccaaaggaaacgcacgaaagaaacagg

SEQ ID NO: 7426 - RNA, 64 nt, Homo sapiens
gagcagggaaacaccacgaagcagccaaggcgggcgcaaaacgggaagcagaaccggccggagc

SEQ ID NO: 7427 - RNA, 51 nt, Homo sapiens
cgcggaggccaggggaacgggggagaaaggccgggcgaggcgaggccaccc

SEQ ID NO: 7428 - RNA, 77 nt, Homo sapiens
cagaagaagagcagaaaaagcagccaggaaccaagaaaacgaccgcggaccaggggcaacaggccggcgcccccgaa

SEQ ID NO: 7429 - RNA, 61 nt, Homo sapiens
cgcggcagcacgcggcgggaaaccgacgccgcagaagaaagcagaagaacaaagagaccac

SEQ ID NO: 7430 - RNA, 83 nt, Homo sapiens
gggcgcgggagcaacgggaggccggacccagcgagcgggcggcacgcacgcagggggagcgggccggagagaagagaggggcg

SEQ ID NO: 7431 - RNA, 63 nt, Homo sapiens
cagcccaccagcaggcgggacccgcaccggaaggccacgccaagagaacaggaacaacccaga

SEQ ID NO: 7432 - RNA, 57 nt, Homo sapiens
ggacggggcggggggaacggaggccaggccagagggaccaacgaaggcaaacaccac

SEQ ID NO: 7433 - RNA, 59 nt, Homo sapiens
cagggcagaccgacagcgacagaggcgggaggccgaaggcaccaaccaaaaccggcgcc

SEQ ID NO: 7434 - RNA, 76 nt, Homo sapiens
agacaaacaaccgaacgggcacaaacaagccacaccaggcacggagccagcagcagcaagcagcgggcaagacccg

SEQ ID NO: 7435 - RNA, 79 nt, Homo sapiens
ggaggaggccggagacgcagcaggggggaagcgaggcaggaagcccagcacgccgaaggccacgcgacccagggaccgg

SEQ ID NO: 7436 - RNA, 76 nt, Homo sapiens
ccgccggaaggcagcgcagaccacacccgcccgagcaggcacagagacggcgacaaagaaacccgcgccagagagc

SEQ ID NO: 7437 - RNA, 75 nt, Homo sapiens
aagccggaccacacgccaaggggccagaccccggaacccacagccaagagccaggcacggacgaccccacagcca

SEQ ID NO: 7438 - RNA, 63 nt, Homo sapiens
accaacaaaggagaagcagcaggcaggacgaagaaaccgaacaagaacgaaccacaccaggcg

SEQ ID NO: 7439 - RNA, 74 nt, Homo sapiens
cgagccgagcaagcgaagaacccccaaacgacccaggggagcgacggcggcccagacaccccgagcagagcaaa

SEQ ID NO: 7440 - RNA, 87 nt, Homo sapiens
gccaccaccccagcggcaaggaccagaccgcgggaacagccagcaaaggcaggggaggaagccacccgagagcaaacagaacgggag

SEQ ID NO: 7441 - RNA, 77 nt, Homo sapiens
gacaagaccgccgaacaacgccacggagggccggaaccaggggcgggaggaacagagcgacaggcaaacacccaggg

SEQ ID NO: 7442 - RNA, 74 nt, Homo sapiens
agcgagcgagggggggcgcgccggaaaccggagcgcgcagcaggggcgcgacgagagaccgcgcacacgggccc

SEQ ID NO: 7443 - RNA, 82 nt, Homo sapiens
cgaccaggaaccgggcgagcagcggcgggggcccgagggacgagccacgcgccgagaacgcaaaagcgaccacaggaccaga

SEQ ID NO: 7444 - RNA, 77 nt, Homo sapiens
gcaaagccacgggcggcccgaggccccacgggaaaaaagcagcggaggagaaaaaaaagaagaccgcagcaaggaag

SEQ ID NO: 7445 - RNA, 68 nt, Homo sapiens
caaaacaggacagaaagaaggaaaaagcagaaagccagaggaagcaggggaaagcgcgagcgagcacc

SEQ ID NO: 7446 - RNA, 82 nt, Homo sapiens
acagaccccgaccgacgagccccaccccccaacggacgcccgcccaccgcccgaaccggaccagggagacggaacccccgga

SEQ ID NO: 7447 - RNA, 101 nt, Homo sapiens
agagccagagagagcggacgacagaacccggccgacccggaccaacaaccccaagggaggggaacagaccgaggacagcggccaggcgcagaagaagcacc

SEQ ID NO: 7448 - RNA, 80 nt, Homo sapiens
caccgcaaccacacaggcacaacgagccggaacaccccaccggcgagggcaggcagcggacggggcgccgggccaagaca

SEQ ID NO: 7449 - RNA, 68 nt, Homo sapiens
aggaccaagaaccaggaaaggcacaaggaagaagcggaaggggcagggggaaagcagaagggaaccca

SEQ ID NO: 7450 - RNA, 80 nt, Homo sapiens
gagggacccaaaaggggagcagcaagcacgaggaggaaacgaagagacacccacaagagcgccgaagaggacagggggcg

SEQ ID NO: 7451 - RNA, 72 nt, Homo sapiens
cacgcggaaaaacccaacagccaaggacagaggaccaaagcggaccagagacaggcaagcgggacaagaaga

SEQ ID NO: 7452 - RNA, 37 nt, Homo sapiens
cacgcccgggcccccgaccgcggaacacagacaacca

SEQ ID NO: 7453 - RNA, 62 nt, Homo sapiens
aacaaccacagaagagggggagacggagcccgccgccccaggcgggggcagggcgcgaccag

SEQ ID NO: 7454 - RNA, 67 nt, Homo sapiens
gggccagccggagcggaaaaccgccagggacgagcagaaaggcaaaagggaaagcaaggggaagggc

SEQ ID NO: 7455 - RNA, 89 nt, Homo sapiens
gcacccccgcgccgcacggggacgagagggaacgaggaagcccgcccaacgagccgaacccaagcaggagcacagaccgagacgggaga

SEQ ID NO: 7456 - RNA, 67 nt, Homo sapiens
cggagacaggcaagccaaagggggagacaagagggcgggggcggagcgccagagggaacacagccgg

SEQ ID NO: 7457 - RNA, 100 nt, Homo sapiens
ggaaaagggagcgaggaccaggaagcacaaagggaccccagccgacgaaccacggagggcggaggcgcacagcaggacggccaaagccaccgggccgaca

SEQ ID NO: 7458 - RNA, 78 nt, Homo sapiens
cggagcagagccagagggcaggccacgaccggagcgcggaagcggccgaggagagcggggcaccaggacaaaagaagg

SEQ ID NO: 7459 - RNA, 80 nt, Homo sapiens
cggaggcaggcggcggaaggaaccgcccgccgccacacgcgcaaagcccggagagaacaaggagcaggccaacggccaga

SEQ ID NO: 7460 - RNA, 73 nt, Homo sapiens
ccgaaaccacaaggccgagggaggcagagcagggagcccacagcggccagaggagaacacagcccacgccacc

SEQ ID NO: 7461 - RNA, 77 nt, Homo sapiens
gccaggcaaccccaccggccgacagccgcgacggcgagcccgggccgcgcccgagaccagaaccggcgcaacacccc

SEQ ID NO: 7462 - RNA, 68 nt, Homo sapiens
gacacacaaccgcgcaaaccgcaggaccggcacaagagaaaaagcccgccgacacagccaccaagaag

SEQ ID NO: 7463 - RNA, 79 nt, Homo sapiens
ggaagagacaagaggcaccaaagcagccgcccccgcagccccgacaagggcgaagcggccgacagaagcagaggcaggc

SEQ ID NO: 7464 - RNA, 38 nt, Homo sapiens
cagacagacgaagaacccaggaagagagaaggccacgc

SEQ ID NO: 7465 - RNA, 78 nt, Homo sapiens
ggcggacgggccggagggaggagaaagccccgcgcaccccgcggagccccagagaaaccaggccggaagaccaggagg

SEQ ID NO: 7466 - RNA, 72 nt, Homo sapiens
accaagaaccagaacccaggacgagaaaaaacagagcggaacaagcggcccaagagaaagcagccaagaaga

SEQ ID NO: 7467 - RNA, 48 nt, Homo sapiens
ggggccgggcagcgagcccacacaggagcacgaaagaaagaaacagcc

SEQ ID NO: 7468 - RNA, 65 nt, Homo sapiens
ccgggcggcccaagggaaaagcagcggccgcaagaacacggagccgagagacacgcccagcgaca

SEQ ID NO: 7469 - RNA, 119 nt, Homo sapiens
aaaggcaccagcccaagcgccccccccgccccccaggaggggcgagagggagccgcagcgagcagccaaaccagaaaggggacagcggcgggcagggagcacggaaggaaccacaaggg

SEQ ID NO: 7470 - RNA, 74 nt, Homo sapiens
cggaccccacacacccgacgaaccgagcacgaagccagagccacaaccagcagcaggacgcaggagaagaaggc

SEQ ID NO: 7471 - RNA, 77 nt, Homo sapiens
aaagaaaccacccagacaagagcaccacgggcaggaaggcagcgcacgacagcaaaaggagcagccaacacgaacgg

SEQ ID NO: 7472 - RNA, 54 nt, Homo sapiens
gaacacaccagaagaggcgcccgcacgccggccagaaggaggacaggaaaaagc

SEQ ID NO: 7473 - RNA, 81 nt, Homo sapiens
ccagaaagcagcgaagaagaaggcagccggaaacacgcgggagcccaaaaaggggccaccacagagcccgcagggacacag

SEQ ID NO: 7474 - RNA, 82 nt, Homo sapiens
gagagccgggcaacagcaagaagcagcaaccgcgacggcggacgggcgccaggacccccccagagccaagacccccagaagg

SEQ ID NO: 7475 - RNA, 72 nt, Homo sapiens
gacggggaaaacagcaagagccggaagaaaggaaagaggacacacggacaggagagacaacggaggcaagaa

SEQ ID NO: 7476 - RNA, 77 nt, Homo sapiens
agaaagcaagaaagaaagagcggaaaacgggccaaagcaggaaacgcccagaaggaaagagcagccaaagccaaaga

SEQ ID NO: 7477 - RNA, 62 nt, Homo sapiens
caagaggcacccaagccccagccgcgcacccacccgccagcaggacacgcaccacggcacgg

SEQ ID NO: 7478 - RNA, 75 nt, Homo sapiens
agcaacaacggcaagcggagaaaaggacgaaaaggggacagaagaggaagaagggaaaaaccaaaaaaacaaccg

SEQ ID NO: 7479 - RNA, 74 nt, Homo sapiens
ccacacagggaccgagacgcggaacccgaggacagccgcacagagggcgcaagcagggcaccgcacccaggcgg

SEQ ID NO: 7480 - RNA, 34 nt, Homo sapiens
cagaggcacagcgcaggcccagaaggggaagacc

SEQ ID NO: 7481 - RNA, 71 nt, Homo sapiens
caacgcgagccaccgggaaccagcgagaaggggggccaccccaacgccagaagcgcagaccggccagaggg

SEQ ID NO: 7482 - RNA, 84 nt, Homo sapiens
acacaagagcagcggggggcaggagcggaagcgagacgcaagaggaggaaggcgggaaccaggaggccgaaagaggccacacgg

SEQ ID NO: 7483 - RNA, 79 nt, Homo sapiens
ggcacagccccagcaacaccccgcagccgcgcaaaaaaacccaaagagcgagaccaaaaagaaagagaagcggagaacc

SEQ ID NO: 7484 - RNA, 84 nt, Homo sapiens
ccacgaagaagccagcggcgagaaacagaaacaccaaacggcaagcgccagaaaacaacggcacagaccccacaggccccggac

SEQ ID NO: 7485 - RNA, 53 nt, Homo sapiens
cggacgcaaggacaaacccgaccgggaaaagagaaccacaggcacccaaaagg

SEQ ID NO: 7486 - RNA, 80 nt, Homo sapiens
agaagaccacagagggacccggacaaccagaggcagccagcagggggaggacagcagaccacagcccggcaggcccaaaa

SEQ ID NO: 7487 - RNA, 60 nt, Homo sapiens
acaaggcagcagagcacgacacaggccagcgcggagcgggcaggccgaggcggaccacca

SEQ ID NO: 7488 - RNA, 66 nt, Homo sapiens
caggaagcacggcgggcgaaacagggacggcagaaacagaacaggaagaaacaaacagacaggaca

SEQ ID NO: 7489 - RNA, 78 nt, Homo sapiens
gaacgagaggaggcgggcagaggagccagaagggggaagcccaagggaaaccgggcgcagacagcaacgacaaaggaa

SEQ ID NO: 7490 - RNA, 79 nt, Homo sapiens
acaggcaagcccgggacaagaacaggcccaccgaccggagaccaggagacaaggagccgagcagacagcggaggacccg

SEQ ID NO: 7491 - RNA, 74 nt, Homo sapiens
gccagacggcgccgccgcccgcggcgccccggggggcggcgcccacccgggaggacaggcggcccacgagaaac

SEQ ID NO: 7492 - RNA, 81 nt, Homo sapiens
gccagggaggcgaggcccgcaccggaagaaagggcagcaagacacgaagccgagaaagagcagcgacaacaaggaggcccc

SEQ ID NO: 7493 - RNA, 74 nt, Homo sapiens
ccgcaaccaaggcgcgccagggaaggacggcggccgacagcacaggagcgaagacacaggagagaagaccggga

SEQ ID NO: 7494 - RNA, 76 nt, Homo sapiens
gcgggggccgccgccgcggccgcgcgggcgccggcgcggcggccggccgggagccagcaggacaggcacacccggg

SEQ ID NO: 7495 - RNA, 65 nt, Homo sapiens
aaacaccacgccgagaacccaggaaccaccggaacaaagaaggcggaaacccagaacgcagcacc

SEQ ID NO: 7496 - RNA, 71 nt, Homo sapiens
caacgcgccgcaaaacagaacgcggaagagacaggaagagcaggacggggcaacaccgagaacgagccgaa

SEQ ID NO: 7497 - RNA, 86 nt, Homo sapiens
cgcagacgcagggcacccggaggaaagcgacacacgacgggaccagggcgggcgcagccacacccggaagagacggaggaaaacac

SEQ ID NO: 7498 - RNA, 67 nt, Homo sapiens
agagaggagcgaacgagacagaacaggaaaaagggggaccaaccgaagagaaagggggcccaccacc

SEQ ID NO: 7499 - RNA, 61 nt, Homo sapiens
ggcaacgcggcgggaccggccagcgcgcggcgggcgaggacagaagcgaaggggacagggg

SEQ ID NO: 7500 - RNA, 76 nt, Homo sapiens
gcaggggagcggagagcggcacccaggagagcagcaccaagcaaacacgggggaccgcggcgggagcggggcaaac

SEQ ID NO: 7501 - RNA, 69 nt, Homo sapiens
acaccagacacgggggacagaaagcaaggacccaccaggagagggggccaagaggagggaccccggggc

SEQ ID NO: 7502 - RNA, 64 nt, Homo sapiens
agcgcaaggggccgacgacaccaccagcaaagggaagcagggaggaaaaagaggaggagcgaag

SEQ ID NO: 7503 - RNA, 103 nt, Homo sapiens
accgcaagcgagcgagcgcagagcccggggacggcgaggccccagaccacacggcaaggacggggacacaagaccagccagcccagccacagagacaggccgc

SEQ ID NO: 7504 - RNA, 75 nt, Homo sapiens
ggacgaggacgaccggagggcagcaagggaagaaaaggagacaacacaaaacgccacaggaccgacagccaccca

SEQ ID NO: 7505 - RNA, 76 nt, Homo sapiens
gcaaggagaacaaaacaggaagccgacggagcgaaaaagacagggagcacaccacccaagccacggacgaaacggg

SEQ ID NO: 7506 - RNA, 52 nt, Homo sapiens
ggaccaagaaccaggcagcccagagcacaaccaaagcccgaaacacacaccc

SEQ ID NO: 7507 - RNA, 69 nt, Homo sapiens
gaagaaagcccagagaagcaaaaaggaaaaggggcccaacacagaaaggcaaggaacacaagcggcggc

SEQ ID NO: 7508 - RNA, 79 nt, Homo sapiens
cgaccccgagagaggacggagcagggccgccccgaggagagcgacgcccgggcgcgccccggcagagcgagccaaaagc

SEQ ID NO: 7509 - RNA, 80 nt, Homo sapiens
gcgcacgaccggcgcccggacacccgaggggggacccgaagaagacaagcgccgcggacccacgagccaccaaccaggcc

SEQ ID NO: 7510 - RNA, 83 nt, Homo sapiens
cccgggcccgacaggagcgcacaagcgcggacaaggacccgaccgccgcgcgggggccaacaagcaggcggaggcagggggac

SEQ ID NO: 7511 - RNA, 75 nt, Homo sapiens
gacccgaccgccgcgcgggggccaacaagcaggggaccgggaccgcgccaccccggacgcccgaacaggaccagg

SEQ ID NO: 7512 - RNA, 70 nt, Homo sapiens
gagcaggcgaagacaacaggaaggaaaacaggaaacgaaaagagacagcagggcaaaacgggccacacac

SEQ ID NO: 7513 - RNA, 50 nt, Homo sapiens
aggaggccccccgggacccccacccagagaaaccagagcaacggaagaca

SEQ ID NO: 7514 - RNA, 56 nt, Homo sapiens
ccccggcccacaggggggggcaaacccgagagaacggaaagcccaggagcccaaca

SEQ ID NO: 7515 - RNA, 82 nt, Homo sapiens
caacagaagcaccgacgaaaggccaaagaaaaaggaaaaggcagaagcagaagacaagcacagccgccggagggagaaggga

SEQ ID NO: 7516 - RNA, 80 nt, Homo sapiens
agagcgcggaggggaaccccgagccgcaggaccggaggacagggaaaaaggcacacgggacagcaggaaaacagagcagc

SEQ ID NO: 7517 - RNA, 67 nt, Homo sapiens
aaggagcacgcaggagaagaagaaccagaagcaagccggccccgagcgaggcaccggacccgacacc

SEQ ID NO: 7518 - RNA, 73 nt, Homo sapiens
cgaccgcaacccggacagccacagcggagcagacgcgccagggaacacccacggaagagaacgcccgagcccc

SEQ ID NO: 7519 - RNA, 95 nt, Homo sapiens
gggcgcacagccagaaaggggggccgacaggcgcccacacccaagcaggagaggagcaggaagaagaccacgcccccagaaggcaaaaccaggaa

SEQ ID NO: 7520 - RNA, 74 nt, Homo sapiens
gagcgaagcaagggaccgaagaagccaaagacgcagaaaacagacacacagcggagacaagcagggccggcagg

SEQ ID NO: 7521 - RNA, 72 nt, Homo sapiens
ggccgccccacaccgagcacccgcagaacaggagaggcgagcaggaaaacgcagcggcgggcagcggaggga

SEQ ID NO: 7522 - RNA, 73 nt, Homo sapiens
gggagagaagcaaaccgggggacgcgcagcacccacccgagagccccagagcgcacccccgagcgccacccgc

SEQ ID NO: 7523 - RNA, 81 nt, Homo sapiens
cgaaccagggagcgcaccgaaccggacccagaaggcgcgaaggcagaccgcccagcggcggcagggcgacagccaggaagc

SEQ ID NO: 7524 - RNA, 56 nt, Homo sapiens
gcagggcgcccccgccccagggcgaagacccccccccagggcaaaccaccaggcaa

SEQ ID NO: 7525 - RNA, 76 nt, Homo sapiens
cacaggaagagacggaaaacgcagaaaaacgggagcaaaagaaaccaacccaaacagagccacccccaagggcgag

SEQ ID NO: 7526 - RNA, 75 nt, Homo sapiens
agagcacagaggggaacagacaggccccagccgcagaaaccaagcgcaacacgaagagggagcacaaagaagaaa

SEQ ID NO: 7527 - RNA, 79 nt, Homo sapiens
gccccggcgcccaccgcccaccgagccgggagggagaaaacgcaggacacaaggaagaagaaggaccagaggaaaacag

SEQ ID NO: 7528 - RNA, 43 nt, Homo sapiens
gcggcaaagggaaaaaggcgcaccacagcaccaggccgcccag

SEQ ID NO: 7529 - RNA, 74 nt, Homo sapiens
aacgcaagaaaagcggagaaagacagcaaagaaaaggagaagaaaggaaaaaaacaaccccgggcaccccgcca

SEQ ID NO: 7530 - RNA, 82 nt, Homo sapiens
cggcgcagcggggaccggcggcggcgcccaggcacccggcccggaccgcccccagccgccgggacagcgcaaagggcccccc

SEQ ID NO: 7531 - RNA, 39 nt, Homo sapiens
ccagaccagccggacaagaaagccgccgcgcccaggcgg

SEQ ID NO: 7532 - RNA, 38 nt, Homo sapiens
gggagaaggaagaggggaaaagaacgcggcagaacgga

SEQ ID NO: 7533 - RNA, 46 nt, Homo sapiens
ccaccgcccccagcgcaccaggccagcaggaagaccaagaagaagg

SEQ ID NO: 7534 - RNA, 77 nt, Homo sapiens
agggaggagaccgaggcaagagaggaagaacgccaaagcacaaagcgaaagcagagagcgaagacgaacaagaacca

SEQ ID NO: 7535 - RNA, 69 nt, Homo sapiens
gaggagagacggcggcggaaaaccccaaaaggacaaaggggagaaaaacaggaaaagaaagacgcacag

SEQ ID NO: 7536 - RNA, 81 nt, Homo sapiens
caggccaaggaaaaggagacgaggagcgaagcagagagagacacgaacagagaggcacccagacgccccacagccagccgg

SEQ ID NO: 7537 - RNA, 78 nt, Homo sapiens
acagcggcagcccagcccggcccggcagcgacaggaagcgagacgacgggaccgaaggaccccgccagagacaaccga

SEQ ID NO: 7538 - RNA, 73 nt, Homo sapiens
aacagccggaacgccccaaaaaaggcacagaagaagccaaaaacgggccagaaagaaacgaggcacaaagaaa

SEQ ID NO: 7539 - RNA, 53 nt, Homo sapiens
gccggcgcgcccgcgcggcgcggggaccgcggcccgacggcccgccacgggcc

SEQ ID NO: 7540 - RNA, 69 nt, Homo sapiens
ccagcccgggggcggcacaggcgaggaaaggagggcacgaggacagcagaccacagcccggcaggccca

SEQ ID NO: 7541 - RNA, 79 nt, Homo sapiens
gcacccacccacgaagggaggaaaagggcagggacagcgcaggcagcaggaaccagcaccagacagaagacgcagaaga

SEQ ID NO: 7542 - RNA, 36 nt, Homo sapiens
cccccccgccggcccaacgggcaagcaaaaacacag

SEQ ID NO: 7543 - RNA, 84 nt, Homo sapiens
gaagacaaggcacccaaaaggacaaccacgacccagagaaaacagcgagaagagcccagggagagagacagcggacgggagacc

SEQ ID NO: 7544 - RNA, 71 nt, Homo sapiens
gagcgggccccaacccaccaaaagcacagcgaaccagaaaaggaaaacgggaccaacggggaaagggaaac

SEQ ID NO: 7545 - RNA, 48 nt, Homo sapiens
cgacccagaaacagaaggcccagaccacagagaagacccaggaccaca

SEQ ID NO: 7546 - RNA, 52 nt, Homo sapiens
gagagccgcaaacgggccggaagcagagccccgggccgggaaggggaaacgg

SEQ ID NO: 7547 - RNA, 79 nt, Homo sapiens
gcgccgcgaacggggccagcgccgcgcccggggccggcgcccgggccaccggccgcaggaaagaaagggcgggcaagaa

SEQ ID NO: 7548 - RNA, 55 nt, Homo sapiens
acccgggcggggcagagcagcccccagccagccgcgagggccgcaaaaggaaaga

SEQ ID NO: 7549 - RNA, 74 nt, Homo sapiens
cccaagagaagagaaaaccagcgcaggacaaagacgaagcgcagaaggaacaagggacagggggaagcaaaggc

SEQ ID NO: 7550 - RNA, 75 nt, Homo sapiens
aaacaagcacccgccgggccgaaccggaagggcaagacgggacccaaggaaaaacagaggacaacaggccagaca

SEQ ID NO: 7551 - RNA, 75 nt, Homo sapiens
gccagccacccaacagacaagaaggcgaagagagcaagagagagaggcagccaagaagaagaacccccagggagc

SEQ ID NO: 7552 - RNA, 39 nt, Homo sapiens
acacaagacaccccccaagaaccggcgaaggagcacgaa

SEQ ID NO: 7553 - RNA, 78 nt, Homo sapiens
gggagagagccagacaaagacgaacaggaccgaagagcaggcggggcggggaaggagacacccagaccacaacacagc

SEQ ID NO: 7554 - RNA, 80 nt, Homo sapiens
aaaaggcgacgcacacaacccccgaaagcggcggagaacggaaaagcaccaggaagcagagaggaccgcagaagggaagg

SEQ ID NO: 7555 - RNA, 84 nt, Homo sapiens
cggggagaagcccacccggaggagccagcgccgcgacgggcggagaacggaaaagcaccaggaagcagagaggaccgcagaagg

SEQ ID NO: 7556 - RNA, 62 nt, Homo sapiens
gcaccagcaagccaacacagagcagccccaagaagagcaaaggagagaggggcgccacggcc

SEQ ID NO: 7557 - RNA, 39 nt, Homo sapiens
cagggccgccccaggacaaaggaaagcacgaagggagcc

SEQ ID NO: 7558 - RNA, 71 nt, Homo sapiens
gggcgacagcggcaggggccccgaaccagaagccaaacggaacaccgggcagagagaacagagagacaaac

SEQ ID NO: 7559 - RNA, 58 nt, Homo sapiens
acacccccaccgcccaggcaacaaaggaacagcagagaacaaaggaccgcaaacgaag

SEQ ID NO: 7560 - RNA, 56 nt, Homo sapiens
cggggccggggaacacacagaaacagcgaggccgcagcaaaggcagccacaggaca

SEQ ID NO: 7561 - RNA, 77 nt, Homo sapiens
gggcgggcccggcccgggggccgccccggcgagccgcgacggcgccgcccacggcgagggccaggagagcgggacag

SEQ ID NO: 7562 - RNA, 90 nt, Homo sapiens
gccacagcagccagccggcccgaggacaccgacaccagcagagaaccaggagcggcagaccgccgccaggaggaggcacgcagcccgaga

SEQ ID NO: 7563 - RNA, 60 nt, Homo sapiens
cggggaccgggaccgggacggaccgggagggcagccggcacccgcacaacccagggggcc

SEQ ID NO: 7564 - RNA, 75 nt, Homo sapiens
gccgaaacacgccagccaccacaggccccaggaaggcaaaaagcaggaaagagcacaacagcggccccacaagcc

SEQ ID NO: 7565 - RNA, 56 nt, Homo sapiens
aacgacagcacaccgacaccaacgccaccacagagggcagccggcaggcgcgaagg

SEQ ID NO: 7566 - RNA, 83 nt, Homo sapiens
gacagaccaccaccagggcggagcgacagcagggggagaccaaggcaggcagcggaagagaaagaccgaggcaaagaagcagg

SEQ ID NO: 7567 - RNA, 78 nt, Homo sapiens
ggccagcgagggagcaggcggcgggaagccaagcgagacggcaagcaggaaacggaggacggggaaaaaggaccacaa

SEQ ID NO: 7568 - RNA, 52 nt, Homo sapiens
acgaagagggaaacagccacaagaacggccgagcgaccaggagaggagcccc

SEQ ID NO: 7569 - RNA, 78 nt, Homo sapiens
cagaaacgggccgcgccaccaagccgacaaccccggaacgcgggcaaaaggccccaggggaccgggggaggccccaga

SEQ ID NO: 7570 - RNA, 79 nt, Homo sapiens
ccgcgcagccgagagccgggggagcggggccccacacccccccgggggggcaagcggccaggcagccggaccagcccac

SEQ ID NO: 7571 - RNA, 78 nt, Homo sapiens
acgagggggcgaccaaccggcaggcacacgaccagccccgcgaaccgaggcgagggggagcccggcccagccccccac

SEQ ID NO: 7572 - RNA, 76 nt, Homo sapiens
aaaaaccgagcggcgggaagagaagcgaaggagagagaaacaggggggaaacaaggcccagagaaggaggaccccg

SEQ ID NO: 7573 - RNA, 58 nt, Homo sapiens
aaaagcggagcaggaaagaggcgaacacaaagaaagcaaaccagccggcgggcgccac

SEQ ID NO: 7574 - RNA, 74 nt, Homo sapiens
cagagaggaagcacccccgcacccagaggaaacaggggaaagagaagaaggaggagcgaagcccccagagggcc

SEQ ID NO: 7575 - RNA, 78 nt, Homo sapiens
accgccccgagacgaggaacgcaagcacaggaccagaaacgaaaggcagcagaagaggaaagccagaaagacgagcaa

SEQ ID NO: 7576 - RNA, 73 nt, Homo sapiens
caacggcaggggcaggccaggaccgacagcccccacaaggcgggacaagggcgcaccggggcgcagcgaggga

SEQ ID NO: 7577 - RNA, 78 nt, Homo sapiens
aagaccgcgcccgcggagagcccaaacaccaccaccaagaccagaagacacgacaccccaaaaaccccacgcacaaaa

SEQ ID NO: 7578 - RNA, 83 nt, Homo sapiens
ggaagaagacccagggaaacccccagagacaccaggcgccgagaaggccagcagagaaacaggcaggagaggcccacaggcgc

SEQ ID NO: 7579 - RNA, 72 nt, Homo sapiens
caggagaggacacggggaccgcagcagcgacgcaacccacaggagaaagaagagagagacccccggaagaag

SEQ ID NO: 7580 - RNA, 56 nt, Homo sapiens
acgaagaacccacagaggagggagaagaccaaagaagagagagcaggaccaccacc

SEQ ID NO: 7581 - RNA, 73 nt, Homo sapiens
acacgcgcaaaggagaaccccacaccagaacccaggggagacagaggaaagcaccaaggaaccgagcaccgga

SEQ ID NO: 7582 - RNA, 64 nt, Homo sapiens
cccccccacaggaagaaacgaggaaaaaacacagccgagcacgcggaggagccaaccgggacac

SEQ ID NO: 7583 - RNA, 79 nt, Homo sapiens
ccagcccgcgggacccgcccgaggcgaccacaagagcgcaggaccagcacacgcaagcccacgccgccacgacacacgg

SEQ ID NO: 7584 - RNA, 70 nt, Homo sapiens
cgagcgcccagccggggagggggggagcgaggcgccgccgagcccgggcaacaccgggcgcgcacagaag

SEQ ID NO: 7585 - RNA, 79 nt, Homo sapiens
gcgaggccaacgaccggagaggggaacagacgcagggcagggccccgcccggcggggaagcggagccggagcgaggcgg

SEQ ID NO: 7586 - RNA, 79 nt, Homo sapiens
ggagcgggccagcccgagcccagggggcagcaggacagcagccggccacaggaaagacaaggagccgggccgagaaacc

SEQ ID NO: 7587 - RNA, 76 nt, Homo sapiens
agcacccggcggccaaaggccaggacaccaacgggaccagaagaggagaacgaaaacccaccaggaaggagcacag

SEQ ID NO: 7588 - RNA, 62 nt, Homo sapiens
caccgaggacgagaaaacccaccggacgaacaaaacgaaggacggaagcggaacaaaaccaa

SEQ ID NO: 7589 - RNA, 76 nt, Homo sapiens
gccgcagccacaacaccggcaggaaccaccaggacagaaacagccacaggaagagggaacaaagaaggaaacagga

SEQ ID NO: 7590 - RNA, 79 nt, Homo sapiens
gaggaccacccagaggagcaacaggacacccccacacgagccccaaccccccagaccaaacacaccgccccaacgcagg

SEQ ID NO: 7591 - RNA, 75 nt, Homo sapiens
ccacagggagagaacaaacacaggggccaccagacgagccacagaccacccaaggccccccagccaacccgacag

SEQ ID NO: 7592 - RNA, 59 nt, Homo sapiens
aaaccagagaaccaggacagacggggggccgaagggaaaacacacgaccagaaggccag

SEQ ID NO: 7593 - RNA, 78 nt, Homo sapiens
gccgaaagcagaagaaaagggacgcaagaaacccaggacgagaacagcaacaggagcgagccaaccaaagaccccgag

SEQ ID NO: 7594 - RNA, 42 nt, Homo sapiens
cagcggcaccggacgaccgcgaaacccacaacagcagccaga

SEQ ID NO: 7595 - RNA, 73 nt, Homo sapiens
cccccgcgagaacccagccgggcccacaaagggcgcggacccgacaaaagacacagcagccagaagaggggcc

SEQ ID NO: 7596 - RNA, 88 nt, Homo sapiens
gggcgcccgcgcccccggagcgcagagacggaaagaacaggccaagaaaagccaaagaaagcaaaaccagcagcagcagagcaacagc

SEQ ID NO: 7597 - RNA, 74 nt, Homo sapiens
cgggcgaacagcaaaaggcacaaaacaacccaaggggaaagaaccccgggcccgggaggagggcaggccaggaa

SEQ ID NO: 7598 - RNA, 77 nt, Homo sapiens
ggacagcgacccccgcaaggaaaggcccagaaaggaccacagagacagccaggcccgcggcgggggcggacgacaga

SEQ ID NO: 7599 - RNA, 80 nt, Homo sapiens
cacggccgcacggcccgccccggcgggcagagaccagcaccggagaaggggagaaaaagcccccacggagagacaggagc

SEQ ID NO: 7600 - RNA, 77 nt, Homo sapiens
cgagccggaaggacacgacacaggaaaccccccaggcaagaggcgcaggaccgggaagaccaacaaacgcaccgcgg

SEQ ID NO: 7601 - RNA, 57 nt, Homo sapiens
gccagggacacggaaaggaaacacgaaggaccccaccaggaggagaccacaaagacc

SEQ ID NO: 7602 - RNA, 78 nt, Homo sapiens
agcgcccgacccggcgagggcagcgcaagccacaggaacgagccacgagaagccccaacaaaacaagacccacagaga

SEQ ID NO: 7603 - RNA, 85 nt, Homo sapiens
agaccccgcgccgacggcgccaaacacagggaggaccgcgccaacaggacgaggagaccgaccaggagaccccagcggagacgac

SEQ ID NO: 7604 - RNA, 80 nt, Homo sapiens
cacggacaaagaaggggggaacgaggccaccgaagaagccagcaacaggagacagccgaagcaggacacaaagaaaagac

SEQ ID NO: 7605 - RNA, 62 nt, Homo sapiens
cgagacagccgaggcaggaagcccggcggacgcgcgccgggggcccggaaagggacgcgcgc

SEQ ID NO: 7606 - RNA, 75 nt, Homo sapiens
ggcccagagccgggggagacaaggcaaagcagaagcgcagcagccagcgggggcggccgcccccagcaggagaag

SEQ ID NO: 7607 - RNA, 78 nt, Homo sapiens
aaccaccaggagacacgaaacgaacgacgaagggaacgcacgggaaagcgcgcaaaagacgcacacgggccgccgcgg

SEQ ID NO: 7608 - RNA, 82 nt, Homo sapiens
acaggaaaacaaaagaggagaaagcacaagcccgggggaaaggcagcgcgcagcagcggcacacaagccaaacagagagaag

SEQ ID NO: 7609 - RNA, 77 nt, Homo sapiens
gagagcaagccaaagaccaaggggggggcacccccacaacgcagggagagggccaaaggaacgggacagcacggcac

SEQ ID NO: 7610 - RNA, 78 nt, Homo sapiens
cccgccggagcacgccccgcccaaccggcgcaaggggacgccgcgcgcccgccgcggagaagccgcgggagcggaaga

SEQ ID NO: 7611 - RNA, 95 nt, Homo sapiens
acccgaaccagaaaacgaccccccagacaagcccacccccgagaccagggacagaaggggggcaaggcccacagggacaccacgagccgccacac

SEQ ID NO: 7612 - RNA, 66 nt, Homo sapiens
aaacaagaaggagaacaaaagcaaagccccagacggacggcgagacccgacagcagacagcgggcc

SEQ ID NO: 7613 - RNA, 68 nt, Homo sapiens
gagcgcagacgagcagaggagcaggggggaggacccgcacgcacccagggaggccgacaccccccgag

SEQ ID NO: 7614 - RNA, 50 nt, Homo sapiens
aggcccaagacgccgcgcgagggggggaacagcgccaggaggcaggaaag

SEQ ID NO: 7615 - RNA, 78 nt, Homo sapiens
ggccccagaacggcacgcaaacaggccagccacaccagcgacggccccaaccacggagcaacgcaccggaacacaaca

SEQ ID NO: 7616 - RNA, 58 nt, Homo sapiens
caagcggccgagcggagccacccccagagagaaaaggcacaggcaagaccgccaagaa

SEQ ID NO: 7617 - RNA, 76 nt, Homo sapiens
cgcgacacaagaaaaccacaagaacgcaccccccagcacacggcggcggcgaagccaagacacgggcccgccgagg

SEQ ID NO: 7618 - RNA, 82 nt, Homo sapiens
gcccccccggagggcgcggaggcggggccagggccgaggacaccggagccagccaggccggccgcgggccgaccggcccccc

SEQ ID NO: 7619 - RNA, 83 nt, Homo sapiens
cacggcccgcaggccgcgcgaggaggccaccgaagccggggacgcgaggagccggcgggcccggagggaacaggcacgcccca

SEQ ID NO: 7620 - RNA, 80 nt, Homo sapiens
cggaacacaggcaaaagggaaaggcagaagaagaagagcggagaaccgaacaggcgcagggagcccccaccacagcagca

SEQ ID NO: 7621 - RNA, 60 nt, Homo sapiens
ggagccggggcggagagcggcgaccacgcggaccggcccgccgacacagccaccaagaag

SEQ ID NO: 7622 - RNA, 67 nt, Homo sapiens
gggccagggccagagcaaaggcgcagggagcaggagaagcggagcgaaggggcgggcaggcagaggc

SEQ ID NO: 7623 - RNA, 58 nt, Homo sapiens
ccgcgagcccggaggagaggacgaggggacccaagagaggccacggcgcccagccccc

SEQ ID NO: 7624 - RNA, 85 nt, Homo sapiens
gaagcaggaacccagccaacgagaaaacaaacaagcggccacccgaaagggagcgggaaacgcacaacagagaacagaaaagacc

SEQ ID NO: 7625 - RNA, 60 nt, Homo sapiens
cccggggcgggccggccgcgccgggagcgccaaccccccaggcaaaagcagaccggaaaa

SEQ ID NO: 7626 - RNA, 79 nt, Homo sapiens
gaaagccagaggccgagacccccaccaccgcaggcagcccaggacaaaagacccacaccgaaggacgagaaacagggcc

SEQ ID NO: 7627 - RNA, 56 nt, Homo sapiens
caccagcaccaaggcggagcccgacggccacaaaagccagcaggacacccgcaaga

SEQ ID NO: 7628 - RNA, 82 nt, Homo sapiens
caagcggccacgcagcacgcgccaaggaccaccaccgccgagcggagggcgggagacgcggcggcggcacgagcggcgccgg

SEQ ID NO: 7629 - RNA, 61 nt, Homo sapiens
gcgaggccggccaacaagacagcgaacacaaagggccccccgaaccggcccagggggagcg

SEQ ID NO: 7630 - RNA, 68 nt, Homo sapiens
cagccgggaaaggagccggccggcggcaaaggggaacggcgagggaacccaggaaggagggcgacaaa

SEQ ID NO: 7631 - RNA, 73 nt, Homo sapiens
ccgcccagcccacaagagcgggacacaggcaaaggggccagggggcagcaaggcccaggggggacaaagaaag

SEQ ID NO: 7632 - RNA, 81 nt, Homo sapiens
cgggaccccaccccccacacgggggaccagcagggaccaagaggaaacggggcggagaagccgaagggccagaaccacccc

SEQ ID NO: 7633 - RNA, 72 nt, Homo sapiens
ccccaaggcagagcggccccccccggcggaagcgggcgcgccaagaagcaccacgagaagaggagaggggaa

SEQ ID NO: 7634 - RNA, 87 nt, Homo sapiens
gaaacagaaaacacgggcccgacgacccagcccgggaccgggagcccgggaccgggagccggggggccaccccgaccggaggagcgg

SEQ ID NO: 7635 - RNA, 58 nt, Homo sapiens
gcgcagaaccagggcggcggccagcgccacgcccacgaggcggccccagcgcgggcga

SEQ ID NO: 7636 - RNA, 81 nt, Homo sapiens
agggccccggaccggcccccgggaaagaggcgcgacccgcggcccggaaggcacggacgggggcagacaaaggcagcccag

SEQ ID NO: 7637 - RNA, 68 nt, Homo sapiens
gaaggcccaagacaagaggagcagacccgggacgaggcagcacacggagcagccgcaacagcgcaccg

SEQ ID NO: 7638 - RNA, 81 nt, Homo sapiens
ggcgcgagccccaggaaaggacagcccagagcaagcacacggaggcccgggagccagaccgggagcccgccccagccaggc

SEQ ID NO: 7639 - RNA, 37 nt, Homo sapiens
accgcaccaacaaagacagaagagaccaagaccggcc

SEQ ID NO: 7640 - RNA, 42 nt, Homo sapiens
gagaagcagcggacagcagagagaggagaaaaggcgaccgaa

SEQ ID NO: 7641 - RNA, 61 nt, Homo sapiens
cgagcgacaggagcacacccggagaagcaggagcccaccggcaggacccaaagacaggacc

SEQ ID NO: 7642 - RNA, 80 nt, Homo sapiens
gggaccgcgcggacccggccgggagaagcagcagcgcaaggcaaaagcagaccggaaaacccaccggcaagaccacaccc

SEQ ID NO: 7643 - RNA, 77 nt, Homo sapiens
caacccgaaagaacaccgaaccaggacagagcgggagccaccagcgccaaagggaagccaggagcccgggggcacgg

SEQ ID NO: 7644 - RNA, 64 nt, Homo sapiens
agggcgagggcgagccggacgcacgggagaaagcgaaagccaggccagaagaaggaaggccggg

SEQ ID NO: 7645 - RNA, 81 nt, Homo sapiens
accagaagcgccgaacgcgcgcagaaccggcgcaggaccgggcaggagcgaagagacacgcggaacaagacaggcccccca

SEQ ID NO: 7646 - RNA, 66 nt, Homo sapiens
gagcagaaaaaagcacgaagacacaagccgagggaagagacagcgaacccacccaacacggcaaaa

SEQ ID NO: 7647 - RNA, 72 nt, Homo sapiens
ggcaggaagaaggaaggacccccaaccggaaccaagaaagaggaagaagaggagacaaaggaaaagagaagg

SEQ ID NO: 7648 - RNA, 73 nt, Homo sapiens
gacccagccccccacccaacgcgggcggagaacggaaaagcaccaggaagcagagaggaccgcagaagggaag

SEQ ID NO: 7649 - RNA, 60 nt, Homo sapiens
ccggcgggcgacggacggccggacagcaaaagcgaaagccggacacaccaaacgcagccc

SEQ ID NO: 7650 - RNA, 87 nt, Homo sapiens
ggcaccagggcgcggggacgaaagaggggcacgcggagaagagagaaccgagccaccgcaacggaggcgaaccggcaggagaaagga

SEQ ID NO: 7651 - RNA, 89 nt, Homo sapiens
cccagccccggaaccacgccaggggaagaaacgagaaggcacggcagcaacgaagcagcagcgggacaagcgaggcagaccagaagagg

SEQ ID NO: 7652 - RNA, 57 nt, Homo sapiens
cacccccggagagggcgcagcgcgaacacaggagggcgaccagacgaggggagacgg

SEQ ID NO: 7653 - RNA, 73 nt, Homo sapiens
cgccacacccgacccgccaagaagccgcgagcaccacagagaccgaacagaggagggaaaccaagagccgcgg

SEQ ID NO: 7654 - RNA, 60 nt, Homo sapiens
caggcaagagcggggagaccagaccagggaagggacgagacagaccggagaggacgggag

SEQ ID NO: 7655 - RNA, 42 nt, Homo sapiens
gcaaggcgagggacgagaacgaggcacggaggccccagccca

SEQ ID NO: 7656 - RNA, 69 nt, Homo sapiens
gacccccaacgggcccgcagagcagggaacagacagcggagagggcacccgggacgccaggacagaaac

SEQ ID NO: 7657 - RNA, 75 nt, Homo sapiens
gggccgagcgcacagacgagaccgcgcagagcgaaagcacacgaagaggcagcccagaagaagaaagcaagcagg

SEQ ID NO: 7658 - RNA, 78 nt, Homo sapiens
agaagcccacccccgcggcgccgcgccccagaccagagacgggaagaccccagaaaaagaaagagcacgaacgcggag

SEQ ID NO: 7659 - RNA, 66 nt, Homo sapiens
ccgcaccaccaacgcggccgacaacagccggcgccgccacgaggagcgacacgcagaccggcgagc

SEQ ID NO: 7660 - RNA, 76 nt, Homo sapiens
gcacacccagcagagccacgaggagcgaagaaggcagagcaacaagagaggacggggacgggccccaggacgagga

SEQ ID NO: 7661 - RNA, 78 nt, Homo sapiens
caaggcaagaccgaacagaaggaacgacgcggaccagaagccagagcgaggacgccggcaggcggccacacgcaggcc

SEQ ID NO: 7662 - RNA, 70 nt, Homo sapiens
ggagccagcagagcgccaggagacgcccagccaccgccccaggaggaaggagaacccgcgaccgcacccc

SEQ ID NO: 7663 - RNA, 58 nt, Homo sapiens
cgaaaacagaccgcgagcccagagggaagcccagaggcacggggcagaacaccaacag

SEQ ID NO: 7664 - RNA, 68 nt, Homo sapiens
acaacagagcgacagaggcaggaaagggacaagaacccgaaaaagcgaggacgagcaccagaaagagc

SEQ ID NO: 7665 - RNA, 75 nt, Homo sapiens
gaagcgccaaagccagacaaggcgagcaaggcaaccagcaagaacaggccacgccagcaagcgcgaaaccacgga

SEQ ID NO: 7666 - RNA, 60 nt, Homo sapiens
cacgggaaggagcgggcggcgagccaacggcagcccgaggccggccgccgcgcccccagg

SEQ ID NO: 7667 - RNA, 76 nt, Homo sapiens
ggaacagggccacagcaagcccacagcacagcaagaaaaaggcggcagcacgggggaccggacccaaacgcaggcc

SEQ ID NO: 7668 - RNA, 61 nt, Homo sapiens
acagcgagcggaggaggacgaggacggaaggaaagcggggcagcaaggcaaggaaaaaacg

SEQ ID NO: 7669 - RNA, 74 nt, Homo sapiens
ccaaacgcggggggacggggccaagcaggagggaaagccccagcaggaggcaacgagggaacaaccgccgaaga

SEQ ID NO: 7670 - RNA, 71 nt, Homo sapiens
gccaggcccccaccccccacgccccaccacaacaaacgaggaaccagcacaagacaagccaaagccacccc

SEQ ID NO: 7671 - RNA, 59 nt, Homo sapiens
ccaaagagcggaaaggcaaaaggacagcaaagaaggccaagaagacgacacaaaaggag

SEQ ID NO: 7672 - RNA, 88 nt, Homo sapiens
cagagggggccgccgcggcagcaagaacagagagagaggggacagacgagagaacgaggaagaggagcaggacggagggagaaggggc

SEQ ID NO: 7673 - RNA, 77 nt, Homo sapiens
ggccgacgagcaggagcgccgcaagggaggcgcaggagccggcagagggccacagagcgaaaaaaaccaacacgcaa

SEQ ID NO: 7674 - RNA, 66 nt, Homo sapiens
gacaaaagccaagaggaggacagcgcacacagcaagcacgagaggaggaaggaccgagcgcaggaa

SEQ ID NO: 7675 - RNA, 77 nt, Homo sapiens
cagcaagaccagcacagagagaagacaagcacacaccaggagaggaacggaaaaggacagaaccagagcgaaaacgc

SEQ ID NO: 7676 - RNA, 82 nt, Homo sapiens
ccggcccggccaccgagaccgcgacgccggcaggggaaaggaggacaaaaggaaaaaaaaaaagggaagacagagaggcggg

SEQ ID NO: 7677 - RNA, 62 nt, Homo sapiens
gcggcacccacgaaacaacagagaccaccagggggaaggaacaccccagacccaacgcggcc

SEQ ID NO: 7678 - RNA, 73 nt, Homo sapiens
ggaagcacggcgggcgaaacagcgcaccacgacaaagaagagaaaacgcggcagagcaacaaacacagccaga

SEQ ID NO: 7679 - RNA, 59 nt, Homo sapiens
ggagccaccccgcagccccgagccagaagaaggaagggagaggcaagaacgccaccgaa

SEQ ID NO: 7680 - RNA, 75 nt, Homo sapiens
cggaaccaccagaagccagcccccaggcggaacgcccgccccgcagagaggaaagcggggcagcaaggcaaggaa

SEQ ID NO: 7681 - RNA, 83 nt, Homo sapiens
aacccgcgccgcgccgcgccgcgccggaagggccgggccggggcacgggcccacggccccccaccgggccaccccgggggcgg

SEQ ID NO: 7682 - RNA, 80 nt, Homo sapiens
agacggggggaaacaggcgaggcggcggcgcccggagggcagcgagaggagccaaccggcacgcgggagggggcggacgg

SEQ ID NO: 7683 - RNA, 77 nt, Homo sapiens
caagagagcaacaagccacgccaagaagagaagaccaaacgcaggaaggcaaggacgaccgcacggccaaagagccg

SEQ ID NO: 7684 - RNA, 82 nt, Homo sapiens
ggccgggccggggacaacgaggccgcggagacgagacaagcgcaagcagccagagcccgggcgcaaagaaccaggcccggac

SEQ ID NO: 7685 - RNA, 132 nt, Homo sapiens
ggacgaggaggaagaagagaagggaaaagcaaaggagaagagacaggacgcgggaccggcagccgacaggacgggccaaaaggaagcccacgacaagagaccaggcaagaggggagaagcgcgaagacgaca

SEQ ID NO: 7686 - RNA, 80 nt, Homo sapiens
ccggccccgcaccaggaggaggacgacagcacgacccagacaaaggagaagaagacccagaagcgcacaagaacggggcg

SEQ ID NO: 7687 - RNA, 66 nt, Homo sapiens
gaggcaagagccggcaccaagggaaaacagaagacgacacccccaaagcgaaagacacgacaagac

SEQ ID NO: 7688 - RNA, 72 nt, Homo sapiens
cgagacagccccaagacaaccccaccagcaccacaggcccaaagaacgacacgaacgcaaggcggacaagag

SEQ ID NO: 7689 - RNA, 67 nt, Homo sapiens
aaggggaaacggccacgcaggaaccacaaggacaggccccaccgacccaagagaccgggcagggcca

SEQ ID NO: 7690 - RNA, 75 nt, Homo sapiens
accaggagagagagaaacaccgaaaaacaacagcagggggaaaaaaacaggggaagagccagaaagcagggccaa

SEQ ID NO: 7691 - RNA, 92 nt, Homo sapiens
aggcccaaggggcccccgggcaccccggaccgcgcagccaccgcggcccccgcgggagcacagcaagcgggagcaggcagaccaaaggaaca

SEQ ID NO: 7692 - RNA, 93 nt, Homo sapiens
gaaaggagacaaagaccgggcgacgaggcacagcgcgcaagaagggaggggggagcacagaggcaagagcacgggcggcagccccaggggaac

SEQ ID NO: 7693 - RNA, 58 nt, Homo sapiens
cacaacaggcagacagacaacccacagacacacccaaagcagcccacacagggcagac

SEQ ID NO: 7694 - RNA, 38 nt, Homo sapiens
cgacacgcagcagcggccaggggcgcccccgcgcccca

SEQ ID NO: 7695 - RNA, 57 nt, Homo sapiens
cccacaagccaagcgccaccagcagcgcgcacccagggcacaggagacagagaggag

SEQ ID NO: 7696 - RNA, 68 nt, Homo sapiens
gagcaaaggcggcggaggggcaggaggcgcggacacgcaaaccacacaagaagagcccaaggaggagc

SEQ ID NO: 7697 - RNA, 66 nt, Homo sapiens
cgcacaggcgcgagaaaggaaagaaacaaggcccagcgggcaaccaagggcagaccgcacaagcag

SEQ ID NO: 7698 - RNA, 87 nt, Homo sapiens
gcggagcaagaggcggacaccccggacgaaccacaggaagcgcggggcggcggcgaaaggacgggcggagaacggaaaagcaccagg

SEQ ID NO: 7699 - RNA, 53 nt, Homo sapiens
aagacccggcaccaacagaacccagaaaaacgcaagaacaagcaccaaagcag

SEQ ID NO: 7700 - RNA, 79 nt, Homo sapiens
aaggcaccgcggacccaaccagaccaacaacaaggcgcggacccacgaaaacaagcggacaccaccaaaaaagaaagaa

SEQ ID NO: 7701 - RNA, 82 nt, Homo sapiens
aggccgcccaccaggcaccgggccagaaccagagaacagcagaggcccaggaaacagccaccaccccggcccccagagccca

SEQ ID NO: 7702 - RNA, 68 nt, Homo sapiens
gagcgccacgcgcggaaggcagcgcccagcagcgcagaacccccaaagacaacaaggagcaccaaaag

SEQ ID NO: 7703 - RNA, 70 nt, Homo sapiens
cccggccaccgacccacaagaacaccggcagagagagagacacaccagacgagaaagcgacggagcggac

SEQ ID NO: 7704 - RNA, 74 nt, Homo sapiens
aaaagggcaagaagccagaaggaacgaagcagagcccaacaggggagccgagaagccgaagcagaaggaaacca

SEQ ID NO: 7705 - RNA, 38 nt, Homo sapiens
gcaagagggagacaaagagagagcagggcggacaaggc

SEQ ID NO: 7706 - RNA, 86 nt, Homo sapiens
caccagccgcccaagccgcacagccgcggcggcagcagcaggagagggcgaaggcgccaccggcgagaagacgcggggacacaccg

SEQ ID NO: 7707 - RNA, 87 nt, Homo sapiens
caggggaccaaagcagggcacagcgaaggaaagccagaggacacgaagggagcagaggccaggaggggcccagcccggccaggaggc

SEQ ID NO: 7708 - RNA, 59 nt, Homo sapiens
cgcgacgcgagagaaggacccacggcgcgcgaaggcaggaagagacgggaaagcggaag

SEQ ID NO: 7709 - RNA, 77 nt, Homo sapiens
ccgggcccggcccccaaccacgcaacaacaggggacgagcagccaaaggcacgacgcccgggaagagggggagcggc

SEQ ID NO: 7710 - RNA, 76 nt, Homo sapiens
agaaaaaaccaacagacaacaagagcccaaacaagaggaaaagaaggaggccagcgggacacacaaagaaagacga

SEQ ID NO: 7711 - RNA, 53 nt, Homo sapiens
ggcggcgggcacccggaggcgcccgagcgggaccaaaccacagcaaaaacacc

SEQ ID NO: 7712 - RNA, 87 nt, Homo sapiens
cagagccggagcgcgaaggccgggacccggccccggcccacaggggggggcaaacccgagagaacggggaagaagcaagccagaaag

SEQ ID NO: 7713 - RNA, 68 nt, Homo sapiens
agaggggacggcgccgcaggagaagccggaggccggaggaaggaaaaagcaaaagaaagaccacgaga

SEQ ID NO: 7714 - RNA, 75 nt, Homo sapiens
aaaacaggagaccgcggccgaccagagaacagcccgcgcccagaagagagccgcaacacgccaccgggaccacgg

SEQ ID NO: 7715 - RNA, 64 nt, Homo sapiens
gcgggcgcaaagggaagccgaggcccgcggccccagacgcaaccaggacaaccgaagggacacc

SEQ ID NO: 7716 - RNA, 70 nt, Homo sapiens
aggcgaaagcggaacgagaaacgaggagcagcaacagaggccgaccccccaggccacaagcccaccagag

SEQ ID NO: 7717 - RNA, 71 nt, Homo sapiens
aggcggcaaggacccaccaaccgcaccagagacagggggccgcaaacaggaggaagccgaaccagccccgc

SEQ ID NO: 7718 - RNA, 70 nt, Homo sapiens
cccacgcggccagcgaaaacgcccagggaggagcgcacagcacagccaaaaacagaaaccacgccaagcg

SEQ ID NO: 7719 - RNA, 73 nt, Homo sapiens
caaccgcagggaccacagcaccgaaaacaccaggaaagacaggagaccaaaaagggaagggaagagaagaaga

SEQ ID NO: 7720 - RNA, 83 nt, Homo sapiens
cgaggacgccagacccacggaaagcagccagcagcacccagggaaccaagaccaggacaaagaagacccggagagacaagccg

SEQ ID NO: 7721 - RNA, 62 nt, Homo sapiens
gcaagagacaacacgccaccaggaccaccccccgccaggaccaagaacgcccagcccgcggg

SEQ ID NO: 7722 - RNA, 80 nt, Homo sapiens
acggacacaagaggaagcggaaaccagggccacagcacgcagccccaggcaggagcggagcagaggcagcacaggaggac

SEQ ID NO: 7723 - RNA, 37 nt, Homo sapiens
cgaaggaccaccccgagagcgccccagagcacacagc

SEQ ID NO: 7724 - RNA, 74 nt, Homo sapiens
agagacgacgaaggcccaaacaggagaaaacccagacagaacaccacgagccggaaaaagaagaaaagcaacca

SEQ ID NO: 7725 - RNA, 82 nt, Homo sapiens
cggacagccggacagcgcccagggccggagcccgagcccggagagcgcggcccccccccgaggcacccagggcggaagcccg

SEQ ID NO: 7726 - RNA, 62 nt, Homo sapiens
cggcggccaacacagccacggacaggggcaccaccacgaggcgaggggccaaccaaggaggc

SEQ ID NO: 7727 - RNA, 54 nt, Homo sapiens
ggggaggagagggcagagaggcaacgaaccggccacgagaccaaaagagacgcg

SEQ ID NO: 7728 - RNA, 72 nt, Homo sapiens
agccacacggcagaaaaagaggagggcccagccagggcaacgagggcacagaaaaggcgcagccagaaacgc

SEQ ID NO: 7729 - RNA, 84 nt, Homo sapiens
cccgggcagcaccagccccggccaaccgggcagacaacaagcccaccggacccgggcgaggaggcgcggaggaggaggaggaag

SEQ ID NO: 7730 - RNA, 74 nt, Homo sapiens
aggagccggcgccccgcggaggagcccccagcggggcggagcgaccccgcggggcgcgagagcgccagaaaggg

SEQ ID NO: 7731 - RNA, 82 nt, Homo sapiens
gcgggcaacccggagcaaccccccaggacgggcggaggcggggggaccggcgggcggccggcacagccacaccgagaagacc

SEQ ID NO: 7732 - RNA, 72 nt, Homo sapiens
gggcccccccagaagcggcagcaccgcacaaggacacacagacagcacagcgacaaaacgcacgcgacgggg

SEQ ID NO: 7733 - RNA, 78 nt, Homo sapiens
ggaccagacaggcggcaaggcaaggacagcaaaagacggaacacaacaaaccccgaaggaaaggaaacccaaggagaa

SEQ ID NO: 7734 - RNA, 86 nt, Homo sapiens
accgaggccccccgaaccccaaggccaacagagagaagagaccagaggaccagcagagccgccaaggaaccagaggagacccaagc

SEQ ID NO: 7735 - RNA, 80 nt, Homo sapiens
gaacgccagcagacgccaccaaaagggaggcagcccgcgcggggaagggaagcagcagcagcagaggaccgcccgagacc

SEQ ID NO: 7736 - RNA, 67 nt, Homo sapiens
agcaccgggcacacgcagaagcacggaggacaaggaagacaacgaggggcacgcgcccacccaggcg

SEQ ID NO: 7737 - RNA, 41 nt, Homo sapiens
accacagggagcggacccaacaggagaggaaccgcacccaa

SEQ ID NO: 7738 - RNA, 65 nt, Homo sapiens
gcagagaaaaagcagcgaaaggagcgaaaggcacgggagccgaacaaggcccggcacgaagccgc

SEQ ID NO: 7739 - RNA, 36 nt, Homo sapiens
gagggccccagaaagggggccgcagcgagcgggccc

SEQ ID NO: 7740 - RNA, 70 nt, Homo sapiens
ccaccaggacgccccggcaaagagaaggaggcaaaggaacagagcacacagaccacaaggcagcaggccc

SEQ ID NO: 7741 - RNA, 84 nt, Homo sapiens
aagagccagccacaccagcagccggcccccccccccagagagaccaaccagccgaaccgggggcccacagagggccggagcgga

SEQ ID NO: 7742 - RNA, 86 nt, Homo sapiens
aaggacccaaggccaccaggggccgaggccaagaaggacaaacaggcacaacaaaaccaccagcagaagcagagcgggaccgggag

SEQ ID NO: 7743 - RNA, 69 nt, Homo sapiens
gaggacgccccacggagaaagagaaccacagacacaaaaggaggacaaaaaagaccgaagaagcgaaga

SEQ ID NO: 7744 - RNA, 82 nt, Homo sapiens
caacacaagcacccccggcgccaggggagaggaggcagaaggagaccgcgggacagaaccgcgggcaaaaggggggaaaacc

SEQ ID NO: 7745 - RNA, 84 nt, Homo sapiens
ggagcgcacaagcggagcgccagccgaggcagagaacaaccgggcggcgagaggggcgaagggagacgggacccacgcgcaaca

SEQ ID NO: 7746 - RNA, 80 nt, Homo sapiens
gagggagcaagcgcacacgaagagaagcaaggcccaagacccaggcggccccaacgcaaccagacacggacaggagccag

SEQ ID NO: 7747 - RNA, 64 nt, Homo sapiens
gcgccgcccggcgccggcccgcccccgcagcagcgccagcgcgccccagaccaccggcagggaa

SEQ ID NO: 7748 - RNA, 68 nt, Homo sapiens
gcggagccaaaaagccgacgccaaagagagccacacgaaggcaaaaaacacgaggagaaaaaacagaa

SEQ ID NO: 7749 - RNA, 74 nt, Homo sapiens
aggggcgagccgcgcgggagaagccaggccccacaggcagacaaaaagaagcggcacagaagccagaaagaaag

SEQ ID NO: 7750 - RNA, 68 nt, Homo sapiens
ggcccggcgcgagcaggcgcacccacccgcggcgaacagaaggagggccagacaaggggaacacaaga

SEQ ID NO: 7751 - RNA, 73 nt, Homo sapiens
ggcgggaccggcgcggcgccgggggcaccgcgccgccgagcaccaagccaccacaggacagcgccccccgcac

SEQ ID NO: 7752 - RNA, 78 nt, Homo sapiens
cgcggagaaggaacgccgggggaaacaggccaaacacaacccgagagaggagacgagaaagagcggggaaggcaaagc

SEQ ID NO: 7753 - RNA, 77 nt, Homo sapiens
aaaaggaccgaccgggcgccccagggaaacgcaagggggccggaagcgcggagcgagaggcggaggcagggcacgac

SEQ ID NO: 7754 - RNA, 73 nt, Homo sapiens
cccgagaagcagcgagagccgaaaagcaccagaaccaaaggacgcagacacaccaaggaaagcaagaagccgg

SEQ ID NO: 7755 - RNA, 73 nt, Homo sapiens
gaacccaacgagacacaccaccaacccagaagaagaacaaccagaagaaggccgccccccgggcgaggcagag

SEQ ID NO: 7756 - RNA, 74 nt, Homo sapiens
gccgagcgcaacagcggcgggcggggcaccccagagggaaaagaggacgaggcgcgaaaaggcaaaggcaagaa

SEQ ID NO: 7757 - RNA, 81 nt, Homo sapiens
caaggaggcccccagcagcgggggaccaggacaagcagacccaccgccagcagaacggacgagcaccaacaagacgcaaaa

SEQ ID NO: 7758 - RNA, 66 nt, Homo sapiens
ccgccaaaccccagcggaacccggccacagccagcagcagggggggccccagcccggccgaacggg

SEQ ID NO: 7759 - RNA, 53 nt, Homo sapiens
caaccagacagaccagccaccaacaacaccagggacacaacagcaaggagcag

SEQ ID NO: 7760 - RNA, 78 nt, Homo sapiens
acccacgcggcccgcgaaagggcgcaaaggccagaagccgcagagcagcagaacagacagaaacacgaaaaccagaca

SEQ ID NO: 7761 - RNA, 74 nt, Homo sapiens
aagggggcccccgaccgccacacgcagaccgcgggaacccgacccaaccccaggccagggagagcccaagcagc

SEQ ID NO: 7762 - RNA, 52 nt, Homo sapiens
caagaaggacgggcaccaagccacaaaacaggccagaccgggcacagacacc

SEQ ID NO: 7763 - RNA, 79 nt, Homo sapiens
cccgcagacgggcaggcacccagagagcccagccccgagggaggcagggaaccgggggagggcaccgccgaaagagagc

SEQ ID NO: 7764 - RNA, 90 nt, Homo sapiens
cggacgggggcccacggaggcagaggggaggaggaccggagcgacagcgcgcaccacccgcaggacggacaacacaagaggaagggagcg

SEQ ID NO: 7765 - RNA, 77 nt, Homo sapiens
aggaaaaacggagagccacaaaaaaggaagcgaaacacaacaacagcaacggaggcgggaccggaacaggcacaccc

SEQ ID NO: 7766 - RNA, 85 nt, Homo sapiens
accacaggaacgaaaccggaagggacgggcaagggaagagagcaccaggcacgaggccgggagccacagaccaacaccccgcccg

SEQ ID NO: 7767 - RNA, 74 nt, Homo sapiens
ggcggccccgaggaagcaaggccgcggggggagaccccaccaccggacaagcgcagcacgcagcccgcgagccc

SEQ ID NO: 7768 - RNA, 72 nt, Homo sapiens
ccggaccgcgcagccaccgcggcccccgcggagagacggcaacggaaagcccgggcagagacaagaccaggc

SEQ ID NO: 7769 - RNA, 80 nt, Homo sapiens
ccaacaaggcccggacaaagccgaaaccagggcgcccacccgccacaggaagagaccaaagagcaacacgcagggaaggc

SEQ ID NO: 7770 - RNA, 62 nt, Homo sapiens
agccagggacaccgggccccgaaacgcgggccagagagaggaacgaaaaccacacaagggac

SEQ ID NO: 7771 - RNA, 87 nt, Homo sapiens
cgggggccgggggagagccggcgcagacccccggagggcggaaggccgccgagacagggaaaggacccggccaaggcgcaacagaac

SEQ ID NO: 7772 - RNA, 74 nt, Homo sapiens
gaaagccgcagagaagagagcccacccagccaacacagaaagagggcccgcgacccaaaaggcccagaccacaa

SEQ ID NO: 7773 - RNA, 74 nt, Homo sapiens
cggggccccacggcgaagagaagcacaaaaagccgaggaagcacacggaagagaggagccaagcccaacgggac

SEQ ID NO: 7774 - RNA, 77 nt, Homo sapiens
cacagggagggggccaagcaccccaggagagaagcagaagagggccgaccaccccgagagaaggaggccggggcgcg

SEQ ID NO: 7775 - RNA, 84 nt, Homo sapiens
gcgggcaggggcggcgcggcgcgggcggcggggcccacgggcacgcagacgcagcaggagggaagcgcgcagacgggcaggcgc

SEQ ID NO: 7776 - RNA, 65 nt, Homo sapiens
gcggaccggcggagcgcgggggccaaaaacagacggagaagagcaaagaggagagacaccggaga

SEQ ID NO: 7777 - RNA, 75 nt, Homo sapiens
cggcagacccgaccagcaccccgcgccagaaaaaacgcagaacggcaaaaaggccgggcccaagaagcacgaagc

SEQ ID NO: 7778 - RNA, 71 nt, Homo sapiens
gaccgaggaggaggcagagccccgccccccgcgggagggagagaggccacagaacaccgccggccacaccg

SEQ ID NO: 7779 - RNA, 80 nt, Homo sapiens
cgcccagaaagaccacgccacagcgcccagcgaaagccaagggcccccggaccgggagaaagggacccggaccaggacaa

SEQ ID NO: 7780 - RNA, 76 nt, Homo sapiens
gccgcagaccggcccaggaccgaaggagaagcaccggcccagaacgcaagcaggcaccccagcccaaagaggacag

SEQ ID NO: 7781 - RNA, 80 nt, Homo sapiens
gcccacgcacgaaagcccaggccaaaaagaggccccccagccagcgcagggcagaaggcccccccgagagaggacaccag

SEQ ID NO: 7782 - RNA, 65 nt, Homo sapiens
aaaaaccgcagggcggagagaccagaacaaacggacccaggacaaaacgacaccagccaaaccag

SEQ ID NO: 7783 - RNA, 35 nt, Homo sapiens
ccggaagcaccagcgaggaagcgcgcgacggccac

SEQ ID NO: 7784 - RNA, 74 nt, Homo sapiens
ggaggcccaacagcggaacacgagcaggggcccaaaagacggggcggcagggggaccagccagcaacccgcccc

SEQ ID NO: 7785 - RNA, 70 nt, Homo sapiens
ccggggcacgcggacgggccaagggaacgggggaacccgacaacagaagaaaaaaaaggaaagagcagga

SEQ ID NO: 7786 - RNA, 55 nt, Homo sapiens
cgaccgaagccgcaaaaaggagaacacagcaacagaagagaccaacccaagcgac

SEQ ID NO: 7787 - RNA, 79 nt, Homo sapiens
gacgggagacaggcccagccccgcaaggaccgggccggggaacagacagagagcaagcgagagaggagcggggaaagaa

SEQ ID NO: 7788 - RNA, 85 nt, Homo sapiens
gggagggagagccgagcagccccggccgggcacggacagggcgaaagccgaccacccggcgaagcagaaaaacggacaggacgac

SEQ ID NO: 7789 - RNA, 38 nt, Homo sapiens
agcgggacgccgcccgccaccgggagggcagaggccag

SEQ ID NO: 7790 - RNA, 76 nt, Homo sapiens
agccgacgccgcggggcagcgggccggcgccggcgcgcccagggacaagacaagccaggaggcgcgaggagggagc

SEQ ID NO: 7791 - RNA, 72 nt, Homo sapiens
ggcggcggcgcgaacccgcgggccccagcaccccgcgcacccgcggcggggagggccaggaccgccggggac

SEQ ID NO: 7792 - RNA, 71 nt, Homo sapiens
cccacgacaccgacagaaccaaaccaccaaaggccgcaccaagagcaaaaggaaaaccacaccacacaggc

SEQ ID NO: 7793 - RNA, 65 nt, Homo sapiens
cacccccacccagagagagacgaggaaagaaggaagcagcgaagcagggaggaagaggcaaccag

SEQ ID NO: 7794 - RNA, 67 nt, Homo sapiens
agcagccccgacagccacggaacaggcgggggaagcaccgcaaacaacaaagcggaaaacaaaaaac

SEQ ID NO: 7795 - RNA, 71 nt, Homo sapiens
caccgaaaaacagaagaaaagccccaccgggggcaggagaaacggcaaaacagagagccgcagagcaaggg

SEQ ID NO: 7796 - RNA, 108 nt, Homo sapiens
cggaccgacaggcgcgggagcgagggaggacgccgggacaccggaagccgagaaagaggaagagaaacaccaaggaaccacacaagaaaagaaagcaaaaggaccaga

SEQ ID NO: 7797 - RNA, 87 nt, Homo sapiens
ccgggagcgacgccgacgccaggccgagcaccagccgggacgcggggaccggaacaggccaaaacagaagaggcaaagcccagccac

SEQ ID NO: 7798 - RNA, 69 nt, Homo sapiens
gaaaacaacaggccggagcacaaaggcaaagggccgaccgaagagaagcggccgggacagcacaaggcc

SEQ ID NO: 7799 - RNA, 55 nt, Homo sapiens
ggaccacgggcgggcggaggggagcgcaggcagggcggagaacggaaaagcacca

SEQ ID NO: 7800 - RNA, 61 nt, Homo sapiens
gcacagccacaccgcaccgcaggccgccccgaccgccgaacaagacacaaaaacaagcccg

SEQ ID NO: 7801 - RNA, 68 nt, Homo sapiens
caacaggaaaaagcacaaacgagcgggaaaaccgccacaaagcccccaagccacaagcaacgcgcagg

SEQ ID NO: 7802 - RNA, 57 nt, Homo sapiens
ccaagacccacaacaaaagacccaacagaggaagccgcaagaaacgggacgacagga

SEQ ID NO: 7803 - RNA, 98 nt, Homo sapiens
gcaagagggcaccagcagcgacggagccacccgcgaaaacggccagggccgccgcgagagaggaacgaggggcacagaaaccagaaaaacggagcgcg

SEQ ID NO: 7804 - RNA, 87 nt, Homo sapiens
cccgccgccagcaggggcgccccggacgagagcccggcgggggcgcagggcgagccagcccccacccagaggagaacgaaaccacga

SEQ ID NO: 7805 - RNA, 76 nt, Homo sapiens
agagggcagcaggcccagaaacgcacacaagaagccagggacaacacacgggagagcacaaaccgaacacacgagc

SEQ ID NO: 7806 - RNA, 79 nt, Homo sapiens
aaagcgcgaggcccgcggccgccgacgcgcgagaaagagccgcagacgcacagcaaccaccggacccgaaggccaccac

SEQ ID NO: 7807 - RNA, 73 nt, Homo sapiens
ggaacacacacagccggcccgccgccccgcaacagcacacacgggcccccacggcagcagcagaaaccgcgcc

SEQ ID NO: 7808 - RNA, 71 nt, Homo sapiens
cggcacggcacgccccgcaagaaacgggggaagcagagcgcacaaagggaaaggagcacaggggaggggaa

SEQ ID NO: 7809 - RNA, 80 nt, Homo sapiens
gccccgaggccggcaacggagacccaagacgggagagaagcgccggccggaaagaagacggggaggagcaggacgagccc

SEQ ID NO: 7810 - RNA, 88 nt, Homo sapiens
acaccaccggggcaaagccagaccagcggccgggggcagaccccagcccacaacccacgcgcaccggagcaagggccagagaaggagg

SEQ ID NO: 7811 - RNA, 72 nt, Homo sapiens
aaggccgggcgaacaccccaccacgcgagaaaacaagagaccaccggaggccacgggagaaaaaacacacac

SEQ ID NO: 7812 - RNA, 107 nt, Homo sapiens
acccccaaaaggccgggggagcgcgaagacccaggaaaagggaagccccacgagaacccgccacaagaccaaaaaaaaaagagccaacagggagcggcggacgggcc

SEQ ID NO: 7813 - RNA, 68 nt, Homo sapiens
gggaggaagagagaaaagagagaaccccaaccggggaggaaaaccgacgaagaacagagcgggagagc

SEQ ID NO: 7814 - RNA, 49 nt, Homo sapiens
acgggacgggagacccgacggagcagacagaaggacaaagcccccagag

SEQ ID NO: 7815 - RNA, 75 nt, Homo sapiens
aaaagcgcagcaaagagacaagccaaagccgaccagggaacaacgggagaaacagcaacggccacgaaagaacga

SEQ ID NO: 7816 - RNA, 53 nt, Homo sapiens
cggaagcgcgccaaggacccagccggagacggggcacaagcggcaagagcggc

SEQ ID NO: 7817 - RNA, 47 nt, Homo sapiens
gccacccccaggcgagccgacaggacgacccagccaacggcaagcag

SEQ ID NO: 7818 - RNA, 77 nt, Homo sapiens
cacaagcaggcagccagcccagaacagagaacagaggcacgaggaagaaagggaaaaagcaacacaggaaagagaca

SEQ ID NO: 7819 - RNA, 77 nt, Homo sapiens
gaaaaagaggccgaaaaacggcacacccaccaagcacccaacagaagaagaggagacaaaggacaggcagaaaccag

SEQ ID NO: 7820 - RNA, 80 nt, Homo sapiens
gaaccaagacagcgccacagacagaaaagagcgcaccaaggagaagcagagccagaggaagaagaaaaggaaacaagagg

SEQ ID NO: 7821 - RNA, 86 nt, Homo sapiens
cggagaaagagcagccacgagaggggaacaggcccggcagagcgggccgacccgaaaggaaagggagcagcaccggccacacccac

SEQ ID NO: 7822 - RNA, 87 nt, Homo sapiens
cgcccggggcagcagcggccccgcgcacgccgagccacccagcggcggcggcggccagcaggacggccggacgaggggcgcccccgc

SEQ ID NO: 7823 - RNA, 77 nt, Homo sapiens
ccagccccccgagggcaacgagaaagagacgggaaccgacgcaaccgaggccgagggcaggaccgaacacgaagaga

SEQ ID NO: 7824 - RNA, 57 nt, Homo sapiens
gaccaacgggaacccccaaagaaggaggagacgagcaagcggcaccaggacgccgaa

SEQ ID NO: 7825 - RNA, 72 nt, Homo sapiens
cggcgcgcggggcgcccgggggagcaacccggcgacaggaccaagccacgccaggagacgagcaaacaagcg

SEQ ID NO: 7826 - RNA, 74 nt, Homo sapiens
cagggaggccaacgggggcacacaacacgccaggggcgcccgagggcaggggggggacagaaaacccaccacga

SEQ ID NO: 7827 - RNA, 78 nt, Homo sapiens
cacagacaccccgagccgaaggacagacaccaagagagcccacagacccagccacgaagccaccgcagaggcccaccc

SEQ ID NO: 7828 - RNA, 78 nt, Homo sapiens
aaagagcacagaggaagaaacgggacccacagaaagcaagcccacaggagcccgggcagacgcagccacagcgcggag

SEQ ID NO: 7829 - RNA, 75 nt, Homo sapiens
cggcccccacggccccgacccagaagggccgaaggaggaacacagcacggaaagacaaggagccgggccgagaaa

SEQ ID NO: 7830 - RNA, 77 nt, Homo sapiens
agcccggcacgagcgccgacaacccggcgccagagccggacccccgcaggcagcggcaggaccgaaggacacagcga

SEQ ID NO: 7831 - RNA, 70 nt, Homo sapiens
aaaacagaaagaagccacgacgaagcaccacagagaaaagggcagcacgaacgagcaccaagcgcccacg

SEQ ID NO: 7832 - RNA, 76 nt, Homo sapiens
ggcagcaaaccgaagagagaggccggagaaaagcgagacggaagaacagagaaacgccaggagaacggggaaagca

SEQ ID NO: 7833 - RNA, 70 nt, Homo sapiens
gaaacccccgcaggcagccggccggcgacgaggggaagcacgagcaagaagggagaaaaaccggaacaag

SEQ ID NO: 7834 - RNA, 69 nt, Homo sapiens
caaccggagccacgccccacgaccgccagcgccacagaccgggccaaacaacccaggaggaagagacac

SEQ ID NO: 7835 - RNA, 75 nt, Homo sapiens
gagagcggaagcaggagaaagaagagcccgcgaaggagaaagaaaagcccaaggacaaggaaaacagggcaggcg

SEQ ID NO: 7836 - RNA, 73 nt, Homo sapiens
gaacgcgcgaccagcacggagcacaaaggacccaaacccaaaacaagaggaaaaaaggaaaaccgcaggcgaa

SEQ ID NO: 7837 - RNA, 58 nt, Homo sapiens
ggcaaaacgagcgggccagcggaaggagagacaggaagggcacagaaacggcgcgagg

SEQ ID NO: 7838 - RNA, 81 nt, Homo sapiens
gaacaccacaaggcaccgcaagggccgagaagaagcggggacggcaaaacagccaacggaacaccaaggaaaaagaagaac

SEQ ID NO: 7839 - RNA, 82 nt, Homo sapiens
gagaagcgaggccacagaaggcgcgacgccggggaagaaggaagaaacgggcgaaaggcagaaaaccacgcggaaacaaaac

SEQ ID NO: 7840 - RNA, 75 nt, Homo sapiens
acggccgcaggaccccaaggacggggaggaacagcgaaacaacgagacgcacgaagcaaagaaaacccgaaccgg

SEQ ID NO: 7841 - RNA, 69 nt, Homo sapiens
gcagcgaccagaggacggccaggaaggaggacagaacaagccaggaagaagagagggcgaaggaggcca

SEQ ID NO: 7842 - RNA, 78 nt, Homo sapiens
gaaggcagcgaaaggacacgggagaaagggagccgagcgagaccacgcaccacgggcggcaaacgagagccccaagag

SEQ ID NO: 7843 - RNA, 83 nt, Homo sapiens
cgaggaggcgcgggagggcgagaacgaccccgagacgggaaagggagcagcaccggccacacccacagcacgaccggaaccca

SEQ ID NO: 7844 - RNA, 91 nt, Homo sapiens
cccacagggagaaaccccacccccaagaaccaacccccaaaggcgggacaggggacggcaaaacagaacagaaaggcggagaaaaaagagg

SEQ ID NO: 7845 - RNA, 81 nt, Homo sapiens
gagacgggcggagaggagaaggagagcagccagcgggacagaaggaggaagagggagcaccacggaccccaaggaagccac

SEQ ID NO: 7846 - RNA, 114 nt, Homo sapiens
cggaaggaggacgaccgaagacacaagagcacgggccaggggaaccgccgcacggggccagcagcaagggaccacaaaaccaagcagggcggaggacgaccaaacacacaaaag

SEQ ID NO: 7847 - RNA, 61 nt, Homo sapiens
cgcggagggaacaccgagacaccagacagcaaagagcaaaagaaagaccgggaaggagacc

SEQ ID NO: 7848 - RNA, 72 nt, Homo sapiens
ggaagccaggcaccccccacagaaagggcgccaacacacgcgcaggaagcgggaggaccggacgaaagccag

SEQ ID NO: 7849 - RNA, 76 nt, Homo sapiens
gcggaaaaggcgccgcgaacgcaaaagagccaacacccaggccaggccgcccggaaggaggccgccacgccccgcc

SEQ ID NO: 7850 - RNA, 67 nt, Homo sapiens
cacccagaggagcaacaagcgaaggaacgggaaaacagcaggaagagcgggaggaagaacagcaagg

SEQ ID NO: 7851 - RNA, 78 nt, Homo sapiens
cgcagccgccaccacccaggaccagaagaaccacaccggacggaggaagacaggaagaagacggcaggggcagccccc

SEQ ID NO: 7852 - RNA, 78 nt, Homo sapiens
aaaccgacccaaaaagaaaacaccgaagggaagaacagggaaccgagaacagccaaggaccccaagcgaacaagagca

SEQ ID NO: 7853 - RNA, 72 nt, Homo sapiens
aagacaccaaggacagacaggcagagaagggaggaaacccaccccaagaccaggggcgcccccaccgggccc

SEQ ID NO: 7854 - RNA, 84 nt, Homo sapiens
cacggcagccgggcagaggacggcaaggacgacagcgaaggcagggaaggcgggccacgaagcaaggaggaccgcaagagagaa

SEQ ID NO: 7855 - RNA, 76 nt, Homo sapiens
aaaagaaagagaagcagaaagagcaagccaaaaacccacagggaaccaaagaaaaagggcaaacagcaagaaagcg

SEQ ID NO: 7856 - RNA, 64 nt, Homo sapiens
gaggccgggacaccacacgacgggaaccccggaaccagcagcagaagagaaggacggaaaacgc

SEQ ID NO: 7857 - RNA, 80 nt, Homo sapiens
gcgagagggcagaggagcggcggagagcggccgcgggcgacgggccgaggaggagagaagaccgagcggaggagcgcagc

SEQ ID NO: 7858 - RNA, 58 nt, Homo sapiens
caaaccggaccaccccgaagaaagcacaggcagaggccgcgcgaggaacaacgaagag

SEQ ID NO: 7859 - RNA, 75 nt, Homo sapiens
acccgcccaggcaacagcggggcacaaaacgccgaggaagaacacccagacgaaggaggaaacaggaacacgaaa

SEQ ID NO: 7860 - RNA, 86 nt, Homo sapiens
cagccagcacaccccgcgagcaaggagagaggaagagagcaaaacgaagaacagaaagaagaaaagaaagagcagaggaagaggaa

SEQ ID NO: 7861 - RNA, 33 nt, Homo sapiens
gccggcgcccagaaagaaggaggacacagaaga

SEQ ID NO: 7862 - RNA, 75 nt, Homo sapiens
aagaacacccccaccggccaggcgagaaaggcagaccccaccaacaacgaacgcggcaggcgcacaaggaaggaa

SEQ ID NO: 7863 - RNA, 87 nt, Homo sapiens
ggccagcgcagcacgggacgcgaccggaaggcagccggaaccaaaaagaagccccagagccggggccaggagccccaagcgccccag

SEQ ID NO: 7864 - RNA, 84 nt, Homo sapiens
cgagacgaagcgcccggggggcgagcccgccgcacccgggccgcgccggcacgcgaggaccggcccagccaggcccggggcagc

SEQ ID NO: 7865 - RNA, 44 nt, Homo sapiens
aggcgcacgaagggacagagaaagcccggcgaagccacagaaac

SEQ ID NO: 7866 - RNA, 76 nt, Homo sapiens
agcaccagcacccaaaagcgcagcagagaagcggaggacagcgacaggagggagcgaccaaggaacagcccagccc

SEQ ID NO: 7867 - RNA, 81 nt, Homo sapiens
cggcgacaacacccggccccgagacagaagccggaggggcagcagcaggacagggaacccgggagacagcaacagacggag

SEQ ID NO: 7868 - RNA, 80 nt, Homo sapiens
gaaccggccccacccgggaggggggagcggcgggaggccaccgccaggcacgacccccaggagaccggaggacgaagcgc

SEQ ID NO: 7869 - RNA, 39 nt, Homo sapiens
cccaaagcgaccagcaaagaagagggaaaagaggacgag

SEQ ID NO: 7870 - RNA, 110 nt, Homo sapiens
agagcgaccaggggcgagagcgggcaccccccaaacgacgcagccacggagaggggaaaagagaagaacacgaaaagaagaacccaacagccccacacaagacacagcag

SEQ ID NO: 7871 - RNA, 63 nt, Homo sapiens
aacaccaggcccccggcgggccaaggagccacaaaagcgaaacaagcaaccaaaacgaggagc

SEQ ID NO: 7872 - RNA, 88 nt, Homo sapiens
cgcggggcgggcccgggggcccagcgggcgccgcgcacgcggggacggaaagagagccgcagcgcagaacaagggaaaaaagggcaaa

SEQ ID NO: 7873 - RNA, 83 nt, Homo sapiens
cgggccaaggcccggagcgcacagcggcgcaagccaacgcgaggccccaaagacacacagggaagagcagaaagaaccaggcc

SEQ ID NO: 7874 - RNA, 74 nt, Homo sapiens
ggaaagcaaaaagggcgaacaggcagcggaaagaagcacagaaggggaacggcccaggcagacggggcaggcag

SEQ ID NO: 7875 - RNA, 81 nt, Homo sapiens
ccgccgcagcgggaccgcgcgaccggcgcccgcccgcgaccagggggaggaagcgggcccgcacacaccaaaaccccccag

SEQ ID NO: 7876 - RNA, 80 nt, Homo sapiens
gcagggaggccacaggggccgaaacacagagcaagcccgccgcccgcagccaaccgccgggacgacggcggggacgccgg

SEQ ID NO: 7877 - RNA, 93 nt, Homo sapiens
ccccagcccagcccagcagccccagcccgcccagccagccccagcccccaccgccaaagcagcaaggagccaaaacacaccggaagaccccac

SEQ ID NO: 7878 - RNA, 87 nt, Homo sapiens
cgccgcgcacccgcgccagcaccacgcccgcgccgcgccgccgccaccagcccaagagaaagcacaacccccggcccagagaccgcc

SEQ ID NO: 7879 - RNA, 72 nt, Homo sapiens
aggggagcaccaggaccgggccggaacgagacgcacggcccgcccgcggcccaggcagaggacccggaccgg

SEQ ID NO: 7880 - RNA, 73 nt, Homo sapiens
gacccaccaaaacgcaggacaccgagagccggcagaaaaagaacggcagccccaccagaacccagcgacagac

SEQ ID NO: 7881 - RNA, 60 nt, Homo sapiens
gaggaggcagggccagcggcaccaaccagcggacacacggaaaagggacgggaaaagccg

SEQ ID NO: 7882 - RNA, 75 nt, Homo sapiens
accaaggaaagggcgacagcaacagccgccggcggaagcgaggggcccggccgcggggcacagcagagggagcgg

SEQ ID NO: 7883 - RNA, 83 nt, Homo sapiens
ggacccggagcgacaagcgccccgacggagcgccaggacggacccaaagacaggaccacgcaccagcagagaaggaaagcaaa

SEQ ID NO: 7884 - RNA, 61 nt, Homo sapiens
caggaaccagacacgcaaacagagaacacgcacgcgggaagcacggcagcgaaccggcacc

SEQ ID NO: 7885 - RNA, 81 nt, Homo sapiens
agaagaagcccgaggagcacggaggaagcacacccgccagggacgggcacgggaaggggccccagacacgacgcccccggc

SEQ ID NO: 7886 - RNA, 76 nt, Homo sapiens
agagaccggcgcggcccgcggcgcgcccgagggacccgcgggcccggcaggcccggagcacacaaggcgaaagaaa

SEQ ID NO: 7887 - RNA, 73 nt, Homo sapiens
cgaggcggacgaaacccgaccggacccaaaacacgcgacgcccagaagagcacaaagaaccaacgccaaggca

SEQ ID NO: 7888 - RNA, 82 nt, Homo sapiens
acacgacgggaagcgggacggcagagaggccaagaagcagaagccaggccgaggcacagcccagcaggaaaggagcgccaac

SEQ ID NO: 7889 - RNA, 76 nt, Homo sapiens
caagagcgagggcccacgaccccgccgaggagcaccggcccaggcggaggcaaggcggacccggcggcgcaaccca

SEQ ID NO: 7890 - RNA, 64 nt, Homo sapiens
agcacggaggggccgcggaggggcacgagcgccacaaccccagggaccgccccgagaccgccga

SEQ ID NO: 7891 - RNA, 74 nt, Homo sapiens
caggcagcaggagcgaagggaacccagacgcggggaaaaggagcgagccagcacaagacgggaccagcaaagca

SEQ ID NO: 7892 - RNA, 72 nt, Homo sapiens
cgggacaacagcgcggggcacaggcacacagagaaaaaaagggaacaaaacacagcaagcagacaaaagggg

SEQ ID NO: 7893 - RNA, 83 nt, Homo sapiens
cacaccaggcacccgggcccagccgggaacccccacgcggccagcgaaaacgcccaggaagagaacccacaacagccacgacc

SEQ ID NO: 7894 - RNA, 74 nt, Homo sapiens
gccaaagaagggagagagggaacaaagagcagaggccagcagccaccgacagcccgcggcgaggaaaagcccag

SEQ ID NO: 7895 - RNA, 65 nt, Homo sapiens
gggcagagggagacgggaaaggagaggcggcgcccaagaagaaccccaccagggccccgcggggc

SEQ ID NO: 7896 - RNA, 76 nt, Homo sapiens
aaggcacacagagcggaagcaccaccaggcccagcacaaccgccaagaggaccagccaacaagggggcgcaacaag

SEQ ID NO: 7897 - RNA, 68 nt, Homo sapiens
aacgagcaagcaaacaaaccccacgggcggaaagaggagagccacaacgcagcaccgagacaaccaag

SEQ ID NO: 7898 - RNA, 73 nt, Homo sapiens
gaaaacagcagcagaggggccaagaggagagaaggcgaggaagcccaagcacaaaggagaagacgcccaagcc

SEQ ID NO: 7899 - RNA, 82 nt, Homo sapiens
gggaggacgaggggcccgggcccagagcggaagacaagacgaccgccgaccaggcacgcccaaccccgcgaaggaaggggac

SEQ ID NO: 7900 - RNA, 73 nt, Homo sapiens
gaaacggagggcagcacggaaaagggggcacagagcggagagccagagaagaggaaccaagagaaggaaaacc

SEQ ID NO: 7901 - RNA, 73 nt, Homo sapiens
gacaaacacgggaggaagagagaacggcacgaaaggaaccaggacccaaggacgggccgggaccacccaagaa

SEQ ID NO: 7902 - RNA, 81 nt, Homo sapiens
ccgcgccccgccgcggggcgcgcggcgccggcggcgcgcggcccccgcgcagcggagaccagaggcccacggccaacagcc

SEQ ID NO: 7903 - RNA, 56 nt, Homo sapiens
aaaacccaccgagacggccacagacaacggagcgcggcaccccagccgggcccgcc

SEQ ID NO: 7904 - RNA, 75 nt, Homo sapiens
ccaggaccggacccggacccaaaggccagcaaggagccggaaggggggcgacgcggaaggcacaacacggcaaca

SEQ ID NO: 7905 - RNA, 78 nt, Homo sapiens
acaccaaaggcccaacccaaacgagcagcggacgccgggcgagcagagcacccaaaccgggacaagagagaaaaggag

SEQ ID NO: 7906 - RNA, 59 nt, Homo sapiens
ggcgaccggaagccaacacccaagacacgccccggagccgcagaaccaggcgaggccag

SEQ ID NO: 7907 - RNA, 47 nt, Homo sapiens
ccccaggacgcgcagcgggaacaacccaaacgcagaaaaccgcgcgg

SEQ ID NO: 7908 - RNA, 69 nt, Homo sapiens
aggcggcgcagcagcaccggcagaaggacacaccaggccacaaccaaagacccagaagaaacgccagac

SEQ ID NO: 7909 - RNA, 76 nt, Homo sapiens
aaaaggaaagacagaaccaagaaacgcagcgaccaaacagggagcggccaaccgcccggcaggaacagcgaggccg

SEQ ID NO: 7910 - RNA, 56 nt, Homo sapiens
aaacaccaaaacaagccaaaacagaagaccaggacccaaaaagccccgaaggacgc

SEQ ID NO: 7911 - RNA, 73 nt, Homo sapiens
gcgcaaaagccacggaccacgcagggacacggggaaccccagagggagaaacacaccacccaaaaaagccagg

SEQ ID NO: 7912 - RNA, 73 nt, Homo sapiens
cggaaacacgggaccaacaagagcagccccagcgcccacaccgccagccacacaaaaaaccagagacgaccac

SEQ ID NO: 7913 - RNA, 97 nt, Homo sapiens
caaggccgcccaccagaaccccgagccagaagaaagagggggccagaagcagggaacaggcaggaaaacgacccaaaacagccaccaacgacgaccc

SEQ ID NO: 7914 - RNA, 66 nt, Homo sapiens
gagagagaacgcccggaaagagcccaggacaacacaggcaaagggccggcggcacccacgcggggg

SEQ ID NO: 7915 - RNA, 103 nt, Homo sapiens
ggcggaaacagacccggcgcccagcggagcccccgcgccccgacccagccaccacgcaccggaagcgagaccaggaggagcgccggaagcagcgagggaccag

SEQ ID NO: 7916 - RNA, 70 nt, Homo sapiens
gcgagcaggaaaagagccaaagcacaggagggaagacaggcaaggagggagaaccgaccagggacaggac

SEQ ID NO: 7917 - RNA, 77 nt, Homo sapiens
gccccaccgccacccgacccaggcgcgaagaggacagaaagaacgcaacaccagaggcacaggaaacagacaaccac

SEQ ID NO: 7918 - RNA, 80 nt, Homo sapiens
cccgcaggaaccacaacccaaccagcgaggagccagaggaaagcgggggcacacagaaaccagcaaggaaggagagccag

SEQ ID NO: 7919 - RNA, 77 nt, Homo sapiens
ccccgcccagcccccaagacgaggcgcagcacccgggaggccggaaggcacgcccagcaccagggagaggaagccag

SEQ ID NO: 7920 - RNA, 65 nt, Homo sapiens
gcccgagacgggagccccggccccggacaacgaagagaggaaagaagcggaaaggagggagcaca

SEQ ID NO: 7921 - RNA, 111 nt, Homo sapiens
cggcgaggaggggaaccggccccacccgggaggggggagcggcgggaggccaccgccagcggagaagcggaggagaccaaggaggccaccaccacagaaggagcggcacgg

SEQ ID NO: 7922 - RNA, 72 nt, Homo sapiens
ccgaagccagcgccccaccggggcaagcagggcaagacggacgagacgcgcgggcagaggcagaacggcggg

SEQ ID NO: 7923 - RNA, 92 nt, Homo sapiens
aaccacgcggcgcgagccccgcccccgccgccgcgcacaaccgcacggcagggcaggagacagaacgagcgaaaggaggaaacaagaaacag

SEQ ID NO: 7924 - RNA, 68 nt, Homo sapiens
ccggccccaagccggaagaaccgcagccgagcggggccggccacagggccacaaccaaaaacacccaa

SEQ ID NO: 7925 - RNA, 80 nt, Homo sapiens
gggggccagccccaggcccacacggaagcccgagacgcagccagcgagcccgcgggacaacaccgcccgagcgggggcgg

SEQ ID NO: 7926 - RNA, 72 nt, Homo sapiens
aggaccagcaaaacagaaagaggaggagaagggagaaagggaacaaggacggaacaaagaaaacacaacaga

SEQ ID NO: 7927 - RNA, 83 nt, Homo sapiens
agcagcgggggcggggcggcggcgccggcgcgggcccgggccccgagcgcccgaacagacacaagagggaaggagacccagac

SEQ ID NO: 7928 - RNA, 99 nt, Homo sapiens
cccgcgcggaggggcgggggaggcgccgggaagcgacggcgccggcggcccgagagcgagaaaccaaagaaggagaagagaagaacaagccaaacacag

SEQ ID NO: 7929 - RNA, 80 nt, Homo sapiens
cccgacgcacccacgcccccaccccccgagagccggaccagcccgaggagggccggaaccacccggaggaggggcgcgga

SEQ ID NO: 7930 - RNA, 68 nt, Homo sapiens
acagaacagacaaggggacacgacaccgggaagggcacgacaggaaaagacgacgaagaggcaagcac

SEQ ID NO: 7931 - RNA, 80 nt, Homo sapiens
cgggccgccgcgcaccgcagcgccggggcacgacacaaaaacaggaccgaaaaaaagcggacagagggcgagagccagaa

SEQ ID NO: 7932 - RNA, 59 nt, Homo sapiens
ccgaaaagcgagcgcgaggaaaaggcggcgggaggggcggcgaaaacacccacgccgca

SEQ ID NO: 7933 - RNA, 77 nt, Homo sapiens
ccgcggcggcgcgaaggcggcggcccgcccccgccccccgcgccggcgcagggcgaagcggccaggcccgggcggac

SEQ ID NO: 7934 - RNA, 80 nt, Homo sapiens
cgcacgggcaccgcgggcccacggaagccgaagcggcgggccagggagaacagagggagccgcccccgaagccaaccgag

SEQ ID NO: 7935 - RNA, 79 nt, Homo sapiens
acacaacccaaaaacgaacgccacgcgcccggcgcccagcccaccagcacggcagcaaaggacgaagaagcgaagaaaa

SEQ ID NO: 7936 - RNA, 74 nt, Homo sapiens
ggcaagcggcgacacacgacgggcaaaggcggaaaacaacaaaagaaaaagaaagccagaaggaacagagcaga

SEQ ID NO: 7937 - RNA, 86 nt, Homo sapiens
ggccaacacgcgggcagcgaacaagcgggagcaaggagggcgaagagcgaggaggcgacaccccaagagggccgccaccacgagga

SEQ ID NO: 7938 - RNA, 102 nt, Homo sapiens
cagcccaaggcccagagaccaaagggaaaacagccccgaaaaggccaagaagcgagagaagaaaaacagaaaaagccaagacagaaacaagaaccaggaaaa

SEQ ID NO: 7939 - RNA, 87 nt, Homo sapiens
cgaaagcaggcgcgggggggcgcgaggacccggacagccggaccaggccaaccggagcgcacccacgccacaagccggacggcggca

SEQ ID NO: 7940 - RNA, 79 nt, Homo sapiens
aagaaccacaacagacccccgggggagagacaaccagagcggaaagggagaaaagcccccagaaaggaggcaccaaaga

SEQ ID NO: 7941 - RNA, 79 nt, Homo sapiens
gggagcagaggaagccgaggaccaccacagaaggaagaaggcccggcgaccggcagggagcagccgcccgccacgcgag

SEQ ID NO: 7942 - RNA, 75 nt, Homo sapiens
cccggagcggcacgccaaggagcagcaggagcagacggccgaggaaagaaggagacccaacaccccggccagacg

SEQ ID NO: 7943 - RNA, 72 nt, Homo sapiens
aaagcacacaagccccaagacgaggggccaggacaggaacaggggccaaagggcgagggcacaaaaaaccac

SEQ ID NO: 7944 - RNA, 73 nt, Homo sapiens
cagacggggggaggacccgaccagggcggagaacggaaaagcaccaggaagcagagaggaccgcagaagggaa

SEQ ID NO: 7945 - RNA, 81 nt, Homo sapiens
gaagagcgcgggaccgaacaaccagcagcgaacccagggcggagaacggaaaagcaccaggaagcagagaggaccgcagaa

SEQ ID NO: 7946 - RNA, 60 nt, Homo sapiens
cgagaaggcagaggcgagaaaaaagaggccggcgggaccaccgcccaccgggccaggagg

SEQ ID NO: 7947 - RNA, 82 nt, Homo sapiens
agggagcggcaggagccggaaacagacagagaaggcacggacaggacgaccaccgcaacagcagagccgccaccccaacaga

SEQ ID NO: 7948 - RNA, 74 nt, Homo sapiens
ggagcggccagccaccagcaggaggagcagagacgaaaagagggcccgagcaggaggccacagcggaacaagcg

SEQ ID NO: 7949 - RNA, 84 nt, Homo sapiens
gcgccggcgcgcgccgagaacgcagacccagcagcccagcgccgagcgcagggacagaggacgcggccccagagcccccgcccg

SEQ ID NO: 7950 - RNA, 70 nt, Homo sapiens
cccaagagggacacacagcagaggagagcaagcaagccgagaacgaccgaagaaaagcaacaaaccaaca

SEQ ID NO: 7951 - RNA, 67 nt, Homo sapiens
aaaacagaggccaacccagaaggaaaagacccaggggagagaggggcacaaacaagaaccaccagca

SEQ ID NO: 7952 - RNA, 79 nt, Homo sapiens
gaagacacagagagagcggccccgaggccggcccaccaggggaaagggagagcacaacaggaaccagagaaacaaggag

SEQ ID NO: 7953 - RNA, 69 nt, Homo sapiens
ccccaagggcgggaacaggaagaaaggcgggccaaagaacggcgaccgaggaacgcaaacgcgaaaagg

SEQ ID NO: 7954 - RNA, 81 nt, Homo sapiens
ccggcgcgccgccaggaccaggagaaccggggcaagagacggcagacaaacacagccgagagaaggcaggcgacgggcaaa

SEQ ID NO: 7955 - RNA, 72 nt, Homo sapiens
ccaaagaagggagagaggacaagaaaccacagagccgagaacagaaagggagccagacagaccagcgaaccg

SEQ ID NO: 7956 - RNA, 44 nt, Homo sapiens
gaggagcccagagcagggaaccaggagcagagccgggcaggcca

SEQ ID NO: 7957 - RNA, 72 nt, Homo sapiens
cgaagcaggaagaggacgccgcagccaagccggaacaggagcggcgagcccaaacgcaagggggaagaaaag

SEQ ID NO: 7958 - RNA, 72 nt, Homo sapiens
caaaaagagcccaaaaccggcgcccagagcacggccccaacccacgccaaaaagggaaaaaagagagccacg

SEQ ID NO: 7959 - RNA, 84 nt, Homo sapiens
acccagagacacccccgaaaccacccccaggggagaggaagacaccaggagagacccccgccagaacgggccacgggccgacac

SEQ ID NO: 7960 - RNA, 50 nt, Homo sapiens
gacaccccggaagcgggaaagaaagaagagaccagcagcagcacccaaaa

SEQ ID NO: 7961 - RNA, 68 nt, Homo sapiens
cccaagggaaccgggcccagggccaaaccaagccgaggcccagcggaacgcccccgggagaagaaggg

SEQ ID NO: 7962 - RNA, 52 nt, Homo sapiens
caggcaaggagaaaagcaaggcaagaggagaggaagcagaaagaaggaagac

SEQ ID NO: 7963 - RNA, 74 nt, Homo sapiens
cccgagcccggaggggggagaaaaggcagccggcacccgcacaacccagggggccgaacccagaccaacaaaag

SEQ ID NO: 7964 - RNA, 77 nt, Homo sapiens
acaccaggggagaccggcagcaggaggggggaagcaggaggcacggaggggaccccagaaccccagccggaggagcc

SEQ ID NO: 7965 - RNA, 54 nt, Homo sapiens
gggagccagccggagaggccgaaccagcgcgggggcgagaccgacagaacaagc

SEQ ID NO: 7966 - RNA, 56 nt, Homo sapiens
caccagcagcccccagagcgggaccacagagcgccagacaacaaagggacgcaagg

SEQ ID NO: 7967 - RNA, 63 nt, Homo sapiens
caagaaagaagaacgagacagacacagcacggcccaaagaagagcaggccaaggaacaagaag

SEQ ID NO: 7968 - RNA, 55 nt, Homo sapiens
ccaaagggcacacagagggaaaggaggcccaagaggcgaaacgcaacacggagcc

SEQ ID NO: 7969 - RNA, 75 nt, Homo sapiens
cgaaaccgagggggcagagcggcagcaaggagcgggagggcgggaaaaaacaccagcagcccagcaaccaaaaag

SEQ ID NO: 7970 - RNA, 84 nt, Homo sapiens
ggaggcggccggagacccacaaccacccacaggcccgacccgcgcgacaggacaacaaaaacggcgccggcccgcgcccggaca

SEQ ID NO: 7971 - RNA, 78 nt, Homo sapiens
gaggaggagagagagacggggagacgccgggaagcgagccgaacagcgggaaagacggccaagggaacgggaggccaa

SEQ ID NO: 7972 - RNA, 77 nt, Homo sapiens
ccccgaacccgggcgggggccgaggaaaggccaagcggagaccagcgccgcgaggccaagaccgagagagcgacgga

SEQ ID NO: 7973 - RNA, 110 nt, Homo sapiens
cagccgccgccgcagcgcgaacaggacgccgcaacgcccaaccaggaggagaacacgggacgagacccacccagaccgaagcccaggaggaggaagaggaggcggggacc

SEQ ID NO: 7974 - RNA, 94 nt, Homo sapiens
aaggaccagacaagagaaacgccaagaaaccaaaaagccgagagagaagacagggggcacccgaggaggaagagggcagggcccacggaaagaa

SEQ ID NO: 7975 - RNA, 80 nt, Homo sapiens
gccgccggggccccgcccgacccggcgggcagcggacccggggccagcggccggagccaggaagaggagcaggacggagg

SEQ ID NO: 7976 - RNA, 79 nt, Homo sapiens
ggggggaggccacaggcgcaagcaggcaaaagcagaccggaaaacccaccggcaagaccacacccgaggggagcccagg

SEQ ID NO: 7977 - RNA, 73 nt, Homo sapiens
ggagcgagcagacgacaagccgggagcgggcggccaaccagcggcaggacacgggacccccagaagagcaaag

SEQ ID NO: 7978 - RNA, 93 nt, Homo sapiens
cagcggcgcgccggcaagagcagcgggagcggcgcggggaagggggcgggccgcagagcaggccgggccccgcggggagcggagacccagacg

SEQ ID NO: 7979 - RNA, 59 nt, Homo sapiens
ccggaaccagacgagagacagaggcgaccgcgcggcaggggacgccgagggaaagggga

SEQ ID NO: 7980 - RNA, 102 nt, Homo sapiens
aacgcggcgaccgccaagaaaggcagcgaggggagagcggaaagaccacagcaagaccacgcccccagccgggggaccaggccgaacgacccggacacaaag

SEQ ID NO: 7981 - RNA, 73 nt, Homo sapiens
gcccgcgacagaggagggaggaaaacaaccgagggcagaggcaggaggaggaagcccccccacacacaaaagg

SEQ ID NO: 7982 - RNA, 63 nt, Homo sapiens
ggaccaggagaacggcggcgggaagcccaggggcggcgccaagggggccgggcaacgaaacag

SEQ ID NO: 7983 - RNA, 74 nt, Homo sapiens
ggccgacagccgcggccgggcccgagcaacggggcggcacacaaggagcgaagggcagggagaacgccaggcac

SEQ ID NO: 7984 - RNA, 72 nt, Homo sapiens
gcccagggcccggaagccggccacaacgcaaggagcggaaggcgcgaggcaacaaccagcacagaacacacc

SEQ ID NO: 7985 - RNA, 81 nt, Homo sapiens
cacgcaagcgagcaccagcagagcaagggccagagaaggaggagaaggagacaggcggcaagcagggcgaagggaggacca

SEQ ID NO: 7986 - RNA, 76 nt, Homo sapiens
gggggcgccaggcacccgagaaaggggacgaacagccagcaaagacaagagcagaccagcagccgcagcgcgacag

SEQ ID NO: 7987 - RNA, 66 nt, Homo sapiens
aagcggccaaagccgcccagacggccaccggcgggaggaacaaaagagaaaggacagggacaggaa

SEQ ID NO: 7988 - RNA, 76 nt, Homo sapiens
aaccccggcccagaccacaaagcaggcagaagaaacgaagccaacacccccaagagaacgaccccagcagaaaaga

SEQ ID NO: 7989 - RNA, 86 nt, Homo sapiens
gaagaggaggagcaaacgaaccggagagagccaaagaccaagagccgcagagcacacaacagaccgaaggggacagcggacgacga

SEQ ID NO: 7990 - RNA, 72 nt, Homo sapiens
accaaagacgcccgccagcaacacaccacaagcagaaggagaaacgggggagaaagccaggagcaggggcac

SEQ ID NO: 7991 - RNA, 63 nt, Homo sapiens
cagggaaggacagggcacaaggagcaagaagcaggccccaggaccggaaccgaggaagaagag

SEQ ID NO: 7992 - RNA, 81 nt, Homo sapiens
cacggaacccggggggagaagaaccaaaagccgcaggacaacaacaaggaagacaaaaccagcaggaccgcaaaggaaaac

SEQ ID NO: 7993 - RNA, 79 nt, Homo sapiens
acgcagagcaacggcgccggggaaagagaagacagagacgcacagaacgcgaaccaggggagaacgagcaaaagcggag

SEQ ID NO: 7994 - RNA, 45 nt, Homo sapiens
gggaccgcaggagggagaacggcgagaaccagaagccacaggcca

SEQ ID NO: 7995 - RNA, 82 nt, Homo sapiens
aaagagacccccagaccaggaaagacaggcagagaccacaagaaccaggagagacccagagccagcgcaggggaagccgcaa

SEQ ID NO: 7996 - RNA, 61 nt, Homo sapiens
ggagccaaggaggagccggcccgagccgggaacggcagacgcagcagagagaccaccagcg

SEQ ID NO: 7997 - RNA, 71 nt, Homo sapiens
acggacagagccggcggggagccagaccagacaaagggagcaccagccagaccgggaagaaacgaaggggg

SEQ ID NO: 7998 - RNA, 82 nt, Homo sapiens
cgggagggcgaccgagccggagccccacgacggcaggcgcacggaacagcgaggccagcaggagacggagccacggagcagg

SEQ ID NO: 7999 - RNA, 73 nt, Homo sapiens
gacgggcgcggacgacacccgagagacccggagaccacggacgaacgggaggaaccgccgccccgagcgccgc

SEQ ID NO: 8000 - RNA, 78 nt, Homo sapiens
aacagaaaggaaaggaacccagcaacaagagaaagggggagagagagcggagccggaacagcaaaacaccagaaagaa

SEQ ID NO: 8001 - RNA, 79 nt, Homo sapiens
ggaagccccccaccacaggaacggaagccagcagagcagggaggaaaaccaaggcaacgccagcacaccaggcgaagag

SEQ ID NO: 8002 - RNA, 55 nt, Homo sapiens
ccagcgcgacgagaggcacgacaacgaagagaggaaagaagcggaaaggagggag

SEQ ID NO: 8003 - RNA, 71 nt, Homo sapiens
caaaggcaccaggccaccacagaaacaaaagcaacaaagagggaacccggcaccagccgggcaaaaaccca

SEQ ID NO: 8004 - RNA, 67 nt, Homo sapiens
gggcggggagccaggcagccgaacccccggagggaggggaagaaccgacagaacccgaggcacggga

SEQ ID NO: 8005 - RNA, 73 nt, Homo sapiens
gagaacaaaaccagcgaggagccgggaaaccgaagaaggcagagaaggcaaacaggaggcgcgggacaggagg

SEQ ID NO: 8006 - RNA, 63 nt, Homo sapiens
cgccgaggcacggggcggacgacccagccggggggcacagccggacagaagcaaaaagcgggc

SEQ ID NO: 8007 - RNA, 79 nt, Homo sapiens
cgcgccggagacagaggacgagccacgggccgaagaaggaaggcagcaagaaacagaccgaagagcaagaaacacgaga

SEQ ID NO: 8008 - RNA, 79 nt, Homo sapiens
accggagaacaccaaccaacacagggcagccacccccggcggccagcagggaaagcaacggcgcaagcggcggcggcgg

SEQ ID NO: 8009 - RNA, 66 nt, Homo sapiens
gagccacgccccacgaccgccagacggggcaccaagggcgcaggaaagcacgcacaggcaccacga

SEQ ID NO: 8010 - RNA, 72 nt, Homo sapiens
ccaacgaaaaaggaccgaacaggagaaacaaacaccacaagcaggcccgcagaaccgaagaaaaggagagag

SEQ ID NO: 8011 - RNA, 80 nt, Homo sapiens
gagccgccagaacgcggaagcgaggacgacgagaacggcaggagcccagcggacggaggccgcccacagagacccaagac

SEQ ID NO: 8012 - RNA, 63 nt, Homo sapiens
cgcggcggcggcgccgccgggcgggcggacaacggcaagcggagaagagcaaggccgaaccga

SEQ ID NO: 8013 - RNA, 57 nt, Homo sapiens
ggaaaaaacacggaccgccaccggaacgcccaccaacaccagcccgaagaagccggg

SEQ ID NO: 8014 - RNA, 84 nt, Homo sapiens
agaaacaggacacgcacgaagagccaggcccccaaagccgaaggccacgaaaacagggaaagaacacagagacaacacaaaggg

SEQ ID NO: 8015 - RNA, 62 nt, Homo sapiens
gggggcaaacccgagagaacggcaggaccggacgccacacaggggggggcagcaaagcggcg

SEQ ID NO: 8016 - RNA, 64 nt, Homo sapiens
aagggacccggccagcgacgcaccgagaaaggaaggaaaaccgacgagaggcccccccagcgcc

SEQ ID NO: 8017 - RNA, 51 nt, Homo sapiens
cccgggcaaagcggacaccgggggcacacaggcccgagcacaaacacaaga

SEQ ID NO: 8018 - RNA, 80 nt, Homo sapiens
cgagaagggaaggaaacagcaagcgaagccgaaaaagcgcccgagacgggcccgccgaaaggagcacagaccaggaggaa

SEQ ID NO: 8019 - RNA, 84 nt, Homo sapiens
cgcacacacccgcgcgcgcccgggaggaaggaacgaggcaaggagcaaagcagcggcgcagcccgggagggcgaaccaaagaag

SEQ ID NO: 8020 - RNA, 77 nt, Homo sapiens
aaggaaaccacgacaaccgggcagagagaaggaaacacagaggaagcggagagaagggacacggaacccaaggagac

SEQ ID NO: 8021 - RNA, 76 nt, Homo sapiens
aggcagaacagcgacacgaacggaagaagcaggaagcaaaagcaggcccgaaagcaccgccacccagcagcaaacg

SEQ ID NO: 8022 - RNA, 83 nt, Homo sapiens
cgagaaccccacagcgaaggaaaaggaaacgaaagagcccagacacccaagagggccaagccagaaaacagaaacgaaacaga

SEQ ID NO: 8023 - RNA, 70 nt, Homo sapiens
cccaccacgcagacgacggagaacggagaggggaggcaagcaggggggcaaaggaaagaaggcagaaagg

SEQ ID NO: 8024 - RNA, 77 nt, Homo sapiens
ggacgccccggggagaggacaagagcgcaaggagaacaaaacaggggaggcaagcaggggggcaaaggaaagaaggc

SEQ ID NO: 8025 - RNA, 67 nt, Homo sapiens
cgaaaccccaggacccagacacacccaccagccggacacccgaagcagaagcgcggccaaaagaggg

SEQ ID NO: 8026 - RNA, 58 nt, Homo sapiens
caaacgagagcagccaacgggcagaccacggccccggagaccgggcggaagaaaaagc

SEQ ID NO: 8027 - RNA, 93 nt, Homo sapiens
agggcgcgcgcccagaagaggccagagcggaagccaaaggcaacgacaccggaaacaggcacagaacagaaggaaaggacgaagagcccagga

SEQ ID NO: 8028 - RNA, 63 nt, Homo sapiens
cgcggcccggcccggccccgaggccggcaacggagacccaaggacaagaaaagaaccaagcaa

SEQ ID NO: 8029 - RNA, 60 nt, Homo sapiens
ggaagaaggccgcgaaagaaccccggccgggcgaagcggggaccaagcaagcaggagggg

SEQ ID NO: 8030 - RNA, 82 nt, Homo sapiens
gccagcagcgaccccaccagagggaaccggggcgccccaacagcgccaaggaccccggaggaaaagcggaagcggcagcggc

SEQ ID NO: 8031 - RNA, 63 nt, Homo sapiens
ggagggcccgccagccgcgcccgaaacccacggagagggcagaccagccacgaacaacaaaac

SEQ ID NO: 8032 - RNA, 87 nt, Homo sapiens
gacacggccaccgcccagcgggagaggagcccaccaggacgaccgcgccgcccagcacgccagggaaacaggccagccacgcagcag

SEQ ID NO: 8033 - RNA, 59 nt, Homo sapiens
ccacacccacgccgacccgcgagaaacgcgaaaaacaaaacagcacagggagaagcaga

SEQ ID NO: 8034 - RNA, 92 nt, Homo sapiens
cgaagaggcggagaacagcggcgcgccggcaagagcagcgggagcggcgcggggaagggggcgggccgcagagcagagcaaggccgggccgc

SEQ ID NO: 8035 - RNA, 73 nt, Homo sapiens
acgcgccggagacagggagaccaagagacagacaccgccccgagacgaggggaacgacacagccgcacagagc

SEQ ID NO: 8036 - RNA, 75 nt, Homo sapiens
ccccaccgacgccgaagaccacagcaccgggaagccagcagcggcagagggcggggggcaccgccagacgcgaac

SEQ ID NO: 8037 - RNA, 52 nt, Homo sapiens
ccgggaagagaagacagcagagaaccacaaggacgaaccaaagcaaaccacg

SEQ ID NO: 8038 - RNA, 73 nt, Homo sapiens
cgaacaaacaagcggggcaaaggcccaccggcagcaaaaggaaaagagcaaaaccagagagagacacagggga

SEQ ID NO: 8039 - RNA, 56 nt, Homo sapiens
gggccacaccgcaaacaggcaaccacacccccggaaacagacaggagccaaaccgg

SEQ ID NO: 8040 - RNA, 74 nt, Homo sapiens
ggacaggagggggcccccggaaggagggcccgggcccaaggaggaggagaggagccaagcccaacgggacggga

SEQ ID NO: 8041 - RNA, 69 nt, Homo sapiens
gaagccacacaaagaacaaagcagggaggccagggacgcggacgcagaagacgaccaaaagccgccagc

SEQ ID NO: 8042 - RNA, 80 nt, Homo sapiens
aggccggccaacacaaagccccagcccaacaggaccgccgggggaccggaacagaccagaccggaagaagcagggaaagc

SEQ ID NO: 8043 - RNA, 74 nt, Homo sapiens
accaagaaccaggacaaacaacagaccaaggggcggaaaacccgaagccaggaacagcggcaagccccggaaga

SEQ ID NO: 8044 - RNA, 86 nt, Homo sapiens
agacggacccgggagggcaggcccaagaacagaaaaacaaccaccagcgagcaaaaaggcaaagaccaagaccaccaagaagcgcc

SEQ ID NO: 8045 - RNA, 75 nt, Homo sapiens
ccggcggagagccgacgaggcgagcgaccaggaccggccggggcgggcagcgcggggaggccacgcgcagccccg

SEQ ID NO: 8046 - RNA, 54 nt, Homo sapiens
cgcaccgaaagggagaaaggaagggacagaggcaaaaaaggaccaccgcagacc

SEQ ID NO: 8047 - RNA, 36 nt, Homo sapiens
aggcccgcgccaagccaagggcgcacccccgagaga

SEQ ID NO: 8048 - RNA, 65 nt, Homo sapiens
aacccagaagagcgaaggacccagcgaggaggcagcagcagcaccgcgcaggagaggaccccgag

SEQ ID NO: 8049 - RNA, 72 nt, Homo sapiens
ccgcacccgggccgcgccggcaccgaggggcacagaggcaggcacaaaaccacaagcgacaacagaagacac

SEQ ID NO: 8050 - RNA, 37 nt, Homo sapiens
ggaggaggagagcagcaccaaccgagccaaagccgca

SEQ ID NO: 8051 - RNA, 86 nt, Homo sapiens
cccccagccgccggagcaccgcggccgacgcgccgagcgcacgcccgaacgcgaggccaacagccccgcaaagaaccaggaggaag

SEQ ID NO: 8052 - RNA, 65 nt, Homo sapiens
cccggagcggccgcgagccaccgaggcccaggcggggccccgggccgcaccccccaccgcaaccc

SEQ ID NO: 8053 - RNA, 81 nt, Homo sapiens
cccccaccaaaaccggccgggcgaccggcagagcccccaggagggggacgcgggggaccggagcgcgggcgggcgcggccc

SEQ ID NO: 8054 - RNA, 85 nt, Homo sapiens
gcccccggcccacaagaggaggacaccacccaagggacgccaaaaagagcaagaccgccaaggaagaacagaaaggggcgcagag

SEQ ID NO: 8055 - RNA, 64 nt, Homo sapiens
ggcagccccaaagccgaacaggcagggccagacccagccccccaggcccaaaccaaagcaccac

SEQ ID NO: 8056 - RNA, 84 nt, Homo sapiens
aagagggccccgcgaccaggggcgcagacccaaaggagccccgcgggcaccagaacaccgggggccacgcccaacgccccagac

SEQ ID NO: 8057 - RNA, 76 nt, Homo sapiens
gaaaagacgaaaggagaggaaggcagagaggaccaaccagcaaggaccagaaggacccaaggacgaaggcagggga

SEQ ID NO: 8058 - RNA, 73 nt, Homo sapiens
cgcagccacaagcaacaccgggacagggaggggcgacgcagagagcgcgaaaggacggccggcaggccacacg

SEQ ID NO: 8059 - RNA, 78 nt, Homo sapiens
gacagaccccaccagaagacccaccgaaacaacggagagacaacaagggccacggacggggcccgggaaacagagaaa

SEQ ID NO: 8060 - RNA, 83 nt, Homo sapiens
cacggaccgaggaagccccgcagcagcagcccaaaggaaggcagaggaggagcgagaggacaggagaagggaagcggacaaca

SEQ ID NO: 8061 - RNA, 77 nt, Homo sapiens
agcacccggcaagaagaacacagggggaagccaagcagaacaacaacaagacagacggagcaaggccacaggacaga

SEQ ID NO: 8062 - RNA, 74 nt, Homo sapiens
gaccaacccgacgcagagccaaagcgcgcggaaagccagaagggaccggacaaaagcggcaagagaagacaacc

SEQ ID NO: 8063 - RNA, 53 nt, Homo sapiens
ccacccaggccccgacgccccgagggcgggggcggagggcaagacgacgacag

SEQ ID NO: 8064 - RNA, 78 nt, Homo sapiens
ggaaaaagacagcccgcagcacgaccagcaggaacgaggaaaggccaggaggacacaggagaaggggccgcgcaaccc

SEQ ID NO: 8065 - RNA, 69 nt, Homo sapiens
ccaaaccgcgggacacgaccagacagaaggagggcacaggaaaagaccccacaagcaaggacaaagacc

SEQ ID NO: 8066 - RNA, 71 nt, Homo sapiens
ggggaggcccaccaggagggcaacaccgaagaggacagaacgaagaaagagccccccgccagccacacaag

SEQ ID NO: 8067 - RNA, 75 nt, Homo sapiens
cagccagaagaaccagggcaagaaagacccagggcggcgaagggaagagaaggaaggcagagcccacaaacccaa

SEQ ID NO: 8068 - RNA, 81 nt, Homo sapiens
cagacagcaggagcgaggccgggaccggagcaccggcagacccggggaccgggaagagagccggagaacaagcgggcagac

SEQ ID NO: 8069 - RNA, 60 nt, Homo sapiens
ggggaccgcagcagcgagaaaggagccggggaccccccaaagacaagggcccgaagacac

SEQ ID NO: 8070 - RNA, 79 nt, Homo sapiens
cgcaaagcgcgaggggcgaggaagcgcacaggggagaagacgacggggcgagccgcgggaagcggccggaaggcggcga

SEQ ID NO: 8071 - RNA, 76 nt, Homo sapiens
aagaccgcaccgcgccacacccgcaacacacccccagacccccgccaggaacgaagagggaaagacagagagaacg

SEQ ID NO: 8072 - RNA, 73 nt, Homo sapiens
cgaaccgggagaggaaccggcccagagcacagaaggagagaaaacagacagaaaagaaccagaaccggccaaa

SEQ ID NO: 8073 - RNA, 73 nt, Homo sapiens
gccccgcccggcggggaagcgagagaacgggccccggaacacaacaagcaccgggagacccacaggcagagcg

SEQ ID NO: 8074 - RNA, 81 nt, Homo sapiens
gcccagcaaaggaaacggccaacgagaggcggccaacaagacaggcacacaggagcccaagaggacagagaacgaagcaca

SEQ ID NO: 8075 - RNA, 73 nt, Homo sapiens
gaccaaaggaagaagcgaagacggaaacgaggaaaccgggaaagccaccgaaaaggacacaggaacgccacaa

SEQ ID NO: 8076 - RNA, 34 nt, Homo sapiens
aaaaccgggcgcagccaaacggcgaggaaagaga

SEQ ID NO: 8077 - RNA, 53 nt, Homo sapiens
acgacgcgggaaagccgacaacacaggaccgaggagcgaagcaacgggagagc

SEQ ID NO: 8078 - RNA, 69 nt, Homo sapiens
gaacaaaccagaggaagcccacacacgccagcagaccaccccgggagggagccaagaccagaagaggaa

SEQ ID NO: 8079 - RNA, 85 nt, Homo sapiens
agcagccgcggcagaccaagaagccagagagggcggggagacaaggaggccgagagaccgcagggccaaccgccccccagcagca

SEQ ID NO: 8080 - RNA, 81 nt, Homo sapiens
gagaagccgcaggacagcagccccgagcacgggccgaggcccaccgcgacacaccgccagaggggcgggcgccggccacca

SEQ ID NO: 8081 - RNA, 81 nt, Homo sapiens
cccaaggccaggaggcccagcgccccaggaagacaagagggaggaccacaggccacccagaagggccccaccccaagggga

SEQ ID NO: 8082 - RNA, 90 nt, Homo sapiens
gcccggccaagaggcaaaggggaggacgcagcaaaccaccagaagaccaggcaggaccaagagaaaggaaaaccacacgagagggacaga

SEQ ID NO: 8083 - RNA, 106 nt, Homo sapiens
aggaagccacaagcgaaaagcacagcggccaagaaaagcagaaggagacgcaaaaaaggcgcgaacggcggaggcaaaaaaggagaaagaacaccaagcagaggga

SEQ ID NO: 8084 - RNA, 50 nt, Homo sapiens
agaccacacacacggcacagaaggcaacagggcccgagggcaggacagca

SEQ ID NO: 8085 - RNA, 81 nt, Homo sapiens
aaagcaaaaccagaccacaacaagaagagaaccccaaaggcccccaaagaaagccacagcgcgccgcaggagcaccgccac

SEQ ID NO: 8086 - RNA, 74 nt, Homo sapiens
gaagggccggaaaccgaaacggggaaaaaaaccgcagggcggagagaccagggcagcgcaagaccccgcacgga

SEQ ID NO: 8087 - RNA, 72 nt, Homo sapiens
cgaaccacagagggggaaccaaccccgaacaggggacggcaaacgcggaccggaccagcaaccgcacacaca

SEQ ID NO: 8088 - RNA, 83 nt, Homo sapiens
gcacccgccaccccaaggggggacagcgaagggccaggccgagggcccgcccggccccaggagaagaaccagccgcagaggag

SEQ ID NO: 8089 - RNA, 75 nt, Homo sapiens
gaaaggcggagaggaagaccggaggaccaaacagcagagaagaaagaaggcagacaaaacaagaggaaagaaaca

SEQ ID NO: 8090 - RNA, 77 nt, Homo sapiens
cggaaacgagaagcgaggggacaaacgagaagacaaggggagaggacgcagacccagaagaagacacccaagcagca

SEQ ID NO: 8091 - RNA, 79 nt, Homo sapiens
gcacagcacccggggccacccggaggagcccacagagcagggccagaagcccaggaagcacacacaaggccacgccagc

SEQ ID NO: 8092 - RNA, 83 nt, Homo sapiens
cacgaggggcgcgccgaagccgagaaagcccgcgggaggccgagcgcgccgagacaggacacggcgccccacacccccgcacc

SEQ ID NO: 8093 - RNA, 79 nt, Homo sapiens
cacgcccgacaggggccaaaccacgggacccgcaggaagcgagaaccaagaaggagcgagggaggagcagcgagacagc

SEQ ID NO: 8094 - RNA, 85 nt, Homo sapiens
ccaggagggccacccccaccccagggaccaaccacaaaccgagacagggacagcgggaggccaaaccgccccggacgcccggagc

SEQ ID NO: 8095 - RNA, 80 nt, Homo sapiens
gggcggaaacgccccgaggagcaggaagcacaagcagggggggcgcccgggagaagcacgggagaccaaaccacgacgga

SEQ ID NO: 8096 - RNA, 76 nt, Homo sapiens
gcccgaggaaaacacggaaaaaccaccggcaacaaaacggaggcgcgaggaacagaaggcgaggaggaggccccgc

SEQ ID NO: 8097 - RNA, 70 nt, Homo sapiens
cgaacgccaccgcagagacacagcgcagaggcgcgcagaagaaagccgcggaaccgcgacaccaagaggg

SEQ ID NO: 8098 - RNA, 55 nt, Homo sapiens
ggccacgcaccgcgcgaagacggaagacgcgcccgcgccgagacgccggggcccg

SEQ ID NO: 8099 - RNA, 71 nt, Homo sapiens
cacgcgcggcccgcacagcggcgcgcgccacgccgcgccacccgccaggcacgcgaccggcccgaggaccg

SEQ ID NO: 8100 - RNA, 70 nt, Homo sapiens
cacgagcgggacaagaaacggagagccccacaagcggggaaccgaacaagacagaaagcgggacgcgcaa

SEQ ID NO: 8101 - RNA, 88 nt, Homo sapiens
gcaggacaagagaagcacaaaacagcagacccaagagcagcggaaaagaccagcacagagcagcccgacggccaggaggcgaagagac

SEQ ID NO: 8102 - RNA, 78 nt, Homo sapiens
ggaagcgaaagaaagagaaagcaaaccccacgagaacaaagcacggcagaaacggaaaaaaaccaagaaagccggacc

SEQ ID NO: 8103 - RNA, 51 nt, Homo sapiens
gaagcgccaaccaaccgggcagcagcacagacacggagacgggggccaggc

SEQ ID NO: 8104 - RNA, 74 nt, Homo sapiens
agccaaaagaaggagaaaaggcacacacacccgcaggagagcgccggagaaaggaagaacccagacacagaggg

SEQ ID NO: 8105 - RNA, 79 nt, Homo sapiens
accaagaacccaccacccagcagcagggcacaagaaagagccgcagacgcacagcaaccaccggacccgaaggccacca

SEQ ID NO: 8106 - RNA, 92 nt, Homo sapiens
ccagacgcgcccgcgggcccggccacggcggagccaaggcacgggcgagagcgggaagagcacgcacaagcagagcgcacaccacggcgccg

SEQ ID NO: 8107 - RNA, 72 nt, Homo sapiens
cgaagaaaagagacgacgggaaaaggaggaaagcaagcgaagcacggggcaagaagaagaagcagagaacgc

SEQ ID NO: 8108 - RNA, 79 nt, Homo sapiens
cacccgcccgagccgggagcacagcagaaggacaacacaccgcccaaccgggacaaagaaaggaaaagagaagaaccgg

SEQ ID NO: 8109 - RNA, 80 nt, Homo sapiens
cagagcgggggaagggcgcccggaggcccgcaagcccccccggagaaaaaggaagcgagagcaccaggccaagaacccca

SEQ ID NO: 8110 - RNA, 101 nt, Homo sapiens
cccaagcggaagaagggagccaacaaaaagcaccggacggcaagcacaacaaggaaaccaagggagagagcaaaaacagacgagccgaagccaaacagagc

SEQ ID NO: 8111 - RNA, 39 nt, Homo sapiens
ggaccgggaggccccgggcgcgggagaacacaaggaacg

SEQ ID NO: 8112 - RNA, 88 nt, Homo sapiens
gaagaggggggaagaggggaacaggacagaagaggaggaccaccggagcgaggaaccggaccccggcagcaacaccagcaggaaaaaa

SEQ ID NO: 8113 - RNA, 66 nt, Homo sapiens
acggagaaaccaccggcggaccgcacaagcagcccggccgggggccaaaccgcaaacacacccacc

SEQ ID NO: 8114 - RNA, 86 nt, Homo sapiens
gacacaggaagaacagggcgaggacgagaccagcagggacacagcaggacaagaacgacagaaagagcaggcagcacacacagaaa

SEQ ID NO: 8115 - RNA, 88 nt, Homo sapiens
acacccacccaaccagagcacgccacaggcgcaagcgcccaaagccaagggaacaccggcaagcgagggcggcacgccacaggacggc

SEQ ID NO: 8116 - RNA, 80 nt, Homo sapiens
caagcaggaccacccaccagccaccaggggacgcccgccacggcccgccagaacgggcgggcccgcacagcccagaagaa

SEQ ID NO: 8117 - RNA, 51 nt, Homo sapiens
ggagaaaaggaaccaaagaaggaaggagaaacaccaaccagggccagggac

SEQ ID NO: 8118 - RNA, 79 nt, Homo sapiens
cgcacggggacccgggcagccgagacggagacgcgcgacccccagacaggaggagccacccgcacagacacgccaagga

SEQ ID NO: 8119 - RNA, 81 nt, Homo sapiens
gggggcggccggggccgccaccacacgaaacagggcaaggggaccccacaccacaaaccgaggaaagaagggacagcagaa

SEQ ID NO: 8120 - RNA, 74 nt, Homo sapiens
caccacacccccgaaccaaggacccaaacagaaggggcagagccgcccgaaaaggggaagaccggggcgagcga

SEQ ID NO: 8121 - RNA, 113 nt, Homo sapiens
gcaaagggaaccaaaagaggaccaccaagcccaaagaaccccacacgggacaggggaaggagaacagaacccagaggcccaagacaggcgagcaaagagacaagccagccagg

SEQ ID NO: 8122 - RNA, 75 nt, Homo sapiens
ccccgagcggaacggagaaagcgaggggcaggacccgaggcgccagcagcagcaagaccgggggaccaggcgaac

SEQ ID NO: 8123 - RNA, 78 nt, Homo sapiens
ccgaccagccccagcgaccgcccgaggacgagaacccccgcgaaccagaggaacccagcgagcgagagcggaccagag

SEQ ID NO: 8124 - RNA, 68 nt, Homo sapiens
aagcagagaagagcaccccagagaccgccccaccgacgccgaaggggccgcaaggccaggcgcgcaga

SEQ ID NO: 8125 - RNA, 51 nt, Homo sapiens
gagccgcgaagccccccaaagcgcccacggggggccgaagaagccaggggg

SEQ ID NO: 8126 - RNA, 93 nt, Homo sapiens
gcacgaaagcgggagagggaccggaacggcggcgacaaggggcccgaacagaggggcacggcagacacaccgaccagaggaaggcgaacccgc

SEQ ID NO: 8127 - RNA, 73 nt, Homo sapiens
gcccccgagggcgggacacagggacggggcgaaagacaaagaagcaacacagaaacggaaaaggaaccaccca

SEQ ID NO: 8128 - RNA, 41 nt, Homo sapiens
ccagaggcaacaaaggcgagggaagcccgcagccgagcaca

SEQ ID NO: 8129 - RNA, 77 nt, Homo sapiens
aaacagaagcagacgagaacggcagccaagggcacacagagaaaaaaagggaacaaaacacagcaagcagacaaaag

SEQ ID NO: 8130 - RNA, 74 nt, Homo sapiens
aggaagaggacagcgggaagcgaaagaacgcagaggcccacagcaagccgagaagaaaccgcaagaaagaaagc

SEQ ID NO: 8131 - RNA, 42 nt, Homo sapiens
ccaacaggcccaaaagagcagaccgaagaagaggggagagaa

SEQ ID NO: 8132 - RNA, 71 nt, Homo sapiens
gacgccaaacacacaacgacaacgaaagggcacgacgcaaacggagacaaagaaaggcaaacaccgagcaa

SEQ ID NO: 8133 - RNA, 90 nt, Homo sapiens
ccaaggacgggggaggcccagccgccccgggggaagggcggaggacgcagacagcgggcccgagagccgcagcgggggcgaggagaccag

SEQ ID NO: 8134 - RNA, 73 nt, Homo sapiens
aggaagaacggagcacgacagaaacacagccgcagaacaccgaccgaggacaacaggagagaagcaaaccccg

SEQ ID NO: 8135 - RNA, 84 nt, Homo sapiens
ggggagccggcccccgaaagagggcgagaacaccgagcaaagccaccaacaagcgacagcaagcgagcaaaccaacagcaagaa

SEQ ID NO: 8136 - RNA, 78 nt, Homo sapiens
aaaagagcaagaggaaaggggggagagacaagcaagcagaacaaaggcaagcagggaccgagccaagaaaaagaacaa

SEQ ID NO: 8137 - RNA, 100 nt, Homo sapiens
cgcgcgagacccgccccaagaccgagccccacggaccggcgacccaccggcggaaagagccccaagcccgcagccccagaagaaaaacacaggccgccgc

SEQ ID NO: 8138 - RNA, 85 nt, Homo sapiens
cccagccacccaggccccgccgcccgggggcgccgcccaccgcgcccgccgaaccgggcggggcggcccaaggggaagcgggccc

SEQ ID NO: 8139 - RNA, 82 nt, Homo sapiens
ggaacagaaaaacaaagacaacaacacagcgggaagggggcaaaggagaacagccagggcaggacggagacccggaggaggg

SEQ ID NO: 8140 - RNA, 49 nt, Homo sapiens
gagccaccgcccccgcccgaccaggccgaggagacagaagagcagcaca

SEQ ID NO: 8141 - RNA, 73 nt, Homo sapiens
aaaacagaagcacagcagcaaaagcaaagacccccggggcgccaccggacagacagcccacaccggcaggcca

SEQ ID NO: 8142 - RNA, 47 nt, Homo sapiens
gaagaaacccagggcgagaaaggggcgcgggaaggacaacagcccca

SEQ ID NO: 8143 - RNA, 82 nt, Homo sapiens
gcgagccccagccccgcgcgggcgacgggccggagcccgcacggagcggccgggcgggacaggaaggagggccccggagcag

SEQ ID NO: 8144 - RNA, 69 nt, Homo sapiens
aaggaagaaacccccagccgacgcccgcgccccccagcaagacaagcaacgaaagcccagccagccaag

SEQ ID NO: 8145 - RNA, 39 nt, Homo sapiens
gcagacgcccaacagaggaagaaacaacagcgccacacc

SEQ ID NO: 8146 - RNA, 52 nt, Homo sapiens
gcacccgcccccaaaaccgaagaccgaccacgaggcgggggcggaagaggcg

SEQ ID NO: 8147 - RNA, 71 nt, Homo sapiens
ccagcacgggaagaaagccaaccggaaaacaccccacaagcaccccacagagcgcaggaaggggaaccggg

SEQ ID NO: 8148 - RNA, 66 nt, Homo sapiens
ccaacgagaccaaagaggcaaggaggagggcgccagcgaacccgccgagccagccagacacacgcg

SEQ ID NO: 8149 - RNA, 71 nt, Homo sapiens
gacacgagcccaggagcaagacagccggacaacaaggaaaaaggaagccaacaccaggcacagaaacgcca

SEQ ID NO: 8150 - RNA, 84 nt, Homo sapiens
aacacagcagaaacaaagaagcagcgcgaaaggagccgcagacagggggagccgggaaggagaagagaaaacaacggacagcca

SEQ ID NO: 8151 - RNA, 76 nt, Homo sapiens
aaccgaagaaaagaagaagccgaccaccaaccgacccacacagcgcgagaagaggaaagaccgcagaccagacaca

SEQ ID NO: 8152 - RNA, 82 nt, Homo sapiens
ggccgcccccgaagagacccaaaaaggacgaagggaacgcacgggaaagcgcgcaaaagacgcacacgggccgccgcgggcc

SEQ ID NO: 8153 - RNA, 38 nt, Homo sapiens
aacagagcaccgccgacaggcaccagacccggaggagc

SEQ ID NO: 8154 - RNA, 69 nt, Homo sapiens
gacgcgcgggaacaacgcgagcggcgcgcgggacgaaggaggagaaagagaaggaaacccacagaccca

SEQ ID NO: 8155 - RNA, 78 nt, Homo sapiens
gcccacaaaaacagcggaggagaccgggaaaccgccgaagacgaaggggaccaaggggcaggggccccaggagaccag

SEQ ID NO: 8156 - RNA, 86 nt, Homo sapiens
aaagcggaaaggacaggggaaggccaaggcaaggcagaccgccacagagagcgggcacagcggcagacaaggcccaaagacagcag

SEQ ID NO: 8157 - RNA, 74 nt, Homo sapiens
gcggaggaggcagaaaaagcgcagagagaggagagacgaaggagcaagggcaacacccggagagaagagccgca

SEQ ID NO: 8158 - RNA, 77 nt, Homo sapiens
aaacaccaaccccccagggcggcagaacagggaccaaccaagaagaaacaacgaccaccaccaaaacagcccacgaa

SEQ ID NO: 8159 - RNA, 76 nt, Homo sapiens
cccacccccgggggccacggacccggcgacaacacccggccccgagacagaagccgcccaggaccgacagcagagg

SEQ ID NO: 8160 - RNA, 75 nt, Homo sapiens
cccagcccagaagacgcggggagagggaaccgcaggacgcagggccccagcccccgaaaacacaagaaaagcacg

SEQ ID NO: 8161 - RNA, 86 nt, Homo sapiens
gaccgccggccgagggggcccaggggcagcgagcaagacagcaagcagggaggcaagagccaggacaaggaccaggggcccaagcc

SEQ ID NO: 8162 - RNA, 65 nt, Homo sapiens
ggacaaccacagcccggagagccgaccgggagaacacggggaaggccaagaagacgcggagggag

SEQ ID NO: 8163 - RNA, 115 nt, Homo sapiens
ggacggagagaaccaagagagcgaaacaccgggacacacaccgaacaagagcaacagacggacagaagaccaacaaagaaggacccaggaacaacggcaaccaaggcaaaaccac

SEQ ID NO: 8164 - RNA, 79 nt, Homo sapiens
cccagccgaaggagaagggggagagagcccacccgggacgggccggcagcgggagccaaaggcggacagcagaacggga

SEQ ID NO: 8165 - RNA, 41 nt, Homo sapiens
cccggagaagccaaaggcaaagccgggccagaacaggcgaa

SEQ ID NO: 8166 - RNA, 76 nt, Homo sapiens
cggcccgaacggccgccaggccccgaagacccacagccaccgggacaagccaacaccgcacagagacaagcccgcg

SEQ ID NO: 8167 - RNA, 70 nt, Homo sapiens
aaaaccacaccaagggaaggaaggaccagagaaacgaaagaccaaacgagaaccagaagaacgaaaaggc

SEQ ID NO: 8168 - RNA, 84 nt, Homo sapiens
cggaggacgcggcagcccgggagcggcgagggaaaagcgaggcaaggcaggcggaagacaggcaagcaaagcaaacgacgcaag

SEQ ID NO: 8169 - RNA, 68 nt, Homo sapiens
cagaaagcagagcaaccaggggggaaaaagcggacaaagagagacaagagcgcccaagcggacagccc

SEQ ID NO: 8170 - RNA, 37 nt, Homo sapiens
aacccggacccggcgagcgcaagggaacaggccaggg

SEQ ID NO: 8171 - RNA, 81 nt, Homo sapiens
agagacagccagcacaccccgcgagcaagaccgccagagcggaacgaccccagagcgagcccgcagcagcccagaaacaaa

SEQ ID NO: 8172 - RNA, 86 nt, Homo sapiens
ccacaaaggaccccgccccaagccccaccacccgcagccggggaggcaacggagcgaaaccagcgacagcagaaaacgcaacagcg

SEQ ID NO: 8173 - RNA, 88 nt, Homo sapiens
cccagaaaggaagaagaaaagagaagggaaacaaagagaggcaagacccagagaaaggaacaagacccgcagacaaccggaggaaaag

SEQ ID NO: 8174 - RNA, 90 nt, Homo sapiens
ggaagaggcacgcgagggggcgcgaggggaacggaggccagagcgcggggggaccaagccaggacagccccccccaagacagcgccaaag

SEQ ID NO: 8175 - RNA, 75 nt, Homo sapiens
gaagaggccagcgcagcacagaaaagacagaccgcacgagcaggcgaccagccgcggaggaaccaggcgcagcgc

SEQ ID NO: 8176 - RNA, 73 nt, Homo sapiens
cccgcgggagagcggagaagcgaggcaaggggggccacaccgaaccagcacgggaggcgaggcagaagaacac

SEQ ID NO: 8177 - RNA, 76 nt, Homo sapiens
gaaggccaggggagcggcaggaaggccaccacagggccaacaagcagcgaggaccagggaacgggacacacagacg

SEQ ID NO: 8178 - RNA, 62 nt, Homo sapiens
ccgagagcggaccgagagcgcgaaacgcacgagaaggaacaacaccacaacagacaagcagc

SEQ ID NO: 8179 - RNA, 79 nt, Homo sapiens
ggacccggcggggcgcaccacagagaccggccaaaccacccagcaggaacgggaagggcacaggaagaaaggaccaagg

SEQ ID NO: 8180 - RNA, 83 nt, Homo sapiens
caggcaacccaaacgaggacaccccgggcgagagaggcggcgaggacggaccagcaccaaaggagggaagggcgccagaacaa

SEQ ID NO: 8181 - RNA, 83 nt, Homo sapiens
ggggaaccgccaaagcccgggcgcggaagaagccaagggaaggggcccggccaggaccggggaagggggccgagagcagcgag

SEQ ID NO: 8182 - RNA, 71 nt, Homo sapiens
agcggaaagcaggagcacaggggaacccaacgaaaacaggaaacccgccacaccacgggaaggggacagcg

SEQ ID NO: 8183 - RNA, 75 nt, Homo sapiens
ccaggccgggccgcgggagccgaggcgccgaaggaccgacgcccgggagggccagacaaggggaacacaagagga

SEQ ID NO: 8184 - RNA, 53 nt, Homo sapiens
gcccaaacaccaccaccaagaaggagcgacgaaaggaagaagccaggggcgcg

SEQ ID NO: 8185 - RNA, 64 nt, Homo sapiens
gggaggaggagccaccccaagccacagggccgccgacagcagagacaggggggcaaaccgaggg

SEQ ID NO: 8186 - RNA, 78 nt, Homo sapiens
ggcgccccgggcgcggcaaggacgagccggggcgcgaagccccggggcccagcgaccgacagacaggacgaagcccca

SEQ ID NO: 8187 - RNA, 77 nt, Homo sapiens
gcggcgccgccacccccccccagcaggccggcaaagcaccaggcacagcaagcgccgaaagaccagggaaaaaacca

SEQ ID NO: 8188 - RNA, 74 nt, Homo sapiens
gagcagggcggcggagcggcggcggaccaccccagccaaagaacacggcagaagcccccaagggaaaaaggaag

SEQ ID NO: 8189 - RNA, 78 nt, Homo sapiens
gaaacagcggcaagccacagacgaccaccgcccacgaagcccgacgaggcccgagagaagagcagaaacgggagaagg

SEQ ID NO: 8190 - RNA, 82 nt, Homo sapiens
gaacaccgcgcgggaagaagcgaccgggcagcacacgccagagaaccagcagacaccaggcccgagcagcagcccacagaac

SEQ ID NO: 8191 - RNA, 87 nt, Homo sapiens
gccccggggccccgcgggaccgcggccacggacggaacccggagggcggaccacaagcaaagagcccgggaagggcgcggagcaggc

SEQ ID NO: 8192 - RNA, 74 nt, Homo sapiens
aaaacccagcagccaaacaaagaagaccggcggagaacggaaaagcaccaggaagcagagaggaccgcagaagg

SEQ ID NO: 8193 - RNA, 42 nt, Homo sapiens
gggaggccgaggcgggcagacacaaggcgggaacaggggagc

SEQ ID NO: 8194 - RNA, 81 nt, Homo sapiens
ggacgaggggaagcggacggagagcgagccgccggcgggacgaggacgacacaccgggcagagacaggcaacagacggcaa

SEQ ID NO: 8195 - RNA, 47 nt, Homo sapiens
agccggacaggagaaggcccaaaaagccgaaagaaaaccaccggcgg

SEQ ID NO: 8196 - RNA, 49 nt, Homo sapiens
ggacgcaccacgagacacagggggcaggggaacagccaccgccgcgggg

SEQ ID NO: 8197 - RNA, 80 nt, Homo sapiens
cggcgggagaagaagagcgcgagaggacgggacaggaacaagggacaaaccaaagaccaaccaagaggccagagagcaac

SEQ ID NO: 8198 - RNA, 80 nt, Homo sapiens
cggaaaccaaaggcagacagacgggcccccgccaaacccaccgaaaccggacaagcagaagaacagaggagcgagcaagg

SEQ ID NO: 8199 - RNA, 78 nt, Homo sapiens
ccccaaggcaggaaccagaggaagagaggacaccgacagagcaccagggaaccagcggggaaacgaggccggggggag

SEQ ID NO: 8200 - RNA, 73 nt, Homo sapiens
gagccaaggcgggaggcgagacacagagaaaagcggcagaagaaagcaaggcaagaacccccggagcaggaaa

SEQ ID NO: 8201 - RNA, 74 nt, Homo sapiens
ccgacacagccccgggacccccaagagcacaggcagaaggcacaaggacaacggcaagcggagaagagcaaggc

SEQ ID NO: 8202 - RNA, 112 nt, Homo sapiens
gaccgccgcgccacggagcggaggacgccggcgcgcccgcgggaccgcacgaccgccggaggcccccagaacccgggcaggaggaaggaggaggcagcgccccacacaagag

SEQ ID NO: 8203 - RNA, 80 nt, Homo sapiens
aggggaagaaaaaggaccccaagcccaaaaggccaccgcacagaaaacgaacgagaaacgagggagaagaagcagaaaaa

SEQ ID NO: 8204 - RNA, 71 nt, Homo sapiens
cggcggcaccacccgaacagggccggcagcaaaagagcaacgccacaagagccacagagccaagcgcagcc

SEQ ID NO: 8205 - RNA, 78 nt, Homo sapiens
cccagagcgacagcccgggacaccaagaaagaacgaaaaccacccagcaagaacgcagcagaagaaaacagaaggaac

SEQ ID NO: 8206 - RNA, 77 nt, Homo sapiens
cgaacaaaaagcagcaaaccggaccaccccgaagaaagcacaggggggagggcgaacccggccagaaccaaaaaacc

SEQ ID NO: 8207 - RNA, 65 nt, Homo sapiens
gagacccgcgcgccaggcgcgcccggaaaaacaaccaccagcgagcaaaaaggcaaagaccaaga

SEQ ID NO: 8208 - RNA, 68 nt, Homo sapiens
gccagccaccacgcagcccagaccgccaccagggaagaaaacgccagagaagcagagcagcccggagc

SEQ ID NO: 8209 - RNA, 84 nt, Homo sapiens
ggccgagggcgggggccagaagacaagagagacggcgaggcgcgccccgcccggcagcgaccggaggagcagcagccacgaacc

SEQ ID NO: 8210 - RNA, 70 nt, Homo sapiens
cccagggaaggggcagcacaggcacaccagccggcgccgcaccaccccggccgagcgccacgggacacac

SEQ ID NO: 8211 - RNA, 80 nt, Homo sapiens
cgagcagcgaacgaggcaagcagcgccgagcccaggcaagagcccgcgagaagaccacacgaaggggcagaagagcacaa

SEQ ID NO: 8212 - RNA, 77 nt, Homo sapiens
ccgaaggaacgggcggaccagggcgagcacgagcacccgccccaacgagccaagcacacaggaggggacccccggcg

SEQ ID NO: 8213 - RNA, 53 nt, Homo sapiens
gcggacccagggccccgggggacaacccaaagacggccaccgcgcaggaccag

SEQ ID NO: 8214 - RNA, 82 nt, Homo sapiens
ccggccaaaacaccagcagagccaaaggcaagagcgaaggagaaaggcaacaaggcccgagcggggaacacgagagccacag

SEQ ID NO: 8215 - RNA, 110 nt, Homo sapiens
gcaccgcggagcaaaaaaagagcccgcaagaagaacagagacagcagccaaacccccagcggggggagaagaacggagagaaccaaccaggagcgagagaaaacgcagac

SEQ ID NO: 8216 - RNA, 59 nt, Homo sapiens
cgagcccaggcaagagcccgcgagaagcggcggagaaaccaccacaaacacgaggccag

SEQ ID NO: 8217 - RNA, 75 nt, Homo sapiens
aaaagagcgaaccagccgggaggggaggagcgcaggggcgcaccacaccagaggggacgagccaaaaccgggaca

SEQ ID NO: 8218 - RNA, 86 nt, Homo sapiens
gggcggcggcccaaggcgaagagaccccagcaagcagagagcccacgcaggagacgggaggagcgacaacggagcacacccacccc

SEQ ID NO: 8219 - RNA, 55 nt, Homo sapiens
ggaccacacacagacgcaggggaccgggggcaaccaggcccagccagacgcaaca

SEQ ID NO: 8220 - RNA, 54 nt, Homo sapiens
ggcagcagcagccccccaaggggacaagaaaaccagaaacgggggcccgacaag

SEQ ID NO: 8221 - RNA, 55 nt, Homo sapiens
gaagcgaggcggaaaacgaagacagcagaacgagggggccaccccaagaagacac

SEQ ID NO: 8222 - RNA, 79 nt, Homo sapiens
ggagcccgcgcccgccgcgggagagagggagagaaggcgcgcaggagagcgcagagacccgcccggaagcgaggcaaca

SEQ ID NO: 8223 - RNA, 85 nt, Homo sapiens
gggccagaccaaacagaaaggacaaagaacagaccgcggcgggacagacagggaccgagcccagaacccggacgggcagacacca

SEQ ID NO: 8224 - RNA, 40 nt, Homo sapiens
ggccggagacccgccgcgagggagggagcagaggcgagca

SEQ ID NO: 8225 - RNA, 74 nt, Homo sapiens
agcagaggaagagccacaaccggaggacgagaacccccgcgaaccagaggaacccagcgagcgagagcggacca

SEQ ID NO: 8226 - RNA, 83 nt, Homo sapiens
ccgggagcgcggggcgggggcgcccgccgcgccgccacggacacaaagcgagaagacccagcaaccagcagcaagaccaagag

SEQ ID NO: 8227 - RNA, 87 nt, Homo sapiens
ggcgaggagcccgcgggcggccggcgggcggggcggcggcgcgacaggagcagcaagcagagacagagaacgcagaacagaagggaa

SEQ ID NO: 8228 - RNA, 59 nt, Homo sapiens
agacaacacgccaccaggaccaccccccgccaggcggggccggggcgggcgggaagggc

SEQ ID NO: 8229 - RNA, 72 nt, Homo sapiens
gcacgaaaaaacccagcgaagaccacagaaaccaaaaaccccagggacacagaggaacacccagcagccgga

SEQ ID NO: 8230 - RNA, 51 nt, Homo sapiens
cgaggagagaaggcagccagggaacagccccggccgacaggaccggaaaac

SEQ ID NO: 8231 - RNA, 70 nt, Homo sapiens
ggaggagcccagccaaaacaggcgacaggggaacaaaagacacacccacagaaggcaagcgggcgagaac

SEQ ID NO: 8232 - RNA, 82 nt, Homo sapiens
ccccggaccaagacgacccacgaaaccagcaggagccaccggaacgacggagcagaggagaggaggaggccgagagacgggg

SEQ ID NO: 8233 - RNA, 78 nt, Homo sapiens
aaggcgccgaaaacaagccggaaggccccgaagagcgaaagcgccaccggaggccgagccaccaccagacaagcacag

SEQ ID NO: 8234 - RNA, 80 nt, Homo sapiens
gaaccgcagacagcggccaagaagacacaaaggacggaggcacggcccaggggacccagcccccaaccagggagccagga

SEQ ID NO: 8235 - RNA, 79 nt, Homo sapiens
agccgggggccgggacccgcgcgcagagccaggacccgcccgccagccggcccaccccagggccgccggcggggacagg

SEQ ID NO: 8236 - RNA, 73 nt, Homo sapiens
gccaccacagacagcccgaacaagccaccaacaacaccagggacacaacagcaaggagcagaaaccgaaacac

SEQ ID NO: 8237 - RNA, 70 nt, Homo sapiens
aagaaaggaagcgaagcccgcagagcaggacagcgagaaacccacaaaccccagagcaagccaacgcaag

SEQ ID NO: 8238 - RNA, 78 nt, Homo sapiens
aaacccgcgagcaggaaccccaggaaacggccagcaacaaacaccaacacgagaggagccccggacacaggccagcca

SEQ ID NO: 8239 - RNA, 55 nt, Homo sapiens
aagaaagagccaaacgccaaggcggcaaagaaaaagcagcacgaaggcgaggaac

SEQ ID NO: 8240 - RNA, 74 nt, Homo sapiens
accagaaaacggcagaaggaagcccccgcaagaaggagcaggacagaacgaggagaccaaacgacaaagaggcg

SEQ ID NO: 8241 - RNA, 81 nt, Homo sapiens
aagccacaagaggcggcggcggggccgaggcgcgaggagaggaggaagagacaccgagacccgccaaaccaaggcacaaag

SEQ ID NO: 8242 - RNA, 58 nt, Homo sapiens
gacagcagagcggggcggccacaagcaaaggaaccgcggggaaaggcgaaggggcgaa

SEQ ID NO: 8243 - RNA, 73 nt, Homo sapiens
cccgcagggcccagcaggcgcgcgacgggaggccacgcgcccaggcggagacaggggcgacgacgacgcaacc

SEQ ID NO: 8244 - RNA, 52 nt, Homo sapiens
cgccgggagcggagcagacgcgaggaacgaacacaaaccccaggccccagga

SEQ ID NO: 8245 - RNA, 35 nt, Homo sapiens
gccgccgacggaagaacggaggaaccgaggcccag

SEQ ID NO: 8246 - RNA, 77 nt, Homo sapiens
aggagcgagaccagccggacaacagccaggaagcacccaacaggaggaagagaaaagcaaaggaacaagggacaccc

SEQ ID NO: 8247 - RNA, 82 nt, Homo sapiens
aggcgaagaagcgcagccgcaccggccaagggaaaagcaacggcgcaagaggcggggcgggcagaggacaccacaaagcaaa

SEQ ID NO: 8248 - RNA, 70 nt, Homo sapiens
cccagccagcccagcaaaacaccaagacggacaccggagcggaaacaaccgaagcgagcccagaacgaac

SEQ ID NO: 8249 - RNA, 64 nt, Homo sapiens
gggaaggagcgcgcagaaggcacagaaaccaggcagggacccgggcaggcagcacgaagggaga

SEQ ID NO: 8250 - RNA, 54 nt, Homo sapiens
cgccacgcgcggaaggcagcgcccagcagcgcagagaccagaaagacccaagga

SEQ ID NO: 8251 - RNA, 74 nt, Homo sapiens
gggcagccgccgccaccccgcggccgcacccccgccccagaaagagggaaggcaacacccgaaaaccggaagaa

SEQ ID NO: 8252 - RNA, 79 nt, Homo sapiens
aaggaccaccaaaagcggaacccgcccagaaaaaggacgcaaacagcagacggaagaccccacggcaaaaccacacccg

SEQ ID NO: 8253 - RNA, 81 nt, Homo sapiens
agacaagccccggagcgcggccgagcaccgcaagggacgcccgggccccacgcccccacagcaccccagcaccaagccacc

SEQ ID NO: 8254 - RNA, 87 nt, Homo sapiens
cgagcacagagcccgccgccgaccgccgcccgccacacccgccgccagacagccccagcgccccaggagaccaacaccccacagcca

SEQ ID NO: 8255 - RNA, 72 nt, Homo sapiens
gaagccagagcgaggacgccggcagcccaaaaggacaaaacagcaacaaggcaccagacacaccaaccaagg

SEQ ID NO: 8256 - RNA, 73 nt, Homo sapiens
gcgcagaagcaagcgacaacggaaaagcaccacaaccaggacaacgagaagaaaacagagccaagagcagcag

SEQ ID NO: 8257 - RNA, 85 nt, Homo sapiens
cgcgcggagcgcccgggccccagcagggccagagaccacggaagccccggacggccggagcagcagaacaagagcggagaccaag

SEQ ID NO: 8258 - RNA, 71 nt, Homo sapiens
ccagacaaggaaccgaggagaaggcgccccggcaaggccaccgcagaagccacaggagaccggaggccaac

SEQ ID NO: 8259 - RNA, 61 nt, Homo sapiens
gcccacagagagcaaaacacaagagagcagggaggagaagaagcccaggacccaggaagga

SEQ ID NO: 8260 - RNA, 75 nt, Homo sapiens
gcacgggaccgaagacaagaacaggggcccccccgggcggcgggcccccggcacccgaaagcccaggaccgggag

SEQ ID NO: 8261 - RNA, 73 nt, Homo sapiens
cccaagcaggaaaagcagacgcaaagacaaggacacaggaaagggaagcgcccaacaccacaaaacacgacaa

SEQ ID NO: 8262 - RNA, 80 nt, Homo sapiens
ggaggcaagaagaaacccaccgcaaagaggagacggggccagggagaaaggaaggccaggagcaaacagaaggcccgcac

SEQ ID NO: 8263 - RNA, 78 nt, Homo sapiens
ggaccgccgccccgcccccagggggaaaggggagccaccacacccagccacaaggggaccaaaagaacccagccaacc

SEQ ID NO: 8264 - RNA, 59 nt, Homo sapiens
gaggacgcgaggacgcacaggagaggcccggcgggccccccgggagccgcggcccgagg

SEQ ID NO: 8265 - RNA, 88 nt, Homo sapiens
acagggccagaacaagcaagggggcaaggagaggaagagcaagcagcagaccaaaaaccacgggcgggaagcacggaaacagagagcc

SEQ ID NO: 8266 - RNA, 80 nt, Homo sapiens
acgggaaaaaagagcaccaaaaaccagaaggcaccgacaggaaaggaaaaggagaaccaggcacccgggggcaaggaggg

SEQ ID NO: 8267 - RNA, 75 nt, Homo sapiens
acacggagccgccacaggcaaggccaagggaggaaaaagcggcacagaggaagaggcccaccccaggagaacaaa

SEQ ID NO: 8268 - RNA, 62 nt, Homo sapiens
ggacagcgagcggcggcgacgccagaagacagagaacaaacagcggacaaaaaacaacccgc

SEQ ID NO: 8269 - RNA, 55 nt, Homo sapiens
cggacccccgagaaccgcgccaccagagacggggcaaagagaaccaggagacccc

SEQ ID NO: 8270 - RNA, 78 nt, Homo sapiens
gggaaacacacgcgcaaaggagaaccccacaccagaacccagggcacccacagaaggagaacaagcagagcaccggac

SEQ ID NO: 8271 - RNA, 36 nt, Homo sapiens
ccccccccccccaagcccccgggaccgggccgccgc

SEQ ID NO: 8272 - RNA, 72 nt, Homo sapiens
cggggacccacgcagagggcggagcggcagggaaccgacgcaaccgaggccgagggcaggaccgaacacgaa

SEQ ID NO: 8273 - RNA, 83 nt, Homo sapiens
cccgcaagaaaacaagcagccgcacgacgcacggcccaggaccgcacaagaggcgagcggcgcagcgcaggagaggaagacga

SEQ ID NO: 8274 - RNA, 57 nt, Homo sapiens
cacaccaaccaagaagagccagccacaagaaggagagacgcagagccagacaagacc

SEQ ID NO: 8275 - RNA, 55 nt, Homo sapiens
cagacagccccagcaggcaacaggaagaagaacccacaggggccaacagaggaag

SEQ ID NO: 8276 - RNA, 56 nt, Homo sapiens
aagaacaacgaagaagcaagcccgagaaaggaggagaaacaagcagcaccgcagga

SEQ ID NO: 8277 - RNA, 65 nt, Homo sapiens
cgagagggaccgagaccaagggcgggggcacaacacaggaacggcacgcagacacaccacagaac

SEQ ID NO: 8278 - RNA, 78 nt, Homo sapiens
gcaacacggacacccacagcggggcggcggcggcggcggcgcggcccaaaagaccacggaaagaaagacaacaagaca

SEQ ID NO: 8279 - RNA, 59 nt, Homo sapiens
aaaaacgcggaggacaagaagggccggcccaacagcagggaccacaagacaaacgaggg

SEQ ID NO: 8280 - RNA, 80 nt, Homo sapiens
cgacgcgacacccccaccaggacagccgacagcccgcccaggaagggacccgagcacggacagaagcgaaggggacaggg

SEQ ID NO: 8281 - RNA, 74 nt, Homo sapiens
agcacgagccgccagcgcagaaacacggcccagccccagaaaaggaacacaagggaccagaccccacaagaaaa

SEQ ID NO: 8282 - RNA, 88 nt, Homo sapiens
gaagcgggagcggccccagagcccgggaccggagacgcccccacacggaccagggccggagcaaagagcggaggggagcgggcgggcg

SEQ ID NO: 8283 - RNA, 80 nt, Homo sapiens
cgagggggcgggggcccaacgcgggacaggaagggccgagcggcgggaaagggacgggggaaggacagaccacaggaaaa

SEQ ID NO: 8284 - RNA, 105 nt, Homo sapiens
cagccaagaccaagcgcgaaagcgccaaaaggacagcagggaggaacaacagaagccagcagcacaggcggaagaaggccccaccagaacccaacccggaccagc

SEQ ID NO: 8285 - RNA, 70 nt, Homo sapiens
aaacgcccaccgccccccaaccgacagcaggccgaaacagaagcccgcgaagccgggaagaccaggagca

SEQ ID NO: 8286 - RNA, 84 nt, Homo sapiens
cggaaagcagcgcaggagccaagaccacagcagcacccagcgccggggaggcagaaggggccgggagcggcccggcccggcacg

SEQ ID NO: 8287 - RNA, 72 nt, Homo sapiens
ggccagcgacaacccccagaagagaccaacgccaccaaccaaccggaggcaagcgccagcagccgagcaaag

SEQ ID NO: 8288 - RNA, 85 nt, Homo sapiens
ccgccagacacccgcggcgaaggcggccgggccgggcccgcgcgcccacccgggcagaaaacgcagaagcccacaggccacagag

SEQ ID NO: 8289 - RNA, 41 nt, Homo sapiens
gaggccgggccgggggagaccgcggccaaccgccccccagc

SEQ ID NO: 8290 - RNA, 64 nt, Homo sapiens
cgggagcccaacacgcggcacgagggccggcccgcgggcagaaccaaaggcagacccagaagag

SEQ ID NO: 8291 - RNA, 58 nt, Homo sapiens
gcgccgcccaaggagagcaaccccaaacgcacgggagcccgggagaggaggcccaggg

SEQ ID NO: 8292 - RNA, 38 nt, Homo sapiens
gcccccccagagagccagaaagaacgaggcagaagcac

SEQ ID NO: 8293 - RNA, 70 nt, Homo sapiens
gagaggaagccagcagccgacgaaggaagaccgcaggaaagcaggaaggcaagaaagccaaggacgaaac

SEQ ID NO: 8294 - RNA, 67 nt, Homo sapiens
gaggccggggggggagcaaggccgggacccagaaaagagggaaagcgaccaagagacggacgcaagg

SEQ ID NO: 8295 - RNA, 71 nt, Homo sapiens
ccagccacgcgcccagcgccacaaggaaccacagcagagggaaccggggcaaggagacaagaaaagaagaa

SEQ ID NO: 8296 - RNA, 74 nt, Homo sapiens
acagggacagggcagccgacagaaaacgcagaacaaagcgggacagacccgcaaggaagagccggacagaagga

SEQ ID NO: 8297 - RNA, 75 nt, Homo sapiens
caaaaaagcaggcccccggaccacaccaagacagggcagagaaagaaccagaaacccccaacaaacagaagaaaa

SEQ ID NO: 8298 - RNA, 84 nt, Homo sapiens
gacacaccacggagaaccagaccggcgacccgcgacgccgagcacccaggcgacgcccaccaagggggccgacgacgagccccg

SEQ ID NO: 8299 - RNA, 69 nt, Homo sapiens
agccgccaccacgagagggaccagaaggagaccggaaacgagagaaacgaagacgaagaaacagccgca

SEQ ID NO: 8300 - RNA, 77 nt, Homo sapiens
ccaggcgccggagcccccaggcggggcaggacacgggccccccggacacgcagccaggggccgggagaggaaggccc

SEQ ID NO: 8301 - RNA, 85 nt, Homo sapiens
cccggccgcaggagggagaccacagcaagacaccgggaccccggaagccaaaaagagaccaggaaggcaaggaagaaaggaaaac

SEQ ID NO: 8302 - RNA, 83 nt, Homo sapiens
gaagcggccaaagccgcccagacggccaccggcgggaggaacaaaaggagcagaagacagagggaggagggccacggacaaac

SEQ ID NO: 8303 - RNA, 104 nt, Homo sapiens
cgaaaccgcgcccgcgaagcaagacaccacaaagagaacacagagccggaaggacaccaggggggaaaaaccacacaggcaaagaacgcgcaaaacaggacgaa

SEQ ID NO: 8304 - RNA, 80 nt, Homo sapiens
gccccccgccgccgccggcccggacaggccgccaacagacagggcggaggggccccacacggccacagggcacgcacacc

SEQ ID NO: 8305 - RNA, 44 nt, Homo sapiens
agacaaaacaggcagaaaacaagccccgacaccaggcaaggaca

SEQ ID NO: 8306 - RNA, 108 nt, Homo sapiens
cagcaacacgagaccaacgcgccaccgaccggcaccagcaagcaagaaagagcgccggcccaggcggaggcaggagcaaccggccccacaaccaagcccaaggacccc

SEQ ID NO: 8307 - RNA, 86 nt, Homo sapiens
cccaggagcagaagccccgccaaaacggaacgagcgggccgaacaggcccacagggcagaggaaaccggaggcgcagcaggaacgg

SEQ ID NO: 8308 - RNA, 116 nt, Homo sapiens
gaggagggagcgaggaaccaccggacgaagacagcaaggagacccgccaaagccgccgggcaaggccagcaagggggggaaacgccagaaggaccgccagcccccacaacacgcac

SEQ ID NO: 8309 - RNA, 63 nt, Homo sapiens
cgcagccgcagcccacgggggaccaagaaaggcccagggaccaaagcccggacaaggcccgag

SEQ ID NO: 8310 - RNA, 79 nt, Homo sapiens
gaaagagcaacaaacgcgagacacagccagcgcgccagaaaccggggaacgagaagagaaagaagaggaaaaagcaagg

SEQ ID NO: 8311 - RNA, 79 nt, Homo sapiens
cacaaccagaagccagggagaaggaaggaggaggagaacacagggagggcccaaagacaaaacagaggaaaggaaggaa

SEQ ID NO: 8312 - RNA, 85 nt, Homo sapiens
aaagaaaggcggcgaagaagagccgagagggaggaaagggaggcaagaaggaagcagaggacaccccaaggcaccggcgggcgac

SEQ ID NO: 8313 - RNA, 73 nt, Homo sapiens
ccaggacaacgaaaggccagcaccagggcaagcagaagaggaacagaagaagcagagcagagacggagcagca

SEQ ID NO: 8314 - RNA, 63 nt, Homo sapiens
caccccagcccacacgaaaggaccgccccaggacaagaacccaagaaacaggaaaaaacccaa

SEQ ID NO: 8315 - RNA, 76 nt, Homo sapiens
gagagaccagaggaggaagagcaagcgggggaccgaacaaggcaaaagggacacccaaaggacggcgggaagaggg

SEQ ID NO: 8316 - RNA, 78 nt, Homo sapiens
gaccgcaggagggagaccacagcaagacccaggaccccggaagccagaaaggaaacagcaccaccgccgcccggagca

SEQ ID NO: 8317 - RNA, 78 nt, Homo sapiens
ggccgagaaggcagaggcgccgaacagcaacagggggcaaagccgccaacagggcagcagagcgcggcggaagggggg

SEQ ID NO: 8318 - RNA, 73 nt, Homo sapiens
caccaaggaggggacaaggaggaacaaacccaaggcgcccggaagcccagaaacccaaaacacgacccaacca

SEQ ID NO: 8319 - RNA, 71 nt, Homo sapiens
gaaggaccaagaaccagacacggccacacagaccgaacacaaacagccaacaggacaaaggacaccgaaag

SEQ ID NO: 8320 - RNA, 77 nt, Homo sapiens
gacaacggcacagcggagaaccggagcaccgacccgacaagcgggcgaaaggccacagacggcaaaaaacacacgcc

SEQ ID NO: 8321 - RNA, 63 nt, Homo sapiens
ccacaaggagggcaaggcccaagaacaaacggacccaggacaaaacgacaccagccaaaccag

SEQ ID NO: 8322 - RNA, 39 nt, Homo sapiens
ccccgcagacccgcgacgcacaggagcgagagacccacc

SEQ ID NO: 8323 - RNA, 80 nt, Homo sapiens
gaccacgacccaggcccagacgaccagcccaaggaacacaccaaaaacggaacagcaacccgccaggaccacgcagaccc

SEQ ID NO: 8324 - RNA, 79 nt, Homo sapiens
caaggagcgggccgcccgcgcgaggagccccgcgagacaggccgaccgggaaagcccaggcagaagccccagaggagcc

SEQ ID NO: 8325 - RNA, 75 nt, Homo sapiens
cgcggccccagaaacagacagccgccaagaggccacggaggccagccccaacacccggagaaggaagccaacacc

SEQ ID NO: 8326 - RNA, 76 nt, Homo sapiens
acccaagccccgaaccccaccgcacccgagccgcccggccaccccgcacgcggaagcggccggggggggcacagag

SEQ ID NO: 8327 - RNA, 80 nt, Homo sapiens
agaccgcaccaggagacaagcaccggggggaagaagaagggaacaagcggagggacgcacgagaacgaggagcgggcacc

SEQ ID NO: 8328 - RNA, 81 nt, Homo sapiens
aggggaccaaagagcccacccagcgagccagcccagcgccgcacccgacagagacgacgggagaggagggggcaggaggaa

SEQ ID NO: 8329 - RNA, 71 nt, Homo sapiens
ccaaaagagcagggaagacccccggcggccaagacacagcgaaaaacccagcacagcccagccagccgaac

SEQ ID NO: 8330 - RNA, 106 nt, Homo sapiens
gccaccagggggagaccgaagagcgcaaaaaccgaaaccgcccacggaaggccggcccacagcccaaaaagaaacaggaccgaaagccagagcgaagccaaagccg

SEQ ID NO: 8331 - RNA, 63 nt, Homo sapiens
agaaaagaccccaaaccccgcgcaaggcagagaaacggaaagaaaccaaaaacaggcgggaga

SEQ ID NO: 8332 - RNA, 57 nt, Homo sapiens
aggcgccaaacgggcagggccaggaaacaagacgaagccgaagaaaggaaggggcac

SEQ ID NO: 8333 - RNA, 58 nt, Homo sapiens
cggagccaccggcaccacgccggcagcgagcaccacaagacgcaagagacccccaccc

SEQ ID NO: 8334 - RNA, 74 nt, Homo sapiens
cggggggcacgcagcgaagccacagaccccagaaacgggcaagcgcgcaaacccagaagaccgacagcccccag

SEQ ID NO: 8335 - RNA, 74 nt, Homo sapiens
ggaaccaagccccagccggagaaggagcccacaacaaccacagagcagagggaaaaaacgcaagaagagcagag

SEQ ID NO: 8336 - RNA, 73 nt, Homo sapiens
gcgggcgagccaacgacgaccacgacgccaccaggaaccggggagggacagcgaagcggccgaccgccagccg

SEQ ID NO: 8337 - RNA, 86 nt, Homo sapiens
cagaaaagagcgggccaaaggaccaagggcacgagccaaggagcacaacgggcagggacaggagccgacacccgcacgccaggacc

SEQ ID NO: 8338 - RNA, 79 nt, Homo sapiens
cagcggcagcggaagaggggcgagaggaacgccccccgggcggcggggagggagccacaaaaagccaggagaaagacca

SEQ ID NO: 8339 - RNA, 87 nt, Homo sapiens
gccagccgcaccagccgcccaagccgcacagccgcggcggcagcagcaggagagcagcgccgcccaagagagagaagagaggcgcga

SEQ ID NO: 8340 - RNA, 78 nt, Homo sapiens
gccacgcagacggaaacaaggcaacagaaagagcaacagcagggcaacaggaagaaccccaccagggccccgcggggc

SEQ ID NO: 8341 - RNA, 48 nt, Homo sapiens
aggagggcaaggagcgagcagaaaaccaaggagcaggccccgcgccac

SEQ ID NO: 8342 - RNA, 73 nt, Homo sapiens
gaccccacccccacccgagcagccagagcggaccggggcagaccaaacggcaagggacccacgggccgcccgc

SEQ ID NO: 8343 - RNA, 59 nt, Homo sapiens
ggaaaaggcaaccaaagaccaagagaggagccagggcaccacacaccacaaaccgaggg

SEQ ID NO: 8344 - RNA, 65 nt, Homo sapiens
ccgcagagacacagcgcagaggaaagaaggccgagaaagaacaccacaagaagagggaacagaag

SEQ ID NO: 8345 - RNA, 83 nt, Homo sapiens
acaccaagaacaggcccccggcgggcacaggcaaaggcacgacccagaaagccaaggggcacaacagcaggacgcccagaaca

SEQ ID NO: 8346 - RNA, 74 nt, Homo sapiens
gcggacagcccccgcccaggagaaagccagggggaaaccgaggcccgcaggcagcgccccccggccaagggaag

SEQ ID NO: 8347 - RNA, 47 nt, Homo sapiens
gccccgaagagaaacacacggacaacaaacgaccgggagaccagaca

SEQ ID NO: 8348 - RNA, 70 nt, Homo sapiens
ggacgggaggggaggcaaagggaggaggaggaccggagagagacacagcaggcgaaccacgacagcagag

SEQ ID NO: 8349 - RNA, 64 nt, Homo sapiens
acacccagcggccaagaggcccccccccgcaggagaaggaaggccgcggaccccccccccccca

SEQ ID NO: 8350 - RNA, 34 nt, Homo sapiens
ccgagggacaacgagacaacccccagccacaacg

SEQ ID NO: 8351 - RNA, 61 nt, Homo sapiens
ggacgccgcaggagggccaagagggggagccagccaccgagacgccgacagcccgacgggg

SEQ ID NO: 8352 - RNA, 79 nt, Homo sapiens
acagagcagcagcagcagagagaaacagcaggacaagcacacaaaaccaaaaaagacccacagagaacaccaaagccac

SEQ ID NO: 8353 - RNA, 59 nt, Homo sapiens
cacacagggccgccaccaacagagaagacagagcaccaacgaggacccgacaaacggac

SEQ ID NO: 8354 - RNA, 83 nt, Homo sapiens
aaccggccacgcacccccgaagccgggccggggggccccgcgggcagaagcgcccacgcagagagccaacagaacgggagggc

SEQ ID NO: 8355 - RNA, 53 nt, Homo sapiens
gccgaggcgccgcacggggccgaggagaaaaccggaagagaaaggccgggaag

SEQ ID NO: 8356 - RNA, 68 nt, Homo sapiens
ggaggaagcagggggagaagaacgcgcaggggcggacagaaggagaagaacaggagcagacacacagg

SEQ ID NO: 8357 - RNA, 75 nt, Homo sapiens
cccaacccggcaccccacagcccagggaaggcaccaaaagggggggcaggaaaggaaaaggaagggaaaacaaga

SEQ ID NO: 8358 - RNA, 78 nt, Homo sapiens
aagccgcgagaaaccagagcgcacacaaagaacgaggggaagggggaacggagaagagaagaaggaagggccagagcg

SEQ ID NO: 8359 - RNA, 62 nt, Homo sapiens
caagacccaaacaaaaagacacgaagaggaggaagcccaggggagacagggggacagagggc

SEQ ID NO: 8360 - RNA, 69 nt, Homo sapiens
gcccagaacgccgccaccaaggaagaagagcgccaaaagacaggaccaagagaagggccacgccgcccc

SEQ ID NO: 8361 - RNA, 72 nt, Homo sapiens
ccaaccccaagaggccaccaggcggcccggacagggccaaaacagaagaggcaaagcccagccacagcagca

SEQ ID NO: 8362 - RNA, 81 nt, Homo sapiens
acgccaagcaaaccgggaaaggagaggacccggagccggcacaggaaagagaaaagcaaagaggggacagcagagagaaga

SEQ ID NO: 8363 - RNA, 76 nt, Homo sapiens
gaccggcggcgcggaggagcgaggcagcgacaggacgggaacggacaacggcaagcggagaagagcaaggccgaac

SEQ ID NO: 8364 - RNA, 49 nt, Homo sapiens
agaaccgcagagaaccagcgcacaaaagacgaaaggcaaagaagaggaa

SEQ ID NO: 8365 - RNA, 58 nt, Homo sapiens
aaagcgagagagggaagcgcccggccgcgaccaggccgcgggaagcgcggacgcccca

SEQ ID NO: 8366 - RNA, 78 nt, Homo sapiens
gaaccgaacccgcaggaccaagaagccacgaaacgaagaacagggagaagcggagagaggagaagagaagaaaaggca

SEQ ID NO: 8367 - RNA, 83 nt, Homo sapiens
cgcgaacgagcgacggcggaacccggggccgggacgcagcccggcggcagcagaaggaccacgggaggcagaccccgacgaca

SEQ ID NO: 8368 - RNA, 77 nt, Homo sapiens
ggccaaagaccacggaccaagggccgcaaacaacccgggaaccccacagaccacggagagcgaacaaagcaaggaag

SEQ ID NO: 8369 - RNA, 70 nt, Homo sapiens
accgacacaacccccggcggagaagagagcggaaagagcaacaggacaagaacccaaacaaaggacacgc

SEQ ID NO: 8370 - RNA, 70 nt, Homo sapiens
cgggcccggcagccccgacgcagccgggaagggccagaaacacagggacaagcacggagggcacccaaca

SEQ ID NO: 8371 - RNA, 98 nt, Homo sapiens
gggaaagcaaaggaagcggagaaccacaaacggaccaagaaaggcccagggaccaaagcccggacaaggcccgagcaccaggaccgcagaaggcccca

SEQ ID NO: 8372 - RNA, 76 nt, Homo sapiens
agcgcgggcacgccagacacggcacagcagacaacaagcggaggagcgggaaggggccaccgcaggccgcgcgcgc

SEQ ID NO: 8373 - RNA, 82 nt, Homo sapiens
gggacccggacaaccagaggcagccagcagggggagaacagccaggccgcagacagcacccaccgcccagcaggcgaccgag

SEQ ID NO: 8374 - RNA, 77 nt, Homo sapiens
gaggagaggcaaaaagaagggacacaggaggaagaggacaaaaagggacagcggaggagaaacaccgggcccgggcc

SEQ ID NO: 8375 - RNA, 81 nt, Homo sapiens
aaaacggaaacacgacagaagcagggcgaaccagagaaaacggcaaggaagccccaaagggagaagaaagaacaaagacaa

SEQ ID NO: 8376 - RNA, 81 nt, Homo sapiens
caaccggaacaacgacacagaagagacgcaggccgggggcagcgccacaacagaaaacgaggaaagagaaagaaaagaagg

SEQ ID NO: 8377 - RNA, 69 nt, Homo sapiens
aagaggaaaagagaagaggaagaaaaaaggagaggacagaaagcgcaaaggggccaaccaggaggggcc

SEQ ID NO: 8378 - RNA, 74 nt, Homo sapiens
caccaggcgagggcgaccagcaacaacgagagcgaaacagcaagagaacaaaggcaaagaaaaaaggagggaga

SEQ ID NO: 8379 - RNA, 73 nt, Homo sapiens
cccgcgcagaaccccagagaagaagaccgaaagcaccgcggcgcgccggaaaggccagaggaagcaccaaccg

SEQ ID NO: 8380 - RNA, 61 nt, Homo sapiens
cggaggggcgaaaaggggaaaaggaccaagagggacccgcgccgaagcgacccccgggcag

SEQ ID NO: 8381 - RNA, 68 nt, Homo sapiens
gggcgggcagggcgcagaaaacagcggaaacagaacggcggcaaacaaagagagaggggaagccaggg

SEQ ID NO: 8382 - RNA, 78 nt, Homo sapiens
gagaagcaagaaggcccggacacagcaaaccgggccacagagaacaggagagggaaggcaaaacaacccgcagggcac

SEQ ID NO: 8383 - RNA, 76 nt, Homo sapiens
gccacccaacagacaagaaggcgaagagagcaagagagagaggcagccaagcgcgagcccagcagaccgcgcaggc

SEQ ID NO: 8384 - RNA, 81 nt, Homo sapiens
aagcccgcggcgcccgccggaccagacgcggcgggcgcagccacgacgggccgagccgccacccagccagccggaccacgg

SEQ ID NO: 8385 - RNA, 76 nt, Homo sapiens
gcagagaccggccagcgccagcaggaggagcagcacccccccaccgcccccggcgcccgcaccccgggccccgcgg

SEQ ID NO: 8386 - RNA, 83 nt, Homo sapiens
cacaggccccggcccagagcaaaagcagaccggaaaacccaccggcaagaccacacccgaggggagcccaggacaccacgaaa

SEQ ID NO: 8387 - RNA, 64 nt, Homo sapiens
gagcgacaacgggacgggaaacgaaggaccaacgaccgcgaaacagacggcagcaggagagaag

SEQ ID NO: 8388 - RNA, 71 nt, Homo sapiens
ggggcgcgcgagccaaggccacgcagccgggagagggcccgccccaccgggggccaccccagggaggagaa

SEQ ID NO: 8389 - RNA, 74 nt, Homo sapiens
aaccagaagggaagcgggcaaggcggaaagcaccccaaaagcccagacggaaagaaggagaggaaagagaaaga

SEQ ID NO: 8390 - RNA, 76 nt, Homo sapiens
caaacacccaagcaacggagccacaaacggccaacagcgggagccgacaagaaggcggagccgggaaggaaaagga

SEQ ID NO: 8391 - RNA, 78 nt, Homo sapiens
cgccgccaccgccagcagggggaggaccacgacggacagggcagcggggaagaagaaaaggaaccgaggccccccggc

SEQ ID NO: 8392 - RNA, 86 nt, Homo sapiens
ggcaggcccggcgccgccacgccgcagccaggagaggcgggccagcggagccgggacggagggcacgaagaacacaaagcaaaaag

SEQ ID NO: 8393 - RNA, 43 nt, Homo sapiens
caaaaaaccccagagcacgggcacagcggcccggaccccacaa

SEQ ID NO: 8394 - RNA, 54 nt, Homo sapiens
cagagcaagaggagccaagcagcagaagagcaaggagagggaaggggaacagga

SEQ ID NO: 8395 - RNA, 73 nt, Homo sapiens
gaaaaccggagaccagggcaacccagacgcaagcggcagccacacccggagaaggagccgcccagggacgaag

SEQ ID NO: 8396 - RNA, 76 nt, Homo sapiens
ccgcgccgcgcagggaggcgccgaaggggagaggcggccggaaggaaaagagaggaacgccccaaaggaggagcaa

SEQ ID NO: 8397 - RNA, 72 nt, Homo sapiens
agcgccaaggaaaaggacgagaacgccgcgacagaaaacccacccagccaacaaacacccgaaggaccacac

SEQ ID NO: 8398 - RNA, 80 nt, Homo sapiens
accggagaccaacagcccccgcgccccaagacaggagagcagagagaaaaggaagacggaagaaaggccgggaagaaaga

SEQ ID NO: 8399 - RNA, 74 nt, Homo sapiens
ggacccgggccgcgacagacccggggcagcccccccggaaccgggcacaggcccaggcgggggagcgggaggag

SEQ ID NO: 8400 - RNA, 80 nt, Homo sapiens
gccgacgggagcagaggaagccgaggaccaccacagaaggaagaagcagcccagcacgaccaggaaagaggcaagcagaa

SEQ ID NO: 8401 - RNA, 78 nt, Homo sapiens
aagcccacagccggggaggcgagagaaacccagccgaagcaaaaagcaaagcagcccgaggaggcacgcaaaacaaca

SEQ ID NO: 8402 - RNA, 79 nt, Homo sapiens
gggccgcagggggacaggaggaaagggccgcccgcccgcccgggggaccgcaggcaccaaccagcggacacacggaaaa

SEQ ID NO: 8403 - RNA, 60 nt, Homo sapiens
gagacagagaccaagccaaacccccagcacagccccacacacgggagcaagaacaagcag

SEQ ID NO: 8404 - RNA, 35 nt, Homo sapiens
gacccaggaccccagacagagagaagggggaggac

SEQ ID NO: 8405 - RNA, 68 nt, Homo sapiens
agaaggaagaggggaaaagcggcgggagaggaaggaaaggaaacaaagagcaagcaacagaagaaaag

SEQ ID NO: 8406 - RNA, 79 nt, Homo sapiens
gccacggcgcgccgccgccggggaggcggcccaggagagggcaacagaacggaacgcccacacggaagaccccggaaca

SEQ ID NO: 8407 - RNA, 88 nt, Homo sapiens
aaggggcgggcaaacgccccccgccgcaggcccggcacggaagcgaggcaaacacgagaagagccaaacgagcaagagaagacagaga

SEQ ID NO: 8408 - RNA, 53 nt, Homo sapiens
acaaccggaccgaacgacacggcggaaacgacgcaggagcgggccaaggaaag

SEQ ID NO: 8409 - RNA, 71 nt, Homo sapiens
agccaccagaaggaggcagggaggagaaagagccaagaaaaagaaaggaaagcgccgcaagacaagccgga

SEQ ID NO: 8410 - RNA, 80 nt, Homo sapiens
ggacgccggccgccgcaggaggaacaagaggcagaaacaacagcaagaaagaggcccgaaaaagacaccagcagcagaag

SEQ ID NO: 8411 - RNA, 71 nt, Homo sapiens
aaccgggcaaggaaggaaaagacccaccaaagggaggcaagggaccaagaaaggcccagggaccaaagccc

SEQ ID NO: 8412 - RNA, 72 nt, Homo sapiens
aacagcagaaacgcaccaggccaaagaaagagaagcgcggacgcagacagacccgacaaagacgcacaacgg

SEQ ID NO: 8413 - RNA, 82 nt, Homo sapiens
gaaagacaggcaaaggacggaggcgcagagcagaacgcggcccgggagggaacaaagaggaacaggccaaaccagcagaccg

SEQ ID NO: 8414 - RNA, 74 nt, Homo sapiens
cacccaacggaggccacaaacgcaagacacccgcaggagcaaacagccaagggacaaccaacaacagacacgac

SEQ ID NO: 8415 - RNA, 76 nt, Homo sapiens
cccgcggcgcgcagcccagcagaccaacagcaacggacaggacagaaccagagcccaaggaagcaaagccaaccag

SEQ ID NO: 8416 - RNA, 58 nt, Homo sapiens
ccacccaaagaagccggggcaacacgggcagcggggaagccccaaacaggcaacagca

SEQ ID NO: 8417 - RNA, 70 nt, Homo sapiens
cagggggaacgaggcgccgaccccacaggaagggaagcacagcgacccgagccgggggggcgagcccgcc

SEQ ID NO: 8418 - RNA, 82 nt, Homo sapiens
caaaggcaagagaacagcagcgccgcccgccgacagccaggcccgggagaagccgcagacccaggagagaacaccgaccgca

SEQ ID NO: 8419 - RNA, 69 nt, Homo sapiens
cgggcccgagggaggagacagcccggcgaagcaagacagcagacaggaacaagcagaaagcacgaacaa

SEQ ID NO: 8420 - RNA, 81 nt, Homo sapiens
gaagagcccgaacaaacaaacacccagaaacaagaggccgaaacagacagcagcggcaaccgagaaggaggggccccacac

SEQ ID NO: 8421 - RNA, 55 nt, Homo sapiens
gcaacgaacaagaacaccgccgggcaaagaaacaaggacgccagagaacggacga

SEQ ID NO: 8422 - RNA, 81 nt, Homo sapiens
agaaggcaggccaaaccaccgaccagcgaagaagcacgagggaaccagaaggagcgcagaagagacaagcccggaagcagc

SEQ ID NO: 8423 - RNA, 98 nt, Homo sapiens
cgaaggcgagccaagcgaagaggagcgccagaggggaggaaacacaagaagcccccccaccaagcaaccaagcgggaacgaacgcaagaagaagaaaa

SEQ ID NO: 8424 - RNA, 77 nt, Homo sapiens
ccacacaggcaagacagcaaaagcaccaagagacagccaagacgcagaccggaaaaacgaaaaacagcagaaacgga

SEQ ID NO: 8425 - RNA, 87 nt, Homo sapiens
ggagagcggagccccgcgcagcgcgacgcgcgaccagaccggcccccccgagaagcgggaaggcagagcagcacgcgaagagacaga

SEQ ID NO: 8426 - RNA, 86 nt, Homo sapiens
aggccgccccgggagcggacaagagcaacagccccccaccaggccggcggcccaaaggagaccaggcccaggaaggaacgaggaag

SEQ ID NO: 8427 - RNA, 81 nt, Homo sapiens
cggcccccgggcccagcacggggacgccaacgccaggccggagccagcagaaccccgccggagacaccacggcaaggccaa

SEQ ID NO: 8428 - RNA, 72 nt, Homo sapiens
gaccacggagggagcggaaaccgacgcagacggaccgaagaggggcgccggagaggagacgagccacgagag

SEQ ID NO: 8429 - RNA, 75 nt, Homo sapiens
gggcccagaaccggggggagacacagccagccaagcacgccccgaggcgcaccccccgcgccggccccgccagca

SEQ ID NO: 8430 - RNA, 68 nt, Homo sapiens
aggagaacacaagagcccacaagacgggaagaccacggcagcaagcacaagaggagagcaagagcaaa

SEQ ID NO: 8431 - RNA, 82 nt, Homo sapiens
ggggggggccccacgcgaaagagaggacgcaccccggccggggccgggcaggggggaggccacggccaggccgagccaccag

SEQ ID NO: 8432 - RNA, 65 nt, Homo sapiens
cacacgcccaagggcagcaagaaagggaagggcaggaagagcggagagcagccccaaaaccagaa

SEQ ID NO: 8433 - RNA, 74 nt, Homo sapiens
gggcagcgcccagccccggccacaggaaaaggccgagacaggcaaccagacggagggaacaaacagggacaagg

SEQ ID NO: 8434 - RNA, 76 nt, Homo sapiens
aagacgcacgcaagaggaaacaggaacacgaaagaggaaaaacgcacaagaaaccgaagccaaggaggagaggagg

SEQ ID NO: 8435 - RNA, 70 nt, Homo sapiens
gaggggacagaaaggaaagcacagcagacagaaccacacacggcagacccgaggaagcagaacgagccag

SEQ ID NO: 8436 - RNA, 89 nt, Homo sapiens
ccccagcaaacacgacccgcagcacaccgccacgagaccaccaagcaggcccggccaacgcaacagggagcccacgcaagaggggccgg

SEQ ID NO: 8437 - RNA, 87 nt, Homo sapiens
agaggcaccgcaagcgggacagggaagaacgaggggagaagccccccgacagcagcggaaggaaagcagaagcagaagaggaggagc

SEQ ID NO: 8438 - RNA, 75 nt, Homo sapiens
aaccagaccccaaagaagccacagaacaggggaggcagccagcgacaaccaaagggaaagaccagcagaagaaca

SEQ ID NO: 8439 - RNA, 73 nt, Homo sapiens
agcaggggccgacggccgagaagcccagggagacaacagccacacaaagcagcaacaggagcagggaagaaaa

SEQ ID NO: 8440 - RNA, 78 nt, Homo sapiens
gcaggagcagaggaaaaaacgaccaagccagagaacagcccccacgcagcccagaaggagggaaacaagacaaaggaa

SEQ ID NO: 8441 - RNA, 73 nt, Homo sapiens
ccaaagcagcggcgccggccgccccaccggcggaacccagcaaggaaacagaacgacagcccgcaccgacgcc

SEQ ID NO: 8442 - RNA, 71 nt, Homo sapiens
ccccggagaaaaggccaagaaggcaggcccaggggccccgggcgggggcaacagaaggggacgacggccac

SEQ ID NO: 8443 - RNA, 78 nt, Homo sapiens
gaaccacccgcacacagccacgagcaaaggacagaaagacagagcaaccacggcaggcaagcgaaagaaaaaaagaca

SEQ ID NO: 8444 - RNA, 82 nt, Homo sapiens
ccccccagccagcaaccgccacccaagccgcggagccaaaggagcaccgaaggagcagggcacacaccccaggagggggagg

SEQ ID NO: 8445 - RNA, 55 nt, Homo sapiens
cccgaaacaggagccgaggcaaggcaccgaacagaccgggagacgggagcaagag

SEQ ID NO: 8446 - RNA, 82 nt, Homo sapiens
gacaccgcggagcaaggaaaaaaacccgaccggaagagacagagagagccaaacccccaggagacagacccagcacggaccc

SEQ ID NO: 8447 - RNA, 86 nt, Homo sapiens
agcaaagaggaaagcagacccaggccagaaaccgggagaagccggccaggcaggcacaccccaccacaacgccacacgaccagcca

SEQ ID NO: 8448 - RNA, 82 nt, Homo sapiens
gacaaagagacagaggaagagaacaggaacacacacagccaagagaagaggcggaccggaagcgagcaggagcagagcggaa

SEQ ID NO: 8449 - RNA, 59 nt, Homo sapiens
agaccgcagacaggaacacgcgccaggcccagagggaggcacaacagcgaggacaccac

SEQ ID NO: 8450 - RNA, 80 nt, Homo sapiens
aagcaccaaacgcgccacaacgccgacgcaccacacgacggcgcagggcagggggagaggcaccagcaacagaccaaccg

SEQ ID NO: 8451 - RNA, 78 nt, Homo sapiens
cgagaagccaggaggagaagcggcccgaaaccacacagcacgaggaccgcgggcacgagcgaccagcaaggcgggcgg

SEQ ID NO: 8452 - RNA, 71 nt, Homo sapiens
ccgaaggaagagccaccagcgacaaacaggaaaggcaaagggacagcaagagcagcggacgacaagaaggc

SEQ ID NO: 8453 - RNA, 75 nt, Homo sapiens
cgcccaggcggcacccacgaaacaacagagaccaccagggggaaggcgcagcccagcccgaaagcagaacgacgc

SEQ ID NO: 8454 - RNA, 74 nt, Homo sapiens
gggcgccgcccaagagaggagccccggccgcccggacgagcgagaccgcaccagagacgaagggaacgcacggg

SEQ ID NO: 8455 - RNA, 78 nt, Homo sapiens
gccaagagccggcagcagacgagcgcagaaccgcagcggagaggaaccaggccgcgcaagccgagacgacaaggccac

SEQ ID NO: 8456 - RNA, 57 nt, Homo sapiens
gaagcccgaagaaaacagcgggaagagacagccaagaaacccgcgccagagagccaa

SEQ ID NO: 8457 - RNA, 67 nt, Homo sapiens
gggagggcagcccagggacccgaagggggaaaagaacaccaacggaggaagcagaaccaaccaccaa

SEQ ID NO: 8458 - RNA, 71 nt, Homo sapiens
acagcccaagaaaaagaaggaagccaaccgcgacagaggcaacggaagaacaggagacaaaggcccacgca

SEQ ID NO: 8459 - RNA, 53 nt, Homo sapiens
ccaccaacaggaggaaacaaccaggacacgcaggacagcccagacccggaaca

SEQ ID NO: 8460 - RNA, 78 nt, Homo sapiens
gaagaagaacgacccgcccggggcagcagagcagcccgacggccaggaggcgaagagacgaggaagcccaggagcccg

SEQ ID NO: 8461 - RNA, 74 nt, Homo sapiens
gaggcgaggcaaacggggggcgcggagggaccagcgagcgggaggcaagagagcagaacaccggaagaaggcgg

SEQ ID NO: 8462 - RNA, 38 nt, Homo sapiens
ccagcggcccagccggggaagcagaaggcacgggggac

SEQ ID NO: 8463 - RNA, 73 nt, Homo sapiens
ggcccagcccgagccgaaagcaggaacagacacgggcggcccacacgcaagccagggcacagggccgccgccc

SEQ ID NO: 8464 - RNA, 73 nt, Homo sapiens
aggagggacccggaggacacccccagacaggcacgccaacaaccgacacacgggccacgaagaacacaccgcg

SEQ ID NO: 8465 - RNA, 64 nt, Homo sapiens
caccgcaggcagacaaaagggccaaagaagggagaccccgcacagagcaggcaggccgggcagg

SEQ ID NO: 8466 - RNA, 86 nt, Homo sapiens
cgggggcaggggggacggcggcagagccgaacgcgagggcggcgcccggggacggagcgcgcgcaaaggacgacgcgcacgcccgc

SEQ ID NO: 8467 - RNA, 70 nt, Homo sapiens
gcggagagaagcagcggacagcagagcgaagagggagaacagcagagccagacagggcggaaacgccgac

SEQ ID NO: 8468 - RNA, 64 nt, Homo sapiens
cacaaccaccagaagaacgacagagaggagggagaacaagcaacggcggcccagagagcaagag

SEQ ID NO: 8469 - RNA, 79 nt, Homo sapiens
gacagaggagcaaggccggaaccagccgaagacagaccgccaaggggcagaaagagaagacagaaaggagggaggagcg

SEQ ID NO: 8470 - RNA, 42 nt, Homo sapiens
gccaccgcaacccgcccccagggcgggagccgagacgcgcca

SEQ ID NO: 8471 - RNA, 76 nt, Homo sapiens
ccgcccagcgcccccaggccgccccggggccacgcgcaagccccggggcagagacacaggacacccacccgccggg

SEQ ID NO: 8472 - RNA, 39 nt, Homo sapiens
ggccgacgcaaacagaagagccgaggcggacagccaaga

SEQ ID NO: 8473 - RNA, 79 nt, Homo sapiens
caggagaaggagaggaaagaaggcaagcgcaagcgcccaagaacaaaccaccgggagaaccaccaaaagaaacggccag

SEQ ID NO: 8474 - RNA, 87 nt, Homo sapiens
cgggcagccccgggccaggccgcggccggggcaggagcgcaggacacagaagaacgcagcccggggagcagcaccccacaggcacgc

SEQ ID NO: 8475 - RNA, 78 nt, Homo sapiens
caggcgagggaaaagagcccacgaagggcgacggacagagcgcacacacaaaggggagccaggaagaagacaaaacag

SEQ ID NO: 8476 - RNA, 78 nt, Homo sapiens
cagaagaggacaagcagacagcaccaacggagaagaaaaccacgcaggagaggggacaaagaaagaagaaaggaaaga

SEQ ID NO: 8477 - RNA, 72 nt, Homo sapiens
gggaccggaggacgaacggggccgcgaggaggccggaggccgccgacgaccgccgcaaaacgccacaaaccc

SEQ ID NO: 8478 - RNA, 61 nt, Homo sapiens
aagcagggccgacacaagcccgcaggaaaaccgccagaacagcccaagcccaagagagccc

SEQ ID NO: 8479 - RNA, 70 nt, Homo sapiens
cgagaaggccacaaccaagagaaacaaccacaagcagaccggaagaccgacggaagaccacaccccgagg

SEQ ID NO: 8480 - RNA, 78 nt, Homo sapiens
cagccccaggaggaagggaggcgcgggagaagagcagaaaccaaaagccaagccagaaggcaaaccgacaccagcgac

SEQ ID NO: 8481 - RNA, 69 nt, Homo sapiens
ggggcgcaggaagggccccaggacagcagaccacagcccggcaggcccaaaaacccaaagggacagaag

SEQ ID NO: 8482 - RNA, 74 nt, Homo sapiens
cgcacaagggcagagggccagagcccagaaaagaggcaccaagcccgccggaaaaagacaggccagagcagcca

SEQ ID NO: 8483 - RNA, 70 nt, Homo sapiens
acgcacacagaaaggcccgaacggacggacaaccagggccagggcaaaaggccaaaacggaagaaccccc

SEQ ID NO: 8484 - RNA, 70 nt, Homo sapiens
aagaccagaggaagcgacagagagaggcaggcagacggcagaaaacagacgaagcaacagcgaacaaaaa

SEQ ID NO: 8485 - RNA, 74 nt, Homo sapiens
agaaggagaagcaaccacaagccggagccgggaaaccgaagaaggcagagaaggcaaacaggaggcgcgggaca

SEQ ID NO: 8486 - RNA, 76 nt, Homo sapiens
ccgggccaaaccacccccacccagccggagagagaaggcccaaaagccaggggccgacggacaagaggaagaccag

SEQ ID NO: 8487 - RNA, 69 nt, Homo sapiens
aacgggagaccaccgaaagcggacccgcgaccggcagcagagccgcccgcaccaccaggcacaccaagg

SEQ ID NO: 8488 - RNA, 76 nt, Homo sapiens
gcacagacagcggacaagagaagaaagagaaaagacagaaggaggagcaaaaaggacagagcacagagccagcaca

SEQ ID NO: 8489 - RNA, 73 nt, Homo sapiens
cgccccagggcaccaaaccaaaaccgaaacagggggcaagagccaaaacggaaagagcgaaggagggagaccg

SEQ ID NO: 8490 - RNA, 53 nt, Homo sapiens
cgggaaacagccaggagagccagagagccaacagaaagagacggagccagacc

SEQ ID NO: 8491 - RNA, 88 nt, Homo sapiens
aagaacgcagccgccggccgaccaccggaacggacagcccccccagcggggccggagcacagcccacggagaaggacgaaagaagcca

SEQ ID NO: 8492 - RNA, 64 nt, Homo sapiens
caggcccaggccgcggccccccgcgcgcccgggaacgagaccagaggagggagaaaacacagca

SEQ ID NO: 8493 - RNA, 72 nt, Homo sapiens
cagaagaagacaacccagggccgcagaggaaaggacccaaaccaaacgcgaaacgaaaaaggcagaagaacg

SEQ ID NO: 8494 - RNA, 81 nt, Homo sapiens
ccacagcgcgcggcccccacaccacacagagagcgagagagagagcggagacaaggccacagcaggccacggcgggggcag

SEQ ID NO: 8495 - RNA, 88 nt, Homo sapiens
acagccacgcagacggaaacaaggcaacagaaagagcaacagcagggcaacagccgcacacgacggggagggaagagaccacacagga

SEQ ID NO: 8496 - RNA, 83 nt, Homo sapiens
agcccacagagagccaggccaaggggcgggagcccgagccccacaccgccgggcagcagggcggacgcgacagcgccggacca

SEQ ID NO: 8497 - RNA, 75 nt, Homo sapiens
ccgaccccccggcgccgcgccggcggcgcacggaccgccggcaccggggagacaacgggcaggcagcgagaccgc

SEQ ID NO: 8498 - RNA, 41 nt, Homo sapiens
gcgagagcccacaggcccccacagaccaacagagaaaagcc

SEQ ID NO: 8499 - RNA, 75 nt, Homo sapiens
ggcaccaaacgcggcaacgcccccgggacagcacgccccggaccccaaggagaaaagaagcagcccacgaacccc

SEQ ID NO: 8500 - RNA, 74 nt, Homo sapiens
caccaccacagccaagggcagagagggggcccagaccacgacaaaacacacgaaccccaaaacaggcacagacg

SEQ ID NO: 8501 - RNA, 57 nt, Homo sapiens
ccgaggagaaccagcggagaggaaccggcccagaggagagaagcaggcccagccccc

SEQ ID NO: 8502 - RNA, 78 nt, Homo sapiens
cgccccggggcgggcgcagcaagccgcaccggagaagcgacccgggcacacgcgcaccaggggggccaggaggagccc

SEQ ID NO: 8503 - RNA, 71 nt, Homo sapiens
gagcgcggagcgggcggagcggcgagagcccccacgggcaaagagcacacgccggagccgggaagaaaacg

SEQ ID NO: 8504 - RNA, 71 nt, Homo sapiens
ggggcacgccaccccccgcacaggggcgggaccaagggaagggagcccaaaacaggagcgcagcaagcacc

SEQ ID NO: 8505 - RNA, 71 nt, Homo sapiens
agacaaagaaagcgaaaagccccagggccaccagcacaggcagcaagagcggaacacagaaagcagggagc

SEQ ID NO: 8506 - RNA, 70 nt, Homo sapiens
aacaccgcccccagcacagcaagccccgggacagggccgggaggcgccccacacggagccaggaggagga

SEQ ID NO: 8507 - RNA, 71 nt, Homo sapiens
cagccacaacgaaggaagcaacccccaggaccgggcagacggcggggcaaggaagacccaaaaggcagccc

SEQ ID NO: 8508 - RNA, 70 nt, Homo sapiens
aagaaggaaaacaagggagcaccaaaagaaggccgcaaacagggcgacagcaagaaggagccagcacaga

SEQ ID NO: 8509 - RNA, 84 nt, Homo sapiens
agaggggagacacgccaaagccccaagaaaaagcggggaaaacaaaaaaaagaaggagggaagagggggccaggaccaggcccc

SEQ ID NO: 8510 - RNA, 79 nt, Homo sapiens
gcccacaggcaagacaagagcacacagggcacgaggcagaaccacagagaggcacagccgccggcccccccggcccgag

SEQ ID NO: 8511 - RNA, 43 nt, Homo sapiens
acaggcgcccacaccacgcccagaacgcaacaaaagacacaga

SEQ ID NO: 8512 - RNA, 77 nt, Homo sapiens
aagaaagacaccccgagagcggccgagggaagaaaccagcgcaaggaaagggccagggaaaacacaccaaacaggcc

SEQ ID NO: 8513 - RNA, 74 nt, Homo sapiens
cccccccgcccacgccagaagccggagacccacgcagcaagaacgacccaggggaaggagggcgaaacaaagga

SEQ ID NO: 8514 - RNA, 80 nt, Homo sapiens
cagccggagaagcgagcagcggccagacgcgaggagacccacaagaccggccggagcgcggcgcagcaggcaaggagaac

SEQ ID NO: 8515 - RNA, 82 nt, Homo sapiens
cggaccgacgcaacagacgggcccccgagcgaccccgggccaaggccgggagcggaacagagacaccggaacgccaaggggc

SEQ ID NO: 8516 - RNA, 73 nt, Homo sapiens
aggggcgccaggcccaggcgcggagaaggcgcgacaggcacgagacccgaaacaagccccacgcacaaaaccc

SEQ ID NO: 8517 - RNA, 74 nt, Homo sapiens
gacgcgcgggccgcgagcggggcgacccgaggggaacggcgagggaacccaggaaggagggcgacaaacaccag

SEQ ID NO: 8518 - RNA, 83 nt, Homo sapiens
ggcaacaagacgaccagcagcggaagacacacaccaggcacagaacaaaaccagccaagcagaggagaaaaagacagcacccc

SEQ ID NO: 8519 - RNA, 60 nt, Homo sapiens
agcagcccaagcaggcccaaggagaaagggacccggcagcaaccccaacaaacgccagag

SEQ ID NO: 8520 - RNA, 73 nt, Homo sapiens
ccgacgccacacaccccagaacagggcgaaaagcgaccacccccccggaccgcacccgacgccagaagaccaa

SEQ ID NO: 8521 - RNA, 76 nt, Homo sapiens
cgccagcgacgcgcacaaaacaaacaggcacccgggcccaaaccagacaaagccacagaaaaccagaagcgaagga

SEQ ID NO: 8522 - RNA, 70 nt, Homo sapiens
gcgcaaacgacaccacccgaccggaaagagggcaaccccgcaggaggaagcacaggcccaagaagccccc

SEQ ID NO: 8523 - RNA, 68 nt, Homo sapiens
gaaaggaggaagaagacaccggggacagacagggaccaacaggggaaccaaaggacagcacagaccga

SEQ ID NO: 8524 - RNA, 100 nt, Homo sapiens
gcccgagagccgccgccaacgcgcagggcagcggcccccgcccgcaggaagccaggagggaagcccagaagacgcacaagagagaccgaccaaaccccgg

SEQ ID NO: 8525 - RNA, 71 nt, Homo sapiens
gacagcgggccgggaaaagggcacgaggccggaaccgcccagccccggaagagacccagacgaagagcgca

SEQ ID NO: 8526 - RNA, 72 nt, Homo sapiens
cgggccgaggccgcaggaggagggagaggaggcacccgggaagcggaaaagcagccagaggaaggaaaacgc

SEQ ID NO: 8527 - RNA, 80 nt, Homo sapiens
cgaaggcaggagcagaggaaaaaacgaccaagccagagaacagcccccacgcagcccagaagagcaggacaaagagaaga

SEQ ID NO: 8528 - RNA, 55 nt, Homo sapiens
aacgaagccgggccacaccaaagagcagagccaaacgacaaaggaaagggcgcca

SEQ ID NO: 8529 - RNA, 51 nt, Homo sapiens
ggaacaccagagcgcagagaaggagaacagacagcacgggggaggacaccc

SEQ ID NO: 8530 - RNA, 83 nt, Homo sapiens
gggcggcccaccaacaggaacagggcagacgagcggaggacacccaacccggaaaggggagcaagaagaaagagcagggagga

SEQ ID NO: 8531 - RNA, 80 nt, Homo sapiens
cgggcgcacacaccgccaagaccaggaaaaggacgccccggggcaggcacaccacgcaggaaaaagccagcggggacaag

SEQ ID NO: 8532 - RNA, 63 nt, Homo sapiens
ccacagccaaggcgggagccacggacggggaggacgcacgacgcgcggcacgggaacgcagcc

SEQ ID NO: 8533 - RNA, 62 nt, Homo sapiens
agacccaccaagagggcgggagaaccacgaggagagaagagccaaggcggagcagcccgggg

SEQ ID NO: 8534 - RNA, 60 nt, Homo sapiens
gggcgcaaccaaagcaccagaccccaccagcaacggaagaggaggcgcaaaagggcccgg

SEQ ID NO: 8535 - RNA, 83 nt, Homo sapiens
aagcgacaaaggaagaccaggcaccgaaggacagaagaggacccagccaacgacaagaagaggaagcccaggagggacccagg

SEQ ID NO: 8536 - RNA, 75 nt, Homo sapiens
agggaagagaaagcaaacgagcagggcaagggcggagaacggaaaagcaccaggaagcagagaggaccgcagaag

SEQ ID NO: 8537 - RNA, 64 nt, Homo sapiens
cgcgggggcgggacacaaggacaccaggcagggaccaacgcgggggacgagagaaaagggaagg

SEQ ID NO: 8538 - RNA, 73 nt, Homo sapiens
cggccggaggcgagacaaccagggacaccgaaagcagggagaacaacacccacagcggcaaagcgccgcaacc

SEQ ID NO: 8539 - RNA, 57 nt, Homo sapiens
cagaccaacaagcaacaagacagggcagaccgccagcagcacagcaagccacagaga

SEQ ID NO: 8540 - RNA, 83 nt, Homo sapiens
cacggcagacaagaaagccaaacgaggagaggaagaggagaaagagaaggaaacccacagacccagcaaagaggagacaaaga

SEQ ID NO: 8541 - RNA, 83 nt, Homo sapiens
cggccaggaccggcggaccggccgcccggcccagccaacaccgacgacgcaaacagcagacggaagaccccacggcaaaacca

SEQ ID NO: 8542 - RNA, 77 nt, Homo sapiens
cagccaaggggggaccgggccggccagcgcccagccggagcaagaaaccaggacaaggccggacgaccagagaccca

SEQ ID NO: 8543 - RNA, 75 nt, Homo sapiens
caggcgcgacccaagggaaacccgggacaaaggcaaggacacaagcaagcgaaaagaaaaacaaacccccaagcc

SEQ ID NO: 8544 - RNA, 59 nt, Homo sapiens
ccccaggcgcacaaccaaaccagaccgcagcagagaaccaggagcggcagaccgccgcc

SEQ ID NO: 8545 - RNA, 82 nt, Homo sapiens
ggaaacgaaagggagcgcagacccgaggagaaggaaaggcaaggacgccagagccaccgcaaaaggggacgagcccagggcg

SEQ ID NO: 8546 - RNA, 76 nt, Homo sapiens
gccaccggacaaacggacaccggggcgcgagacagaggacgcgggagaaggagaagaagaaaaagaacaccaaaca

SEQ ID NO: 8547 - RNA, 35 nt, Homo sapiens
ccaagcgggcccccgggaaaccgggcgcagacagc

SEQ ID NO: 8548 - RNA, 71 nt, Homo sapiens
agcaccacagggaaacacaagcagaaacagacaggaccacgcaacaaagccgaccccgcaagaagaaaaag

SEQ ID NO: 8549 - RNA, 76 nt, Homo sapiens
aggaaaagaaaccacgaacacagggacaccagaaacaagaaaggcaaaagaaaagacggcaaccaacacacgcaga

SEQ ID NO: 8550 - RNA, 73 nt, Homo sapiens
gaagagaacccagccgccgaaaagagggggggagcaccagagagaaaaagccaaggaagagaacagccacaaa

SEQ ID NO: 8551 - RNA, 37 nt, Homo sapiens
ccgagcagcgggaacaggggagaagaaccaaggacaa

SEQ ID NO: 8552 - RNA, 95 nt, Homo sapiens
ccggggggcaggacgagcagccgccgggacggccaggaacggggcgggccaagcagagacccgggcccaaagccgaaggcaagggaaggaagacc

SEQ ID NO: 8553 - RNA, 64 nt, Homo sapiens
gcaaggaacaaaaggaaacccaccaagggggaaaagccagccagaacacagaacagaacacacg

SEQ ID NO: 8554 - RNA, 77 nt, Homo sapiens
cgcagggcgggaaaaaaccaagcagcgagcaccagaacaagccgagcaagaacaaaacagcccggacaagcgcacgg

SEQ ID NO: 8555 - RNA, 79 nt, Homo sapiens
cggggcagcgggccggcgccggcgcggagaaagacagcaaagaaaaggagaagaaaggaaaaaaacaaccccgggcacc

SEQ ID NO: 8556 - RNA, 72 nt, Homo sapiens
caggcaccagggaagacccaaagccccccacccaacaagagaaagaggcgcacgcccagaaaaaaccagccg

SEQ ID NO: 8557 - RNA, 71 nt, Homo sapiens
cagagggaagaccccaaggaagagacccagacgaagagcgcacagaaagagggaaaacaaagaaccaaaac

SEQ ID NO: 8558 - RNA, 71 nt, Homo sapiens
aaagaccgggggaggaaagaagggggcgaggcccgagagcccccagacaggggcacgaggaggcaaaacag

SEQ ID NO: 8559 - RNA, 75 nt, Homo sapiens
cgcccgggccggacggcggccccacagaggccgggcgagcccaggggcgagaaccagcgacggagcacgcgacgg

SEQ ID NO: 8560 - RNA, 89 nt, Homo sapiens
aaagccggagaagccaacaggcggaaggccagcaccaaagaagagagccggccagagaacccaaaagcaaacccaagaccgaaagaaac

SEQ ID NO: 8561 - RNA, 72 nt, Homo sapiens
cgaagggcggggagcgcggcgggcgcgcgccagggaaagaaggacaaaagaagaccggaaaagcagaaagag

SEQ ID NO: 8562 - RNA, 76 nt, Homo sapiens
cgggccgcccgcgcgaggagccccgcgagacaggccgaccgggaaagcccagggcaagaaggaacagacaaaaacg

SEQ ID NO: 8563 - RNA, 80 nt, Homo sapiens
ggcggcggcagcggcccccccccacccgaacacagggcccccagaccaggcgccccaacacacagaggagcggagcgaag

SEQ ID NO: 8564 - RNA, 86 nt, Homo sapiens
cgcgacggacgcaagaggcgacggcgaccaagcccgaccggaagagggggcacacagacaccacccgacagcggccaagcgcgccg

SEQ ID NO: 8565 - RNA, 65 nt, Homo sapiens
cgcggcaggagggagcaggagcggaccggcccggaagggccccagggcacaggggcacccaggca

SEQ ID NO: 8566 - RNA, 43 nt, Homo sapiens
agcgggagagagacaaagagccaggccccggggccccagcggc

SEQ ID NO: 8567 - RNA, 69 nt, Homo sapiens
gggagccgggcccgggcacggccagcaccccgaggggaaccagaagaggccaaccagcacgaacgccag

SEQ ID NO: 8568 - RNA, 69 nt, Homo sapiens
gagaacaaaggagagaggaccacccagaggagcaacgcagaaaagggacccaacacagaagaggcaagc

SEQ ID NO: 8569 - RNA, 79 nt, Homo sapiens
cacgcaggaggggaagagaacgagacaaacagggcagcgacacccagacccaccggaccaggcccacccagaagcaaca

SEQ ID NO: 8570 - RNA, 79 nt, Homo sapiens
cgacaggcggcagcggggcggcgcgcggcgcggcggcggcccgccccgcggcccagaccagccggccgcggaagcccgg

SEQ ID NO: 8571 - RNA, 74 nt, Homo sapiens
gggaagacggacagcgaagccacccagcgccgaggaccagaggaaggcggggaggcggaagaccaggagaaagc

SEQ ID NO: 8572 - RNA, 55 nt, Homo sapiens
ggaggcacgcgaccagcccagacaggagaccgaccagagaaacagaggagaacgg

SEQ ID NO: 8573 - RNA, 76 nt, Homo sapiens
caggacgggccaagagagcccgggcccggaaagggagagaacagcacacagaggcgcaaggggaagagaaaagaca

SEQ ID NO: 8574 - RNA, 80 nt, Homo sapiens
ccgaaaacggaagcgcagggagaaggaagaggggaaaaggacaccaggcagaaagagcccacaagacaaaaaagcagacg

SEQ ID NO: 8575 - RNA, 73 nt, Homo sapiens
agacgaacgggggcaggaggacggcaaagaagacgcgcaagaccgagcaagacgccgcagccgagcacgagca

SEQ ID NO: 8576 - RNA, 74 nt, Homo sapiens
ggcggcgccgccacccccccccagcaggggcccgggcagagggaaagcagaggacggaacaacccgggggaccg

SEQ ID NO: 8577 - RNA, 76 nt, Homo sapiens
cagcgacagccacacaacggacagacacagaccagcgcgagagaacaccaaggagccccaaaccaaagagagccaa

SEQ ID NO: 8578 - RNA, 78 nt, Homo sapiens
agcaacagccaacccaagaacagcccaaggaggaagcggagcccacgaggggaggggccggccacccaggagacaccc

SEQ ID NO: 8579 - RNA, 70 nt, Homo sapiens
ccccccgacacgcagcgcagcaacccccccaacaagcgcacaacaacagcaacggaggcgggaccggaac

SEQ ID NO: 8580 - RNA, 78 nt, Homo sapiens
ggagggccaggccgagacaccgcagcgccgccgccgccaccgagccgccgccccacacacgcgaccaccaaggcaaac

SEQ ID NO: 8581 - RNA, 58 nt, Homo sapiens
cggcggccccacgcagccacccaaaaacagggcgaagcgccccgaggaccggcccacc

SEQ ID NO: 8582 - RNA, 70 nt, Homo sapiens
cagggaccacaccggacccaacgggaaaggaaggaaccaacggacccaaaaaacaaggaggaaaggcccc

SEQ ID NO: 8583 - RNA, 75 nt, Homo sapiens
gcccacccgccgcgcccaagccccgcggggaagaacggcacgcggggggaggcccggaacacggggaggagacga

SEQ ID NO: 8584 - RNA, 66 nt, Homo sapiens
cacccccccagggcggggcagggacccagcaggacgaccagccaaagagcccaacgccaagcaacc

SEQ ID NO: 8585 - RNA, 98 nt, Homo sapiens
gagaaacaccagcagcacaagaaaacgcagacccaaccgcggaaccgaaagagcgagccccagggccggagccagcaagccgagaaacaggagacgga

SEQ ID NO: 8586 - RNA, 57 nt, Homo sapiens
aggagcgaccagacccacaagcaaaggagaagcaggaagaaaacaccgggaaaggcc

SEQ ID NO: 8587 - RNA, 79 nt, Homo sapiens
ccaccggcaggcgcccggggccgcagcgccgaggcccgacccgccggacagcggacacacccaggcggagacaaccaga

SEQ ID NO: 8588 - RNA, 80 nt, Homo sapiens
gccggccagacaaggagagcaacacaaggaagcaagggccaccgcccagccaaccacagggcaaagcccaacaccccccc

SEQ ID NO: 8589 - RNA, 75 nt, Homo sapiens
cggcaaaaccacacagcgaaaagacacagaggaaaaagacaaaccagccccgccgaagaagcagcagagaagaga

SEQ ID NO: 8590 - RNA, 80 nt, Homo sapiens
gcgcgcaacccaggaacccggaggggcaccccccaccccgggacaccccagggcaccacagagcggcagagcgcaaagcg

SEQ ID NO: 8591 - RNA, 38 nt, Homo sapiens
gcggagagcggggggggaggggggcgggccgagcaccc

SEQ ID NO: 8592 - RNA, 78 nt, Homo sapiens
agaggccgacaaaaaacagaagacgacaaagcgaaacgccagccgaacacccaacaagaaggcaacgacaaacagcca

SEQ ID NO: 8593 - RNA, 82 nt, Homo sapiens
ggggagagagcaaggccgcgacggaacccaaagccccgcggacaccgcgcgggccgccacccgaagaacagaggcacacgaa

SEQ ID NO: 8594 - RNA, 89 nt, Homo sapiens
ccccaggcggccgagcgcccgcggcccgaggccgggcggaagaggcgcccggagcgccgcggacagcacggacacaaaccacacaacgg

SEQ ID NO: 8595 - RNA, 60 nt, Homo sapiens
aacgaacggaagaggcagacgaacgggggcaggaggacggcaacccccagaaacccacaa

SEQ ID NO: 8596 - RNA, 63 nt, Homo sapiens
agagagaaacccacagcccgcgcgcgcagaacacagcgccgaggccaccacagaagaaacgac

SEQ ID NO: 8597 - RNA, 79 nt, Homo sapiens
ccgggagacggcgggcaagcgccacggcgcccggcgccgcacacaggaacacagcgccaagggaccccaagaccagaag

SEQ ID NO: 8598 - RNA, 86 nt, Homo sapiens
cgcgaaggccgggacccggccccggcccacaggggggggcaaacccgagagaacggaccgcaggcgggacaagaaaagaaaaagca

SEQ ID NO: 8599 - RNA, 68 nt, Homo sapiens
cccccccacaccaacgacaccagaaaaccagcgacacgaacccccagcgaggaagcagccaagaagac

SEQ ID NO: 8600 - RNA, 80 nt, Homo sapiens
ggccccaagcccgaggcccagaggaggagaagaagacaggcagaggacacggagaccgcgccgccgacccagggacaaca

SEQ ID NO: 8601 - RNA, 59 nt, Homo sapiens
ggcaccaccaggcgcaagaacaggcgggagcaaaaagcggaaccacaagaagaaagcaa

SEQ ID NO: 8602 - RNA, 73 nt, Homo sapiens
gccaccaacaagagcaacccagagaaaaccggcaagccccagaggcagcacaggaaacccgccggagaaggag

SEQ ID NO: 8603 - RNA, 79 nt, Homo sapiens
cccccggcgccgcgccggcggcgccaccagccaaggacagagggcaagagagacccagccaaggcgggacaacccaacc

SEQ ID NO: 8604 - RNA, 67 nt, Homo sapiens
aaggaccaagaaccagaagcgacaggaagcgacagcagaaggaagcaaaaacagaaggaaaaacgag

SEQ ID NO: 8605 - RNA, 78 nt, Homo sapiens
caaagaagagaggagcggcggaaaagaaaaggcaaaccgcccgcccccacaacacacagacggagccgccggccaggc

SEQ ID NO: 8606 - RNA, 83 nt, Homo sapiens
gcgcggagggagccgcgggaggaccgcagcggcagccaggaggcaggagcagcgggcgacaggcgggcccgggcgggccccgc

SEQ ID NO: 8607 - RNA, 52 nt, Homo sapiens
ggcccagggacaagagggaaaggagagggacagaaagcaaggcaaaccaggg

SEQ ID NO: 8608 - RNA, 41 nt, Homo sapiens
cacgcagacaccagccgcgccagccaccggggaccgcaagg

SEQ ID NO: 8609 - RNA, 102 nt, Homo sapiens
ccaagccagccagcgccgccaaggccgacggccccagcccgccaggaccgaggacgaacaggagagagcagccgggcggcccagccaaacaggccccgagag

SEQ ID NO: 8610 - RNA, 75 nt, Homo sapiens
cgaagagagggcacagaccaggaggcggaacccacacagggacccgcagggaaaagaaaacggcgggcaaagcca

SEQ ID NO: 8611 - RNA, 75 nt, Homo sapiens
ggccgggggccgccgggacccggccaccagcaagccggacacaccggaacaaagaaaaccaaaacgcaacagaaa

SEQ ID NO: 8612 - RNA, 70 nt, Homo sapiens
accaagaaccaggagccccagcgagccagagggacagcacagcccgcccgcgcaagcccaaagaacgcca

SEQ ID NO: 8613 - RNA, 69 nt, Homo sapiens
agacccacagaggcaccccagacacaggacaagagaaaaaaagggcgggcgaacaaaaagagcagagga

SEQ ID NO: 8614 - RNA, 60 nt, Homo sapiens
gaaaaagaagagagagacacggacaagggagaccaaagaggaaggggaccaacacagagg

SEQ ID NO: 8615 - RNA, 59 nt, Homo sapiens
aacccagaacccggcgaccacgaaggaggagcccagcaggacaaaccggcgaccacaca

SEQ ID NO: 8616 - RNA, 82 nt, Homo sapiens
ggaacccgaccagaagaaagccaggaagaaggacaagaacccagagaagagagagaccggcagggcgcaggagccgcggcgg

SEQ ID NO: 8617 - RNA, 69 nt, Homo sapiens
acagagacacaaaaacagaacagggacaccagaacaggcggaaaagcagcgacacggaggacgaagagg

SEQ ID NO: 8618 - RNA, 80 nt, Homo sapiens
accaggggaaacacaccaggccgggccgcaggacaggcccgcggcgaggaggggacaagagacgcaaacagcagacggaa

SEQ ID NO: 8619 - RNA, 60 nt, Homo sapiens
cacgccaccagccccaccggagcccgaaggcacagaaaacgaacgagaaacgagggagaa

SEQ ID NO: 8620 - RNA, 41 nt, Homo sapiens
gaccggggacaccaagagaagcccgggagggagggcgcggg

SEQ ID NO: 8621 - RNA, 83 nt, Homo sapiens
cagccgaccagcaggaggacagggccggagcagccggcagcaagcagccaacgcagaaacgcagggggagccccccagacccg

SEQ ID NO: 8622 - RNA, 85 nt, Homo sapiens
agcagcggggcggggcgaagaagcagcacaaggcgagccaggacagggccaaagcggcaggagaaggaagggaccggaaacgaca

SEQ ID NO: 8623 - RNA, 74 nt, Homo sapiens
aaagcgcccgagacgggcccgccgaaagagccccacagccgaaacccacgggcgccgggaggacggcagcaggg

SEQ ID NO: 8624 - RNA, 71 nt, Homo sapiens
gaacaagacccaaaagaaggcgaaaagacaccaaaacaaggaagaaaacaggacacgcaagcgaggagcga

SEQ ID NO: 8625 - RNA, 73 nt, Homo sapiens
ggaaggagccgacgcaaggagcagagggcgccaccgcagacgagcagagggcaggcgcagaggccagagggcc

SEQ ID NO: 8626 - RNA, 80 nt, Homo sapiens
agaagaacgagaacggcgagagaggaagagagaagacggcgaagccccagaaagacaacaggcacaaagagagaaggaac

SEQ ID NO: 8627 - RNA, 69 nt, Homo sapiens
ggggcggggcaacgcggaagaagcggccagcgagccgggagcgaccccaccccccggcccacccccccc

SEQ ID NO: 8628 - RNA, 39 nt, Homo sapiens
gcgcccggcgggccggaccaaggacccacgggagacaga

SEQ ID NO: 8629 - RNA, 55 nt, Homo sapiens
cgaaaggaggaggcacagaagcacaaagcaaggaggagaggcagcacaagcagaa

SEQ ID NO: 8630 - RNA, 56 nt, Homo sapiens
gcagcagaccacaaaggcagacacaaccccagcgaaagaaaagcccagaacaggac

SEQ ID NO: 8631 - RNA, 78 nt, Homo sapiens
ccggggagaggcggaccggaccacggcgcggagcgccgccagaggagaaggggagcgccacgaagggcaccaacccgc

SEQ ID NO: 8632 - RNA, 108 nt, Homo sapiens
cgcagcgggcgcagcgcgccaaaaccgggacggacaagacccgggaaggaggcgacaggaacagacgccacgagccggcacagcacccaacccgaccgggcaaggcgc

SEQ ID NO: 8633 - RNA, 76 nt, Homo sapiens
cgcggagaaagagaccaccgagggccgaggaggaagcccacaggcaccgccaccggcccaggggccgcggagccaa

SEQ ID NO: 8634 - RNA, 78 nt, Homo sapiens
gacgggggaagcagcagccaggaagcagcagcggagaaacacaggagaagaaaggaagagacgacagccagcaggcag

SEQ ID NO: 8635 - RNA, 64 nt, Homo sapiens
agccgaggaccggcgcggcagcggggcggcaggggggccaaggcgacagcaaaacggagaaaga

SEQ ID NO: 8636 - RNA, 69 nt, Homo sapiens
acgcggcacgcagcaccggaagacgacccggagaacacaagaggaacccgagcgcaagcacaccagcac

SEQ ID NO: 8637 - RNA, 65 nt, Homo sapiens
ccgacagccgggaacgacgaaaacggaaggccccaggaccggcacccggaagggacaaccgaaca

SEQ ID NO: 8638 - RNA, 77 nt, Homo sapiens
ggcagcccaagaagacagagaccagcaagcagccagggaaccgaaccaccaggccaaaaagcgccggcagccccgag

SEQ ID NO: 8639 - RNA, 69 nt, Homo sapiens
ccgacggccaggacgcacgagccccggaaacaccaggccacccaggaaccccagacaacggaacgcgcc

SEQ ID NO: 8640 - RNA, 76 nt, Homo sapiens
cagaggccgggcggagcgcccagacgcggggagccgccggagcgagaagaaaagccgaggcgacgggccacacgaa

SEQ ID NO: 8641 - RNA, 84 nt, Homo sapiens
ggaaacggaaagcagagacccggaggggcgcggaccagccggcgcaagcgggcgaaggaccagaggaaaaggaaaacggagaaa

SEQ ID NO: 8642 - RNA, 52 nt, Homo sapiens
cacgaagccgagaggccggacgagggcgaagacgcagacccgaaaacaccaa

SEQ ID NO: 8643 - RNA, 60 nt, Homo sapiens
gccggagccagccaacgagcggagccgggggggcgagcccgccgagagcgccaaggagga

SEQ ID NO: 8644 - RNA, 77 nt, Homo sapiens
cagagggggaaagccaaggaaaaacggagagccacaaaaaaggaagcgaaacccggcgaagaagaggagcaccaagg

SEQ ID NO: 8645 - RNA, 72 nt, Homo sapiens
accgcgcacccacgaacgcccaccccccgaacccagccgcaccgaaccagagacgagacgggcggagacgaa

SEQ ID NO: 8646 - RNA, 83 nt, Homo sapiens
aagaaggcgagcaggggcgggagagccccgcagaagacgccgacgaggggcgcaaaacgggcagggggacggacagagagcgc

SEQ ID NO: 8647 - RNA, 79 nt, Homo sapiens
cgcaagaccgagccgccgagcgacaacccgcgccccgaggccacggaggcaacccaccggaagccgccaggagccggga

SEQ ID NO: 8648 - RNA, 75 nt, Homo sapiens
agcccccagagcgggaccacaggggagccgccaggccccggggacagccggcacagcgggagagggacggaccag

SEQ ID NO: 8649 - RNA, 80 nt, Homo sapiens
ccggcgccgcgggacgggagaccgggagccagggcagaaacccccaccaggcgggcgccacacggcaccccgggacaaag

SEQ ID NO: 8650 - RNA, 74 nt, Homo sapiens
ccacgcaccgcacaacaagaggccggcggggcgacaggcgggacggcgcgaagcccaaggaggaagcccacggc

SEQ ID NO: 8651 - RNA, 82 nt, Homo sapiens
ccgccgcagcccaggcgcgggggcgacgacaggaagaaagggcaggcgagagagggggaacaggaccaacggaacaacacag

SEQ ID NO: 8652 - RNA, 73 nt, Homo sapiens
aaaggggaagccaagcccccccggaaagcccggaaggaaggagagaacggcgcaagcgcgaagaaccaacaaa

SEQ ID NO: 8653 - RNA, 73 nt, Homo sapiens
caaggcaaaggagaacccgcaagccagaaagaaacagaaagaagggagaaggaccacagggacaagcagaggc

SEQ ID NO: 8654 - RNA, 78 nt, Homo sapiens
ggcgcagcagaagaaccacgcagagcgagcggaaacccccacgggcgcaaagacaacaggcacaaagagagaaggaac

SEQ ID NO: 8655 - RNA, 55 nt, Homo sapiens
gaagccggccaaccagcaaaaggaaccacccccagacagacagaaagcgcccagg

SEQ ID NO: 8656 - RNA, 77 nt, Homo sapiens
acaacacgcacggaacaaagaaaacagggccagacgggaagaaacgagaagggaccaggggcggaagcggaaaacag

SEQ ID NO: 8657 - RNA, 47 nt, Homo sapiens
aaagggccaaagaagggagagagagaccaaaagagacgcgaggacca

SEQ ID NO: 8658 - RNA, 39 nt, Homo sapiens
gaggaggaggaagagccaggacgcggagccacccacgca

SEQ ID NO: 8659 - RNA, 54 nt, Homo sapiens
gacacggcaggcgccagaagaaaagggaaagcagcgagcagccacagaaccccc

SEQ ID NO: 8660 - RNA, 70 nt, Homo sapiens
ccacaacgccgcggacgaccgcacgggcagaacagaccggccccccaaacacccgagcccagccccgccc

SEQ ID NO: 8661 - RNA, 77 nt, Homo sapiens
aaccaccggagaaccaggaccccaccaaaccgaaaagcacaagaggagagcaagagcaaaaaggaaacgaacagagg

SEQ ID NO: 8662 - RNA, 77 nt, Homo sapiens
agcagaggggcaaggccaagggacccaggggacccccaaaagacaagggcaaaacggaccagacacaaagaggaggg

SEQ ID NO: 8663 - RNA, 79 nt, Homo sapiens
caagggcaacacaacagcacaaacacaaccaggcaggaacacagccaggcccccacccccaggaggcgaaggcacggca

SEQ ID NO: 8664 - RNA, 67 nt, Homo sapiens
aaaacagaaaaaaaaaacaaaaagccgaagcacagaaagccagaacggaagaccaaccagaagacac

SEQ ID NO: 8665 - RNA, 73 nt, Homo sapiens
aaccggagagcacccaacaaaccccggaccacccgcccaagaggggaaccaccaaacacagcaagggcaggac

SEQ ID NO: 8666 - RNA, 77 nt, Homo sapiens
gcccacggacacacaggaacgggggccacgcacggagaaggacccggcaaagagagaggcacacgccgccgaaggcc

SEQ ID NO: 8667 - RNA, 84 nt, Homo sapiens
cgggacccggcccggaggcgaagcagcacgaccagccaagcgccggagcaaggaaggcaaccagcaccagcagagagaaggcaa

SEQ ID NO: 8668 - RNA, 64 nt, Homo sapiens
cagggaccggcagagagcaaaccccaccacaagacgggggaagccccgacaaaaaaaaagagag

SEQ ID NO: 8669 - RNA, 72 nt, Homo sapiens
ggaaaggagagcgcagaggcgagggaccaagaccaggaccaagaaaaagaaagggaaaagccgggaaacgaa

SEQ ID NO: 8670 - RNA, 73 nt, Homo sapiens
cacgaacagagccgggagcaagaagaacacccagagcccaggccggcgcgccggacacacggcaggagcacac

SEQ ID NO: 8671 - RNA, 58 nt, Homo sapiens
gagccaacaaccaagagcgggaggccacaccaacaagacaagaaccaaacagaaccca

SEQ ID NO: 8672 - RNA, 85 nt, Homo sapiens
acacgcccaccagcacggcacccgacgagaccgcaacaacaccaggccaaggaccaggggcggagaacggaaaagcaccaggaag

SEQ ID NO: 8673 - RNA, 75 nt, Homo sapiens
gagaccaacgggagccccaagcaccggggggaagaagaagggaacaagcggagggacgcacgagaacgaggagcg

SEQ ID NO: 8674 - RNA, 71 nt, Homo sapiens
accacacgaccgaagaacaccaaggaggaggccaaagagcacagggacagaaaaacagcgcagacgagccg

SEQ ID NO: 8675 - RNA, 73 nt, Homo sapiens
cccggcgacgcaaccggccaaagacacaagacagagccaggaggaacggaacgcccaccccaggacaggagaa

SEQ ID NO: 8676 - RNA, 75 nt, Homo sapiens
caacagccccgcggccacagcgcaaggccagagggaaaaaaagcacagagcacgaacaggaaagcaacggaagaa

SEQ ID NO: 8677 - RNA, 74 nt, Homo sapiens
agcaggggccaccgggacgccagacaccaaccagagagacggggggcgagcccaggcgggggaacccggcccaa

SEQ ID NO: 8678 - RNA, 71 nt, Homo sapiens
gggcggagagggcacccgggaacgggacgagcgcaccggcgaggacacccccccaagggaccagacaccac

SEQ ID NO: 8679 - RNA, 52 nt, Homo sapiens
caagcgcgcagagaagaaccaacaggcaaacaaccagaaggcgaaaggccaa

SEQ ID NO: 8680 - RNA, 81 nt, Homo sapiens
ggcagcgacaggacgggaacggggaaaaccagcaagaccgcaagaagaagagacaggaaaagaagaaggggacacaaagcc

SEQ ID NO: 8681 - RNA, 74 nt, Homo sapiens
aaacaccggagcaccaaaagagcaccggccagcagaaccagccggggccggcaagccccgcccaagaagagcca

SEQ ID NO: 8682 - RNA, 54 nt, Homo sapiens
cggccggagcagcagcccgagggcaaagacaaccccacgcggcgcggcgagaac

SEQ ID NO: 8683 - RNA, 84 nt, Homo sapiens
cgcgggcgccaaggggagcagaaggaccggacacagaacggcgcggcaggcaccgcccagcccagccgccaagccaccagcgcc

SEQ ID NO: 8684 - RNA, 73 nt, Homo sapiens
caggcaggaacgaagagcagaaacccacgagcgaacaccggagccccgcagggcgggagaggaggcgagcggc

SEQ ID NO: 8685 - RNA, 73 nt, Homo sapiens
gaacaacagcggaggacacaggcaccagacgggacagaaaaccagagggaggagagaaagaacccacgcagga

SEQ ID NO: 8686 - RNA, 82 nt, Homo sapiens
gacagcccacacccggcgcggagggaacaagaggcagaaacaacagcaagaaagaggcccgaaaaagacaccagcagcagaa

SEQ ID NO: 8687 - RNA, 69 nt, Homo sapiens
ggaacgaaagcgccgcggcaaagacaaaggagaggagggaccgcaccccaccgggggagcgcggcggca

SEQ ID NO: 8688 - RNA, 79 nt, Homo sapiens
cacagcaagacaaagaaaaacccgccccccaacaccggacaccgagaggaaccacaagcagcgaaacaggacagcaaga

SEQ ID NO: 8689 - RNA, 78 nt, Homo sapiens
caagacgcaaaccagagggagcgcaagccggcagccagccgagacggccaccccccgggaccaagaaaggcccaggga

SEQ ID NO: 8690 - RNA, 81 nt, Homo sapiens
aggaaaccgcaagagcggagaccgccaccccccgcgggggggagaggccccagcagcgagcacagcgaagaaagccagaaa

SEQ ID NO: 8691 - RNA, 76 nt, Homo sapiens
gacaccacggcacgcccgggccaaggagccagaggcggggcaccaggcccagacggcgaacccgagcaagcaacca

SEQ ID NO: 8692 - RNA, 80 nt, Homo sapiens
cagcgcgggggccgacagacaggcacagagaggggaagaaaccgagaggggcaggcggcaaaccgaagcagacaagaacc

SEQ ID NO: 8693 - RNA, 80 nt, Homo sapiens
ccagacaccgacgcagcacacccggcaggagccaagaggccacgacagaagaacagcaacagaacacaccaagagacccg

SEQ ID NO: 8694 - RNA, 84 nt, Homo sapiens
ccgggacggaccgagaccggaccgagagcggaccgagagcgcgaaacgcacgagaagggaaagcggccaaaacaggcggagaag

SEQ ID NO: 8695 - RNA, 76 nt, Homo sapiens
cggaaaggaagaggagacagagggccgagaaggacaggacaggaggacagcacaaaaacacaccaagagagcgcga

SEQ ID NO: 8696 - RNA, 70 nt, Homo sapiens
cggacgcggcgcgcgaccgacacgaaggcgagcggccccggaggaagagcgggggcgcgagggcgggacc

SEQ ID NO: 8697 - RNA, 29 nt, Homo sapiens
ggcagcgcccccaaacgcaaccagagaca

SEQ ID NO: 8698 - RNA, 92 nt, Homo sapiens
ccagccccgcggcgcccgggcccgggcggcggcccaccgcccacggcagcgagagccagacaagccagacaccaagaccccacgaaagaccg

SEQ ID NO: 8699 - RNA, 101 nt, Homo sapiens
agggaggcgggccacaaaacccacgaacgaaagaggaaaccacaaaccaggcaaggaaccggagcaaacgacccgaccagcgcgcggcggccccggggaga

SEQ ID NO: 8700 - RNA, 79 nt, Homo sapiens
gaaagcccgaaaaccaaaaaaggcaacagaggccccgcaaaggaggaggacggaaaggagacggacacacaagagacgg

SEQ ID NO: 8701 - RNA, 73 nt, Homo sapiens
gcgcccccacgacgacaccagagcaggccagggggaaccgaccagaggaagcggaagcagcagagcgccaaag

SEQ ID NO: 8702 - RNA, 78 nt, Homo sapiens
acccgccaccgcgcgcagggcgcccccccaccagaccgacaccgagaacagagcaagaggaggagaagagcaaacaga

SEQ ID NO: 8703 - RNA, 67 nt, Homo sapiens
cagggccaggaacaacacagaaaaagcacagaaacgcggaacagagaggaagcaaggcaaagcggga

SEQ ID NO: 8704 - RNA, 79 nt, Homo sapiens
agagcgcgggaacgggggcggccgggacggaggacgcgcaggacccaaggccagccagccccaggcaccagcggacagg

SEQ ID NO: 8705 - RNA, 75 nt, Homo sapiens
aacacagaaacacgaagaagagagacaaccaaaagacacaagggcacgaaagagggaagaaagcacgggaaaagg

SEQ ID NO: 8706 - RNA, 74 nt, Homo sapiens
cagccgcgcgagcacaggacaggggacgcaacgcccaggggccgggccgggcagagacaggggaggagccccac

SEQ ID NO: 8707 - RNA, 76 nt, Homo sapiens
gcgaggacagacccgcagacccacaccgaagcccccgggcagacaggaacaaacggggacagcgccgaccggaaca

SEQ ID NO: 8708 - RNA, 36 nt, Homo sapiens
gaccaacgggacaagaaggcaccaccagcaccaccc

SEQ ID NO: 8709 - RNA, 73 nt, Homo sapiens
gacaaggcagacagcagccagaaacgaccgagaaggaggacacacaggaagggcccaaggaccacgcagccaa

SEQ ID NO: 8710 - RNA, 75 nt, Homo sapiens
acgacagcgaaaaaaagggaacccagggacacccagaaaacagagagagaaggaagaagagaaagagggagacga

SEQ ID NO: 8711 - RNA, 115 nt, Homo sapiens
ccggaccagcccggccggggccgcgggcgcccagagccgcgccgccgcgccgcccgcggcgcgccccagaccccagagcacgccggcaccaccagacgggcggaagaggaaagac

SEQ ID NO: 8712 - RNA, 67 nt, Homo sapiens
cccacacccccaaggcacggggccacaccacgaagacgaaaaagagccacgcccccacgagcgcccc

SEQ ID NO: 8713 - RNA, 70 nt, Homo sapiens
gcaggcccccagccgcagccacaacaccggcaggaaccaccaggacagacaaagaggccagacacacgcg

SEQ ID NO: 8714 - RNA, 61 nt, Homo sapiens
gggcggaagccacacaggccagaacgagggcccggagagacaaggagaggaacaaaggcgg

SEQ ID NO: 8715 - RNA, 53 nt, Homo sapiens
acaacccgacccgacgagaaaaggcccaggcagggcgggcaccaggagcgaag

SEQ ID NO: 8716 - RNA, 72 nt, Homo sapiens
cggggcaaagcgccagagcgggccaacagacgggccacaggacagcggcacgaccaaaaagacacagaggag

SEQ ID NO: 8717 - RNA, 66 nt, Homo sapiens
ccacgaaggacaagaccaaaacccacggaagaccaacacgcacgaagggaacacacggaagcaacc

SEQ ID NO: 8718 - RNA, 77 nt, Homo sapiens
ggcgccggcggcgcgcgacccccgcgcagggggagcgacacccaacaggaagaagacccccgaagcagccagccccg

SEQ ID NO: 8719 - RNA, 77 nt, Homo sapiens
cgcagagcggccacaaaacgaagacggagccaaaccaagaaagaaggaacacgacagaaaaaggcggcagaggccag

SEQ ID NO: 8720 - RNA, 73 nt, Homo sapiens
gaaaggcgacccccgcccagcggcaccgggcagagggggaacacgcccaaaaaaaccagaacgaggccagcag

SEQ ID NO: 8721 - RNA, 81 nt, Homo sapiens
cgaaccccaaacccaaaccgcggcggcgacccaccacgccagccagcgagaccaaacacccaggcaaacgcggggggaccg

SEQ ID NO: 8722 - RNA, 84 nt, Homo sapiens
cgaagaaggcgagcaggggcgggagagccccgcagaagacgccgacgaggcagccagacaggccaggacagcggaggccaccac

SEQ ID NO: 8723 - RNA, 55 nt, Homo sapiens
gcgcgaaacgcacgagaagggagcgggagccaaaaagcccgaccaccggaacaaa

SEQ ID NO: 8724 - RNA, 113 nt, Homo sapiens
gcaaggcgcgacaccaagcagaagccagcgggccggaggcgcaacccccagaaccccaacgaggacgccggaaggacccgccggagaagccagccggcgaggagagccgcagc

SEQ ID NO: 8725 - RNA, 76 nt, Homo sapiens
cggcccaggagccagaggaaggcaacagcgcccaccgggacaccagggcggaaaaagaggggccaccccccgcgcg

SEQ ID NO: 8726 - RNA, 72 nt, Homo sapiens
cgggcggggcggcagcgaggaacaggagagcggccgcagacaaagaagccaagcacacagagcagcagaaga

SEQ ID NO: 8727 - RNA, 67 nt, Homo sapiens
ccgacaggccaagagcagcagacccacaggaccgcgaacaaggaggccacaaaacacccggacccac

SEQ ID NO: 8728 - RNA, 73 nt, Homo sapiens
ccgaacccagccgcaccgcacccgacagcacaaaggcaagaaagaaaaagccccagccgcccgcccgcaacag

SEQ ID NO: 8729 - RNA, 80 nt, Homo sapiens
cccccaccaacgaccagacacggaccggcaccgccgcgacgcagaggaagcgaaacacacgagaggacaagccaagccag

SEQ ID NO: 8730 - RNA, 76 nt, Homo sapiens
ccggcagggcagaacccccagagggcccaagagaaaggcaagcagaagaggaacagaagaagcagagcagagacgg

SEQ ID NO: 8731 - RNA, 74 nt, Homo sapiens
caaggaccaaggacccaaagcacaggaaccaccgaaagcggcgcaacgagccccccgggaagacacaaacgcac

SEQ ID NO: 8732 - RNA, 79 nt, Homo sapiens
cgccacagcaggaaacacccaccccgcgaggcccccgggcccgggaaaacacacggccagggggcggagccgaccggcc

SEQ ID NO: 8733 - RNA, 77 nt, Homo sapiens
gaggacgcaagcggagagccaggcaaggaccacacgcagggggacagagaaagaagcaagaaaaaccagccaaaaga

SEQ ID NO: 8734 - RNA, 67 nt, Homo sapiens
cgaacaccccgccaccaagaaacccacaaagacgcaaagaaacagaagacagccgaaccaagggcga

SEQ ID NO: 8735 - RNA, 86 nt, Homo sapiens
cgaagacagaaccgaggaaaagaccagcagcagcaaaacaggccgagacaagccaaaggagaaaaacacccagaaacaaagaagga

SEQ ID NO: 8736 - RNA, 53 nt, Homo sapiens
acaacgagaacggcagcagaggggaggagggcaccggcgcacccgggacgaac

SEQ ID NO: 8737 - RNA, 83 nt, Homo sapiens
ccacgacaccgaaaacccaccgagcccgccaaaggcgaagccgacgagcccgaacagacgcaccagcgggaggaagagggacg

SEQ ID NO: 8738 - RNA, 75 nt, Homo sapiens
cgcaacaaagcacgggaagggcaaggcgaggaggacaagaagaagcaaaggagaaaacaccaccagcggcggcgc

SEQ ID NO: 8739 - RNA, 117 nt, Homo sapiens
cggcaaccgcgagaaggcccagcgcccgcagaaggccgagaagccacccacgccccggcccgcgaccaaaccaggcaagaacgcagaacccagaacaggccaagcgagacaagggcg

SEQ ID NO: 8740 - RNA, 86 nt, Homo sapiens
gggccaaccagcgaagagcgacaagccgcggcagccgcggaccaccgccgccagggacagagccagaggaccccggacaaacacag

SEQ ID NO: 8741 - RNA, 77 nt, Homo sapiens
gagacccaagaaaacacccgaaggcacaagaacaggcaagggccaagacaagcccagagggccgaggaacggcccgc

SEQ ID NO: 8742 - RNA, 56 nt, Homo sapiens
agcccagacaccgccagccagccggggccagaggaggacgaccgaaaacccagcca

SEQ ID NO: 8743 - RNA, 80 nt, Homo sapiens
gcggacgccgaggcaccgaggcaccagaggaggcaaacgaacacgcgcagcgcagaggcccggcagccccaaggaacgcg

SEQ ID NO: 8744 - RNA, 72 nt, Homo sapiens
cgaagcgacggagcagagacccccggagacccaagcacacaggaccgaccagccggaagaccaggcaccagg

SEQ ID NO: 8745 - RNA, 80 nt, Homo sapiens
acgcgacacgcagcgcgacgcggcaagaggcgcagagcgaggagcgggaggcgcgagcggcgacgggagaggagccaagc

SEQ ID NO: 8746 - RNA, 113 nt, Homo sapiens
gcagcagggcgcgggcagacggacaaggccggcagccgggagagcggaagggccagcgggccagcgagacaggcggaggccagccccggcccaccgccagccagaccggcgcc

SEQ ID NO: 8747 - RNA, 77 nt, Homo sapiens
agaggaaagagagccgggcgacccaaccaagggaccagagggagacgcgcacggaccggaaccagaacaagacgaaa

SEQ ID NO: 8748 - RNA, 76 nt, Homo sapiens
aggcgcaggagaaccagggaccagccgacgcacacaaaggacaacaaaagagaaggagacaggcaaagacacgggg

SEQ ID NO: 8749 - RNA, 63 nt, Homo sapiens
cacagaccccagagcggccagagcggggcagccgcccaggagggccggagagaagagagagca

SEQ ID NO: 8750 - RNA, 70 nt, Homo sapiens
aagagcccaccaccaccaagcaagcagagcccaccgaagaccgaaaaaaccacggaaggccccgaccgag

SEQ ID NO: 8751 - RNA, 54 nt, Homo sapiens
ccaagccgacggcggcagcaacagaagacaggcacaaccaggcgacggacaagg

SEQ ID NO: 8752 - RNA, 76 nt, Homo sapiens
gacccgagccggcgcccgggccggccaggacgacccggaccacggccgagccgggacaagccgccgcgccgaccag

SEQ ID NO: 8753 - RNA, 79 nt, Homo sapiens
aaacgggcccccgaccgcgcccgcgccggcgcacggcggccgcggcgcggcgccacgaacacaccacagccacagcacg

SEQ ID NO: 8754 - RNA, 56 nt, Homo sapiens
gaagcgagcccggacagaccaaccgcaggcgcaaaggcagcagcagagcgaacagg

SEQ ID NO: 8755 - RNA, 81 nt, Homo sapiens
ggaggagccggacgggccaggacgcacaaaacagaaacaaggacccggaaaggaagaaaacaaaaagagaagaaaacaaca

SEQ ID NO: 8756 - RNA, 76 nt, Homo sapiens
acgccgcaccgcgcaacccgccgggccaggcagccgcacgcgcccggggaaggagaagcaagaagggaccagcagg

SEQ ID NO: 8757 - RNA, 77 nt, Homo sapiens
cccagagcgacagcccgggacaccaagaaagaacgggagcgccgcgcccaggcggaggcaggagcaacggccacgca

SEQ ID NO: 8758 - RNA, 75 nt, Homo sapiens
cggggcagccgaccggcgcgggggacggccgccagagggcagccacaaggaggacagcacagcgcgcggaggccg

SEQ ID NO: 8759 - RNA, 55 nt, Homo sapiens
cagccacaacaccggcaggaaccaccaggacagagaagcccacgcgagagacggg

SEQ ID NO: 8760 - RNA, 42 nt, Homo sapiens
gcccccaaagagcgggaacagggcagagccggagagccccaa

SEQ ID NO: 8761 - RNA, 72 nt, Homo sapiens
gggcagggaacaacggaggagcccaggacacccggcccaagacccggggcgacgcgggacaccggaagacac

SEQ ID NO: 8762 - RNA, 88 nt, Homo sapiens
caagcaagccaaaagagggcagcccaggcagaggaagcggcgcgagaacaggaagcggagaaacaggagaagaaacgcaaagaaggaa

SEQ ID NO: 8763 - RNA, 82 nt, Homo sapiens
gggcccagcgggacccgcgcccccggacggccacgagaccggggaacacaaaaagggcacagaaaaaacaaagacaacccac

SEQ ID NO: 8764 - RNA, 73 nt, Homo sapiens
aggacacagcccgcggaggcagcgaaagcacaccagaagcgccagccgggacaacaagcagaaggagagcaaa

SEQ ID NO: 8765 - RNA, 58 nt, Homo sapiens
gagcccacccagcaggaccgagccaaagagcggggaaagagcaccgaaaccaggcgga

SEQ ID NO: 8766 - RNA, 77 nt, Homo sapiens
gagcccggggcggcagcgcggacccgcccggagagaggaaacccgaccgccccaggggcacagcaggaccagcaggg

SEQ ID NO: 8767 - RNA, 79 nt, Homo sapiens
gaaagcggaaagccaagagcaaagaccaggggacgaaggccgcagacgaaggggaaagggaagcaagagccagacccaa

SEQ ID NO: 8768 - RNA, 70 nt, Homo sapiens
gaaccggcgccccaccaagaggaaggggagcaacgggacaccccagcaaagccggcagaaagaacagggg

SEQ ID NO: 8769 - RNA, 50 nt, Homo sapiens
aagggcggggccgagacagagggagcacaagcgggaggggccggcgaagc

SEQ ID NO: 8770 - RNA, 61 nt, Homo sapiens
cgacgcccaagggaagaagacaccacagcgaaaccacccccaaacccggcgccaccccgag

SEQ ID NO: 8771 - RNA, 68 nt, Homo sapiens
ccaggaaaaagacagcccgcagcacgaccagcaggaacggcagaacgcgagagaagaagccagcaggc

SEQ ID NO: 8772 - RNA, 79 nt, Homo sapiens
cgaggggccgggcacgagcggcgagggcagccacacaaaagggaagcgggcagaaccgagaaaaacagcagagaccagg

SEQ ID NO: 8773 - RNA, 77 nt, Homo sapiens
ggaagggcagccgccccgagggccgggcggagaggcggcgcgggcgcgaggaaagagcacaacagcggccccacaag

SEQ ID NO: 8774 - RNA, 75 nt, Homo sapiens
ccacccagaaagagaagacaaccacggagccgagaaccaggagcggccggggccgggccggggcacggcagaggc

SEQ ID NO: 8775 - RNA, 74 nt, Homo sapiens
ccgcgcggcgcggggaccgcggcccggcccgagagcacccagccccagcgagcgaccaccagcaggggaaaaac

SEQ ID NO: 8776 - RNA, 73 nt, Homo sapiens
cgcggggcgccggcccaggcgaccgggccggggagccggcaggacccgaagacgaggaaggccgcggaccccc

SEQ ID NO: 8777 - RNA, 83 nt, Homo sapiens
gagggagccggacgccgccgcccgcacccgcagcccgcgcccgccgccgcccgccccagcacgaagccagggcgaacagcaga

SEQ ID NO: 8778 - RNA, 79 nt, Homo sapiens
cccaagagcgggaccacagacagagccgcccacccaggagaggcaaggcgcaaccggccacgcaaccccgccacgcaac

SEQ ID NO: 8779 - RNA, 80 nt, Homo sapiens
aaccgaagcggcggcaggggccgcggcccggagcggagcgagcacaaacgacacacgcaaaccacaaagcccagcaaccc

SEQ ID NO: 8780 - RNA, 36 nt, Homo sapiens
agcaaggcggcgcgcccaggaggacaaagcggcgca

SEQ ID NO: 8781 - RNA, 72 nt, Homo sapiens
ccacaaaggaaaaggaggcaccgcggccaggaaaagcaccaaaggaccaaggaagaacggcagccaagacag

SEQ ID NO: 8782 - RNA, 76 nt, Homo sapiens
gcggcgggaaccacacaggacccaccccccggcgccagcacagacagcccaaagggacagaggaaaaccagcagga

SEQ ID NO: 8783 - RNA, 62 nt, Homo sapiens
cgagagcacgaggaccaaggagagaccgcacgcagggccacagcagcacgaggacagcccga

SEQ ID NO: 8784 - RNA, 81 nt, Homo sapiens
gaaaacgagggaccacacaaagacagccacaggcgggaccagcccacacccaaggagagaagcggaaggaccgggggccaa

SEQ ID NO: 8785 - RNA, 54 nt, Homo sapiens
cagggcggacaagaagaggaagaccgggaaaaggcggaaacagcagaagagcgc

SEQ ID NO: 8786 - RNA, 74 nt, Homo sapiens
gagggagacaaagcagcgcccgcgccgggcccggaaagcgccgcccagcagccgcaggcccggcgagcgaccgc

SEQ ID NO: 8787 - RNA, 79 nt, Homo sapiens
cgccgcacgcaagaagaggacagccggacacacgcccgagcagaccagagagacgggcacggagccagaaggccgaccc

SEQ ID NO: 8788 - RNA, 62 nt, Homo sapiens
aggggcagcagcgaacccgaacccgcaggcccccacacagcgaagaaaagccgaggcgacgg

SEQ ID NO: 8789 - RNA, 55 nt, Homo sapiens
gaaggggggccaccccaacgccaaaaacccccaccagcgcagaaggaaccgagga

SEQ ID NO: 8790 - RNA, 46 nt, Homo sapiens
agagaagcccaaccgggaacagagaagaagacaacgacaaacgggc

SEQ ID NO: 8791 - RNA, 68 nt, Homo sapiens
cgaccccagcaggggaagaagggaagaacccaagaggacagcggggaccccgaaaccaaaccaacgag

SEQ ID NO: 8792 - RNA, 61 nt, Homo sapiens
ccgaacgaggacacgaccccgccccacgcccaggagcagggggggccccagcccggccgaa

SEQ ID NO: 8793 - RNA, 68 nt, Homo sapiens
cggcgaagccgggccaaaggacgaagaacccacagagcggagcagaccaccgcccagcaaaaagcggc

SEQ ID NO: 8794 - RNA, 84 nt, Homo sapiens
cacgggcagacggggcgcgacggagcgcccgcagcccagcccgcagaagaaaacacggggaaccggaggagaacaccggacccc

SEQ ID NO: 8795 - RNA, 55 nt, Homo sapiens
gagacacaagcaccacagggcgccgcaagagggaaaggagaagaaggaacggcgg

SEQ ID NO: 8796 - RNA, 74 nt, Homo sapiens
ccccgagccgcccaagcccgggccagggccaccccggcgaggaaaaacacgggccagaacacaagggaccagac

SEQ ID NO: 8797 - RNA, 32 nt, Homo sapiens
acaagaaacacgagagaggaccgaagaggggc

SEQ ID NO: 8798 - RNA, 75 nt, Homo sapiens
gcccgcagacggcaggagcagaccaaaggcacaggaagaagcgcagggggagccacccaaaggaggaaccggaga

SEQ ID NO: 8799 - RNA, 79 nt, Homo sapiens
cggcccgggggccgccccggcgagccgcgacggcgccgcccacggcgaggcgagagggaagaacaggacgcaggagaag

SEQ ID NO: 8800 - RNA, 56 nt, Homo sapiens
ggacaggccagaagcccaacaagaaaacccagggcaggccaggaacgcaagcgccg

SEQ ID NO: 8801 - RNA, 71 nt, Homo sapiens
ggagaaggaccaagaaccagagcacgcagggagaagcacaccgccagagacaaagacacaggaagaagagg

SEQ ID NO: 8802 - RNA, 68 nt, Homo sapiens
aagaagacacaaggacaagaagcaaaaaacaagaaacgacaaagcaagggacgcacacaccacagggc

SEQ ID NO: 8803 - RNA, 83 nt, Homo sapiens
cgggggcgggagccccggcgggccgcgccgggacggcccaccagccaccccaccgcgcagggagaaccacgaagcgcccgaga

SEQ ID NO: 8804 - RNA, 71 nt, Homo sapiens
caaggcaaacggcagagacccgagaagagagagaagaaccaagacccggcgcacaagcaccacaccagacc

SEQ ID NO: 8805 - RNA, 68 nt, Homo sapiens
cccccaaggcaacagggagggacacacccaagcacggaccaaaagaacacccgcagggggaccaggcc

SEQ ID NO: 8806 - RNA, 87 nt, Homo sapiens
cccgcccgcagcgacacaccaagcggaggggacgccacgcaacgccggaccccaaggagcaacaaaggcagcgaagaagcagaagaa

SEQ ID NO: 8807 - RNA, 70 nt, Homo sapiens
gcgcgccaaaaccgggacggacaagacccgggaaggaggcgacaggcaaggggagagccaggcgcagagc

SEQ ID NO: 8808 - RNA, 79 nt, Homo sapiens
aagggaaggaacaagcacgaagagggccagaaggcaaacggacaggacaaagcaaaaccgccgaccagacccggaagca

SEQ ID NO: 8809 - RNA, 69 nt, Homo sapiens
gaaaaagccgccacacgccaaagggccaccggagccgacgcgcaacaaaaccaccgccagaaggagcgc

SEQ ID NO: 8810 - RNA, 98 nt, Homo sapiens
caaacaccccagcccacagagagcaaaacacaagagagcagggaggaggacagcccagagcaagcacacggaggcccgggagccagaccgggagcccg

SEQ ID NO: 8811 - RNA, 53 nt, Homo sapiens
ggaggccgcacggcccacgcgaacgccaggaagccggacgcgcagggaaaacg

SEQ ID NO: 8812 - RNA, 82 nt, Homo sapiens
gccgcacccggacggaccgccacgcgcccgggagacgcccgcgccgccggcgcaaggaagaagagacgccgcgcggcagaca

SEQ ID NO: 8813 - RNA, 78 nt, Homo sapiens
agaagggggaccccggagaggaccaccgagagggaacagcacagagaacccgagaaaacccgaacccagacacaccag

SEQ ID NO: 8814 - RNA, 71 nt, Homo sapiens
gggggccagccaagcccgcccggcagccacaggcggaggcggccggaagagaggaaagagcgagagacaca

SEQ ID NO: 8815 - RNA, 75 nt, Homo sapiens
aaacagcaagaaagaccacaagaccagagagcgcgcgccgcgcgcccgcacaaacgccggggacaacaacccgaa

SEQ ID NO: 8816 - RNA, 79 nt, Homo sapiens
gcccggagagacgaaccgaagcgggcgggcccccccacccagagggagaggcagacaaaaagaccggagaagggggaag

SEQ ID NO: 8817 - RNA, 83 nt, Homo sapiens
gcaaaagcacaaacagcaagcacgacaagcagcacaccaagagcacacagggagcaacagcgagcaacaggcaacgaaaacag

SEQ ID NO: 8818 - RNA, 69 nt, Homo sapiens
cgggaagggccaggacgcgacaaggaacaagaggacgaaaacacccgaggcccaaccccaggaacacac

SEQ ID NO: 8819 - RNA, 84 nt, Homo sapiens
cagcgcggagaccccagacccccagcgcggcacgaccacagaaaacacggacccccggaagcacgaaaaacagaccccggccgg

SEQ ID NO: 8820 - RNA, 73 nt, Homo sapiens
gagcccggccggccgcgacgcaggccccacgaggggagggcgagccgccagagaaagagcggcgagggagacc

SEQ ID NO: 8821 - RNA, 89 nt, Homo sapiens
ccagagggggccgccgcggcagcaagaacagagagagaggggacagacgagagaacgaggcacacccaagagaaaacaacgagagcggg

SEQ ID NO: 8822 - RNA, 71 nt, Homo sapiens
cgcagcccggacagacccccgccccgaggacggacaaggcggcaaggaagaggcccggaaagggaaaaacc

SEQ ID NO: 8823 - RNA, 80 nt, Homo sapiens
gaacaaaccgaagaacagcgggaaagaaggcaaaacacgggcagaaaccagaaaacaacgagcggaacgacggaacaaac

SEQ ID NO: 8824 - RNA, 32 nt, Homo sapiens
acgccaagcagagcccaagacggaggccggcc

SEQ ID NO: 8825 - RNA, 86 nt, Homo sapiens
ggcgccgcgggcccgcgcccggccggacccgggcccgaggacaaccaaacaacaggcaggagacggcccggcggggagagccacac

SEQ ID NO: 8826 - RNA, 83 nt, Homo sapiens
gcccaggccacggaagcaaaaaccccagggaaggagcaggaccgaggagggcgaccacccagaacaagggccagcccgacccg

SEQ ID NO: 8827 - RNA, 85 nt, Homo sapiens
gagggaggggacccacggggaggggccagagaaggggacccccaaaagacaagggcaaaacggaccagacacaaagaggagggcg

SEQ ID NO: 8828 - RNA, 68 nt, Homo sapiens
aacggggcgagaggaggacgccggggacacacagacggaagcgcaccagcagggcggcccggaaggga

SEQ ID NO: 8829 - RNA, 85 nt, Homo sapiens
gcacgggccgaggcccaccgcgacacaccgccagggcagaggccaagaccggcccaagaaggagaaaagaagcgaggcggagcaa

SEQ ID NO: 8830 - RNA, 76 nt, Homo sapiens
gccagggaaacgccggccccacgcgacacggcacaccaccaagaggcggggacggacagccaggaccgcgaggcgg

SEQ ID NO: 8831 - RNA, 79 nt, Homo sapiens
gcgaggcgccgccaggcccgcggacccgaccaagaggcagaagacggggggaagagagaaggccacgcccgaccccaag

SEQ ID NO: 8832 - RNA, 72 nt, Homo sapiens
gccgggcgcgcgcgaccgggcgcaagccccggggcagagacacaggacacccacccgccggggacagacgcg

SEQ ID NO: 8833 - RNA, 81 nt, Homo sapiens
cgaagcaagcccgggggccgggacaagacgggccgcaccgaaacccaacggaaaagacaggaaaccaaaccagagagagaa

SEQ ID NO: 8834 - RNA, 81 nt, Homo sapiens
ccgcaaagacggcacgcgggacgaacaccgcacaggcaggaggcaggccaaggacagagagccgagcggggcagggagccc

SEQ ID NO: 8835 - RNA, 60 nt, Homo sapiens
cggggggacgcgccaggcacagcagcaggcacgcgagaaggggagggggagaaagaagag

SEQ ID NO: 8836 - RNA, 80 nt, Homo sapiens
gaccaaagaccagcagaaggaagccaccaagaagggcaaagaaaaggagccagggacggcccccagcccgggcacccagg

SEQ ID NO: 8837 - RNA, 74 nt, Homo sapiens
caacagggacggcaaaggcgcaacggccccaacgagaggaccgagagaagggaggaagagccccaccgagaggg

SEQ ID NO: 8838 - RNA, 75 nt, Homo sapiens
agaagagaagccgcaaaggccacagacccgagggaaagagaccaaagaagaggcaggagaaaaggaagcgcagac

SEQ ID NO: 8839 - RNA, 110 nt, Homo sapiens
cccggcggaaaaccgaagggaaggccagcagcgcgcggagaagaacggggagccaggcgaagggagggccgccccaaccgacgcaccagccggaggaggagggacagggc

SEQ ID NO: 8840 - RNA, 58 nt, Homo sapiens
gggaaagaaggcaaaacacggaaagaccgagcgcccggcacgccaggagggacaccca

SEQ ID NO: 8841 - RNA, 82 nt, Homo sapiens
gagcagccgcgggcgcccgaggggccgagcgagggaggcccccccccacaaggcccgcaagcaccagccccacccgcacgcc

SEQ ID NO: 8842 - RNA, 113 nt, Homo sapiens
cccaggcaggacagcagggacagggggaagcgaggagccacacagaccagaacggcagccgcagaaagcaacaaagcgagagcacaagaaaacagccccgagcaccagaccac

SEQ ID NO: 8843 - RNA, 62 nt, Homo sapiens
ggcccggggccccgggaccggcgcccccccggcagccgacggccaagaaacccccaagaggg

SEQ ID NO: 8844 - RNA, 78 nt, Homo sapiens
accgagcccaggagcgccacgcgcggaaggcagcgcccagcagcgcaggaaccaagaagaagcaggggagaagaagag

SEQ ID NO: 8845 - RNA, 62 nt, Homo sapiens
gcccaaccccggacgcagcaaggagcagggacaagacaggaagcccaagcagcaaccaaaag

SEQ ID NO: 8846 - RNA, 76 nt, Homo sapiens
gacacgccagcgcgggcccagggcgggggggggcacccccaaaggaagggccccgggcaaggagaagcccagcgcc

SEQ ID NO: 8847 - RNA, 66 nt, Homo sapiens
aaacgacacgggcgaggggccgcgagggacagagaaagaagacagcgaaggaagagccaggaaagc

SEQ ID NO: 8848 - RNA, 49 nt, Homo sapiens
ccacccagaggagcaacgggcgggaacgggcaggaaaacaccacagaca

SEQ ID NO: 8849 - RNA, 79 nt, Homo sapiens
cgagcacagaagcaccaagccgccgcacccccaaccccggggcccgaaccagaccgccgcacagcgggagggcggggga

SEQ ID NO: 8850 - RNA, 60 nt, Homo sapiens
ggaacggagccgcgggaaagaacaccagcaggaaaaaagagcggcagaaggccaaacggc

SEQ ID NO: 8851 - RNA, 85 nt, Homo sapiens
aggcggacaacgagaaacggacaaccaacggccaagaacaagaacaaaggccgcgacggagccaccagcgaacaggccaaagcca

SEQ ID NO: 8852 - RNA, 64 nt, Homo sapiens
gaaccaaccgggaaagcccggggcagggagaagcaaaaagccacgagggacacaaggccagcag

SEQ ID NO: 8853 - RNA, 54 nt, Homo sapiens
ggcgagagagaacacagccacgcacggaggggagaacagacaccccccacaaga

SEQ ID NO: 8854 - RNA, 76 nt, Homo sapiens
ggaggcgcggaggacgccccaccgccgacgcccccagccaccaggggaaccagaagaggccaaccagcacgaacgc

SEQ ID NO: 8855 - RNA, 56 nt, Homo sapiens
cagagccccaacagccccgcggccacagcgcaaggagaaaaccggaagagaaaggc

SEQ ID NO: 8856 - RNA, 69 nt, Homo sapiens
agcaaagagggcacaaaccagcaccgggagaggaggcgccagcaggaaacacagccggaaaaaaggaag

SEQ ID NO: 8857 - RNA, 55 nt, Homo sapiens
cacaacccaaccgggagaggagcagagacagggccaaaagaacacagccgacccc

SEQ ID NO: 8858 - RNA, 65 nt, Homo sapiens
gcggcaagcaccagcagggaaggagaagagagcaagggggccgagaggcagaggaaaaacaaaaa

SEQ ID NO: 8859 - RNA, 76 nt, Homo sapiens
gggaacagcggcgagaccagaccaggacaaagggcggagaacggaaaagcaccaggaagcagagaggaccgcagaa

SEQ ID NO: 8860 - RNA, 72 nt, Homo sapiens
gagacagcggcacagagggccgccaggcagcagggagaccagaccaggacagaccggcaggagggagcagca

SEQ ID NO: 8861 - RNA, 85 nt, Homo sapiens
gccagggccgcgagcgccgagccgcgcaggaaagaagcgaccgcggcggcgagcccgcggcgagggagggagaaacaagacccag

SEQ ID NO: 8862 - RNA, 77 nt, Homo sapiens
acccacagccacggagaaaaagaagaaaagaaaaagaacagaacaaggacaacgccagggggccgcagccggaaacc

SEQ ID NO: 8863 - RNA, 66 nt, Homo sapiens
gggacaagcgcgggaacggcgcggaaggggagaagcagaccgcaccaggcgggaccccgaaaaagc

SEQ ID NO: 8864 - RNA, 91 nt, Homo sapiens
cggcggcggcggggccgaggaggcccgagcggcggcggggcggcgaaggccgaggcggccggcgcggaagaggccggcggcgggacggccc

SEQ ID NO: 8865 - RNA, 117 nt, Homo sapiens
gccgagacaaaggcaccaggccaccacagaaacaaaagcaacaaagaggggaccaagaaaggcccagggaccaaagcccggacaaggcccgagcaccaggaccgcagaaggccccag

SEQ ID NO: 8866 - RNA, 98 nt, Homo sapiens
aaaaaacagaggaaggaaaggcgcaacaacacaaaaaaagcagcaaggagaggagcaggaaaacacacagaaaaaagacggagaagggggaccacgcg

SEQ ID NO: 8867 - RNA, 76 nt, Homo sapiens
aggagccaggaaggaggaggaaaaaaggagcaaaaggaacacaaaaccaccgcccaaagaaacgccaaaagaccca

SEQ ID NO: 8868 - RNA, 55 nt, Homo sapiens
caaagagagaaccggagagcacccaacacccccaaaacacaagaggacggagaag

SEQ ID NO: 8869 - RNA, 58 nt, Homo sapiens
cgcccaaccgcacggcacccgggacagcccaccacaagcaggccccaagcccaacaga

SEQ ID NO: 8870 - RNA, 76 nt, Homo sapiens
cccaacaagccgcaacgaaaaccggaaaagggagccgacaagccgaacccaaaagggcccagaccaagaggagagc

SEQ ID NO: 8871 - RNA, 82 nt, Homo sapiens
ggcgcagcaaggcgacgggagcggacacgcccgggcagggcccaccccgcgcccgacagaaaagaaagggggcccgagcagc

SEQ ID NO: 8872 - RNA, 75 nt, Homo sapiens
ggaaagaggacacgggagcgggggcagcagcaggaaggaaaagaagacggcaagaaaacagaacagaagcaaaga

SEQ ID NO: 8873 - RNA, 81 nt, Homo sapiens
gaaggagccaaacccaaagaggcacagaagacgagcacgaggagaggaaccaacgaagaaagaaaagggaaagcagcacaa

SEQ ID NO: 8874 - RNA, 79 nt, Homo sapiens
cgggggcggcccagaagaggcggaggcgggggagcacagaccaggaggaaaaagcagaaaaggaaagagcaagcagcaa

SEQ ID NO: 8875 - RNA, 63 nt, Homo sapiens
cgaggcgcagccgcgcgggaagccacaagggccccagccccaccccagccccaaaggaggcgc

SEQ ID NO: 8876 - RNA, 74 nt, Homo sapiens
ccaccccagacaccaagcgcagaccaggcgggcaagacggccgcgcaccggacaagcggacggccagagagaca

SEQ ID NO: 8877 - RNA, 76 nt, Homo sapiens
aggcgacagagaacaccagccgcaccgaagaccccaccccgaaagcgaggaggccgggcgcaccccggaggcggcc

SEQ ID NO: 8878 - RNA, 83 nt, Homo sapiens
aagcagggcccagggcgggcggcgggcagaagcggacagcgacaccgaaagagaggagccaagaaaaccaacaaacaggggaa

SEQ ID NO: 8879 - RNA, 79 nt, Homo sapiens
gaaacgaaacccccccccccacccaccaaaccggagggggaaaaaacccaaggcgcaaagcacagccccgcggcgcccg

SEQ ID NO: 8880 - RNA, 79 nt, Homo sapiens
acaaaggccaaccacggacaacaacagagcgccgcgcccaggcggaggagaggcgcgacacacccaccgggccacgcac

SEQ ID NO: 8881 - RNA, 74 nt, Homo sapiens
caaggacacggcacaccgaccgacggacacggacaaaacccgcgcagcgcgccacccaaaacccgccacaaaag

SEQ ID NO: 8882 - RNA, 85 nt, Homo sapiens
caagaacagccaaagccccacagcaagacccaggaagccgcgggcaaaccagaccgaaggccagacgggacccgaaccaggaacc

SEQ ID NO: 8883 - RNA, 84 nt, Homo sapiens
cggaccccccaagcgggcaagagcagccaggaaccgccacggacgacccagaggcagaggaacaccaccagcccgacgagaaag

SEQ ID NO: 8884 - RNA, 64 nt, Homo sapiens
cgccggccccaagaacggggccagagggggcgaccgggacaaacggcggaggcagaagaggcaa

SEQ ID NO: 8885 - RNA, 71 nt, Homo sapiens
ccagcacaagagaaggaaaagggaagaaaagaacagggcaaaccaagagccaggacaacaaccaaaggcag

SEQ ID NO: 8886 - RNA, 59 nt, Homo sapiens
caccaggaaagacaggagaccaaaaagggcaaggccagagaaggcgggagaaagacacg

SEQ ID NO: 8887 - RNA, 68 nt, Homo sapiens
gagaacagcaagcagggaagaggagcgcaagcgccggggagcccacgaccccccagggcaccacaaca

SEQ ID NO: 8888 - RNA, 78 nt, Homo sapiens
gaagcgacccagccgaagagccgggacaaaaggggaaaggaaaccaaaccaggaaagaaggacaaggagcgaggagaa

SEQ ID NO: 8889 - RNA, 77 nt, Homo sapiens
ggccacacaccccccccagccaagagcaggcagggagaaggaaggcaggcagcaggcagcagcaggaagggaggaaa

SEQ ID NO: 8890 - RNA, 88 nt, Homo sapiens
cccccgccggcgcgacggacgggggcgccgcccgcgcccgggaccgacccccgccgcggccgcgccgagacgggaagcccgaagccag

SEQ ID NO: 8891 - RNA, 61 nt, Homo sapiens
ccacacccaagagaagcccgcccaggcgaggacacaccaggagccgggaaaaggaaggccc

SEQ ID NO: 8892 - RNA, 76 nt, Homo sapiens
caccacagcccgcagccccgccagccacccccagccggcaccaccccagaggcaccacgaagaccccgcccagccc

SEQ ID NO: 8893 - RNA, 79 nt, Homo sapiens
cggaacgcggaggcgggccaccgacccaccccagcgagagaagaaccgaccaccgggcaaagcccaccacggcagcagg

SEQ ID NO: 8894 - RNA, 81 nt, Homo sapiens
gcaaaaagcgcaggaccggaacgcgcgcggagggggcggcgcggcaggagcgcggagggacgccaccagcgggcccccacg

SEQ ID NO: 8895 - RNA, 54 nt, Homo sapiens
ccgcacgagcggcaaccgaaagccagcagcgggggcccccggagggccacaagc

SEQ ID NO: 8896 - RNA, 75 nt, Homo sapiens
caaacagcaagaaagaccacaagaccaggaaccgcaaagcacaaagcacccagggaaggacaagccaggagggcc

SEQ ID NO: 8897 - RNA, 55 nt, Homo sapiens
aaaccagagacccccgaagacggaaagcacaccggcccccaaaaacaagaggcaa

SEQ ID NO: 8898 - RNA, 73 nt, Homo sapiens
gggaaaccccgaaaggggggcagggagagaagacccagggagcaaggccacgggggggaccgggcaagacccc

SEQ ID NO: 8899 - RNA, 68 nt, Homo sapiens
ggaaaagagggagaaaaggcacacccaggccagagagcacaggaagacccaaagcaccaggcacaaag

SEQ ID NO: 8900 - RNA, 70 nt, Homo sapiens
accgcagccaaccggaccaggacaccgagccccaggcgcacagccaagcaaacgcaccccgggccccaag

SEQ ID NO: 8901 - RNA, 75 nt, Homo sapiens
gccacgggaagaacccaacagaggcccgagcacggccaccccaggccaccagcaagaccaccccccgagaacgag

SEQ ID NO: 8902 - RNA, 71 nt, Homo sapiens
caaaacacacccgcccggacggccggagccaggcccaagacgggggagcagggacggagaggcaggcgaca

SEQ ID NO: 8903 - RNA, 75 nt, Homo sapiens
cagaagaacaaaaaaaaagagggaaagacacggggaagagcccgaagaaaggaggcaaacaaaaaaacaaccgga

SEQ ID NO: 8904 - RNA, 53 nt, Homo sapiens
gacggaaacgacagaagcagaggacagagaggaaggcacgcagagaacagaga

SEQ ID NO: 8905 - RNA, 67 nt, Homo sapiens
agagcccaaagccgagccagaaaaagccgaaaaaaacacacaaagcgcaaaccaggcgagacagcag

SEQ ID NO: 8906 - RNA, 69 nt, Homo sapiens
cggagcgccaaaagcgacagcaccaagacgggacagagcagaagggcgaaagaccgggccgcagaagag

SEQ ID NO: 8907 - RNA, 75 nt, Homo sapiens
aagaggaggaccccaccccaagcaaggccaggaggaaggcccccggccacgggacgcaaaggccccgggccgagg

SEQ ID NO: 8908 - RNA, 89 nt, Homo sapiens
cgaggaccgggcgcccgcgagacgaggagcgggcgcccaggagaaagacagcaaagaaaaggagaagaaaggaaaaaaacaaccccggg

SEQ ID NO: 8909 - RNA, 73 nt, Homo sapiens
gggagaccaagaagaacaagcggccccgggacagacagggaagacagaggagcgacccagccagccaacagga

SEQ ID NO: 8910 - RNA, 72 nt, Homo sapiens
ccccgaccaaggccacagcgggggaggcgcccaaagagggaagcgcggacacaaaggaaaaagggccacccc

SEQ ID NO: 8911 - RNA, 67 nt, Homo sapiens
gagaagacgaaagaagggaccacgaacgaagaaagagcccgccagaagggacgacacagaacacgag

SEQ ID NO: 8912 - RNA, 83 nt, Homo sapiens
ggacccgcggccggcccggcgcggcccagcgccccaggcccgcggcaggcggggccaggcccgagccagaaggaggcccacag

SEQ ID NO: 8913 - RNA, 82 nt, Homo sapiens
acacagaagccgacaaggcgcaagcgaaaacagaccgcgagcccagaggcacaggcacaggagaccaccaacacagcaaagc

SEQ ID NO: 8914 - RNA, 70 nt, Homo sapiens
gggccacacacggcaagaaagggcgaacggagaggccagcgcggaacgagaagcccaagaccaaaagaaa

SEQ ID NO: 8915 - RNA, 94 nt, Homo sapiens
acggcggcgagacgaggcgcagccaccaacgcgcacgggcgccacgcgcggcgcacacgggcgcgggccgcccgccgcagacggccagagccag

SEQ ID NO: 8916 - RNA, 72 nt, Homo sapiens
aaaaaagcgcagagaagcagggcaaaggcccacaggaaagccgggaaaccgcccgagacccagggaacccaa

SEQ ID NO: 8917 - RNA, 50 nt, Homo sapiens
caccccacgggagggcaggagaaggaagaccaaagaaaaacacaaagcac

SEQ ID NO: 8918 - RNA, 72 nt, Homo sapiens
agcccggagcaggaggagaaaggaaacagaggagagaacacgggccggcggccccgggagcgagacaagagg

SEQ ID NO: 8919 - RNA, 78 nt, Homo sapiens
cccgggcagccgcgccccagcaagacccagagaaaggaacaagacccgcagacaaccggaggaaaaggagcagagaga

SEQ ID NO: 8920 - RNA, 72 nt, Homo sapiens
cggcccggaaccggaacgcgcgaggagaggagccaagcccaacgggacgggaaaacggccacagccaacgac

SEQ ID NO: 8921 - RNA, 57 nt, Homo sapiens
acgaacagagccgggagcaagaagaacacccagaggccccagcgcaaccagggaacc

SEQ ID NO: 8922 - RNA, 80 nt, Homo sapiens
agccagggagcgcgaaccgcccgcggaaccacagcccagcacgggaaggaggcagaaagggagccccaagagagagggcc

SEQ ID NO: 8923 - RNA, 74 nt, Homo sapiens
gggccaaagaagggagagaggcaaggaagagaaaaggaaccccagccacggaagccggggaggaggaggaagga

SEQ ID NO: 8924 - RNA, 70 nt, Homo sapiens
gacggaaaccagaaaacagcaacccaaagcaccaaagggcacacagacagcagagcaacaggcagaacga

SEQ ID NO: 8925 - RNA, 116 nt, Homo sapiens
caggagcgcgccggcaggagacgaagagcccgggcggcgccgaccggccacgggcgagcgcggcagaaaggaagcggaagagaagaccggcaacaagaaaaaaagccagaaacgcc

SEQ ID NO: 8926 - RNA, 67 nt, Homo sapiens
ggaaaacacagaggaaagcacacacacaccgcaagggaacggacagagagggccaacggaacaagag

SEQ ID NO: 8927 - RNA, 52 nt, Homo sapiens
ggcaaccagggaaacaggagaggaggacaaaaagcccgggcagacagaaagc

SEQ ID NO: 8928 - RNA, 41 nt, Homo sapiens
gagggaccggcccgcgaagggggcgaggaagcgccccgaaa

SEQ ID NO: 8929 - RNA, 72 nt, Homo sapiens
cagaggcaaccgcgaagcacagagcccaacccgagaaaaggaaggaagggaagaacaggcagcacaggcacc

SEQ ID NO: 8930 - RNA, 79 nt, Homo sapiens
cccccgcccagaacagcaagcacaccgaaaacccccccaggaccgcagggcgacgcaccaaagcgaaacagaagcgaac

SEQ ID NO: 8931 - RNA, 79 nt, Homo sapiens
agagaaggaaccacccacgcaggcaggaggagaaggaggaaggaccaggacacaaggaaaacagaccgaaaagagccag

SEQ ID NO: 8932 - RNA, 79 nt, Homo sapiens
cgaggccgcggcgccaaaccgagccaccccacgcagcgcagcgccgcagagacaggcgcccccacaccagcgcacaagc

SEQ ID NO: 8933 - RNA, 55 nt, Homo sapiens
aaacgaagggcagaacaaggagaagcggcagcggccaggagaccagcacccaaag

SEQ ID NO: 8934 - RNA, 81 nt, Homo sapiens
aagagaagaggaagacagagaaaaaggagaagaaggaaggggaagaggcagaaaaggaagagacgccccgcaacgggaagc

SEQ ID NO: 8935 - RNA, 81 nt, Homo sapiens
gaggggacacgaggagacgcccaagcaggagaagaaaggaagagacgacagccagcaggcaggagcccgcccagaacaccc

SEQ ID NO: 8936 - RNA, 77 nt, Homo sapiens
gcagggcagcaccacgagccagaagcagagccgggaacagaaagaacagccaaaagagaaagaccgggcgagccaca

SEQ ID NO: 8937 - RNA, 95 nt, Homo sapiens
gcaccgaaaacaccaggaaagacaggagaccaaaaaggccgcgcgagaagcggaccaaacgcacccaacccggcagccacgcccgcagccaagcc

SEQ ID NO: 8938 - RNA, 80 nt, Homo sapiens
caaggaagcggcaaagccagaaagaggaggccagagcgggagagagagaccagagaaagagagaacggaacgaaaagaag

SEQ ID NO: 8939 - RNA, 80 nt, Homo sapiens
gcgaagcacgagcagaccggcccgaccgcccacagacccaaacaaaggagccgccaggccggccgggagaaggcaagccc

SEQ ID NO: 8940 - RNA, 67 nt, Homo sapiens
cagggccgcggggacaggaccccggacgagcccggcgaggaaagcgagccgaccacggagcggaacc

SEQ ID NO: 8941 - RNA, 68 nt, Homo sapiens
gacccccagaagaagaggggaacaggaagggcggaaaaggcaaaacagcgcaaccaagagagaggaag

SEQ ID NO: 8942 - RNA, 77 nt, Homo sapiens
gcgcaggcccggccgacggccacacggcggccgcagggcgccggagccccccaggcagcaacgaagaggcacggagc

SEQ ID NO: 8943 - RNA, 79 nt, Homo sapiens
ggaagaacaccaaaagggaaaaaagacaaaggaagccaggagccaggcaagaaaaagcaggaaaagcaacggcgcaaga

SEQ ID NO: 8944 - RNA, 88 nt, Homo sapiens
gcgccgcccggggccccgcggcgcaggaggcggggagcgcagagcgggcgagcgcggcaaaagcggaccggaaaacccaccggcaaga

SEQ ID NO: 8945 - RNA, 71 nt, Homo sapiens
agcagaggaggcggccacaagaaagacagaggggcgcacccaacgcgcaccgagaagaacgagaggcacag

SEQ ID NO: 8946 - RNA, 76 nt, Homo sapiens
cgaagaaacagaaaaacaaaagaaaggcaagagaaacacagaaagagagccaagcgaacgaaaccagagggcaagc

SEQ ID NO: 8947 - RNA, 74 nt, Homo sapiens
aacaagaccgacaggaggccaaccacgagaaggcaaacgaaaggagaaaacggggacaccgggagcagacaaac

SEQ ID NO: 8948 - RNA, 83 nt, Homo sapiens
cagaggccacacccacagagaacccagacaacaggacgccgccaagggacgaaacgcccaccccgggaagcaggacgcgcaca

SEQ ID NO: 8949 - RNA, 77 nt, Homo sapiens
agaagggaagaacaaggccaaggcgaaaaccacaaaggaaggaaggaaagaaggggggaaagaaacccgggacaagg

SEQ ID NO: 8950 - RNA, 75 nt, Homo sapiens
cggaaggaggaagaagagccagggggagcggaaggccacaagaccaggacccaggggcacagccacacccagcca

SEQ ID NO: 8951 - RNA, 82 nt, Homo sapiens
cgaccccggacacagcgcacaccggaccaaaacgccagggccagacggagggaccgccagaagcagcgcgacggagagccaa

SEQ ID NO: 8952 - RNA, 87 nt, Homo sapiens
gagcgaccagagcgaagaaccacaaacagcagacacacaaaaaagccaggacggaaaagaaccaacaggaggaagccacaaacgagg

SEQ ID NO: 8953 - RNA, 70 nt, Homo sapiens
caccccaccgcgcagggagacacaagacacccaagaagcccagcagacccaacgcccagcaccaaaaggg

SEQ ID NO: 8954 - RNA, 74 nt, Homo sapiens
cgaaaggagagacacggaacacaaggaagcaaaagcccagaagagaacacccacgaagcaccgccccacgccga

SEQ ID NO: 8955 - RNA, 80 nt, Homo sapiens
gggggggccgcgcccgagaagggaacccacagaaaggagacgcaacaccaggggcaaagagcagacccagaaagaaaaag

SEQ ID NO: 8956 - RNA, 81 nt, Homo sapiens
gcccgggcaacacccccgggaacgagagaggaccgcacgacggcaccagcaacgggacggcacgggccccagcgggcacga

SEQ ID NO: 8957 - RNA, 75 nt, Homo sapiens
ggagaccccaccgccggcgcgggaaacgggcgaagcgacgagccgcgaggaggggaaccagaagaggccaaccag

SEQ ID NO: 8958 - RNA, 72 nt, Homo sapiens
ccaaaccagccgggcaggggcccagaccaacaccaagaagccggcccagccaggcacacaagaagcagaaga

SEQ ID NO: 8959 - RNA, 56 nt, Homo sapiens
gaccacgcccaaaagagcgcaccaacccccacggggaaaaaaaagggcgagcccac

SEQ ID NO: 8960 - RNA, 66 nt, Homo sapiens
acaggagccaaaagagaagacacccaagggggagagaccccagaagaccggaggggcaccccaaac

SEQ ID NO: 8961 - RNA, 72 nt, Homo sapiens
cagccaacggaaaaggaggaaaagaagagaagagaggccaacacaggcagagcaaaaaggagccgggcaaaa

SEQ ID NO: 8962 - RNA, 54 nt, Homo sapiens
aggacaagaccaggcccaaaaaaggggcaggcacacaagaggcccggaaagcgg

SEQ ID NO: 8963 - RNA, 74 nt, Homo sapiens
ggcacaacaaaaccagaccgaaagcgaaaccggaccaagaaaaaacaaaagcaaaaaagaagcaacacaacagg

SEQ ID NO: 8964 - RNA, 80 nt, Homo sapiens
gggagccggcccccgaaagaggacccagggccaggacccagcacaacaccagcaacacgaacaagccagaacagagaacg

SEQ ID NO: 8965 - RNA, 77 nt, Homo sapiens
cacagagccacgaaaagcggcccgcaggaagcccaagagggaaagccccagaggccggagagcagaaagccacagag

SEQ ID NO: 8966 - RNA, 70 nt, Homo sapiens
gaccgccgacggaccacaaggagagcgacgcaggggaggacagggaacggcgaggagccaccgggacggc

SEQ ID NO: 8967 - RNA, 49 nt, Homo sapiens
ggaaccaaagccagcagcaccaaccaggaccgaagaggggcgccggaga

SEQ ID NO: 8968 - RNA, 58 nt, Homo sapiens
caaaagacacagggaaccaccaggagacacgaaacgaacggacccagagagggaccag

SEQ ID NO: 8969 - RNA, 78 nt, Homo sapiens
gcggggacccgagacgcaagccccagcgaccccaagcaaaccgcccggagcgagagcgagagaagggaccagccagaa

SEQ ID NO: 8970 - RNA, 78 nt, Homo sapiens
agaaccaagaccacaacaccaggggccccaggacccggacagacccaaaagggaaaaaggaaaaccagaagccagccg

SEQ ID NO: 8971 - RNA, 62 nt, Homo sapiens
ggaggacagcgcacacagcaagcacgagacgagagagccaggccagaaggaaagcggggcaa

SEQ ID NO: 8972 - RNA, 62 nt, Homo sapiens
ccgaggcacggggcggacgacccagccggggggcacagccggaacgggaaggccagaggaga

SEQ ID NO: 8973 - RNA, 85 nt, Homo sapiens
gacaagcaaagaaccaggacaaaaaggaagagaccgcaagagaaaaggcaaacagaacaaaacgaagaggagaaaggaggcaaag

SEQ ID NO: 8974 - RNA, 72 nt, Homo sapiens
ggaacaaagcagcgccagcaggggggaagccagaacacgccaaggcaaggggcggccccggcgaggcaggag

SEQ ID NO: 8975 - RNA, 81 nt, Homo sapiens
ggagaggggccgcggaaaccggagggaaggaaaccccaaggcgcagacaccgacggagcgggagccagagagcgccgccac

SEQ ID NO: 8976 - RNA, 63 nt, Homo sapiens
gcgccgcagcccgggcccaggccccggcagcgccgggacaaggcgcgagccggcacgaaacaa

SEQ ID NO: 8977 - RNA, 57 nt, Homo sapiens
gaagaacagacagacaggcccaggcagaggcagcgacagagaaaaccccggagcagg

SEQ ID NO: 8978 - RNA, 78 nt, Homo sapiens
agaaaaagaagacacgagcacaaaagcaaaagcagcaaccaaccaaaggccgcgaaaagacgaaaaaacgggagggag

SEQ ID NO: 8979 - RNA, 56 nt, Homo sapiens
ccgcacagcagcagccgcacacagaccggcccacgaggccgagaacaccaggcggg

SEQ ID NO: 8980 - RNA, 79 nt, Homo sapiens
gcagaaacagagaaggaacagagccgcccagcccccaaacccaagaacagcagagccagacgacggaagggcccgaaaa

SEQ ID NO: 8981 - RNA, 86 nt, Homo sapiens
agcacaacccgaagcggccggaccggaacagggcggggggcaacaccggaggacagcaacccccaccgaacaaagaaggaaaaagc

SEQ ID NO: 8982 - RNA, 54 nt, Homo sapiens
caagagagcaagaggagagaaaaggcagaggaagagcggaacaaaccgaagcac

SEQ ID NO: 8983 - RNA, 74 nt, Homo sapiens
aaaggggagcagcccgggaaagcgaccagacaagccagcgaaaccagccccaagcgcagggcgaacaaaccgga

SEQ ID NO: 8984 - RNA, 58 nt, Homo sapiens
ggcccccagcaccacagcccgcagccccgccagccacccccagcacagggaacaccag

SEQ ID NO: 8985 - RNA, 76 nt, Homo sapiens
cggaaacgacagaagcagagaaaaagcggggaaggggggcaaaaaaaagaagcaagcgaagcaccgagcacccacc

SEQ ID NO: 8986 - RNA, 81 nt, Homo sapiens
cgcgccccagaacgcgcgcccgacgcccgcaggcccgcgggcgcaccggcgacgggcgcccgcgccggcagaggaggcgag

SEQ ID NO: 8987 - RNA, 73 nt, Homo sapiens
agccccagcagcagaagaagaggaccggagagagcaccgacagaaccgaacggaagagggcagagagagagcc

SEQ ID NO: 8988 - RNA, 79 nt, Homo sapiens
gaaaaccgcagcaggaagcgggggaaagggagcagcaccggccacacccacagcacgaccggaacccagcgaccgacgc

SEQ ID NO: 8989 - RNA, 65 nt, Homo sapiens
gagagaagagccagagggacacgcgggcacggccggagggggaaggagcgagacacgacgaagga

SEQ ID NO: 8990 - RNA, 80 nt, Homo sapiens
caccaagcccaagagaaccgcaaggagagaagcagacccccagcccagaagagaagaaggggaaaagaggaaaaccaggc

SEQ ID NO: 8991 - RNA, 76 nt, Homo sapiens
cggacacacaaaaagacgcaccaaaggaaggcaagggggagacacgcacgggcccgcagacccaggggaggccagg

SEQ ID NO: 8992 - RNA, 71 nt, Homo sapiens
acaccaaacagcacccggcaagaagaacacagggggaagccaagcagaacaaaccagaccgccgacccagc

SEQ ID NO: 8993 - RNA, 82 nt, Homo sapiens
gggcacaaggcccaggagagcaaggcccagacggagcggacagacggaagaagaagagcacagcgccggagcaggcccagag

SEQ ID NO: 8994 - RNA, 35 nt, Homo sapiens
ccccaaaagcgggagcagcccaaaaggagacacca

SEQ ID NO: 8995 - RNA, 78 nt, Homo sapiens
ccagcgagcagagggccggccccccaaggagcggcggagacaggcaaaggagccaggggagagccggccagacccaga

SEQ ID NO: 8996 - RNA, 83 nt, Homo sapiens
ccgacgcggaggcggcagcggcgggccgaggcgaaggagcggccgggagcccgccgcgcggagcggaagaccgcaggaaagca

SEQ ID NO: 8997 - RNA, 54 nt, Homo sapiens
cagcaaaacacgcccgagacccggccaccagccggagagagagaggggcaccag

SEQ ID NO: 8998 - RNA, 68 nt, Homo sapiens
acggcacaggcgccggggaagaggagggggcagcaggagcaaaacaaccggcgcccggggaaggagaa

SEQ ID NO: 8999 - RNA, 79 nt, Homo sapiens
cggagggaagacgcccgggccaccaagcaagacaggaaggccaggcaacacgccgccccagccggggagaccgagcagg

SEQ ID NO: 9000 - RNA, 75 nt, Homo sapiens
caagcgcacaggaccggaaccaagccgccacagggagaaaagagcagaggccgaccccaggacacgacgggggcc

SEQ ID NO: 9001 - RNA, 77 nt, Homo sapiens
gcagcggcgggggccggggcgccccccgggcgcgcccggcccgcagacaagcagaccggaagaccgacggaagacca

SEQ ID NO: 9002 - RNA, 72 nt, Homo sapiens
cagccagaaaaaacacagccgacagacgccaccaaaagcaccagcaaaagcagccaacacaacgaagaggca

SEQ ID NO: 9003 - RNA, 87 nt, Homo sapiens
cgcggggccgcgaggcccagacggccaccccacggacgggaacagaaaggaaggaacggagagcgccagccaagagaacgcaccaga

SEQ ID NO: 9004 - RNA, 73 nt, Homo sapiens
aagccggggggccggccggggccaaaccgagcgccgccccggcaggccagccgacacacaacacgcgcaccga

SEQ ID NO: 9005 - RNA, 41 nt, Homo sapiens
aagaaaacacacacacacaaggcggaaaggaaaccgcaagg

SEQ ID NO: 9006 - RNA, 75 nt, Homo sapiens
ccccacccgcgccgcgacccgggcggcgccgcagcccgccaccgacggggcgcacccggaccggcgcacggcgcc

SEQ ID NO: 9007 - RNA, 87 nt, Homo sapiens
caaccgccagacaaggacccgaaggggggaaccaaggcaagaggaaggacgcaagacaccggaaaacgcacccaagggaacagcaag

SEQ ID NO: 9008 - RNA, 70 nt, Homo sapiens
aaaaggcaaaggggagagaaggacacaagaggaagcccacaggcagagagggcagagcgaggagccagac

SEQ ID NO: 9009 - RNA, 75 nt, Homo sapiens
gagaaacaaggcgccggagcaggcgcaaggaagaagagacgccgcgcggcagacaaggcccggcaggcaaagcgg

SEQ ID NO: 9010 - RNA, 85 nt, Homo sapiens
gcagggaaggaggccgagccgggaccaggcccgggggcggcggccacgccaaggacgggaacgcaacaccagaggcacaggaaac

SEQ ID NO: 9011 - RNA, 69 nt, Homo sapiens
aaccagaccgaggcacccccccaagcaagggcagagccccacagcggagagggagagacggaaagcccg

SEQ ID NO: 9012 - RNA, 71 nt, Homo sapiens
aaaggcgagaaaggacgaagcggaccagaacaaagaagacaaacagaccccagaaagaagaagaggaaagc

SEQ ID NO: 9013 - RNA, 72 nt, Homo sapiens
gcggccgggagagagcaggccggaccccaggaaggagggccggccagggaagggaacgcccaacgcaaaaag

SEQ ID NO: 9014 - RNA, 72 nt, Homo sapiens
ggcacaccggagagcgacgggacccccccgcagaagggagcagggagcgcaggcaaggaggcgagcaccaac

SEQ ID NO: 9015 - RNA, 80 nt, Homo sapiens
gaaccaggcagcccaaaaaccaagaaggagcgagggaggagcagcgagacagcaagagacgaccacagagccacagacag

SEQ ID NO: 9016 - RNA, 68 nt, Homo sapiens
ccacaagaagaaagaacaaaggaaaaaccaagccaggggaaggaaaacaggacgcggcagagcgcaag

SEQ ID NO: 9017 - RNA, 96 nt, Homo sapiens
gccggcgggcgcggacgcgcagcaggcggggaggacgaggggcccgggcccagagcggaagacaagacgacaagcagaccggaagaccgacggaag

SEQ ID NO: 9018 - RNA, 72 nt, Homo sapiens
gggacccgcaagcgacccgacagaggcacaaaaagcggggaccacaccacacagccacgaggcgacagggcc

SEQ ID NO: 9019 - RNA, 79 nt, Homo sapiens
gaggaccccaggaacaccaacagagaacagcaagacacagagcgaagaacgaaccccaaaagacagagagcggaggccg

SEQ ID NO: 9020 - RNA, 80 nt, Homo sapiens
gagaagaaacagccacggagaacaacagacgggagacgaacgagaggcccggacccgcgccgccggcaccaggcgagagc

SEQ ID NO: 9021 - RNA, 74 nt, Homo sapiens
agaagaccagagaagcccacagaccagagaaaggccaggaagcggagcaggagacgaaaccgacccgagaccgg

SEQ ID NO: 9022 - RNA, 81 nt, Homo sapiens
gggacacccgggagcaggaaaggaagaaagggcaggcgagagagggggaacaggaccaacggaacaacacagggaccggca

SEQ ID NO: 9023 - RNA, 80 nt, Homo sapiens
cgcaccgccccgccgggacccggcgccaacgccaggaagagagaaggccacgcccgaccccaagcaacaacggggcaggg

SEQ ID NO: 9024 - RNA, 76 nt, Homo sapiens
cgcccggaccgcgcagaaccagggcggcggccagcgccacgcggccacccgcacggcagcaagaggaaagccgccg

SEQ ID NO: 9025 - RNA, 35 nt, Homo sapiens
ccagaagacagagggcgagaaaaccagaaggcacc

SEQ ID NO: 9026 - RNA, 72 nt, Homo sapiens
aaaaacagaagcacagaaaacagggcaccacagaacagccgaagcaggccaccagccgagaacgaggaacac

SEQ ID NO: 9027 - RNA, 60 nt, Homo sapiens
gggaggccagacaggggcgcagccacaaggcgcaagcagggccacacaggaaacagcagc

SEQ ID NO: 9028 - RNA, 78 nt, Homo sapiens
ggaagagccggaccccagaggagcgggaaacgcacaacagagaacagaaaagacccgcagacaacgggcacagacaga

SEQ ID NO: 9029 - RNA, 71 nt, Homo sapiens
ccccgcgcacggccagcgcagaacgaagagaaagggccagaaggaagacccagaaagagagcgaaacccca

SEQ ID NO: 9030 - RNA, 80 nt, Homo sapiens
gcgggccagcaccaggaggacggaagcggagccccccccacaggcaaggaagacgccgagcgcgcccacaaccgcgacac

SEQ ID NO: 9031 - RNA, 79 nt, Homo sapiens
cagccgcaccaccccgcaccccacccaccgaaggcaccaacacaagaccccgagcccaccagggccccggaaaggaagc

SEQ ID NO: 9032 - RNA, 74 nt, Homo sapiens
accggaagaacccggcccagagccaaaggagccccacaaaagaaaccgaaaccagcccccaaggggaaccagcc

SEQ ID NO: 9033 - RNA, 74 nt, Homo sapiens
agaaccgccggaagaggcacaggaggaagcaggcggagcacccgaggaagaaggcaccacgacaaaccggagcc

SEQ ID NO: 9034 - RNA, 69 nt, Homo sapiens
gcaggaggaccgccaaagccaacagacacgaccccgggacagcagccagaacaagccaggaagaaagag

SEQ ID NO: 9035 - RNA, 74 nt, Homo sapiens
ccccagcagcagccacccaagaaaggcggaacaccccagccccgacgcaaaacagaccaggaggagaagaaggg

SEQ ID NO: 9036 - RNA, 70 nt, Homo sapiens
agggagagacgacccagcggcggccgcgacgcggggcagccgagcacagcacgggacaaaaaggacccga

SEQ ID NO: 9037 - RNA, 82 nt, Homo sapiens
agaggagcagaaggaggagcggcgccgcgggaggagcgagaccagcccagagagcagggaggaggaggaggcagagccgcgg

SEQ ID NO: 9038 - RNA, 85 nt, Homo sapiens
cgcgggcacggccggaggccgagggagcggcgcagaaagccagaggaggaggaggcccggagagagaggaggaaagccagaggca

SEQ ID NO: 9039 - RNA, 36 nt, Homo sapiens
agagggcgggaaggcagggcagccgacggccaagaa

SEQ ID NO: 9040 - RNA, 70 nt, Homo sapiens
accaggggaggaacccccggcaagaagcggcggggaccgaggggaccaggaggagaagcaaccagagagg

SEQ ID NO: 9041 - RNA, 76 nt, Homo sapiens
ggggcaccgcgccgccgagccggccaggcgccgcacccacaggaacgccgcggagcagagccagggcgccaccccg

SEQ ID NO: 9042 - RNA, 57 nt, Homo sapiens
ccagacaaggaggaccgcacgacagcggcccgcgggaaaagcaacggcgcaagaggc

SEQ ID NO: 9043 - RNA, 76 nt, Homo sapiens
gagcccgccccagcgaggcgcacccggcgcgcccaaagaagagggggaagggagggcggagaacggaaaagcacca

SEQ ID NO: 9044 - RNA, 56 nt, Homo sapiens
aaacccaaccaagaaggcccagggcagccagacaagaaggacacagaagagagcaa

SEQ ID NO: 9045 - RNA, 68 nt, Homo sapiens
gcgcgaaaaaagagacagccaggcaaagggaaggaaaggagaagcagagaaccccagacacagagcga

SEQ ID NO: 9046 - RNA, 69 nt, Homo sapiens
gccgacgaacaaaagcggcagcccaacccagaggaacgacccaggagcggcagcccacaagcaggaaga

SEQ ID NO: 9047 - RNA, 77 nt, Homo sapiens
cccagccagacccagccagaccagaccgagccacccagaaccacagccaaggacaaggcacgaggcgcggcgaccac

SEQ ID NO: 9048 - RNA, 69 nt, Homo sapiens
cccccggaaccacacccagcgccagcccgaggagcccggcaaccgccagacaacgagaccaagaaagaa

SEQ ID NO: 9049 - RNA, 58 nt, Homo sapiens
gccaggaagaggagagaccaaaagacgggcccagcacaggcagcgcaggcaaaccccc

SEQ ID NO: 9050 - RNA, 75 nt, Homo sapiens
ggaggagaaggagacaggccccggcaccaggggccacaacaacaaacggacaggcaccagccccacgggaacaga

SEQ ID NO: 9051 - RNA, 81 nt, Homo sapiens
gacccccaacgccaagcagcccaccgacaggcccggaggcagcagaaggcggcaccaggacgccgaaaagcgaccggacgc

SEQ ID NO: 9052 - RNA, 79 nt, Homo sapiens
gagggacaccacccaccccaaaggacccggaccgacgagacaggcaaagggcgaaaggcaaacggacaaaccccaccgg

SEQ ID NO: 9053 - RNA, 71 nt, Homo sapiens
ccgagagaagaacccagggcgccaggcgccggaaccggcagggacgcaaaacaaaaggggccaaggacgca

SEQ ID NO: 9054 - RNA, 60 nt, Homo sapiens
gcggaccgagagcgcgaaacgcacgagaaggcacgacgaaaacaacaagcaaaaaagcca

SEQ ID NO: 9055 - RNA, 34 nt, Homo sapiens
ggaaaacaagggaaagcaacaccagaacggggga

SEQ ID NO: 9056 - RNA, 70 nt, Homo sapiens
cagcaagccggccaaacaacaagcagggcggagaacggaaaagcaccaggaagcagagaggaccgcagaa

SEQ ID NO: 9057 - RNA, 81 nt, Homo sapiens
gaggcacaacaggccgcgccggcggcagagaggaacgggcgggggaggagcgcgagcccggcagaaacgggaaccgggggc

SEQ ID NO: 9058 - RNA, 85 nt, Homo sapiens
gcgagaccagccggacaacaggcagccacagggccaccaggagggggccccagaaggggcaccggagccaacagcgagcgacccc

SEQ ID NO: 9059 - RNA, 61 nt, Homo sapiens
cgaccagggcaaccgggaccagcgagcgacaggcaacagggaagagagggaagaccaaaga

SEQ ID NO: 9060 - RNA, 78 nt, Homo sapiens
ggcggagaccccacgaggcagcgggaggcggccggagacccacaaccacccacagaagacggcagcgaacgagaagag

SEQ ID NO: 9061 - RNA, 77 nt, Homo sapiens
caagcacgccgacagggagaaccccggcagggacgcacaacgcagagaggcccaaggacaaggcaaaccagaaggca

SEQ ID NO: 9062 - RNA, 65 nt, Homo sapiens
agccaggcgaccggcgccagggcgccaagcgccgggcagacccaacaccaacacgaggagaaggc

SEQ ID NO: 9063 - RNA, 70 nt, Homo sapiens
gagacaagcacaaggcagaggagggccgaaaaccccggcaagcagcagaggaaagcggccagaggccgag

SEQ ID NO: 9064 - RNA, 54 nt, Homo sapiens
agcccaccggacacgagacgggcgggacaacacaagggaaccaaggagggcgcc

SEQ ID NO: 9065 - RNA, 56 nt, Homo sapiens
gcgcgacccggcccaaccccgagccgcgggcacagccaagcaggcaccaagcagcc

SEQ ID NO: 9066 - RNA, 73 nt, Homo sapiens
agcacccagcagccggaacagggccagcaccgcaagcgagcgaacaacccagccgccagcccagcccagccca

SEQ ID NO: 9067 - RNA, 81 nt, Homo sapiens
ggacgcaccaccaccaaccgccaacgacaagcccgcgccgcccccaggagcacaaaaggggccacgaggcccagggaaccc

SEQ ID NO: 9068 - RNA, 58 nt, Homo sapiens
gaaccccaggccggggcccgaagaggggccaggaagcgggaccggaaggagagcggag

SEQ ID NO: 9069 - RNA, 62 nt, Homo sapiens
aaaacgcaccgggacccacagaccagaggacaagacaaagggagcaagacaagccaaagagg

SEQ ID NO: 9070 - RNA, 70 nt, Homo sapiens
aaacacagcaccggaacagcagccgccaccaggggcagggcaagaccccggcagccggaggccccaaacg

SEQ ID NO: 9071 - RNA, 44 nt, Homo sapiens
gagcagcgaccgggcaccccacagccaccacgggcgaggccgcg

SEQ ID NO: 9072 - RNA, 86 nt, Homo sapiens
caggggaagaagaagaaacgggccgcgaaccgcagacagcggccaagaagacacaaaggacggaggcacggacccaaagacaggac

SEQ ID NO: 9073 - RNA, 70 nt, Homo sapiens
cgccggcccggagaacacacaccgccgcaggcgcccccggcgaaccagacccagggggcagaaggcaggc

SEQ ID NO: 9074 - RNA, 84 nt, Homo sapiens
gaagaaagaggacaacagacgccagaggccccaggagcagacccgccccgaaggggaccggcccaacggcccacggagaagaac

SEQ ID NO: 9075 - RNA, 72 nt, Homo sapiens
ggaacaggcacaccccacacaagcacgccaaggagagagagagaggccagggagagagaagaggagacaaac

SEQ ID NO: 9076 - RNA, 63 nt, Homo sapiens
ggcagccggggcccaggcaacccaagaacaggccacacgggagacaagcgcaagcagccagag

SEQ ID NO: 9077 - RNA, 80 nt, Homo sapiens
agggccaagggagccgcccgaggaccaggggagcgaagggcaagaacggaagcacgggcggaggaaagcacaagcagagc

SEQ ID NO: 9078 - RNA, 78 nt, Homo sapiens
aaaggaacaacacaccaccaccaagaaggaggagcaaccacaaaccgaaagaagcaaagcacgccgaaacagagcagc

SEQ ID NO: 9079 - RNA, 60 nt, Homo sapiens
cgaaggccgggagaccgcggaggaaggggccccgaacaccgagagaacggacgagaccaa

SEQ ID NO: 9080 - RNA, 72 nt, Homo sapiens
aaggagaggaacggccaaaacgggggacgcgccacagacgggggaacccagaaagagaaccgacgggaacac

SEQ ID NO: 9081 - RNA, 74 nt, Homo sapiens
cggaggggcccacgaggagccaacacaccagcagggaaacacaaagaagacaccagaagggccagcaccacgac

SEQ ID NO: 9082 - RNA, 77 nt, Homo sapiens
gacaccagcagcccaccaccaagcccagcccaggaggcacgcgacccacagagccgcagagcaagcgaaaacaaaca

SEQ ID NO: 9083 - RNA, 84 nt, Homo sapiens
caggccaagccaaccagccagcaggccgggcgggggggccgcaaggccaggcgcgcagaggcacccaacggcacagaccccaca

SEQ ID NO: 9084 - RNA, 69 nt, Homo sapiens
cagcaagcagaaagagaaaggcaaaaagacccacagacacacaggaaagcaggcccccgacgcagcaca

SEQ ID NO: 9085 - RNA, 73 nt, Homo sapiens
gcggcagacgcaggcgggaccagagcgccggggagcaaaagcagccagaagcaaaaggacaaccggcaaccag

SEQ ID NO: 9086 - RNA, 79 nt, Homo sapiens
gagccaacaagggcgacgcccgggcgcgcagaacaggcgcgcggcgacacccacccggcaaggcgccaccggaagaaac

SEQ ID NO: 9087 - RNA, 80 nt, Homo sapiens
ccacccaagcccagccaaaccaggggcaacccaaaaacccaggccgccagacccacccggacccccagaaaaggaaacaa

SEQ ID NO: 9088 - RNA, 80 nt, Homo sapiens
ccagagagagaagccaccacggcaaagggcggcccaaaggcgaaacacagaaggagacaaccacagggccccaggaccgg

SEQ ID NO: 9089 - RNA, 50 nt, Homo sapiens
cagccccaacagcccgagggcccggccagaaagacaggagcgaaaaccca

SEQ ID NO: 9090 - RNA, 70 nt, Homo sapiens
gccggaaccggacacgcagcccggcgagcagacaccgcaggaaagggcaaaggacgcggcccggcagacc

SEQ ID NO: 9091 - RNA, 87 nt, Homo sapiens
gagggaacgcaccgaagcacaccgagaccccaaaccccagggaccagggcgggcgcagccacacccggaagagacggaggaaaacac

SEQ ID NO: 9092 - RNA, 104 nt, Homo sapiens
caagcccgagaggccccaaaaccacccgcggagaacaaccgaacggaaagcggcagcgcagcaagacagcgaacccacccaacacggcaaaacaaagacaccac

SEQ ID NO: 9093 - RNA, 62 nt, Homo sapiens
caggaaccacaacccaaccagccccagaagaaacgaccccccagccaggacccgcaccacca

SEQ ID NO: 9094 - RNA, 84 nt, Homo sapiens
aaacgaaacaaaggaccaaccaagaaaaacaaccaccagcgagcaaaaaggcaaagaccaagaccaccaagaagcgccccagcg

SEQ ID NO: 9095 - RNA, 54 nt, Homo sapiens
cacacagaggagagcgacgagaaggcaggcgagaacgaaaccaagaggcaaaga

SEQ ID NO: 9096 - RNA, 80 nt, Homo sapiens
gagaggaacccgaagaagaaaggacgacagccagagaggccgcaggagggaagcgcacggaaaccgccccgggaggcaca

SEQ ID NO: 9097 - RNA, 85 nt, Homo sapiens
ccgacccaaccacgcacgggacagagagcccgagacacgacaggaccaaccaagaagcgaagaaaagagaaagaaacagacaagc

SEQ ID NO: 9098 - RNA, 78 nt, Homo sapiens
gcccgaggcccagaggaggagaggaacccgaaggcccgaagacaacccgccgccggcacgacggagggcgagcacgcc

SEQ ID NO: 9099 - RNA, 84 nt, Homo sapiens
ccgacaagaagaagagaacaaagagccgggagacggagcacggcgccgcggcaagagccaggacaagaaaaccccaggacacag

SEQ ID NO: 9100 - RNA, 80 nt, Homo sapiens
aaggcggcagcgccgagcgaacagagaacagcgccggaaaaccaccaccccaggggagcgccagcgggcggcccccaccg

SEQ ID NO: 9101 - RNA, 75 nt, Homo sapiens
aaaccacaggcacaaagagacgcgcagaagaagcccacccagaacgccccccagggaacccagcaccccaccagg

SEQ ID NO: 9102 - RNA, 61 nt, Homo sapiens
aaggacgcgcgaagcgcgggcggcaggcggcccaaaggcgaaacacagaaggagacaacca

SEQ ID NO: 9103 - RNA, 69 nt, Homo sapiens
agaggcagagaacgcgacggccggggccgcccggcagccgcagcagcgggaaaaggagaacagcgaaga

SEQ ID NO: 9104 - RNA, 70 nt, Homo sapiens
aaaccacgacacggcaggaagagcaagggaaaccgcgggcacagcaggccagaaaaacccacagacccca

SEQ ID NO: 9105 - RNA, 82 nt, Homo sapiens
aaacaacaagaaacccacaaccaagagaaccaccagaagccagaggacaaaacccagccggcacaaaccaggaaaggaagcc

SEQ ID NO: 9106 - RNA, 74 nt, Homo sapiens
ggccgcaccggcgccccacccgcccccgcgggcgccgggccaggacgggacccgaagaggcagaagccaccaag

SEQ ID NO: 9107 - RNA, 82 nt, Homo sapiens
aaccagcacaagaccggaggcggcagagacgcccaagccgcccggaggagaccccaggagaccgcaagcagagcgacaagca

SEQ ID NO: 9108 - RNA, 84 nt, Homo sapiens
aagcgaccgccggagcgaggaccagggcgaacaccggcagcaagagcaaccaccaccagccgggcccagaagcagcccgccccg

SEQ ID NO: 9109 - RNA, 83 nt, Homo sapiens
aacaaggacaacaagagacgggacaagacagggcaaaggacagaccagcacccaggccacagaggaggaaagagaggggaaag

SEQ ID NO: 9110 - RNA, 74 nt, Homo sapiens
gcaaaccagcaacgcgacaaaaagaccaaaacagaaaaggaaccaagaggaagggccccacaccaaaccgccac

SEQ ID NO: 9111 - RNA, 77 nt, Homo sapiens
cagagccccccccaccagaggacgggaggagcagcaacaggaagacagaccgcgaggccacacccaagaccgagccc

SEQ ID NO: 9112 - RNA, 65 nt, Homo sapiens
cccccccgccacaagaacagggacaagggggaaagagagggacgaaaccccagacacaagaaaac

SEQ ID NO: 9113 - RNA, 77 nt, Homo sapiens
aggcggacggcgggaccacaagacaacgcggagcggcgaagagcaaccagaggaacaccgaaagaagagaagcaaga

SEQ ID NO: 9114 - RNA, 76 nt, Homo sapiens
caccaggccaccgccacgggccgagacacgcagcggcggccagggaccagaaccagccaggaaaggagaggaaacg

SEQ ID NO: 9115 - RNA, 65 nt, Homo sapiens
ccgccgaagaagcacgaaagccccacccgccgcagcaagcagagggacgaccaggacagcgcaaa

SEQ ID NO: 9116 - RNA, 40 nt, Homo sapiens
cggaccgaaacaggaccgggagggaagcggacacacagga

SEQ ID NO: 9117 - RNA, 87 nt, Homo sapiens
cggaacggcgaacagacccgacgcgcccgcagaggcggccaggccagacagaaaaaggaagcccaccacccaccccaggacagcgag

SEQ ID NO: 9118 - RNA, 76 nt, Homo sapiens
gcgggcgaggcccccgcacagcacgcgcagaacaaagggacaggggagcgcggccacagacgcacaggcagagaca

SEQ ID NO: 9119 - RNA, 83 nt, Homo sapiens
cccccacccagaggcaggaagacggagcccggcaggaggaagcccagaagcaacaagcccgacgcccccccagagaagagcca

SEQ ID NO: 9120 - RNA, 68 nt, Homo sapiens
caacgggcagcggcagcggaccccagagccagagcacacggcccccgcagccaccaggccaccggagg

SEQ ID NO: 9121 - RNA, 78 nt, Homo sapiens
gagggaaccaggggacggcacgcccgggaaccgcagaaacgcggacgggagaagcaacgcgaacagcaacaggaccac

SEQ ID NO: 9122 - RNA, 99 nt, Homo sapiens
agaaagccccggaacaaaaagccccagaccagagacagaagcagaggacgccaggggagaagcagaccgcaccaggcgggaccccgaaaaagcccaaac

SEQ ID NO: 9123 - RNA, 74 nt, Homo sapiens
cagccaaaaaccacagcgcacacagaggggagcaacacgaagaaacgaagccggaggggagggggcgcccgaac

SEQ ID NO: 9124 - RNA, 71 nt, Homo sapiens
ggagggcaccaaccacaaaggaacccagcagaagccagccgccacgccgagccagccagcaccaaccaacg

SEQ ID NO: 9125 - RNA, 74 nt, Homo sapiens
cagagagccccagcaggaaggccaccgagggaacccgaccggacccagccccagaaggaaccgcgacccaagcg

SEQ ID NO: 9126 - RNA, 73 nt, Homo sapiens
accaggagcccgagagagaagggccgggaacccaacaagggagcaaacagagaaagaacccaaacacacagaa

SEQ ID NO: 9127 - RNA, 73 nt, Homo sapiens
agaaacgccccaacaggagacaccgccggagcagggaaacagcagacagcccccccaacagacaggcagacac

SEQ ID NO: 9128 - RNA, 74 nt, Homo sapiens
gacacgagggaggacagcaaaaaccagggcccacagaggagaacaccggaagaacagacacacagagccacggc

SEQ ID NO: 9129 - RNA, 79 nt, Homo sapiens
caccgcagcccagaccagaacaagacacaagaggacagccggaacaaagagaccaaaaaggcacaccaagcccagggac

SEQ ID NO: 9130 - RNA, 84 nt, Homo sapiens
cggagccccggcggccaccccggggccgggcagaagggcccaggccgaaagaagaaaacccgagcagagaaaacaacaaagcgc

SEQ ID NO: 9131 - RNA, 75 nt, Homo sapiens
gggcgagcgacccaggaaggagagagacagaagccaaaacaggaaccgaaaggccaagcaaccagaaagaaaaca

SEQ ID NO: 9132 - RNA, 92 nt, Homo sapiens
ggagcgacaagccggccagcccccgacaaggagagggaggagagccgcggcagaaccgagcacaccacaggccaaacggaggaaggcaccac

SEQ ID NO: 9133 - RNA, 68 nt, Homo sapiens
gccacagcaggagaaggcagagagcaaggaaacgaaacaggaagagggaccggaggcgcaacgcgcag

SEQ ID NO: 9134 - RNA, 80 nt, Homo sapiens
acaagagaagagccgcagcgaaaacgggaagcagcagaaaaagccgagccgaaggacaagcaccgagacaaccaagcaag

SEQ ID NO: 9135 - RNA, 71 nt, Homo sapiens
gaaacagaacgacagaaacaagcaggccagcccagaacaaagcaggccacggaaggagcacacaaaacaag

SEQ ID NO: 9136 - RNA, 47 nt, Homo sapiens
cgaacacacaagggaaagggacccccagacaacaaaacagagagaag

SEQ ID NO: 9137 - RNA, 76 nt, Homo sapiens
gccagcgcgagccgacagacagggaggccgcgggccgggagcggacgcggggagcaccaacaagacgcaaaaccag

SEQ ID NO: 9138 - RNA, 75 nt, Homo sapiens
gaagggaggaaaagggcagggacagcgcaggcagcagcccgggaagcaggcgcaaaaacaggaaaacgacacgac

SEQ ID NO: 9139 - RNA, 74 nt, Homo sapiens
ccaaggacagcagaacaaagaaagcaaaagaaaaagaaaacagaaagcaacaaagaaacacaggggaaacacga

SEQ ID NO: 9140 - RNA, 50 nt, Homo sapiens
gcaggaaacccggggcagcagaggcaccacccacgaaggaacgccggccc

SEQ ID NO: 9141 - RNA, 81 nt, Homo sapiens
gcaaacacccaccccgcgcagcagaaccagagaaacccagaaaacaacccggccaagggcgaggggccgaccagcaacaag

SEQ ID NO: 9142 - RNA, 75 nt, Homo sapiens
cacagcagagaccaaaggcagggcaaggaaacggccacaagaagcggaagaaagaagagccaagaagggaagaaa

SEQ ID NO: 9143 - RNA, 69 nt, Homo sapiens
cgcagggcgcccccgaagacagcccaacaaggcgggacgacaacaccacagacacccccaaaccaccaa

SEQ ID NO: 9144 - RNA, 83 nt, Homo sapiens
caacggcaccggcagcggcccagaccggcggcaggcaaaggagccccaagcagcgggagcggcaggcaagcgaccagcccagc

SEQ ID NO: 9145 - RNA, 65 nt, Homo sapiens
aagcccgggcgcaacagagagacaaaaaggacggccaagagcagcacccaaaggccaggagcgcc

SEQ ID NO: 9146 - RNA, 65 nt, Homo sapiens
gacaacgcagaaagaacacacacaaaaacaagccgacagaagaaagcagacagagagagggcacc

SEQ ID NO: 9147 - RNA, 74 nt, Homo sapiens
aacaggcccgaaaggagaagaacagaccacgggagaaaaacaagaaacagcagccaaccaggcccgagacaaaa

SEQ ID NO: 9148 - RNA, 98 nt, Homo sapiens
cggagggggaagaccgcgcccgcggagagcccaaacaccaccaccaagggcggagaacggaaaagcaccaggaagcagagaggaccgcagaagggaag

SEQ ID NO: 9149 - RNA, 77 nt, Homo sapiens
cagacagagaccccccaggacccgcggggcgggcgcgaagcaggcacaacgacgcagaccagagccaggccccgagc

SEQ ID NO: 9150 - RNA, 87 nt, Homo sapiens
gagccgccggccaagacgaagggaccacaagggaggaaggcgggccagcgggagagagacgccggcccacaccaggggcacacagca

SEQ ID NO: 9151 - RNA, 75 nt, Homo sapiens
ggggacaaaggagccaggacaaggccaagcgagcagacagcggggagcacgcagcacgaggcgaaaacccagaag

SEQ ID NO: 9152 - RNA, 80 nt, Homo sapiens
cgcccgcgaccacccggaggagcccggcagagcgcggacgggcagaagagcgacaccagggaagcagcacgggacgagcg

SEQ ID NO: 9153 - RNA, 80 nt, Homo sapiens
ggccccggcccaaccgcccgcgaccccccgcgccgcgccgccgccgcagcgccaaaagccggagccgaaagcgagcgagc

SEQ ID NO: 9154 - RNA, 52 nt, Homo sapiens
ggagccagcgagcccccccgacacggccaagaacggccgagcgaccaggaga

SEQ ID NO: 9155 - RNA, 74 nt, Homo sapiens
ccccggcggcaacacaagccaaagccagccagagggcacgcacgggcccaagcagaacccaacgacaaagcagg

SEQ ID NO: 9156 - RNA, 80 nt, Homo sapiens
ccgggggcgagcacaaacggggcggggccggggaacacacagacgaaagcgcgcgcgcagggagcagcacccccaccgca

SEQ ID NO: 9157 - RNA, 76 nt, Homo sapiens
ggcaccgagggcaccacgcgcggagaaaccggaggcacaacagcaaggagcaccgccaggaaaccaccaaaacaca

SEQ ID NO: 9158 - RNA, 81 nt, Homo sapiens
gaagggacagcggcccgaccgccccccgaggcagagacccagcaaccccggacaaagagccagcgccaaggcacgaagcag

SEQ ID NO: 9159 - RNA, 90 nt, Homo sapiens
ccaagcgcacacaaaagaggagaaaaccgggcgcagccgaaacgaaaacaccacgacgaagacgggagaacacagcgccggcagaagcaa

SEQ ID NO: 9160 - RNA, 60 nt, Homo sapiens
ggcggcggcggaggagagccgcagagcgcgcagaccccggaaaagcgacacaccaggcgc

SEQ ID NO: 9161 - RNA, 70 nt, Homo sapiens
gcagccgcggcggagacgcacaggcccgggaaagacaaggagccgggccgagaaaccgaaccagagacca

SEQ ID NO: 9162 - RNA, 76 nt, Homo sapiens
aacaggaagcagaaacaaggagggaacaggaaaggaaggcaaagccagccccgcaccacaaaggccccccaagggc

SEQ ID NO: 9163 - RNA, 77 nt, Homo sapiens
cgagcgggaaaggccgcgggggcaacggagaaaacccggaaccgcgacggcggcagggacagaccgagaaagggagg

SEQ ID NO: 9164 - RNA, 73 nt, Homo sapiens
gacccccgggcaggcgaaagaggcggcggcgcgccgcggccggccacgcggaccgaaaaggaacgcccaagca

SEQ ID NO: 9165 - RNA, 56 nt, Homo sapiens
gcaacagaagagcagagggaccaccccagaacccggaaagcaaggggagggaagag

SEQ ID NO: 9166 - RNA, 78 nt, Homo sapiens
aggaacggcacggagccagacacaaaacgacagacgagaacaaggcaagaaaccccccaggacacaaagggaaaggag

SEQ ID NO: 9167 - RNA, 77 nt, Homo sapiens
cccaggaccccggaagccagaaaggccaggagggggccacaccgaacccagccgggaggccaaggccagggagcgag

SEQ ID NO: 9168 - RNA, 75 nt, Homo sapiens
aaacccgaaagggggcaaccagaaagccaggagccacgcaggaggggaacccaggagaaacgagagggacagcaa

SEQ ID NO: 9169 - RNA, 77 nt, Homo sapiens
gaaggccgggacccggccccggcccacaggggggggcaaacccgagagaacggccgggcccacccgccacacacccc

SEQ ID NO: 9170 - RNA, 83 nt, Homo sapiens
caacccaccggcacgacagcgcgccccagaccaccggcagggaacagccgagcagaccgaggaggcccaccagcagacgccac

SEQ ID NO: 9171 - RNA, 57 nt, Homo sapiens
gccacggcagacacacaacccgacccgacgagcgcaaaaggccacgccggagggaac

SEQ ID NO: 9172 - RNA, 75 nt, Homo sapiens
ggcaccgcaggcaagcgcaacaggaggaaaacggccaacccaccgcgccgaaagaagaaagcacaggaaagagag

SEQ ID NO: 9173 - RNA, 77 nt, Homo sapiens
cgcaaaccgaaagccacacaccagggacagagcagaagggcgaaagaccgggccgcagaagaggccccaacccgggc

SEQ ID NO: 9174 - RNA, 70 nt, Homo sapiens
ccaaccccaagggagcccacacagaaaagaaacccggaaccccccccacccgccaagaacaacgcaaacg

SEQ ID NO: 9175 - RNA, 81 nt, Homo sapiens
caagcagggaccaggcagaacgaacgccacagggggaagaacgcaaagcgaggcaacaaacgaaccaggaaggcaaacgaa

SEQ ID NO: 9176 - RNA, 85 nt, Homo sapiens
cgcgggcccgagcagccagaccgacccacccgcgcggaggagaaggagaaacggaggacgcccccacacaagccaacacgggcgc

SEQ ID NO: 9177 - RNA, 53 nt, Homo sapiens
ccgggcccgaaggcgcggaacaagagcaaagaccaagagccaggggggggggc

SEQ ID NO: 9178 - RNA, 61 nt, Homo sapiens
gacgggccgggccacggaaaccggaggaccagaggagggacacgacccaccaccacccggc

SEQ ID NO: 9179 - RNA, 55 nt, Homo sapiens
aggaacaccaccaaaaacaggcaaaagggaaagcaaggggaagggcccaagaaga

SEQ ID NO: 9180 - RNA, 72 nt, Homo sapiens
gacgagcccccggaaccacacccaggcgcccgcagacgcagaagaccgcagagccgcgcgaccgcccgagcg

SEQ ID NO: 9181 - RNA, 74 nt, Homo sapiens
ccggagggccagggccccggagacgacgcaccaaacccccacggacagccccagaacaacacccccagcacccc

SEQ ID NO: 9182 - RNA, 74 nt, Homo sapiens
caggacgggaagacagcaaaaaaaggaacaccacgaacaaagggaccgagcagagaaccaacggagaacagccc

SEQ ID NO: 9183 - RNA, 62 nt, Homo sapiens
acgacaagaggcgacgcgaaccgggcccaggaaccacccagggaagacgaggggcgaggagg

SEQ ID NO: 9184 - RNA, 45 nt, Homo sapiens
cagcccaaacgggcagcgaaggggcgggccggccccagcgagcca

SEQ ID NO: 9185 - RNA, 61 nt, Homo sapiens
gcacggcagaaacagccaaggagacgaaagagggcacccacccacgaagggaggaaaaggg

SEQ ID NO: 9186 - RNA, 87 nt, Homo sapiens
aggcggacgggaaggcgggagacgagaagccgaaaagcgcagcgagcggagccgccggaggagaacccaccccccacggaccgacga

SEQ ID NO: 9187 - RNA, 70 nt, Homo sapiens
aacagaaacaagacaggaacgccagggccacggaaaggggcccagaaggggccagcaaccaaagggagca

SEQ ID NO: 9188 - RNA, 76 nt, Homo sapiens
cgagcgcgccgccgccgccgccagaacaaccgggcgccgacgagacgggcccggcgagcgaccgccgggggaacgc

SEQ ID NO: 9189 - RNA, 84 nt, Homo sapiens
gcggcgaggggcccaaggacggggccgaggcagggcgcagcggggaagaggacagggcagcccgcggggccggcgaagacgccc

SEQ ID NO: 9190 - RNA, 84 nt, Homo sapiens
cacagcacgaggagaagagacaagaaaaaaaagcacagcaaaaagcagagggaaccgacccagacacaccgcggccagaggccc

SEQ ID NO: 9191 - RNA, 70 nt, Homo sapiens
ccgacagaccaggcccaagcgaaaaagcgggaacgcaggacccaaagcccaggcggggggcagagacgag

SEQ ID NO: 9192 - RNA, 40 nt, Homo sapiens
gcccgcgcgcagcccccggaagaggaagaacgcgagaaaa

SEQ ID NO: 9193 - RNA, 80 nt, Homo sapiens
ggacggaaacccacaggcacacccaaaggaacgaggaagaacagcaaagaccaacagagcccaccagaagaaacgaacga

SEQ ID NO: 9194 - RNA, 85 nt, Homo sapiens
gggcgcggggcggaaaaggccggcagaagggaggcacgaggaccgacagaaacgcagacagggcagagaggaagagagaggaacc

SEQ ID NO: 9195 - RNA, 73 nt, Homo sapiens
acggccagggaaccaaacagcagagcagggagcgcggaggccggcgagacaccacacaggaaacgcagaagag

SEQ ID NO: 9196 - RNA, 75 nt, Homo sapiens
accagcgacaaacaggaaaggcgggagagaagcaacgggaaccaaccaaacgggagcgaacgcgaagcacaaccc

SEQ ID NO: 9197 - RNA, 73 nt, Homo sapiens
gccgccgccccgccagcgccagacggacgaggcggcggagaacaagcggcagggggcacgcgaaggacagcaa

SEQ ID NO: 9198 - RNA, 78 nt, Homo sapiens
aggccagcaccaccggcagcaccagcccgaagaagccgggcagaccaggcagcagcggaaaggagcagggaaggacca

SEQ ID NO: 9199 - RNA, 72 nt, Homo sapiens
cgccaaggcggcgcagcgaacaacgcaaacgcccacacagcaagcacgggcagaagaaggaacggaaaaagc

SEQ ID NO: 9200 - RNA, 70 nt, Homo sapiens
cacgcgagcacacacaacgcgagcacacccccagaaggaaaaaaaagcccaacaccaaagacacacaagg

SEQ ID NO: 9201 - RNA, 86 nt, Homo sapiens
aggcaaaggagaacccgcaagccagaaagaaacagaaagaagggagaaggggccaaacaggagaagaagaagaagaagacaggcgg

SEQ ID NO: 9202 - RNA, 78 nt, Homo sapiens
cgcaacgacacggggagagaaagaaaaggaacgggagcgagagaacccaggagaaacgagagggacagcaaggaagac

SEQ ID NO: 9203 - RNA, 73 nt, Homo sapiens
acgggcaaagaggccacagaggcagccaaggaaccgcggcagaaaaggggaagggaaccgcgaaaacccggca

SEQ ID NO: 9204 - RNA, 80 nt, Homo sapiens
caggagaaagaagacagccacagaaagggcggcacaggcagaagcacgagccacaggaggagccagcccagaagacgggg

SEQ ID NO: 9205 - RNA, 57 nt, Homo sapiens
ggaagccacggcagacacacaacccgacccgacgacgccccacaggaagcccgcaga

SEQ ID NO: 9206 - RNA, 70 nt, Homo sapiens
cccgagacgcgccggcgcgggcggcgcccagcggccacacgccccaagcgccacgcccgggcgcccacgc

SEQ ID NO: 9207 - RNA, 77 nt, Homo sapiens
cgacacgaacagagggaggagacagaggaagccagcagagcagggaggaaaaccaaggcaacgccagcacaccaggc

SEQ ID NO: 9208 - RNA, 72 nt, Homo sapiens
cgcaaagagaacacgcaaaacaaaagacacaccaaaccagcagcacaacagaggcagcagcagagcgaacag

SEQ ID NO: 9209 - RNA, 74 nt, Homo sapiens
aaagggacaagaagggcaaagccgaagcgccacaggagccgcagaagcaaaggcaccgccaaaccgaaaacgcg

SEQ ID NO: 9210 - RNA, 60 nt, Homo sapiens
ccgagcagcagcgagacccagaccggcaagaacagaagaccggggaccagaagggagaag

SEQ ID NO: 9211 - RNA, 67 nt, Homo sapiens
acgaaaagaccacggcagaagccccacagagaggcaggcaacccaaggaagaaggaggcaaagagca

SEQ ID NO: 9212 - RNA, 76 nt, Homo sapiens
ggggacgccaccggagaagggaggaaaaccaacaagcaccacccaacccaccagacaccaggaaaaacgaaagagc

SEQ ID NO: 9213 - RNA, 71 nt, Homo sapiens
cgggaagggaaccggaaaagacaagcgaggagaccgcagccgagcagcaccgcagcagaagaacaaaagga

SEQ ID NO: 9214 - RNA, 83 nt, Homo sapiens
gcagccgcaccagaaccaggcgaagcggggggcgcgagccgcaccaccgcacggaggagaagaggagaccaggccgagaccgc

SEQ ID NO: 9215 - RNA, 32 nt, Homo sapiens
gcagggcgcccccgccaaacagacagcgcggg

SEQ ID NO: 9216 - RNA, 80 nt, Homo sapiens
cgggaagcccagcgacggagcacgccacgggccacgcccaccggacacggaagcgggagaacagccccaggaagacagag

SEQ ID NO: 9217 - RNA, 69 nt, Homo sapiens
gagccaaaacagaggcacccaccgccgagacacggaagggcggcaaacccgaggaaacagcaaaaaaag

SEQ ID NO: 9218 - RNA, 84 nt, Homo sapiens
acacaggccccaggccccaggccccgcccgcgggccagggcgccggcgcagagggaacaggcacgccccacccgccagccgagc

SEQ ID NO: 9219 - RNA, 73 nt, Homo sapiens
gagcccgggagcgacccgcgcaaacaaacaggacagcaaaggcggggagacacccaagaaaacaaagaagggg

SEQ ID NO: 9220 - RNA, 62 nt, Homo sapiens
acgcagggcgcccccggagacccaaagagacacccacaagaaaagaagaaaagggaaagaga

SEQ ID NO: 9221 - RNA, 68 nt, Homo sapiens
gggagcaccacgacacgggacgggacagagagccgaaagccgggcaaggggaaagaaggccgaagaac

SEQ ID NO: 9222 - RNA, 36 nt, Homo sapiens
aggcccccagccagggaacagggaaaagaggacgag

SEQ ID NO: 9223 - RNA, 71 nt, Homo sapiens
cgcagcggaccggaaaaagaaaaggcgcagggagcaggagaagcggagcgaaggggcgggcaggcagaggc

SEQ ID NO: 9224 - RNA, 57 nt, Homo sapiens
gaagcgaccaagcagaagggacaagcaaggggccaaggagccaaggaggaaacccac

SEQ ID NO: 9225 - RNA, 55 nt, Homo sapiens
ggggaaccaaggagacgcccggcacgcagaaaaaggcgaacaggacaagaagaaa

SEQ ID NO: 9226 - RNA, 80 nt, Homo sapiens
caaaacccagacaccgacgggccgcgaggggaagaggaagcaaagccaaggggaaaaagaaaagggcgaagacccgaagc

SEQ ID NO: 9227 - RNA, 78 nt, Homo sapiens
gcaacaaccgggggccgcaccggaacgggcacaagccgacgcaccgccgccccggggagaccccacgcagggcagagc

SEQ ID NO: 9228 - RNA, 57 nt, Homo sapiens
aaagaaaagacaccgcacgaaaggagaccggaaacgagagaaacgaagacgaagaaa

SEQ ID NO: 9229 - RNA, 78 nt, Homo sapiens
gacggaaacaaggcaacagaaagagcaacagcagggcaacagaccccacggaagaaccaaacagcgcacaccaggaca

SEQ ID NO: 9230 - RNA, 87 nt, Homo sapiens
gcggaaggcggaggccgagaccagacgcggagccaggccgaggggcggacgcggccggagcgcaacaacccaaacaccccgccagag

SEQ ID NO: 9231 - RNA, 84 nt, Homo sapiens
ccaaccccggggcagggcaagcacgggaagaagcagcggacccgccaccacacggcaccggcaaacggggacagcgccgaccgg

SEQ ID NO: 9232 - RNA, 78 nt, Homo sapiens
gggggacagacgcaagcagagagcacgagagaggacgaggcacagagcggccgcgccaggcagagcaccgccggagga

SEQ ID NO: 9233 - RNA, 82 nt, Homo sapiens
agccaaacgaagaaaggaaggccccacggcgcgccagccaggcaaacgaacacgcgcagcgcagaggcccggcagccccaag

SEQ ID NO: 9234 - RNA, 82 nt, Homo sapiens
cgcggggaccaagggcaacgacggacacgagcgcacgccgaaaacaggccgcaagagagcacaagagacggaaaaggaaggg

SEQ ID NO: 9235 - RNA, 71 nt, Homo sapiens
agaaccgaggaaaagaccagcagcagcaaaacaggccggcaacgaaagcaaaccgagagcaggcgaaggcc

SEQ ID NO: 9236 - RNA, 83 nt, Homo sapiens
caaagggagagcggggcagagaggagcacacggccagggcaggcggccggcagagggcagagcacaccaggcagacaagcaag

SEQ ID NO: 9237 - RNA, 73 nt, Homo sapiens
cagaaaggccagcagcggagagccaaacaagaaagcgccgagaggaggacaccgcgacagcgcagaacacaca

SEQ ID NO: 9238 - RNA, 86 nt, Homo sapiens
ggagccgcagcgccgggcgaccccgcccgggcccggaacacgaccaacggccccaaaaaccaccggcaagaagaagagcaggaaga

SEQ ID NO: 9239 - RNA, 50 nt, Homo sapiens
gcagaaacacagcacaaacaccagaggcggagggcgaacgaacgcccgcc

SEQ ID NO: 9240 - RNA, 50 nt, Homo sapiens
gcaaccagagcggaagcccaaacgggaagaaaaacgaagagccgaagaac

SEQ ID NO: 9241 - RNA, 97 nt, Homo sapiens
gcccgccagccggcccggcggcgcgcgcgcgacgcgcgcgcccggcccgggaaacccgagaggagcaggagcaaccgacaggcgggccggacagcgc

SEQ ID NO: 9242 - RNA, 78 nt, Homo sapiens
ccaaaggcagcaaaaacaagagccccaaagcagccaaaagaacagaacacgagcgagaaaacagagcagacagagaca

SEQ ID NO: 9243 - RNA, 74 nt, Homo sapiens
ggaacgcggggaaggcgaggcacgaccccacccccgaggcccgaccgggacagaagacgccccagggcaccgcg

SEQ ID NO: 9244 - RNA, 76 nt, Homo sapiens
accaagaccaccaaggcaaaggaaagaggagaaaccaaagaagcccggggcagcccaccgaaccagcggggcgcca

SEQ ID NO: 9245 - RNA, 63 nt, Homo sapiens
ccagccccagacaggacgccccgacaacaaccagacgcagagacggcgagcaaagcccgggaa

SEQ ID NO: 9246 - RNA, 75 nt, Homo sapiens
acagcggcgaccgggacgggggccgagacaacaagaaggggaggaacaaaagcgcaaaccggagccagaaacaac

SEQ ID NO: 9247 - RNA, 78 nt, Homo sapiens
ggggacgggcccagaggcccagggaggcaggggcagaaacagagaaggaacaggacccccgcaggcagcggcaggacc

SEQ ID NO: 9248 - RNA, 83 nt, Homo sapiens
aaggaagaggcggacggcgggaccacaagacaacgcggagcggcgaagagcaaccagcccgccgacacagccaccaagaaggc

SEQ ID NO: 9249 - RNA, 82 nt, Homo sapiens
ccgcccgcggcgccccggggggcggcgcccacccgggaggacagggggcaccagccgaagccaggcaagcaagaaccaacaa

SEQ ID NO: 9250 - RNA, 59 nt, Homo sapiens
cgccggcgggccgcccaggggccggcgccagagccggcagagagcagggggaacacgcg

SEQ ID NO: 9251 - RNA, 71 nt, Homo sapiens
cagggcggaagcccgccccagagcaggacaggagagacaacggaggcaagaaagacggagaagcgagaaga

SEQ ID NO: 9252 - RNA, 56 nt, Homo sapiens
aagcaaccaaaacacagcccaacagaggcccacgcggaccggcagcgccaccggac

SEQ ID NO: 9253 - RNA, 59 nt, Homo sapiens
aaccaacgcagagcacccggcgagacgagaacgcagagaggcacacccagaagccacag

SEQ ID NO: 9254 - RNA, 75 nt, Homo sapiens
aagaacaacccgaacgcaaaagaaggggccggaggacgcggggaaccagaccgggccagaccccacgggacagac

SEQ ID NO: 9255 - RNA, 48 nt, Homo sapiens
ggacgggcgcccagccagaaggcccaaaagggaacagacacaagcaga

SEQ ID NO: 9256 - RNA, 70 nt, Homo sapiens
gacgggcggggcaaaaacccgacaacagcaacacgcaggaagaagaaccaggcagacgcagcaggaagac

SEQ ID NO: 9257 - RNA, 96 nt, Homo sapiens
ggcggacggaggcgagccggccggggcccccccggccggcagggggacgggggccgcggagcaggagcaaaggagcaagaaaccagacccggaaac

SEQ ID NO: 9258 - RNA, 75 nt, Homo sapiens
gcagccagccgcggaggggagcggagggcgaggacccccgccagcagggaacccaggagcaggagagaagaggcg

SEQ ID NO: 9259 - RNA, 76 nt, Homo sapiens
cccgcccagaacagaaggaacaagaggacaagcaccgaggccgcggccacgggcacccggcaagcagaaccgagcc

SEQ ID NO: 9260 - RNA, 74 nt, Homo sapiens
ggaagaggacacacacccagcagcggccgaagaaaccaaaagacaggccaaccgccccacgacacgaggcccag

SEQ ID NO: 9261 - RNA, 82 nt, Homo sapiens
ccggcccgcgcgcgcaccccgcggacgccacagcgcgagaacagcaagagaaagagcaggaaacagacccgaaggggaaaac

SEQ ID NO: 9262 - RNA, 67 nt, Homo sapiens
cggcggacgagcggagccagaggacggagaagacgaggaagaggaggagagaacgcccgcgaggcca

SEQ ID NO: 9263 - RNA, 79 nt, Homo sapiens
acagagggaaagaagaggccccagcacacgggacgggaacacgcagggagggccaacgcacagcgcccgcacccgcgcc

SEQ ID NO: 9264 - RNA, 73 nt, Homo sapiens
cggccagaggaccccaaggcgcacaccacccgacgccgaaggaaggccgggcacgacaaccagcccagccccg

SEQ ID NO: 9265 - RNA, 76 nt, Homo sapiens
caagaagcacggacccgcagcagcagaacaaagcagccggaaaggagccaagagggagacaaaaacaggaagagaa

SEQ ID NO: 9266 - RNA, 74 nt, Homo sapiens
cacaacaccgcccccaccggacccacgaggaagcggccgcggcgaaccccagagccagcgggcagacgaacagc

SEQ ID NO: 9267 - RNA, 74 nt, Homo sapiens
acggaagcaccaagaggacaaccacaggaccgaagcaaaacagagcacagagcacaggagaagcaagcaagaac

SEQ ID NO: 9268 - RNA, 75 nt, Homo sapiens
cgggccgcgccgccgcgccgccgccgcgcgcgggaccgacagcacgaggaggagagaagaaaagcggcccgagac

SEQ ID NO: 9269 - RNA, 41 nt, Homo sapiens
ccgaccagcacgcgaaagaaacaagcaccaagccccagaac

SEQ ID NO: 9270 - RNA, 67 nt, Homo sapiens
cccgcccccccaccgaggaaggccgggcgaggcaacaacagaaaaacaagcagaaaaaaacagacgg

SEQ ID NO: 9271 - RNA, 66 nt, Homo sapiens
agccgcacagcccgcaagggggcacagagcgccaccaaacgggcgggaagcgcgacgaaaggaggc

SEQ ID NO: 9272 - RNA, 78 nt, Homo sapiens
ggcgggggggccacgcagccggacacgggggcgacccgggggcccgggcagcaggagcagaaggcaagaaagggagaa

SEQ ID NO: 9273 - RNA, 83 nt, Homo sapiens
gacgccgcggacccccgcgaccgcgcggaccagggcgacaaagggacccgcgaggggcccggccgcggggcacagcagaggga

SEQ ID NO: 9274 - RNA, 41 nt, Homo sapiens
gccgccggcaggcccgcgcaccagggcaccacgcagacacc

SEQ ID NO: 9275 - RNA, 75 nt, Homo sapiens
agggagaaaggaagggacagagggcgaaaccagcgaagacacagccacccaaaccgcccccaggaagggagaacg

SEQ ID NO: 9276 - RNA, 42 nt, Homo sapiens
gaaggagaaagagaaaggaagccggacccgagccccaaagac

SEQ ID NO: 9277 - RNA, 85 nt, Homo sapiens
aggacaccgaccggaagacgggcgaggagaccggcaccacggcagcggcccaacgccaagaacaaccccacagcgaaccccaggc

SEQ ID NO: 9278 - RNA, 83 nt, Homo sapiens
gcacgcggcccacccagaaccccagaggcagccagggcggggacccaggcgcagggcagaggagagagaccaggaagggggag

SEQ ID NO: 9279 - RNA, 78 nt, Homo sapiens
gcagccccgggcaaccagcaagcccagagaacccacagaaaccaagggagacacaagacgggagggggagaaaccagg

SEQ ID NO: 9280 - RNA, 77 nt, Homo sapiens
ccaaccacagcggagaccggaggcaccagcccacaaacaccccagggcacgcacggagaaaggaagacagcaaccgg

SEQ ID NO: 9281 - RNA, 79 nt, Homo sapiens
ccaggaggggagcggcaccggaagagcgcccaggcggggaacaagacccccgaaaggaaccgggaagcaaaggggaggg

SEQ ID NO: 9282 - RNA, 57 nt, Homo sapiens
ggacaacccagagcagccagacccaaggggggaggagacgaggccaggagaaggaaa

SEQ ID NO: 9283 - RNA, 75 nt, Homo sapiens
aagagcgcagaaaagacagcccagaaagcaaaccccacgagaacaaagcacggcagaaacggaaaaaaaccaaga

SEQ ID NO: 9284 - RNA, 64 nt, Homo sapiens
ccccgaaagcggcaccacacgggggaggcaccagagagagccagggcagaaacccccaccaggc

SEQ ID NO: 9285 - RNA, 79 nt, Homo sapiens
aacccaggaagaccgggaccaagcagcccgacaggaaggaagagcaaaacccaggagcccagagcgcccaaaccgggac

SEQ ID NO: 9286 - RNA, 77 nt, Homo sapiens
ccacaaaaaagagacccacagccagcaacaccgggcacaaggaccagcgccgaggagccacaagggcaccccagagc

SEQ ID NO: 9287 - RNA, 79 nt, Homo sapiens
gcaccccgccccaaggagcgcggcagaagacaagccgcccagcccaccgcaaggacgacgaggccagccaaaaccaacc

SEQ ID NO: 9288 - RNA, 87 nt, Homo sapiens
cccgcgagccagcgcgccgcagccccccaagcggccgcgagaagcagcgggggggcaggcgacgaaggaaagaacaaagcacagcag

SEQ ID NO: 9289 - RNA, 78 nt, Homo sapiens
ccaggcgaggagagcgaacaaccccagaagagggaaagaagaacgccagaaaaaaaccagaaaaaaggagagaagaaa

SEQ ID NO: 9290 - RNA, 55 nt, Homo sapiens
ccagagggaacaagacgggggggcagacgaaaggaaaagaggagaaaggaaccca

SEQ ID NO: 9291 - RNA, 53 nt, Homo sapiens
aaaggcggacagcagcgcaggcaaaaaacagggggggccgcccgcccaaggca

SEQ ID NO: 9292 - RNA, 78 nt, Homo sapiens
gcggggaagacggccacacacggggacacgcgggggcggcacccggcaaaggaaggggcggagaacggaaaagcacca

SEQ ID NO: 9293 - RNA, 79 nt, Homo sapiens
agggcacaccaacaccgacaacccccggagacaacaaccgcgggcacccacggaaaagagcggggacgggaaagagggc

SEQ ID NO: 9294 - RNA, 79 nt, Homo sapiens
ggaaggcgcggccgaagacgcaaagagaccccaggcgcggcgcaaccagcacaccggacaagcaccgaaggccggacag

SEQ ID NO: 9295 - RNA, 55 nt, Homo sapiens
cgagcgcgccaggccgacagccgcggccgggcccgagaaggggaccaacagggcg

SEQ ID NO: 9296 - RNA, 81 nt, Homo sapiens
ccggcgcggccggcggaggcgagccggccgcgggcgcgaccggaggcaggaaagggagagaggagaaccaggcagcccggg

SEQ ID NO: 9297 - RNA, 66 nt, Homo sapiens
cggcaagcagggcgcagacggagcggagcgaccgagagaggcagagcaagaaacacgccgaggcgg

SEQ ID NO: 9298 - RNA, 90 nt, Homo sapiens
gggaacaacgcaccgagacccgcagcgagccaacggcgaccaagcggggaaacccagacgacaaggaaggccaagggacccacgaccaac

SEQ ID NO: 9299 - RNA, 64 nt, Homo sapiens
gaagacggcccaaaacacagcgcaccacacacagagggaaacggaaaggaggcacaaagagaga

SEQ ID NO: 9300 - RNA, 95 nt, Homo sapiens
cggccgcccagacgcgcccgcgggcccggccacggcggagccaaggcggcggccggggcagcgccgcgagccagcaacgggggaaggccacaaca

SEQ ID NO: 9301 - RNA, 71 nt, Homo sapiens
gggcggggagaagccgcaaggacgcccgggagagaagagagggccccagaagaagcaggggagaagcggaa

SEQ ID NO: 9302 - RNA, 80 nt, Homo sapiens
cggcgcggagagggggcgcgagcggggaacccacaggagggccagaggacaaagcacggcggaagagaagccagccgccg

SEQ ID NO: 9303 - RNA, 77 nt, Homo sapiens
ccccggagaaaaggccaagaaggcaggacagcagggaagaacggaaaccagagaaagaaacgcccccacacaaaagc

SEQ ID NO: 9304 - RNA, 73 nt, Homo sapiens
gcccgccacccgcgcgccgccgccgaggagaaagggaggccaccagaaaccaagaccaacaccagcgggcaag

SEQ ID NO: 9305 - RNA, 78 nt, Homo sapiens
gggagacaggacggcaacccaggacagaagaggacccccacgaaaaggagaacagaagcagagaaccggaacgcggac

SEQ ID NO: 9306 - RNA, 80 nt, Homo sapiens
cgggagcaacgagcagaaaacccaagagcagaaagaagaggcaggacgaagagcaagagcacgaacgagacacagagaaa

SEQ ID NO: 9307 - RNA, 54 nt, Homo sapiens
gacccggcggcagaggcggccccagcggccgaggggagagacaggaggaggaaa

SEQ ID NO: 9308 - RNA, 65 nt, Homo sapiens
cgcggggcaggaggccccgaggcgggagcccaggaaagaaagggacgcggcacagaacgaagaag

SEQ ID NO: 9309 - RNA, 83 nt, Homo sapiens
cggccagcaggaggcgagaaggaaacccgggaaagcaaaagcgaagggaaaaaaggggaaaaggaaggaagggaggagcgaaa

SEQ ID NO: 9310 - RNA, 79 nt, Homo sapiens
agccccgagcagcgggaacaggggagaaagggacagcgcgcgaaacaacaggcagaaacaaagagccagagccgacgca

SEQ ID NO: 9311 - RNA, 82 nt, Homo sapiens
cagaagagcccccacaacggggagaacagcccaaaaaagaaaaacaaccaccagcgagcaaaaaggcaaagaccaagaccac

SEQ ID NO: 9312 - RNA, 79 nt, Homo sapiens
ggaagcgcagcccggccgacaagagcccaccacaccgggcgcaaaaggacacagaccaggacaagaccaccgaccgggg

SEQ ID NO: 9313 - RNA, 80 nt, Homo sapiens
cgagcgaggggcaaccagcggggcaccgggacgggccgagccgggcagccagacaagaaggacacagaagagagcaaaga

SEQ ID NO: 9314 - RNA, 73 nt, Homo sapiens
cagcgaaggagaaggagccagggcgaaaaaaaaggaaaagacaggcagggaggcagcggcaagcggaccggga

SEQ ID NO: 9315 - RNA, 58 nt, Homo sapiens
cgcccggcgcccagcccaccagcacggcagcaaagggagaagaaaagcaacacagcga

SEQ ID NO: 9316 - RNA, 72 nt, Homo sapiens
aagcaaagaccgacccaagaacagaaagagaagaggaggccgcgccaaaagagaagaagagaggggcaccgg

SEQ ID NO: 9317 - RNA, 85 nt, Homo sapiens
cggcggccgcgcccaagccggcaccgagcggcggagacggcgagcacaagaacaagagaaccaacggcgaaaacggcggggaaaa

SEQ ID NO: 9318 - RNA, 82 nt, Homo sapiens
cccaacagcccagcccggggcagggaaaggagaaacaccagacacggaagccacgccgaagagcccgggcggaggcagccag

SEQ ID NO: 9319 - RNA, 75 nt, Homo sapiens
agggaaaaaagaaaggcaaaaacaacccagccaaagccagcaaaaacagccaaacagaggaaagagcggagcccg

SEQ ID NO: 9320 - RNA, 39 nt, Homo sapiens
acgcgcagaggcaccgccaggcacaagggagcgccggaa

SEQ ID NO: 9321 - RNA, 77 nt, Homo sapiens
aaaggaagccaggaacagaacgaacaggaaccgggaggcgccagagagacacggggaacagacgccagaacaaggga

SEQ ID NO: 9322 - RNA, 79 nt, Homo sapiens
gcgcggcggggcgcggccagaaaagaaacgaagccgggcacggacaggacagagaaagcaggcgccagcgacccgccgc

SEQ ID NO: 9323 - RNA, 67 nt, Homo sapiens
aggcaagggggaccaggaaggaaaggggcaaggcgggggaggcaaccccaacacacggcaggcagga

SEQ ID NO: 9324 - RNA, 88 nt, Homo sapiens
ccggggcagggcaagcacgggaagaagcagcggacccgccaccacacggcaccggcccgaagaggaaggagaaggaaagagcagaaag

SEQ ID NO: 9325 - RNA, 73 nt, Homo sapiens
agaaaccggacagcagaggaaacgagggacaacacagacccaccagcagagacgcccccgggccaaacggcag

SEQ ID NO: 9326 - RNA, 82 nt, Homo sapiens
ggaaggggagccaccagccccccggggccaaggagaacggggccgaggccaggacccaaaggaagccagggggaccaggacg

SEQ ID NO: 9327 - RNA, 63 nt, Homo sapiens
caggagcccacagaaggcagaggcagaaccacagggcaacccgcccagaagaggcaccaggcc

SEQ ID NO: 9328 - RNA, 78 nt, Homo sapiens
gcacccacgcagacaccagccgcgccaggcgcaaggaagaagagacgccgcgcggcagacaaggcccggcaggcaaag

SEQ ID NO: 9329 - RNA, 77 nt, Homo sapiens
gagcaggccaagaccgagggcccggaggcaaagaaagacggaaaaggcgggaaagaaggaccagaggaaaaggaaaa

SEQ ID NO: 9330 - RNA, 83 nt, Homo sapiens
ccagagcggacccaccagcaaggaggaacgccgggacccgggcacgccgcagaccaccccgcacacagaggcaggcgggccgc

SEQ ID NO: 9331 - RNA, 69 nt, Homo sapiens
cagaagaacccccggcagagggcagaggcccagcaaccaccaccgccggaagacaccagaagggaacaa

SEQ ID NO: 9332 - RNA, 55 nt, Homo sapiens
gcccacaagggaacggcaacaaggaccccggaacagaagcacagcccgacagacc

SEQ ID NO: 9333 - RNA, 83 nt, Homo sapiens
ggggggcgcagaggacacgaggcggcgggcggagacaggaccgcggcgagcaagagaggacaccgagaaaaagggccggccgc

SEQ ID NO: 9334 - RNA, 67 nt, Homo sapiens
agcgcgcggaggaagaaacaaagacgcaagcggggcagaaaaacaagccgcacccagccgcccccgg

SEQ ID NO: 9335 - RNA, 84 nt, Homo sapiens
ccagcagccaccaggagcccgagagagaaggggaaagacaaggagccgggccgagaaaccgaaccagagaccagagaagaaacg

SEQ ID NO: 9336 - RNA, 88 nt, Homo sapiens
gaaagggaaaacccccacacggaggggacgaagacaaaaaccaggaggcgcaaacggaccaggggccccccgacagcagggccgacgc

SEQ ID NO: 9337 - RNA, 58 nt, Homo sapiens
aggacaaggagaaggacggggggcagacaggagcccaagggccccgggcgcgggagcc

SEQ ID NO: 9338 - RNA, 78 nt, Homo sapiens
aagaagcaaaaaggaacaaacgcagaccagcagaaaggagggcaggagaaaggagaaaaagaggcagggagaagaaac

SEQ ID NO: 9339 - RNA, 82 nt, Homo sapiens
cagagaggaggccacccaggaaaggggaagcgcggggccgacagaaaaagaagaggaggacagggggggccggaaacgcgag

SEQ ID NO: 9340 - RNA, 56 nt, Homo sapiens
acgacggggcgagaccccgcccggaccgcagcggcggagaaaccaccacaaacacg

SEQ ID NO: 9341 - RNA, 63 nt, Homo sapiens
cacgccgccacaggccaagggccccagccccaccccagccccaaaggaggcgcgagagggacg

SEQ ID NO: 9342 - RNA, 71 nt, Homo sapiens
cagaacgcaggaggagaacgacagaacagccagcaaagacaagagcagaccagcagccgcagcgcgacagc

SEQ ID NO: 9343 - RNA, 83 nt, Homo sapiens
gaacaagaggccacgcagagccacgccggggagcgaacaaggagcggggaggagaaagagggaaccccccacaacagcagagg

SEQ ID NO: 9344 - RNA, 70 nt, Homo sapiens
gacgcggcaacgggccgcccggcagcgggccgcagcaacgaggaaacacaaagccggggaagcaaagaga

SEQ ID NO: 9345 - RNA, 71 nt, Homo sapiens
gcaaagacaaccagacggcacccggccagccgaagcgcccaacagccaaacggaacgcgacgcggccaggc

SEQ ID NO: 9346 - RNA, 50 nt, Homo sapiens
acgcgaaggaacggcaaagggggaaaccgaaaaacaaaaagccgcgaaac

SEQ ID NO: 9347 - RNA, 59 nt, Homo sapiens
cgagaaggcggcgaggaagcgcgcccggcgcacggaagaacaagcgggggaacggaggg

SEQ ID NO: 9348 - RNA, 78 nt, Homo sapiens
gaggggcagccaggacgcacggcggcgcacgggaacgccgcacaggggaggccagcagaaaagagacgaggaagaaga

SEQ ID NO: 9349 - RNA, 58 nt, Homo sapiens
caaagcggccagggagcacagaagaacaaacacccaaagcagccaggagccagcaaaa

SEQ ID NO: 9350 - RNA, 37 nt, Homo sapiens
caacaggaaggcgcaagaacggccaaccagggaaagg

SEQ ID NO: 9351 - RNA, 73 nt, Homo sapiens
ggaaggagcggcccgcgcgcgcgggaagggggcccgacaagagaggcggagccacccccacaacggaccagga

SEQ ID NO: 9352 - RNA, 76 nt, Homo sapiens
agaggacgaggaccaggggaggaggagcagaggacacagagaaaggaagcaaggaggggggaagcacaagagggaa

SEQ ID NO: 9353 - RNA, 79 nt, Homo sapiens
cgcgcccggccggcccggagcaccgagccgcggcacggaggagccggaggcggaagccagacgaggggcagcaaggcgg

SEQ ID NO: 9354 - RNA, 76 nt, Homo sapiens
cacaagaacccagccaaagccccaagaagaacggaaaagccagccaggacaggaagggaaaaggccgaggcacagc

SEQ ID NO: 9355 - RNA, 91 nt, Homo sapiens
accaaggccccgacagcgcgccccgaccgggggccgccagcaaagccagagaaggacgaggcgacccgcggcgagagcccccccagagcgc

SEQ ID NO: 9356 - RNA, 76 nt, Homo sapiens
cgaagcaacccgcaaggccaggacacagaaccgaggcaccagaagaaaggagagagccgaaagagaaaagcgcgcg

SEQ ID NO: 9357 - RNA, 83 nt, Homo sapiens
acagaggacagcaggacccaaggagagcagcggaggcgacgcgcccagaaggggcacaagaaggccaaccccaaaagagagaa

SEQ ID NO: 9358 - RNA, 62 nt, Homo sapiens
gaccgggaaagcaaaggaagcggagaaccacaaacgacccacaacggaaaaaacaacaccga

SEQ ID NO: 9359 - RNA, 77 nt, Homo sapiens
gagagggcgaggccaggggagcggaggacccgggccccacacaacaagggccggaagaagaagaacccccgaggaga

SEQ ID NO: 9360 - RNA, 80 nt, Homo sapiens
cgaacacaaaggagggacagcagcaagagccccaaagccaccagagcaacaaggagacgcgccgcccggcccaagcgaac

SEQ ID NO: 9361 - RNA, 70 nt, Homo sapiens
cgccgcgggagagaggacccccccccccccccaaggccaccgaaagacacagggagggcagccagaacgg

SEQ ID NO: 9362 - RNA, 62 nt, Homo sapiens
ccaaaaacacaacaaaagaaaccaacaccgcagcccaagaccaccaaaccccagaaccggaa

SEQ ID NO: 9363 - RNA, 69 nt, Homo sapiens
aagcaggcccccagccgcagccacaacaccggcaggaaccaccaggacagaagaaaccgcaccagggac

SEQ ID NO: 9364 - RNA, 74 nt, Homo sapiens
gaacaccacacgccaccaccccaaaggcgcacagcagaaaccaccccaaagcgcacccgggcaccaccgcgacc

SEQ ID NO: 9365 - RNA, 83 nt, Homo sapiens
cccaggaccgaaacgccagcgcccagcagcaggcacaagacacgggagaggaagagcaagcggcccgaaaaagcccaagacag

SEQ ID NO: 9366 - RNA, 59 nt, Homo sapiens
agaacaacagacgggagacgaacgagggaacggcagaagaaggggaaaagaaagcccgc

SEQ ID NO: 9367 - RNA, 76 nt, Homo sapiens
gccagagcccaaaccccaggccaagcagccaccagcagcccccagagcgggaccacagcacaccgccacagagcaa

SEQ ID NO: 9368 - RNA, 75 nt, Homo sapiens
cgaggcagcacaacaagaaaaagaagcgaggacacagaccgaacagacccaaggccagccagccccaggcaccag

SEQ ID NO: 9369 - RNA, 69 nt, Homo sapiens
gaggcaacagaaaaaggaaacaaagcagaacaggcacaagcaggacaagacaccccggaccagggccgg

SEQ ID NO: 9370 - RNA, 79 nt, Homo sapiens
cggggcaaaggccccagccaacccaaaccggcgacagccgagcaagagaggacaccagcagccgcaacggcacacacgc

SEQ ID NO: 9371 - RNA, 57 nt, Homo sapiens
aggggaggagcgaccaggaagaccacgcagagccagagcccaagcccccgcagggag

SEQ ID NO: 9372 - RNA, 73 nt, Homo sapiens
ggcgcgagggcgggggcagcggcaggaccccgaaaacgaccaggcgaaaagaaaagcccgaccacccaaccaa

SEQ ID NO: 9373 - RNA, 52 nt, Homo sapiens
cgagcggcagaccgaccaccccccaggggagacaaccagagccggcaggacc

SEQ ID NO: 9374 - RNA, 70 nt, Homo sapiens
aaagaagagaagaggacagcaggcaacaggcgcccccccaaagagaggcgcgagaggcacaggacaaggg

SEQ ID NO: 9375 - RNA, 82 nt, Homo sapiens
cccacgggagccgacaccaagggcagagcaaggcagcaaagagaggccgcaagaaaagaagagcaccaggagcacggaggcg

SEQ ID NO: 9376 - RNA, 87 nt, Homo sapiens
ccaaagagacccccaggaaaacagcccaggaccgggggccgggcgaggaggccgggagaagccgaagcgccgaaggagagagaggag

SEQ ID NO: 9377 - RNA, 72 nt, Homo sapiens
agaaccaaagcagcgaccccagcagcagcgacagaccggaagaagacggcacgggacccccagcacaggcag

SEQ ID NO: 9378 - RNA, 52 nt, Homo sapiens
cagagaaagcaaaggacaggcccaagccaggaccacgcaccgggaggggaag

SEQ ID NO: 9379 - RNA, 74 nt, Homo sapiens
cagcgaaggccaacacggaacacgagcgagacccggcgggggaacccaggagcaagggagcaggaagggagaca

SEQ ID NO: 9380 - RNA, 84 nt, Homo sapiens
gcgcccgcggcgcagcggggcggcagcgaggcggaggcgacgaggaggcggacccccggcgcaggcggggccggggagcccggg

SEQ ID NO: 9381 - RNA, 72 nt, Homo sapiens
cgccgaagcgacccaagaaagaccgggaggggacgccggaacgggagagaaaaggaacagccgaagccaggg

SEQ ID NO: 9382 - RNA, 74 nt, Homo sapiens
cagccagcccacaagaaccgcgaggacagagacaaggcgaccagccagcccgggagacagagggagccagcaga

SEQ ID NO: 9383 - RNA, 77 nt, Homo sapiens
agaaagccgagagaaggacaacaccacagaccacagcaccgggaagccagcagcggcagagggcggggggcaccgcc

SEQ ID NO: 9384 - RNA, 108 nt, Homo sapiens
cccgaaaaacgaggcagccagcccgaagaaaagggaaaacgcgcgggccaagggacaggccggcgggggaagaggagaggaaaagcggaaacaagaggcaaagccgcc

SEQ ID NO: 9385 - RNA, 72 nt, Homo sapiens
gagcaaagagagaacgcccggaggagaaaagcaaaaaaagccgggacaggaagcacaagaagaaaagacaca

SEQ ID NO: 9386 - RNA, 64 nt, Homo sapiens
cgcaccgcaggcagacaaaagggccaaagaagggagagagacccaggacccggccccgccgccg

SEQ ID NO: 9387 - RNA, 55 nt, Homo sapiens
agcaccaaaggacaccacagaacccgagaaaccacggcacgagcaaaaaaaagcc

SEQ ID NO: 9388 - RNA, 86 nt, Homo sapiens
gggcagccagccgagggccaccgggaaggacagaagccaagccccgaagggaaaacgagcacagaaccaagcacagccaaaccccc

SEQ ID NO: 9389 - RNA, 78 nt, Homo sapiens
gccgccaagaggagcgagcggacccgcgaggacggccaaaccccacagcggaccagccgagccaaaaggccggcaggg

SEQ ID NO: 9390 - RNA, 72 nt, Homo sapiens
aagccagccacggacaccaggcaggccagagcagcaccaggccagagccagaacagcaaccccgcacaaacc

SEQ ID NO: 9391 - RNA, 87 nt, Homo sapiens
cgcagggggacggggaccagcagcgcgccgccgcccagacacagaaaagcccacgaggaaaaacggccaacaaaaacacagcgcaga

SEQ ID NO: 9392 - RNA, 71 nt, Homo sapiens
gggggccggcaccaggagcaccagcccgggacccacaggcggagaagaggggacggggaagggggggcagg

SEQ ID NO: 9393 - RNA, 76 nt, Homo sapiens
acagcgccgcaccccagagcccacacccgcagagcgaggaccggaaggaaggcggggagacaccaaagccaaccca

SEQ ID NO: 9394 - RNA, 56 nt, Homo sapiens
ggaacccagcgcgaagccacagagccacgccgccaggagcccgaacacagccacgc

SEQ ID NO: 9395 - RNA, 73 nt, Homo sapiens
gggaggagagagggagagccaaagaagacaaagcagagcccacagacaaggccaaaggcaaagcgcacagagg

SEQ ID NO: 9396 - RNA, 72 nt, Homo sapiens
acaccccagaaggcacaggggcaggaggcaccagccgagcaaggacaccaggggcgaccccagcagacaggg

SEQ ID NO: 9397 - RNA, 68 nt, Homo sapiens
cccacagggaagaggagcccaaaaggcagagcgaggagagaagaaggagggaaagccaaacaacggac

SEQ ID NO: 9398 - RNA, 65 nt, Homo sapiens
agagagcccagagacagccaggcgcccgagccaggggccccggcagcgcagcacgaacacacagc

SEQ ID NO: 9399 - RNA, 86 nt, Homo sapiens
ggaggccgaccgggagcacgcaggcggcacggccccaccacagaggggaggagacgggacacgggacacaaggcggcaggcaaagg

SEQ ID NO: 9400 - RNA, 59 nt, Homo sapiens
gccccgacgggccggccgccgcggcccgcgaggccgagggaggcagcgacggaagcccg

SEQ ID NO: 9401 - RNA, 90 nt, Homo sapiens
ccagagcggggcaccgagccgggggaacccacacccgcccccagggccaccgcaggacgccgacaccacccccagcagacgccggagaga

SEQ ID NO: 9402 - RNA, 56 nt, Homo sapiens
acagaaagcagggcgacgacgacaaaacacagagcccgagagcaccccacccgcgg

SEQ ID NO: 9403 - RNA, 75 nt, Homo sapiens
gccagccccgccgccccgcaaccggcagccgccgccgggaagggcggaagagcgcgggaggggaggccaccaaga

SEQ ID NO: 9404 - RNA, 62 nt, Homo sapiens
cggagcccgaagacagcaccgccagccaagggaaggagggagccgggaggaagaacgaagaa

SEQ ID NO: 9405 - RNA, 69 nt, Homo sapiens
aacccgcgaaagcaggaaagggcaaaagcggcaaagggaaaaaggcggaccccggacccagcgaccaac

SEQ ID NO: 9406 - RNA, 79 nt, Homo sapiens
caccgggcagacagcagcagcggccccgcacaccaagccaccagggcccaaccaagaccgaacccaagccagggaaaca

SEQ ID NO: 9407 - RNA, 94 nt, Homo sapiens
gccacgcgaggacagaaaacgcaagacaacaggagaggaaagcggaaagccaagggcggagaacggaaaagcaccaggaagcagagaggaccgc

SEQ ID NO: 9408 - RNA, 68 nt, Homo sapiens
gacagagagggaaggccccggcacaacagcaacgcaacaagagccaacaagcaagaagacccaggaaa

SEQ ID NO: 9409 - RNA, 72 nt, Homo sapiens
gagcccgcgcccgccgcgggagagaggacccccccccccccccaaggacccacgaggaagcggccgcggcga

SEQ ID NO: 9410 - RNA, 80 nt, Homo sapiens
caaagcgccccggaaggaggcagccaacaagaaaaacccagcccagcccagagacacagggagccgccgccccaacaggc

SEQ ID NO: 9411 - RNA, 82 nt, Homo sapiens
gggcgggaggcccggggccccgggcgaacagaggcgcggagaccgaccacagcacggggccgacaccgaagccgaagccagg

SEQ ID NO: 9412 - RNA, 85 nt, Homo sapiens
cggcgcgcgaccgcgcaaaacggacaaacagagcaacgaacagcaggacggcgggggcagcagacacagagaagcaccgagaagc

SEQ ID NO: 9413 - RNA, 74 nt, Homo sapiens
ccagcgcagccccagcggacgacgcagaagacagggacgcaccgacgaggcgacacaacccaagacacgacaga

SEQ ID NO: 9414 - RNA, 94 nt, Homo sapiens
gccagcgcaccggcccccagcggcagccgagcccgcccgcgcgccggagccagagcggaagcacgaccagcagagaaaagaaaaccgagaaaga

SEQ ID NO: 9415 - RNA, 68 nt, Homo sapiens
cgcagggcgcccccggaagacagaaagagcaaagaaaaaaacacagccaagagaccgagcaaaacgac

SEQ ID NO: 9416 - RNA, 82 nt, Homo sapiens
aggagaggccgccacccgccccagcccccgcccccccgcacaccagaagagggagaaggagagcgaagggcaaaagcccaag

SEQ ID NO: 9417 - RNA, 84 nt, Homo sapiens
aaaagcagcggaggaggcgaggaggagaggacagagggccggggcaaccccaccgacggccaggcgagaaacacaccaacaaca

SEQ ID NO: 9418 - RNA, 86 nt, Homo sapiens
ccacccggcccccggcgccgccagcgaggcacaggaacgcaccgcccagcagacggcccccgcccgccgccaccccagacccccag

SEQ ID NO: 9419 - RNA, 74 nt, Homo sapiens
gaagccaagagggggagggcagagagagcaaaagcaagccccagccaagacccaccaggcaggggaagaagaca

SEQ ID NO: 9420 - RNA, 71 nt, Homo sapiens
gcaggggagccagaagggagaccagcacgagccgggcgggacgccggaaggggcacaagacacgcacaagg

SEQ ID NO: 9421 - RNA, 77 nt, Homo sapiens
cgaccagcaccggcgcacgacagacagcacgcaaaggacgcaacagaagcaaaacacagaacacggcgagaagacag

SEQ ID NO: 9422 - RNA, 68 nt, Homo sapiens
acacgccagggacacccaaagcgagggagccacaccaaagccggacccccccagccggaccggaccaa

SEQ ID NO: 9423 - RNA, 47 nt, Homo sapiens
ccagcgcgcagaccagcggacgagacacagagcacacggaccagagc

SEQ ID NO: 9424 - RNA, 78 nt, Homo sapiens
ccgcgccgcgccgcaccccgagcgaccgggggcacccgaggaggaagagggcagggcccacggaaagaagggaaaccc

SEQ ID NO: 9425 - RNA, 81 nt, Homo sapiens
ccaaccaaggagacgcgacacgggaaagggcaggcagcggaagagaaagaccgaggcaaagaagcaggagcacacaaagaa

SEQ ID NO: 9426 - RNA, 86 nt, Homo sapiens
acaagccgcggcagccgcggaccaccgccgccaggggagaagaaaggggaccggggacacacccacgaacacaaagggcccggacg

SEQ ID NO: 9427 - RNA, 73 nt, Homo sapiens
aagggaaggaaaagagacgcagagagccaggagagcagcaagccggccaggcagggggcagaaagacaacacc

SEQ ID NO: 9428 - RNA, 71 nt, Homo sapiens
cagcagaagcgccgacaagccagaaggacaacacacccagcccagaggcaaaggagggaaaaaaagaaccc

SEQ ID NO: 9429 - RNA, 73 nt, Homo sapiens
aaaagaaaacgcgcgagaagagagacgagagagaagaggagagagaagacaaagaacagcgaacgacaagagg

SEQ ID NO: 9430 - RNA, 55 nt, Homo sapiens
cagggcgcccccggaccagcacccgcacgacgccccggagaagaacgcccccgcg

SEQ ID NO: 9431 - RNA, 76 nt, Homo sapiens
ccgccccgcaccaccgccgacggccagggcacgagagagcgcacggcagaaaagggagaacagaagaacagaaaag

SEQ ID NO: 9432 - RNA, 79 nt, Homo sapiens
cggccccagcccagccaccagagcaccaagcagacacgcagaggcccgggacagagagacaagcaagggaaaagaagcc

SEQ ID NO: 9433 - RNA, 73 nt, Homo sapiens
agaccacagcaagacgccgggaccccggaaaccagaaagggaacggagggaaagcgacaaacaaccaacccac

SEQ ID NO: 9434 - RNA, 45 nt, Homo sapiens
gagaagagcccagcacaacgaagcgccgcccaagagagagaagag

SEQ ID NO: 9435 - RNA, 61 nt, Homo sapiens
agaaggaccaagaaccagaacaggccagccggaccaagagcacccgggcccgagaaacgaa

SEQ ID NO: 9436 - RNA, 83 nt, Homo sapiens
ccagaggagaagcaaggcgacgccagaggaggaaaggaagacaagaacaagaggaaagaggggaaggagccaagcaggagacg

SEQ ID NO: 9437 - RNA, 60 nt, Homo sapiens
ccggagccgaggccgccgggggcagcagaagaccagaggccaagcccagcccgcgcggaa

SEQ ID NO: 9438 - RNA, 66 nt, Homo sapiens
aaaggaacaccccaccccccagcaaaaaccacccagacaaacgaaaaagcagacacaaccagagac

SEQ ID NO: 9439 - RNA, 77 nt, Homo sapiens
ccggacgagccgccaacaagagacgaggacgcgcacaggaaaggacgcggaacaagcaggcagccaggcagcagaag

SEQ ID NO: 9440 - RNA, 83 nt, Homo sapiens
ggaacaacaaaaaaccccaggaagcaggcagacaccgcaccacaaaccggaagagagaaggaaaaggccaaccccaaccgaaa

SEQ ID NO: 9441 - RNA, 55 nt, Homo sapiens
gccccccagaagcacaaaagaccggcaagcagacaggcgggcgccccaaagccca

SEQ ID NO: 9442 - RNA, 75 nt, Homo sapiens
accaggaccgggccggaacgagacgcacggagaccggaaaccgagagaaacgaagacgaagaaacagccgcacac

SEQ ID NO: 9443 - RNA, 37 nt, Homo sapiens
ggggccggagagaagcggaaaggagaggagccaagcc

SEQ ID NO: 9444 - RNA, 72 nt, Homo sapiens
cccacgaacacgcgcaaacaacacaagagagcggcaaaggaagcgaagccagagcaggggagcggaaagggc

SEQ ID NO: 9445 - RNA, 78 nt, Homo sapiens
aacaaccccagaaaagcagccacaggaaaaggccgagacaggcaaccagacggagggaacaaacagggacaaggaaaa

SEQ ID NO: 9446 - RNA, 74 nt, Homo sapiens
gagcacaccaggcacccgggcccagccgggaacccccacgcggccagcgaaaacgcccagcccggagggaccac

SEQ ID NO: 9447 - RNA, 84 nt, Homo sapiens
ccaggacggccacccccgcaggcggcgccgaggaagagcagaaggaggcccaagggccagggacgaagcgggcaaggaaaccca

SEQ ID NO: 9448 - RNA, 56 nt, Homo sapiens
ggacccagagaagaaagaaaaagccagcaggccacagacaagagagccccaggcca

SEQ ID NO: 9449 - RNA, 75 nt, Homo sapiens
cgggagggaggacccggacggggacggaggcaacacggaaccacggaaagccaaggacacgcaggacgaagaagg

SEQ ID NO: 9450 - RNA, 63 nt, Homo sapiens
aagacgcagaggaaacggcagcagaacacacgagaggcgagggacgacagagcaagcggcaga

SEQ ID NO: 9451 - RNA, 89 nt, Homo sapiens
ccgcgcaggggccccggcggcgggagcgcccccgaccggacaaagaaacgagcgccggaaagcggagggaaaggccacccaccacgagc

SEQ ID NO: 9452 - RNA, 53 nt, Homo sapiens
acgagacagggacaggcggccaaaaggcccagcagaggggagaggacggggag

SEQ ID NO: 9453 - RNA, 85 nt, Homo sapiens
acaaaacagcggaaaagggcacagaccagggggcagacccaaaggaaacgcacgaaagaaacaggagagcgcagcgaagcccggg

SEQ ID NO: 9454 - RNA, 82 nt, Homo sapiens
gggcggggcggaggcgaggagaaggaggagcgggccgggaggccgccgccaggagagggcggggacacagcgggcaggaaga

SEQ ID NO: 9455 - RNA, 75 nt, Homo sapiens
gggcagagcgcggcggcgcggaaagagaacccccgagggacgggagaccaaagaaggcagaaaaaacgaaacagg

SEQ ID NO: 9456 - RNA, 76 nt, Homo sapiens
agaccccacgaacaggaagaagccaaacagcagagcgccaccaaaaagggaaaagaggaacagaaaagcagccagc

SEQ ID NO: 9457 - RNA, 75 nt, Homo sapiens
ccgacagagacggcggagaccccgaaggcgcaaacgacaccacccgaccggcagagcagccgagaagaagccaaa

SEQ ID NO: 9458 - RNA, 76 nt, Homo sapiens
gcacacacaaaaagacgagaaaacccagagacgcaaagcgacaagcccccagggggaacacaccgaaacagaggaa

SEQ ID NO: 9459 - RNA, 86 nt, Homo sapiens
cggggcaccgcgagcccgcaaagagagaaggacaaaccagggaagaggcaaaacagaaaaaggggcagaagaagagcagaaaaagc

SEQ ID NO: 9460 - RNA, 86 nt, Homo sapiens
cgcgaggagccgccgcgcgcccgcgcccccgcgcgacgccaggccgaaagaagaaaacccgagcagagaaaacaacaaagcgccca

SEQ ID NO: 9461 - RNA, 112 nt, Homo sapiens
cggcaacagggcaaccagccaaccccgcagagggcagcgcaaggcaccggccagaggggcagcccaaggaccaagggagaagagacccaggaggcagggcagaaccccacca

SEQ ID NO: 9462 - RNA, 81 nt, Homo sapiens
ggcagaagcccgaaaccaaggggccagggacgcccagacaaagacagcacccaagaaaacccaggccgcgaaggagaagac

SEQ ID NO: 9463 - RNA, 88 nt, Homo sapiens
aaggaagaaaaaggaagccccaaagccgcacccacggcacgaaagggagggcaccgaagacgcgaagggcggggaggacaccaaggcc

SEQ ID NO: 9464 - RNA, 75 nt, Homo sapiens
aggcgacgagagcaagccaaagaccaaggggggggcacccccacaacgccaccgcagagccaccggcaaaggaag

SEQ ID NO: 9465 - RNA, 68 nt, Homo sapiens
aggaagaagccgcagcaacagggacaggaaagggcacaaggaagaacccaggaacaacaaaaaacaca

SEQ ID NO: 9466 - RNA, 73 nt, Homo sapiens
gaagcggaggcaacgaggccgagcgcgcggcgccgcaacaaagcagacaccagcgagacgacgggaccgaagg

SEQ ID NO: 9467 - RNA, 78 nt, Homo sapiens
caagcagccccacggcgagacaaggagaacccgcgggcaggggacccaggggaacaaagcgacgagggcgagaagaac

SEQ ID NO: 9468 - RNA, 89 nt, Homo sapiens
cgaagcccagaaaagaaaggggacaggccgaaagaccgcaaagaggccgcgacagccaccaaagcagcgcggacaagaaaagacagaaa

SEQ ID NO: 9469 - RNA, 81 nt, Homo sapiens
cccgcgacggcagacagcggcacacaggaccccgcgagccagcggcgacgggaacaagccccaaagagcgccgcacaagaa

SEQ ID NO: 9470 - RNA, 75 nt, Homo sapiens
cacgggccgagacacgcagcggcggccagggaccaagcagacagacagcgaacacggaagccacgaaaagcaaaa

SEQ ID NO: 9471 - RNA, 52 nt, Homo sapiens
acacagaaggagaagcaaccacaagccggacccccgccagcagggaacccag

SEQ ID NO: 9472 - RNA, 81 nt, Homo sapiens
ggagcgaggaggcgcaaggacccccgcgccagacacacagcgaagacgacaacaacccggccaagggcccgggacaccggg

SEQ ID NO: 9473 - RNA, 78 nt, Homo sapiens
agcggagaaacagccggaaacgccaaaccccagcaagcaggggcgggacaggccagggacagcccaacccagcgcgaa

SEQ ID NO: 9474 - RNA, 68 nt, Homo sapiens
gacccaccaaaaccgagccgggacgaagaaaaaccggaggccccaggcaggaagagcgaagggaacag

SEQ ID NO: 9475 - RNA, 86 nt, Homo sapiens
ccccagggaagcgcagaaagcaggcgaacccgcggcgcaaaacggcagcagaaacaacgcagccacaagccggaagggaaagagaa

SEQ ID NO: 9476 - RNA, 64 nt, Homo sapiens
agaacccgacgcccaagccacagccaggagccccagaacgggagaaggcgaccaggagaggaca

SEQ ID NO: 9477 - RNA, 71 nt, Homo sapiens
aggaagcggagaaccacaaacgggcgccggacccgccccagagggaggcccgcccacggcgggcacggacc

SEQ ID NO: 9478 - RNA, 63 nt, Homo sapiens
ccgacggaggggaccgggacgcgcgggcgagcagccccgcagcggcaaaccaccggggaccgg

SEQ ID NO: 9479 - RNA, 74 nt, Homo sapiens
agaaggcccaccgaggagaccagggaacggcgcccacaagccagcacccaccgcggaaaacacggcaggggaga

SEQ ID NO: 9480 - RNA, 44 nt, Homo sapiens
gacccacgagcaggagcagacagggcaagaaggaacagacaaaa

SEQ ID NO: 9481 - RNA, 73 nt, Homo sapiens
agaagcgggacccgggaggaagcagagagagcgggagacgagacaacagggcagaggagagaagcgacggaga

SEQ ID NO: 9482 - RNA, 75 nt, Homo sapiens
cacacccggccaacccagaaccccagcaccgaaagggaccgaaaggagagcaaaggcacaccgagggcccacaca

SEQ ID NO: 9483 - RNA, 72 nt, Homo sapiens
gggggaaagccaaggaaaaacggagagccacaaaaaaggaagcgaaaccagaacgcaaagcagagcaaacga

SEQ ID NO: 9484 - RNA, 79 nt, Homo sapiens
acaggagccagggaggaagggcaagcgcccagcgaacaacccagccgccagcccagcccagcccagcccagccacacca

SEQ ID NO: 9485 - RNA, 82 nt, Homo sapiens
gacaacgaccccacagaaacaagccaccaggagaagcaaaagaggaaaaaacccaggaccaaaacagagaaaggagaccaag

SEQ ID NO: 9486 - RNA, 81 nt, Homo sapiens
caggagcggcggccaggccagacccgaaggccaggagacccgaccccaagggcggaggcagcaccagagaaagacacaggg

SEQ ID NO: 9487 - RNA, 66 nt, Homo sapiens
ggggcggaaggggacgcagccagaaaaaagcgaccagagaccgaggaccgcggacgagcacaacag

SEQ ID NO: 9488 - RNA, 82 nt, Homo sapiens
cgcagccccggccccggcccgccggagaaacagcgcccccaagagggagaagaagagagccggggaggaagaaaaagaccgg

SEQ ID NO: 9489 - RNA, 80 nt, Homo sapiens
aacgcgagccaggggcggcggagcgcgggagaggacgcgggaagagaagaaaggcgaaggacaaaggcaacccgaccgag

SEQ ID NO: 9490 - RNA, 51 nt, Homo sapiens
gagcgaagagcgccgacaagcaacgaaccacccaaaacacaagaggaccga

SEQ ID NO: 9491 - RNA, 75 nt, Homo sapiens
gcgaggccaggcaaaggaaccacccaggaaacagcgcaagggcgggcagcagcggcgcacaaaagcaggaaaggc

SEQ ID NO: 9492 - RNA, 72 nt, Homo sapiens
gggcccaggcgcgcaggaagagacccagacgaagagcgcacagaaagagggaaaacaaagaaccaaaacagc

SEQ ID NO: 9493 - RNA, 78 nt, Homo sapiens
gcaggccgaagagcacagaaagcccaaagaagagggccaacggccacccaagcaacaaaggaacaagcagaagagaca

SEQ ID NO: 9494 - RNA, 72 nt, Homo sapiens
caggcggaaggagaggggagaccaggggccgggcggggcaggaagccaggagaaccacaaccccaccaggag

SEQ ID NO: 9495 - RNA, 77 nt, Homo sapiens
gagccgggaggccggccgggccagcacccggccgagacggcggcagcagcggcacagacaacggcaagcggagaaga

SEQ ID NO: 9496 - RNA, 73 nt, Homo sapiens
acacacccagaaaaagaaacaggacacacaaggaggaagagggaacggaagagccgaccaccgcgcggaaaac

SEQ ID NO: 9497 - RNA, 88 nt, Homo sapiens
ccccaagagggcggcggcagcgggccacgaggagggcgcagagcccaggagacgggcggggagcagggaagagcaccacgcaagcaga

SEQ ID NO: 9498 - RNA, 109 nt, Homo sapiens
gaaagggggaagaaacacagcaacagaacagaacaggagcaagaaacaacaacagcagcccccacagccagaaaaaagacagaccgagcggggaggcaaggacggagcc

SEQ ID NO: 9499 - RNA, 61 nt, Homo sapiens
ggggagaccaagcaagaggaagacaccagccccacaggagccagcaccgccgaccgccagc

SEQ ID NO: 9500 - RNA, 75 nt, Homo sapiens
ccgaacggggccccccgcgcgagacaaggcgaccagccagcccgggagacagagggagccagcagacgcgaccga

SEQ ID NO: 9501 - RNA, 82 nt, Homo sapiens
cgccccaccgcaaccggaggcaagcaccaagggcgcccgcgccggcagaggaggcgagcacccgccagggagaggaaccccc

SEQ ID NO: 9502 - RNA, 75 nt, Homo sapiens
cccgggcaggaagacgaggaggaagggaggcgggacgcgcgccagccgcagaacaagaacggcaggcgaaagacc

SEQ ID NO: 9503 - RNA, 106 nt, Homo sapiens
cacccacaccccgacccccgaacccccagcccaaacccggaaacccagcggcccagccgggagcaggacacgagacacaggccgcacgcacgcgggggaccccaag

SEQ ID NO: 9504 - RNA, 102 nt, Homo sapiens
accgccgaaggcgggaagggaagcggccaaggcacggaggccgcgccggaaccaaaaagaagccccagagccggggccaggagccccaagcgccccagcagc

SEQ ID NO: 9505 - RNA, 80 nt, Homo sapiens
caaggccggaagaggaagagaagaaaggaggagccccccaggcccaaaccaaagcaccacccgccaaaaaacggagagga

SEQ ID NO: 9506 - RNA, 68 nt, Homo sapiens
aagagacaacaacaaacaaacgaagagaggcaaaagcggccaccaaacagaaccagaaagcaagccgc

SEQ ID NO: 9507 - RNA, 75 nt, Homo sapiens
aacaggacgaaaaaagggcaagaagccagaaggaaggaaaacacccggcagggaaggaaggaacgcaaccgaaga

SEQ ID NO: 9508 - RNA, 64 nt, Homo sapiens
cggcgccggccgagaaggcagaggcggacagccagacaagaccccaacgaagggccagaaaagg

SEQ ID NO: 9509 - RNA, 76 nt, Homo sapiens
gcaaaggagacccaaggaacaggccaagagagccgaacccaccgagccagggagcaggagagagagcccggaaaag

SEQ ID NO: 9510 - RNA, 88 nt, Homo sapiens
ggggagcaaaaccaacgccggccggagcagcagcccgaggacagcggccgaagccagagccggggcggcgccaggccccacacgggcg

SEQ ID NO: 9511 - RNA, 41 nt, Homo sapiens
gacaaaaccgaaggaggaccaagacacccaggagaaagaca

SEQ ID NO: 9512 - RNA, 84 nt, Homo sapiens
cgaggcggcgagagaggcaggcggagccgaccgggccagaggagaagaagagggaccaagcaagcagagagaagccaaacggaa

SEQ ID NO: 9513 - RNA, 68 nt, Homo sapiens
cccccgccccccgcgccggcgcaggagcgagcacacacaggagggacagaggggaaaacaagaagcag

SEQ ID NO: 9514 - RNA, 43 nt, Homo sapiens
gcagggcgcccccgcacagagcgccaaaccaaacacaagcggg

SEQ ID NO: 9515 - RNA, 62 nt, Homo sapiens
cagcaccaaaccaagaggcggccagcaggaggcgagaagacaagcagaccggaagaccgacg

SEQ ID NO: 9516 - RNA, 80 nt, Homo sapiens
aagccaagagggggagggcagagagagcaaaaggggacagaccagagcaggaccaaaggcgcacagagccgaaccccacc

SEQ ID NO: 9517 - RNA, 50 nt, Homo sapiens
ccaacccccggcacccaacaggagccagggaacacacacccgagaacagc

SEQ ID NO: 9518 - RNA, 68 nt, Homo sapiens
agaccgaccacagaacgggcccgacaagagaggcggagccacccccacaacggaccaggagaagggcc

SEQ ID NO: 9519 - RNA, 81 nt, Homo sapiens
gaggccaaggggaagagaccacacagacccgccagagagagggcccaaaccgccccgggagccagccacggcggggagggc

SEQ ID NO: 9520 - RNA, 83 nt, Homo sapiens
gccaaccggaggagagaccaaccgaagcggcggcaggggccgcggcccggagcaccccgagccccccaggcgccgagggcccc

SEQ ID NO: 9521 - RNA, 74 nt, Homo sapiens
aaaccaaacaaaagaaccgcgggccaaaccaaagaacgaggacgaagcccggaccgacaggaaagaaggagccc

SEQ ID NO: 9522 - RNA, 79 nt, Homo sapiens
cgacacaccgaccgcagaacagcagcggaggaggagaaagagaggacccccggaccggcccgagggccgcggccgcacc

SEQ ID NO: 9523 - RNA, 71 nt, Homo sapiens
ccgagaacgagggcggaagaaggaaagggggaggccacaaaacagaccgaggccaaaagaaaggaagaaaa

SEQ ID NO: 9524 - RNA, 76 nt, Homo sapiens
gcgggaagagcaagaggaaaaaagccgaaagggcggagaaaagaaagagcaaaagaagagcccaaaccaggaggca

SEQ ID NO: 9525 - RNA, 73 nt, Homo sapiens
ccagaaacgccacacacagggaggagcaacagagaagagcgggaagacggaaccgagggggccggccgcgaca

SEQ ID NO: 9526 - RNA, 118 nt, Homo sapiens
aggaccgacacagccaggccagagccagagcccggacgagacagaacacgagccaaggaaaggccagccaccaggcccagccggagcgcaccacccaagcaaggcaggagaacggcag

SEQ ID NO: 9527 - RNA, 76 nt, Homo sapiens
cgacgagcgacccgggagacacgacgccacaggaagaaaagagcacagccaaaggggacggcagcagcacacaaaa

SEQ ID NO: 9528 - RNA, 78 nt, Homo sapiens
ccagaaacaaccgcaaccacccaacaaggcccaggaaggacggccccacagagcagcaccacgacgcggggcccagac

SEQ ID NO: 9529 - RNA, 81 nt, Homo sapiens
caagacagcaaggaagagccagaacagcacaaggcacggagggcccaggaagcagccaacccccagggaaggaccaaccga

SEQ ID NO: 9530 - RNA, 71 nt, Homo sapiens
aaccgcaggacccagcagcgcagcagccaaggagacaccccaggacccaaagagcagacaacaccgcaaca

SEQ ID NO: 9531 - RNA, 86 nt, Homo sapiens
gaaggcagcgggaccaagaaggagaacgcccgacaacagggaagggacccccacacccaaaagcgcgggcacagaggcaacgggag

SEQ ID NO: 9532 - RNA, 81 nt, Homo sapiens
cccgccgaccgccacacaccagcagaggaggcgggggcagccgcgagacggcacaagaacgggcgaaaaacgaagaaggaa

SEQ ID NO: 9533 - RNA, 74 nt, Homo sapiens
acaacacacacagagaagcaaaagcacaaagcagacacccgcaggagcaaacagccaagggacaaccaacaaca

SEQ ID NO: 9534 - RNA, 74 nt, Homo sapiens
ccaagcacagccagccccaggggaaccaccccaaggggaccgacaagacggaaaccgggagggggaaaagcgag

SEQ ID NO: 9535 - RNA, 61 nt, Homo sapiens
gggggacggaggacgagaggcgcaggaggcacagcacaagggggggaaaagaacacaaggc

SEQ ID NO: 9536 - RNA, 87 nt, Homo sapiens
gggcggagcagcaagaacagagaggcggggagagacggccaagcagcaccagcggccggggaaaggggcccagaggacccgggaagg

SEQ ID NO: 9537 - RNA, 78 nt, Homo sapiens
gggagcccggaggcccaggacccgacgaacccaccggccaaccaacgggagaccgaagaagcggcaccaagggaaagg

SEQ ID NO: 9538 - RNA, 88 nt, Homo sapiens
ggcccaccgcgaagggggcagagacagggcggaccaggcacggccaccaccagcggaaacgcgaggacaaggggccacagaacgcagc

SEQ ID NO: 9539 - RNA, 74 nt, Homo sapiens
cgagccccgggaaagagcagcgacgggagacagccgggcgcgcaagcagggcggagccccgcgagggagacccg

SEQ ID NO: 9540 - RNA, 79 nt, Homo sapiens
gaacgccggccgcccagcacagccccgcagcaccaggcccacaaaaggacacggcgggggccagcggccggacacccca

SEQ ID NO: 9541 - RNA, 94 nt, Homo sapiens
agccccagagcaccgagggcggagaaccagaagacgagaggcccgcaaaagggcggagaacggaaaagcaccaggaagcagagaggaccgcaga

SEQ ID NO: 9542 - RNA, 83 nt, Homo sapiens
gcgagccgcggccacgcgagagggacacgcaggacgagcggccgaagcagcgcgcaaaagggagaccacaacagccaccaaac

SEQ ID NO: 9543 - RNA, 55 nt, Homo sapiens
aacagcgccggcaaaagagggccgcgaaaccaacgacaacagcccgacaccagca

SEQ ID NO: 9544 - RNA, 78 nt, Homo sapiens
acagggaaacagaccaacagaagaaaaaacagcccaaaaacaaggggccaaggcgacagcaaaacggagaaagaggag

SEQ ID NO: 9545 - RNA, 40 nt, Homo sapiens
cgcgcacggagaggaggcacgccagccggaggcgcagacc

SEQ ID NO: 9546 - RNA, 67 nt, Homo sapiens
cacaggccgaaaaaaaaggaaaaggcccgaagaacagcaacaggggacacaagccaggcgcgcgaga

SEQ ID NO: 9547 - RNA, 39 nt, Homo sapiens
acacgggcaccacagagccgaggaaacccagacccaaga

SEQ ID NO: 9548 - RNA, 71 nt, Homo sapiens
gcgaggcagggaagagacaccaggacccaggcacacacagaacaaaagcaggcagcacaccaagagcagag

SEQ ID NO: 9549 - RNA, 83 nt, Homo sapiens
cccaggaaacaagcgcagccaagccaagcgcaaaacggggaaaaacccaagagcggcaccaaaagaaccacgccgagggaagc

SEQ ID NO: 9550 - RNA, 76 nt, Homo sapiens
ggaaaaccaaccagaagacgaacaaacagcaagaaagaccacaagaccaacagccaagcaccgaacaggacaacac

SEQ ID NO: 9551 - RNA, 56 nt, Homo sapiens
ccagcagagaggagcccaccaggacaggcgcgcccccacccggggccgagaaccac

SEQ ID NO: 9552 - RNA, 65 nt, Homo sapiens
gagcgccacccgggacacagcgccaccccgagcagcggggaagcgcgacagggcagcccgcagag

SEQ ID NO: 9553 - RNA, 38 nt, Homo sapiens
cacggcgccgcggcaagagccagggaccccaacgaggg

SEQ ID NO: 9554 - RNA, 70 nt, Homo sapiens
cgaacgcccacagagggcgcagacggcaggcacagaggacaggggacccaagggagggcggaaaaaccgg

SEQ ID NO: 9555 - RNA, 53 nt, Homo sapiens
aggaccaagaaccagaggagcagccgcgcaagggggaagggccggcggggcaa

SEQ ID NO: 9556 - RNA, 75 nt, Homo sapiens
ggagggggcaggagccggaagagcaaccgcggccgagaaacggccccacacgcaacacccagcccggagcgggga

SEQ ID NO: 9557 - RNA, 67 nt, Homo sapiens
cggaaaaaacaaagcgaaacagcggggccacccagaacaaaaagggccaggggcagacagcgggcgc

SEQ ID NO: 9558 - RNA, 79 nt, Homo sapiens
ccgcagacaccaacgcggccccaggaagcgaagccagcagaacccgaccaggagggagccaaggcccggggaagaaaag

SEQ ID NO: 9559 - RNA, 67 nt, Homo sapiens
gccgcaggcgcagacccacccgccagaagccccccgcaggccgaaccaagaacaaccccagacagca

SEQ ID NO: 9560 - RNA, 71 nt, Homo sapiens
acagcagcccagccagcccgagcaagaaagaggagcccgcgggcgcccaggggggcggagagcccaggcgc

SEQ ID NO: 9561 - RNA, 80 nt, Homo sapiens
gcccaagacccacaacaaaagccgcaaaggaccccaccccccagaagaggagaagaggaaacacaagaagaaacgccggg

SEQ ID NO: 9562 - RNA, 81 nt, Homo sapiens
cgaggccaggggagcggacccgagccgcaagcagcgcggccaagccacgccaacgaggcacgaaccggagaccgaaacagg

SEQ ID NO: 9563 - RNA, 72 nt, Homo sapiens
accaaccacggcaaaccaacaagcggagaaaaagaaagcggcgcgccaacagacccgggggaagcacaggca

SEQ ID NO: 9564 - RNA, 95 nt, Homo sapiens
gaggcggagaggcacggaggagccgcggggcgccgccacggccgcccggaggcggcgcccagcggccacacgccccaagcgccacgcccgggcgc

SEQ ID NO: 9565 - RNA, 77 nt, Homo sapiens
ccggaggcaccggcaaggacagaacaagcgcaggaggaaagagagcccagagaaaaaaaaagaaaggaccgagaaac

SEQ ID NO: 9566 - RNA, 74 nt, Homo sapiens
cccaggacggaccagacacgcaagggaccgccagcccagggaaccaggaccgagggcaaggggagaaaaagaca

SEQ ID NO: 9567 - RNA, 68 nt, Homo sapiens
ggagagggagcgagaaccagacagcagagagcccacgaacggcgggaacagaaagccagaggccggag

SEQ ID NO: 9568 - RNA, 88 nt, Homo sapiens
ggacccaaacaaccgcagccgcgcccaggagggaccggaaagcaccccggccacagcggaaccaacgcagagccccagaacaaaagaa

SEQ ID NO: 9569 - RNA, 62 nt, Homo sapiens
ccaaagaagggagagaggagaacacgagacccgcacaaaaccccgccccccaggccacacag

SEQ ID NO: 9570 - RNA, 63 nt, Homo sapiens
aagaaaccccgacacaaagaacgaaccaaggggcaagacagcgcggagggccggaggggacca

SEQ ID NO: 9571 - RNA, 72 nt, Homo sapiens
caaggggagaaaccaggacaggagccacagaacaagaaggagcgggccaacggccgccaccaaaaagaagaa

SEQ ID NO: 9572 - RNA, 68 nt, Homo sapiens
cggagaagcgcagaagcagagagcggcaaaggaagcgaagccagagcaggggagcggaaagggcccac

SEQ ID NO: 9573 - RNA, 74 nt, Homo sapiens
ccaacaacaaagcgcggcccccccccggaagggaccccaacaaggagggccaggcgcgagccccaaagggcaga

SEQ ID NO: 9574 - RNA, 53 nt, Homo sapiens
ggaacgcgaccaagagcaaaccggaaacagcacgccaagggaagaagcagaag

SEQ ID NO: 9575 - RNA, 55 nt, Homo sapiens
gccccgacggagcgccaggacgagagaagaagaaggaggccgcggccagaaaccc

SEQ ID NO: 9576 - RNA, 66 nt, Homo sapiens
aagcacaccaccccagccagcagaaagaggccagaagaaacaccagggaaggagaccaagaaccag

SEQ ID NO: 9577 - RNA, 79 nt, Homo sapiens
accgagcgacagcgcacggcagcggcaccacggcgacgcacaaggccgcacgcccaaagcggaaacgcggaagagaccg

SEQ ID NO: 9578 - RNA, 76 nt, Homo sapiens
ccacccggaggagacggggcagacaacggagcccgggagaaaagagcagaacacaaaaaaacaaagaggcagaagc

SEQ ID NO: 9579 - RNA, 79 nt, Homo sapiens
gccacggggccgggagaagccgcgccggcgggcccagggcggcggagaggaaacagaacgacagcccgcaccgacgccg

SEQ ID NO: 9580 - RNA, 70 nt, Homo sapiens
aaaggcaagggaagcaggacgcaggggaccagcacaggaggagcggggagaaggagccacagacccgcca

SEQ ID NO: 9581 - RNA, 76 nt, Homo sapiens
cccagaccggcgcggaacacgcgcagagggagggcccccaggcgcgagaccccccgaggagcacccgcccgccaag

SEQ ID NO: 9582 - RNA, 85 nt, Homo sapiens
aaaaggagagcacggacgccaagacacgacaagacgaccgggaaagccagggaggccgcgaagcaaggcgccaccggaagaaacg

SEQ ID NO: 9583 - RNA, 76 nt, Homo sapiens
cccccacgcaccgcacaacaagaggccggcggggcgacaggaaaaccagcaccggcgacgaaccggaaccaagcag

SEQ ID NO: 9584 - RNA, 55 nt, Homo sapiens
caccgagccggaccggagacggggccaacaggccgaaacagaggagccgacaaag

SEQ ID NO: 9585 - RNA, 71 nt, Homo sapiens
acacccggccccgagacagaagccggaaccccaccaggcagacccccagaaaacacaagcgacaaagggaa

SEQ ID NO: 9586 - RNA, 72 nt, Homo sapiens
gcaggggcaacagaggagccgcaaggagcgagagcagaggaacaggagcagcaaaggaccaggaaggggaca

SEQ ID NO: 9587 - RNA, 77 nt, Homo sapiens
aggacggggaccaaaggcacagcgcgagacaaacgggggagaggaccgcgagacgcagacggagggagggagagccc

SEQ ID NO: 9588 - RNA, 85 nt, Homo sapiens
ggccaacacgcgggcagcgaacaagcgggagcaaggagggcgaagagcgaggagagcacaaagcaaggaggagaggcagcacaag

SEQ ID NO: 9589 - RNA, 82 nt, Homo sapiens
ggagcgcggcggggccgcagagacggaaggagaccaagccaccgcagagaaaaagaaggcggcgggcaaccaagcccggccg

SEQ ID NO: 9590 - RNA, 60 nt, Homo sapiens
aaccgaaagaagcggaaagcagaagcgcgcagcaacggcgggaacagaaaccgcaccaga

SEQ ID NO: 9591 - RNA, 64 nt, Homo sapiens
aaacccaacaaccacagagggaggaaagagaagccacagggaaaacaagggcgacagcaagagg

SEQ ID NO: 9592 - RNA, 53 nt, Homo sapiens
ccaacacacgcaaagcagagaaaggaccgcacaggacgagcgaagacagggaa

SEQ ID NO: 9593 - RNA, 80 nt, Homo sapiens
accgcgagcaaggagcgcggaacggggagcgccggagcagcggacccaggcagccccgggcaaggggagcagacaacaaa

SEQ ID NO: 9594 - RNA, 73 nt, Homo sapiens
agacgggggaaaaaaaggagcgcccgagcgaccaaagaccgggaaaaacagcgaacccacccaacacggcaaa

SEQ ID NO: 9595 - RNA, 85 nt, Homo sapiens
agaagaaagaagaaggaggaacagggccagcagggagagacagagacgagaagcaaagaaaaaggacggcagcaacacaaacaag

SEQ ID NO: 9596 - RNA, 53 nt, Homo sapiens
cagggcgggcccgaccgccccggaccgccgcgccccccaacgaccaggcccca

SEQ ID NO: 9597 - RNA, 71 nt, Homo sapiens
gaagaccaacacaggacgaaaaggggaaaggagaaagaagggagaagaaacagagaaccccaaggacaagg

SEQ ID NO: 9598 - RNA, 51 nt, Homo sapiens
gcccgcagacaagggccgggacacaaccagcggcaagaaaacgcgacacaa

SEQ ID NO: 9599 - RNA, 86 nt, Homo sapiens
cggcagggcccgcaggcggcgcacaggaagcacgggacagagcagaagggcgaaagaccgggccgcagaagaggccccaacccggg

SEQ ID NO: 9600 - RNA, 64 nt, Homo sapiens
gaaggaccaagaaccagggcagaagacccgagcggcccgagacaaggggacccagagcaagccg

SEQ ID NO: 9601 - RNA, 75 nt, Homo sapiens
agggcaaagcggcgaccaggcaggacaaaggcaacaagccagcgccaagaaaaccgccaggagcgaagacgaaca

SEQ ID NO: 9602 - RNA, 89 nt, Homo sapiens
cacggaccacccgcaccccacagagagaaagagcccagcgagccagaggaaccaagcggcacgcaggcaacacgagccccagcaaccca

SEQ ID NO: 9603 - RNA, 72 nt, Homo sapiens
cccaggcgccaggcccccaggagcacccacgggagaccggggggcaagaaaaggaagaagaagcacaccacc

SEQ ID NO: 9604 - RNA, 74 nt, Homo sapiens
gacaaccagaggcagccagcagggggaggagccacagcgcccaaggcacaggcccgcccgcgccggcagacggc

SEQ ID NO: 9605 - RNA, 80 nt, Homo sapiens
aagaaaaagacggaaaggacacgccgagccgggccgccccccaccaccggcccacccccacgggcccgcaccgcggaccc

SEQ ID NO: 9606 - RNA, 75 nt, Homo sapiens
agccacccacaaacagagagaaggaaccacccacgcaggcaggccgccaggcacagagaaggcaaacgggagggc

SEQ ID NO: 9607 - RNA, 61 nt, Homo sapiens
gacccgccacacgcggcccacaacagccggagaccaagacacccagcacagccccccaacc

SEQ ID NO: 9608 - RNA, 90 nt, Homo sapiens
cggcggaacccggggccgggacgcagcccggcggcagcagggcggagaacggaaaagcaccaggaagcagagaggaccgcagaagggaag

SEQ ID NO: 9609 - RNA, 74 nt, Homo sapiens
agaagggacccgaagaggagccagaaggaagcgcagggcagggcacacaaggcaaggaacgagccaggggaaca

SEQ ID NO: 9610 - RNA, 81 nt, Homo sapiens
gcgccggcaggagacgaagagcccgggcggcgccgaccggccacgggcgagcgcggcagaagggccaaaagaaacacaggg

SEQ ID NO: 9611 - RNA, 85 nt, Homo sapiens
aaaaacagcaaaacagaccgaaagaaacgccacaacgggacaaaggaacacagagggagacgaggacgagcgaccgcaccaggag

SEQ ID NO: 9612 - RNA, 77 nt, Homo sapiens
aagcacagacccaggaacaggggaaacaaaagcgcagaagagaagccaacaaggaccgccccggccgccgccaaggc

SEQ ID NO: 9613 - RNA, 74 nt, Homo sapiens
aaagaaggcaaaacacgggagggaagcagaaggagcaaccaggagcacgcccgaggagaccccaccgaggagga

SEQ ID NO: 9614 - RNA, 81 nt, Homo sapiens
cagggggcagaacccagaggcgggaggggccgggaggcagaggggcaggggccgaagggcaagagggcacagaagacggcg

SEQ ID NO: 9615 - RNA, 88 nt, Homo sapiens
ccaacgccacgaccagagacgaagaaggagcagcgcacagcacaggcgaagcgccaagaggagccaaaacaaggggccaaaaagagga

SEQ ID NO: 9616 - RNA, 107 nt, Homo sapiens
cgaccgagcgggaggccacagcagccagccggcccgaggacaccgacaccagcaggccagcgcgcaggcccggaggagcgggaggccagaaacaaagagcagacagg

SEQ ID NO: 9617 - RNA, 64 nt, Homo sapiens
caagcgaccaggacgaaaaggaacacaagggcaagacagccgggaaccccaccccaccccacag

SEQ ID NO: 9618 - RNA, 69 nt, Homo sapiens
ggaaacgaacgcagcaaacagacaacaaacagaacggcaaaagccagaaagcgagcgacggaacacaaa

SEQ ID NO: 9619 - RNA, 75 nt, Homo sapiens
caggagccacgagagaggaggcgcgcgcgcgccgagccgcgggcccgcaggaggaggcgccccaccacgaacgcg

SEQ ID NO: 9620 - RNA, 80 nt, Homo sapiens
aaccccgcagccacccacagcggaccgggccaccggaaccacaggagcagaagcggcgccaggaccggacacaacagcgc

SEQ ID NO: 9621 - RNA, 78 nt, Homo sapiens
gcaggcccccgagggcagcccgagacccaccagagggcgccacaaacggagcaaggcgaccgaaaaaaaagcaaaagc

SEQ ID NO: 9622 - RNA, 54 nt, Homo sapiens
acagcccaagaggggacgagaacaaaggagagccagacaaggccgacgcgcacg

SEQ ID NO: 9623 - RNA, 83 nt, Homo sapiens
ggagcaacgaggcgccgggaccggcgcagagacaggcgcgaggagacaccgcagagacagaagacagcccacgacacaggccc

SEQ ID NO: 9624 - RNA, 77 nt, Homo sapiens
agaccgcgcgccaagccgcacgcaaccaccgcccggccacaccaggaggacagcagcggacggccggaccaagaggc

SEQ ID NO: 9625 - RNA, 92 nt, Homo sapiens
ggggaaggaggcgcggcccgggcagcagggcggcagcgcccgagagaggccaagccgacgccagcgggcgccacccaacaggcgcaccgccc

SEQ ID NO: 9626 - RNA, 69 nt, Homo sapiens
ggccccggagcacagcccgggcacccaggacccagaggcgacagcggcaaccgcccgcccgccacaggg

SEQ ID NO: 9627 - RNA, 65 nt, Homo sapiens
cagagcaggcgcgccaacacaagagaaacaccaaacaaggccgaaaggaggagccaaaaagagaa

SEQ ID NO: 9628 - RNA, 78 nt, Homo sapiens
acaaacaggcgcggcagagccgaaacacacaagaggagggaagcaccaaacaaaccgaaaaagggaaggagaaagaaa

SEQ ID NO: 9629 - RNA, 79 nt, Homo sapiens
gaccccgcgcaccccccgcgccggcggccagccagccccgcggccggccgagacaaaacagaggagaccagaccagaag

SEQ ID NO: 9630 - RNA, 81 nt, Homo sapiens
gcaggaggccgagcaacaagaaccagacgaagcagagagcgcaggacagacccaaaaaggacaacgacccgcaaggaggcg

SEQ ID NO: 9631 - RNA, 76 nt, Homo sapiens
gagccgagccggaacgcggcagcccccgccaggcccaccaaggccgagaaacagacaacccacagaacaaagcgga

SEQ ID NO: 9632 - RNA, 75 nt, Homo sapiens
aagaaaagaccagacgggaaccaagaagaccgaggaagacacgaggacaggcccaacggagaagggcacacacgg

SEQ ID NO: 9633 - RNA, 82 nt, Homo sapiens
ggacgcggggccgcggcgccggcagcagagaccaccagaagggaaaagccaagacgaagaagcgcacacgccggaaacacag

SEQ ID NO: 9634 - RNA, 63 nt, Homo sapiens
acggaaacgacagaagcagagggaggggggaagacagggcccagcaccacaggacgggccggg

SEQ ID NO: 9635 - RNA, 60 nt, Homo sapiens
gcggaccgcccccgccaacgaagaccgagaccagggcggaaaacaccccaaaagccaaaa

SEQ ID NO: 9636 - RNA, 90 nt, Homo sapiens
aaaggaaagaaacccacgggcagagcgaaaaaggggacgaaacgcccaccccgggaagcaggacgcgcacagagcgacagaaaggacagc

SEQ ID NO: 9637 - RNA, 73 nt, Homo sapiens
aaccaaggaaagagaacagaggccgaaaaaaaggcaccaaaagacccaacagggcgaccagaaacgagacgca

SEQ ID NO: 9638 - RNA, 84 nt, Homo sapiens
gcgaaggaaaaaccacacacaccagcaagaagacgacccaagcggcagaagcccggagcagcaaggggacaagagaagaccaag

SEQ ID NO: 9639 - RNA, 102 nt, Homo sapiens
aagaaaggagacaccagaaggcagaggaggcgcaagacgcgaccaaagccgacggggcaaggcacggggccaaaaaggcacgagggaacgggaaagaacaga

SEQ ID NO: 9640 - RNA, 82 nt, Homo sapiens
ggagaaggccacaccacgcagaacgcaacaccaaggcacaccaccccagaaccagcaacacacaagaaacccagccaccaag

SEQ ID NO: 9641 - RNA, 55 nt, Homo sapiens
ggacacacccccaggaggcccggcagagcagagcgagccacacgaaaaacaaaaa

SEQ ID NO: 9642 - RNA, 80 nt, Homo sapiens
gccaggacgacaaaaacaaacggcaggcgaaggaaaaccagcacaagaagcaagggaaacccgaacagccgggggagaag

SEQ ID NO: 9643 - RNA, 77 nt, Homo sapiens
cggcgaagaaggaggcaggcacgggagccgaaggcgaaggccccaccaccaaccgacaccgggccagccgagcagga

SEQ ID NO: 9644 - RNA, 70 nt, Homo sapiens
ccaaacgcaggaaagccagccaggaaacgcaccacgaggacaagcagaaaccaagcggaccgagacacag

SEQ ID NO: 9645 - RNA, 80 nt, Homo sapiens
cacgaagcagcagaagcccagggcggcccccacccaggacacgagaggaagccggagcaggaggcaacgccccccgaagc

SEQ ID NO: 9646 - RNA, 72 nt, Homo sapiens
aagaggcgcggaccaacacaagaacgaaacacccgggaaaaagaagaggcaaaaggcacggagggaacaggc

SEQ ID NO: 9647 - RNA, 69 nt, Homo sapiens
ccggcgcccggggccggcggccaggggcgcgaccccccgaaggacagaaaacgggccccagacacaagc

SEQ ID NO: 9648 - RNA, 67 nt, Homo sapiens
cccaccagcaaagaaagggaagcagcgggagaggagcccccaaacggccgggaaggacaacagcagg

SEQ ID NO: 9649 - RNA, 84 nt, Homo sapiens
ggaagaaccaccaacacaagaagaggcagaacccgagagacgcagcagcacaagcgaagagggcaacgcccccagccccccacc

SEQ ID NO: 9650 - RNA, 76 nt, Homo sapiens
gccagaaacgcccccgaagagagccgaagcgacagaaccccaaggccacaaccacacaccaaggaacgcaaccgga

SEQ ID NO: 9651 - RNA, 99 nt, Homo sapiens
ggaaagcagaagagagcgcaggcgacgcacaagaagcacaaaggcaggccagacaccgcagcagaagcaaggaaaaaggaaagaaaggcaaagcagcac

SEQ ID NO: 9652 - RNA, 78 nt, Homo sapiens
ccacacccaaccgccacggaaggcggcgaagaaccagacagggggggccccaccggaacgagacagcgagcaggggag

SEQ ID NO: 9653 - RNA, 83 nt, Homo sapiens
accgggggaccgcgcagcggggacgcgaggacccgggcgggccccacccggagcccaaggacccagaacccaaaaagaccccg

SEQ ID NO: 9654 - RNA, 54 nt, Homo sapiens
gcaaacaaacaagggaacaaggggaacaaacggggagaagcagaccgcaccagg

SEQ ID NO: 9655 - RNA, 86 nt, Homo sapiens
caggagccggagcgcgagacagcgcaccggcggcgcggacgacagcgagacaccgcaccaccagcgcgggccaggcacgacaccgc

SEQ ID NO: 9656 - RNA, 53 nt, Homo sapiens
caaaagcaacaaagaggggaagggaagaacgagaacccaaaaggaaaaaggca

SEQ ID NO: 9657 - RNA, 88 nt, Homo sapiens
gacccggacaaccagaggcagccagcagggggagacaggcccaggagaaagcaagacacggaccggacggcaaagaagcgaccaggag

SEQ ID NO: 9658 - RNA, 59 nt, Homo sapiens
ggggccagggaacccggcaccgccccagcggagccggagcgaggcgggggaggcagcag

SEQ ID NO: 9659 - RNA, 72 nt, Homo sapiens
ggaaccgagcaacgcggccccagccgcggagacacaacaacagaggcagcaacgcgcgaggaagaacaacaa

SEQ ID NO: 9660 - RNA, 82 nt, Homo sapiens
ccggaccacaacgccccacaccgcaggagcagcgcgggcccgacgcgcgcccccgggcgcgccggacaggccgccgcggcgg

SEQ ID NO: 9661 - RNA, 64 nt, Homo sapiens
aaaagacaggcaacaggaaagcaagggaaggcgccccaacaaagggggccgagcgaggaccgcc

SEQ ID NO: 9662 - RNA, 76 nt, Homo sapiens
gacaaggagagaagaaccaaagaagcaaaacacgaggggcaacacccccacaaagagcaagccagccggacgcacc

SEQ ID NO: 9663 - RNA, 71 nt, Homo sapiens
cgaaacgagccccgggaagggcaacacaggccaaggagaccccccgacaacagaagagagaggggcaccgg

SEQ ID NO: 9664 - RNA, 82 nt, Homo sapiens
agggaacaagaggggcagcaagggccaaaggagagaaggcgaggaagcccaagcacaaaggagaagacgcccaagccaagaa

SEQ ID NO: 9665 - RNA, 76 nt, Homo sapiens
gaagacaaggaccacagggcgcaagaagcaacggcaaaggaacagggaccccccaagccagcgaagcaggccgaac

SEQ ID NO: 9666 - RNA, 67 nt, Homo sapiens
ccgcgccggcccgaccaggccccgcagacccaacggaggagacggagcagaacaacccgaaagaaga

SEQ ID NO: 9667 - RNA, 79 nt, Homo sapiens
gcgggcaggagcggcggccaggccagacccgaaggccaggagacccgaccccaaggccccgggggcgccgagggcacaa

SEQ ID NO: 9668 - RNA, 54 nt, Homo sapiens
gcaggcggacccaggaggcagagaaaacgcgcacaggggcccgagacacccccg

SEQ ID NO: 9669 - RNA, 81 nt, Homo sapiens
cggcaccggccgacgccccgcccgcccagaagcaggagccaacagagcccaaaagacaggagaaacacaaggcaagccgac

SEQ ID NO: 9670 - RNA, 55 nt, Homo sapiens
accacagaaaccaaaacaagacaaacagagaacaggacagcaagaacgagggaac

SEQ ID NO: 9671 - RNA, 57 nt, Homo sapiens
gaaaaacgagaaaaaggacagggaacgccgcagaaagaagaaggggcaagaacagcc

SEQ ID NO: 9672 - RNA, 78 nt, Homo sapiens
aaagcagccaggagcacggggggggccagggagcccggaagacagacgcgaagcaaagcgccacccagaagacgacag

SEQ ID NO: 9673 - RNA, 77 nt, Homo sapiens
gggcgcgcgggcggcgcgggccacaccagaggagccggaaggggaccagaagccaggagaggcgccgggacgggcgc

SEQ ID NO: 9674 - RNA, 86 nt, Homo sapiens
ggcgaggcgcgccccgcccggcagcgaccggaggcagcaccgggaccggaggcccagagcgacggacggagaaccaggcccgcagc

SEQ ID NO: 9675 - RNA, 68 nt, Homo sapiens
gggagacgacgccagaagcaaacaaaagcaagcggccgggaaaaaaaggagggcggggcagagcaggg

SEQ ID NO: 9676 - RNA, 74 nt, Homo sapiens
agaagcacaggcccgggcgaaggggccacgcgagggccggaggacgcggggaaccagaccgggccagaccccac

SEQ ID NO: 9677 - RNA, 110 nt, Homo sapiens
ggggggcccgcgaccccgggacaccacgaaaaaccagccagcggcgacgacacggccagcgcagaaagcggacgagcggcaaagcccgcagcgccgggaagaagccggcc

SEQ ID NO: 9678 - RNA, 74 nt, Homo sapiens
cggacaggacgccaaacaagacaggacccaggacgaagacagggaagaagcaccaaagccggacaggacaaaag

SEQ ID NO: 9679 - RNA, 67 nt, Homo sapiens
ggaccaaaccagagcagacacagccggagaggcaacggaacacggcgaggcgccaaagggagagagc

SEQ ID NO: 9680 - RNA, 75 nt, Homo sapiens
ccgagagccgcccgggccagcggccgcgcacccccggccggaggcaccagccagaaagcgaagcagaagccgaga

SEQ ID NO: 9681 - RNA, 75 nt, Homo sapiens
gcagccaccagcagcccccagagcgggaccacagcgaaagggacagaaccggcaggaaaaaccaagcagggaaga

SEQ ID NO: 9682 - RNA, 74 nt, Homo sapiens
ccgaagacaagccgcagcgggcagcgcaagccagcaggacggaaaaagcacagaaaggggggaacgaaacgcga

SEQ ID NO: 9683 - RNA, 82 nt, Homo sapiens
agcggcgcgcgggaccgccaccgggcggggccgcggcggcggagcgggacggcagggacacggacagcgggaggggcagggg

SEQ ID NO: 9684 - RNA, 74 nt, Homo sapiens
gaccaagaaggaccagaaaaccgacaacccccagaaagccaagccgggagcagccaacacgaacgggcaggaac

SEQ ID NO: 9685 - RNA, 87 nt, Homo sapiens
cagggaccgagacaccggacccgcgaccaccgcaggcccaaaacagggggcgacgaggcccgaggggcgggacaccagggacccggc

SEQ ID NO: 9686 - RNA, 54 nt, Homo sapiens
agggacagcacgcagcgaagagaggaagaagacacggaccgacggacgggaaac

SEQ ID NO: 9687 - RNA, 58 nt, Homo sapiens
acacgaaaagaggagggccacaaggaacggccaaacaacaaacgcagcacagccaaag

SEQ ID NO: 9688 - RNA, 57 nt, Homo sapiens
aaaaccgccaaagccggccccggcaaggaggaaggggcgggagcagcggaggaagcc

SEQ ID NO: 9689 - RNA, 72 nt, Homo sapiens
gggccgaaccgggagcgaggaaccagaacgaaaagcgccagaaaggggcgaccgcacagacccagccgaggc

SEQ ID NO: 9690 - RNA, 81 nt, Homo sapiens
ggccggcacggaacgagggccccagagacgcaaaggagcgcccgggaacaagccaagggaaccggccgcaagaccccgcac

SEQ ID NO: 9691 - RNA, 65 nt, Homo sapiens
cagagagcgcagcaagaaagaagagaaaccaagcggagccacaaccagggcaccggcagacaaac

SEQ ID NO: 9692 - RNA, 85 nt, Homo sapiens
aagccccccaccaccccccaagccccaccgaggaagaaaagaaaggagccgaagaaccacggagcgcacaaccacccagggccgg

SEQ ID NO: 9693 - RNA, 57 nt, Homo sapiens
gagcagcgaaaacggggagagccggaccccaggccggggggggcacagagccccgga

SEQ ID NO: 9694 - RNA, 76 nt, Homo sapiens
aagacccagggagaccaccgaccccaggacacagaacgaccgaagcagcagccgcccaaaacacaaaccaaagaag

SEQ ID NO: 9695 - RNA, 110 nt, Homo sapiens
gcagaacgccaagccccgcgagcgcacgccaacgacgaggaccgacgcaggcaaaagcagaccggaaaacccaccggcaagaccacacccgaggggagcccaggacacca

SEQ ID NO: 9696 - RNA, 58 nt, Homo sapiens
aaggcgcgaaggcagaccgcccagcggcgggcagcccagaaacaggacagcacgccgg

SEQ ID NO: 9697 - RNA, 85 nt, Homo sapiens
gccccaacagcaccgcgccgccgcccccaccccccaggaaggccaggaccccagaccaggcaccggcccgaccagccacgacacc

SEQ ID NO: 9698 - RNA, 58 nt, Homo sapiens
aagcaccgccgggcccgcccgcacgaaaccggccggcagaagaggccaacggccccaa

SEQ ID NO: 9699 - RNA, 84 nt, Homo sapiens
cagagagaaggcagggcaaaccagaaagacggcaaaccgacaccagcgacacaagcgcgagggaaccacagaggacaggcgagg

SEQ ID NO: 9700 - RNA, 82 nt, Homo sapiens
gagggcaccagcagacacgccgccgcccaggaagacgaccccgacgcaggccaggagccgcggacagaagccgagcacggcc

SEQ ID NO: 9701 - RNA, 79 nt, Homo sapiens
gcgggaccccgccgcggcgggagggcaaaagggaaagcaaggggaagggcccaagaagacaccccaccagaaaccgaac

SEQ ID NO: 9702 - RNA, 76 nt, Homo sapiens
agcggggaaagccgggcacaagccagcgcacccaggagcacaggagaggcgcacgcggggaggaagagaagaggca

SEQ ID NO: 9703 - RNA, 60 nt, Homo sapiens
ccggaaaccgccgcccccacccagagcaaagagacgcccgacaccacccgaggggaaagg

SEQ ID NO: 9704 - RNA, 38 nt, Homo sapiens
gggggcaaacccgagagaacggaaaaggacgggacacg

SEQ ID NO: 9705 - RNA, 85 nt, Homo sapiens
gcagggcaccgcgcgaagcggccaaagccgcccagacggccaccggcgggaggaacaaaagggccagaccaaaggaaccagagca

SEQ ID NO: 9706 - RNA, 36 nt, Homo sapiens
gaggccgaagggagaacgaagggaacaaccagcagg

SEQ ID NO: 9707 - RNA, 75 nt, Homo sapiens
gggcaagaacgaaccaaccccacaacaccgccggagacagccaagggaaggagacccaggaagaaagggcgaagg

SEQ ID NO: 9708 - RNA, 61 nt, Homo sapiens
acacgagagcccagggcaaggcgccaagggcgagccgcccgagccagagggacaaagacgc

SEQ ID NO: 9709 - RNA, 79 nt, Homo sapiens
aggaaggcagcgcacgacagcaaaaggaccccggaggaaaagcggaagcggcagcggcgaacgccggaacggaccaaca

SEQ ID NO: 9710 - RNA, 67 nt, Homo sapiens
gggaaagcagaggaaggcagaagaaaaagcaacagagcgccaaaaagaggaccccagcacagcacag

SEQ ID NO: 9711 - RNA, 73 nt, Homo sapiens
ggagacccacgacacggcaacggaacagcagagaacaaaggaccgcaaacgaagacggcagcacagcaggcac

SEQ ID NO: 9712 - RNA, 73 nt, Homo sapiens
aggccccggcacgggcacggggcaccccagcagaggacagggcgggaagcagcaaggaagaaagggcaggcga

SEQ ID NO: 9713 - RNA, 70 nt, Homo sapiens
caagagacaacacggaggggggagaacgcacccacggagcgagagagacccgcgaaaccgacccaagaaa

SEQ ID NO: 9714 - RNA, 73 nt, Homo sapiens
ccaggcgaagaccggaccgggggcaccggaccgagcgccggaggaagagcggaaaaggcggagacgaaaaccg

SEQ ID NO: 9715 - RNA, 39 nt, Homo sapiens
ccaaaacgcaacagaaacaacaggcaaaccgacaccagc

SEQ ID NO: 9716 - RNA, 59 nt, Homo sapiens
gacgcccccccaggaaccccacagcaccgaaagaggaaagaaggaccaggaaggggggg

SEQ ID NO: 9717 - RNA, 53 nt, Homo sapiens
acgaagagcccaaggaacagcgggcgacaaaccccgggggaccacccaccggg

SEQ ID NO: 9718 - RNA, 73 nt, Homo sapiens
aagaagcccaaagggcccgacagccggcaagacgcgccccccgcagcaggcgcccacacccaccaccagcagg

SEQ ID NO: 9719 - RNA, 70 nt, Homo sapiens
cggcagacgggacggccaacggaggagagaaaccgggcaaacagaagacgggcaaaagagcggaagaacc

SEQ ID NO: 9720 - RNA, 47 nt, Homo sapiens
gcggaggaacagcggcagccacaggagccagcgaccaacgaggacag

SEQ ID NO: 9721 - RNA, 68 nt, Homo sapiens
aaggaggacgaggcaagggaacagaaggagcagggcccaggacagaaggcgggcaaggagcgcccccc

SEQ ID NO: 9722 - RNA, 91 nt, Homo sapiens
cacccgggagcggcggccacggaggcaccagaagaagcaccagggagaaaagaagcagcccacgaaccccgacaacagagcagaagccgag

SEQ ID NO: 9723 - RNA, 79 nt, Homo sapiens
gccaagccgggccgcccgcggcggcgcaggggcacagcgacgccgggcccccggaccccgcggcggcgggcgggagggc

SEQ ID NO: 9724 - RNA, 65 nt, Homo sapiens
agagagacacggcaaaaaccagcagaggagcaccggcccaggcggaggcaaggcggacccggcgg

SEQ ID NO: 9725 - RNA, 67 nt, Homo sapiens
gcagaggaagacacacaaacggcgcggcagaaaaaccagcccggcgcagaccccggaaagggacagg

SEQ ID NO: 9726 - RNA, 85 nt, Homo sapiens
caaaaccgaggcccaaagagcccaggagaagcggagcggcagagaaaaaggccaccgaggagagcgggacggccccaaggccaca

SEQ ID NO: 9727 - RNA, 63 nt, Homo sapiens
aaccacccacagaccagccggaacaagagacccgggggagcgggccggagagaagagaggggc

SEQ ID NO: 9728 - RNA, 73 nt, Homo sapiens
cagcgagggcccccagccagcccgacagccgcaaaaccaggcaaggaacaacggagaagaaaaagggacacga

SEQ ID NO: 9729 - RNA, 66 nt, Homo sapiens
gcgggagggcgggaggcccggagcgcccggagccggaggcaccgaaggacagaagaggacccagcc

SEQ ID NO: 9730 - RNA, 76 nt, Homo sapiens
gccgagaggcgcgcaaccgccccaggcagagcccaggaccagccgccaagagaggcgacggcccaagcgccagaac

SEQ ID NO: 9731 - RNA, 79 nt, Homo sapiens
caggaagagggacggaaccaccagaagccagcccccaggcggaacgcccgccccgcagagagggacaagacggacagaa

SEQ ID NO: 9732 - RNA, 73 nt, Homo sapiens
cgaccacagcagcgaccgaaggggaacaaaggccgacaaagaacacaaggggaaagagaaaagagcaccagac

SEQ ID NO: 9733 - RNA, 59 nt, Homo sapiens
ccggagcagagagcccaaaaacggcccaggccgcaggggagccgccaccaaaagcagac

SEQ ID NO: 9734 - RNA, 64 nt, Homo sapiens
acgagcgacaggagcacacccggagaagcaggagcccaccggcagggaggcaccgccccaaccc

SEQ ID NO: 9735 - RNA, 57 nt, Homo sapiens
ccgggcccaagcagcacgggggaaagaaacccacgcccaccaaggcaggcccgggca

SEQ ID NO: 9736 - RNA, 79 nt, Homo sapiens
ggaaccaccaaagaaaaaacgccacgcaaggccggggggggcacagagccccggaagacagcccccagcgaccagaccc

SEQ ID NO: 9737 - RNA, 68 nt, Homo sapiens
gccagggcagggaggagcacgcgcagcgaggggcaaagaaaagggcaggcgcgcaaaggccggagccc

SEQ ID NO: 9738 - RNA, 77 nt, Homo sapiens
aacagccaaaggaacgagagacacacgacaagacagaaaccaagaagcacgaagagaggagagacagcaaagcaggg

SEQ ID NO: 9739 - RNA, 84 nt, Homo sapiens
cgcacaggaagaacaaagggcaggccggaaggaccaggcagggagcaggacaggaagcagaaggccaggaaacccaccagagga

SEQ ID NO: 9740 - RNA, 68 nt, Homo sapiens
ggggcagaggcacagggccgggagcggaacccaaaaaaagacccagaccagggaaaagagcagaacgg

SEQ ID NO: 9741 - RNA, 78 nt, Homo sapiens
accgcgacccgccacccacagcagcccgcgaggaagagagcgagcggaaaacggccgaaggcaaagcgaccagaccgg

SEQ ID NO: 9742 - RNA, 73 nt, Homo sapiens
ggccccaagacccggccggcgccgcggccgcggggcccacgagcagcgagcgcccccggcccccggccaccaa

SEQ ID NO: 9743 - RNA, 51 nt, Homo sapiens
acgcccaccccccgaacccagccgcaccgccagcagcgcagcgcccgcagc

SEQ ID NO: 9744 - RNA, 85 nt, Homo sapiens
ccgacccgggccccgggcagcagagcggaggcgcgccacgaaaccgaccgcggcaagagcaggacaaaaaggacccgacagcaca

SEQ ID NO: 9745 - RNA, 108 nt, Homo sapiens
cagaccgaagagacagacaaggcaaagcgaaaggcaccgcaacaacgcccagcgaggacacacccgacacccaaccccgaaccccacacaccgccagcacacaggagg

SEQ ID NO: 9746 - RNA, 76 nt, Homo sapiens
gcccagacccacacaagaaagaaccaacgaaacgagcccccaagggagcgagggcacacgagaaacaggcaggaga

SEQ ID NO: 9747 - RNA, 75 nt, Homo sapiens
gaccgcggcgaagcaaaggaacgcgccggaagaaaaggccggcacccacagaaggagaacaagcagagcaccgga

SEQ ID NO: 9748 - RNA, 82 nt, Homo sapiens
gaggacacgcaagccacaggccaccgccggaaccgcgggcccgaaggcacgacgacgagcgggcgaggcgccagcgcccagg

SEQ ID NO: 9749 - RNA, 71 nt, Homo sapiens
aaggaaaaaccccccaacaggaggcaaggaggccacggggccgaagacaccaaccgggcaccagccaaacg

SEQ ID NO: 9750 - RNA, 51 nt, Homo sapiens
ccccggagcccggagcaagaggcgcagccgagccaaagaaaaagccggcca

SEQ ID NO: 9751 - RNA, 51 nt, Homo sapiens
gggaacccggggcgagaggaaccggagaccagaaaagacgaacaggagaag

SEQ ID NO: 9752 - RNA, 88 nt, Homo sapiens
gacggccagcgacccgcgcaagcgcgagaccgaccgcacggggaggaagagaggggccacacagcaggagagaggacgcgcagcgagg

SEQ ID NO: 9753 - RNA, 98 nt, Homo sapiens
ggcagcgggccggcaaccagacagacgcgcccagccccgcgcagcaagggcccgcccacggcccaaccgaaggccccggcaggcgagggaccgagccc

SEQ ID NO: 9754 - RNA, 96 nt, Homo sapiens
gaaggaggagccccccgcccggcagcgccccgcgagaaggcggggcagccccggaggacccaccagcacgcaggaaggcacggcggcggccgggcg

SEQ ID NO: 9755 - RNA, 51 nt, Homo sapiens
ggcccgcgagggcgaggccgggagaggggaagaccgaggagcagggagcaa

SEQ ID NO: 9756 - RNA, 81 nt, Homo sapiens
caccgcggagcaaaaaaagagcccgcaagaagaacagagacagcagccaaacccccagagacaagacaaagcgcaggaaaa

SEQ ID NO: 9757 - RNA, 75 nt, Homo sapiens
ccggccacccggcccccggcaccaggccgaaaacgaagcagaggaacaacaaggacaacaaagcgcgcagaaacc

SEQ ID NO: 9758 - RNA, 81 nt, Homo sapiens
acccccaagccggagggaacgcagccagcgccacgacaaagccccccgaaaagggcaaaggaaacccacccaccacccgag

SEQ ID NO: 9759 - RNA, 55 nt, Homo sapiens
aagccgcacaggggcagggaaccgaaagacaaggcccggggacacgagaccggcc

SEQ ID NO: 9760 - RNA, 79 nt, Homo sapiens
gcgcaacgcgggagagcccgggccacccccccaggcaagagaaggcaccggccaaagggggcgaccgggacaggacgac

SEQ ID NO: 9761 - RNA, 53 nt, Homo sapiens
agaaagagaggaaagaagaaaaccaagaaagccccacgcgcaaccgaacgcac

SEQ ID NO: 9762 - RNA, 86 nt, Homo sapiens
cggagcaaggaagaaaaccgaccagaagagaaagagagaagccaaaccccagaacggggaagaaaccgaaggggggagaaacccac

SEQ ID NO: 9763 - RNA, 78 nt, Homo sapiens
ggaggagacgcgcgagagccggccaaagaggggccagagcaaaaaagggcgagaaaacacaaaagcaagacgcagcag

SEQ ID NO: 9764 - RNA, 64 nt, Homo sapiens
caggcgcgcaaagcagacaccccagcgcgacaaggcggagaacggaaaagcaccaggaagcaga

SEQ ID NO: 9765 - RNA, 82 nt, Homo sapiens
gaaacgcagcgcgcccccaggaggcgagcccgcggaaccgcagccaggggccaggaaggaacggcagccaggaaagagggag

SEQ ID NO: 9766 - RNA, 79 nt, Homo sapiens
caggagcggcacgccagaaaagaaaagcaccgggcgcagagacccgggacaccgaggaggcaccccacagcagcgcggg

SEQ ID NO: 9767 - RNA, 58 nt, Homo sapiens
aaaaacgggacccgaccagaaacaagaagcaggagaagaggcgggccgaccacaccaa

SEQ ID NO: 9768 - RNA, 80 nt, Homo sapiens
cggcgagaggcggcgccgccccaagagcgcagacggccagccgaaaccacgagaaagcaggcaaacaaccaggcccgcgg

SEQ ID NO: 9769 - RNA, 79 nt, Homo sapiens
aggccaaagaaagagaacaccacgccacccgaaaaacacggagagcaccacccagaggagaaggagaggagaagccgcc

SEQ ID NO: 9770 - RNA, 41 nt, Homo sapiens
acaaaacagagcaaggcaagaaggggagcaccgaagacgag

SEQ ID NO: 9771 - RNA, 69 nt, Homo sapiens
gacaagcaggaaacaagaaacaccaacacaaaaaaaaccaacagccccccaggaaagggccgagaaaga

SEQ ID NO: 9772 - RNA, 78 nt, Homo sapiens
gaaccccagcagaaccagccgacaggacagcagccgcaaccaagcacacgagagcgcacgagacaacgacagcgaccg

SEQ ID NO: 9773 - RNA, 70 nt, Homo sapiens
cagaggagcagggaggccacaggggccgaaacacagagcaaggcgggaaaacggcacaaggcgacgaggg

SEQ ID NO: 9774 - RNA, 70 nt, Homo sapiens
gagcggaagacagagcccagagaacagagagcaaaaagcaaggcagagaaagcaagagacgcaaccgaac

SEQ ID NO: 9775 - RNA, 81 nt, Homo sapiens
ggacggcgggaccacaagacaacgcggagcggcgaagagcaaccaggaaggaagacccacaagagaccacgcagagacagc

SEQ ID NO: 9776 - RNA, 72 nt, Homo sapiens
aggcgcacacaaacggcagcgcccggagaggaagaggcaaggcaacaccgggcgcgcacagaagggacaacg

SEQ ID NO: 9777 - RNA, 83 nt, Homo sapiens
ggcggccagaccccagaccaggggggagcaggaccagcaggcccgaccccacccgaccggcgcgccgcccagccagaagggag

SEQ ID NO: 9778 - RNA, 66 nt, Homo sapiens
ccagaggccggggaccgccaaccccccaagaagcagagaccgaaggacacagcccgcagaaaggaa

SEQ ID NO: 9779 - RNA, 79 nt, Homo sapiens
gacgccgaggccccagaacaagcggagccaccggcaccacggccaaaccagaccgcggaaccgcgggaagagcgccgga

SEQ ID NO: 9780 - RNA, 60 nt, Homo sapiens
cacgggacagacacgcgagagcgggaggcggcaccggccgccacgcagggggcggcgcgc

SEQ ID NO: 9781 - RNA, 75 nt, Homo sapiens
caggaagcagaagaagcgaggagaagaagagggcggagaacggaaaagcaccaggaagcagagaggaccgcagaa

SEQ ID NO: 9782 - RNA, 73 nt, Homo sapiens
ccggagcaaaggacaacgagagagagggaaacacagcaaagaagaagcaccgggaagaacagcaggaagacca

SEQ ID NO: 9783 - RNA, 60 nt, Homo sapiens
accagaggacagagcccacagaaaagagccgacaagagcaccaggagcagcgagccagca

SEQ ID NO: 9784 - RNA, 119 nt, Homo sapiens
aaggcgaaggagccgacgagaaaaacaaggagcggacacgagccgagggaggggaaaggcgcaggcgcaccccccggaggcggccgagcccacgcgacgaagaacaggagagggacgaa

SEQ ID NO: 9785 - RNA, 78 nt, Homo sapiens
cccgccgaggccgcggcgccaaaccgagggggcacccgaggaggaagagggcagggcccacggaaagaagggaaaccc

SEQ ID NO: 9786 - RNA, 79 nt, Homo sapiens
aaaagagcggaggagcggcgagggaagaacccaaaacaaaacagaacgcaaaagcaccgacgacaaaccaacaggagca

SEQ ID NO: 9787 - RNA, 63 nt, Homo sapiens
gcgcaagcagcaggaaggagaccaagagaaccaggagcggcagaccgccgccaggaggaggca

SEQ ID NO: 9788 - RNA, 44 nt, Homo sapiens
ggcggagaagacccagcaggcccagacccaagacgacaagacca

SEQ ID NO: 9789 - RNA, 39 nt, Homo sapiens
agacagcacaaccagcgggccaccgccacccaggcggag

SEQ ID NO: 9790 - RNA, 80 nt, Homo sapiens
ccgcccgaaccaggccgagaaggaccgccgacccgcccaccacgccagcagcgcgacggcagccaccaggcaggcaacca

SEQ ID NO: 9791 - RNA, 76 nt, Homo sapiens
gccaggacgagcagagccccccccaccagaggacgggaggagcagcaacagaaaggaagcggaagagaagaccggc

SEQ ID NO: 9792 - RNA, 59 nt, Homo sapiens
gggaacaggcacaggacggcgcccaaggcacaggaccgacaaagaaaacgcacaggacc

SEQ ID NO: 9793 - RNA, 82 nt, Homo sapiens
ccgcgccaagccgggggcacacagagaaggagacccagggccaaaaacaaggcgaaagcaggcgaaagggaaaaccagaagc

SEQ ID NO: 9794 - RNA, 68 nt, Homo sapiens
accaggccccaggaaccacagcgccagaaggccaggggacgccgagggaaaggggaccaccgaccgac

SEQ ID NO: 9795 - RNA, 61 nt, Homo sapiens
gccgaccagccgcggagccgggggcagggacaaagaggaggacaagaacccacccgcgccc

SEQ ID NO: 9796 - RNA, 71 nt, Homo sapiens
cgaaggaaaggcacgcacgagaagcggccgaagagagcgccaaccgaacagcgcgagccacaaggcaagga

SEQ ID NO: 9797 - RNA, 56 nt, Homo sapiens
aacaaaagagaaggagacacagacgcggccaaccacccaaagaggagcaaccaagg

SEQ ID NO: 9798 - RNA, 80 nt, Homo sapiens
cggcgagccgcgacggcgccgcccacggcgagagcccaagacagggggccggaaacagggagcagggaaaagccaagcag

SEQ ID NO: 9799 - RNA, 66 nt, Homo sapiens
acgaaagggagagaacaacacgacaagcagacagagggccacaaaggaagacagaccgccaggaca

SEQ ID NO: 9800 - RNA, 113 nt, Homo sapiens
aagcgcggcgcgcaggacccagacccccccccgagaccggaagagaaagagcaggaagcccggacccaagaacaccacacgcacagcggagacgcacagacgcacgcggccgg

SEQ ID NO: 9801 - RNA, 56 nt, Homo sapiens
agacacgcgagcaagcacaccgaaagccacagcaagaagagggaaggggaacagga

SEQ ID NO: 9802 - RNA, 62 nt, Homo sapiens
cgcagaccgagacccggacagggcaggaaacagaaggcaggcccacgggagccgagaccccc

SEQ ID NO: 9803 - RNA, 77 nt, Homo sapiens
caacggaggaggagaagaagcacggagagaacagcaaaaaaaagagacgacaccccaccgcggaggcaaggcgcgac

SEQ ID NO: 9804 - RNA, 37 nt, Homo sapiens
cggagcagaggccaacagcccggaggaacaaccggac

SEQ ID NO: 9805 - RNA, 79 nt, Homo sapiens
caaggcaggacaacacaggggggggggggagcaggagagaacaaggagcaggccaacggccagaagaacgagcaaaaag

SEQ ID NO: 9806 - RNA, 76 nt, Homo sapiens
accagagaccacagaagaaggaagggccacccaggacaggggcacccagaggagacacaccgaagaaacaacagag

SEQ ID NO: 9807 - RNA, 39 nt, Homo sapiens
aaagccacagcgaccaaggaaggggaaccacaaagaaga

SEQ ID NO: 9808 - RNA, 51 nt, Homo sapiens
ggagacagcagacgcaccaaagggacagaaccaaaggacaaggcacgaggc

SEQ ID NO: 9809 - RNA, 75 nt, Homo sapiens
cacggcagacggcaagcccccgagggcccaccggaccacggccacaacggggcgggcgagagcacaggcagaagg

SEQ ID NO: 9810 - RNA, 84 nt, Homo sapiens
aagacccaccccggagacccccgcccaggcagcaaaagagcaacgccacaagagccacagagccaagcgcagcccagaaagcgg

SEQ ID NO: 9811 - RNA, 79 nt, Homo sapiens
ggggagcagaccggaggaggcgggggcgccggcagaggaccaggcaccaccggccccggaagcaaaagcgcacagccag

SEQ ID NO: 9812 - RNA, 72 nt, Homo sapiens
ccccacagaaagggcgcaccggacaacagagcggcagaaccgaaggaaaagacgcccgaaggacagcaagag

SEQ ID NO: 9813 - RNA, 83 nt, Homo sapiens
ccgccgcgggagccgcgcccgaaccccggcccgaacccagccaccagccaaggacagagggcaagagagacccagccaaggcg

SEQ ID NO: 9814 - RNA, 61 nt, Homo sapiens
agcgcgcccgccgagaaggagcccccgcaggaccaggccaaccggagcgcacccacgccac

SEQ ID NO: 9815 - RNA, 78 nt, Homo sapiens
gccgaaaaagaggaaccaccaggacaggcagccagggacgccaccaggcagccgcagaggagagcaggcggaccgcca

SEQ ID NO: 9816 - RNA, 68 nt, Homo sapiens
aaggaccaagaaccagacaacagagaagcaaaggccagaaacagagaccaccaacgccaagaaaacgc

SEQ ID NO: 9817 - RNA, 76 nt, Homo sapiens
gaaaggcgcccccgagaccccgcggaacgcccaccgcggagagcagcacgaccccagcacagaagacagcggacac

SEQ ID NO: 9818 - RNA, 71 nt, Homo sapiens
aacaccacccggagggccaaagcggagcccggcacgggcaaacagagcaggcagggaaccgccaaggcaga

SEQ ID NO: 9819 - RNA, 53 nt, Homo sapiens
ccaaccaacagcaaaacagggccaaaaaagccaccaagggaggaaacacaacc

SEQ ID NO: 9820 - RNA, 72 nt, Homo sapiens
gaccgacccggacgagaaacgcaagaacccaggagaaacgagagggacagcaaggaagacgccagagagcgg

SEQ ID NO: 9821 - RNA, 72 nt, Homo sapiens
gagaaaaacccgaacaccagggagaagcaaagacggcaagggcagccgacggccccccccgcaaagcgacaa

SEQ ID NO: 9822 - RNA, 70 nt, Homo sapiens
agaaagggcagaggcccccacggaagggccccacaccaaaccgccacgcaacagacgcagagccagccag

SEQ ID NO: 9823 - RNA, 80 nt, Homo sapiens
cgcagcacgaagcagcccagaggagaaaccgccgcccagaagacaggagcaaccaccagacggcaggaagcaaaagccag

SEQ ID NO: 9824 - RNA, 63 nt, Homo sapiens
agaagaagagaaaaggagggaacacagacccagccgccaagggggcgccagcccaaagagcga

SEQ ID NO: 9825 - RNA, 63 nt, Homo sapiens
cgccgaggaggcgagcagccgggagacaccgccaccgccagcggacggcgcgccaccggccac

SEQ ID NO: 9826 - RNA, 70 nt, Homo sapiens
acagaaaacacccacacagaagggcacgacgcgcaagccaccacgcggggagagggggagcacgcacacc

SEQ ID NO: 9827 - RNA, 79 nt, Homo sapiens
cgggggagcgggagcgcggaaaggcaagcacaaagcacgacaccaggcagggcaccaggccgcgaagcaacagagcaac

SEQ ID NO: 9828 - RNA, 61 nt, Homo sapiens
ccggacaaccagaggcagccagcagggggagccggccaccggaccaccccaagccaccccc

SEQ ID NO: 9829 - RNA, 82 nt, Homo sapiens
cggcaggcccgcaccgacagccaccgccgcccccaacgccagccgacagaaaaaaggccaggagacaaccagaccccggggc

SEQ ID NO: 9830 - RNA, 71 nt, Homo sapiens
gcccaccgcgccggagccaaaggaccaagacccacggcgaagaccaacgaaagacccaaccgacaaaacaa

SEQ ID NO: 9831 - RNA, 75 nt, Homo sapiens
gagacaacacacaacagaagacaagggcaaacaacccccagggggccacccaccgaggaaccaaaccacagacaa

SEQ ID NO: 9832 - RNA, 57 nt, Homo sapiens
gacgggaccgcagccccgagaaaccaaggcggcaccaggacgccgaaaagcgaccgg

SEQ ID NO: 9833 - RNA, 42 nt, Homo sapiens
ccgcacccaaggccgcagacaaggggcgaaggcagacagaca

SEQ ID NO: 9834 - RNA, 54 nt, Homo sapiens
agagaacgagcacccccgaagcacccaggacacaggcaaccacgcagagcgggg

SEQ ID NO: 9835 - RNA, 71 nt, Homo sapiens
acaccaaggcagcgacagcgacacggcccgaccagaagaccaaggcgagccggggacacgaacaccacagc

SEQ ID NO: 9836 - RNA, 74 nt, Homo sapiens
acaggagagccagaggaagaaccagaggaacgggacaaagcggccagggagcacagaaaaggccaggccagacg

SEQ ID NO: 9837 - RNA, 77 nt, Homo sapiens
gcgccccggccccccggccgcacaggagccaggacaaaaccaggcagaaccaacacgaacccaagcacaaacaagaa

SEQ ID NO: 9838 - RNA, 80 nt, Homo sapiens
agaagagagccggggcgacacgcaccgggcagagaacaccagcccgcgcccccgcagaccggaaagcccaaccagcgccc

SEQ ID NO: 9839 - RNA, 64 nt, Homo sapiens
gccgggaccgggggaagggagaagaccaaagggaagagaaacgcaaccggaacacagcacccac

SEQ ID NO: 9840 - RNA, 51 nt, Homo sapiens
gcgggagaaaagaaccgacccacaccaagggaaagacaaggagccgggccg

SEQ ID NO: 9841 - RNA, 58 nt, Homo sapiens
agccgccgggcgccgcgccggaaagccccaaagagacacagggacgcaggagaacgga

SEQ ID NO: 9842 - RNA, 81 nt, Homo sapiens
gcggacggaggagcaggcgagaagagaagaaccaacgaaaagacaggcggccaagagccaaaggcagaaaacgcaagcaaa

SEQ ID NO: 9843 - RNA, 82 nt, Homo sapiens
cacaaaacagcaccccggaggagccggcaacgagacccgaccagccagacggcagcgaccgagccacaccaccccacaaccc

SEQ ID NO: 9844 - RNA, 83 nt, Homo sapiens
gggagaccacagcaagacgccaggacccacggaagccagaaagcaggaaccgcggcgcggacaagagggggcggggaacgacc

SEQ ID NO: 9845 - RNA, 86 nt, Homo sapiens
cgaggaagcaaggccgcggggggagaccccaccaccgcggagaagaagcaggcgccccccaccagccacagacacagacgacacgg

SEQ ID NO: 9846 - RNA, 60 nt, Homo sapiens
gcaccgggaaaggggccagcagaggcgggccgggagaggacgcgagcagagagccccagg

SEQ ID NO: 9847 - RNA, 53 nt, Homo sapiens
aacaacagacagggccacgaaaagggcccaaaacgacagacgcgaaaggggac

SEQ ID NO: 9848 - RNA, 89 nt, Homo sapiens
aaggagcggggaggagaaagagggaaccccccacaacagcagaggccacacagggcaagcagaggcccaccagccgagcagacagaaga

SEQ ID NO: 9849 - RNA, 82 nt, Homo sapiens
ccggccggagcagcagcccgagccaagacacggcaagggaggaagaagggcgccgaggccgagccccggcgagccaacgccc

SEQ ID NO: 9850 - RNA, 54 nt, Homo sapiens
ccagcaggggaagaacgggacacacaaccccgggccgccccccaccagaagagc

SEQ ID NO: 9851 - RNA, 78 nt, Homo sapiens
cagacacggggaagcgcaaaaacaagacggggcgccccacagaggggcgacgggcggagaacggaaaagcaccaggaa

SEQ ID NO: 9852 - RNA, 76 nt, Homo sapiens
gggaccgcccacagggagcacgcacccaggggcagcgcggacccgagcacaccaaaccagaaaacgcgcgagagaa

SEQ ID NO: 9853 - RNA, 81 nt, Homo sapiens
accggcgcgggggcaggcgcgcgccgcaacgccgagcgcaccgacacgccgccaaagagagccagcgcccccgggaacaac

SEQ ID NO: 9854 - RNA, 42 nt, Homo sapiens
aggacaccccaaggacggaaggacggggccagccgaacccag

SEQ ID NO: 9855 - RNA, 80 nt, Homo sapiens
cgccaggaccccagaggcacccagcccagacgggacacacccaaggacccaagaagaacagaaggaagacaaagagacgg

SEQ ID NO: 9856 - RNA, 76 nt, Homo sapiens
ccaggggaagcgaagacagggggcccaaacgggagacaacccccgaaggagggaagagcacaacaccaggggcaga

SEQ ID NO: 9857 - RNA, 73 nt, Homo sapiens
gggacgcgaagcaacaggcggaggcgggacaccaggacacaggaagggcacaagacacaagaaacccgggacc

SEQ ID NO: 9858 - RNA, 81 nt, Homo sapiens
ccaggagcagagcgacagcggcgagcagaacacggcgagcggcgagaaaaaggaagaaacaccaagaacaagagcagccag

SEQ ID NO: 9859 - RNA, 73 nt, Homo sapiens
cgggcggcggacacaagcaggacgccccacacacggaccccggcagccgcagccacccgcgccggccggaacg

SEQ ID NO: 9860 - RNA, 83 nt, Homo sapiens
caagaagccaggccaggccggccaccgcgccgcgccgcgccggcccagggagccccggcaagcaagagcccagaggcccggaa

SEQ ID NO: 9861 - RNA, 91 nt, Homo sapiens
aagacccaagcaaaggcaggcaagggccaaaggacaggcggagaccggccgcaacgcgagcccagaaagaaagagggaaagccagcaggcc

SEQ ID NO: 9862 - RNA, 76 nt, Homo sapiens
aggcgccggcccgggccgccccccgggaacgggagccgccgcgcagagagcggagaaacggggcggggagagggga

SEQ ID NO: 9863 - RNA, 79 nt, Homo sapiens
aacaagaccgacccacaaggccgcacaccagggaaggaccaacgcagcgggcaacaagaggagcgcgaaagcagcaaga

SEQ ID NO: 9864 - RNA, 73 nt, Homo sapiens
ccgcccccagcacacaaaccaggaacggcagcgaccggccggcccagggagaacgcaaaaccaccacccccac

SEQ ID NO: 9865 - RNA, 66 nt, Homo sapiens
agccaccacaagagaaacgaccccaaaaggccaccaccacaagaaacagacgcacgccgaaaaaaa

SEQ ID NO: 9866 - RNA, 76 nt, Homo sapiens
agacccaaagacggaggagggcgcggaggagaggagcgagcccagagaggccaaaccaaaaggaaagcaagccgga

SEQ ID NO: 9867 - RNA, 76 nt, Homo sapiens
cgcagcgggggaagccaccaggcggcagcacgggccccaggcccggaagccgaggggcccaagcccacgaacaccc

SEQ ID NO: 9868 - RNA, 82 nt, Homo sapiens
aaaaagaaaccagcagaagaaaagacaaacaaaaaccaacgaagcagcgacagaggagagaaaccacaaggaccgggaaggc

SEQ ID NO: 9869 - RNA, 76 nt, Homo sapiens
agccgcgcccgccccagcggcccgcccaacgcccgaccaagaaaagcccacccacaagaccagacaaggaggaaca

SEQ ID NO: 9870 - RNA, 77 nt, Homo sapiens
aaagacggcacgcaccgagaggccaggggacaccagccaggagagaaccagaccgggcggagacaagccagccggac

SEQ ID NO: 9871 - RNA, 72 nt, Homo sapiens
caccgggaaggcggggaggaggccccaaagggcgagccccacgacggcaggcgcacggaacagcgaggccag

SEQ ID NO: 9872 - RNA, 60 nt, Homo sapiens
aaagagcccagccacgaagggccaagaacaggagccgcgagggaacaggcacgccccacc

SEQ ID NO: 9873 - RNA, 67 nt, Homo sapiens
aaagggaccgaaggaagagccaccagcgacaaacaggaaagcaggacacaccaccagcaaggcaaaa

SEQ ID NO: 9874 - RNA, 62 nt, Homo sapiens
gaccagcccaaggaacaccaccaaaaacagagcccgcggccccaaaaagcggcgcaagacgg

SEQ ID NO: 9875 - RNA, 69 nt, Homo sapiens
aaccaacagccccccaggcaaagccgcagcgcaaaaccagcacagcacacaaggcggaccccaaacaac

SEQ ID NO: 9876 - RNA, 83 nt, Homo sapiens
gacagccaggcgcccagaggggccccggagccagggaccaaaagagcgcccgacacagcagggcgaggaccaccagacgcgcc

SEQ ID NO: 9877 - RNA, 80 nt, Homo sapiens
cccccaagcccagacaggaccacccaggaggcaggcaaaaccccaaaagagccgcgcagcgagccacgcaccaaaccagc

SEQ ID NO: 9878 - RNA, 61 nt, Homo sapiens
gcccagggcggcaaagggccacagccagccagcaggcaacaggcccagaccaggcccaaag

SEQ ID NO: 9879 - RNA, 72 nt, Homo sapiens
ccaaaaaaaacaacagcagagcaaggaaagccagacaccgcaggaagaggagaggcggacgcagggccgaac

SEQ ID NO: 9880 - RNA, 60 nt, Homo sapiens
cgaacccgcgaccaggcggagagcccagaaacaggcgagacccgacagcagacagcgggc

SEQ ID NO: 9881 - RNA, 72 nt, Homo sapiens
cacaggaaaggacaaaaccagaagcaggggaaccagcggcccagaaacgggagacacccaaggagggacggg

SEQ ID NO: 9882 - RNA, 80 nt, Homo sapiens
gcaagcgcacgcgaggccgaggcggagaaggggcccgagcgcccagacacgacagagggcggagaacggaaaagcaccag

SEQ ID NO: 9883 - RNA, 82 nt, Homo sapiens
gaagaggacccggcccacccgaggagagagcggagaagaagcaggcgccccccaccagccacagacacagacgacacggcgg

SEQ ID NO: 9884 - RNA, 67 nt, Homo sapiens
acgaccggaccgcccaacccaggggacgaccaccagccaggccggggacaaacaggcaaccgacggg

SEQ ID NO: 9885 - RNA, 65 nt, Homo sapiens
cacacaaaaaacaggggacaaccagcagcaaagaggcgcgcaagaaacacgcgagcgagcggcaa

SEQ ID NO: 9886 - RNA, 80 nt, Homo sapiens
gccgcgaaccgcagacagcggccaagaagacacaaaggacggaggcacggagaagacagaggagccagaccaagagacag

SEQ ID NO: 9887 - RNA, 76 nt, Homo sapiens
gccgaggcccaaggcagaggcgaggcggaagggcaccccacccgagaaaaggagcgccagcagcagccagagggga

SEQ ID NO: 9888 - RNA, 70 nt, Homo sapiens
accccccacccgcaggagaaaacggggacggacccaggccaggaaagaaagaaccgccacgggcgcgcag

SEQ ID NO: 9889 - RNA, 76 nt, Homo sapiens
gccccagccgcccgcggccgggagcggagccccggggggagcagagcgcagcacggagcgccagaccacgggagga

SEQ ID NO: 9890 - RNA, 76 nt, Homo sapiens
accccaggacgcgcccccgggagcgggcgcccagagggggaagaaggagccgcagccagaaaaggccagccacaaa

SEQ ID NO: 9891 - RNA, 36 nt, Homo sapiens
agcgcagagaagcggggcgacccagcaacgcggccg

SEQ ID NO: 9892 - RNA, 61 nt, Homo sapiens
gccaaccggaccgcccccaacaaccaacgcgaccggaaaggagagagagacagaaccacag

SEQ ID NO: 9893 - RNA, 75 nt, Homo sapiens
accaggccccgaggaacagagaaaagaaaccagcagacagaagcaggcacgaaaacacaaagaaaaccgccaaaa

SEQ ID NO: 9894 - RNA, 75 nt, Homo sapiens
cacgacccacagaaagccacgaggcgacagggccaggccaccaagccagaagagaccccacggaacaaccaggaa

SEQ ID NO: 9895 - RNA, 67 nt, Homo sapiens
caaaggcccgcacccccggcggccacagaaacgggacccagggcgaccacgcagagaaagcagcaag

SEQ ID NO: 9896 - RNA, 77 nt, Homo sapiens
accgcacagaagaagaggaaaaacgaagccaagaagcaggaaagggccggagcgagggagagcaggaacacagagag

SEQ ID NO: 9897 - RNA, 85 nt, Homo sapiens
cgggcgcaccgaccaggccccaaagccccaaggcgacaagaccggaccgcaaaccagccagcacgggggcccagccagccagcag

SEQ ID NO: 9898 - RNA, 74 nt, Homo sapiens
aggaagcagaacggaggcaaggggagcacggaagacgggcaggcaggggagcaaagcagagagcacacgcgcaa

SEQ ID NO: 9899 - RNA, 80 nt, Homo sapiens
aggaggagagaccagaagccaggagcccaaaagcacagccgagcaaagcccacaaaagaggcagcagacagcaacagcag

SEQ ID NO: 9900 - RNA, 39 nt, Homo sapiens
ccgaggaaaaggagagaggacccgcgcaggaagacaggg

SEQ ID NO: 9901 - RNA, 84 nt, Homo sapiens
cgacacgcacacccccgacaaggcagccgcgcaacggcccgcggcgcgggaggagacggccgaccgacgcggccacaccgaacc

SEQ ID NO: 9902 - RNA, 112 nt, Homo sapiens
accagcacacggggccgggagacaacgccaacccaaggaaggaccaaacggagaaccagggcagccacacacagcaccgaagaaggagagccaaggaggaaaggaaaacaag

SEQ ID NO: 9903 - RNA, 76 nt, Homo sapiens
gggagagggccaccgcccgccacccgcgcgccgccgccgaggagaaaggagggcaccggaagagcggaaagccgcc

SEQ ID NO: 9904 - RNA, 103 nt, Homo sapiens
gccggaccgcggcagaagaaagcaagacccaggacaccccgaagccgagaaagcagggccccaagaaaggcagagccacgggacccccaggaaaaggaaacag

SEQ ID NO: 9905 - RNA, 81 nt, Homo sapiens
ggacaaggaccagacagacaaccaaaagccaacagcaacacccagagcgcagaagccccgaaaaaaggaagaagcgggaga

SEQ ID NO: 9906 - RNA, 78 nt, Homo sapiens
ggcgggggcaagcacgcggcccggaggggccgggagaaacaccccccgaccccaggcaaaaccgagaaaaagcgaaca

SEQ ID NO: 9907 - RNA, 66 nt, Homo sapiens
cggacgcggaggcccaaccgaagaaaacaagagaggaacaggacggaaaaggcagagggacaaacc

SEQ ID NO: 9908 - RNA, 80 nt, Homo sapiens
gcgaggaccggcgggagagagagcgcccagaaagccaggccaagcaggaagcacgccgggaacgaagcacacggagaagc

SEQ ID NO: 9909 - RNA, 72 nt, Homo sapiens
cggagaggggaacagacgcagggcagggccccgcccggcggggaaggggccaaggcgacagcaaaacggaga

SEQ ID NO: 9910 - RNA, 76 nt, Homo sapiens
gcgcccaccagaggagcgaaagagagaggacccgacaagagcgggaacgcgacgggaagcgcaaaccagaagccag

SEQ ID NO: 9911 - RNA, 57 nt, Homo sapiens
gcgcacagaccacccgccccgacacccccaccagacccaggcacgggccgccggcca

SEQ ID NO: 9912 - RNA, 76 nt, Homo sapiens
gaaaagaaacccaccagggcaacccccgccacccagaaaaggcgaccgaacgggaaaagcggggaaaaggcccgag

SEQ ID NO: 9913 - RNA, 55 nt, Homo sapiens
caacacggcaacacagaaacaagggccagacgcgcccaagccaacacgagaccgc

SEQ ID NO: 9914 - RNA, 83 nt, Homo sapiens
gaacgcaaaacacgggaaaagagcagaggcaggagaggcaggccgagaccgcgggggacccggccaaggcggaaaaaggcggc

SEQ ID NO: 9915 - RNA, 61 nt, Homo sapiens
gcacacaaagaaggagacgggggcacgggagcaggaagccaaaacggacaagccaaggcac

SEQ ID NO: 9916 - RNA, 71 nt, Homo sapiens
acgacccacgggggcagagagcagccaggaaagggacacgcaaaaagagagaaaacccgccaaaggacggg

SEQ ID NO: 9917 - RNA, 57 nt, Homo sapiens
agaaaacgagccaggaacaaagagcaagaccaaaggacacagaagcacccaggggca

SEQ ID NO: 9918 - RNA, 59 nt, Homo sapiens
cgcacgggagacacaagacaccaaaagacaccaggggaacaaggggacaaaaaagcccc

SEQ ID NO: 9919 - RNA, 77 nt, Homo sapiens
cgggcgccggcgagagccgcaccgccaacccccgagcaagacgggaaacaagggacgaacaaaacaccgaggaagga

SEQ ID NO: 9920 - RNA, 79 nt, Homo sapiens
agcagcggacaggcacagacaaccaggcacgacgccccacgggagcaaggaggcccgaggcccacgcgcggaggagacc

SEQ ID NO: 9921 - RNA, 78 nt, Homo sapiens
aagagccggcacgggcgacagcaggcacagggacgagggggcggaaggaggggcgcggccaggccggagaacagcacg

SEQ ID NO: 9922 - RNA, 72 nt, Homo sapiens
aaaacgaggaccgacgccagccacgacccgacaacccaaccccaaggcaccagcaagagagcgaaaacccca

SEQ ID NO: 9923 - RNA, 88 nt, Homo sapiens
ggggacggcaggagggaaggagaagcccaacaaagccccacagcagccagaaggaaagcgcggaaaaggaacagaagaggaaccgaaa

SEQ ID NO: 9924 - RNA, 75 nt, Homo sapiens
ggaacacccgaaccaaggaagcaggccagaggacacaaaaggagaccagaaagcgggcaacaccaaccgagacgc

SEQ ID NO: 9925 - RNA, 59 nt, Homo sapiens
agcgcacgacagcaaaaggccgagacgcaccagagccggaccggggacgcgaagcaggc

SEQ ID NO: 9926 - RNA, 88 nt, Homo sapiens
agaagacggggcagcggacgagcggagaaggccacaccacgcagaacgcaacaccaaggcacaccaccccagccaccacaacccggga

SEQ ID NO: 9927 - RNA, 86 nt, Homo sapiens
aggagggggcaagcgcacgggccaccggagcgggagaagcagcccgcagcgaggagaggacagccacaccaagggcgagaaggggc

SEQ ID NO: 9928 - RNA, 71 nt, Homo sapiens
agccggaggagcacccaaccccgcgaaccccccaaaaggagcgagaaaaagaggaccccggcgcgcgcaga

SEQ ID NO: 9929 - RNA, 76 nt, Homo sapiens
cgggaagcaggacgcgccgcgccccaagggaagaaaagagacaggaagaagggcagccgggacagcacgagacagg

SEQ ID NO: 9930 - RNA, 63 nt, Homo sapiens
gacaacgaacaagcggaagagggaccaagaaaggcccagggaccaaagcccggacaaggcccg

SEQ ID NO: 9931 - RNA, 81 nt, Homo sapiens
cggagcacacggaggccggagaaggcacgcgccacaagaagcgaacagcgcgcgcaagcgagccggccggccagcgcgggg

SEQ ID NO: 9932 - RNA, 65 nt, Homo sapiens
gcacagaaaccgcaagggacacggccgcggcgccgacggaagccggccaccaggagagaacgccg

SEQ ID NO: 9933 - RNA, 94 nt, Homo sapiens
aagagagacacggccgaaggcgaacgccgcggccaaggagccgccaaagccagacggaaaaaggcgcaggcacacaggacggcccacccccacg

SEQ ID NO: 9934 - RNA, 76 nt, Homo sapiens
gcaagaggcgagacaggcgacaacgaacagcccaccagaaaggaagagaggaagggcggggaacagaccagggaag

SEQ ID NO: 9935 - RNA, 75 nt, Homo sapiens
ggaacccgcgccgcgagggcccccccagaggaccagcgggaaaagagaaagggggacgaaggacaacaacccagc

SEQ ID NO: 9936 - RNA, 115 nt, Homo sapiens
cggagacagagcaagaaaagcccgggagcagaagggaggcccaagacccacaacaaaagggccaaccagaagacggagcaggcaaaggagaaaagccaagaagaccgaacagaga

SEQ ID NO: 9937 - RNA, 80 nt, Homo sapiens
caagaacagaagaagaaagcagggggacgcaaaggccaaggggcggcaaaaaggaggcacaggaggaagaccacgcggca

SEQ ID NO: 9938 - RNA, 88 nt, Homo sapiens
cccagccccgaggagcgggaacaggcaccacaccaaccccggggcacgagggcggggaagaggaccagccgaaagacgaaggaagcca

SEQ ID NO: 9939 - RNA, 73 nt, Homo sapiens
gggaacagcccacccggccacaaacccacacaacagagaacgggcaaacccagcaggaagccacgggcgaaac

SEQ ID NO: 9940 - RNA, 81 nt, Homo sapiens
agacagagcagaacagccccgcggcccggggagaagcaagaagggaaccagaaggcaacacccgaacaaccccaccagaac

SEQ ID NO: 9941 - RNA, 75 nt, Homo sapiens
aacccagccagcccagccggaaagagagccaccgccagcccgagagccccaaccagaaaccacagacgccgggac

SEQ ID NO: 9942 - RNA, 75 nt, Homo sapiens
aaaaagcgggaacgcaggacccaaagcgaaggggagaagcccccccaacccggcgccggcaacgcagaccggcca

SEQ ID NO: 9943 - RNA, 53 nt, Homo sapiens
gaccggcgcggagggggcccaagaaagcaacccccagccacaacgcgaaccgg

SEQ ID NO: 9944 - RNA, 73 nt, Homo sapiens
gagacccaccaagccaggaaacgcaccagcccgaagaagccgggcagaccaggcagcagcggaaaggagcagg

SEQ ID NO: 9945 - RNA, 46 nt, Homo sapiens
caagacagcagacagggccggagcgagcggcgccgagcgggaagga

SEQ ID NO: 9946 - RNA, 86 nt, Homo sapiens
cccgccgcccgccccggcacacgcgcagccccggccccggcccgccggagaaacagcaaagcccagacaagccagggaacgaaggg

SEQ ID NO: 9947 - RNA, 86 nt, Homo sapiens
ggcggcgcgcgcggcgcgggacgcgcgcgggcacccacggagccccggggcgcaaacgaacacaagagacagggaacaccagaccg

SEQ ID NO: 9948 - RNA, 35 nt, Homo sapiens
cccagagcgagaacagaccaacgaaccaacagcgc

SEQ ID NO: 9949 - RNA, 63 nt, Homo sapiens
gggccagaagcaaccaggaccgcccccaaaccccccgaaccgaggggaagcaacccaggaaaa

SEQ ID NO: 9950 - RNA, 85 nt, Homo sapiens
ggcggcccagggccccacccgacaggccaggcagagcagcccaccagggaggggagggggggaggcgcaccccgcgcccacccac

SEQ ID NO: 9951 - RNA, 57 nt, Homo sapiens
acacagccccgcaccccaaggccccccacaaagaccaaacagagcagaacgaaacag

SEQ ID NO: 9952 - RNA, 111 nt, Homo sapiens
ggggcgcggcgggacgcgagcggcgagccggagcgcggagcccggccccgcaccaggaggaggacgacagcacggcccggcgaccggcagggagcagccgcccgccacgcg

SEQ ID NO: 9953 - RNA, 73 nt, Homo sapiens
accacaaccaccacccaagggagcgaccccaacagcaggaaagccccgcaagacgacggaaagagaagaagcc

SEQ ID NO: 9954 - RNA, 75 nt, Homo sapiens
agaacccagaggcgggaggggccgggaggcagaggggcagggggaaagaaccaccagccgcccccccaaaaaagg

SEQ ID NO: 9955 - RNA, 38 nt, Homo sapiens
agcaagacgcgggcaagccggagagcaccaaccgccac

SEQ ID NO: 9956 - RNA, 70 nt, Homo sapiens
gcgggacagaagcgaaaggaaagagacaagaagccaagcagagcacaggcaaggaaccagcaggaacgcc

SEQ ID NO: 9957 - RNA, 76 nt, Homo sapiens
aacgggggccccgggagggaaggggcggcaagggccaccggaaggggagccgccaccaaaagcagacggaaaaccc

SEQ ID NO: 9958 - RNA, 72 nt, Homo sapiens
cagcaagccagcaaggggagcaagaaacgcaacacggagacggaggggaagcgaagggaagcacgaacccca

SEQ ID NO: 9959 - RNA, 72 nt, Homo sapiens
acagccagcaggacggacagcaagcagggagacacagcaacaaaggccggccgccaaaacagaggccaggcc

SEQ ID NO: 9960 - RNA, 67 nt, Homo sapiens
gaccacaccgacagcggacgccccagcacccccagcgggcagggccgcaccaaccaacagcaaccag

SEQ ID NO: 9961 - RNA, 65 nt, Homo sapiens
cgcgggacccagcccaggcggcgcggacggggcggaggaaagcagcagcagagcaacacccacca

SEQ ID NO: 9962 - RNA, 78 nt, Homo sapiens
gagggcggcccggaccgggagacacggccagacgcccccacgcggaacacacagccagcagcacgacggcagggccac

SEQ ID NO: 9963 - RNA, 35 nt, Homo sapiens
gaaccggcacagcccccggcccggcacaaccgaac

SEQ ID NO: 9964 - RNA, 103 nt, Homo sapiens
gaggacgaagaagcgacaccaagaaccgcgggaagagcgggcccaaagcaggaaagggaagcgccgaggggggacgccaggaaagcaggcagagcaaccccca

SEQ ID NO: 9965 - RNA, 78 nt, Homo sapiens
gagcgccaacagggggcgcgccggggaccagccagaaagcacgagcaccgggcagagaacaccagcccgcgcccccgc

SEQ ID NO: 9966 - RNA, 69 nt, Homo sapiens
cagagagggagccacggcaccaagcgagcacaaccggccgcgccaaccacggaccgggaagaccacaca

SEQ ID NO: 9967 - RNA, 77 nt, Homo sapiens
ccagcgccggcccccaggcgaagaagcgcagccgcaccggccaagggccaaccagaaaaccaccgacaccagagaca

SEQ ID NO: 9968 - RNA, 67 nt, Homo sapiens
caaagaacagaagcaacgaggagcacaaacaggaaaacaggcggagcaggagcaaaggagcaagaaa

SEQ ID NO: 9969 - RNA, 93 nt, Homo sapiens
ccaaaggccaccggaggccccaaagaacccgcgagacacaaccacacccggaacgaccaggagacgcgggaaggacagaagacagccgcaacc

SEQ ID NO: 9970 - RNA, 72 nt, Homo sapiens
gagaagaccggagaagcagggcagggagaaacgccacaccgggaaaggagggcccagaagccaagaggaaga

SEQ ID NO: 9971 - RNA, 52 nt, Homo sapiens
cccggcgccccaaccccggcagccccagcagcaggcgagaggcagaacccgg

SEQ ID NO: 9972 - RNA, 70 nt, Homo sapiens
gacacggcggaaacgacgcaggagggaacaggacgccagacgaaaggaaaggcgcacagcgagcaccacc

SEQ ID NO: 9973 - RNA, 75 nt, Homo sapiens
ggcccaacccccaccccgcccaaggaggcccagcgaggcgaccacaccacaaaagagcaaacggacacaaaccaa

SEQ ID NO: 9974 - RNA, 54 nt, Homo sapiens
ggcccaagcgaaaaagcgggaacgcaggacccaaagcagaacgacgacgggaca

SEQ ID NO: 9975 - RNA, 76 nt, Homo sapiens
ggcaccgaagaacacgagcgggccgcagcggggggcaccgcccggcaagacgcccggacggacgaccgaaaaccca

SEQ ID NO: 9976 - RNA, 81 nt, Homo sapiens
agaacacccccaaagagcaacgaagacaacgcagcggcagaaacaaggcgcaggagggcgaagggaagaagcagaaaccag

SEQ ID NO: 9977 - RNA, 77 nt, Homo sapiens
ggcggcgggcaccgcagcgccggaagaggcgcaccagccggacggaaacccaggacagccagcaacgcccaggacag

SEQ ID NO: 9978 - RNA, 64 nt, Homo sapiens
cggcggagcggacccacaccccggaccgagggacgcggacggcggaaaacccgaagcagaagcc

SEQ ID NO: 9979 - RNA, 70 nt, Homo sapiens
caacaccggcaggaaccaccaggacagagggcaagaaccgaagcaaaagagcaaaacaggaagcgaaacc

SEQ ID NO: 9980 - RNA, 78 nt, Homo sapiens
accgaccagaagagaaagagagaagccaaaccccaggccaagaagccaccaccagcacccaccccccagccaccgacc

SEQ ID NO: 9981 - RNA, 87 nt, Homo sapiens
gggacgaaccaagacccccacaccgagaaccaggggagcggagcggaggcacaagagagaaggcagaagccaagaccggcccgaggc

SEQ ID NO: 9982 - RNA, 69 nt, Homo sapiens
caccgcggaagcaaaccaagcgcgggggaagaagagaaagaaaaccaggaacacaagccagaaaaaggg

SEQ ID NO: 9983 - RNA, 102 nt, Homo sapiens
acagccggagggacaaaagcccaagacaagaagccagagaagacaagcgcacacgcacggggaaaaggccaggagcagcgagaggcggccaacccaaggcgg

SEQ ID NO: 9984 - RNA, 66 nt, Homo sapiens
gccccaagaggcgccaagggaagacgagcaaaaaacaaagaagccacagacaaagagggaggaaca

SEQ ID NO: 9985 - RNA, 67 nt, Homo sapiens
gcacaaagggagggggcagcccgcaggagcaagcgcagcaccaccaacaggagcgccgccgcgagac

SEQ ID NO: 9986 - RNA, 75 nt, Homo sapiens
aacagaaggcaaaagagggaggagagcgaccgaagcagaaagccgccgcggagaggccggaaggaccacggaaac

SEQ ID NO: 9987 - RNA, 63 nt, Homo sapiens
ggccaagcaagggcccacaagacccggccccggccccacacaacggcaccccaccagcagaac

SEQ ID NO: 9988 - RNA, 72 nt, Homo sapiens
acgcggccagcgaaaacgcccaggcgggaaccaggaccgaacccgagaagcaaaccagcccaaaagaaaaag

SEQ ID NO: 9989 - RNA, 58 nt, Homo sapiens
cacaagccgcagcccagcaagggaacagaccccggcaggaggggagaacaaggaacac

SEQ ID NO: 9990 - RNA, 77 nt, Homo sapiens
aaaaacaggcccggcgagccccgcagaaacaacgaacgagcaaggaagggccaaggcagaccccacaccggagaacg

SEQ ID NO: 9991 - RNA, 56 nt, Homo sapiens
aggacccaacgacaaaagaacgaaaacaaacggaagagagggcagcaagaaagaac

SEQ ID NO: 9992 - RNA, 71 nt, Homo sapiens
cggccccgccgcaccccggggaaaccaaaaccagagaagccggaacccaaggccccaccagaaaagacaac

SEQ ID NO: 9993 - RNA, 97 nt, Homo sapiens
acagaaggagagggggagaagaaacgccaggaggggcccccgccagacgagaaggaagaggggaacaagcaagaaaagccccagaagggccgaaccg

SEQ ID NO: 9994 - RNA, 71 nt, Homo sapiens
gagccggagaaagaggccacggaagacgacagcgaacgaacaaaggcggaaagcgggcagaaggaagggaa

SEQ ID NO: 9995 - RNA, 48 nt, Homo sapiens
ggacaagacccgccagaacagggccaagcagagacacaaaaccggacc

SEQ ID NO: 9996 - RNA, 69 nt, Homo sapiens
gaagagacaaagaaagagacaaaaccaagacccccagacccagcggggccacgcaagaacaaagagcgg

SEQ ID NO: 9997 - RNA, 60 nt, Homo sapiens
cagcgacccccgccaggcaaaaggaagcgcgcacgcagcgggcagacacacgggaccacc

SEQ ID NO: 9998 - RNA, 71 nt, Homo sapiens
cgggagaggccaggagacgggacgaccaggagccaggaccacaaaacccaacaaaaacaaaagcacaaaga

SEQ ID NO: 9999 - RNA, 78 nt, Homo sapiens
gacaggagcgcacaagcgcggacaaggacccgaccgccgcgcgggggccaacaagcaggagaaaacggagcgaagggc

SEQ ID NO: 10000 - RNA, 74 nt, Homo sapiens
gagagagggaagcgcccggccggaggcaggggaaaggggggcagcccaggccgcgcgggggcggccgccgaagc

SEQ ID NO: 10001 - RNA, 56 nt, Homo sapiens
gagaacacagaaacccgccccgggggacaccagcagcgccgccggaccaccgggca

SEQ ID NO: 10002 - RNA, 55 nt, Homo sapiens
caggacggcgcccagcgacaccaggacaggccgccagggggacagaaggagcagg

SEQ ID NO: 10003 - RNA, 75 nt, Homo sapiens
aaaaacccaaaccacacacaaacaagggaaaaaacgaaagaacagcaccggaaccgagacgaaacggacaagccg

SEQ ID NO: 10004 - RNA, 64 nt, Homo sapiens
gagcgcagagaaagacaccccagagaccaaccgggcgcggaggcggaggccacccagacccggc

SEQ ID NO: 10005 - RNA, 74 nt, Homo sapiens
gccacacagacgcaccggcaggcagcgggccgccacgggcggaggcagaacaccacgaagccacgaacgaacgc

SEQ ID NO: 10006 - RNA, 75 nt, Homo sapiens
aaaacaccagggaggagagagaacccaccgcaagagaccaaaggccaagagcaccgcagccaccagcccggaacc

SEQ ID NO: 10007 - RNA, 70 nt, Homo sapiens
aaacaaacaaaaacacgagagcgaccaaggagacagaacccagacagggggagcgggccagggcggaagg

SEQ ID NO: 10008 - RNA, 64 nt, Homo sapiens
cgacggcagaaagagggaaaaaggaggagacgaccagcaaccaaacgccgcacgaagaggggca

SEQ ID NO: 10009 - RNA, 85 nt, Homo sapiens
gcgaaagcacgaacaggaaacaggaagccgggagagaaacacagagccaaccggcacacgaagagccgaggcgggagcagcgcga

SEQ ID NO: 10010 - RNA, 82 nt, Homo sapiens
ggggaacaggcgccggggcccccgcggcgccgggaggaggccggggccgcgcgagggcgcccagcgaaggggccgcccgaaa

SEQ ID NO: 10011 - RNA, 77 nt, Homo sapiens
cgagccagggcgggagcgacgcggggcgggcccgggggcccagcgggcgccgcgcacgcgagagaaaggagaacaga

SEQ ID NO: 10012 - RNA, 77 nt, Homo sapiens
acgcaggggagaaaccaaaggaaccacaacagcacaagccagacaagcaaaaggggcacaacaaaccgcagagcaga

SEQ ID NO: 10013 - RNA, 78 nt, Homo sapiens
ggaccaagcaccccaccaccaaaccacggacagaaacccaacgccaaagggggacccgcaggcccgacgcagggagac

SEQ ID NO: 10014 - RNA, 77 nt, Homo sapiens
agcccaaaacgggccagcgaacagggacccacggccaccaacaacaccagggacacaacagcaaggagcagaaaccg

SEQ ID NO: 10015 - RNA, 81 nt, Homo sapiens
gacgaaagaagaagaagagcaaagggcccgcagaaccaccaggccccgaaagagccagagaaggaaggagggaaacacggc

SEQ ID NO: 10016 - RNA, 85 nt, Homo sapiens
cccggcacacgcgcagccccggccccggcccgccggagaaacaggacccaaagacaggaccacgcaccagcagagaaggaaagca

SEQ ID NO: 10017 - RNA, 85 nt, Homo sapiens
agaaccggcgccgccaaacagcccagccgcgccagcgcccggcgccgcgcgccacccccgagcaagccaccgagaaagggaggac

SEQ ID NO: 10018 - RNA, 71 nt, Homo sapiens
gccaacacgggacggagaaagcaggacaagcagccgcgaaaccaaggcaccccccagaggaagcacagggc

SEQ ID NO: 10019 - RNA, 66 nt, Homo sapiens
ccgagccagcgccggccgcgcgccgcgcccgcgccacaggcccccggggcccgccccacagcacag

SEQ ID NO: 10020 - RNA, 80 nt, Homo sapiens
ccggcccggcacagggaccagcggaggggccaagcaaagacagcccgagccaaaccaggagccagcggggcagcaggcac

SEQ ID NO: 10021 - RNA, 78 nt, Homo sapiens
gcaagagaagcaccgcacccagagaaagcgcggacaacaccaggaaaagacagagacagagacgaaaaagaggaccga

SEQ ID NO: 10022 - RNA, 79 nt, Homo sapiens
gcacccggaccccaaccagccccgcaacccggaccagcagaaaccagaggcaacaacccaggcccagcaacacaggaca

SEQ ID NO: 10023 - RNA, 85 nt, Homo sapiens
gccgcagccgcccagaacccgaccaacaccagaacccagcgcccccagcccacagcccccacccgagcccccggacggagagagc

SEQ ID NO: 10024 - RNA, 66 nt, Homo sapiens
cggcaaaagggcacaccgaccccccaccggggacagacaccccgccgaacgaaagcgaaaagaaac

SEQ ID NO: 10025 - RNA, 70 nt, Homo sapiens
aggaaaaccaggcagggacacaacagaaaaaccacaccaaagagccagcccacaagacagcaccagacaa

SEQ ID NO: 10026 - RNA, 83 nt, Homo sapiens
gcgcaaccgcgcccgccggcccccccccgcgcccgcgaccgccgcggcgaagaggaaaagaccaggcacggacacggaggcgc

SEQ ID NO: 10027 - RNA, 82 nt, Homo sapiens
cccgccggccgcggccgggaaggcgcagccgacgagaaaaggaaccacagaacccaagaaccagcaacaaacaagacggaca

SEQ ID NO: 10028 - RNA, 73 nt, Homo sapiens
aagagccagggacagccagggacaccagagagaaggccgacaggcccggccagaagcggagggggcggccaaa

SEQ ID NO: 10029 - RNA, 79 nt, Homo sapiens
acagcaagaacccaaaaggaaaaacagggacagaaccaaaagagcaaaggaggcacgaaacagaaagcgaaccccagac

SEQ ID NO: 10030 - RNA, 65 nt, Homo sapiens
acgcggaacacaggcaaaagggaaaggaagaagacccgcagaccagaacggaagcgcaggagcag

SEQ ID NO: 10031 - RNA, 62 nt, Homo sapiens
ggccggggcggcgaagcggaggccggagaccgagagagggggcaacagacggacgcccgggg

SEQ ID NO: 10032 - RNA, 71 nt, Homo sapiens
acggcgcaagagaaacgcacagagagggacccagagagcacaggacacgagggccaagaccagcgggacca

SEQ ID NO: 10033 - RNA, 79 nt, Homo sapiens
cagcccagcaaagacagccgcaaaaacacagaagcaccagaccagacccggagagaacagcaaagaaaaccagccccag

SEQ ID NO: 10034 - RNA, 59 nt, Homo sapiens
gaagagccgggccagcaagcgacagggcagcccgcagaggaccgcacgaacgcaagaac

SEQ ID NO: 10035 - RNA, 75 nt, Homo sapiens
gacacagagcaccaacagccccaacccagaaagcagaggccagagcggagacagacggaagggcggaaaaggcaa

SEQ ID NO: 10036 - RNA, 78 nt, Homo sapiens
aaaaccaggcagggcgaaggagacaggggccaggccaggggcaggggaagcacccaaccaacgagcgggccacacagc

SEQ ID NO: 10037 - RNA, 73 nt, Homo sapiens
cagaccagaaacacaaagaaaacccaggaggcgccaccagcaaaaccagagaaacaggcagagaaagacaccc

SEQ ID NO: 10038 - RNA, 71 nt, Homo sapiens
gggggcagaacccagaggcgggaggggccgggaggcagaggggcagggaaccgcagaaacagcagcaaaaa

SEQ ID NO: 10039 - RNA, 55 nt, Homo sapiens
gggcgccgcggaacacacagaaaacggcaagggcgaacccgaaaaaccagagaaa

SEQ ID NO: 10040 - RNA, 74 nt, Homo sapiens
aaagacgaacaagaaaggagcaaccaaccacaggaggacaagagcccggcccaaagaagcaggaaagcggaccg

SEQ ID NO: 10041 - RNA, 62 nt, Homo sapiens
accaggcaccagcaaggggggcacacacaggggaaaagagacgcaaaccacgaggacagaga

SEQ ID NO: 10042 - RNA, 83 nt, Homo sapiens
agccgggcaggccccgagaggaacccagccgacacgacgccgccggcaggcccgcgcaccaggccccagagagaccacccaaa

SEQ ID NO: 10043 - RNA, 83 nt, Homo sapiens
ccgagcagaaaagaccagcagcgcaccagaagccaccgacgccagagcgaggcgcgcaacagcggacgcggagacaccccgac

SEQ ID NO: 10044 - RNA, 73 nt, Homo sapiens
aaagaaccgcccacgggccgcgccagggccacagacaagccggcacggagggccgcagagagccacggggaaa

SEQ ID NO: 10045 - RNA, 59 nt, Homo sapiens
cggagagccgacccgacacgagccaagaaaaggccccccgggccgggcacgggcgccag

SEQ ID NO: 10046 - RNA, 86 nt, Homo sapiens
cgcaggcaccacgccaaaggggagcaaagccgggccggcccgaggcccccaggaccccaccccaagggagcaggagaccggaaccc

SEQ ID NO: 10047 - RNA, 81 nt, Homo sapiens
aacggggggcgaaggcaaggcacaaagcccgacagggcaacacccgacaaagggcgggagggcccccaagacccaacagag

SEQ ID NO: 10048 - RNA, 79 nt, Homo sapiens
aggacgagaaaagcggagggcaagaggcacccaagccccagccgcgcacccacccgccagcaggaagaagagagggcga

SEQ ID NO: 10049 - RNA, 78 nt, Homo sapiens
ggagcccgcccccggcggccccccgcgcacagaacgaccaagacacccaggagaaagacagcggggaaaagaaaaagg

SEQ ID NO: 10050 - RNA, 87 nt, Homo sapiens
agaaaaagaagacccccacaacaaagcagcaacaagaaagcagaggaagcagaaaggaaggagggcagcacgagaaggaaggaaagg

SEQ ID NO: 10051 - RNA, 85 nt, Homo sapiens
ggggccccccccccgcccccagggcgaaggcagcaaaaccccagaagaggcgaaccgcaggaaaccagagcaagaaacgagcgac

SEQ ID NO: 10052 - RNA, 67 nt, Homo sapiens
ccccagagccaaggacaacacagccaagagagaaaaacccagaggagaagaagccaggaagcaagca

SEQ ID NO: 10053 - RNA, 68 nt, Homo sapiens
ggaagcaaccaaggacaggccaccaagcacaaccggggaggccgcagcaaggacagcgaagaacagca

SEQ ID NO: 10054 - RNA, 77 nt, Homo sapiens
ccgggaagcgccggggaagcagaagcacagggcacgccaacccaggcgaaccacgggaacaaaggcgaggacaagga

SEQ ID NO: 10055 - RNA, 78 nt, Homo sapiens
gcgggagcgcgcggacccgcgccgcgcggcggcccgccagccaagggaagaagcagaagcaagcccagggcaaggacc

SEQ ID NO: 10056 - RNA, 75 nt, Homo sapiens
gcggccccccagcagcccagacaacaggccccaaccacacccccagggaaccacgggaccgaccagaccccaggg

SEQ ID NO: 10057 - RNA, 60 nt, Homo sapiens
cccgccagcagccgccggagccagccaacgagcggcagccggggaacggaagaaaaggag

SEQ ID NO: 10058 - RNA, 69 nt, Homo sapiens
aaggggcggaaggagaaaagaccagcaaaggaggagccacgccagaagcgggggagaagaaacggccca

SEQ ID NO: 10059 - RNA, 63 nt, Homo sapiens
gcggggcgcgccgcagagcggcaccgaaggacaggagacccaacagaggaagccgcaagaaac

SEQ ID NO: 10060 - RNA, 40 nt, Homo sapiens
cacgcaagcccacccccagaggaagaagccggaccaacca

SEQ ID NO: 10061 - RNA, 61 nt, Homo sapiens
cgacagcggcgagcagaacacggcgagcgggccacggggcgccggccacgaggggcggaag

SEQ ID NO: 10062 - RNA, 101 nt, Homo sapiens
acccaggccggccccccccagcagacccgcgccagcgggacccgcccgcgcggccagggggaacgaggaagaacggacgacccagagacgacaaacgagga

SEQ ID NO: 10063 - RNA, 79 nt, Homo sapiens
cggaggaccacaggcccagacgagcggaggaggcacagggcgcggaccgcacgagcgcgaccggcgggggcccagggcc

SEQ ID NO: 10064 - RNA, 38 nt, Homo sapiens
ccccagcccgccggcggcggcggagcccaaaaggcaga

SEQ ID NO: 10065 - RNA, 68 nt, Homo sapiens
gcgcccgcagaccggccgcggccaaaagccccacgaagagagaagcgcggaccaaagcagaaagggag

SEQ ID NO: 10066 - RNA, 35 nt, Homo sapiens
ggggcaccgcgccgcagcgaagccgggcggaagcc

SEQ ID NO: 10067 - RNA, 62 nt, Homo sapiens
agcgccccgcagcccgccaggaccagggccaaaagggcggggaacggaccaccagccccaac

SEQ ID NO: 10068 - RNA, 76 nt, Homo sapiens
acgacagcgggaggcagagggaggaaccggacgccggaagccgggaaaggcaaagcccagacaccaggacagcacc

SEQ ID NO: 10069 - RNA, 76 nt, Homo sapiens
aagaaaacaggaagggagccccaaagaacgcgcgagacggggacagacaccagaggcaaaccaagggaagagagcc

SEQ ID NO: 10070 - RNA, 70 nt, Homo sapiens
agacacacagaaccagagccgaacacacgggaaagccggcaggggggggggcgaaagacccgaaggaccg

SEQ ID NO: 10071 - RNA, 69 nt, Homo sapiens
gaaagaacggcaggcgggaagaaaacaaagagaaaaagggagaagaaagagagacagggcaccaaggcc

SEQ ID NO: 10072 - RNA, 38 nt, Homo sapiens
agcacaaaagcggaggaaaaggaaggaacgcggccacg

SEQ ID NO: 10073 - RNA, 85 nt, Homo sapiens
cgagccggcccgcaggggcacccaccagcagcggcgcgagacacagaccagacccgaagaaggaggggcgacccaggaggcagag

SEQ ID NO: 10074 - RNA, 58 nt, Homo sapiens
aggcaccggggacgccaccggagaagggaggaaaaccaacaagaacaacaagaaggag

SEQ ID NO: 10075 - RNA, 66 nt, Homo sapiens
ccgacaggaacagggaccacggggaaacacgcccgccgacagaaacacgcaaagaacagcgaccag

SEQ ID NO: 10076 - RNA, 78 nt, Homo sapiens
cgcaagcccagaagagcggagcccaagcaggcccaaacagaggaaagaacaggacagagcaaaacgggaaacaaggcc

SEQ ID NO: 10077 - RNA, 76 nt, Homo sapiens
aaacgccgcaccagaagaaggcgggacgccgcaacaccggcgggagccggcaggaccccagaggcggcaagcgcac

SEQ ID NO: 10078 - RNA, 83 nt, Homo sapiens
gccggaccacggagagcaggcagcgggggggcgagcccgaaacgaggcgggagcagcacagaagggcgaacgaggaaggaagc

SEQ ID NO: 10079 - RNA, 73 nt, Homo sapiens
caagcccccgaaaccaaggagcgcaagaaaagcggggagggcaagaggaccagcaaacccggccaggcggaag

SEQ ID NO: 10080 - RNA, 79 nt, Homo sapiens
gacagggaggagggagaacacagccaccgaacacggaagagcgaaagccagggggcgaaacaaaacaaaaaggagcaaa

SEQ ID NO: 10081 - RNA, 88 nt, Homo sapiens
gagcgcgaaggccgggacccggccccggcccacaggggggggcaaacccgagagaacgggcggggaccaagagaagagcagaggacca

SEQ ID NO: 10082 - RNA, 81 nt, Homo sapiens
acgacggacgggaaggcgccccaggaaggcgcacacaaagaaccgcacacagggcacaggcagggaaccacggaggcccgg

SEQ ID NO: 10083 - RNA, 43 nt, Homo sapiens
gggcacgcgccaccgggccgacggagaaggagggggcagagca

SEQ ID NO: 10084 - RNA, 79 nt, Homo sapiens
ccggagggcgcccccgggacgggaccgacgcccggaccgggcgcgccgcgggagcgagggcgccagggaaggaccgcac

SEQ ID NO: 10085 - RNA, 87 nt, Homo sapiens
acaagacaacacgagagcccggagccgagcccgggaaggcgggggggcccgggccgacgcggcaagccgcaccggccagagagcagc

SEQ ID NO: 10086 - RNA, 124 nt, Homo sapiens
ggccgcgcgccgggccgcgcccaccccaggccggggcgcacgcggccccacgcagccagccccggcaaaagcagaccggaaaacccaccggcaagaccacacccgaggggagcccaggacacca

SEQ ID NO: 10087 - RNA, 64 nt, Homo sapiens
aaaagaaaccagacgcaacacgaacaacgacgggagcaggcccacggggagccagacagacggc

SEQ ID NO: 10088 - RNA, 89 nt, Homo sapiens
aagaaagaaaaccaaagagccggggacaagggaagacggaaggccagcagcaacgagaaacagaacaaaggcacacaagggagcaaagc

SEQ ID NO: 10089 - RNA, 84 nt, Homo sapiens
agggaccacaaagaagaacaccaccaaagaccccgcacaggaaaacgcccgcccaggaccggggaagaacgcaggggacacgcg

SEQ ID NO: 10090 - RNA, 78 nt, Homo sapiens
gggcccacagggccccggacaggaaagagggcgggaggcaacagcagcgcaggagaaggagaaagaaaaagaaaccag

SEQ ID NO: 10091 - RNA, 77 nt, Homo sapiens
ccgggagacacacagcaggggagaaggggagaaacgaaagcaaagcagacccagcacagagcagaggaagaacaacc

SEQ ID NO: 10092 - RNA, 72 nt, Homo sapiens
ccccccggcccgcgagcccgaggagcggggccacaaggaaggacaggagaaacaggggccaaaaaaccaaag

SEQ ID NO: 10093 - RNA, 100 nt, Homo sapiens
cgcgccgcgcagggaggcgccgaaggggagaggcggccggaaggaaaaggcacacgcagccagaagcaacaagagaagcagaaaaacagacacgcaagag

SEQ ID NO: 10094 - RNA, 63 nt, Homo sapiens
acagaggccagcaggggaagaacgggagggaggccgaagacagcaccacaccagcggcgaaag

SEQ ID NO: 10095 - RNA, 71 nt, Homo sapiens
gacgaaggaaagcaggaaacgagggcccaggacagaaggcgggcaaggagcgccccccgagcaccccccac

SEQ ID NO: 10096 - RNA, 79 nt, Homo sapiens
cagggaggcgggaaaaagaggccaaagacgacagaacggcagcggagaaaacaaccaggccagccagggcagcagcaag

SEQ ID NO: 10097 - RNA, 60 nt, Homo sapiens
agaaaacggcaaggaagcggaccgaaggaccggagggcggcagaaacgccccccccgcag

SEQ ID NO: 10098 - RNA, 79 nt, Homo sapiens
gagacggggcagacaacggagcccggggacgagcagacaggaaacacaggcagcgagacaacgggcccggagccacgaa

SEQ ID NO: 10099 - RNA, 76 nt, Homo sapiens
gaagacagcaccaggccaaacacaagaagcaagaagcgaagaccgaggcaggacggcccaaaccaaaccagacgcc

SEQ ID NO: 10100 - RNA, 69 nt, Homo sapiens
cccccagacacacacacccaacccaaaccaaggaggaacagaccacaaacaaaccgaaaaggccacgac

SEQ ID NO: 10101 - RNA, 79 nt, Homo sapiens
ccggaacgcccgaccgcacacggccacccgaggaggcaaggaggccacggggccgaagacaccaaccgggcaccagcca

SEQ ID NO: 10102 - RNA, 62 nt, Homo sapiens
cagcagaaggcaaacggcagccaccgggcaacccgcagagcccagggagaggaagaccgccc

SEQ ID NO: 10103 - RNA, 81 nt, Homo sapiens
gcgccgaggccagacccggccggggccgaaccgaccagaccaggcaagaaaccccggacagaaggcacggcgaacaaaggg

SEQ ID NO: 10104 - RNA, 78 nt, Homo sapiens
ccagcggcccgggagacacacagcaggggagacagccgacgccagacaggagggccaacgacgagcggaagcccaagg

SEQ ID NO: 10105 - RNA, 77 nt, Homo sapiens
ggagggccccccgagccaacggcaagaacaagccaagacccagagagaaggagccacaagaccaagcgccacaaggg

SEQ ID NO: 10106 - RNA, 84 nt, Homo sapiens
ccgcggccgaggaggcagcgcgaccccgcacgacagaagcgaaggggacagggggagaaccgccagggaaacccgggggacaga

SEQ ID NO: 10107 - RNA, 70 nt, Homo sapiens
ccgggcccccccgccggaaacaggaccacaaaacaaaccacccaacacaagcaaagaccacgaagccgga

SEQ ID NO: 10108 - RNA, 75 nt, Homo sapiens
cggcgccccgcgccgccgcgcccacggccccgccagcaaggcggcgcgcccaggaggaacccacgaagaggggag

SEQ ID NO: 10109 - RNA, 80 nt, Homo sapiens
aggagccgcgccgccgggacacaccaggagaacaagcccacgcaccacccaacccggagccggggacggcacacgggcgg

SEQ ID NO: 10110 - RNA, 76 nt, Homo sapiens
gcagggaagccaccagcgccgcgacagaggagcagcaagagaccaagcgaccaagcaagcagcgccgacaggcaga

SEQ ID NO: 10111 - RNA, 58 nt, Homo sapiens
cggggaccaacaaccaccaagaaacagagcaaccaccgaaacgggcgaaaaagaagaa

SEQ ID NO: 10112 - RNA, 79 nt, Homo sapiens
ccgacccacccagccaccagaacaaccaaacagagaaggcagcaggaagaaacagcgaaccaaaaaccagcagaagcag

SEQ ID NO: 10113 - RNA, 59 nt, Homo sapiens
ccacgcccggccccgacacgcgaaacagcggaagaacgcgaggacagaaagcgaggacc

SEQ ID NO: 10114 - RNA, 104 nt, Homo sapiens
cggccaccagcgagagcaccaccaggcccccagccgcaggcccggcgggagagacgccaccccgccccaccgaggccggcgggccacagcaggcgccccgccgg

SEQ ID NO: 10115 - RNA, 79 nt, Homo sapiens
acgcgcccgccccgccaggccggccggccgcgccccggccaccgcgggcccagcaggggcaagaccaacggagccaccg

SEQ ID NO: 10116 - RNA, 73 nt, Homo sapiens
ggggggagagccagggggcagaagcgcgaagagcagcagaaacggaagaaggcacagacaaaagcacacacgg

SEQ ID NO: 10117 - RNA, 60 nt, Homo sapiens
acccccagacggggagaagagcagcaccagaagaaaggagagagccgaaagagaaaagcg

SEQ ID NO: 10118 - RNA, 56 nt, Homo sapiens
ccccggggagaggacaagagcgcaaggagaacaaaacaggaaagggagcggcccca

SEQ ID NO: 10119 - RNA, 56 nt, Homo sapiens
ggaaaggcccgcggcgaggagcgagcagagggaacccaacgggggacaggggggca

SEQ ID NO: 10120 - RNA, 75 nt, Homo sapiens
agcccccccgcccgaggagaaggagaagccacacaagaaagcagggcgcaggcgaaaccgggccccaacagagga

SEQ ID NO: 10121 - RNA, 64 nt, Homo sapiens
ggccaggggaagagcgcagcgaggggcgggagcagcagcacaccacagaccaggccagaagggg

SEQ ID NO: 10122 - RNA, 32 nt, Homo sapiens
ggcgacaccccggcagggaccaagggcacccg

SEQ ID NO: 10123 - RNA, 88 nt, Homo sapiens
gcccagcccccgagggcgggacacagagcaagagagacaggccaggagccaaggaagccagagagagcccgacacccaagcccgaccg

SEQ ID NO: 10124 - RNA, 75 nt, Homo sapiens
caaaccgggcagccccaaacggaaagaagagcaaaaaggaaggcccggagcacacaaggcgaaagaaaaggcaag

SEQ ID NO: 10125 - RNA, 55 nt, Homo sapiens
ggagggaaccagcaacaagccaggacccaaggccagccagccccaggcaccagcg

SEQ ID NO: 10126 - RNA, 32 nt, Homo sapiens
gccacacaccaaacgcgagaaccgccggcgag

SEQ ID NO: 10127 - RNA, 71 nt, Homo sapiens
aaaacagcgcacacgagaaaggacggagccgaagagacacgccgacacacgcagccagcgaggcgggccgc

SEQ ID NO: 10128 - RNA, 37 nt, Homo sapiens
aaggaccgaccccaaagggcaagcagaggagcagaga

SEQ ID NO: 10129 - RNA, 65 nt, Homo sapiens
gagcaaggggaacgccacggacgggcagccaggaagaaagggacccggagggcggagggaacacg

SEQ ID NO: 10130 - RNA, 79 nt, Homo sapiens
cccgacggacaccccccaggaagagcagcgaagaggcacaaaaagagaggagaaggaacaaaagaacaaaggaaccaag

SEQ ID NO: 10131 - RNA, 70 nt, Homo sapiens
cgaacccccaccaaggagacgcacagcgacccacaggaccgcgaacaaggaggccacaaaacacccggac

SEQ ID NO: 10132 - RNA, 80 nt, Homo sapiens
aggcagagggacggccgggaccaccagagggaaagcggggcgggaccagacaaggagggccaagaaccgggaggagggca

SEQ ID NO: 10133 - RNA, 82 nt, Homo sapiens
cacccgcccggcccgacacggcgagccgagcgcggcggcggcccacgcgcagcgacagggagagccgaaaagacgaggcgag

SEQ ID NO: 10134 - RNA, 66 nt, Homo sapiens
gcggggccaacagcggaacccggcgcgcggaggagcgcgcgcaggccaggcccagggacacggagc

SEQ ID NO: 10135 - RNA, 79 nt, Homo sapiens
cccaagaagcaggaagaaagggcgccccgccccagcggggaggccgcaaggacccacacggaccaggaaaacgagcgcc

SEQ ID NO: 10136 - RNA, 68 nt, Homo sapiens
cgaaagggaagcacacggaccagcagaacagaaacaaggggaggaacaacgggagccaaggacgcgaa

SEQ ID NO: 10137 - RNA, 76 nt, Homo sapiens
agcgcggacgaccggccacgcgcaccagagcagggcccccgagaaacaccggggccaggcagccagaacgaaaagg

SEQ ID NO: 10138 - RNA, 71 nt, Homo sapiens
gagggagacagaacaaaaggaagcgaaccgcagcaaaccacagaccagacagacaacgaggagagacggaa

SEQ ID NO: 10139 - RNA, 75 nt, Homo sapiens
cgaagacgccccaccacgaggccagcacgggaacgcgaagcgccaaagccagacaaagcaccgggggagcaaaag

SEQ ID NO: 10140 - RNA, 82 nt, Homo sapiens
aaggcaagcgcagcaacaacagagagcacgggaccaaccaaacccgcaaaaccacaccaccagccggaggggacagaacaca

SEQ ID NO: 10141 - RNA, 72 nt, Homo sapiens
gagccccccagccgcgaagagacccgacagagacgagagaaacaggaaaccagagccaagcggaaagaaaac

SEQ ID NO: 10142 - RNA, 78 nt, Homo sapiens
ggaacgacgcggcgcgcgcggacgaagagccccccccccaacaccgcgacacgcagagacggaaagaacaggccaaga

SEQ ID NO: 10143 - RNA, 66 nt, Homo sapiens
accaccgcggaaaccgccaggccagaaacgccacagagaagagccaagggggaagagccaccggac

SEQ ID NO: 10144 - RNA, 86 nt, Homo sapiens
gcagagaccaacccaagcgaagaagagcggaaaacaaggggcaacaccgggcgcgcacagaagggacaacggaggaaaccaagccc

SEQ ID NO: 10145 - RNA, 104 nt, Homo sapiens
ccgcgagcgcccggccgaacccgcgaggaaaagcccagcggcccgccaggcccgcaggaggccacgcgcagccccggaagagccacccagacccaccccgggcg

SEQ ID NO: 10146 - RNA, 81 nt, Homo sapiens
ggcccgaccgcccacagacccaaacaaaggaacaaagacaaccccacgaggacaaaggaccgaaccgggggacgagagaac

SEQ ID NO: 10147 - RNA, 69 nt, Homo sapiens
gaacgaagagaacggaacggagggggcagcacgccgaaggagagaccagacaacaggccagggaaggga

SEQ ID NO: 10148 - RNA, 76 nt, Homo sapiens
caccgcaaggacggagaagggggaacagacaagagggacacaggcgaaacagagaggaagacaagccaagcgagga

SEQ ID NO: 10149 - RNA, 74 nt, Homo sapiens
gccgagcaggcgcgcgggagccgaggcgcgcaccggggaacgaccgaagaagcagcccccggcagcagcacgcc

SEQ ID NO: 10150 - RNA, 84 nt, Homo sapiens
cgcaacagaacgcaaacacggacacccgccgaaggagcccaggaagagcaaagccgagcgcagggcccgccgagccggaacgag

SEQ ID NO: 10151 - RNA, 84 nt, Homo sapiens
ccccaccgcagaccggcccccaacggcacggcaggagcacggcccagcgccgggcgcggccacggcagcgagcaccacaccgcc

SEQ ID NO: 10152 - RNA, 65 nt, Homo sapiens
cgagacccaccggaccccgaacccagaacggagacgcagaaaaaccacgacaaagaaggccaaca

SEQ ID NO: 10153 - RNA, 76 nt, Homo sapiens
ccccccaagaagcgaaccaagcggcgggagcggcagcggagccgccgcaagccgacaagcgaacccagacgccacg

SEQ ID NO: 10154 - RNA, 84 nt, Homo sapiens
caccgggccgggcggccccggggcgccagagcagcaggacaagacgaggggggaacccagaggaggagcgccgagcgagcaccc

SEQ ID NO: 10155 - RNA, 60 nt, Homo sapiens
cgcgcgcgaggagaggagcgcaacagcagcaccaggaaaacaccgggaaaggcccaaacc

SEQ ID NO: 10156 - RNA, 79 nt, Homo sapiens
cgcgcaccaacggcgaaaaggcgcaagcaacgacccacagagaaggaccagcaagcccacagacccaaaacacgcaggg

SEQ ID NO: 10157 - RNA, 70 nt, Homo sapiens
caaggagcccaccggaaacggcggcggagggcacgcacgggcccaagcagaacccaacgacaaagcaggg

SEQ ID NO: 10158 - RNA, 35 nt, Homo sapiens
gcccgggagagcaagaacggcaagggaacgaacag

SEQ ID NO: 10159 - RNA, 78 nt, Homo sapiens
cgaagcagcggaaggcagcccagccacgaaggccccccaggcgcgcccacccgggcagaaaacgcagaagcccacagg

SEQ ID NO: 10160 - RNA, 57 nt, Homo sapiens
cgacgcacacgggggcggacaccacaagaagggcgccagggaggggacaccaaacgg

SEQ ID NO: 10161 - RNA, 78 nt, Homo sapiens
agagccggcagcaaagagggaacagagcgcacagcgaggaggggggcgcgcagcccggggaccccccgccccagcagg

SEQ ID NO: 10162 - RNA, 41 nt, Homo sapiens
ggccgcgcccacgggcagcgaggaagaaagccaaggaagag

SEQ ID NO: 10163 - RNA, 74 nt, Homo sapiens
accggggcccggcgcccgggcccgccccggaggaaccaagacaggcgcccagggcacaaaggggcgcgaagccg

SEQ ID NO: 10164 - RNA, 81 nt, Homo sapiens
gaccgggccggaacgagacgcacgagccccggagcagggagcgggcacggacagcggggcggaccccgagccaggaccgag

SEQ ID NO: 10165 - RNA, 74 nt, Homo sapiens
cacagcgggcccggcaacacaaggagccgggcagcggagggggaaagcgcggagaaaaaagcggggaagggggg

SEQ ID NO: 10166 - RNA, 66 nt, Homo sapiens
gagcccaggagcgccacgcgcggaaggcagcgcccagcagcgcagggggagagagacgcgggaacc

SEQ ID NO: 10167 - RNA, 75 nt, Homo sapiens
aaggaaaaaggccccaaacaagagagcagcgcggacacagagaggaacccggacaccgacccggccaagggccaa

SEQ ID NO: 10168 - RNA, 74 nt, Homo sapiens
gaaagggcggcgccaagacaagaacacacacgaccgcaagaaggacaggagaaacaggggccaaaaaaccaaag

SEQ ID NO: 10169 - RNA, 83 nt, Homo sapiens
gcgcggcgcgcggaagacgaggagcgcgcggcgccggggggcgcgccgcgaccgcccgccgggcccagagaacagcggggagc

SEQ ID NO: 10170 - RNA, 72 nt, Homo sapiens
agagcccagaccaaccaaaagcgaagaaaaagacagaaggagcaggaccgcgacagacccccggacaggcca

SEQ ID NO: 10171 - RNA, 80 nt, Homo sapiens
gaacagaaggaacgacgcggaccagaagccagagcgaggacgccggcaggccaagcaaacacagaaagggaagaaacaag

SEQ ID NO: 10172 - RNA, 79 nt, Homo sapiens
ccaaccccacacggagcccggagcagccgccgcccacaaggaccggagagcagcaaacgagacaacgaaggcacagcaa

SEQ ID NO: 10173 - RNA, 85 nt, Homo sapiens
acaggaaccagcagcaaagaaggcacggaaagagaggacaccgcgaccagcaccacccaaacaagaccacaagaccaaaaagcaa

SEQ ID NO: 10174 - RNA, 80 nt, Homo sapiens
aagagagaaggacaaggacggagagaagagacagaggcgagggcacaagcccgaggaagaagcccccgacgcgcccagaa

SEQ ID NO: 10175 - RNA, 37 nt, Homo sapiens
accgcgccagaccgcacagggcggagaacggaaaagc

SEQ ID NO: 10176 - RNA, 62 nt, Homo sapiens
gcaccccaccacagcgacaaagacccggacccaagccaaaggacaaccgagggagcaagaaa

SEQ ID NO: 10177 - RNA, 73 nt, Homo sapiens
ccgggaagcggccaccgacacgcagcagcggccagaggagggagaaaaagccaggccacagccagagaaacga

SEQ ID NO: 10178 - RNA, 38 nt, Homo sapiens
ccagcccccgagggcgggaacaggacagggccgaggag

SEQ ID NO: 10179 - RNA, 82 nt, Homo sapiens
gccgcccggggcagaccaggcagagcacagcagacccggcgaagaaaccacgcaagaagcaagaggaacagaagcaagagaa

SEQ ID NO: 10180 - RNA, 82 nt, Homo sapiens
cggccagggagagaggaacccaagacaccaccagcccaagagccaggccccaccccgccgccaacgccgagaacgcgccgcg

SEQ ID NO: 10181 - RNA, 78 nt, Homo sapiens
gggacgcccgggagaggccgcggcggccaggccccagacacagacgagcaggggaaggaaccgagaggagggaggaca

SEQ ID NO: 10182 - RNA, 74 nt, Homo sapiens
gacagaaccccggccaaggaggggcaaaaacccggccaggagcacccgcgccagacaaccagcaaggaaggaac

SEQ ID NO: 10183 - RNA, 65 nt, Homo sapiens
caccaacaagagcaacccaggacaggagagacaacggaggcaagaaagacggagaagcgagaaga

SEQ ID NO: 10184 - RNA, 81 nt, Homo sapiens
accgacaagggcagcccaaggacacaaggaaagacacaggaaacaaaccacaggcccccagaaagaccgggacgaaaacac

SEQ ID NO: 10185 - RNA, 65 nt, Homo sapiens
gccacaagagggccagaagaccgccggggcggaaagggacccgacacgagacgaacacaaagggg

SEQ ID NO: 10186 - RNA, 68 nt, Homo sapiens
cggggaccagcagcgcgccgccgcccaggaacaagacaacacacacgcaccagggcagaaaaagggag

SEQ ID NO: 10187 - RNA, 60 nt, Homo sapiens
cgggaaggcagacagcgagggcgacgagccccccgcaggcgagcccaggaagggacacgc

SEQ ID NO: 10188 - RNA, 76 nt, Homo sapiens
agcgaaccagagcaacagcgcaaggcagaggcgacccgcggcgagagcccccccagagcgccagggcccgagaagg

SEQ ID NO: 10189 - RNA, 69 nt, Homo sapiens
caaaacagagcggaacgaacaagggcaaacaaaggcacaccaacggcaacggagaaggaaggaccgaac

SEQ ID NO: 10190 - RNA, 73 nt, Homo sapiens
cgcaaaggccagcggcgaacacacgagaagcacgggagaacaaggcaaagacaagggaagagcagggggggga

SEQ ID NO: 10191 - RNA, 52 nt, Homo sapiens
ccaccacaaccagcaaaggcccgcaggaaagaaaacaagccacccagacaag

SEQ ID NO: 10192 - RNA, 112 nt, Homo sapiens
ggaacacggcccacacacccaggcgcggagggaagacgcccgggccaccaagcaagacaagcagaccggaagaccgacggaagaccacaccccgagggagcccaggacacca

SEQ ID NO: 10193 - RNA, 53 nt, Homo sapiens
gaacagacgcggaaaccggaaggggaacaggacgccaggcaggaccggccagg

SEQ ID NO: 10194 - RNA, 70 nt, Homo sapiens
cagccgagcggggccggccacaggaaaagcgcacgaggagcaggaaccgaggaggaacgcccgaaaaaag

SEQ ID NO: 10195 - RNA, 38 nt, Homo sapiens
agcggggcagaaaaacaagcgaaagggaagcaaaggaa

SEQ ID NO: 10196 - RNA, 60 nt, Homo sapiens
aaaaccaaagccaggacaagacacagcaaccaagaggagaagaaccagaggcaaagcaca

SEQ ID NO: 10197 - RNA, 60 nt, Homo sapiens
acaaggcacgggggccagcaaccaccaagggaacagcacagcaaaccggcacgagccagg

SEQ ID NO: 10198 - RNA, 40 nt, Homo sapiens
ggaggaccagaagaaaacacgccaaaaagaccagggggaa

SEQ ID NO: 10199 - RNA, 53 nt, Homo sapiens
gcccacagcaccgccaccaaggacagaaggcgcagcaacccggccaaccagac

SEQ ID NO: 10200 - RNA, 81 nt, Homo sapiens
gacccgccgaaccgggagccggaccgggaccaggaccgggccccacccaagagacacacagaggacagaccccccgggcac

SEQ ID NO: 10201 - RNA, 52 nt, Homo sapiens
caggcggcgccggacagagagcagaggaggaagaaggaccacgggaggcaga

SEQ ID NO: 10202 - RNA, 82 nt, Homo sapiens
caaccaccgggcgccggccagcagaggcccgccaagccgaggaggcagaggccgagccccacagacccccggcacacggggc

SEQ ID NO: 10203 - RNA, 80 nt, Homo sapiens
cacagccaaaaccaaaagggcagcagggaggaagaaaaacagagcagaacaacaggaccggccaagccaaacagagaaac

SEQ ID NO: 10204 - RNA, 63 nt, Homo sapiens
ccggagccccccagccgcgccagcagggagaagcagaagcccgcacagagcagggaccccaac

SEQ ID NO: 10205 - RNA, 66 nt, Homo sapiens
ggaggaagccacacaaagaacaaagcagggaggccggggggggcacagagccccggaagacagccc

SEQ ID NO: 10206 - RNA, 80 nt, Homo sapiens
aacccgcaaacgaaaaagaacgacagagcaaccaggaaagaagagggggccgacgcgaggaggacagcagcgcagcagcc

SEQ ID NO: 10207 - RNA, 83 nt, Homo sapiens
gagcgacccggggaccgaccggggaccccgccgaagaggaggagacacacagccccagacgggaggaaaaaaggaaggaccgc

SEQ ID NO: 10208 - RNA, 42 nt, Homo sapiens
gcacacgggcgcgggccgacacagggagggaggccgaagcgg

SEQ ID NO: 10209 - RNA, 74 nt, Homo sapiens
gagacgcgggagccacggcgccaccaccaggagaaggcggggaaacgaacccaacagccacaaaacaaacagac

SEQ ID NO: 10210 - RNA, 55 nt, Homo sapiens
ccacacagaaacggccgcagcggggcgaagggcagaaccccccccggggaggcgg

SEQ ID NO: 10211 - RNA, 74 nt, Homo sapiens
gccggccggagcgggaggcgggccagcgacaaaaagagagcccgccagcagccagggcggaacaggagacgcgg

SEQ ID NO: 10212 - RNA, 75 nt, Homo sapiens
gcgaaaaaggaccacaaaaagaccacagaaaaaagcccagcgagcaccaggaccacaggcacaaggcaacccgag

SEQ ID NO: 10213 - RNA, 73 nt, Homo sapiens
cagaaagcgagcagagcccgcgaacaagacaagcagaaaggcggaaaaaggaaaccacacaaaggaaaagcgg

SEQ ID NO: 10214 - RNA, 74 nt, Homo sapiens
aagagacgacacgcaagcaggcaaccgaaacagaggacacgaaaccaccgcaacaagaggaagcaaagcagaaa

SEQ ID NO: 10215 - RNA, 68 nt, Homo sapiens
aaaagccagagccaaaaaaacggcggaaaaaagcggagaagaggggagacaacaggaggacacggaag

SEQ ID NO: 10216 - RNA, 82 nt, Homo sapiens
ccgagacaaaggcaccaggccaccacagaaacaaaagcaacaaagagggccgcaggacaagcgaacaagagggacaaagagg

SEQ ID NO: 10217 - RNA, 93 nt, Homo sapiens
accagcagcagcagcagcagcagaaagcgggcgagcagcaggagcgagcccgaggacaggagaggaagagagaacgagggccaaagccaacga

SEQ ID NO: 10218 - RNA, 81 nt, Homo sapiens
acaccgagagaggaggagccagacgacaagcacacacaggcgcgaaacggaaaaagcccagaaggggaagaccccagcccg

SEQ ID NO: 10219 - RNA, 87 nt, Homo sapiens
ggaaaaccgaagggaaggccagcagcgcgcggagaagaacggggagccaggagaacgcacaaccacggggacgggcagaggaccaag

SEQ ID NO: 10220 - RNA, 75 nt, Homo sapiens
acagcgagcggagccggcaggaaggggaccgggcggcggagcggcggaagaagaaggccgcgggaaaggcaaaac

SEQ ID NO: 10221 - RNA, 79 nt, Homo sapiens
aaagaagaagaaaagcacgaacacccaaagccaaggcacgccagcgacgccgacaagggcaccacaccaggacacggcg

SEQ ID NO: 10222 - RNA, 87 nt, Homo sapiens
acaggaggcagagccaaacacccagcccacggcagacacagcaggccaacccagaaccaccgaagaagaaaagacaaacgaaaaaga

SEQ ID NO: 10223 - RNA, 61 nt, Homo sapiens
cagacaaccacacccacgggcagccagagacgcgcacgaaacgacgaagaggcccgaggac

SEQ ID NO: 10224 - RNA, 83 nt, Homo sapiens
cggggacagccagccccgcggaccagaccaggccgcggcccggcaccggcccgaccagccacgacacccacgaaaggacaggc

SEQ ID NO: 10225 - RNA, 57 nt, Homo sapiens
cggcggccgggacccacagagccggccagccgcagagggaccgcccccggacaaggc

SEQ ID NO: 10226 - RNA, 69 nt, Homo sapiens
agagggggaaagccaaggaaaaacggagagccacaaaaaaggaagcgaaaggagaagaaaaagcagaaa

SEQ ID NO: 10227 - RNA, 85 nt, Homo sapiens
ccggacgaaggaccgcagcacggagcgcagaaccggccgcgcccgggcccggcaggaaccggaacaacccacagggcagagcgga

SEQ ID NO: 10228 - RNA, 77 nt, Homo sapiens
aaccgagccaaaagcggcaaggcaacaggagaaacaacgaacgagcaaggaagggccaaggcagaccccacaccgga

SEQ ID NO: 10229 - RNA, 61 nt, Homo sapiens
ccgcggcggcagcagggcgggagcacggaaacacagacaccaccacgaccaaagaaaagcc

SEQ ID NO: 10230 - RNA, 82 nt, Homo sapiens
agccagcggaggccgaaaacaggccggggccgaaaagccagacaaagaaacagccggaaaagcacgagcacaagacgaaaac

SEQ ID NO: 10231 - RNA, 73 nt, Homo sapiens
ccgcgaggacccacaagaaccgagaggaccaacaccgcagacgaagaggccgcgacagccaccaaagcagcgc

SEQ ID NO: 10232 - RNA, 54 nt, Homo sapiens
cccgccgacagcccacacaggagcggcagacaggagcgcacaggcggcacgcag

SEQ ID NO: 10233 - RNA, 80 nt, Homo sapiens
agcgcccagcaacaagacagagcggccggagccgcggcggccgcggagagcccgcacacagacggccgcgggcgacagac

SEQ ID NO: 10234 - RNA, 96 nt, Homo sapiens
acagcgccagcgcaagaggagccaagcaaacagaagcgcggccaagggacagaagacgccccagggcaccgcgcccaagagaggaggagaagacag

SEQ ID NO: 10235 - RNA, 92 nt, Homo sapiens
cccggccagcccccgcaccaagaccccagcaccaaccagaccgggggggaacagcgccaggaggcaggaaagcagcacaaaaggcaaaggaa

SEQ ID NO: 10236 - RNA, 47 nt, Homo sapiens
gaagagcgggggaaagaggacaacagggcaagcaccaagcgccagcc

SEQ ID NO: 10237 - RNA, 86 nt, Homo sapiens
cccaggccgcgccgagcccgccgcgcgggcccgcccgacgcggaaggccccgcggacgggaagacaaagaaaaagacacagcccgc

SEQ ID NO: 10238 - RNA, 79 nt, Homo sapiens
gagcaaggcgacgaaccggagagaggagaacgaacaccggaccgccagggaaggaggcaagaaggcacaggaacaggac

SEQ ID NO: 10239 - RNA, 83 nt, Homo sapiens
ggagaagacagcgcggggaggagcccgggcgaagaggaggcggaagccaagggggaagaccaacacacaccccccagacagcc

SEQ ID NO: 10240 - RNA, 84 nt, Homo sapiens
cgaagcaaaagacagcgaggagcagcagcagcccagcaggcgcggcccgccagagccgaggaaggcaccaggagaggaggaggg

SEQ ID NO: 10241 - RNA, 56 nt, Homo sapiens
cgggagaagaaaagacccagaggagcagccaagaagccccccaggggcccgcagac

SEQ ID NO: 10242 - RNA, 74 nt, Homo sapiens
ggaccagagagcggcagagggaagaaaagacaagggacacccagaaaacagagagagaaggaagaagagaaaga

SEQ ID NO: 10243 - RNA, 82 nt, Homo sapiens
ggacaaggacagaacaccagcacggcgaagcaaccgcccagaggaacagcgaagcccagcacaggaccagcaacgcagcgcg

SEQ ID NO: 10244 - RNA, 62 nt, Homo sapiens
accaaagaaagagcacgagggagagagagggaccgaaaccaccagaggaaagcaggaaaacg

SEQ ID NO: 10245 - RNA, 78 nt, Homo sapiens
gcgccagaaggaagaggcggacggaggagcaggcgagaagagaagccccgacaagggaccgggcgggccccgcaggaa

SEQ ID NO: 10246 - RNA, 80 nt, Homo sapiens
ggagcgcccagacgcggggagccgccggagcgagaaggaagccccaacagcgggcacccggcaggcagcaagacaaaggg

SEQ ID NO: 10247 - RNA, 77 nt, Homo sapiens
aagggagcagggagaggagcgggaaacgggagggaaccagcaacaagccgccaagaaggacaagaaggggagaagaa

SEQ ID NO: 10248 - RNA, 96 nt, Homo sapiens
gccagcgggacaggagggcaggaagagcgcagcggggacaagggacgaacagcggggacgccccagcagaccgcccaggagaggaaagcaggagga

SEQ ID NO: 10249 - RNA, 72 nt, Homo sapiens
aggcgcccaggagcacagcggcacggccagcggcccgcgaccggcccgaggaccgccgcacgaccaaacgca

SEQ ID NO: 10250 - RNA, 72 nt, Homo sapiens
gggggcagcaaaaaacgaagaagagcagaacacggcacaccccaggaaggaagacccccagaaacagcccag

SEQ ID NO: 10251 - RNA, 80 nt, Homo sapiens
agagagcaccccagcgaggcccacagaaaagccacaacccaggaacagaggagcggaaacgcaggaggagagagacggac

SEQ ID NO: 10252 - RNA, 78 nt, Homo sapiens
caccacaaccagcggacacggccgccgggccgcgcccacgggcagcgaggaacccccacccagaagacaaagaccgca

SEQ ID NO: 10253 - RNA, 71 nt, Homo sapiens
ggagaggcaaaaagaagggcagagacaggcaacagacggcaacgaaaggcacaaaaacgcaacacaaagag

SEQ ID NO: 10254 - RNA, 123 nt, Homo sapiens
ccgagcgccgagaaagccccgggagaagcagcgccgcccggggcagaccaggcagccggaaccaaaaagaagccccagagccggggccaggagccccaagcgccccagcagcaaacacagaag

SEQ ID NO: 10255 - RNA, 79 nt, Homo sapiens
acaggaaccaagggcaacaggaaggcgcaagcggaaaagccagggcggaaaccggcaagaggaagagaaagaaaaaaaa

SEQ ID NO: 10256 - RNA, 64 nt, Homo sapiens
gagcgaccgagaaaaaccgaaagagccagggcacgaaggcaaagaccccagcaccacagaaaaa

SEQ ID NO: 10257 - RNA, 68 nt, Homo sapiens
aaggaagaaagcacgcaggacaacggaacgagcaacgaaggaaggcacaaagacggaggagagggccg

SEQ ID NO: 10258 - RNA, 70 nt, Homo sapiens
aacaaagggacacccagaagagaggacagaagcaaaaaggcagaaaaaccccaagaagaacaaaagccag

SEQ ID NO: 10259 - RNA, 105 nt, Homo sapiens
cgggccgcgggcgcggacgccggcccgcgcgcgcaccccgcggacgccacagcgcccgacaaccccggaacgcgggcaaaaggccccaggggaccgggggaggcc

SEQ ID NO: 10260 - RNA, 85 nt, Homo sapiens
cagccagcacggccaagcagccaccggacgaaaaagcggggaaggggggcaaaaaaaagaagcaagcgaagcaccgagcacccac

SEQ ID NO: 10261 - RNA, 81 nt, Homo sapiens
gaacccgaagaagaaaggacgacagccagagagggccaggagggagggcacggaggaccagaggcggacacaccaccaccc

SEQ ID NO: 10262 - RNA, 74 nt, Homo sapiens
cccagggcaaaccccgccagaggcacacacgccaaaggagccgaacccaaaaagagcagcaccgcgagcgagaa

SEQ ID NO: 10263 - RNA, 75 nt, Homo sapiens
cgggaaagaccgaggaagaaaggggaccacaggccaaggcaggcaacaggaagaagaacccacaggggccaacag

SEQ ID NO: 10264 - RNA, 51 nt, Homo sapiens
ggcagacaaaagggccaaagaagggagagagggggggaccaagcagggacg

SEQ ID NO: 10265 - RNA, 75 nt, Homo sapiens
acagacgggggcgagcggacccgcagccccaaaggaaacacaaagaagacaccagaagggccagcaccacgacaa

SEQ ID NO: 10266 - RNA, 82 nt, Homo sapiens
gaggagggagggcacccgcagcccgccgcaaggcacgcaggaaccacaccacacggaggccagcgcggcccagagcaccacg

SEQ ID NO: 10267 - RNA, 57 nt, Homo sapiens
aaacgcacaaccaagcggagagacaaaagcagagaccgggaggcagcaacccagagg

SEQ ID NO: 10268 - RNA, 59 nt, Homo sapiens
cgggccgggaacgccaggaggaagggaggagggaggacaggcaggggagcgggagcaag

SEQ ID NO: 10269 - RNA, 52 nt, Homo sapiens
caacgaaccggccacgagaggacagagacgaggcgggcccaagggcaccacc

SEQ ID NO: 10270 - RNA, 69 nt, Homo sapiens
cagacaaacaagaacagcacacagcaaccggagggaccagaaagccccacaaggcaagaaaaggagaag

SEQ ID NO: 10271 - RNA, 83 nt, Homo sapiens
gcggcggaaaccgaaggggagccaggcggcgacagcgggaggagaaagggcagagcggcgggaaaccaccaacaacaccccca

SEQ ID NO: 10272 - RNA, 81 nt, Homo sapiens
caccaaaaaccaggccgccaccgcggcaaaggaaagggagcagcaccggccacacccacagcacgaccggaacccagcgac

SEQ ID NO: 10273 - RNA, 72 nt, Homo sapiens
gccaccaaacccagcagagacccccccagcagccccaagacccaccgagacagggacagagaagaggacgga

SEQ ID NO: 10274 - RNA, 39 nt, Homo sapiens
caagaagaagccgcggacccccgacaacaaaagccgaac

SEQ ID NO: 10275 - RNA, 81 nt, Homo sapiens
cccggaccccgggcaagaccgcagagaaaggcccccccgagccccccagcgccacagcaaggacacgaggcaccacccagc

SEQ ID NO: 10276 - RNA, 74 nt, Homo sapiens
agaccacacaagcaaggagccgaaaaagagccggaggaagggccagaaggcagccgagccggaccgcaagccac

SEQ ID NO: 10277 - RNA, 74 nt, Homo sapiens
agggacaacacagacccaccagcagagccaaagaacgccaaccgaaagaaagacaaagagggccaaaagaaaga

SEQ ID NO: 10278 - RNA, 74 nt, Homo sapiens
gcaccagcaccaaccaagccggacaaagcaagagcaacgaaccaaagcaaaggaggccgggggaagacggaaaa

SEQ ID NO: 10279 - RNA, 80 nt, Homo sapiens
cgagccgagggaggggaaaggcgcagggcacgaacgagacacgccgggcgcgacccaccggccggcgggcccggccgcca

SEQ ID NO: 10280 - RNA, 76 nt, Homo sapiens
cagagaacagaaacggcaaagggccggggacaccagaggacagcagcggacggccggaccaagaggcgccgccccc

SEQ ID NO: 10281 - RNA, 67 nt, Homo sapiens
ccaaggcaccccggggggagaagaacacggggggccccgccggaggccgaaaccggggcccagggca

SEQ ID NO: 10282 - RNA, 38 nt, Homo sapiens
gcccgcgcgcgcggcggccgggggaccccacgccggag

SEQ ID NO: 10283 - RNA, 84 nt, Homo sapiens
aacgacggcccagcaggcggggaagagaaaggaaaggaggaaacagccggcagccagacagcaagggccggggaaacagaagcc

SEQ ID NO: 10284 - RNA, 41 nt, Homo sapiens
aagcccggggccaaccagaaaccgaacacccaacaagaagg

SEQ ID NO: 10285 - RNA, 71 nt, Homo sapiens
ggaggcgaggaggagaggacagagggccggggcaaccccaccgacggccaggacccaaacgagcccggggg

SEQ ID NO: 10286 - RNA, 79 nt, Homo sapiens
cccccgagagcgagaacagggaacggagcccccggggacacccagcagagggcccagcccaccgcggagccacggacga

SEQ ID NO: 10287 - RNA, 48 nt, Homo sapiens
ccccaccgcgcagggagaacccgcccagcagccgaaagccaggaaaac

SEQ ID NO: 10288 - RNA, 67 nt, Homo sapiens
acgggagcaaggaccgccagaagcacaggaccagggagacacacaccagccgcagccagccccaacc

SEQ ID NO: 10289 - RNA, 67 nt, Homo sapiens
cccgcgcaaggagcaaacgccaggacccacccgggcaaagaagagcaaaggcgcaccccgccgcgca

SEQ ID NO: 10290 - RNA, 67 nt, Homo sapiens
cccgacgccaaccaagaaggaaccagaaaaaagaggaagcaagaccaccggcagaacacaagaacag

SEQ ID NO: 10291 - RNA, 60 nt, Homo sapiens
ggagggaagaaaggagaggaagaagaagcgggaagcgccacccagagcccggagcccgac

SEQ ID NO: 10292 - RNA, 69 nt, Homo sapiens
aaaacccaaaaacccagaaacaggaaacagaccagacgaaaggcgaaaaaagcccagaaaagaaaggag

SEQ ID NO: 10293 - RNA, 68 nt, Homo sapiens
aaagcaaagccccagacggacgagcagggacaaggaagggagcaaacgggagagcagagggcaaaaga

SEQ ID NO: 10294 - RNA, 84 nt, Homo sapiens
cagagacaggccagagggggccgccgcggcagcaagaacagagagagaggggacagacgagagaacgagccaaggagaccggga

SEQ ID NO: 10295 - RNA, 80 nt, Homo sapiens
cgaggaacggcggagcagggagcccaaagaccccggagacagggggagaggcaccagcaacagaccaaccgcagcaagca

SEQ ID NO: 10296 - RNA, 78 nt, Homo sapiens
caggcgggagacaccgaaaagaacggaccccaccgacgaggcacccgagaagcccgcaggagcaacacgccccaagaa

SEQ ID NO: 10297 - RNA, 73 nt, Homo sapiens
acaagccacggaaaaaggacagaaaaagaggacgaagagcacacgaccacaccaggaccacccaagaagacca

SEQ ID NO: 10298 - RNA, 55 nt, Homo sapiens
gcgcgggaggaggccaccgcagaggagcggagcggaggcagacacacacgggggg

SEQ ID NO: 10299 - RNA, 72 nt, Homo sapiens
gggggcggcgcgcagagcggagcagccggggcggagaacggaaaagcaccaggaagcagagaggaccgcaga

SEQ ID NO: 10300 - RNA, 69 nt, Homo sapiens
aagacaggccgaaaccccaaaaggaccgaaaccagccagacaaacaaggccaagcaacaggagacacaa

SEQ ID NO: 10301 - RNA, 61 nt, Homo sapiens
cacagcgggaagcggcggggcaggccagcgaccggccggagcccagacccaaccagggcag

SEQ ID NO: 10302 - RNA, 43 nt, Homo sapiens
cacaccggcagcaaacagcaaggcgccccggcaaggccaccgc

SEQ ID NO: 10303 - RNA, 69 nt, Homo sapiens
agagccagggaacggaggagcgagccacggcggagaaggaaagagcagcgaaacaaagagaacagcaac

SEQ ID NO: 10304 - RNA, 130 nt, Homo sapiens
cgcaggagagaccgccaacaccggagggaacagagaaaagacaagccccaccaagccagagccaggcgggcaccacggcaggggcgagcaccccaggaagggagaggaccgaccggacacgacccggggg

SEQ ID NO: 10305 - RNA, 65 nt, Homo sapiens
gaacgagacagaacaggaaaaaggacaggggcagaccaaaaaaacaagaaaaggaagaaagccaa

SEQ ID NO: 10306 - RNA, 74 nt, Homo sapiens
acaaacaaaagggggcacggaggacgccccagccacccggaccagggagaagagcagccccccaaccccggaaa

SEQ ID NO: 10307 - RNA, 76 nt, Homo sapiens
accagcgaagaggacccaccggggcccacgcacggaaaagggagccggcacaggacccaaagaggcggaggggcca

SEQ ID NO: 10308 - RNA, 78 nt, Homo sapiens
cgcgcgcgcggcacgcgccgcgggacccgaggcgagccaagcaggcggggccgaggcgcggcagacagggacaacggc

SEQ ID NO: 10309 - RNA, 77 nt, Homo sapiens
ccaccgggcgcaaaggaagcgcccaaacccgagggcacacccacagacacaagaagacagcccgaggacaacgagaa

SEQ ID NO: 10310 - RNA, 81 nt, Homo sapiens
ccgcgaggaggcgccgggcggaggcggcggcggcggccgcggccgaggcgagaaggcacaaagagcacacggaacgccagg

SEQ ID NO: 10311 - RNA, 61 nt, Homo sapiens
gagaacccgcccagaagccagaccccagcaacccacgagcggagaacagggaacgaaaccg

SEQ ID NO: 10312 - RNA, 82 nt, Homo sapiens
gaggggaccaagccggagccgccccaacagcgcagcagcagcagaggaaaaaagagaccgagagaaagcagcagaaaggggg

SEQ ID NO: 10313 - RNA, 59 nt, Homo sapiens
accgccagggcagggcaagaccccaaggccggggccgccacgccgggaaggaagccgcc

SEQ ID NO: 10314 - RNA, 76 nt, Homo sapiens
aaacccccagccgacgcccgcgccccccagcaagggaaaccggcaagcagcccagccgagcagccccagaccgcgc

SEQ ID NO: 10315 - RNA, 57 nt, Homo sapiens
ccagacgaccgcggaacaaacagaagacagcaaggagagagcacgaccaccgccgag

SEQ ID NO: 10316 - RNA, 73 nt, Homo sapiens
aaccccgcaggaccagggccgccgccccaagagagcgaggaccgcccccaaaggaagaaaaagacaaccaggg

SEQ ID NO: 10317 - RNA, 74 nt, Homo sapiens
cacccagaacaaaaagggccagagagccacaggccgcacaccccagagcccgaagggggccccgaccccgaccc

SEQ ID NO: 10318 - RNA, 43 nt, Homo sapiens
cggccgaccccagaagaaccccacaccaggagaagcacagcac

SEQ ID NO: 10319 - RNA, 64 nt, Homo sapiens
agagccggaagaccaggaaggagccggggcggacagggacaagcgcacagcggagaaagcagcg

SEQ ID NO: 10320 - RNA, 86 nt, Homo sapiens
acggagggggacacggcgagcgcaggaggggccaggaaccgggcaccccgggccaggacgccgaggaggagaccgaggagcccagg

SEQ ID NO: 10321 - RNA, 76 nt, Homo sapiens
cagcgcccggcccccgcggcggccggcccccccccagggccaggcgccgccagaacgggggagccagacgaaagca

SEQ ID NO: 10322 - RNA, 73 nt, Homo sapiens
ccagggaaccaagaaaaaacccagagaagagcaaccaggccaccaagcacaaacggacgcaaagacagacaac

SEQ ID NO: 10323 - RNA, 75 nt, Homo sapiens
cagggcacccgccagccgacgaaggggagccacaggagagcgcccaggacgcaaggaccaaaaaacaaagggcgg

SEQ ID NO: 10324 - RNA, 71 nt, Homo sapiens
aggccgccccgacagcaaacaacgccagacagcgagccaccaagcccccacaaaggaagcaacgcccaggg

SEQ ID NO: 10325 - RNA, 85 nt, Homo sapiens
aaagcaaacgaccagacggcagggaggcacaaaggggaacacaggggacaacgcgacggcgggacccagggacgccccgcagaag

SEQ ID NO: 10326 - RNA, 79 nt, Homo sapiens
gcggggacggcgcgcgggacggccgaggaaggaacggcccccccccagcccgccccaaaagacaacaggcacaaagaga

SEQ ID NO: 10327 - RNA, 84 nt, Homo sapiens
cagggcggccagagcacacaccaggcacgggaaagggagcagcaccggccacacccacagcacgaccggaacccagcgaccgac

SEQ ID NO: 10328 - RNA, 73 nt, Homo sapiens
ccaagccaggggccccaccaggagccagggaggacgaagaaaggaaggcacgcccaacagaagaccaagacca

SEQ ID NO: 10329 - RNA, 83 nt, Homo sapiens
agccgccaccgggagaagcggccgggccaagagcaccccagccgagcccagagccggggccccgagcacaggcgccgaccccg

SEQ ID NO: 10330 - RNA, 77 nt, Homo sapiens
gaggaggccgaggccgggaggccggcccggaggacagcagagccggcgccccacgacaaaggggcaggcaggggggc

SEQ ID NO: 10331 - RNA, 86 nt, Homo sapiens
cgaagaagaggcccaacccccaccccgcccaaggaggcccagcggccggacacaaaaaggcaccaaaagccgcacaggggcaggga

SEQ ID NO: 10332 - RNA, 68 nt, Homo sapiens
acgcagaacgggcggacgggcgcccagccaggagaaaaccggaagagaaaggccgggaagcaggaaag

SEQ ID NO: 10333 - RNA, 63 nt, Homo sapiens
caccccgaagccgagaaaggaggagccagcaccccagaggcgaccgccgccgggaagccacag

SEQ ID NO: 10334 - RNA, 55 nt, Homo sapiens
gggaggaaggggcaagagggggaaagcacaggggacaccacgccacccaagagag

SEQ ID NO: 10335 - RNA, 74 nt, Homo sapiens
gcgccggaggccgagcggaggggaaccgagaccagagcacaacgaagccagacccggaagcaaagggaaaagag

SEQ ID NO: 10336 - RNA, 80 nt, Homo sapiens
acaccaaaaaccaggccgccaccgcggcaaagccggcaagaagccaacggagaaccaaggccaagaccagaaccagcccg

SEQ ID NO: 10337 - RNA, 76 nt, Homo sapiens
aaccgcagacagcggccaagaagacacaaaggacggaggcacgccaaagaacacggcagaagcccccaagggaaaa

SEQ ID NO: 10338 - RNA, 82 nt, Homo sapiens
gccgccaagagccggccacagaggccggaaaagccccaaacgcgccaacgacaagaaccacggcgggaaacgccagaaggag

SEQ ID NO: 10339 - RNA, 57 nt, Homo sapiens
aacgcagacgggaagagaagaagaccagagaacacccgcgagggcccaggccgaaac

SEQ ID NO: 10340 - RNA, 74 nt, Homo sapiens
gaagccaaggcaagcaagagccgggcaaagaaggagaaagccgagcacacgaggaagagaagaacaaagcccgc

SEQ ID NO: 10341 - RNA, 72 nt, Homo sapiens
agcccgccagaaccgaggggcccccaggaccaacccgagcgagaaaggcaaagcggaaagcgagccgccccc

SEQ ID NO: 10342 - RNA, 75 nt, Homo sapiens
agcaccagaaggaagagcgcccgggaaagaggaaaacccaaaggaagccgagcagaagcaggaaaacagagacaa

SEQ ID NO: 10343 - RNA, 86 nt, Homo sapiens
ggcgggggcccagggcgccccagccgccgccggcggcggcggcggagccaccgcgcaggccagggcgaccgggcaaggaacgggag

SEQ ID NO: 10344 - RNA, 66 nt, Homo sapiens
gcacacagagaccaaagggaaacagggacgacagaaaaaaaaaagccggggccgcggggagaaagc

SEQ ID NO: 10345 - RNA, 81 nt, Homo sapiens
cgccacaaacagagacccccccccaagcaaggacaaaagccccaacggacccaggcaaaaggagggcaccccgccaggacc

SEQ ID NO: 10346 - RNA, 81 nt, Homo sapiens
ggacccagcggcagaggggcggagcggcgacagaccccaaaacacgagacgcgcagaacgcgggcggaggcagggcggacc

SEQ ID NO: 10347 - RNA, 86 nt, Homo sapiens
acccggccccggacggagcgccggccgcaccaccgccccggccggcccaccgggacggagacgagcagagggggcacggaggcgca

SEQ ID NO: 10348 - RNA, 75 nt, Homo sapiens
ccaccacgggagaagaaggaagaaaggaaagcgagggcccagcccaaggacccgacaggagagacagccccacag

SEQ ID NO: 10349 - RNA, 81 nt, Homo sapiens
ggcgccgccgaggggcagcagcacaacaaggcgagcaacagaaaaaggcggccacaccgcgagggcgacccaaggcagcga

SEQ ID NO: 10350 - RNA, 52 nt, Homo sapiens
accggagagcacccaacaacgggaagcccgaagccagagagggcacccgccg

SEQ ID NO: 10351 - RNA, 58 nt, Homo sapiens
accaccccggcgcaggagcgcacggcaacaaccaaaccacacgcaaagcagaagcccg

SEQ ID NO: 10352 - RNA, 85 nt, Homo sapiens
gaagaggccagggaaaaagggaacaggccagcaaaacaccagcgcaagccaaagccacaagaccccccaacccggaaacaggcac

SEQ ID NO: 10353 - RNA, 95 nt, Homo sapiens
caggagcgccacgggagccaggccgcagaggcgcacaggggcaaacagggaaagggagcagcaccggccacacccacagcacgaccggaacccag

SEQ ID NO: 10354 - RNA, 77 nt, Homo sapiens
gggcagaggaagcgccgccaggcccgcaggaccgccggagacagggcaaaggaagcacccgcgagaaagaagggcac

SEQ ID NO: 10355 - RNA, 55 nt, Homo sapiens
ccccagccccacagcgcagggacaagcggcgcgacggcccacgagcgcggcgcca

SEQ ID NO: 10356 - RNA, 80 nt, Homo sapiens
ggacagagcccccgaggccccagaacaccggagcacagaccagcgcgcgaccggagccccacagcggcacaggccccagc

SEQ ID NO: 10357 - RNA, 96 nt, Homo sapiens
accaggacggacaagcacagccggaaggaggggaaagcgcgaaaaagggcgcaaggccaagccagagacacacggaggaaaaacccaccaaaaaac

SEQ ID NO: 10358 - RNA, 62 nt, Homo sapiens
ccaaaagccgacaaccccagaaacaggagagaacaaggagcaggccaacggccagaagaacg

SEQ ID NO: 10359 - RNA, 71 nt, Homo sapiens
gagggaggaaaacaaccgagggcagaggccggagccggaggaacgacgaaccagaagagacccaaggacaa

SEQ ID NO: 10360 - RNA, 79 nt, Homo sapiens
gcggcggagccggcaggagcggagaggcccaccaggccagggaggacggacaggaggagaaagccaagggagagacgca

SEQ ID NO: 10361 - RNA, 61 nt, Homo sapiens
gggcgccccgcagccccccaacaccgcccgccaggacgacaaaacccccaccagcgcagaa

SEQ ID NO: 10362 - RNA, 83 nt, Homo sapiens
agacgccaccacgggcacccgcgccgggcaccgaggaccagccaagacaggaggagacacacagccccagacgggaggaaaaa

SEQ ID NO: 10363 - RNA, 56 nt, Homo sapiens
aaagagaggagggagaacacagaaacccgccccgggacacccagagcaacaaaccc

SEQ ID NO: 10364 - RNA, 76 nt, Homo sapiens
ggggcccgcccgcggcccccgcgcggaggacaccagacggccaaaacgggaagcaaaccagagcgacgcgccagcc

SEQ ID NO: 10365 - RNA, 75 nt, Homo sapiens
aggccgcggcccgcccccagaaagaaccccaaacacagagaaggaggcgcaacagggcaaggcaaagagaaggac

SEQ ID NO: 10366 - RNA, 73 nt, Homo sapiens
gcccgcggcgcaccgcgccgcggagaaagggacggcagcaggaaggacccagacagacggcacgcccacagag

SEQ ID NO: 10367 - RNA, 89 nt, Homo sapiens
gcgagacgcagccccggccaaacggccagacgccgacgcgaccagcagagacgaggaaacggaacgaaacggcagcagcaagagcaaga

SEQ ID NO: 10368 - RNA, 54 nt, Homo sapiens
caagcagcaaccagcccaaaggcgaaaccgaaagccagagccccgcgagaccag

SEQ ID NO: 10369 - RNA, 83 nt, Homo sapiens
agcagcggacggccaggagaacaaggcacacagagacagacaaagcagccgaaacagcagaagaaagaagcgacaaaacagcc

SEQ ID NO: 10370 - RNA, 40 nt, Homo sapiens
ccaagaccacagcagcacccaggggacaccgaagcgaaaa

SEQ ID NO: 10371 - RNA, 68 nt, Homo sapiens
gagaggccagaacagccggcaagagcacaggaagcaagaagggcgaaagaggaagaagaaagacaaag

SEQ ID NO: 10372 - RNA, 65 nt, Homo sapiens
ccaggccaggagaggagagaagaagagcccccaagcaccacggagggggagagcacgccacccca

SEQ ID NO: 10373 - RNA, 88 nt, Homo sapiens
aaacagaacccaagccaggcacccaaaaaaacgaaacgaaaagagacagcagggcaaaacgggccacacacagggcaaaaagaacggg

SEQ ID NO: 10374 - RNA, 89 nt, Homo sapiens
gggccacaaaggaccaagaacggagcaagcccaggcacagccgacgccgcggggggagagcacaagcgaaaccaggccccagcacacca

SEQ ID NO: 10375 - RNA, 65 nt, Homo sapiens
gggaaaaagggacgggcggacaggcggacaaggacaccgcgaaaggcagcaccacagcaccacag

SEQ ID NO: 10376 - RNA, 73 nt, Homo sapiens
acaaagcagcaggccgaagcgacaaaaaggccggagagccacagcaaacgggcagaaggaccagggagaagac

SEQ ID NO: 10377 - RNA, 70 nt, Homo sapiens
agacaggagccaaaagaagaagaaagacgaacaaggacaaaagacagcacacggagcgcgaagaaacaca

SEQ ID NO: 10378 - RNA, 55 nt, Homo sapiens
ccacagcaaaaaaaagaaacaaagacagcacagaaaacagaagcaggggcaaaag

SEQ ID NO: 10379 - RNA, 72 nt, Homo sapiens
gaaagagaagagacaaggcagagaggcaggaagaacaacgacgccaaggacggaggggggaggagcaggccc

SEQ ID NO: 10380 - RNA, 62 nt, Homo sapiens
gacacagcggccgagagaccggacccacaaaccgggagaccaagaacggcacacggacggag

SEQ ID NO: 10381 - RNA, 72 nt, Homo sapiens
caaagaggcggcagggaccagcagacgggaagcacagggaacaccagaggcgggaccacgggcagcgcccag

SEQ ID NO: 10382 - RNA, 72 nt, Homo sapiens
gaaccccagaccaagggagggccagagccaagaaaaaagacagccaaacccgggccaaggacccgcccagcc

SEQ ID NO: 10383 - RNA, 74 nt, Homo sapiens
agaaacgaagacagacaccaaaaggcaaaaacaaccaggcagagagacaagcaggagcgaagcaggacaacaag

SEQ ID NO: 10384 - RNA, 80 nt, Homo sapiens
acaagcccggccgcccagaaaggcccgacaccaaccccacgcccagcgcaggagaagccgcgggagcggaagacaggccc

SEQ ID NO: 10385 - RNA, 67 nt, Homo sapiens
caggccgcagacgcgaaggaacggcaaagggggaaaccacaccacccgccacagacagggaggagga

SEQ ID NO: 10386 - RNA, 63 nt, Homo sapiens
gagaccggcacccagacaggggcgaaggcagaggaacggaggcaccgggggaagcacccgccg

SEQ ID NO: 10387 - RNA, 57 nt, Homo sapiens
cagggacggcggggaacggccgaaaggcgcgcgaacacaaaggcgcgagggaccaac

SEQ ID NO: 10388 - RNA, 112 nt, Homo sapiens
agacgaggcgagggaggcagcagaccgcacaaccccagaagcgcgcccgggagggcagagcacaccgaacacccccgccaaaacccgcggagcaaacaaaaccggccaaccc

SEQ ID NO: 10389 - RNA, 75 nt, Homo sapiens
gcaggacagccaaaccagagcagggacggggggaaaagcgcacccgggcccgggcgagaaagaagacaccaaagg

SEQ ID NO: 10390 - RNA, 92 nt, Homo sapiens
aagacgggccgagaagcagcgcgagaggacgggaggggcaagcgcggccaaccaaggccaagagcgagcggaagaagaagagccggccgcgc

SEQ ID NO: 10391 - RNA, 77 nt, Homo sapiens
ggcaagcaccaaggaggccgcaaaaagaacgaggaagccggaagggaggaagacaaccacagcagaccagccgaaag

SEQ ID NO: 10392 - RNA, 58 nt, Homo sapiens
gcggcaggccaggggaccgcccaaggaaaggcccaggcacagcagacgcacggaggcg

SEQ ID NO: 10393 - RNA, 105 nt, Homo sapiens
ggagcccgcgcccgccgcgggagagaggacccccccccccccccaagaagacgaccccgacgcaggccaggagccgcggacagaagccgagcacggccgagacaa

SEQ ID NO: 10394 - RNA, 62 nt, Homo sapiens
agaagcggggcggagagaaggcagaaggagagcaggggccaggagggccgaagcccacagcg

SEQ ID NO: 10395 - RNA, 69 nt, Homo sapiens
cagccagcgggaagggaggaagcacgcagaggcagagcagaagccagaagacgcccggcgcgcggacgg

SEQ ID NO: 10396 - RNA, 72 nt, Homo sapiens
gccaccgcagcacgcccaggggcgcgggaaggacaacagccccaaaggcaagcccacaggaaagaaccccag

SEQ ID NO: 10397 - RNA, 88 nt, Homo sapiens
ccgcccccgccgggacgccccgcgccgagccggaggccgcgggacccgaaagccgcgggaaaaaacaccagcaggaaaaaagagcggc

SEQ ID NO: 10398 - RNA, 78 nt, Homo sapiens
ccccgagaccgccgcgccggacgcccgccggcgggccgcccaggggccggcgccagggagcggcgacagacacgggaa

SEQ ID NO: 10399 - RNA, 74 nt, Homo sapiens
gggcaccacagaaaaggcgcggaccgagacaagaacgcgcagggcagaagaaaccgcgaggccaagcacacacc

SEQ ID NO: 10400 - RNA, 73 nt, Homo sapiens
caagagcagccagaggaccacgacaagagagagcccacccaggacggagaaagaacaccgggcagagaacggc

SEQ ID NO: 10401 - RNA, 75 nt, Homo sapiens
caggaggggaaacaccagggcagcggcagaaagacccggcaagggcaacaaaccaggaccccccgaggaaaggga

SEQ ID NO: 10402 - RNA, 109 nt, Homo sapiens
ggggccggcccaagcaagagcgacgcaagaggcagccaccacgggccgggcggagccccccccaagggcgagcagcggccggacaagaaggccaagaaccgcgaggaca

SEQ ID NO: 10403 - RNA, 71 nt, Homo sapiens
aagaacccggacacggagacggggccacacaacaccgcagaccaccagcacccggaaaggcagcggacaga

SEQ ID NO: 10404 - RNA, 73 nt, Homo sapiens
gagacagacaaagcagccaggggccaagaacaggagccccccagcgaagcagcccagacgaagacagggagac

SEQ ID NO: 10405 - RNA, 59 nt, Homo sapiens
ccgggagggcgcgagaccaaagggcggcacggccccaccacagaggggaggagacggga

SEQ ID NO: 10406 - RNA, 59 nt, Homo sapiens
aacgggaacccccaaagaaggaggagacgagcaagcgccacaggagccgcagaagcaaa

SEQ ID NO: 10407 - RNA, 77 nt, Homo sapiens
agacccacccgcgacccggacccggaccagccgaaaagccccgcccgcccggaaggaacacagcacccacccacacc

SEQ ID NO: 10408 - RNA, 54 nt, Homo sapiens
cggccgaaacagaaaacaagagaccacagaagaacccaagaaggcagaagccag

SEQ ID NO: 10409 - RNA, 75 nt, Homo sapiens
aacgcggagcggcgaagagcaaccaggaggcagcacggcaggagacgaggagaggacagcaggacacccggaccc

SEQ ID NO: 10410 - RNA, 88 nt, Homo sapiens
aggagccgggaaccgggacgcgagcgggagagagacgaggaaagaaggaagcagcgaagcagggaggaagaggcaaccaggcccaaag

SEQ ID NO: 10411 - RNA, 45 nt, Homo sapiens
gcccacaggaggaccaaagggggcagggcccagcaccagagggcc

SEQ ID NO: 10412 - RNA, 71 nt, Homo sapiens
acccgccccgggggccggagaacaaaaggaaccgccagggcggaagggaaagaagagaacgaaacaagcca

SEQ ID NO: 10413 - RNA, 83 nt, Homo sapiens
cagcgggagcggacggcgagcgcgagcggcgcgagaaaagccggcagcgcccgagggagcaaggagaagagcggaacccagac

SEQ ID NO: 10414 - RNA, 58 nt, Homo sapiens
agacccggcccagccggcaggggcggaggagcgagccggagaccagcgcccacaggcg

SEQ ID NO: 10415 - RNA, 52 nt, Homo sapiens
agccggacgcccacaaagacgggccaacgcacggcccggcagagccagcacc

SEQ ID NO: 10416 - RNA, 69 nt, Homo sapiens
agaaaccggacgcagaaagagagaacgagacaggggcaaagaagagaccgaaccaagccgaagaacaga

SEQ ID NO: 10417 - RNA, 73 nt, Homo sapiens
gccgcggagaccccgcggcccggcagggggaacgggagggggcacccaggccacagaggaggaaagagagggg

SEQ ID NO: 10418 - RNA, 63 nt, Homo sapiens
gccagcccaggaaaaggagagaccacggggaacacagaacagaagacgaaaaccagcccagac

SEQ ID NO: 10419 - RNA, 83 nt, Homo sapiens
gcgaaagaaagggccgcccccccacaccagaacaggacaccagcaggaaaacacgggccccagaaacaaggaaagggcaggcc

SEQ ID NO: 10420 - RNA, 62 nt, Homo sapiens
gggcagccccgcccggacaggacagcccagagcaagcacacggaggcccgggagccagaccg

SEQ ID NO: 10421 - RNA, 76 nt, Homo sapiens
acgaagaacccacagagacgcccggcaagaggggagagcccggaacaggacagggggaggagaagccacgagcccg

SEQ ID NO: 10422 - RNA, 84 nt, Homo sapiens
cgccggaggccacgcaagcacaagacccagagcagccgggaagggacccggcaaagagagaggcacacgccgccgaaggccagg

SEQ ID NO: 10423 - RNA, 54 nt, Homo sapiens
ggcgaagccacaaaggaaaaggaggcaccgcgaaacaggaagaggaacgccgga

SEQ ID NO: 10424 - RNA, 74 nt, Homo sapiens
ccggccggccgggcggcgagccgagcgaggcagccgagccgcgcgggaaggaaggaacagagaagacccgcccc

SEQ ID NO: 10425 - RNA, 64 nt, Homo sapiens
caggacgaccagcgggaggccagaggaaggaagagagaagaagcaaaccgggaccggaagcacc

SEQ ID NO: 10426 - RNA, 81 nt, Homo sapiens
gagccgaggcagaagacggggcccgggaccacaggccccggcccagaggggaaagcaggggagaaaagaaaagaaagacgg

SEQ ID NO: 10427 - RNA, 83 nt, Homo sapiens
cgagcccgccgcgcgggcccgcccgacgcggaagcccgacgccgccgcaggaagagggaagcggaggcggagcgcgcggggca

SEQ ID NO: 10428 - RNA, 80 nt, Homo sapiens
gccgcagccacgagccagcgaggagaacagccgaaaggcggggacgggccggcccgcggaaggaagagaccgagaccagg

SEQ ID NO: 10429 - RNA, 76 nt, Homo sapiens
ggcggcccagcgggcgagacggaggaggacaagagacacgcaaaccaaggcgacggaaggcagccaaaaaaacaga

SEQ ID NO: 10430 - RNA, 84 nt, Homo sapiens
ggaaaggaggaagaagacaccggggacagacaggccccacacaaggagagcaagcagggagggcccacgaaggacagagaagaa

SEQ ID NO: 10431 - RNA, 57 nt, Homo sapiens
cccgcgcgaccgcagggcgcccggcaaggcagagcgaaggaaaaccagagaaaaaag

SEQ ID NO: 10432 - RNA, 74 nt, Homo sapiens
cacaccagccgcacgcgcgggacggagccagcgggaaggaggcccaaagcccagccaaggacccgaaaaacgag

SEQ ID NO: 10433 - RNA, 67 nt, Homo sapiens
accaagacagagcaccaggaaaaggccaaggaccccgacggagagacaaagaagacggagggggggc

SEQ ID NO: 10434 - RNA, 75 nt, Homo sapiens
cacgggcgccggcaagacaagaggcagccagcggacggacgaaaacaccgacagaaaaaaaagccagggaaggag

SEQ ID NO: 10435 - RNA, 80 nt, Homo sapiens
acccccagcgagccagcggagcgcgggccggaaacaaagaaacgagcaaaccagggaccggaaagcaaggaacaacgcag

SEQ ID NO: 10436 - RNA, 62 nt, Homo sapiens
gccaaccccagcaaaaagcccgcaacaagaagcagggacaccacaccgaggggccagacccc

SEQ ID NO: 10437 - RNA, 80 nt, Homo sapiens
ggaaccagagcaaagaagaaaccggccagaaacagccagagaagggcgaagaggaagccaaggaggagaaggaagaagca

SEQ ID NO: 10438 - RNA, 74 nt, Homo sapiens
agaaggagcaaaaggcggacaggcagagccagcgggccggcaccggcacgaggagcgcacacccgcccagccaa

SEQ ID NO: 10439 - RNA, 75 nt, Homo sapiens
agcaacagagaagagcgggaagacggaaccgagccaaagaccacgggggccaaacaccaggagaagggcgagcca

SEQ ID NO: 10440 - RNA, 90 nt, Homo sapiens
agcaaagaagcgggagaagccggaaggcaccgagaagacgccaaagcgccgccaccgcaacaccgcccagcgccaggagacaggacagcc

SEQ ID NO: 10441 - RNA, 78 nt, Homo sapiens
cgcccggacgggccgaccgaggaacggcagcagcggcccaagagggaagaaaacaaagaaccgaacagagaccgagac

SEQ ID NO: 10442 - RNA, 76 nt, Homo sapiens
agaaaaagaggcccccccccccgcgacggaagaaggagaaagacaaagccccgagaaagaccagcaccgccgaaaa

SEQ ID NO: 10443 - RNA, 85 nt, Homo sapiens
gagcaggggggcccagcagggcaccacacagagaggccagagaagcaaaagaaacaaggcaagacggaagcaagaagaaaagcaa

SEQ ID NO: 10444 - RNA, 53 nt, Homo sapiens
cacaggagggagcaggaaaaaggcggagaggaagaaaagcaacagggcacggc

SEQ ID NO: 10445 - RNA, 68 nt, Homo sapiens
acgagaaaaaagagcgacaccgccagccccaacgagcaagggacgccgagggaaaggggaccaccgac

SEQ ID NO: 10446 - RNA, 77 nt, Homo sapiens
cagcgaacaagcgggagcaaggagggcgaagagcgaggaggcaagaacggaagcacgggcggaggaaagcacaagca

SEQ ID NO: 10447 - RNA, 70 nt, Homo sapiens
gccggaccagaccggggggaaaggcggaaggaaacaccagccgggaagagccaccaggcagcgacgacgc

SEQ ID NO: 10448 - RNA, 73 nt, Homo sapiens
ggcgcgccggaccagagcccgggaacgccagagaagacaaggggacggcagcccaaagaaaacccagaggccc

SEQ ID NO: 10449 - RNA, 69 nt, Homo sapiens
agacgacgcaccgcaggcagacaaaagggccaaagaagggagagaggaaaaaaggagcagaaggaccgg

SEQ ID NO: 10450 - RNA, 68 nt, Homo sapiens
gaggcagcggaaggagacaagcggaggccaggaacaaaaccggagaccgggcccaaacaacaagaaga

SEQ ID NO: 10451 - RNA, 80 nt, Homo sapiens
caacaagcgggaaggcgaacgcggcgcaagcgacgagggccccgcacagcgcagccaggggcgaggaccacggcgcccag

SEQ ID NO: 10452 - RNA, 62 nt, Homo sapiens
aaagccggaggaacccgaacccaaaccgagccaaacaccaagaggggggcagagagccgggc

SEQ ID NO: 10453 - RNA, 38 nt, Homo sapiens
cagaacgccggagggaagccagccccaacggaaacgac

SEQ ID NO: 10454 - RNA, 76 nt, Homo sapiens
ccagcgccccagacgcccgggccggcggcgaagccccgcagcaagaggagccaggagcacggggggaacaagaccg

SEQ ID NO: 10455 - RNA, 75 nt, Homo sapiens
cagaagaaccagcgacagacgacagcaaacaaacgccagaccagcgacccgagacagcagagccccgagaggggc

SEQ ID NO: 10456 - RNA, 76 nt, Homo sapiens
aacacacaacagaagggaaggggaaggagaccacaaagacagagaggacacagaaagaggagccaaggaagagaag

SEQ ID NO: 10457 - RNA, 59 nt, Homo sapiens
gaagggagaagcaagaggacacgaagacacagacgacacggacaggccaggcccacggc

SEQ ID NO: 10458 - RNA, 83 nt, Homo sapiens
ccgccgagccagcgccggccgcgcgccgcgcccgcgccacagaaaacccaagagaccaacaaaagacaaacaaaagcacacag

SEQ ID NO: 10459 - RNA, 86 nt, Homo sapiens
cgggacccagccaggcagaccccgggcagcagggacacgagacagggacaggggcggaggagcccacacaccccacagcaagccca

SEQ ID NO: 10460 - RNA, 78 nt, Homo sapiens
acacaacgccccgacgcgcccgccccgcaggccaacacgggagccccgacaagggaccgggcgggccccgcaggaaac

SEQ ID NO: 10461 - RNA, 63 nt, Homo sapiens
ggcagaagagaagcaggaaggaggcagaggcacaccgaaagacgaaaaggggaaaggagaaag

SEQ ID NO: 10462 - RNA, 72 nt, Homo sapiens
accagcaccggaggaaccgcaccgccagaacaaaacaaccggaacagacgggagggcgccagcaagacaaaa

SEQ ID NO: 10463 - RNA, 78 nt, Homo sapiens
cgagggacggggacggagagaacacgagcccacaggcggcggccggggcagcgccgcgagccagcaacgggggaaggc

SEQ ID NO: 10464 - RNA, 83 nt, Homo sapiens
cgaacagaaaacccgcccccagcgggaggaaggacccggggaggccggccacgccccgcacggcagaccgccaggccgcaggg

SEQ ID NO: 10465 - RNA, 77 nt, Homo sapiens
aggaacgaccaagcaaaaaccagccgggacagaccggagcggggaggagcgccggccgaaacgagcgggcgggcggg

SEQ ID NO: 10466 - RNA, 82 nt, Homo sapiens
cagcgcccggcgccgcgcgccacccccgaaaccagacgccgggcccccagcaggcagccccacggaggggaaaggccaagga

SEQ ID NO: 10467 - RNA, 47 nt, Homo sapiens
gaaaaccccagcgaaacaccaagaggggacgaagcggggaacgcacc

SEQ ID NO: 10468 - RNA, 74 nt, Homo sapiens
cgaacccggaggaggcgaccgcggcgcagcgacccccgccaggcaaaaggaaggccacaccaccacaggaggca

SEQ ID NO: 10469 - RNA, 80 nt, Homo sapiens
cggcgggaccgggcggcacgcacgcgggcagggaacaggcggagcggaaggaaacgagggaaagagcacggaccgcggaa

SEQ ID NO: 10470 - RNA, 80 nt, Homo sapiens
ccggagacagccccacagccccgagaccggacgcccagacaggcgcccagccccgccacagccccacccccgaaaagcgc

SEQ ID NO: 10471 - RNA, 54 nt, Homo sapiens
gcaggggcagaaacagagaaggaacaggggccccaggcaagcacgaagagggca

SEQ ID NO: 10472 - RNA, 55 nt, Homo sapiens
cgaaacccaagggcggggaaaggcagcggcaagagagaggaccagaaccagaccg

SEQ ID NO: 10473 - RNA, 59 nt, Homo sapiens
cgccgaccggagcagcaaggcaaacgaaacgaaccaaaggacgcagacacaccaaggaa

SEQ ID NO: 10474 - RNA, 72 nt, Homo sapiens
cacccaggcccgacaaaagagcccaaagggcacgcaaaaagaacagaggaacccaaggaagcgccgaagccg

SEQ ID NO: 10475 - RNA, 80 nt, Homo sapiens
ggaccaagaggcgccgccccccagcaaacgagaaaaacccagcgaccgacgaccgcaacgagagacagcagggaggaaac

SEQ ID NO: 10476 - RNA, 57 nt, Homo sapiens
caacaagccaaagaagaagggacacgaagccagcaagcaacgaggaacacacccgac

SEQ ID NO: 10477 - RNA, 79 nt, Homo sapiens
cgaggcggcggcccggaaggagcgggaagggccagaagcccccaggaggagaacgagcaacggaagccagaagaagcac

SEQ ID NO: 10478 - RNA, 97 nt, Homo sapiens
gggaggagggccacgcaccgacagagcccagaagaggggggccgcagcgagccccggcaggccgccaagggggcgggccgccccgggccggacgggg

SEQ ID NO: 10479 - RNA, 79 nt, Homo sapiens
ccaccagaccgggagccggccccgggaaagaagaacgccagaaaaaaaccagaaaaaaggagagaagaaaggcacagag

SEQ ID NO: 10480 - RNA, 73 nt, Homo sapiens
acgacggcaacgggacagcacgagggggaagggcccggagaacacagcgcaagaaagcaggggcgaggggcac

SEQ ID NO: 10481 - RNA, 83 nt, Homo sapiens
ccgccagcacaagaggagacacaccccgacggcagccagacgggaagaagggagagggggaccccacccgaggagcagagagc

SEQ ID NO: 10482 - RNA, 73 nt, Homo sapiens
cgagacaggaagcagagggcagggggcaaacaagccgaccggaaaaagggcagggcaaagacgggcagaggac

SEQ ID NO: 10483 - RNA, 78 nt, Homo sapiens
acccaaggcaaaggcggcaggcacagaggcaaggcgagcagcgcgcaaagagagaaggcgggaccaagaagaaagaaa

SEQ ID NO: 10484 - RNA, 72 nt, Homo sapiens
cccgcccaggagaaagccagggggaaaccgagggggccgcaaggccaggcgcgcagaggcacccaacggcac

SEQ ID NO: 10485 - RNA, 66 nt, Homo sapiens
acaaggaccgaaacagaaacggaacaccaagggaaacacaaagaagacaccagaagggccagcacc

SEQ ID NO: 10486 - RNA, 78 nt, Homo sapiens
acgcgggccgaggagagcggaggaggggaacaacaagaaggagaaagacacaacgacagaagaaaaaacacaagaaaa

SEQ ID NO: 10487 - RNA, 74 nt, Homo sapiens
ccacagggagggggccaagcaccccaggagagaagcagaagagggagaagacagaggagccagaccaagagaca

SEQ ID NO: 10488 - RNA, 83 nt, Homo sapiens
aaaaacaacaaggccaccaaacgagagcagccaacggcagaggggaggagacacgaagcgacgcagagccagaagggaggcag

SEQ ID NO: 10489 - RNA, 73 nt, Homo sapiens
agcaccgaacaaacaaccgcaggggaagaaacccgaaggcgggcccaagaggcccagagcagcgggaggagaa

SEQ ID NO: 10490 - RNA, 66 nt, Homo sapiens
aggggcgaaccacggaaaggaggaagaagacaccggggacagacaggaaaggaagcacgcgcgcgg

SEQ ID NO: 10491 - RNA, 75 nt, Homo sapiens
ggcaaaagaccaagagcacagcagaagagaaacagcacccaggacacccaaagagcggaaccaaagaaacccagc

SEQ ID NO: 10492 - RNA, 79 nt, Homo sapiens
cagccgcgcccaggccgcagcagcaggcaggaccaacagcaggaaggagcgaacagacaaccagcaccgaagaaaacca

SEQ ID NO: 10493 - RNA, 78 nt, Homo sapiens
agccagcccacacaagcagacaaccaagggaccaagaaaggcccagggaccaaagcccggacaaggcccgagcaccag

SEQ ID NO: 10494 - RNA, 85 nt, Homo sapiens
ccccccagccccaccaccccgccgaagcccagccccgagcccagcagggaaagggagcagcaccggccacacccacagcacgacc

SEQ ID NO: 10495 - RNA, 69 nt, Homo sapiens
acaaccggaacccagcaggggggaaagagcggcaagcaagaccaaacaccaaagaaaggaaaacaaaac

SEQ ID NO: 10496 - RNA, 66 nt, Homo sapiens
gaagcaaaccggcggaaccccaaagacccacaaaggacaggacaaagcgggagggggcaaccgcgc

SEQ ID NO: 10497 - RNA, 63 nt, Homo sapiens
cgccgggcagggaggggagccgggccaggacacggaggagaaaggccaggcgagaagacgagc

SEQ ID NO: 10498 - RNA, 81 nt, Homo sapiens
cgcgaccgcgggcccgcccgggcggaacgacccggaacaaacaaagccaggcaggaggaacaaagaaacccagagacagca

SEQ ID NO: 10499 - RNA, 52 nt, Homo sapiens
gcacacaacaaacagaacgcaaagaaaccccaccacgcggcaggggccgccg

SEQ ID NO: 10500 - RNA, 73 nt, Homo sapiens
ggcgccacgaaagccggccacgccgggccggagccgggacggagggaggggcaggaagaacacgcggggaaga

SEQ ID NO: 10501 - RNA, 79 nt, Homo sapiens
gggcaggaaccaccgcccaaaggaccgacagcccccaggaaggaggcggcggccgcgagagcccagccgccgggcaggg

SEQ ID NO: 10502 - RNA, 70 nt, Homo sapiens
cggaacacacagcaagccgccgggacagccacgacggcacgcaaggcagggccaaagacaggaaaagcgc

SEQ ID NO: 10503 - RNA, 37 nt, Homo sapiens
aaggcaccgcagagccaagaagagaacacgcccacaa

SEQ ID NO: 10504 - RNA, 77 nt, Homo sapiens
agcggcggcgggggcacagccagggcggcagacaaagagccagcaggggcagcaaaggagcggaagccgcaggccaa

SEQ ID NO: 10505 - RNA, 76 nt, Homo sapiens
gaccaagccgacccaccacacaagacggaaaaagcgacggagcccccccccgggaaccagcaccgcagagggcggg

SEQ ID NO: 10506 - RNA, 89 nt, Homo sapiens
cgggccgcaggccgcgagcagcggacgccggccgccgcaggagagcagagaaagggggaggcggacccggcaacacgaaccggaaagcc

SEQ ID NO: 10507 - RNA, 77 nt, Homo sapiens
gcgggacccacgacaaccaggggcacgagagacggcaggagggcggccagaccgaacccagaaacagagggaggaag

SEQ ID NO: 10508 - RNA, 68 nt, Homo sapiens
ggccgaggaccccccaggaggaagcccgacagaaaagggaaggagccgagacggaagcacgcaacagg

SEQ ID NO: 10509 - RNA, 65 nt, Homo sapiens
gcaggcagacaaaagggccaaagaagggagagagaggcgcggggccgagaggccgccgggacggc

SEQ ID NO: 10510 - RNA, 81 nt, Homo sapiens
gcggcacccgccggaggggcgcaggggcgggggagcaccacccaggaggcccagggagaaaaggaggccggacagagaagg

SEQ ID NO: 10511 - RNA, 75 nt, Homo sapiens
gagagagcccgcaggagcagaagaagccaaaaacacggcagagccccgagaggggcgcgcagaaacgggaagaaa

SEQ ID NO: 10512 - RNA, 60 nt, Homo sapiens
cgaaaggaggccccgccggggacccgaaaaaaaaggggcggagaacggaaaagcaccagg

SEQ ID NO: 10513 - RNA, 44 nt, Homo sapiens
ggggagcaggaggcgacaagaggcccagacgagaggaaacgaac

SEQ ID NO: 10514 - RNA, 74 nt, Homo sapiens
ccaggccaggagaggaagaaacacccacagcacgcaggggacccaaggacagggaagaagagaagcccggaacc

SEQ ID NO: 10515 - RNA, 91 nt, Homo sapiens
cggcccagcgccggaggccggcagagccagcagccacccccgcccagccaacaccccccaggcccaagggggacgcggcccgaagagcggg

SEQ ID NO: 10516 - RNA, 81 nt, Homo sapiens
gaaaccgcacaaaccacgcccaagcagcaggggccgaaggggacagaaggagacggaacgcacagaggaacgagcgagcgg

SEQ ID NO: 10517 - RNA, 77 nt, Homo sapiens
gcggccagaggcacccgagcccgagagccgccgccaacgcgcagggcagcggcccccgcccgcagcacgcagaagcc

SEQ ID NO: 10518 - RNA, 83 nt, Homo sapiens
cggggacgacccccagagcggggagcgccccagagaggggaaccccacgcagaacgcagggccaacgggccaacgccggcagg

SEQ ID NO: 10519 - RNA, 70 nt, Homo sapiens
agcaacagaaaaggagagcccaagaagagaccgacccaaacccacccaagggcaggacgggaagcaggcg

SEQ ID NO: 10520 - RNA, 81 nt, Homo sapiens
gcggacgagcggagaaggccacaccacgcagaacgcaacaccaaggcacaccaccccaggcacgaagagccaggacaaacc

SEQ ID NO: 10521 - RNA, 106 nt, Homo sapiens
ccccggcagcaaggagaagacccgggaggggagaaagacagcgggcccccagcaggagcaggacccaaggaggccaagaccgggaagagggacaagcagacgccag

SEQ ID NO: 10522 - RNA, 73 nt, Homo sapiens
gaggaggagaaggggaggagacggaagccggaccagggggacagggaagggcgggaccacaggaaagcccggg

SEQ ID NO: 10523 - RNA, 82 nt, Homo sapiens
ggacggggcagcacggacgagaagaaggcccaggcccaggcccaaggccaaggagagagcccaggccacaggacagcgccac

SEQ ID NO: 10524 - RNA, 72 nt, Homo sapiens
gaaaggaagaaggaaaacagccagcaagaccgccgaagaggccagaaagcaccaaggacaagaaggcagcgg

SEQ ID NO: 10525 - RNA, 76 nt, Homo sapiens
cgccacccagcacaaccaagacccccgggaccaggaacggcaagggcaccagcaacggaaagagaagggagggcga

SEQ ID NO: 10526 - RNA, 58 nt, Homo sapiens
cgcacccccgcgacacagaagcggcaaggagagcagaagacacacaaggaaagccaag

SEQ ID NO: 10527 - RNA, 95 nt, Homo sapiens
gcgcgaaagcgcaggccccgaggacccgccgcacgacaggggagccagaaggaccagcagggccggcaacaccccaacacgggcagaggacggag

SEQ ID NO: 10528 - RNA, 66 nt, Homo sapiens
gagcagcccagggagcgggagacagacagaagacaggagccagagggacgggcagcaaaaagacca

SEQ ID NO: 10529 - RNA, 54 nt, Homo sapiens
gagaaaccagcccggacagcgcaccccacgcggccggccacgagggcacagaac

SEQ ID NO: 10530 - RNA, 108 nt, Homo sapiens
caaaagcccaggaacaagccaggagggcaaagaaacccgggagccaaagaacagaagggaaaaggccgaggcacagcgggaagaccgcaaagacgacccgagacaggg

SEQ ID NO: 10531 - RNA, 60 nt, Homo sapiens
cgcagcgagcccgagcggcagcgccggagagaggaaacgagacccagaaaggggaagcac

SEQ ID NO: 10532 - RNA, 81 nt, Homo sapiens
accgagaccggaccgagagcggaccgagagcgcgaaacgcacgagaagggcccggcaggaaccggaacaacccacagggca

SEQ ID NO: 10533 - RNA, 73 nt, Homo sapiens
gaaccaacaaggggagcgggggcgacagcgcccggcacaagcccaggggagccgccaccaaaagcagacggaa

SEQ ID NO: 10534 - RNA, 52 nt, Homo sapiens
ggaaacacggggcaaaaaccagaagaaaagagaacacacacggagagcacca

SEQ ID NO: 10535 - RNA, 85 nt, Homo sapiens
ccagcccccgagggcgggacacagcacacggacccgacaccggcgccagcgcaagaaacgagcagaagaggaacaagggggggaa

SEQ ID NO: 10536 - RNA, 80 nt, Homo sapiens
cgccaccccgcggccgcacccccgccccaggagaccggacgcgggacacaagaaaaaacccggaacaaggaaccggaagg

SEQ ID NO: 10537 - RNA, 67 nt, Homo sapiens
gaaggaccaagaaccagagcaaccaaaggaaagggggcgaacgagaagagccccggaaaacagaacc

SEQ ID NO: 10538 - RNA, 40 nt, Homo sapiens
caccgaacccgacccgaacaggacaagagaagccacaccg

SEQ ID NO: 10539 - RNA, 111 nt, Homo sapiens
accccaaagaagaacaaaccggggacccacgggccaaaaagcacagaagagacagaccaggagaagagggaaagacaagcaggagaacaacgaccccccccagggacagcc

SEQ ID NO: 10540 - RNA, 64 nt, Homo sapiens
aaggcaagccccggacaggccagaaggaccggggaaaaagagaacccgagaaagcgaagccggc

SEQ ID NO: 10541 - RNA, 73 nt, Homo sapiens
cagacgcagggcgcccccgacaaaacaacgagggcagaaccagagaggggagaggcccgcaaaccagccacag

SEQ ID NO: 10542 - RNA, 37 nt, Homo sapiens
aagacacgccacaaccggagccggcacaggacccaaa

SEQ ID NO: 10543 - RNA, 72 nt, Homo sapiens
caaaacgcggggaaaaggaaacggagcagccccaaaggccaagaaaaggagcccaaaagaaacagggcgcag

SEQ ID NO: 10544 - RNA, 78 nt, Homo sapiens
cgagcccaggagcgccacgcgcggaaggcagcgcccagcagcgcagggcgaagcggccaggcccgggcggacgcagag

SEQ ID NO: 10545 - RNA, 71 nt, Homo sapiens
ccagcgacgcaccgagaaaggaaggaaaaccgacgacccgggcaaagcgccgcagaagcccacgaaaggga

SEQ ID NO: 10546 - RNA, 62 nt, Homo sapiens
aaagggccaaagaagggagagaggggaggacacaaccccagagagcggaacgagcaacaaac

SEQ ID NO: 10547 - RNA, 81 nt, Homo sapiens
cccacaggggggggcaaacccgagagaacgggccgcgccagaagggaagaaaggcggaacggcgggccacggccgggggcc

SEQ ID NO: 10548 - RNA, 42 nt, Homo sapiens
acacagcaacggacaaaggacccccagcacggggccccccaa

SEQ ID NO: 10549 - RNA, 77 nt, Homo sapiens
cggcccacagcaggacggaagcgagggcacgggcggcagcccgagaccgcagcaggagaccggaaaccgagagaaac

SEQ ID NO: 10550 - RNA, 36 nt, Homo sapiens
acacaaaggacggaggcacgccggccccgggcgaag

SEQ ID NO: 10551 - RNA, 70 nt, Homo sapiens
caccagacggagcggagaacgggacaacccccgggggcgagcaccagcacaacaaggagaccaagaaccc

SEQ ID NO: 10552 - RNA, 72 nt, Homo sapiens
agcgcccaagaagaaccgaagagacagcccgcacggaccgggaagagaaaagaggggggaaccgaagagcaa

SEQ ID NO: 10553 - RNA, 74 nt, Homo sapiens
ccgcagcgaaaacgggaagcagcagaaaaagccgagccgaaggacaaggagacccccacccagaagaccagcgg

SEQ ID NO: 10554 - RNA, 90 nt, Homo sapiens
gcaggaaccggggagagggcagggggaccgaaggagaagaaggagaaggggaggagaaggcaagccggaaagagcgaaagaaagaagggg

SEQ ID NO: 10555 - RNA, 71 nt, Homo sapiens
ccaaagcgcacccagaagacaaacggaacacacacagaccccacaagcagacgaaaagggaggaggaagaa

SEQ ID NO: 10556 - RNA, 71 nt, Homo sapiens
gaggcgagagaaacccagccgaagcaaaaaggcacaacccaagacaagcagccagggaagccgggcagacg

SEQ ID NO: 10557 - RNA, 73 nt, Homo sapiens
agaccccaaaggcacccgcgagcgcaacccaagaagaccacgggccaaaccaacgcgcaaccgggcaggagac

SEQ ID NO: 10558 - RNA, 61 nt, Homo sapiens
aggaggccgagagagaggccggagcccaccaagcgggaaggcaagaagggcggggagacag

SEQ ID NO: 10559 - RNA, 80 nt, Homo sapiens
ccaggcgacaggggaacagacagaaggagcaggaaccaaaggaaaggacgagaccgaagagaaggaaggacagcgagaga

SEQ ID NO: 10560 - RNA, 58 nt, Homo sapiens
cgagaagacaagcgccagaggagcgcaaaccacggaacgaaagcggcacggagaagaa

SEQ ID NO: 10561 - RNA, 74 nt, Homo sapiens
cccgaggaccacaggcggaaaaaaggaaagggagggcagaggcggaggagggaaaccaagagaccacaaaaaaa

SEQ ID NO: 10562 - RNA, 47 nt, Homo sapiens
ccaccccaacgccgcagaggggccacaaaccaagaacccgccacaag

SEQ ID NO: 10563 - RNA, 60 nt, Homo sapiens
gaacaaccacgccacggggacaagacaagccgggaagacaagcagaccccccagaggggc

SEQ ID NO: 10564 - RNA, 68 nt, Homo sapiens
gcaaagcagacggggacagaaagaaggacccagagcaaaaagaggcccgggcggaaaaacaacgaaag

SEQ ID NO: 10565 - RNA, 77 nt, Homo sapiens
gaggccacccccggcgggcccgaggcggcgagagaggcaggcggagccgaccgggccagagccacagaagcgaaggc

SEQ ID NO: 10566 - RNA, 71 nt, Homo sapiens
aaggggcccacccaagaagaaggcgccgagccggacgacgaagccccccccacgagcgacggcacaaggac

SEQ ID NO: 10567 - RNA, 73 nt, Homo sapiens
ccaggggagagagaagaaccgagcaggacgaaaggaacccgggggaccagcaggcggcggccgacgcgcagca

SEQ ID NO: 10568 - RNA, 57 nt, Homo sapiens
ggccgagaaggcagaggcgggcccaagaggaagcagaggcagacccagggagacggc

SEQ ID NO: 10569 - RNA, 75 nt, Homo sapiens
acaaaagagaggcagaaaccacagaggaaaagggaaaaggaaaccagaagagggacgaagaaaacagcgcagcgc

SEQ ID NO: 10570 - RNA, 96 nt, Homo sapiens
gcggcggcagcgggccagacccaggaccgcgacacgccaaaacagaagaggcaaagcccagccacagcagcagcccagcagcaaacaaccaaagag

SEQ ID NO: 10571 - RNA, 64 nt, Homo sapiens
caggaccgggacacagaaaagaccggaccaacaagaggaaaagggagaaccaacaaagagggca

SEQ ID NO: 10572 - RNA, 68 nt, Homo sapiens
caaggggccagcgacaacccccagaagagaccaacgccaccaaccaaccgaagcgcacaccacaacag

SEQ ID NO: 10573 - RNA, 77 nt, Homo sapiens
ccccaaaggacacgacgcccccaagaagccacacgccaccagaaagcaacagcagaggccgagggagcaacaagagc

SEQ ID NO: 10574 - RNA, 77 nt, Homo sapiens
gcccgagcaccccgagcagccggccgccagccgggagaagacacgcgccgcgcgccgggagaggcccggggcccgcc

SEQ ID NO: 10575 - RNA, 80 nt, Homo sapiens
cgagccccagcgccgcgccgggccagccacccaaggaccacggacgcgccacacggagagcaaggaggagccgccgcgcc

SEQ ID NO: 10576 - RNA, 69 nt, Homo sapiens
ccaggacagcggagcaggccaggccgagcacgggcacgcaggcagcggggggccgcaccagcccagaca

SEQ ID NO: 10577 - RNA, 73 nt, Homo sapiens
aaagcaggcaccaaggacagagcaggaccaaaagaagcaaaaacgcggcagaacggaggcaggcagcacgaga

SEQ ID NO: 10578 - RNA, 74 nt, Homo sapiens
cggggaccaccgccccagcagacgcggaaggccaggggcaagcaccacccgagcaagagagcccagaggaagaa

SEQ ID NO: 10579 - RNA, 110 nt, Homo sapiens
caagaccggaccagccagaggacgcgggccgaggagagcggaggaggggggaggcccaggaacacaccaccaggaaaagccgaaggaagcgacaggaaggggaccagaac

SEQ ID NO: 10580 - RNA, 81 nt, Homo sapiens
gagagaagcaaaaggagaacgaaagcggaccaggcaggcagcccgcgagccggccaggccaccacccaggagccccagagc

SEQ ID NO: 10581 - RNA, 82 nt, Homo sapiens
gggaaacggcacaccaggcggcaggggcaaccagacgggccaagggccggcccagggagaacgcaaaaccaccacccccaca

SEQ ID NO: 10582 - RNA, 79 nt, Homo sapiens
gcaaaaacagcaagggagcaacagcggagaggagaaccaggaccaaagcaccagcacagaagggaagaacgccaaagga

SEQ ID NO: 10583 - RNA, 59 nt, Homo sapiens
gccgcaacgggcagcgcgcccggcgggcccgcaggaaacccaccagagaaggcgcggcc

SEQ ID NO: 10584 - RNA, 41 nt, Homo sapiens
aagcaaacgagagaacccagacacgagaggcgagggacgac

SEQ ID NO: 10585 - RNA, 85 nt, Homo sapiens
gcaagacgagcaaaagacccgcaccaccgcacaccgagcaggacccaaagacaggaccacgcaccagcagagaaggaaagcaaac

SEQ ID NO: 10586 - RNA, 56 nt, Homo sapiens
cccccagccagggaacaacccgccacccccacccggcgccccgcgacgagacaagc

SEQ ID NO: 10587 - RNA, 88 nt, Homo sapiens
ggagaagggggcggcgggcggcgggcggcaaaggagcagccagagggccgggcccagcaccgaccggggaaccacgacagcggcggcc

SEQ ID NO: 10588 - RNA, 75 nt, Homo sapiens
cagaacacagaacacacaaggggagccggaaccccccagcgagcaccaaaagccaacaccaggagcccagcagac

SEQ ID NO: 10589 - RNA, 83 nt, Homo sapiens
gaagaacaacacagccagccccccgagggagggacaagggaccaaaagagcgcccgacacagcagggcgaggaccaccagacg

SEQ ID NO: 10590 - RNA, 78 nt, Homo sapiens
gcgagccgcccccaggccgcgccgagcccgccgcgcgggcccgcccgacgcggaagggaccaaagccacgaagccgag

SEQ ID NO: 10591 - RNA, 75 nt, Homo sapiens
cacgccggacgcccgacaaaaccaacggcagccaggaggcaggagcagcgggcgacaggcgggcccgggcgggcc

SEQ ID NO: 10592 - RNA, 68 nt, Homo sapiens
aagagaaagagacagacacccagcggacaggcagagagagaagaacccagcaccaggacggcaaacac

SEQ ID NO: 10593 - RNA, 75 nt, Homo sapiens
ggagcgagcgagcggccggcagggggaggagcggccgaaggaaagcgggaacgaacaaggcgacccacagaaccg

SEQ ID NO: 10594 - RNA, 73 nt, Homo sapiens
ggagaaaccgaaggagcaacaaacgagcgccgaccgagaagaccagaaaaagaagagaaaccacggggaggaa

SEQ ID NO: 10595 - RNA, 67 nt, Homo sapiens
acgcagggcgcccccggacacacgaacaagccagggaacaaggccaggaaccaccgcaaaggaaaac

SEQ ID NO: 10596 - RNA, 77 nt, Homo sapiens
gacaagcagaccgaagagacagacaaggcaaagcgaaaggcaccgcaacaacgcccagcgagcaggggcccagccca

SEQ ID NO: 10597 - RNA, 58 nt, Homo sapiens
gacccgcaagcgagggcccggcaaagaccccgccccagagacaccagccagggccgcg

SEQ ID NO: 10598 - RNA, 65 nt, Homo sapiens
cagaaaggagaaacaagaagaacaacgagacaggaaagggagagccggaacaaaagaaagagccg

SEQ ID NO: 10599 - RNA, 63 nt, Homo sapiens
gcccacaagcggcgccgcgccccggccgcacggccacagagggccgccagcacaagaccggag

SEQ ID NO: 10600 - RNA, 80 nt, Homo sapiens
ggacgcggaaccagcggagaaacgcgagagcacaaagggaagagcgggcggggcgcacacagccagcacccaggaggcag

SEQ ID NO: 10601 - RNA, 73 nt, Homo sapiens
agagacaagcaagaaccggcagagacacaaccaccagccaaacaagccaggaggagcaacacccaaagcgaac

SEQ ID NO: 10602 - RNA, 69 nt, Homo sapiens
cccccacgcaccgcacaacaagaggccggcggggcgacagggccggcggcacccacgcgggggacgggc

SEQ ID NO: 10603 - RNA, 76 nt, Homo sapiens
gaccgaaaagccacggagacggcgggcggcagaaaacggggaagacacccgaagacggaaggacacggagagacca

SEQ ID NO: 10604 - RNA, 51 nt, Homo sapiens
acgaagaacacacaacgggaggagaacaccgcaaaacaaacggagagagga

SEQ ID NO: 10605 - RNA, 122 nt, Homo sapiens
ggcccgccccgaggcccggcccggggggggaaccgcgcgaggagcggaaaccccggcagaaaagcggaggaagagaaccaaaaaacaagaaaggcaccggaaagacaaccaaaaaaacagga

SEQ ID NO: 10606 - RNA, 71 nt, Homo sapiens
acagggaagaaagggaagggcaagggggccgaagcaaccaggcggaggcaaggcacgaccggccaccgcaa

SEQ ID NO: 10607 - RNA, 85 nt, Homo sapiens
ggccgggacccggaaagggacccaccccgaaggaagagagaagggcacagaccaagacaacgaaccccggccaggacaggccccc

SEQ ID NO: 10608 - RNA, 57 nt, Homo sapiens
aaggacgggcaacgagaaaaagccaagaacagcaccagggaaaggcggggcaccagg

SEQ ID NO: 10609 - RNA, 83 nt, Homo sapiens
cgcgcgacgcccagagccgcggccggggcgcgggagcgcgaaaagcagggccgacgggccggggggagcggacaccgggggga

SEQ ID NO: 10610 - RNA, 71 nt, Homo sapiens
ccccggaagcgagcgcggacgccacccgggggcacagcaaggaaagcaccgcaaggcagagggcagacaga

SEQ ID NO: 10611 - RNA, 69 nt, Homo sapiens
ggcaggcaaggggcagacccaggaaagagccccccaagagcacacccagaacagcgggccggacggagg

SEQ ID NO: 10612 - RNA, 74 nt, Homo sapiens
gcgagcagcgcccccggacacggcaaagagaccccccaggggacagaaggagccgagccggaggagcacacagg

SEQ ID NO: 10613 - RNA, 81 nt, Homo sapiens
ccgaaagacggacaagccgacacggaccgagacagacgcagccgaggaaggggcacccacagccaacccaacaagaggggc

SEQ ID NO: 10614 - RNA, 80 nt, Homo sapiens
agcggaacaaaaaaccggcaagggaagggacgggaagccgcgggggggaaccccacccgaggcgcggggaagggagcacg

SEQ ID NO: 10615 - RNA, 73 nt, Homo sapiens
gcagcaaacgggaaacgcacagcccccggacagcacgagacaaggcacacaaaggggaagcagccgagaggcg

SEQ ID NO: 10616 - RNA, 79 nt, Homo sapiens
ggacgccggccgccgcaggagagacggcccgcacccaccaaacagaacgaggaaccgcccccacgaaggccccagagaa

SEQ ID NO: 10617 - RNA, 49 nt, Homo sapiens
cggaaggcacacgcaccaccagcgacacccccaggcccacacgccggca

SEQ ID NO: 10618 - RNA, 79 nt, Homo sapiens
gacacagcggcagcagcggcagccgcgccagcagaccagccagccccaagcagccgcacgacaaagaacgaagacaaga

SEQ ID NO: 10619 - RNA, 79 nt, Homo sapiens
cggagaccgggagcggcacaggcagcagcccaggagggagcgggaaaggaagagaagacagaagcagagacaagaagag

SEQ ID NO: 10620 - RNA, 48 nt, Homo sapiens
aaaacgggaaagacaacaggcacaaagagagaaggaacacccacaggg

SEQ ID NO: 10621 - RNA, 103 nt, Homo sapiens
gcaggcacaccgaagacaggacccaagcaaaacccacggagagcccaagcgaaaccccagcacccacagaggcgaacgaaacaaacagcacagcccggaacaa

SEQ ID NO: 10622 - RNA, 83 nt, Homo sapiens
aagaagaggaagaaagaggaaggagaaacaaaccagccgaaaagaagacgcaagggacagcaaaggccagacgcaccaacaac

SEQ ID NO: 10623 - RNA, 72 nt, Homo sapiens
aggacaggggaccacagcaaggagaggcagggacgggcgggagcgaaaggcaggggagggacaaggcggggc

SEQ ID NO: 10624 - RNA, 74 nt, Homo sapiens
ggacaagaagggcaaagccgaaggaccagagcaaagaaaaagagccgcgggggagcaaaggaggagaaaagggg

SEQ ID NO: 10625 - RNA, 78 nt, Homo sapiens
gccaccgcgacccagccaaagaccacagcacccagacaacaagcgccagcgggaccaggaggcaacggacacggcagg

SEQ ID NO: 10626 - RNA, 91 nt, Homo sapiens
gagggcagaggaggcagaggcaggcgccagacaaccaggcaagcggaagaaccgaacacacaaaggcaaaccgacaccagcgacacaagcg

SEQ ID NO: 10627 - RNA, 69 nt, Homo sapiens
cgaccaccggggaccagccaaagcgcacgggaagcaggaaaacgaggccgcgggccggggcggggcaaa

SEQ ID NO: 10628 - RNA, 76 nt, Homo sapiens
aagcccaaccacaggagaaaggggaaagaagaacagggcccccagagccgacggcccccaccccccacaagacgcg

SEQ ID NO: 10629 - RNA, 52 nt, Homo sapiens
cagacgcagggcgcccccgagggggaaacccgaaaaagaagcgaagagacaa

SEQ ID NO: 10630 - RNA, 71 nt, Homo sapiens
aagggagccgcgcaaaggccccggcaagaaggaggcccacaagcggcacccaccaagacaaaccagcaagg

SEQ ID NO: 10631 - RNA, 82 nt, Homo sapiens
caaggagcaaaccgcacaagaggcggcggagcggcagggcggcgcgaggaggcggggagcccgcagggcccgccccacgccc

SEQ ID NO: 10632 - RNA, 84 nt, Homo sapiens
ccccaccgcagcagcacccgacaggcagacagccagaagacagcacagcggaaaggagaggcgcagcgccaggccccaaggcca

SEQ ID NO: 10633 - RNA, 70 nt, Homo sapiens
gaaaccacaaacaggaagcagaaacaaggagggaacaggagggcacagaaggaaggaaaccaccaccgga

SEQ ID NO: 10634 - RNA, 79 nt, Homo sapiens
acaggccacccacggccgggcagaccccaagagaaaggagccccccaagacggacggggaggcaagcaacacgccggac

SEQ ID NO: 10635 - RNA, 99 nt, Homo sapiens
gcgggcgcacccgccccggcgccgccggcccgcgggaccgacagccgggcagaggaaagaccacagcaagaccacgcccccagccgggggaccaggccg

SEQ ID NO: 10636 - RNA, 75 nt, Homo sapiens
gaaggaccaagaaccaggacaaagaggccaggagacacgccaccgccggcggcccccggccaggccaccccccag

SEQ ID NO: 10637 - RNA, 69 nt, Homo sapiens
ccgacagccgcagaacgaccagccagcaagaccgagcgacagaagaagggcaccaaaaagcaacaccac

SEQ ID NO: 10638 - RNA, 57 nt, Homo sapiens
gagccgacgccggggcgaggaccgacggaggacaagaccgacgccccggcgcagcag

SEQ ID NO: 10639 - RNA, 72 nt, Homo sapiens
ccgcacgaccggggccccccgcaggcccagaggggaaggcagagccaccggaaacacgcaaggcggcgggac

SEQ ID NO: 10640 - RNA, 74 nt, Homo sapiens
cccacacaaacccgggacgggccgagaggacggagaggccgcccacggagcgcagagccaaccccaagccccgc

SEQ ID NO: 10641 - RNA, 69 nt, Homo sapiens
gacgcacagcgaccaccaacagaccgaagaggcgagggcgccggcaccagggcgcaaccggaaagggaa

SEQ ID NO: 10642 - RNA, 74 nt, Homo sapiens
caccgcggaaaggccagccgggacaccacagcaagaggaacgggcacgccagaaaagaccaggagaagcagacg

SEQ ID NO: 10643 - RNA, 78 nt, Homo sapiens
ggggcaagaacgggcaacaaaaaccgaacaaagggagccaaggacaggccacgcagaaaacacagagacaggagaaac

SEQ ID NO: 10644 - RNA, 73 nt, Homo sapiens
aagagcagagaaaaccagaaaaaggccaaggggaccacaggcagcagcacaaaccagcaccaggaacgggacc

SEQ ID NO: 10645 - RNA, 75 nt, Homo sapiens
gggggccagcaacccagacgcccacaggacaagaccgaagaacgccggcacacaaaaagcgaaaaacgagaaaac

SEQ ID NO: 10646 - RNA, 73 nt, Homo sapiens
gaggcgcccggcccccgcccgccgcgcccagagaagggagcacgcacgcgcaagcgggcaccggggcccacag

SEQ ID NO: 10647 - RNA, 59 nt, Homo sapiens
ggccggggcggccaacgcccgcacccgggaggacagaggagagggccacaagaagagac

SEQ ID NO: 10648 - RNA, 51 nt, Homo sapiens
gaaaccaggagccacggacaagaccaaaagcggcccgggagggaacaaaga

SEQ ID NO: 10649 - RNA, 70 nt, Homo sapiens
agcaggcggacgacacgggacaccccaacgagaaaagccaccagccagaaggcagaagagaccaagggaa

SEQ ID NO: 10650 - RNA, 82 nt, Homo sapiens
gccagcccgggccccggcagggaggagacggagcgcagcggcacgcacgcgaagacagcggcaggcagaggcggaccggcgc

SEQ ID NO: 10651 - RNA, 54 nt, Homo sapiens
cacgcggaaaggagccccgggaacgcaagaaggacgccaggaaagcaggcagag

SEQ ID NO: 10652 - RNA, 70 nt, Homo sapiens
agaaccccaccgcgacacacgagcacaggaggaacaccccagacccaacgcggccccgaaccaggaggcg

SEQ ID NO: 10653 - RNA, 70 nt, Homo sapiens
ccagccagcaggacgggccgagacagacaaaaacgaaaccggagaaacggagcagaccaccgcccagcaa

SEQ ID NO: 10654 - RNA, 81 nt, Homo sapiens
acgcgccacggagagacacggcggggggggcagcgggcccaggccaggagggcaagaacacgcagaagacccgaccaagac

SEQ ID NO: 10655 - RNA, 76 nt, Homo sapiens
agaggcgaacgccaccagcgcggcacggagaagcagaagccagcagaagaaagagaaaagaaaggcccgccaagac

SEQ ID NO: 10656 - RNA, 79 nt, Homo sapiens
gaggcaccgggacggaccgagaccggaccgagagcggaccgagagcgcgaaacgcacgagaagacaagcaacgaaagcc

SEQ ID NO: 10657 - RNA, 79 nt, Homo sapiens
gcgccaccaccaggacacgcaggccagagcacagcacccagaagaaggaacggccgccaccggcgggcacgccccacaa

SEQ ID NO: 10658 - RNA, 82 nt, Homo sapiens
gcccaggaagcccccgaagcccccgccgccgcgagaagggccgcgggaggacgagaccggaccacccccggagaccaccacc

SEQ ID NO: 10659 - RNA, 62 nt, Homo sapiens
aaggaacagagccaaaccagaagaggagggcccagaagaaaaaggcacggggccaaaaaggc

SEQ ID NO: 10660 - RNA, 68 nt, Homo sapiens
gaccacaggcgcagagggcccagagacccaaggagaacgacccacaccacagcaacccgaaccccggg

SEQ ID NO: 10661 - RNA, 77 nt, Homo sapiens
agccccgcaagaggaggcgggcacacaccgacaaaaaacaggagaagcaggaaggaaaaaaaccagaagaggaccag

SEQ ID NO: 10662 - RNA, 83 nt, Homo sapiens
cgcgaccgaggggacgccgcccgccgcccgccgcaggccacccgggaacggaggagggcaagaaaagccaggcccgagccgga

SEQ ID NO: 10663 - RNA, 79 nt, Homo sapiens
ggaagacagcccacacggcaggaagggagggggagcaccccggaaagggcggacccccccaggggaaccaggagcagcc

SEQ ID NO: 10664 - RNA, 74 nt, Homo sapiens
ccccaaaaacagcacagggaaaagggaagcccagaggcacggggcagaacaccaacagagggccgaccggggga

SEQ ID NO: 10665 - RNA, 78 nt, Homo sapiens
ggaagcgaagcaacccccgccgaccagagccagacacagagcagcagccccacaagggggccaaacaaccagaaaagg

SEQ ID NO: 10666 - RNA, 80 nt, Homo sapiens
ggggggaaccagccccgcgaagagcagcccagcgcagagaaagcccgcacggagcaggagaacggcgacgaggcacaaag

SEQ ID NO: 10667 - RNA, 68 nt, Homo sapiens
ccagacgggagggaccacagcccagcaccgaagcgcccccccccaacacacgcgacacgaagaagaga

SEQ ID NO: 10668 - RNA, 47 nt, Homo sapiens
gagaaaggaaacagaggagagaacacgggaacgggcacacgacacaa

SEQ ID NO: 10669 - RNA, 86 nt, Homo sapiens
cgggacggaccgagaccggaccgagagcggaccgagagcgcgaaacgcacgagaaggacgagcagggggaggaacaaagcgaggaa

SEQ ID NO: 10670 - RNA, 72 nt, Homo sapiens
cggagcaccagaccggaggagagcgacacagacaaggggcgcagagcccggcaaccagaacaaagacaggag

SEQ ID NO: 10671 - RNA, 79 nt, Homo sapiens
caaaacaccagaaccaaccgggcggccagagggacaacagagaaggagcgcgcacgaggcaaccacacaacaacacagg

SEQ ID NO: 10672 - RNA, 84 nt, Homo sapiens
gcgcgccgcgccgccggcgcccccccagaccacggcccggcgccgcaccgccgcaggagagggacagggaagggaaacaggaga

SEQ ID NO: 10673 - RNA, 62 nt, Homo sapiens
gagggacgcacccggggacgggagggggggccccgcgcaaaggagccggcccaacagagaac

SEQ ID NO: 10674 - RNA, 119 nt, Homo sapiens
gccacacagcagaccacggcccggagagagcacgcccaccgcgccggagccaaaggagccccccaacagagcgagagaggcacggagcgcagcaggaccagcgagagccccgcccccgc

SEQ ID NO: 10675 - RNA, 80 nt, Homo sapiens
gcacgccacagcgaaggcgcgagggacaagagcagaggacagagagaggcagaagaaaaagcacccccaagcgagagagc

SEQ ID NO: 10676 - RNA, 72 nt, Homo sapiens
accaagcggggcccaaagcgggaaccaaagcgcacggggaggccaggaaacacgaggcaagacagggaggcc

SEQ ID NO: 10677 - RNA, 76 nt, Homo sapiens
caacacggacacccacagcggggcggcggcggcggcggcgcggcccaaaagggcgggaaaccaacccgcaaggcag

SEQ ID NO: 10678 - RNA, 76 nt, Homo sapiens
aagagccacgagccgccaaacgaagcgggcaccaacagacaaccagggcaagcagaggcaaaggcaagggcggaaa

SEQ ID NO: 10679 - RNA, 63 nt, Homo sapiens
ggagcggacggaaagaaaaacacggagagcaacaaagagggaagcggagaagaaagaagacca

SEQ ID NO: 10680 - RNA, 73 nt, Homo sapiens
cgcgggcggaccgacggagacggaaagccgggacaggaggagagagagagaggccagggagagagaagaggag

SEQ ID NO: 10681 - RNA, 81 nt, Homo sapiens
gcccacgcaccggcaaccagcacacagagaacaccaagacagcgacaagaaaggccaaggaaaaggaacagagagagcaga

SEQ ID NO: 10682 - RNA, 58 nt, Homo sapiens
gacgaggcggaaaggaaccccaaggcggagacccgaaggaagagggaacgaaaaagaa

SEQ ID NO: 10683 - RNA, 70 nt, Homo sapiens
cccgcagccaggcgcggaaggagggggccggaagcgaccagacggaaacagcccagagaaagcaagaaga

SEQ ID NO: 10684 - RNA, 80 nt, Homo sapiens
gcagagacaccaggacagaaaagacaggcgccaggagcacagaagagcgaggaggagagccaggcacaaaaaggggaaga

SEQ ID NO: 10685 - RNA, 77 nt, Homo sapiens
ggacggaagaacagccggacagaccaggggagcaggcggccaggccaggcaacaaagcagcaacgaacggccccgaa

SEQ ID NO: 10686 - RNA, 70 nt, Homo sapiens
ggcgcaccacgaaaacaacacagcagggaagcagaaggggggaggcaagcggagcaggcagaccgaagac

SEQ ID NO: 10687 - RNA, 75 nt, Homo sapiens
gccccgcaacaccgcggcccacgggacccccaggagggacccgcagggcacgaagaacacaaagcaaaaaggaaa

SEQ ID NO: 10688 - RNA, 77 nt, Homo sapiens
cggggggccgagaacacccaacagcgggacagaaagagcggaccacaccagaaaaagggagaggacaagaaagaggg

SEQ ID NO: 10689 - RNA, 69 nt, Homo sapiens
gccggccaccaggagcaacgagagaggcccccgccgagcacggaccccaagcggaccaaggaaaaaaga

SEQ ID NO: 10690 - RNA, 74 nt, Homo sapiens
gaagagaccgcggagggggccgcaggacgggcggagagcagcaaacggagaaccgcccaaaccagcagaaagaa

SEQ ID NO: 10691 - RNA, 75 nt, Homo sapiens
gagaaaacggcgcaagggcaaaggcacgaacaaaggcgacccagacaacgacaacgccacagcagcggaaaggga

SEQ ID NO: 10692 - RNA, 75 nt, Homo sapiens
cccagcagccgcccacccagccagcacacacgaaagacaggaaggacgagcccccgcggagacagcccgaagaac

SEQ ID NO: 10693 - RNA, 75 nt, Homo sapiens
ccgcagcgcgggccgggacccagccaggcagaccccgggcagcagggggacaagaccccccccagggaagaccaa

SEQ ID NO: 10694 - RNA, 38 nt, Homo sapiens
acaggcaaaggaaaccagacaaagcaggaagcacgggg

SEQ ID NO: 10695 - RNA, 74 nt, Homo sapiens
accagcacagaccgcggcgcggccgagagccggggacgcgggccgagggggagacacgcccagggagaccacgc

SEQ ID NO: 10696 - RNA, 76 nt, Homo sapiens
caccccaccggcgcgcgcggcggcccgcgcacagggggaggcggaacacagaaggaaagaggcagaaggccagaag

SEQ ID NO: 10697 - RNA, 73 nt, Homo sapiens
caaaagaaggcagaagaagcgggcaaagccggcaaaggaacagaaacacgacaggaggaggaagcccacgcag

SEQ ID NO: 10698 - RNA, 68 nt, Homo sapiens
gagaaaaagaaacagggaagaaaggagacaccacggaacccgccacccagagacgggcgcagacacag

SEQ ID NO: 10699 - RNA, 81 nt, Homo sapiens
aacagggaaacccaggacgcagccacgcaaaacaaggcccgccacccgggggcgggacgacaggggagagccggacagcac

SEQ ID NO: 10700 - RNA, 54 nt, Homo sapiens
gcggagagagaggagaagggaacagaaagagaccacaagacggcacccagcgca

SEQ ID NO: 10701 - RNA, 35 nt, Homo sapiens
cagaccgaccaccaaaagaaaacagcgccaagcca

SEQ ID NO: 10702 - RNA, 75 nt, Homo sapiens
ggaagaacacagcccgggaaagcacagaaagccaaaaggcacaacccaagacaagcagccagggaagccgggcag

SEQ ID NO: 10703 - RNA, 77 nt, Homo sapiens
ccagaacacgggagaaaaaggaaaacgcggaaaaccgacacaacagcacacaccacgggacacaggggaaaggcgcg

SEQ ID NO: 10704 - RNA, 82 nt, Homo sapiens
cgcaccgccgcggaaagcccgggcgcgccaggcacagccaagagcggaccggcagcggccagcgcagcggccggagcagaca

SEQ ID NO: 10705 - RNA, 36 nt, Homo sapiens
gacaacccccgaaggaggggcggagaacggaaaagc

SEQ ID NO: 10706 - RNA, 79 nt, Homo sapiens
ggaaccaagccgcgggacaagagacgggaaaagagaacaagaacacacaagacaagggggggcagaagaaaaagcagga

SEQ ID NO: 10707 - RNA, 77 nt, Homo sapiens
caccagcagcagcccgcaaccggccagcgggcacccaaccgcacggcggcgggccagggggcgacacgggccacacg

SEQ ID NO: 10708 - RNA, 79 nt, Homo sapiens
cgcgcgccgcaacgcaggcaccggcaggcgagggaagacagccgccaccaggcgcccccccagcaaccacccacagacc

SEQ ID NO: 10709 - RNA, 55 nt, Homo sapiens
aagacggaacccgggacgacggggccaggacaagccgaggcaccgcaggcccaca

SEQ ID NO: 10710 - RNA, 75 nt, Homo sapiens
ccggcgacccaccaggaacagggaacggaggccgagccagcgaccaggacgggaagacaaccagccagaggccgg

SEQ ID NO: 10711 - RNA, 79 nt, Homo sapiens
gcggaggacacgggggccacaaagccccccggagacgcaaccaagccacgaagaccgggcgccagggccgccgccccgc

SEQ ID NO: 10712 - RNA, 58 nt, Homo sapiens
accgggcgccacgccgcgaacgcggacgaaaagaacaagcgcccggagacagcaacga

SEQ ID NO: 10713 - RNA, 54 nt, Homo sapiens
agacaccgaaggaggagcaaaagaacgacacccccgaagagaacagggaagaga

SEQ ID NO: 10714 - RNA, 57 nt, Homo sapiens
gcagcccggcagacgcagaaccagccaggcagcgccaaggaccgggacagacaaacc

SEQ ID NO: 10715 - RNA, 53 nt, Homo sapiens
ggcagccggcaggagagcgacaaaccaaggaggaacaggccgcgagcaagccg

SEQ ID NO: 10716 - RNA, 83 nt, Homo sapiens
cagaggaagaggcggcggcgaaaggaacggcgaaggcccacgggagaaaaccgggcgcaagaaagcggaacagcacgcgagac

SEQ ID NO: 10717 - RNA, 66 nt, Homo sapiens
gaacccaccgagccagggaggacagcagaccacagcccggcaggcccaaaaacccaaagggacaga

SEQ ID NO: 10718 - RNA, 76 nt, Homo sapiens
gaccgagccgggcaccgccacggaggacggagggaggagagcgacagcgcaagggcagaccggagaagaggcgcgg

SEQ ID NO: 10719 - RNA, 59 nt, Homo sapiens
cccgaggacaggaaaaacaggacaacaacaacgaaggagaaacaaaaaccacaaaggaa

SEQ ID NO: 10720 - RNA, 82 nt, Homo sapiens
cggccccgagggccccaagggcagcggaacgcgccgacgccgcaaccagcaccccgaggagcggaaccagaccgccgggcaa

SEQ ID NO: 10721 - RNA, 79 nt, Homo sapiens
aaagagaaacccggagggcgccgggcgcaggcacgcagggccaacgggacccggcgccggaaaggaaccaggagcgagc

SEQ ID NO: 10722 - RNA, 78 nt, Homo sapiens
acgagcgggacaagaaacggagagccccacaagcggggacaagaagagaagaaaagaaacaaaccgggacgagacgga

SEQ ID NO: 10723 - RNA, 80 nt, Homo sapiens
agcacggagaggggcaacacgagacgcggccccggcacaggagaaaacgacgcccacaccaaccccacaccccacaagca

SEQ ID NO: 10724 - RNA, 80 nt, Homo sapiens
ggccaaacgaaacacgaacggcaggaaaagcagaccggcgaaggagacaacccacaacaacaccaggcgcagcgcggccc

SEQ ID NO: 10725 - RNA, 73 nt, Homo sapiens
acacaagaagaaagaaaacaggcaaagggagggagcaacgcgagccaagcagcaggccccaaaaaggagaaag

SEQ ID NO: 10726 - RNA, 80 nt, Homo sapiens
gccgggggggcccagcacgcaaggcggcggccacgggaacaggggccgagggaccggacgacgagccgaggagaccccga

SEQ ID NO: 10727 - RNA, 78 nt, Homo sapiens
gccgaagagacgcacgcgaacggaaacgcagcaagacgacgcagacccggccgccccaagagggagcaaacgaaaaga

SEQ ID NO: 10728 - RNA, 67 nt, Homo sapiens
acgggaacacaccgcccagccacgcgggaaccccaaacccaccagaaaagccccagcgagcggcacc

SEQ ID NO: 10729 - RNA, 79 nt, Homo sapiens
agggccggcccgcccccggccggggcgcagcggaggcagggggggccccagcccggccgaacgggcgcacgacacaaac

SEQ ID NO: 10730 - RNA, 78 nt, Homo sapiens
aaccgggaccgaccaccgcaggcgcgcacccaggcaaaagcaacagggcacggcagaaggagggacgccgaccccacc

SEQ ID NO: 10731 - RNA, 38 nt, Homo sapiens
agcgggaagggaccccggaaacacaaacgccaacgaaa

SEQ ID NO: 10732 - RNA, 73 nt, Homo sapiens
cccacgaaccgggggcagaacagaaaggaacaaggaccaacaccaaggaccagccaccgaaccacacaccaaa

SEQ ID NO: 10733 - RNA, 61 nt, Homo sapiens
aaagagagcagacccgaggagcccgcagcgggcacagagagacccagcgacgagcaaaagg

SEQ ID NO: 10734 - RNA, 83 nt, Homo sapiens
aaggggaggcaccggggcgcgcaggccgagacaccgaggggccacccaccccaccagagccggacaccagagccggacaccag

SEQ ID NO: 10735 - RNA, 70 nt, Homo sapiens
cgacccgcggagacagacaagacaagaccggcggggaagcgggcccacaggccacccgccagacgcagcg

SEQ ID NO: 10736 - RNA, 86 nt, Homo sapiens
gggagccaaggaaacaggagcgaagcccagcgggccggacggggcggggggaacgacaggaacggccgaacacagagggagaagag

SEQ ID NO: 10737 - RNA, 63 nt, Homo sapiens
gaagaccagaagcggccaggagaccgaagcgggacgggcggaggagcgcagaaggagcgcgga

SEQ ID NO: 10738 - RNA, 54 nt, Homo sapiens
aacagcacagccaagcaacgcacacaacagcagcagggggggaggccagagaag

SEQ ID NO: 10739 - RNA, 55 nt, Homo sapiens
gcacgggggggagacggcgggcagggcaaggcggagaacggaaaagcaccaggaa

SEQ ID NO: 10740 - RNA, 68 nt, Homo sapiens
gggcgcgcagaacaggcgcgcggcgacacccacccggcggcgccaagaggggcaaagacccagccacc

SEQ ID NO: 10741 - RNA, 86 nt, Homo sapiens
gcaccagacgccggcaacaaagaacacacggaaggggacaccagccaggagagaaccagaccgggcggagacaagccagccggacg

SEQ ID NO: 10742 - RNA, 72 nt, Homo sapiens
aagcagcgggcaacaggaagaccaaaaacacccgaaaacacaggaaacaggagccaaagaagaggaaggccc

SEQ ID NO: 10743 - RNA, 78 nt, Homo sapiens
cggagagcaagggccaggggagcccagcggcgcgccggcagcaggcggcaggacacaagcaggggaggaagaagacga

SEQ ID NO: 10744 - RNA, 61 nt, Homo sapiens
ccagcaaggcccccggcagcgccggccacacgaacgccgggagagacaaagcgaaagaaac

SEQ ID NO: 10745 - RNA, 75 nt, Homo sapiens
acagcacagcaacgcaagaccacaagccagcgaggggggccggggcaaagaccggcaagacggaagggcgacacg

SEQ ID NO: 10746 - RNA, 53 nt, Homo sapiens
gagggacacccccaaggagccgcgcggggaggaagacccagccccccaggaca

SEQ ID NO: 10747 - RNA, 72 nt, Homo sapiens
ccgggccagcggccgcgcacccccggccggaggcaccagcgaacagaacagcggcaacagacgcggcaaagg

SEQ ID NO: 10748 - RNA, 73 nt, Homo sapiens
agcaaacaccaggccacagaggcacacgcagccagaagcaacaagagaagcagaaaaacagacacgcaagaga

SEQ ID NO: 10749 - RNA, 53 nt, Homo sapiens
aaaaacagccacccaagcccagcaaggacaaagaaaaccagaaggcaccgaca

SEQ ID NO: 10750 - RNA, 76 nt, Homo sapiens
ggacaccaggcgcccgcacagaaggaccgaggcggaaggacaggccgaacacccacaggcaggaagcccacccaag

SEQ ID NO: 10751 - RNA, 76 nt, Homo sapiens
ggacaggagggcaggaagagcgcagcggggacaagcgcccgggcagccagaagcagaccaggaggacggaaggagg

SEQ ID NO: 10752 - RNA, 73 nt, Homo sapiens
ccgccggaccccagagagccggaacaccagccgggcccgcacaccaccgaccaaaacagaaagcagcagagca

SEQ ID NO: 10753 - RNA, 72 nt, Homo sapiens
gaggaagcccccccggcacgacaccgccccaacccacgagaggacagcccagaaaaggccagacggccagca

SEQ ID NO: 10754 - RNA, 55 nt, Homo sapiens
aaggaccaagaaccagacgccaacggcgaagccaagccgaagaagaaaaaaaagc

SEQ ID NO: 10755 - RNA, 88 nt, Homo sapiens
ccgaggggccaaccagcgaagagcgacaagccgcggcagccgcggaccaccgccgccaggcccgccaaaagacccccagaaggaggca

SEQ ID NO: 10756 - RNA, 75 nt, Homo sapiens
ggacaaacagaaccagagcaaaaggacccaagaacacgggagacacacacaaacggggagaagcagaccgcacca

SEQ ID NO: 10757 - RNA, 101 nt, Homo sapiens
agccccgcccagcccacggaacgcaccaggaaggccggagggggagagccgaggcgaacaccccagggccgaagggggccccaagagccaccagacacggc

SEQ ID NO: 10758 - RNA, 77 nt, Homo sapiens
agccacaaggacgggaagcaccaaagcgcgccaagagggcccgggcagagggaaagcagaggacggaacaacccggg

SEQ ID NO: 10759 - RNA, 34 nt, Homo sapiens
ccgacagccgcagaaccagcaccaggggaggagg

SEQ ID NO: 10760 - RNA, 65 nt, Homo sapiens
aaacgaggcaggagcgaaaggaaaccggccaacggacagacagaagccaaaacaggaaccgaaag

SEQ ID NO: 10761 - RNA, 76 nt, Homo sapiens
cgacaggacccagggcaagaccagacggaggagagacacacaccgggaccagcccaaaaccaggcccaaggaacga

SEQ ID NO: 10762 - RNA, 66 nt, Homo sapiens
ccccaggcgcaaaacccgagaaagggcaaccgagcacccacgggagaccggggggcaagaaaagga

SEQ ID NO: 10763 - RNA, 105 nt, Homo sapiens
ggaagacggcccaaaacacagcgcaccacacacagagggaaacggaaagaggcagaaaccccagaggcacagaaacacaaggacgacaacccaggaaggccagga

SEQ ID NO: 10764 - RNA, 50 nt, Homo sapiens
cgcgagaagcgagcgcgacaaacccaggaggcaggacgcaacgcaccgcc

SEQ ID NO: 10765 - RNA, 59 nt, Homo sapiens
aacagaacccaaaagccgacaaccccagaaacagaaagggcaagcagaaaccgggaagg

SEQ ID NO: 10766 - RNA, 61 nt, Homo sapiens
gaccaagaggggcgacgcagagccgagcgaagcggcggagaacggaaaagcaccaggaagc

SEQ ID NO: 10767 - RNA, 78 nt, Homo sapiens
ccaccgccgcgccccggcgcccccccgaggacgagaacccccgcgaaccagaggaacccagcgagcgagagcggacca

SEQ ID NO: 10768 - RNA, 72 nt, Homo sapiens
ccacaaaccggccaaggcacaaaagaaaaggagcaacgggagccacccacccgaaagagcggcggaaacaag

SEQ ID NO: 10769 - RNA, 52 nt, Homo sapiens
gaaggggaacgggaaaggaacaacgggcaagaaagacagagagacaggcaag

SEQ ID NO: 10770 - RNA, 52 nt, Homo sapiens
ggacgcagaaagggcagacacaggcacaccaagggccacaagaaggagagac

SEQ ID NO: 10771 - RNA, 76 nt, Homo sapiens
gaggccagacagcaagagcacccgacccacaggccagagaggaccaagcaccaagcagagaagacaggacggggac

SEQ ID NO: 10772 - RNA, 74 nt, Homo sapiens
cgcaagacgcacgcaggcgcccgcaggcccgcgggggagacgcagccgaaaccagcaggagccaccggaacgac

SEQ ID NO: 10773 - RNA, 75 nt, Homo sapiens
acgagccgccgggacagcccaaaaggccacaccgacggggaacgacggccagccccaggacccgcgggccgcagc

SEQ ID NO: 10774 - RNA, 77 nt, Homo sapiens
cgcacaaccagaggaaaaaagaaagagaaaaggaaagcagaagacaagcagacaaaacagaggagaccagaccagaa

SEQ ID NO: 10775 - RNA, 68 nt, Homo sapiens
gaaaaggagcaggaagagaacgagagcccacggcgaggaacaggacaagcgaaccggagcccaaaaca

SEQ ID NO: 10776 - RNA, 58 nt, Homo sapiens
gaggacacccaaaacaggaggcgaccggaacgcacaccaccgagggaacagagagcag

SEQ ID NO: 10777 - RNA, 78 nt, Homo sapiens
gaaggagccgcggcggggggaaaaggagccccaccaagggaggacaaaaggagccaaacaaaaggagaacacccacga

SEQ ID NO: 10778 - RNA, 54 nt, Homo sapiens
cccaaggacaacgacgggccccaagacagaagacgaaaggcaagacaaccaaac

SEQ ID NO: 10779 - RNA, 85 nt, Homo sapiens
acggaacgccaaccggcggaccgcgagacagccagccgaccgaggcgggcgcaaagacaccgccagaagaccagaggaccccgga

SEQ ID NO: 10780 - RNA, 111 nt, Homo sapiens
caagaagaagccaaccaaggcacaaacgcccgagggcagcaacagcaaaacccccaccggaccacagggaacaccagaggcgggaccacgggcagcgcccagggagcagga

SEQ ID NO: 10781 - RNA, 87 nt, Homo sapiens
cacggcaagacagcaccaacaacagaggcggaagacggcagccgccggacgggcagacccaagcagaccacagcaaggacacaaacc

SEQ ID NO: 10782 - RNA, 77 nt, Homo sapiens
ccaaggaaaccccaacacagagccaagcgccaaagacaaccagaacaggaggagagggcagcaggacaaaggaaccc

SEQ ID NO: 10783 - RNA, 75 nt, Homo sapiens
aggggaaagcgcaggggggacagcccaaggcggaaaagcgaaggaagccacaagcacagcccacacaaaccagag

SEQ ID NO: 10784 - RNA, 83 nt, Homo sapiens
ggacgaaagaagcgcagcggaggaaggcgaggagccgcccggcaaagcgaaagcgcaggaccgaggagaaggagccgccggag

SEQ ID NO: 10785 - RNA, 55 nt, Homo sapiens
gagcaggagcgcaggggccaggccggggggggcacagagccccggaagacagccc

SEQ ID NO: 10786 - RNA, 54 nt, Homo sapiens
cgcaacccccccccgaacagacagcgaacgggcacgacggccagcgaaacagag

SEQ ID NO: 10787 - RNA, 107 nt, Homo sapiens
ggggacagccgcagacgggggaagccaggcaccccccacagaaagggcgggagagagaaagagcgcagaaggcaccaccacaggcaacacaaggaggcacagaagcc

SEQ ID NO: 10788 - RNA, 72 nt, Homo sapiens
gacagcaagacaggagaccggacgccaccacgacggaggaaaggcaaagagagcccgagcagccaccggaca

SEQ ID NO: 10789 - RNA, 72 nt, Homo sapiens
ccgcggacccgcaaccgcggcaggcaggcacagaacgaaccaaaaaggaaaggacccacaaagacagaaaga

SEQ ID NO: 10790 - RNA, 75 nt, Homo sapiens
cccgcgagagcgcaaacacccccagacaaagacaaaggaaccggcgaacccgaacccaaaaaacagccacaacgg

SEQ ID NO: 10791 - RNA, 61 nt, Homo sapiens
ccagaaagagagagcagagaccggacaacaggcaaggagagcccacacgacagggaaagcg

SEQ ID NO: 10792 - RNA, 73 nt, Homo sapiens
acagccgaaccagcccgacacaggaaaacgggcaacagaaggaaagagcggcaaagggcagacacagcgaaca

SEQ ID NO: 10793 - RNA, 81 nt, Homo sapiens
cagcagacagacagccaggcgcccagaggggccccggagccaggacagacaagcagacggggccgccacacgcccaaccag

SEQ ID NO: 10794 - RNA, 73 nt, Homo sapiens
ccagcggcaccggacagagcggagggcacggagaaacacaccgacagagaaagggagagcggcaaaaagaaca

SEQ ID NO: 10795 - RNA, 80 nt, Homo sapiens
ggagggggcgcgagccgggaagacgcggggaagaggaggcggaaaaggacgcaaagcccggcgaggaacccagaaccgcg

SEQ ID NO: 10796 - RNA, 56 nt, Homo sapiens
cgccagggcaccagacgggcgggaaagagaggcccggcaaccaaaggcaagcagac

SEQ ID NO: 10797 - RNA, 38 nt, Homo sapiens
cccgaaaccacaaggccgagccccagccccagccaaac

SEQ ID NO: 10798 - RNA, 79 nt, Homo sapiens
cgccccccccccacggcacccccaccagaagacaaaggcaccagcgagccccaaggggaccccggccacagggacacca

SEQ ID NO: 10799 - RNA, 81 nt, Homo sapiens
ggccccaccagacagggaccggcggcaaccggaaggaacggaggagcacaggaacaaacgagggaaagccccaggaacaga

SEQ ID NO: 10800 - RNA, 75 nt, Homo sapiens
acgggaaagaaaggaccacaagaagaaaagggaaagcagcagggccaggaaagacagcgaacccacccaacacgg

SEQ ID NO: 10801 - RNA, 72 nt, Homo sapiens
accgccccaaccagaagaaaccagccagagagccaagaagaacagacagacaggcccagcgcccgagcggcg

SEQ ID NO: 10802 - RNA, 79 nt, Homo sapiens
ccaaacccgcacagagggaaaggagcgcgaagccacccaacagacagaggaaaagacccaggggcggagggagcccgga

SEQ ID NO: 10803 - RNA, 74 nt, Homo sapiens
agaaagagcagcgcccgaaggccggacacacagcagcggacgacgggagcagacggacgggccacggggaggag

SEQ ID NO: 10804 - RNA, 75 nt, Homo sapiens
agaagaaggggaggggacagacggggccacccccacacgcccccagccaaacaggcagcaccgggaccgccacaa

SEQ ID NO: 10805 - RNA, 86 nt, Homo sapiens
cccggagaaccccacggagaaccagagagggcgaagacaggacggcccaggcagacacggaggaggaggaagaggaggagggcgac

SEQ ID NO: 10806 - RNA, 53 nt, Homo sapiens
aggaaggccacagccagcaccaccggcccgccgggacccaccaagggccccca

SEQ ID NO: 10807 - RNA, 76 nt, Homo sapiens
gcagcagccggcagcagcagcggccagagacggacacgggaaaaagacacaaagagagcacaaagagccccgcaga

SEQ ID NO: 10808 - RNA, 71 nt, Homo sapiens
ggaagaccagccccgcccagcagagggcagagacaagcccagcaggcgcagcagcaagagggaaaaaggca

SEQ ID NO: 10809 - RNA, 69 nt, Homo sapiens
gcgaccaccaaaaaaacggaggcaaggaaaccgacgaagcgcggggacggacaggcagggagagccgaa

SEQ ID NO: 10810 - RNA, 56 nt, Homo sapiens
ggagaacgggaggcgggaacacaagagaccaaacgcagcggaaacccagacagcgc

SEQ ID NO: 10811 - RNA, 55 nt, Homo sapiens
cgggggagagccacggaagccgacagacaaccagaaccaagcccagaggagagca

SEQ ID NO: 10812 - RNA, 64 nt, Homo sapiens
agaaccaaggccaagaccagaaccagcccgggaaagagccaggccccggggccccagcggcacc

SEQ ID NO: 10813 - RNA, 62 nt, Homo sapiens
cgcagcccacgccagacgaccccacccgcgccgcgacccgccagcgcacgcgagcgaggaca

SEQ ID NO: 10814 - RNA, 59 nt, Homo sapiens
accggcgaggcccaccaagccagccacaacacagcagcccccaggagagcaggaaaagc

SEQ ID NO: 10815 - RNA, 35 nt, Homo sapiens
acaaggcaccgcaaagagcagagagaacgagcaag

SEQ ID NO: 10816 - RNA, 58 nt, Homo sapiens
gaaggcaggcaccacaaaaaggacagaaggcgggaagaaaaaaacgaagggagcagac

SEQ ID NO: 10817 - RNA, 70 nt, Homo sapiens
aggagggaccggaaagcaccccggccacagcgaaagcaccgggaggaaagagagccacacgaagaacacg

SEQ ID NO: 10818 - RNA, 62 nt, Homo sapiens
cggaaggcgcaagaaggagaacgggagcccaggcaagcagggcaaagggcagagcgcgcccg

SEQ ID NO: 10819 - RNA, 77 nt, Homo sapiens
cggaacggagccccgccggcgcccgcgaccccgcgggaggaaaaaggaacaagagcaagaaaaaaacaaaacgcaga

SEQ ID NO: 10820 - RNA, 80 nt, Homo sapiens
gaagaagacacagaaaacaggcaaaagcagaccggaaaacccaccggcaagaccacacccgaggggagcccaggacacca

SEQ ID NO: 10821 - RNA, 76 nt, Homo sapiens
ccggcgccgcgccggcggcggaggaaggcacaagcagagacacagaaacacagcaagaaggggaaacgcgcaggag

SEQ ID NO: 10822 - RNA, 76 nt, Homo sapiens
gaccaggagggcacccggcaacaagaagaacgcccaccggaggcaggaccagcgcagcgcggcagagaaagagcga

SEQ ID NO: 10823 - RNA, 69 nt, Homo sapiens
aaaaccaagcgagggagggcacccggaaacaagccacgaaggagagaaaaccagcagcagcgcagcaga

SEQ ID NO: 10824 - RNA, 86 nt, Homo sapiens
ggccaacagccggagcgaccccccagaccggccgccccccccccacggcacccccaccagaagaaccgcaaggcgcccagaccgac

SEQ ID NO: 10825 - RNA, 73 nt, Homo sapiens
gagaggacccaacaggcagccccagaacaccaaagagccggcaaagaggcgaggcagagagggaggaggaaaa

SEQ ID NO: 10826 - RNA, 86 nt, Homo sapiens
aggcggccgagccggccgggccgcgccacaccggcaccaagggcagaaaaacgcaagaggaacccgagaaccaggagggaagccga

SEQ ID NO: 10827 - RNA, 71 nt, Homo sapiens
cacacgggccgcggagccagcaccagccgacgagaaggaaaacaccaagagaccaccgcagaaaaaggacg

SEQ ID NO: 10828 - RNA, 82 nt, Homo sapiens
gacggcggcgcagcggacagcgcccgacgcgcaggccggcacgagcccgagagaagacgaccccgacgcaggccaggagccg

SEQ ID NO: 10829 - RNA, 56 nt, Homo sapiens
aaccgacaaaccaggcagagagacaaacgccgccaggccacaggcgccaagaagcc

SEQ ID NO: 10830 - RNA, 65 nt, Homo sapiens
ccgacgccaggcagcgcccccaaacggacccgacgaaggcaggcacagggaagaaaagcaaaaag

SEQ ID NO: 10831 - RNA, 91 nt, Homo sapiens
gccgcccccaccgccgccgcacccagggggccacacgccccccccccacgccacacacacacgcacccccccccccggcggagccccgaag

SEQ ID NO: 10832 - RNA, 59 nt, Homo sapiens
ggggagcaaaaccaacgccggccggagcagcagcccgaggccggggggggcacagagcc

SEQ ID NO: 10833 - RNA, 74 nt, Homo sapiens
caggggacaggcaaaacgcgaacaacccacagaagcccaacagaagagggccacccggggccagagggaaggaa

SEQ ID NO: 10834 - RNA, 55 nt, Homo sapiens
acccggaagggaggcgggagaaggcgcaacgcggcgcccgcgcggaaacagcccc

SEQ ID NO: 10835 - RNA, 39 nt, Homo sapiens
ccggaggaagaaacaccgcaagcgcagggagcaggagaa

SEQ ID NO: 10836 - RNA, 78 nt, Homo sapiens
gagcagacccccccaccagccaggacccccagccacgagagcaggccaaggaccacgggcgcccaccaagcagcccac

SEQ ID NO: 10837 - RNA, 75 nt, Homo sapiens
gccgccaaggcaagggagggagagagcaaaaccaggccaccagcggaagaaaggaggaagagaggaaaacagcag

SEQ ID NO: 10838 - RNA, 42 nt, Homo sapiens
gccggggcaaggagaaaaggaagaaggagaaagggccaaccc

SEQ ID NO: 10839 - RNA, 73 nt, Homo sapiens
cgggcagccacccggcggcggggccgcagcccaaggaagggaccgaaaacaaggacacgaggcacaagcacaa

SEQ ID NO: 10840 - RNA, 81 nt, Homo sapiens
caaggccgaagccgagcagaggacaaaacaagagggccagggggaccagagacacccgacccgaccacagcggaggagaga

SEQ ID NO: 10841 - RNA, 77 nt, Homo sapiens
gccccgccgcccagaggacgcccaacaccacccacccaccacggagggagcaacaacaaggagcaagcacagcgcga

SEQ ID NO: 10842 - RNA, 74 nt, Homo sapiens
aggccggggcgcccggcgccggccgagaaggcagaggcgcaccccgagcccggagaggacccacgcggacccgg

SEQ ID NO: 10843 - RNA, 36 nt, Homo sapiens
gcagagcgaggaccggaagaaggaaagaggcagaag

SEQ ID NO: 10844 - RNA, 83 nt, Homo sapiens
ggaccccgaggacgaggagggagcgagacaggcagcagagcgggagcgacagggagaagaagcgaaggaggggggacaaacaa

SEQ ID NO: 10845 - RNA, 61 nt, Homo sapiens
ccgcgcgacggcgacgcgggaggccagagagagggggaaccggggaaggcaccggcaaggg

SEQ ID NO: 10846 - RNA, 76 nt, Homo sapiens
ccacaaccggccacccgcgcggcccgcgggaggacacacccccgcaaccggggcgccacgcccagagcagaggacg

SEQ ID NO: 10847 - RNA, 50 nt, Homo sapiens
cgccaaggcggcgcagcgaacaaagggcaaaggacacaccgcacaaacgg

SEQ ID NO: 10848 - RNA, 53 nt, Homo sapiens
aagaaaggcgcgcgcggagagagccacgccccaacaaccagagggcaacagaa

SEQ ID NO: 10849 - RNA, 79 nt, Homo sapiens
gacgaggcggcgggggacaagcggcgccccagagcggacgagcaagggggaaagcggaccaagaggaaacccgaagagg

SEQ ID NO: 10850 - RNA, 70 nt, Homo sapiens
gcagccaacagcaaagccaggaaagcggacgacagcagacgacccgaagggcccggggcaaagcacagac

SEQ ID NO: 10851 - RNA, 71 nt, Homo sapiens
agggagcccaagcgcagagaaggacccccaagggcgaaggaagaagcgccagcagagccagaaccccagcc

SEQ ID NO: 10852 - RNA, 73 nt, Homo sapiens
ggcaccgcccggagggggccccaccgggcccgaaggcgcgagagcgggaaagagcaaaaaacaacagggaacg

SEQ ID NO: 10853 - RNA, 83 nt, Homo sapiens
ggacagcgccgacgccggggcacggccacgcacggaaagagaagggagggcgacgagagccgaagcagaggccaagaccaacc

SEQ ID NO: 10854 - RNA, 91 nt, Homo sapiens
agccgaccagcggagggggagccaaccagaaaagggcggggcggaacaagaggacggggaaaaagcgcagccagaccggccccggcacgga

SEQ ID NO: 10855 - RNA, 80 nt, Homo sapiens
gcgcaccaagggcgaaggagccggcccaagggaccggagggccggaagcgggccgggacaacgggcaggagccggaaggg

SEQ ID NO: 10856 - RNA, 74 nt, Homo sapiens
acagcgcagaaggacagaccacgcaacagaacagaaaggggcaaggagaaaacaccccgaggggcccacaggaa

SEQ ID NO: 10857 - RNA, 76 nt, Homo sapiens
aagcccgagaagaccggcggccaacacagccacggacagcgacagccgacaaccgaggaagagacacacaccgaag

SEQ ID NO: 10858 - RNA, 65 nt, Homo sapiens
ggagaaaaggccaagaaggcaggcgccaagcccacgggcgcaccaacggagagccagagcaaggg

SEQ ID NO: 10859 - RNA, 75 nt, Homo sapiens
gcgaggaaagccagaaggccagggacaaagggcacgggaggaaaaagaacagaggccaacccgacaagaggacca

SEQ ID NO: 10860 - RNA, 73 nt, Homo sapiens
cggcccccgcaacgcccccggcccgcagcccccgccggccgcccaacaccgaacaccgacccaaagacaggac

SEQ ID NO: 10861 - RNA, 68 nt, Homo sapiens
agacgacgcaccgcaggcagacaaaagggccaaagaagggagagaggaacaggaggcccggaccccca

SEQ ID NO: 10862 - RNA, 54 nt, Homo sapiens
ccggcaccgggagaaccaccgccaccgccaccaggcaccgcgcgccgcgccccc

SEQ ID NO: 10863 - RNA, 76 nt, Homo sapiens
gcagcacagcggggggaggagggggaaaagagaaccgccagcaagagcgcgcacgcaaacgggagagccggaaacg

SEQ ID NO: 10864 - RNA, 71 nt, Homo sapiens
ccccaggagaagagccagagcgggaggacgacgagagaggagaaagacagcaaagaaaaggagaagaaagg

SEQ ID NO: 10865 - RNA, 76 nt, Homo sapiens
acgacacggcggcaaagagaagagaagacgacccaccagacagccagcacaggccgggcaaaagacaggagaagaa

SEQ ID NO: 10866 - RNA, 116 nt, Homo sapiens
gggcgccagccgggccacggagaggagcagcccccggagacagcggcacagagggccgccagaaccagagaaccccaaagacaaaagagcgaaaacaggcaagacggagcgggacg

SEQ ID NO: 10867 - RNA, 85 nt, Homo sapiens
aaaaaagggcagaagagaagcaggaaggaggcagaggcacaccgaaaggacaccaggggggaaaaaccacacaggcaaagaacgc

SEQ ID NO: 10868 - RNA, 55 nt, Homo sapiens
ggcgggcgaacgccaccagacagaagagaggcagcagaccaggaaacccccaaca

SEQ ID NO: 10869 - RNA, 77 nt, Homo sapiens
gacagccgaacggaacggagagcagccaagcaggggcacaagaccgaaagagcaggcaagcaaaagcggggccagca

SEQ ID NO: 10870 - RNA, 44 nt, Homo sapiens
ccacaacacaaccacagcccagggggaggaaaaagcagcgaaac

SEQ ID NO: 10871 - RNA, 38 nt, Homo sapiens
ccccaccggccaggaacagaggagccacgcacccaggc

SEQ ID NO: 10872 - RNA, 48 nt, Homo sapiens
aaagagacccacagccagcaacacccccaagaagacggcagaacaccc

SEQ ID NO: 10873 - RNA, 80 nt, Homo sapiens
acaggacgcaaccccaacacggcgcacggagaaccacagacacacgaggaccgcacgccaagagaagaaccagagaaaca

SEQ ID NO: 10874 - RNA, 82 nt, Homo sapiens
cccaagcccacgggaggcacggagggggcgaggcagagaagacggcccagcagagcacccaaccagcgggaacacagcgccg

SEQ ID NO: 10875 - RNA, 78 nt, Homo sapiens
caagccgggccgcccgcggccaaccaaccagggcacccagccggaggggggacacccccgggggcagccaggccgggg

SEQ ID NO: 10876 - RNA, 74 nt, Homo sapiens
ccgggcgcccaagcgacagcgcagaggggcaggagccgggagccaccgcgaaggggcgggaagaagcccgccgc

SEQ ID NO: 10877 - RNA, 76 nt, Homo sapiens
gccggcaggacggaaggggaagaggcccacccggagaaccccacggagaaccagagggaggagggaaccgcccgag

SEQ ID NO: 10878 - RNA, 74 nt, Homo sapiens
cgggaagaagacacagaaaacagacggcggggaaaaacgcaggaccaaaagaaggcaaaagggagcaaagccac

SEQ ID NO: 10879 - RNA, 57 nt, Homo sapiens
agcacacaagagaaaaaaacaagagcccaagagaagggccaaaccggaagcaaaagc

SEQ ID NO: 10880 - RNA, 58 nt, Homo sapiens
ggagcccaaggcagaaaacggcagaggacccgcggccccgcaggggcccgggacgaga

SEQ ID NO: 10881 - RNA, 80 nt, Homo sapiens
cagagagccgaccggaggacgcggagaaccggcacagcccccggaaagccgacaagagacaacccccaaaagcaccgaga

SEQ ID NO: 10882 - RNA, 71 nt, Homo sapiens
gaaagggacacacccaggcaggaggagaaagagcaaaaacacagccagcccacaagggcggcaccgaaggc

SEQ ID NO: 10883 - RNA, 83 nt, Homo sapiens
ccccgcccgcagagcacgggcagaacacagaagaagccacaaagcagacagaaagaacggagaagggccacaaagccagagag

SEQ ID NO: 10884 - RNA, 67 nt, Homo sapiens
gggaacgggggacaaaaaccaagaagacacccaacccaagcgcccagaaagggcaccacccgcaacg

SEQ ID NO: 10885 - RNA, 89 nt, Homo sapiens
caacagcaccaggcacaagagggccagcggcccaggccagcggcccagggccagccacgagccccaccggaacaacggggcggccagca

SEQ ID NO: 10886 - RNA, 78 nt, Homo sapiens
cgaagcccacgccgggacccagcgcaggaacccgcgacgccaacagaggagaagaggagaacagcaagcccaaaaaag

SEQ ID NO: 10887 - RNA, 84 nt, Homo sapiens
gagccccccgcccggcagcgccccgcgagaaccgcgacccaggagacaagacaccagaggacaaagggccccaccggcagccgg

SEQ ID NO: 10888 - RNA, 66 nt, Homo sapiens
cacagcgcagcgacgagagggcccgggaccgggagcccgggaccgggagccggggggccaccccga

SEQ ID NO: 10889 - RNA, 77 nt, Homo sapiens
cgggacagcaaaaagacccaccaaggaagcagcggccacgccagggcaccacgccagcccacagcagccggacagaa

SEQ ID NO: 10890 - RNA, 75 nt, Homo sapiens
cggagacaggcggaacagaacaaggcccaaacgggggcccccagacaagacccaaagacaccgacaacacgaaag

SEQ ID NO: 10891 - RNA, 86 nt, Homo sapiens
gagaagacagggagcgagagcggagaagcgggaggagaccacccaaacgcggcacgggaggcccaggcgagagcgggaagagcacc

SEQ ID NO: 10892 - RNA, 74 nt, Homo sapiens
aaagcaaagaacccaggaagaaggccccccccacagggacgcacaaagcccagggacccccagaccaccgggcg

SEQ ID NO: 10893 - RNA, 39 nt, Homo sapiens
agggagcccaagcaggaacgaagcccacaaggcccaagc

SEQ ID NO: 10894 - RNA, 81 nt, Homo sapiens
gagagagcgagcgagggggggcgcgccggaaaccggagcgcgcagcaggcccccagcacaagggggcaccaggcggagaag

SEQ ID NO: 10895 - RNA, 76 nt, Homo sapiens
caccgacccgccgcaaagaagcagaaaccaccagagaccaggcccgagggagcaccaagaacacgaaacaaagaag

SEQ ID NO: 10896 - RNA, 104 nt, Homo sapiens
gagacggagggcggcacagagacgagcggcgcagaggagagaaggaggacgacgcccagggggacagcgcccaagcgggacagacccaccgaaccagcagacag

SEQ ID NO: 10897 - RNA, 77 nt, Homo sapiens
gcaggagccgccgcgccaccccaccagccaaggccccggccccaacaggcccgcgcccagagccccgcagggggaca

SEQ ID NO: 10898 - RNA, 62 nt, Homo sapiens
aagaaccaagaccaggaaacccgaacccccagacaacacagggacacaacaaacacaaccgc

SEQ ID NO: 10899 - RNA, 55 nt, Homo sapiens
cgggacgcgcgcgcagggggggggaagacaacccggagaacacccaggggacgcc

SEQ ID NO: 10900 - RNA, 76 nt, Homo sapiens
gacgagcccgcaagaagacggcagacacgcaacaggccggaaagagcgaagccaggcgaaaacggcaaaccgcgcg

SEQ ID NO: 10901 - RNA, 79 nt, Homo sapiens
aagcgggccggcagcgcccggacgaggagggaaagacaaggagccgggccgagaaaccgaaccagagaccagagaagaa

SEQ ID NO: 10902 - RNA, 78 nt, Homo sapiens
gccaacgggccccacgcagggcgcagaggaccgcgccaacaggacgaggagaccgaccaggagaccccagcggagacg

SEQ ID NO: 10903 - RNA, 81 nt, Homo sapiens
cgggacggccgcaagacccgcccagcagccgcaacccccacaggcgcgccgagacccagccggccccgcgacagcgggagc

SEQ ID NO: 10904 - RNA, 78 nt, Homo sapiens
acccagaagaagcacaaaacagaggaaacccagcggcggcagaaccagccggcacaaagccgaaccagagagagcaac

SEQ ID NO: 10905 - RNA, 75 nt, Homo sapiens
cacacccgcaaggagacgcagagcggagcggagaggaggagccaagagagggaggagccaggaggaggaaaggac

SEQ ID NO: 10906 - RNA, 54 nt, Homo sapiens
ccgggaccaacacacacccacagcagaccacagaggaagaaacaagcgagagga

SEQ ID NO: 10907 - RNA, 78 nt, Homo sapiens
agagaagaacagcacaggacagaacccgggcggggccggacggggggagaaggaaaagggacaaagcagccgggaaga

SEQ ID NO: 10908 - RNA, 56 nt, Homo sapiens
caggaaagacaggaggccacccccaaagaaaagcaaaccagccggcgggcgccaca

SEQ ID NO: 10909 - RNA, 62 nt, Homo sapiens
agcagacgaccagggaaaacaaggcagcggaggaggagaaagagaggacccccggaccggcc

SEQ ID NO: 10910 - RNA, 119 nt, Homo sapiens
gcagccaggccgagaaccccagcggagaaccaccgcacaagagccaagaacaagggccgcgagggaagacccagagagggaccagggccaaagaagagccggggggcaggcggacagca

SEQ ID NO: 10911 - RNA, 67 nt, Homo sapiens
gaggacgggacacgggccaagggagcgaaaagaacccccaaaaggcagaaaggaggacaccacagac

SEQ ID NO: 10912 - RNA, 76 nt, Homo sapiens
gggggggcgcgccggaaaccggagcgcgcagcaggacagaaaccacggggcgaagaacaagccaccacaaacgcag

SEQ ID NO: 10913 - RNA, 81 nt, Homo sapiens
ggcaccaggccaccacagaaacaaaagcaacaaagaggagaagccggccccaaacaggaacacgaagagccccccaaagga

SEQ ID NO: 10914 - RNA, 90 nt, Homo sapiens
agcgcgagcgggaacgcgagaaagagcgcgagcgcgagaaggagcgcgagcgaacgcagcggaagcccaggggaggcaggcaccgaagcg

SEQ ID NO: 10915 - RNA, 91 nt, Homo sapiens
gacaccgcacgcgcacggacggcacagcccgccgaacccgaaaggagggaaagagagggacgaaaccccagacacaagaaaaccagcaaac

SEQ ID NO: 10916 - RNA, 79 nt, Homo sapiens
ccgcaagcaagaggccaggacccgccaggagaagggaagcaaggagaaggagaagcagagacggcacagcagccacgag

SEQ ID NO: 10917 - RNA, 54 nt, Homo sapiens
cggcggggccgcagcccaaggaaggcgggacccggcggcgccgcccaccgcagg

SEQ ID NO: 10918 - RNA, 70 nt, Homo sapiens
gggcgaccgagggcgcagaacacacaaagggaagagaaagccaaacccacccccgggcaggcagacgccg

SEQ ID NO: 10919 - RNA, 76 nt, Homo sapiens
cgggcgggcggcgggcaagcacacaagaaggaaccgaacacagggagggccaagaacccccgaagagggaaagcgg

SEQ ID NO: 10920 - RNA, 74 nt, Homo sapiens
acccgcccaggacaagccgcgcggggacccgacgcccgcacgccccacacaaggagagcaagcagggagggccc

SEQ ID NO: 10921 - RNA, 77 nt, Homo sapiens
ccccaacgaagcacccaagggcgggagaaccaggaagccggaggagaaggaggaaggaccaggacacaaggaaaaca

SEQ ID NO: 10922 - RNA, 67 nt, Homo sapiens
agaggaaaaaagccgaaagggcggagaaaagaaagccgccgcggagaggccggaaggaccacggaaa

SEQ ID NO: 10923 - RNA, 80 nt, Homo sapiens
aagcggcaccgaggccggggccaacgagccaacgccaggcgccgcccacaggggacggaaagagagccgcagcgcagaac

SEQ ID NO: 10924 - RNA, 73 nt, Homo sapiens
agggccggaaaccggaggcaggaaacgcagcaaagccacgggggagaaggcacccgggaacagaaaggagagg

SEQ ID NO: 10925 - RNA, 76 nt, Homo sapiens
aaagggagcacaccaaagcacaagggaaacagaacgacagcccgcaccgacgccggcggccagccagagagcacgc

SEQ ID NO: 10926 - RNA, 78 nt, Homo sapiens
aaaggcaccaggccaccacagaaacaaaagcaacaaagagggacagaaggcgggaaaaaaggcaaacgacagagccaa

SEQ ID NO: 10927 - RNA, 81 nt, Homo sapiens
gggagcggaaacccaacagaccagccccccccagacgaagagagagcagagagagagcgcgagagcgagaacgcaagaaaa

SEQ ID NO: 10928 - RNA, 77 nt, Homo sapiens
cggaaccaaagaaaaacagaaagaggaaaaccagagaaacaagaggaggaggggaaaaaacccaggaccaaaacaga

SEQ ID NO: 10929 - RNA, 72 nt, Homo sapiens
gacaacaaaaaccccgaacagcgaaacgcagcagagcgaagcgaggacacgggaggcagaggcgcaaaagga

SEQ ID NO: 10930 - RNA, 75 nt, Homo sapiens
cgacggcccccggagacaccgccagagacaccaacgaagaggaaagaaaaaggcaacaggagaaaaaaaccgagc

SEQ ID NO: 10931 - RNA, 68 nt, Homo sapiens
cggaaaccaaaccaacaaaaagaaggaaccaagagacggacaacaacaacggccaccgaacagaaccc

SEQ ID NO: 10932 - RNA, 73 nt, Homo sapiens
agcagacgagaaaaggacgcgacacaagcacaaaagcggaggaaaagaacgcaaggagggacaggacggaagg

SEQ ID NO: 10933 - RNA, 74 nt, Homo sapiens
cacgaggcgcgcgaggagaggccggggcagcagggccccgcccccgaaggacaggcccgaagaggcacaggagc

SEQ ID NO: 10934 - RNA, 79 nt, Homo sapiens
ccgaaggggacagaaggagacggaacgcacagaggaacgagcgagcggcagagcgcaccagagggaacacaagaccccc

SEQ ID NO: 10935 - RNA, 56 nt, Homo sapiens
ggcggaggaacagcggcagccacaggagccaggagcgagaacccgagcagcgccag

SEQ ID NO: 10936 - RNA, 79 nt, Homo sapiens
gggagcgagccagcgcgccgcgaggggggagagcgagcagcgggccaaggaaagcggagggagccccagaggacggcca

SEQ ID NO: 10937 - RNA, 72 nt, Homo sapiens
ccacacacaccacaggaagccagaccgaaaagacgcggccccaaaggaaacacccgaagaacacagcgccag

SEQ ID NO: 10938 - RNA, 59 nt, Homo sapiens
ggggacggggggaggcaggaccggaccgcaacaggcgagcccaggacacacgagaacgc

SEQ ID NO: 10939 - RNA, 59 nt, Homo sapiens
gagaagccgaccgaacgcgccagcgcggggcaacaggggagaagcagaccgcaccaggc

SEQ ID NO: 10940 - RNA, 75 nt, Homo sapiens
gccgggagcaggacaaacagcagcaggaaagaccacagcaagaccacgcccccagccgggggaccaggccgaacg

SEQ ID NO: 10941 - RNA, 80 nt, Homo sapiens
caccgcgagaagacaaggaccacagggcgcaagaacagcgaaaaagagagcagcgaggaaggagccagacgccaacccga

SEQ ID NO: 10942 - RNA, 78 nt, Homo sapiens
cagcagaaggaagccaccaagaagggcaaagaaaaggagccagggacggcccccaggcgcgaccagaagaagaacaaa

SEQ ID NO: 10943 - RNA, 81 nt, Homo sapiens
gcgcgccaagggccgacacaacaccgagacaacgacagcccagagcaagcacacggaggcccgggagccagaccgggagcc

SEQ ID NO: 10944 - RNA, 94 nt, Homo sapiens
gacgcaggacccaagaggaagaaagaacgaaaagaacagagccgcacacaggggaccgcaaaacagagaccggaaaagagaaacagaaggacac

SEQ ID NO: 10945 - RNA, 77 nt, Homo sapiens
aacaaaaaaagaggcgaccagaaacaacacagaagacaaagcacgcagaaaagcacagccagggcgaaagaagaccc

SEQ ID NO: 10946 - RNA, 75 nt, Homo sapiens
agagacgggacaagacagggcaaaggacagaccagccggccagaacacacagaaaagggccaaaggaagaagaag

SEQ ID NO: 10947 - RNA, 75 nt, Homo sapiens
ggccgcagccgacagaggaccgacagggaggagggagaacacagccaccgaccacgggcccaacaaggcgcaccg

SEQ ID NO: 10948 - RNA, 89 nt, Homo sapiens
acccgcaggccagaccccgggagcccagccaccacagacagagccccagcccccagcagccgacaggaggcccgcaagagcaggcaggc

SEQ ID NO: 10949 - RNA, 81 nt, Homo sapiens
ccaaccccaggaagccagcgggggcagccagccgagggccaccgggaaggacagaaggcccgggcccccacaaccgggccc

SEQ ID NO: 10950 - RNA, 82 nt, Homo sapiens
acgcgcgggggacccgcggacacaccgccccgagggagacaacccaccccaagagccgcgcaaacacaacgcgagaaaggcc

SEQ ID NO: 10951 - RNA, 49 nt, Homo sapiens
cgaccacgagcccccaggccgagagaggagccaggaggagagaacaaga

SEQ ID NO: 10952 - RNA, 79 nt, Homo sapiens
ggccccgaggacaaggcagagcagaagcccaggaaaaccagggcggcggcccaccccccggccagagagcagacaaaga

SEQ ID NO: 10953 - RNA, 82 nt, Homo sapiens
ggaaagcagcaagagaagagaagccgccgagaaagaccagcccaaaaccaggcccaaggaacgagagaggaagcaaagaaga

SEQ ID NO: 10954 - RNA, 78 nt, Homo sapiens
acaacgagagaccacggaggcagacccagaaagcggcagcccagaaccggaagcgaccacggacacaaacgccagaga

SEQ ID NO: 10955 - RNA, 56 nt, Homo sapiens
caaaaggaaaacgaaccagggaagacaaggggaagcaacaccagagaacacggaag

SEQ ID NO: 10956 - RNA, 79 nt, Homo sapiens
cagaaggagaacgcaaggaagaacaggaaccagcagcaaagaaggcacggaaagagaggcaccgaaggacagaagagga

SEQ ID NO: 10957 - RNA, 74 nt, Homo sapiens
gcgcggaaggcagccaaaagggcaaggaccaaagacccgagggaggcacagaaagaagaaccaagacaccaaag

SEQ ID NO: 10958 - RNA, 92 nt, Homo sapiens
cacaccccaggaaaaagacagcccgcagcacgaccagcaggaacggacaaggagcaccaagaaccgacccagaacgcaaacagaccaaggcg

SEQ ID NO: 10959 - RNA, 74 nt, Homo sapiens
ggccaacggggagacaaagaagagccgaaagagccaaacacccggaccagccaggccgaaacacccacaggcaa

SEQ ID NO: 10960 - RNA, 38 nt, Homo sapiens
ccacacggacacccggcagagccacacccagcaggagg

SEQ ID NO: 10961 - RNA, 70 nt, Homo sapiens
cagccaaggagcacacagcacggacgaaagggcggaagaccggccggaaaaagggaaagaacaaaacaca

SEQ ID NO: 10962 - RNA, 79 nt, Homo sapiens
ggaacggccaaacaacagggaaccaaggggacaaaccaacagaagggcaaccagagccgagaaaaagcggaccgggcac

SEQ ID NO: 10963 - RNA, 102 nt, Homo sapiens
aacagacagaacaaaacacaaaacccgagcacagaaaagaaaaggaccggaggacacaccggaacaaagaaaaccaaaacgcaacagaaacaacaggcaaga

SEQ ID NO: 10964 - RNA, 87 nt, Homo sapiens
acgggacagagcggcgggacagcccaagggccagcaccgcgcccaggcagagccagacccgcagacccaggggagcccaccagccag

SEQ ID NO: 10965 - RNA, 74 nt, Homo sapiens
aaagcgagaccacagaaaagcaaacaaggcgggaagaagagagaaggacggagaagcgaaagccagaccggcaa

SEQ ID NO: 10966 - RNA, 55 nt, Homo sapiens
cccgagcagggaccgccgcgcacgggcaaggcgacaggggcgaggaagagacagg

SEQ ID NO: 10967 - RNA, 74 nt, Homo sapiens
gggacgcgccccgaaccaggcagcacccccagaagccagacgccgggaaggccaaacccagacacaggaaaacc

SEQ ID NO: 10968 - RNA, 88 nt, Homo sapiens
caggaaaagccggccacgcaggaacgaccagaaaagcggaagaagaaagagaaagcgaaaagaaagagagaaaaaggcgagaagagca

SEQ ID NO: 10969 - RNA, 66 nt, Homo sapiens
caccgagggccaggcgaggaggacaaaagagccgcaagaccggggccaaccacccaagacaagcag

SEQ ID NO: 10970 - RNA, 75 nt, Homo sapiens
gggccgccagggaagaccacaacaagcaagcagcagcacgcgaaaggaagagagaagggcacagaccaagacaac

SEQ ID NO: 10971 - RNA, 77 nt, Homo sapiens
cccaagaagccaccccccacaccgaggccccagccgcgaagacgcccagcccaagagggcacagaagccggagcggg

SEQ ID NO: 10972 - RNA, 82 nt, Homo sapiens
gagaagcagaagggcggagccacaccgcgagcgggagcagcgcgagaacgcaaacagcagacggaagaccccacggcaaaac

SEQ ID NO: 10973 - RNA, 61 nt, Homo sapiens
accccgccgcggcgggaggaaacggcgaggaaagagaggagccccggaaagaaaaggacag

SEQ ID NO: 10974 - RNA, 78 nt, Homo sapiens
caggcgaccggaagccgggacgggcaggggaccacgcaggagcagcacaacggacccagccgggcgaacgaggccgac

SEQ ID NO: 10975 - RNA, 66 nt, Homo sapiens
caccaaacgggaacacaggagggagaacagaaggggcaagagagagaagaagccggcagcccggcc

SEQ ID NO: 10976 - RNA, 58 nt, Homo sapiens
gaagaagcaacagacaaaagggccacagcggacccagcgagaaagccacccacagacc

SEQ ID NO: 10977 - RNA, 75 nt, Homo sapiens
gcccccaggcggaacgcccgccccgcagagagcagagagcgcagaagacaggacaaaaagcccacacaacaccag

SEQ ID NO: 10978 - RNA, 72 nt, Homo sapiens
gcagcgggcgccgacaggcgcgcggggagccgcggggcggagcgggggccaagcagcccagccggggccggc

SEQ ID NO: 10979 - RNA, 80 nt, Homo sapiens
cggaccccgccccgacgaggacgaccaacaggcagcagcgggccccgccaccggcacaccgaaggaaccccacgaaacag

SEQ ID NO: 10980 - RNA, 62 nt, Homo sapiens
ggagaagcagagccccagcgagcccagccgcgcaagggcacagaagaaacagcacaaagcac

SEQ ID NO: 10981 - RNA, 63 nt, Homo sapiens
acgacgccgggaccggccaagggcccacacaccaagaccaaggaaaccccccaggcaagaggc

SEQ ID NO: 10982 - RNA, 69 nt, Homo sapiens
aacagcagcacaccggaagacccacggcaaagacgggcccagagcaacaaacccagaggccggggccag

SEQ ID NO: 10983 - RNA, 69 nt, Homo sapiens
cacgcaaccaagagggaaggagacagggaagcaaagcgcaacagaaacagagagagcagaaaaaccaca

SEQ ID NO: 10984 - RNA, 69 nt, Homo sapiens
gaacaggacgaccccaaggaaaaaccaagaaagacaggaaacaacaagaacggcgcgaaaagcacccag

SEQ ID NO: 10985 - RNA, 72 nt, Homo sapiens
cagagcccaaaccccaggccaagcagccaccagcagcccccagagcgggaccacagcagaaggagacgcacg

SEQ ID NO: 10986 - RNA, 77 nt, Homo sapiens
acccccaggagaagagcccaagcagcgccagacaaagagcaaggcccgccgacacagccaccaagaaggcacaagca

SEQ ID NO: 10987 - RNA, 48 nt, Homo sapiens
ggcaccggggggaccagggggaagaagcgaaggagaccgcacagcagg

SEQ ID NO: 10988 - RNA, 82 nt, Homo sapiens
gcggggcagagccaccgcgcccgcggccggagacaacgaggcaacgcacccggaccgggccagcaggcaaggccagcaagga

SEQ ID NO: 10989 - RNA, 72 nt, Homo sapiens
ccccagcggaccgaacaggcccaagggccagcgcgccgccaggaccgggcccacgcacaaagaagcgaagag

SEQ ID NO: 10990 - RNA, 78 nt, Homo sapiens
caagaggcggccaaggggacgagcaaaggaagcgcgaacagcagcgcagcagagggacagagcggaggagagcggaag

SEQ ID NO: 10991 - RNA, 85 nt, Homo sapiens
gggaggggagccgcccccagacggccagccgagcggccggacacagccagagggaccacagagcaccagccgcaggaacccccca

SEQ ID NO: 10992 - RNA, 68 nt, Homo sapiens
acggacgagcacgcaaccacgggcccccgcgcgcagggaaacaggccagccacgcagcagcagaagcc

SEQ ID NO: 10993 - RNA, 81 nt, Homo sapiens
agaagagcaaggccacgccggccgcgcgcgccagcaagaagaccgcgcccgagcccaggaaggccgcggaccccccccccc

SEQ ID NO: 10994 - RNA, 67 nt, Homo sapiens
gaaaagacaagggggcaaaggaaccaagaacagagaccagcacaaccagggaagaagacagaaaggg

SEQ ID NO: 10995 - RNA, 73 nt, Homo sapiens
ccgaagccagaagacggaaaaaacagggaggacagagcccaggaccaagagcacaacaacacggaccagaaaa

SEQ ID NO: 10996 - RNA, 78 nt, Homo sapiens
ggccgacggcccggacaccacgcgagccgcgcgccggccaggagcacaccagggaacacaagaaacgaagggaaaaca

SEQ ID NO: 10997 - RNA, 67 nt, Homo sapiens
aaggcggaaaaagacaccaccaacggaaaacaacacagccaggcccacccacagccaaaacacccac

SEQ ID NO: 10998 - RNA, 65 nt, Homo sapiens
cgagaggccgcaaaggccggcagagagaagagggggaaaaaggaaggccgccggacagcgcagag

SEQ ID NO: 10999 - RNA, 79 nt, Homo sapiens
agagaccgaagaggaggcaagcacggggggacgggcaggcaaaggcggaaaaaggcaccagggagaacaacaagaagaa

SEQ ID NO: 11000 - RNA, 68 nt, Homo sapiens
cagagccggaagcggcaggccacaaagccacaggagaggaagacgaggaagcagaagaacaccaagcc

SEQ ID NO: 11001 - RNA, 65 nt, Homo sapiens
gacgccacagagggaagaccccaagcagggagaccagaggccagaccgccgggggagaagcacgg

SEQ ID NO: 11002 - RNA, 72 nt, Homo sapiens
ggaaccgggcagagaaagaggcaagaagaaagagacgagagggccggcagaaaacggaaagacacaacccac

SEQ ID NO: 11003 - RNA, 76 nt, Homo sapiens
gagagggagccaacccccccacgcgcacgccgggggcgaggagacaaaaaagcccaaggacagggcagaccgccag

SEQ ID NO: 11004 - RNA, 75 nt, Homo sapiens
gaaggaccaagaaccagggacaacccgccacaacgacaaaggaccccaaagaccccggaaggcggaccaggcaca

SEQ ID NO: 11005 - RNA, 74 nt, Homo sapiens
gggggaaccccacccgaacggagaaaaacgaccaacaggcacacaaaacacaaggagaagaacccacaccaaag

SEQ ID NO: 11006 - RNA, 52 nt, Homo sapiens
ggcgcccagcgagaaagccgccggccgacgagacacgccggaggaaacagac

SEQ ID NO: 11007 - RNA, 70 nt, Homo sapiens
cccagaagacagagggcgagagcagcaaggcgaaccggcgcggagcggccgggccacaggaggaccgggc

SEQ ID NO: 11008 - RNA, 70 nt, Homo sapiens
gccaaagcagcgaagaagaggcccaacccccaccccgcccaaggaggcccagcgaacagaggagggcggg

SEQ ID NO: 11009 - RNA, 79 nt, Homo sapiens
ggacaggccgcgcacaggccggggaagggccaggccgggcagccgccgacgagcagaaaggaacaggaagcagaagcaa

SEQ ID NO: 11010 - RNA, 82 nt, Homo sapiens
agagaggaagacaacgagaggccggcacagaagggagaaaaggaagaacaaagcaaaaaagcaaaagaaccgaggggaagaa

SEQ ID NO: 11011 - RNA, 38 nt, Homo sapiens
acaaaccgaaaggaaaggccacaaaagccagcaaggag

SEQ ID NO: 11012 - RNA, 81 nt, Homo sapiens
gcgggaacccaccgccaccagcgcgggcgcgggccaaggacacaacagcggaccaagcgccggggcaagcaccccaggcgg

SEQ ID NO: 11013 - RNA, 83 nt, Homo sapiens
cgaacccacggccagcccgagggacagcacaagcaagaacagaagaccggggaccagaagggagaagaagcaaaaggaaccac

SEQ ID NO: 11014 - RNA, 79 nt, Homo sapiens
ggccagcaggccacgcaagacgaaacggaggagcccaggaggaagaagaagcagccaaagaagagaaagaagaacgaga

SEQ ID NO: 11015 - RNA, 58 nt, Homo sapiens
aaggcgcgaggaggaaaggaggacgaggaagggaccacagaccagcacgccggcgcca

SEQ ID NO: 11016 - RNA, 88 nt, Homo sapiens
gaggagcgcagcccggcccgcccaagacacagccccagcagcccccagacccacagacacacccagggaaaacaaaaagccacaacga

SEQ ID NO: 11017 - RNA, 80 nt, Homo sapiens
ccggccccgaggccggcaacggagacccaagaagggagggcaagcagaaagcagaggaaaacgaacaacacccaaagcca

SEQ ID NO: 11018 - RNA, 39 nt, Homo sapiens
ggcaaagaacccggggaaagagccaggaacaccgaacag

SEQ ID NO: 11019 - RNA, 83 nt, Homo sapiens
acccagccgccccagcggcgcggcgccgcccacggaagagcagccccgaggcggacccacacaccgagaggcacgcgacaaaa

SEQ ID NO: 11020 - RNA, 70 nt, Homo sapiens
ccacacaagagcacaacccgggcgggggggacccagccggccaggaagagcaggaagggcagagagcaaa

SEQ ID NO: 11021 - RNA, 94 nt, Homo sapiens
acagcggcgagcagaacacggcgagcgggcggcagcagagaccccggggggcaacaagccccaacagcagggaccaccagccaggcaggccaaa

SEQ ID NO: 11022 - RNA, 108 nt, Homo sapiens
cgcagagccgaggcagaagacggggcccgggaccacaggccccggcccagaacccccccagcgcccgccccagcacccgaagacgccgacaacgcagagcaggccgag

SEQ ID NO: 11023 - RNA, 72 nt, Homo sapiens
aggagggaaacgcgagggcaccaggaggccagaagcaaggaaagagcagggcagaaacagccgaacaacagc

SEQ ID NO: 11024 - RNA, 41 nt, Homo sapiens
cccccaaaggcgagaacagaggagcccaagggggcacaaga

SEQ ID NO: 11025 - RNA, 77 nt, Homo sapiens
ccgcgaaaggaggaggcacagagggccggccgccaagacacccccggcccggcacagaaaacacgcaacaccagcgc

SEQ ID NO: 11026 - RNA, 71 nt, Homo sapiens
aacgccacgcaccggagagagcacaggagaacacccacgaagcaccgccccacgccgagccgccacacagg

SEQ ID NO: 11027 - RNA, 68 nt, Homo sapiens
gaaaaaagagaggagcgaacgagacagaacaggaaaaaggcaaagcgaggcagcaagcggacacagaa

SEQ ID NO: 11028 - RNA, 71 nt, Homo sapiens
gggcagaaggagccaccaaccgcccggacccgcggcaccgcgccccacgccgaccggaagagaagcccggc

SEQ ID NO: 11029 - RNA, 45 nt, Homo sapiens
ggagcgcggcagaggaaacccaaggacgcccccgggccaaacggc

SEQ ID NO: 11030 - RNA, 79 nt, Homo sapiens
ggaagggcaggcgcgcgggccggggagcgcgccggcgggcggacgcggaagcaagaaaggacagcaaagcgaagaagca

SEQ ID NO: 11031 - RNA, 65 nt, Homo sapiens
ggaaacgccgcaacgacagggccgaacaagaaggaacacagaggggcgacagcccagacccgaac

SEQ ID NO: 11032 - RNA, 53 nt, Homo sapiens
gcgggggaaagaggacaacagggaagagcggacaccgcccaaaggacgcccgg

SEQ ID NO: 11033 - RNA, 58 nt, Homo sapiens
gggagcgggagggccggacgggacccacccaacgagacaaaaggcacaacaaaccggg

SEQ ID NO: 11034 - RNA, 79 nt, Homo sapiens
aagaagcaccagaagaaaagagaggaaagaccaccaccccgccagaagaggaaaaaggagaagccacagacaagaaagc

SEQ ID NO: 11035 - RNA, 81 nt, Homo sapiens
cgcagccgagacaccagcccgaaacaccaccaaggagacagggcggcaggcccaggggaggcaggagcagaagccccgaac

SEQ ID NO: 11036 - RNA, 101 nt, Homo sapiens
caggccaagcaaaaaagagccaaagaagcgcaacagaggacgcgagagccggccgaacgggggagcgggcaggcagaagaaggggaacccgcgcccaccag

SEQ ID NO: 11037 - RNA, 81 nt, Homo sapiens
gccacccacgccccggcccgcgaaccaagaaggagcgagggaggagcagcgagacagcaagagacgaccacagagccacag

SEQ ID NO: 11038 - RNA, 83 nt, Homo sapiens
cagaggcagcgggacccgcggaagagccccgcccggggcccgcggcggaagccggcaggacacgaaagcccaacgggagacag

SEQ ID NO: 11039 - RNA, 80 nt, Homo sapiens
caacaaccagaggaggaagcagccacaaggccaagagaaccagcccccgcgacgagcccccaacgagccaccaacaggaa

SEQ ID NO: 11040 - RNA, 58 nt, Homo sapiens
gaagggcaggaggaggaggaggggcccggcggcggggagacggagcaaagagacaggg

SEQ ID NO: 11041 - RNA, 82 nt, Homo sapiens
gggacccggcgaagacgcgaccgcggcgcgagcaccagggaagagcgaaagagagaagcgacaagggaccaggaaagcgaag

SEQ ID NO: 11042 - RNA, 55 nt, Homo sapiens
aaaaaggccagaaagaggagcagagacgccggacaggaacggggacagaacaaac

SEQ ID NO: 11043 - RNA, 55 nt, Homo sapiens
aggaggggagcggggaagggggggccccagcccggccgaacgggcgcacgacaca

SEQ ID NO: 11044 - RNA, 62 nt, Homo sapiens
gcggccaccacacggagagggacggaccccgggcccccccggccagggcgcaggagggaggg

SEQ ID NO: 11045 - RNA, 63 nt, Homo sapiens
gcagcagcgcgagacggacaaaggaaaggggcaagaaaagagcagagccgagaagagaaccaa

SEQ ID NO: 11046 - RNA, 76 nt, Homo sapiens
accccgaacggggggagacgccacggaacgcagaaaagcacgaaacacaaagcaaaacggagaaggacgaagaagg

SEQ ID NO: 11047 - RNA, 59 nt, Homo sapiens
gaagagcaacccgaaaaaacgaaggaagaaagagaggagcgccccgcgcaggcccggag

SEQ ID NO: 11048 - RNA, 52 nt, Homo sapiens
acgggaaggagagcagccagcagagaaaaccagcacaagacacccggaagga

SEQ ID NO: 11049 - RNA, 63 nt, Homo sapiens
gccgagcggacccggaccgggggggagcaaaacgcccaccacggaggcaccgaggacgacggg

SEQ ID NO: 11050 - RNA, 85 nt, Homo sapiens
cgcccagccggcaacccacccaccacacaacaaagggagaacacccagcagaggcgcaggaaaagcaccgaaagaacacggaaag

SEQ ID NO: 11051 - RNA, 70 nt, Homo sapiens
acaggccgccccaacaccagggaagagacacacccaggaagaaaggaaggggcaccacaagacacaaaga

SEQ ID NO: 11052 - RNA, 54 nt, Homo sapiens
gcacaccaaagcgaaaaggcggcaccaggacgccgaaaagcgaccggacgcagg

SEQ ID NO: 11053 - RNA, 67 nt, Homo sapiens
gggagcagccaggaccggaagcagcagacgaacacagaaaggaacagcacagacacaaaaaagacaa

SEQ ID NO: 11054 - RNA, 60 nt, Homo sapiens
cggccgacaccaacccccgcggacccagggagaaaccccccaggcggaggcaagggcgac

SEQ ID NO: 11055 - RNA, 77 nt, Homo sapiens
cgacggggcccgcaccccaggggagcgggaggggccaaccgcgcgagcggcaccagccaccaggacccacaggagcc

SEQ ID NO: 11056 - RNA, 70 nt, Homo sapiens
gaaccagcggacgcggaggcccaaccgaagaaaacaagggacaggagagagggcaagagacgacaagcag

SEQ ID NO: 11057 - RNA, 87 nt, Homo sapiens
ggagaccaaagccgcaagaaagacgccgccccaacacaacagccgcaacaaggacagcggccagggcacacgagacaacagcgcccc

SEQ ID NO: 11058 - RNA, 77 nt, Homo sapiens
aaaaggcaaaggacgcagcgccccaccagccggaaagaacaacaagaaggagaaagacacaacgacagaagaaaaaa

SEQ ID NO: 11059 - RNA, 82 nt, Homo sapiens
cagcaaacaagaaaaggaacggccaagacaagcaaaaagcccacagaagccaacggacaagcaggaacggaccccagaagga

SEQ ID NO: 11060 - RNA, 80 nt, Homo sapiens
agaaggggcaaaagcgggacagcgcagaaaagacagaggccgggacagagcccaaacgagaaggaagccgcggaggaccg

SEQ ID NO: 11061 - RNA, 76 nt, Homo sapiens
agggaccagacacccaagaagaacacggcaagggaaccccccacgacggaaagcccaagaaaagaggaggaggaga

SEQ ID NO: 11062 - RNA, 76 nt, Homo sapiens
gagagcaccgggagggaccacggaccccgcgacagaaagagaccgaccaccgggaggccgaggccacggacaacac

SEQ ID NO: 11063 - RNA, 77 nt, Homo sapiens
gaagagcgcgcgggaaggcccccagacggagggaggacaacaaggggaagacgagggcggcggcagacggggcggaa

SEQ ID NO: 11064 - RNA, 54 nt, Homo sapiens
cacacaacccgacccgacgacggcaaccggcacgcaccagagcagcccacagga

SEQ ID NO: 11065 - RNA, 78 nt, Homo sapiens
ggaagaggcggccggcgaaaggagcgggccggcaagggagggcccaaggccggccaagaaagagcggccagcccaaac

SEQ ID NO: 11066 - RNA, 72 nt, Homo sapiens
aaagccccggggaacagaaggagaaagaagagcaagaccaggccaggacaaacgcaggaacggaacagaggg

SEQ ID NO: 11067 - RNA, 68 nt, Homo sapiens
agagaacggaaccgcaaagaccaacacaccgagcaagacgaagagcgacaagcagcaggcgaacacca

SEQ ID NO: 11068 - RNA, 91 nt, Homo sapiens
ggaggacggaaaagaagcacagaaaaggagacgcacccagagaaagaggccacacgcagagagcaaacggaagaacagaaggccccaacaa

SEQ ID NO: 11069 - RNA, 55 nt, Homo sapiens
gaggagagaacccaaagagagaaaaccaaagacgacagcacagaacccccggaaa

SEQ ID NO: 11070 - RNA, 72 nt, Homo sapiens
ggccagcccgggcccccagcggcaaaggccccccaccgaagacaagcgagagcggcaccaaaggcgacacaa

SEQ ID NO: 11071 - RNA, 74 nt, Homo sapiens
cgcccggccccgcagccggaaccacgccagaagggaccgaaaacaaggacacgaggcacaagcacaaaacgagc

SEQ ID NO: 11072 - RNA, 82 nt, Homo sapiens
cccacccaccagagacacagagaaggaggaaacaggccccaggcccgacggccggccggacagggcagaccgccagcagcac

SEQ ID NO: 11073 - RNA, 62 nt, Homo sapiens
ggaggccagggggcgccagaccgcccaaaacgaggagaaaagaagacagaggcgagccgcgg

SEQ ID NO: 11074 - RNA, 72 nt, Homo sapiens
ccaggaacagcgggacccaggaaaaccaagcaccgacggaaacaggcgaaaaacaacgacgaaggaagaaaa

SEQ ID NO: 11075 - RNA, 70 nt, Homo sapiens
ggaagaaacccccagccgacgcccgcgccccccagcaaggcaagaggcgcagagccagagaccggagaca

SEQ ID NO: 11076 - RNA, 74 nt, Homo sapiens
gacaagcccgggaacaaaaacaaacaggagccgcggggcccgcccagaacagaaggacagcaaaccgcaagccc

SEQ ID NO: 11077 - RNA, 50 nt, Homo sapiens
gcagggcgcccccggccgccgggacgcgagaggaagaccaccaaacagac

SEQ ID NO: 11078 - RNA, 85 nt, Homo sapiens
agggacggcgcaccacagcccagaaacccgagaggagcaggagcaaccgacaggcgggccggacagcgcgcccagcacaggagcc

SEQ ID NO: 11079 - RNA, 84 nt, Homo sapiens
ggcgagcagaggacccggcgggcggcccgcgggcagaggccaccaaaaagaggaagcagcgaaacacgccagagcagcaaacag

SEQ ID NO: 11080 - RNA, 81 nt, Homo sapiens
gcggaccaagccagacccaaggggagccgggagaaggccccggggggcgggaaaggcagaagacgaggggacaaacgagcc

SEQ ID NO: 11081 - RNA, 72 nt, Homo sapiens
aaccaggcagcccaggcaccaccggagaccgggcccacccgccagggggacaagcagcaaacgcacccggag

SEQ ID NO: 11082 - RNA, 68 nt, Homo sapiens
aggaacggcccggaaacaggaggaccgcgccccagaccaccggcagggaacagccgagcagaccgagg

SEQ ID NO: 11083 - RNA, 56 nt, Homo sapiens
cccagccccagcggcagacggaaacgacagaagcagagggacgcgggaaacagcgg

SEQ ID NO: 11084 - RNA, 75 nt, Homo sapiens
ggggacgcacaaaaagagacccccaggcccaggcgggaagcaggggacgaccccggaaacccggaagagacagag

SEQ ID NO: 11085 - RNA, 85 nt, Homo sapiens
gacccacaaagcagaagaagaggaaagacagaaccagccaacaaaaggagcgagaacccgagcagcgccagagcaacacaccgcg

SEQ ID NO: 11086 - RNA, 82 nt, Homo sapiens
cgcgagccccggaaaagcccggaaacacacacaacgccagccacaaggcagagcccgccagagcccgaaccggagggagacg

SEQ ID NO: 11087 - RNA, 74 nt, Homo sapiens
aggaaaagagacgacggcccaagaacaccgaagacagggccacccgcacggcagcaagaggaaagccgccgggg

SEQ ID NO: 11088 - RNA, 62 nt, Homo sapiens
aggggaaggagacgcgccaccggcaggcagaggagggaacaaaaacaaaaccaacaggacag

SEQ ID NO: 11089 - RNA, 59 nt, Homo sapiens
gaccggcagccacccaacgacggagaccaggaaacaaacagaagcgcacgagaacccag

SEQ ID NO: 11090 - RNA, 74 nt, Homo sapiens
aaggagagcaacacaaggaagcaagggccaccgcccagccaaccacaggcaagaggacccaaaaaggaagaaca

SEQ ID NO: 11091 - RNA, 75 nt, Homo sapiens
cccgcgacgccaaccacgacgaagcggaaggcagaaggccccgcgagaccggcgcggcggcagacagccgccgaa

SEQ ID NO: 11092 - RNA, 64 nt, Homo sapiens
gggcgccacccgggaacaagcagagagaggacagacgcccgaaagcaggcgagcaagccccaag

SEQ ID NO: 11093 - RNA, 65 nt, Homo sapiens
gcaggaggcaagaaaggggaaccccggagaaaaggccaagaaggcaggcaaccagagaagccgaa

SEQ ID NO: 11094 - RNA, 63 nt, Homo sapiens
cgcaccagcagccaccaggagcccgagagagaaggcaggaaaaccgaaagcgccaggccagcg

SEQ ID NO: 11095 - RNA, 70 nt, Homo sapiens
agcgcgaggcgggcgcggagaagcgcggagacggagcgcgccccaccgcggccgccggggacacagagcc

SEQ ID NO: 11096 - RNA, 89 nt, Homo sapiens
ccggcccccacgggcggcgcagggggaggggcaggcggcagcacggggcggggccggaaggccgcgcaggagcgcaggagggccagcgc

SEQ ID NO: 11097 - RNA, 75 nt, Homo sapiens
agagacgacaaacaaaaagcgagaagggggacggcaagagcaacaagcagagcaaagaggagacccacaggggac

SEQ ID NO: 11098 - RNA, 55 nt, Homo sapiens
accccccccaggccacagccgcccacaaacaaacagaggagccaccgcacccagg

SEQ ID NO: 11099 - RNA, 77 nt, Homo sapiens
ggcaacaaacaagaggccgcccacacgagcaaccgacccaacagaggaagagagggagagcccgcgcagaggagacg

SEQ ID NO: 11100 - RNA, 92 nt, Homo sapiens
caaccggaggacacagccagggcggacgggaaagcagagagagcgcgcgccgcgcgcccgcacaaacgccggggacaacaacccgaagacca

SEQ ID NO: 11101 - RNA, 77 nt, Homo sapiens
aagacagagcgcacccggcaggcgcaacagagcgccggcggaccgaagcggcgggcgacacggaaggagaaaccaac

SEQ ID NO: 11102 - RNA, 53 nt, Homo sapiens
ccacggacccaaaccagaagaaaaccgaaccgaggccggcccggaggacacag

SEQ ID NO: 11103 - RNA, 71 nt, Homo sapiens
ggaggaggagagagcgacgcgcacaccaaagcaaggacggaagaggaggaagcgggaacaaggaacaccaa

SEQ ID NO: 11104 - RNA, 61 nt, Homo sapiens
gaggacagcgcacacagcaagcacgagcaggggaaaagcagccagaaaaaaaacagccagg

SEQ ID NO: 11105 - RNA, 54 nt, Homo sapiens
ggagggaaccagcaacaagccgagaggaaaacccaagacaaggaagggcaaagc

SEQ ID NO: 11106 - RNA, 81 nt, Homo sapiens
agacccccacgaacaacaacccagcgccaccacaccaaggccccagggccccaaagcagccaaaacggacaagccaaggca

SEQ ID NO: 11107 - RNA, 64 nt, Homo sapiens
gaaccgaacaaggaaaggaaagacgccaaagaaagcagcaacgaccaagaacagggaacacaga

SEQ ID NO: 11108 - RNA, 72 nt, Homo sapiens
cggagagagcggaagcccggggacgcccccagccagaaacggagcacacaagcaacagcacaggacagggcc

SEQ ID NO: 11109 - RNA, 63 nt, Homo sapiens
gggggaaaggcgaggggaaagggggagaaaacaggaccgccgaggcaagagccacaccaaggc

SEQ ID NO: 11110 - RNA, 68 nt, Homo sapiens
aacggcaggaaggagaacgggccggaaaacaagcaccagaccaaaacaaggacacagcgcagaaacag

SEQ ID NO: 11111 - RNA, 61 nt, Homo sapiens
acagaaagaagaaaagaaagagcagaggaagaggaaagcgaacgaaggaagccgccagagc

SEQ ID NO: 11112 - RNA, 83 nt, Homo sapiens
agacaggagccccagcggcagagagaaagcagccagagcacgagagcgccacgcagagccccgccaggaagacacgccgggga

SEQ ID NO: 11113 - RNA, 58 nt, Homo sapiens
aaaggaaccccaagcgacgcaggcagaagcgagacggcaagggacagacaaacagcgg

SEQ ID NO: 11114 - RNA, 85 nt, Homo sapiens
aaggcgcggcgcgcagagcgaggcgcgggaccccaggagggggacaggaggcgcggggcccagcacagcagcggacacaagccca

SEQ ID NO: 11115 - RNA, 77 nt, Homo sapiens
ccggccaagaaaagacaagaaacaggaaaagaaaccgaaagaacgcgcccaggcagcgcagacgaaacagcgcgcag

SEQ ID NO: 11116 - RNA, 56 nt, Homo sapiens
acgagcgaggcggagggagaaggcaaaagaagcaagaacccaaaggcaagagggac

SEQ ID NO: 11117 - RNA, 93 nt, Homo sapiens
agcggagcgcaggacagcgcaggagccccggcgcacgcggcgcgcacagacccaggccgcgccagccccaagccccccaccagccagagcccc

SEQ ID NO: 11118 - RNA, 65 nt, Homo sapiens
ccggcagccaccccacgggaagccccagccccagaggaaggaagcacgcagagaaagagcagaaa

SEQ ID NO: 11119 - RNA, 36 nt, Homo sapiens
gaaaagcaacggagccagggggcacaccaggacaga

SEQ ID NO: 11120 - RNA, 83 nt, Homo sapiens
ggccgaagccccgccagcccagcaaagcagacggccgcacgcgacccgaaggcccggaggcggagccgcacgagccccgaaag

SEQ ID NO: 11121 - RNA, 75 nt, Homo sapiens
ggggcccgccagcaaacaacccagcgcccaggcagcgcagcgaggccagccaaaagccaaaagcacaccgacccc

SEQ ID NO: 11122 - RNA, 101 nt, Homo sapiens
gaccaaaagcagagacaggaccggcaggagagacgggagcccgacacagacagggcggaagggaacgccgaacggcaagagagagaggaagcagagaaccc

SEQ ID NO: 11123 - RNA, 83 nt, Homo sapiens
cgagagccgcccgggccagcggccgcgcacccccggccggaggcaccagcacaagcagaccggaagaccgacggaagaccaca

SEQ ID NO: 11124 - RNA, 74 nt, Homo sapiens
ccaccgccgaaacagagaagacgcaacagcccacagaggcaccaaaccagggccccccggagccccccgagaag

SEQ ID NO: 11125 - RNA, 52 nt, Homo sapiens
gcgagaagaggagaggggaagcaaacgaacacaagagacagggaacaccaga

SEQ ID NO: 11126 - RNA, 66 nt, Homo sapiens
accggcaaaaaagcaaagaaagaagcaccgaagggacaggcaagagcccaaacaggagcccaaggc

SEQ ID NO: 11127 - RNA, 77 nt, Homo sapiens
acaccgacccacaggagcgcccgcggaggagcgcccgggagaccagaaagcgggcaacaccaaccgagacgcgagag

SEQ ID NO: 11128 - RNA, 78 nt, Homo sapiens
aaaggaagcaacaagagcgcaacaagagcacaccagaccagagcacgggcagcagcgccaagacaaggcagcgggcca

SEQ ID NO: 11129 - RNA, 71 nt, Homo sapiens
accagaggaaagaacggaaaaaaggcaccacagaaaagcaaggcgaaggaggacaggagacgaccgagcag

SEQ ID NO: 11130 - RNA, 73 nt, Homo sapiens
ccgcggccaggcgggggcggcgccaagcgggggccccgaggacggcgacggaggggaacgagcagcgcagcgc

SEQ ID NO: 11131 - RNA, 81 nt, Homo sapiens
ggccaccgggccgagcaggaggagccacgccgcggcagaacgggccggaaggccaggcccagggccccggccaggcccagc

SEQ ID NO: 11132 - RNA, 77 nt, Homo sapiens
cacaaacagcaacacagaacgcaagaagggaacaaaccggcagaaaaagcagagccggaagcacccagacaagcacc

SEQ ID NO: 11133 - RNA, 77 nt, Homo sapiens
ccgggagcagcagagaggagcagcggaagccgggcgcgcccccccgcgggcgccgcccaggcggggcggaggaagac

SEQ ID NO: 11134 - RNA, 74 nt, Homo sapiens
agcaacacgaagaccgaggaaaagcgcggcgcccccccccaacacacgcgacacgaagaagagaggagggaacc

SEQ ID NO: 11135 - RNA, 58 nt, Homo sapiens
ccaagaacaagcacaaagccacagcgaccaaggggaagcgaagggaagcacgaacccc

SEQ ID NO: 11136 - RNA, 78 nt, Homo sapiens
agaagacgaggagagcggaaaaaccccaaggcaaaccgacaccagcgacacaagcgcgagggaaccacagaggacagg

SEQ ID NO: 11137 - RNA, 45 nt, Homo sapiens
ggcagacaaaagggccaaagaagggagagagagacacaaaagcac

SEQ ID NO: 11138 - RNA, 68 nt, Homo sapiens
ccagccaaggacccacggggccagggggcagaacagggaagccgacagcaaggcggaaaagaagcagg

SEQ ID NO: 11139 - RNA, 78 nt, Homo sapiens
gaaagcaaaggagcagggaggcccccagaaccagcccccccaagccccggggccagccacaagccccaacaaacagca

SEQ ID NO: 11140 - RNA, 82 nt, Homo sapiens
cgcagccgcggggcgcaggaggcgggcacagcgccaagcaagccaggcggcagacaaacggaaccaaccaaagcaaaacagg

SEQ ID NO: 11141 - RNA, 61 nt, Homo sapiens
ggagagacgccacgaacagccacaaccagaacgaccagaaaagcggaagaagaaagagaaa

SEQ ID NO: 11142 - RNA, 71 nt, Homo sapiens
acacaagggagcccccccaccacccccgagcagcagggagaccagaccaggacagaccggcaggagggagc

SEQ ID NO: 11143 - RNA, 69 nt, Homo sapiens
acaacaggacccggagcagaagaagcaggaccgcggggagcgaagcgcgcggagcacgcccggccagga

SEQ ID NO: 11144 - RNA, 85 nt, Homo sapiens
acccaggagcccgaaagagcacgaggagccagaaacgcaaagggcgagccagcccccacccagaggagaacgaaaccacgacaac

SEQ ID NO: 11145 - RNA, 73 nt, Homo sapiens
gaagaccgcaagggaacaaggagaagagcaggacacagagaaccaagacagcaccagacaaagggcagaacgg

SEQ ID NO: 11146 - RNA, 64 nt, Homo sapiens
aaagaggccacagaggcagccaaggaaccgcggcagaaaaggagccgggaaaccgaagaaggca

SEQ ID NO: 11147 - RNA, 80 nt, Homo sapiens
cacgaaggcaccgacgcacagcgaccaccaacagaccgaagggggcccacgagaagagcaggcgacgggggagagggaga

SEQ ID NO: 11148 - RNA, 80 nt, Homo sapiens
agaggagacaccgggccgaccccggcggggcaggggacagccaaagaccggagcggagagagaagaaacaggccacagag

SEQ ID NO: 11149 - RNA, 78 nt, Homo sapiens
acccaggagacgacacggagcgggaagacagggccacccggagaagagaagccccagaaaagggagaggcccgcccca

SEQ ID NO: 11150 - RNA, 69 nt, Homo sapiens
agaacagcgacaaggagagaagcgcggagccccaagacacccgagaacaccccagggagaaaggaaaaa

SEQ ID NO: 11151 - RNA, 72 nt, Homo sapiens
cccccccagagccccgccggagaccccagcccggcgagacacagcaccagagaaaaaaaacggaccaccgcg

SEQ ID NO: 11152 - RNA, 65 nt, Homo sapiens
ccccgcaacaccgcggcccacgggacccccaggagggacccgcaggcggaggcagggcggaccgg

SEQ ID NO: 11153 - RNA, 61 nt, Homo sapiens
gcggaaaaccgacacaacagcccgaagagccaaccacaggagggaaaccacgcaggcaaac

SEQ ID NO: 11154 - RNA, 70 nt, Homo sapiens
ggccaaggagaggccgcaacggacaaggcccgccaagcaccacaccccggccgcaggaagccggggcagg

SEQ ID NO: 11155 - RNA, 56 nt, Homo sapiens
caaagcaccgacagcgggcagccgaggaagcccagaggcacggggcagaacaccaa

SEQ ID NO: 11156 - RNA, 73 nt, Homo sapiens
gaagagaaagagagaagccaaaccccagcaaacaggcgaagaaaaggcagaccaagcccaccggcgcccgcac

SEQ ID NO: 11157 - RNA, 64 nt, Homo sapiens
gagccagaaaagggagcgccccccaagggcaccagagaccagggacaagagacccaacagagaa

SEQ ID NO: 11158 - RNA, 78 nt, Homo sapiens
ccggcgcgagccaagcgcgcgccgacggcccgccacgggccccgcagccgcgcccgagcgcccgagcagggacagcga

SEQ ID NO: 11159 - RNA, 46 nt, Homo sapiens
gcgcggccggacaccagagaggaaacagcagaagaaagaagcgaca

SEQ ID NO: 11160 - RNA, 70 nt, Homo sapiens
gcgggcgcggccggaccgcagccgcaagcgggccaggcacaggcgagaacggcacaggggcacggagcca

SEQ ID NO: 11161 - RNA, 73 nt, Homo sapiens
ccgaagagccccccaccgaacggagcagggaccacggagaaccacggggaccaagaagcgagcagcccaaacg

SEQ ID NO: 11162 - RNA, 36 nt, Homo sapiens
acaagggcagccaaacgagcaggagaaccccaagaa

SEQ ID NO: 11163 - RNA, 39 nt, Homo sapiens
agaccacacaaggaaggcagcccggaccgacaggaaaga

SEQ ID NO: 11164 - RNA, 36 nt, Homo sapiens
ccgcaaggggacgcccaggaggagggacagacgaga

SEQ ID NO: 11165 - RNA, 72 nt, Homo sapiens
cggccaggacagcagagcagcagccaagggaaccaacgaccacaaccaggcacagagcacaggaaggagccc

SEQ ID NO: 11166 - RNA, 41 nt, Homo sapiens
aaaagcgaggcaaggcaggcggggggccgagacaacaagaa

SEQ ID NO: 11167 - RNA, 75 nt, Homo sapiens
aagaagagaagcagaaaaccagaagcacaaggacagagcacccaccacaggaggagaagaaggaggcccggagcg

SEQ ID NO: 11168 - RNA, 74 nt, Homo sapiens
ccgccgcgcccgcccgacccgccaccgccaggccagagccaggacaaaaccaggcagaaccaacacgaacccaa

SEQ ID NO: 11169 - RNA, 81 nt, Homo sapiens
agacggcggaggggcggacgccacgccaaagcaccggcagcgcgaaggacagccaggggagcggggagggggcccgcaagc

SEQ ID NO: 11170 - RNA, 80 nt, Homo sapiens
ccgagcgccgagaaagccccgggagaagcagcgccgcccggggcagaccaggcagggaaacccagacgacaaggaaggcc

SEQ ID NO: 11171 - RNA, 54 nt, Homo sapiens
gcgcgcgcggcgggggcgcaccagaccgccgggcaggagaaccgccggggagca

SEQ ID NO: 11172 - RNA, 78 nt, Homo sapiens
ccagccaacagcagaagagaaagccagaccacggacggaagacaaaagaggcaaggaagagaaaggaaccgcccgaac

SEQ ID NO: 11173 - RNA, 69 nt, Homo sapiens
cccaggagaacacacaaccaacaacgaagagaggaaagaagcggaaaggagggagcacacaacaaggag

SEQ ID NO: 11174 - RNA, 115 nt, Homo sapiens
gagagcaagcgcaccagcccgcaaaagcgagagagccacagcccgccgccgcgcgggggagcccagcacagaccgccgccgggaccccgagcgcgcaccccagccccaccgccca

SEQ ID NO: 11175 - RNA, 75 nt, Homo sapiens
ggaaagcaccgaggcacaacagggaaagaagaacgccagaaaaaaaccagaaaaaaggagagaagaaaggcacag

SEQ ID NO: 11176 - RNA, 49 nt, Homo sapiens
gaaggagcagagagaaaggagagggcgagaggagcgcccggcagaccag

SEQ ID NO: 11177 - RNA, 71 nt, Homo sapiens
ggaaggccggaaaggaccagaccgcccaggaaacgaaacacaacacacgcaggacgcaaacgccaccggac

SEQ ID NO: 11178 - RNA, 55 nt, Homo sapiens
gcacgagaccaaaaagcgccagccggaagcccgagggcagcgcccacggccgcga

SEQ ID NO: 11179 - RNA, 53 nt, Homo sapiens
gcccccggacgcccccccgcaaccccgcagccaagaagagggaaagaagacag

SEQ ID NO: 11180 - RNA, 55 nt, Homo sapiens
ggggaagaaagagaaagcaggaagccagccagagcagcacaaccagagaaaccac

SEQ ID NO: 11181 - RNA, 76 nt, Homo sapiens
ccccagcggccgcagggccgacaagcggaccaagccagacccaagggcaggaaccacagagaacagcccggacacg

SEQ ID NO: 11182 - RNA, 80 nt, Homo sapiens
ggaaagaaggcaaaacacgggacaccaggggggaaaaaccacacaggcaaagaacgcgcaaaacaggacgaaaacaaagg

SEQ ID NO: 11183 - RNA, 79 nt, Homo sapiens
agaacccgacgacccgaggagccagggcggacaacaagccccgagaaccaagaacggaagaccagcccggacccaacga

SEQ ID NO: 11184 - RNA, 78 nt, Homo sapiens
gccagccaggagagagagcaccaccggcgcggacgaccggagacccgccacaccaggcgagaacgcggacaagcaaac

SEQ ID NO: 11185 - RNA, 87 nt, Homo sapiens
gaagcgaggagacagaagacagagccaaacacccagggaccaagaaaggcccagggaccaaagcccggacaaggcccgagcaccagg

SEQ ID NO: 11186 - RNA, 73 nt, Homo sapiens
accccccgccgggagggccacaggaggcggcgggccccgcccgccgaagggagggaaaaaaaagaagacaaca

SEQ ID NO: 11187 - RNA, 88 nt, Homo sapiens
agccccccccgaccacacaccagaaccggaggaggaccgcggagggaacaccggcggagaacggaaaagcaccaggaagcagagagga

SEQ ID NO: 11188 - RNA, 75 nt, Homo sapiens
cggaggaggaggaggggaggcgcccccggagccgccccggaggagaaggccggagcaacgagaagagagcagacg

SEQ ID NO: 11189 - RNA, 74 nt, Homo sapiens
aagacccggccggcgccgcggccgcgggaaaaggcgaggagggacgcgacagaaccgccccccccccaccccgg

SEQ ID NO: 11190 - RNA, 72 nt, Homo sapiens
cgacgggccccgagcgacgggcgaagggaggggggcagcggagcccaggcggcagcgccaggaaggccgcgg

SEQ ID NO: 11191 - RNA, 61 nt, Homo sapiens
aggaggagcaggacgccgggcacgcgagcgccgcgggggacaagccgccgcaagaaaagga

SEQ ID NO: 11192 - RNA, 80 nt, Homo sapiens
ggcgggagcgcggaaccgcacaagaggacgcccgcgcacgccccggggggggccaagccgcacgcacaacaagacgagag

SEQ ID NO: 11193 - RNA, 62 nt, Homo sapiens
ccaagccaccccggcggaaccgcccccaggcgccgcgcccggggagacagaaacgaggcgcc

SEQ ID NO: 11194 - RNA, 88 nt, Homo sapiens
cagccagcgccacgacaaagccccccgaaaagggcaaagcggagaagaagcaggcgccccccaccagccacagacacagacgacacgg

SEQ ID NO: 11195 - RNA, 77 nt, Homo sapiens
gaaggcagcggacgcacacgcaccagaaggaaagacaaggagccgggccgagaaaccgaaccagagaccagagaaga

SEQ ID NO: 11196 - RNA, 81 nt, Homo sapiens
aggaaaagccggagaggaccacacaaccgagcagcacagccacacgcgcccggccaccggacaagaagcaaccacggacgg

SEQ ID NO: 11197 - RNA, 77 nt, Homo sapiens
aggggacaaaccgcgacccagcagcaagaccgagcccagcggacccaaaggacccccgcgagagccccaagaacaga

SEQ ID NO: 11198 - RNA, 68 nt, Homo sapiens
gccccgcaggaccgcacccgcggagacggacgcccggcaagacccagagaaaggaacaagacccgcag

SEQ ID NO: 11199 - RNA, 77 nt, Homo sapiens
ggggcggaggggcggaacaggcagccggcaccaccagcagaaacagccgcccagcgaacagcagcacggaccaacaa

SEQ ID NO: 11200 - RNA, 82 nt, Homo sapiens
accacgaaaagggaaacaaagcgaagagaaggggcagaccaacaccacccagcaaaaaccccgacgaacgcgccagggagcg

SEQ ID NO: 11201 - RNA, 73 nt, Homo sapiens
aaaacggccgaaaaaaagccaaaacgaagacagacagcagcccgaggcccaccgaaagggacggacaggcagc

SEQ ID NO: 11202 - RNA, 107 nt, Homo sapiens
gcagggcaccgcgcgaagcggccaaagccgcccagacggccaccggcgggaggaacaaaagcaaggcgccaccggaagaaacgggaggggaggagccgggaaagaca

SEQ ID NO: 11203 - RNA, 81 nt, Homo sapiens
ccagggcgccccggcaaccacgagcccagccaacagcgccccggacgcaccagagccaggcggcaaaccgacaccagcgac

SEQ ID NO: 11204 - RNA, 74 nt, Homo sapiens
cgccgcgagccgcccaccggcgccacgcaagggcgaggcagccccaaacaccggacagaacccggacaaaaagg

SEQ ID NO: 11205 - RNA, 78 nt, Homo sapiens
cccgggaagagccgcggggcaaaaacacaagaagagagcgagaacaccgcaagaaccgcagccccccccaagacgaaa

SEQ ID NO: 11206 - RNA, 64 nt, Homo sapiens
acggccaggaaacggaaaagcaaggcaccgcaagagacagcacgaaccgaagaaacgagaaaac

SEQ ID NO: 11207 - RNA, 82 nt, Homo sapiens
ccagaggagcgcaaggaccaagagggcggagggaaagggagcagcaccggccacacccacagcacgaccggaacccagcgac

SEQ ID NO: 11208 - RNA, 71 nt, Homo sapiens
gcccgcccacccagggccggaaaagccaacgccggcgaaggagcgaaaacgccacaacagagggggccagg

SEQ ID NO: 11209 - RNA, 78 nt, Homo sapiens
ccaaagaagcagaacgacaaaagccaagggcaaacgaagagagggcacccaaagaaaaaaagcgccgagggcgcaccc

SEQ ID NO: 11210 - RNA, 76 nt, Homo sapiens
cagcaacgccggacgcccacgcaagcagggggcacccgaggaggaagagggcagggcccacggaaagaagggaaac

SEQ ID NO: 11211 - RNA, 79 nt, Homo sapiens
caggacccaaaaggcgcagggccccaggggcgccacagccgaggcagcccggggggccccccgagcggcagacaaccca

SEQ ID NO: 11212 - RNA, 74 nt, Homo sapiens
gagcggagaagcgaggacacacaggcaggccggacccccgcacgcgccaaaagggccacccgggccagacgcga

SEQ ID NO: 11213 - RNA, 74 nt, Homo sapiens
agcaggaaggccaccgagggaacccgaccggacccagccccagaaggaggagaaccaggaccaaagcaccagca

SEQ ID NO: 11214 - RNA, 84 nt, Homo sapiens
gcgcccaggcggcgcaggcggccaacgagaggaacggccacgcgccaggaagagaaaagggaccgggagccgaccagggcccga

SEQ ID NO: 11215 - RNA, 46 nt, Homo sapiens
ccgcggcccggcagggggaacgggagggggcgacaggcgccacccg

SEQ ID NO: 11216 - RNA, 66 nt, Homo sapiens
agccacacaaacgccggaccggcacaaaggacccaagaggagcccagccccaaggaaaacaagcag

SEQ ID NO: 11217 - RNA, 59 nt, Homo sapiens
ggaaagcagcaacacaaccaggcccccggccacgcagggcggcacaaacaaggaaacag

SEQ ID NO: 11218 - RNA, 67 nt, Homo sapiens
gcaacgcaaggcaggcaacaaggaggacacaaggaacggagagaacgcagcggaaaagcggcaagaa

SEQ ID NO: 11219 - RNA, 40 nt, Homo sapiens
cccgccgggcgccaggcagccgggaaagagcggcgccacc

SEQ ID NO: 11220 - RNA, 69 nt, Homo sapiens
caaaagcgcagcaagacggccgcgcggcccgcaggggagaccagaaccaggcaaacgacaaaaaagaga

SEQ ID NO: 11221 - RNA, 74 nt, Homo sapiens
agacaccgcggagagacacaccccgaagaaacaggcccagggacccaaggacacaaaaccagacgcgcggccaa

SEQ ID NO: 11222 - RNA, 75 nt, Homo sapiens
gaggagaggagagccagggcagaggagcagcagggaggggaggagcacggccggccaccagccagcgcacgagag

SEQ ID NO: 11223 - RNA, 80 nt, Homo sapiens
cgggaccaccggcgacagcagaaaaaggccgggacagcagaaaacagccagcagaaaaagccaaaaagcaagcggacaaa

SEQ ID NO: 11224 - RNA, 78 nt, Homo sapiens
ccgggggccaccaccgaggagccagcgcccaaggaggacaaaccaaccaggcacacccgaggccagcagcgaaggccc

SEQ ID NO: 11225 - RNA, 68 nt, Homo sapiens
acccaagcaggggagcagcaagagcggcacgccacagagcccacaggacccgacggagaccgacaggc

SEQ ID NO: 11226 - RNA, 65 nt, Homo sapiens
acgcagccaacacacagcccaagaccggaggaagggggaaaaaccagaggcgaaaaagcagaaaa

SEQ ID NO: 11227 - RNA, 75 nt, Homo sapiens
gcaagaagaaacggaaggacaaaacagaagcccccgcacgccgaagggagcgggagccaaaaagcccgaccaccg

SEQ ID NO: 11228 - RNA, 79 nt, Homo sapiens
ccaccgagacgaagcgggcggcgaaggggaaaaaagcagcggaggagaaaaaaaagaagaccgcagcaaggaagaggca

SEQ ID NO: 11229 - RNA, 63 nt, Homo sapiens
gcgggccgcaggagcgcgcggagagaaggagggggcagagcacggcaggcagaaggggccaac

SEQ ID NO: 11230 - RNA, 76 nt, Homo sapiens
caacaacacaggaccccacccccacaacaacaccggcgcacgaaggccgccagagccaggcgggcgcggacggcag

SEQ ID NO: 11231 - RNA, 74 nt, Homo sapiens
aaaagaaaaaacgcagacagcccagagcggcaggcggggcagaagagaccgaagcagcgcggagcacggaagaa

SEQ ID NO: 11232 - RNA, 76 nt, Homo sapiens
agcccaggcagagccgcgacaaacccaggagggcgcggcggaggacccagcagccagcgaagccccaaggaagccg

SEQ ID NO: 11233 - RNA, 70 nt, Homo sapiens
gccggggccaaaagaaaggaaaaagcaagagagcccaacaaagaagagaacccagggcgaccacgggagg

SEQ ID NO: 11234 - RNA, 69 nt, Homo sapiens
aagaggacagcaggcaacagggaggaacaaaagaaaaaggaacgggggaacgacagcagcaggaccaga

SEQ ID NO: 11235 - RNA, 62 nt, Homo sapiens
cccagcacccgccagcggccagcggaaggacaaggacccaccggggccagcagaaagccagc

SEQ ID NO: 11236 - RNA, 68 nt, Homo sapiens
aggcccagacagacagcacgcagggaaggagaacagagggaaaaagaccagagaaagggggggaggaa

SEQ ID NO: 11237 - RNA, 55 nt, Homo sapiens
cagagcaggggcagccgcaacagcgagggagcagccggcaggcagacaaccaaaa

SEQ ID NO: 11238 - RNA, 55 nt, Homo sapiens
gaccgacagggagggagggacggaaacaaagacaggaaggagggccccggagcag

SEQ ID NO: 11239 - RNA, 68 nt, Homo sapiens
aaaaacaaaaggagccgggacagcccccggacccaccgagaaagagaaaaggagaaccacgaaacgga

SEQ ID NO: 11240 - RNA, 78 nt, Homo sapiens
ccaaggagaaggcagcgccgacacccgacggccacgaacccgaggggagaacaaccgcaacgaacaaacaggagacag

SEQ ID NO: 11241 - RNA, 67 nt, Homo sapiens
aaccgagacgccagagccaaagaagccaaagacaagcagcagaccccagggcccgacagcacggaga

SEQ ID NO: 11242 - RNA, 74 nt, Homo sapiens
agagggagccaacccccccacgcgcacgccgggggcgaggagacaaaaaagcccaagcccgccgggacccacca

SEQ ID NO: 11243 - RNA, 75 nt, Homo sapiens
ggacagcacaacagagaagacagcaccaggccaaacacaagaagcaagaagggaagcggcaggagcaaaacggac

SEQ ID NO: 11244 - RNA, 84 nt, Homo sapiens
agcagagcgacagcggcgagcagaacacggcgagcggaaacaagggaaaagaaaggcggcgaagaagagccgagagggaggaaa

SEQ ID NO: 11245 - RNA, 59 nt, Homo sapiens
ggaggagggaccacgcgcgagaccaagggaacggaagccccagcccgcgcgagccaggc

SEQ ID NO: 11246 - RNA, 82 nt, Homo sapiens
gcccgccgcgcgcccgacgccccgcgggaccccccgccggaccccacagcaacaaggcgaccaacgacgaagagcagagcag

SEQ ID NO: 11247 - RNA, 64 nt, Homo sapiens
ggaaccacaaggacgcggacaacggggaccgcagcggaacaccaaacggaggagccagacccgg

SEQ ID NO: 11248 - RNA, 83 nt, Homo sapiens
gcacgaaggggagccaaggagcaggagcggccaggagggggggaagaaccgcggcgacccccaccccaggagcaacccagccc

SEQ ID NO: 11249 - RNA, 83 nt, Homo sapiens
gaggaaaggaggagaacaggaagagcacgaggccacgccaggaaggacaaggagccgggccacagcgagacagccaccccgag

SEQ ID NO: 11250 - RNA, 85 nt, Homo sapiens
cgcgagggcacacagcacccgaaagagcaaagaggacaggaagggggggagagggcagaaggccccgagcccagggcggaacaca

SEQ ID NO: 11251 - RNA, 36 nt, Homo sapiens
ggggccaacagcggaacccgaaaacgagggaggagc

SEQ ID NO: 11252 - RNA, 79 nt, Homo sapiens
aagccgaaggaccagaagaagagaaccaggagcggcagaccgccgccaggaggaggcacgcagcccgagaaggagccac

SEQ ID NO: 11253 - RNA, 71 nt, Homo sapiens
agcaaaaggacccaagaacacgggagacacacacaaacggcgaaccccaaggacgggaccccgagccagca

SEQ ID NO: 11254 - RNA, 85 nt, Homo sapiens
cgaagggcagggaccggaaaccaagacgccacccaggccgcaacccggagaagcaagaggggcgagaaggagcgcagacacagac

SEQ ID NO: 11255 - RNA, 77 nt, Homo sapiens
ggagcagcagcgagaagaccagcacacagcagcagacgcagccccaaaaacgcaagaagacgaggagccgccgcacc

SEQ ID NO: 11256 - RNA, 72 nt, Homo sapiens
gcgcgagggcgggggcagcggcagacgcgcagaagaagcccacccagaacgccccccagggaacccagcacc

SEQ ID NO: 11257 - RNA, 77 nt, Homo sapiens
ccggcgggacgaccacgcacacgagaacagccggcagagaacacaccgccggaagaggaaaagaaaaaacaaaaaag

SEQ ID NO: 11258 - RNA, 70 nt, Homo sapiens
caccaaggcagagaagaaagcggaagaggcagaggacagacacaaaaagacgacgggagcggggcgccaa

SEQ ID NO: 11259 - RNA, 72 nt, Homo sapiens
gcaggccagccccggcaggccaagcagaaccacaggagggggaaagaacaggagagcgcaaaggaacagggg

SEQ ID NO: 11260 - RNA, 81 nt, Homo sapiens
cggcgaggaggcgccacacccccccgacgccgcgcggggacgcaagccccccaggggaggaggcacacagccacccggagc

SEQ ID NO: 11261 - RNA, 75 nt, Homo sapiens
cggacaagaggccaaccaaccggaggacaacacaccgcccaaccgggacaaagaaaggaaaagagaagaaccgga

SEQ ID NO: 11262 - RNA, 57 nt, Homo sapiens
accccaacacagagccaagcgccaagcaagaagccacagagggcgaggaaaacagga

SEQ ID NO: 11263 - RNA, 75 nt, Homo sapiens
cagccaagaggggccgccgggcgaggcacccagccgccgcccaggaccccgccccgagccaggaccggagaacaa

SEQ ID NO: 11264 - RNA, 88 nt, Homo sapiens
gagaggccggcgggacgcgggcgccaggaccggccgaacgcagaggccgggcagaaagggaagaaagaaggggacaaagcgaaccagc

SEQ ID NO: 11265 - RNA, 65 nt, Homo sapiens
gagagccaggccgcagccaaggacgacagagggggcagagacaagaagcaacgaagagacacgag

SEQ ID NO: 11266 - RNA, 75 nt, Homo sapiens
gaacagaaaacgcaaggagaaacccaagagcagcggcagaagaaagacaaggcgaccgaaccaaggagcaggcca

SEQ ID NO: 11267 - RNA, 71 nt, Homo sapiens
ccagaacgccacccgacaacagccaggaaaccagagacagaaaaggcaaaccgcacgccaagaaaaaccgc

SEQ ID NO: 11268 - RNA, 83 nt, Homo sapiens
caccgccagaaaccagaccgcgccgagacaaccgacagggcgggccgcgcccaccgccagcccaagccacagcagggccccca

SEQ ID NO: 11269 - RNA, 79 nt, Homo sapiens
cggagagggccagcaaaaagagcaagaaaggcaagacgacaccagaaggccgcaggagggaagcgcacggaaaccgccc

SEQ ID NO: 11270 - RNA, 73 nt, Homo sapiens
ggccccgaccccgcggccggacgacccaagcccgcgagcaggagaggggcggcgcagccgaaggaaagcacga

SEQ ID NO: 11271 - RNA, 63 nt, Homo sapiens
cacagacagacaaacaccaacggagcggagaaaacgagcaggaggccgaccgaggaggccaga

SEQ ID NO: 11272 - RNA, 76 nt, Homo sapiens
aagggccaagccacacacgccaggggccccgccgcaccgcgcaggagccagccacagacgacgcaccaaaccccca

SEQ ID NO: 11273 - RNA, 68 nt, Homo sapiens
gaaacgcccaccagcaggcccgaacccccaggccacagaggggaaagccaaaacccagaacccgaagc

SEQ ID NO: 11274 - RNA, 77 nt, Homo sapiens
acagcggcccagacagagcagcaccgaacaaccgaggcccagcggacccccgagcgagaggagcacggcagccagga

SEQ ID NO: 11275 - RNA, 68 nt, Homo sapiens
caaacagcccaaacgcacaagcaaaaccacccacagagacaagaggaaaagggagaaccaacaaagag

SEQ ID NO: 11276 - RNA, 81 nt, Homo sapiens
cggccccccggcggagaagaagcgcggccgcaccggccaaggaaaccacaacacaggcccggagcgccacggaggagaggg

SEQ ID NO: 11277 - RNA, 90 nt, Homo sapiens
ccgaggacccagaaggcgcaaacaacccggaccaagagcaaacgcacaaaaccaagcagccagaacggggcaacaggacacgccggccca

SEQ ID NO: 11278 - RNA, 78 nt, Homo sapiens
gagacgaagccccacaggcgcagggcaggaaaggccaaggaaaaggaacagagagagcagaaccgaaacggggaaaga

SEQ ID NO: 11279 - RNA, 70 nt, Homo sapiens
aacaaccgggaagacgccgggcaaaagggcaggcccgacaagccgaccagccaagccggacagggacggc

SEQ ID NO: 11280 - RNA, 35 nt, Homo sapiens
agaagccaaagggacacgaaggcaccaaggaacaa

SEQ ID NO: 11281 - RNA, 59 nt, Homo sapiens
gacccgcagagcgcccggagcgcgcacggcaccccgccaggaagaggcggcggcggagg

SEQ ID NO: 11282 - RNA, 75 nt, Homo sapiens
aacaacagcagggcagcaggagaaacgcaagccagacacgcgagaaaagaagcgggcagacgaaggacagagagg

SEQ ID NO: 11283 - RNA, 55 nt, Homo sapiens
gagccgaccgaaccggccaaggaagggccgcccagcggcacccacgacgcagcgc

SEQ ID NO: 11284 - RNA, 69 nt, Homo sapiens
gaacagaaacagcaaaaaaaaccaggcaaaggcccagaccagggcgcgaacccgggcacccgccagccc

SEQ ID NO: 11285 - RNA, 73 nt, Homo sapiens
aggagcgagaggcgggagaagcggcaagaacagagcaaggcggcgggggagaaggcgggcaaaacgccgagcc

SEQ ID NO: 11286 - RNA, 77 nt, Homo sapiens
cggaccgagagcggaccgagagcgcgaaacgcacgagaagaaggaggcccagaggaaaaagacacgcgagaagacga

SEQ ID NO: 11287 - RNA, 53 nt, Homo sapiens
aacgccgaaacggaaagcccaagaggagacgacggcccaccagccgagcagac

SEQ ID NO: 11288 - RNA, 69 nt, Homo sapiens
cagaagccaagaacgggaaacaacagagcaaccccaggcaaagggcaccacgccagcccacagcagccg

SEQ ID NO: 11289 - RNA, 80 nt, Homo sapiens
aacgagaaggaaaggaaagacaggcacgccggacaaaacaagggccgggagcaaagagagaaagacaccacccaggccca

SEQ ID NO: 11290 - RNA, 82 nt, Homo sapiens
ccgccaaaccagaggagggaaaacgccgaagaagggggcaagcgcgagaagagcggcgcccacaaccccccgagcgcaccgc

SEQ ID NO: 11291 - RNA, 76 nt, Homo sapiens
cagcagcccgccaccggaaaaccaccaccaaacaaacaggagcagacaacaggcacaaagagagaaggaacaccca

SEQ ID NO: 11292 - RNA, 55 nt, Homo sapiens
acaaagacaccacagcaggccgggggaaaagccagaaagacggggacagaagacc

SEQ ID NO: 11293 - RNA, 85 nt, Homo sapiens
ccggcaagagggagaaggacaccaggcagaggcaaggcacggagggcccaggaagcagccaacccccagggaaggaccaaccgac

SEQ ID NO: 11294 - RNA, 70 nt, Homo sapiens
accagaaagcaggggaccacaggacgacgggcaacagcaggacacaaggccaacgaccaaggaagagcgc

SEQ ID NO: 11295 - RNA, 82 nt, Homo sapiens
ggccggcaggaccagcgcgaaagagaccggacgcagccgccaccgagacgagagacgaagaagccaaggaaagacaaagaga

SEQ ID NO: 11296 - RNA, 79 nt, Homo sapiens
ccaaagccacgagaccgaacgccccaagggagaacgcgccacccaccccaacggcagaaagagacggccacgaaagcag

SEQ ID NO: 11297 - RNA, 85 nt, Homo sapiens
cccccaagagacccaggggaagacccaaaggcagcaaaaacaagagccccaaagcagccaaaagacaacgaagagaggaaagaag

SEQ ID NO: 11298 - RNA, 75 nt, Homo sapiens
gcaaaacgagccaaacaaaccacgccaggccacaaacgaacagcgaaacggagaacggaagaaagccccagcacc

SEQ ID NO: 11299 - RNA, 77 nt, Homo sapiens
cgggcggccaccgggaggcaaggaggcgcggagagcgcaaacgccaccggccgcggacacggcaccggaacaccccc

SEQ ID NO: 11300 - RNA, 80 nt, Homo sapiens
cgacaagccgcggcagccgcggaccaccgccgccagggacgcgagagcggaaagggcaccgacccacacgacggaggcac

SEQ ID NO: 11301 - RNA, 90 nt, Homo sapiens
gagccaccggaggcacggcgggagggcccgcagaaccggagaacgggaaggagacgcgcagcgcacggacccccccaagacacacggacc

SEQ ID NO: 11302 - RNA, 78 nt, Homo sapiens
ccaaaaggcaaggcacaagaagaagaacggcaacccccacagaggcacacccaggaggacaaggcgggcacggaccgg

SEQ ID NO: 11303 - RNA, 62 nt, Homo sapiens
ccagccagcaggccgggcggggcccgacaaagggaaccgacagaacggagaagcagaaacag

SEQ ID NO: 11304 - RNA, 73 nt, Homo sapiens
gagaaggaccaagaaccagaccgagcagggcagacaaaaagagagcggcagaggaaaagcgcgccaaaaggac

SEQ ID NO: 11305 - RNA, 79 nt, Homo sapiens
cacaggacgcggacaagggcggcagaagacgacagcgaacacccgaaggagccagcaacagaggagaacacaagcccga

SEQ ID NO: 11306 - RNA, 56 nt, Homo sapiens
acggcgaagggacagggccccggccacagcaacccacgccaaacaggccagaacac

SEQ ID NO: 11307 - RNA, 69 nt, Homo sapiens
aaacaggaaaagcccacgagcacagagggccccagagggcaggcccggaaacggcccgacaccccaggg

SEQ ID NO: 11308 - RNA, 74 nt, Homo sapiens
caaaccggagaaggagccaagaaagagaagacaacaggcacaaagagagaaggaacacccacagggcagacaga

SEQ ID NO: 11309 - RNA, 77 nt, Homo sapiens
acaaaaaggcaaaagaagaaaggggcaaaacaaaagaaggaagaggacgcaagagccccgaagaaagagcggcaagg

SEQ ID NO: 11310 - RNA, 79 nt, Homo sapiens
gagaaaagcagccacgcagggccaccaaacagacccacggagcacggcagcggggggcagcccgccaccccagcaggcg

SEQ ID NO: 11311 - RNA, 48 nt, Homo sapiens
agccccccagccgcgaagagacccgacagaggaaagaaaacaagccac

SEQ ID NO: 11312 - RNA, 75 nt, Homo sapiens
gagggccaacaacaccgacgagcaggcacggaagaccaccagcagcggaccaccgaggcggacgcagaaccgccg

SEQ ID NO: 11313 - RNA, 82 nt, Homo sapiens
gggggcaagagagacacaccaaaaggggaggaggggaggccaaagagcagagccggagcgcccccagcaggaagggagaagc

SEQ ID NO: 11314 - RNA, 82 nt, Homo sapiens
gcacacggccccgaccggcgggccccgggcacaccaacaagccacgaccggggagcagggaacacgggcggcgagagaaaag

SEQ ID NO: 11315 - RNA, 60 nt, Homo sapiens
aacgagcgccccacacaagcaggaacggcgaaagcacggaaagccaaagcaagggaacgg

SEQ ID NO: 11316 - RNA, 71 nt, Homo sapiens
cggaacagaaccaaaggcaggacagccagcagggggaggacacaacccgccagaaggagcgagaccccgcc

SEQ ID NO: 11317 - RNA, 78 nt, Homo sapiens
ccaaacacaaagagagacgacacaaagccagcaaccacagagggcgagcagaggacagcagggaagaacggaaaccag

SEQ ID NO: 11318 - RNA, 81 nt, Homo sapiens
gcgcgcgcgcgcgcgcagaaggcgcaccgaggcgagaggcagaggcccgggacacagcaccaaagaggaagcccacggacc

SEQ ID NO: 11319 - RNA, 84 nt, Homo sapiens
gccacacggcggccgcagggcgccggagccccccagggagcggagcgcccggccggcagcgggaagaacgggaagaagaagaag

SEQ ID NO: 11320 - RNA, 72 nt, Homo sapiens
gggggaccccgcccagggcccagaggacccaacaccagaagacacacagggggcggcaagaaaacaggaaca

SEQ ID NO: 11321 - RNA, 76 nt, Homo sapiens
gccgagccgccacccggccgccgcccccccggccccaagaaggccacagcacgaccggccccagaggcacagggcc

SEQ ID NO: 11322 - RNA, 69 nt, Homo sapiens
ccacagagggaaggccccccccagacacacacgcacaaagacaaccgcagaaccacacaaggcaagaag

SEQ ID NO: 11323 - RNA, 62 nt, Homo sapiens
cccgccacccaagggcccccggagccggcgagaacgaaggaaacccggagaacggagaggcc

SEQ ID NO: 11324 - RNA, 85 nt, Homo sapiens
cggagccggcgggcggggaacccaggccccgccgaggcggccagagaaccgacacccaacggcagaagaaaaacccccagaagaa

SEQ ID NO: 11325 - RNA, 70 nt, Homo sapiens
gccccagaaagagacaacacaggaacaagcaccacagagagaggcacacacagccacgggaccggcacaa

SEQ ID NO: 11326 - RNA, 79 nt, Homo sapiens
agaaaaacaagaacgaggaacacgaacaggaacccgcaggcccaaaagaaccaagagggagacaagggaaaaggaagac

SEQ ID NO: 11327 - RNA, 54 nt, Homo sapiens
gaaacacgaaagccaaggaggaggacaagaaaggaaacagcagagagaggaggg

SEQ ID NO: 11328 - RNA, 81 nt, Homo sapiens
gagaccaaccggccaacagggagcgaaggaccccccgaggcggaggcagcagaagcccgcggccagaggaaacaaagcgcc

SEQ ID NO: 11329 - RNA, 78 nt, Homo sapiens
cgcccgccggcacgccgccagccccgggggccacgagcggccaacgggacaggaaaaccagcccacagcgcaagaaga

SEQ ID NO: 11330 - RNA, 57 nt, Homo sapiens
acggaggaacaggagcaccacgagagcacccagagaggacggcccgcgcggaacagc

SEQ ID NO: 11331 - RNA, 40 nt, Homo sapiens
ggccgggaggcagaggggcaggggccaggcggaggaggca

SEQ ID NO: 11332 - RNA, 70 nt, Homo sapiens
cggggccgacgggagcgggcccgcccggagcggcaggcgacagagaagagagggacggcgcaaaccaggg

SEQ ID NO: 11333 - RNA, 80 nt, Homo sapiens
caggaagggccgcggggaaggaggcggacgcgagggaaagggggccggagccgccaggaaagaccacagcaagaccacgc

SEQ ID NO: 11334 - RNA, 60 nt, Homo sapiens
ccaaaagagacagggaagaggagacggcaagcgggggcaaggacgcagccccgcagaggg

SEQ ID NO: 11335 - RNA, 58 nt, Homo sapiens
acgagcagagaacagcaaaagagcacaagaaaacaccgggaggcacgggccaagcaca

SEQ ID NO: 11336 - RNA, 50 nt, Homo sapiens
ccggacgcgacgggccagcgcacccaacacacacgcaagaagcagcaggc

SEQ ID NO: 11337 - RNA, 68 nt, Homo sapiens
ggagaaccagcaacggcaaacaaaaccacaggcacaaagagggcacaggaaaaaagagcggaaaaaaa

SEQ ID NO: 11338 - RNA, 75 nt, Homo sapiens
gccaacaagaggaagcaggaaaaacaaagaagacccagggagagaacgccgagccgcgccgcagccccgccgccg

SEQ ID NO: 11339 - RNA, 80 nt, Homo sapiens
cagccgcccaaccgcgggaccaaccacccgagcggcgcggacgaaggcgcagagggcaaggggggagagggcagaaacca

SEQ ID NO: 11340 - RNA, 78 nt, Homo sapiens
gccaccgagccgggcccaccccccaccaaggaagggaggccaacagacccaacccagaaggcaccaaacggaggggga

SEQ ID NO: 11341 - RNA, 73 nt, Homo sapiens
gcagcccccggcgccaccagcagccaaaggacccaggaagccacccgcagaggggcaaggagaaagggcaaac

SEQ ID NO: 11342 - RNA, 82 nt, Homo sapiens
gcggagccgcgcagccccggagcacggccgacgcccgccgcggccggggaacaggccacagccaggagcgcacacaggagcc

SEQ ID NO: 11343 - RNA, 50 nt, Homo sapiens
aacgcgagcacacccccagaagcaaacgaaaccggcagcagccggagggg

SEQ ID NO: 11344 - RNA, 81 nt, Homo sapiens
ggagaccacagcaagacgccgggaccccggaaaccagaaagacagggcagaggacgggcggaggggggcacaacacgccac

SEQ ID NO: 11345 - RNA, 77 nt, Homo sapiens
cagaggaccccaacccacccagcgcaccggcggaagccccaaggccgaccggccccagcagaggaacgggggacccc

SEQ ID NO: 11346 - RNA, 56 nt, Homo sapiens
ccaggccagcagcagaaccacggccccccaccccccagcgggggccagcaaggacc

SEQ ID NO: 11347 - RNA, 68 nt, Homo sapiens
gcagacggcaggcaagccgacccaccacgaacacaggacaaaccggcgaccacacacggggacgacgg

SEQ ID NO: 11348 - RNA, 58 nt, Homo sapiens
agaggacgggaggacaaagcgggggaaacagaggaggagccccgggggcagacggccg

SEQ ID NO: 11349 - RNA, 75 nt, Homo sapiens
cccagcaagaggacagaggcgccccggcccagaaccaggggggggagggaccggggcggaagagcaggcaggcgg

SEQ ID NO: 11350 - RNA, 78 nt, Homo sapiens
acccgacccccaaaccccacagcacaggaaggacacagcgagccaaaaagggccagagcagaggcggagaggggcaga

SEQ ID NO: 11351 - RNA, 83 nt, Homo sapiens
gcaccgccaacccccgagcaagacgggggggccggcggccgaccaacccccaagagcccgccgcaacacagcgccggggccca

SEQ ID NO: 11352 - RNA, 77 nt, Homo sapiens
aggagaccccacggagcgggcgacgagcgacccgggagacacgacgcacggccagggcccggcgccagacgccgccg

SEQ ID NO: 11353 - RNA, 65 nt, Homo sapiens
gcggaggacagccgagaggaggggcgcaacgccggagcgggggaaccgacgcccagccgagagga

SEQ ID NO: 11354 - RNA, 75 nt, Homo sapiens
ggcaagagcgccgaccgggcggcgaggaaggcgccccggggcggcgcagccgaaggaaagcacgaaggaacgacc

SEQ ID NO: 11355 - RNA, 68 nt, Homo sapiens
agccacccccagacaaaaccaccaaagacaacagccaccggaggacagacccaaagacaggaccacgc

SEQ ID NO: 11356 - RNA, 83 nt, Homo sapiens
ggacgagcggagaaggccacaccacgcagaacgcaacaccaaggcacaccaccccagaggcaaacaccgcaccagggaaagcg

SEQ ID NO: 11357 - RNA, 84 nt, Homo sapiens
caggaaggggggcggcagcaggagggccccgacgaagcgaggcaccgcagcaccagagggcggacggcagacaggcagcaaccg

SEQ ID NO: 11358 - RNA, 64 nt, Homo sapiens
gcccagcccccgaggagcgggacacagacagaagacaggagccagagggacgggcagcaaaaag

SEQ ID NO: 11359 - RNA, 102 nt, Homo sapiens
gccgggcgacgccggggggggcggcccgcagcgaaggaccgcagcgccgcccaagagagagaagagaggcgcgagggcagggaagaggcggacaagcgcaaa

SEQ ID NO: 11360 - RNA, 75 nt, Homo sapiens
ggaagccacccaaaccggagggaaacggaagcaggagagggcggagggaaggggccggagacccccgcgccccaa

SEQ ID NO: 11361 - RNA, 68 nt, Homo sapiens
acaaagcaggagaaaggccaggcgaaacacaaccaaaacagcaaacccaaaggggcggaaccaaagaa

SEQ ID NO: 11362 - RNA, 86 nt, Homo sapiens
ggggccggcccaccaagaagaccaaacccaggccagaacaccaccgaaggaccaggaggaagacaggacaccgacaccagaagccc

SEQ ID NO: 11363 - RNA, 83 nt, Homo sapiens
aaccgcacccccgaacagcacccccagcagccaccagcagagccccccaagagaacccagggggagccacgccggagcgggca

SEQ ID NO: 11364 - RNA, 70 nt, Homo sapiens
cacccagacggaagaacaagcgaaagggggcgcgaggccaaccccacacaaggccagagaggggcgcagg

SEQ ID NO: 11365 - RNA, 82 nt, Homo sapiens
ggcgggccgcgcccgagcccagagcggcgcggcgcgccgcccgacacacggccaaaacggaggagaacaagaagaagggcag

SEQ ID NO: 11366 - RNA, 75 nt, Homo sapiens
cagaacggaaaccacggacaaacaccccaaggcggcaaggaagaggcccggaaagggaaaaaccgaggcagagaa

SEQ ID NO: 11367 - RNA, 84 nt, Homo sapiens
gcgcgaggcggccaccgcgacccggccgcgccggcgccgaccccgcgcgccagggaccgagcagcagaaccgagggggagcgga

SEQ ID NO: 11368 - RNA, 79 nt, Homo sapiens
aggagaccaaaaaaaacaacagcagagcaaggaaagccagacaccgcgcaccagggcagcagccggcgcacacaacggc

SEQ ID NO: 11369 - RNA, 96 nt, Homo sapiens
ggaggacgagcgcggggcggcaccggaggaggagaaccgagggggaaggaagggccccacaccaaagaaacccaaaaagaacgacccccacgcaaa

SEQ ID NO: 11370 - RNA, 64 nt, Homo sapiens
acccgacgcgccggcccacgcgcggccaaggggaaccagaagaggccaaccagcacgaacgcca

SEQ ID NO: 11371 - RNA, 69 nt, Homo sapiens
ccgagacacggggcgagaaggcggcgcacaagaggcgcaaaacaaggaccggacagagcacgcacagaa

SEQ ID NO: 11372 - RNA, 77 nt, Homo sapiens
gggaggcccggccgccccggagggagacgcgcgccgaggagaacccagcggaagccgggcaaggagaacaacacaaa

SEQ ID NO: 11373 - RNA, 67 nt, Homo sapiens
ccggaacggacagcccccccagaaagcccggcgaagccacagaaaccgcccgcacagagcaggaggc

SEQ ID NO: 11374 - RNA, 82 nt, Homo sapiens
ggaagaagcccgcaaggcaagaggcacaggcagcgcgggcgcagcagcggaaggggaagagccgcacccggccgaccccgca

SEQ ID NO: 11375 - RNA, 36 nt, Homo sapiens
acggcgccggaaaaacggggcaccggagcggcaacg

SEQ ID NO: 11376 - RNA, 70 nt, Homo sapiens
gaaaagcgaaccacaccagcaagacgacgaagaacagcagacggcccaagcagccagagaggcaggaccg

SEQ ID NO: 11377 - RNA, 80 nt, Homo sapiens
ggcccgagacacaccaggccggcaggcgagaaaagcgagaccgcggcgaggaccggacccccagaggaccccaacaccca

SEQ ID NO: 11378 - RNA, 84 nt, Homo sapiens
gccgggaagaagcgccgcgcacggaccggcagagaaggccagcggagaacagccgagggaggggaggcccgcacgcccacagag

SEQ ID NO: 11379 - RNA, 84 nt, Homo sapiens
ccaccacagaaggacgccgcgccaagcacggaaccaaagaagcagcggcaggagaaggcggaggggccgaggggaccaagcgga

SEQ ID NO: 11380 - RNA, 74 nt, Homo sapiens
gggaaccccagccccgaggcggaccggggcaccggagcgagcgagagccgaggacgaacagaaagcacgaccgc

SEQ ID NO: 11381 - RNA, 79 nt, Homo sapiens
gcgagcccgcgggggccggccgcccacgccagccacagggagccggcccaggaggacagaccggaacacccagaagaaa

SEQ ID NO: 11382 - RNA, 80 nt, Homo sapiens
agaagaagaggagcaccccacacagaccaaaaagaccagaggagacggaggcagagagaagagggagaggccggaggaag

SEQ ID NO: 11383 - RNA, 62 nt, Homo sapiens
agcaacacgaccaccaagggaggcgagaagacaaaacccaagcgcacagaaacaaaaggggg

SEQ ID NO: 11384 - RNA, 55 nt, Homo sapiens
caggccaagccacgagaacaccccgccagggaacaaagagcagaagaccccacag

SEQ ID NO: 11385 - RNA, 77 nt, Homo sapiens
gccccggcaccgccgaagcaaggagacccaacccggagccggggacggcacacgggcgggggcaacgggaggagaag

SEQ ID NO: 11386 - RNA, 84 nt, Homo sapiens
gagaggagcgacgccgggggcgcagaccgggcaagaccacccgcaagcacgcgcaaacgaacacaagagacagggaacaccaga

SEQ ID NO: 11387 - RNA, 80 nt, Homo sapiens
cgggcggacgcgcgcgccggagcggggccgaggccgaaggcccgcggcgccccggcgcagaggccgcgacagccaccaaa

SEQ ID NO: 11388 - RNA, 75 nt, Homo sapiens
aggcccacccggccaccccccagggagccgaagccaagggacggccaccccagaacaccagcaggaaaaaagagc

SEQ ID NO: 11389 - RNA, 56 nt, Homo sapiens
gaaagagaagcagaaaggaaccaagcggcacgcaggcaacacgagccccagcaacc

SEQ ID NO: 11390 - RNA, 74 nt, Homo sapiens
acccgcgaaaagagccacggggccaagaagccaggcgagcacgagggcgccagccagcaccccgagaacccgcc

SEQ ID NO: 11391 - RNA, 62 nt, Homo sapiens
gaggacagcgcacacagcaagcacgagccaagggaagaagcagaagcaagcccagggcaagg

SEQ ID NO: 11392 - RNA, 39 nt, Homo sapiens
cggggcccgcaccccagggcggggaacacagaggaagga

SEQ ID NO: 11393 - RNA, 57 nt, Homo sapiens
gacgcgcgcgggcgggcgcgagcggcccggcgcccgggaggcgcggaaaccaccgca

SEQ ID NO: 11394 - RNA, 75 nt, Homo sapiens
gagagcaccgccgagcggaccccaagcggaagagccgagcccacaaagaagaagaacaagagaggagagagagac

SEQ ID NO: 11395 - RNA, 68 nt, Homo sapiens
caaggaacccagacagcaaggaacccaaacaacccaaaggccggcgacagaaaggccccaaacggacc

SEQ ID NO: 11396 - RNA, 67 nt, Homo sapiens
gcaggaccaaaagggaaaagcaccgacaacggcaagcggagaagagcaaggccgaaccgagaggaag

SEQ ID NO: 11397 - RNA, 71 nt, Homo sapiens
aacgcaacggggaacacgcgaccaaggaacgaccaaagcagaagccgcaaacagccaaacgaaacagaaag

SEQ ID NO: 11398 - RNA, 50 nt, Homo sapiens
ccccgcccgcgcgaccgcagggcgcccggcaaggaagaagagagggcgaa

SEQ ID NO: 11399 - RNA, 75 nt, Homo sapiens
accaaagaacggaaaaaaacagcggagaagagaaacagacaaggaaccaagccaggccaagaccaaacgcgacag

SEQ ID NO: 11400 - RNA, 68 nt, Homo sapiens
agacggccagaacaccacagcccacaaaggcagagagcaagaggcgaagcacggcacaagcaccccgc

SEQ ID NO: 11401 - RNA, 61 nt, Homo sapiens
ccgacaggagagaacacaacagagacagaagagcagcacaggggaagagacagaaggcagg

SEQ ID NO: 11402 - RNA, 81 nt, Homo sapiens
gggccaacaggggcaggaggcacaaggccacacaacggaccacacaagcaggagacccacccgccaaggccccccgggagg

SEQ ID NO: 11403 - RNA, 61 nt, Homo sapiens
cggcgacgccccaggggaaaacccccgggaccagaaccaacccaaaacagggaagaagaca

SEQ ID NO: 11404 - RNA, 85 nt, Homo sapiens
caaaccaaaccacgaaggccaagagagaggaggaagaagggggaaagggaaaagaggaagagagaaacagagagaaggagaagag

SEQ ID NO: 11405 - RNA, 77 nt, Homo sapiens
cggccgcagcgaaagcacccgcccggaggaagcggggccgggggcccgccccggaacccggagcccgcggcccgaac

SEQ ID NO: 11406 - RNA, 75 nt, Homo sapiens
gccccaaacccaggaccaagggaaccacaccccgaggcggagaaccgcgccagaccaaagcaacggaacaacccg

SEQ ID NO: 11407 - RNA, 74 nt, Homo sapiens
cagacaaccgagcagcacagccagaacgagaaacaggcacaacgcacagagaacaaaagaaaggccacagcccg

SEQ ID NO: 11408 - RNA, 79 nt, Homo sapiens
gcccgggccaaaacagcaacccaaacacagaaggacaccaggggggaaaaaccacacaggcaaagaacgcgcaaaacag

SEQ ID NO: 11409 - RNA, 75 nt, Homo sapiens
aagagaccaccagcggccaccacacgggagccccagcgagccagagggacagcacagcccgcccgcgcaagccca

SEQ ID NO: 11410 - RNA, 75 nt, Homo sapiens
cgccaagagacaaagaaaaacggaaaggaaacacaacaccaagcccacaaggagaaagacagcaaagaaaaggag

SEQ ID NO: 11411 - RNA, 72 nt, Homo sapiens
ggcgccaggagcacagaagagcgaggagagaggagcagggacaccgaccggggacagcccgaagggccgcag

SEQ ID NO: 11412 - RNA, 78 nt, Homo sapiens
cagcgcgggacccagcccaggcggcgcggacggggcggagcaggaggaagaccgccggcaaaaagaagacagaagaag

SEQ ID NO: 11413 - RNA, 53 nt, Homo sapiens
aggagagaggaccacccagaggagcaacacaaggcgagggaaaccaacacaag

SEQ ID NO: 11414 - RNA, 92 nt, Homo sapiens
aaacagcccccgaaaacgcacggagcgggcccgggccagaggcagaaaacggacggaagaaaaggcggccgacgcccggcaagaggggagag

SEQ ID NO: 11415 - RNA, 82 nt, Homo sapiens
aggagagcccgccaaaaagccgaaggacgcgaaagggcagagaaaacagcccccggacccgcagcaagcgcagcgacccacg

SEQ ID NO: 11416 - RNA, 75 nt, Homo sapiens
cgcgcaaggagcgggcaagagacacaaaggaagcaggagcgccgcaaagcaaggaagcgaaaccccacgaggcga

SEQ ID NO: 11417 - RNA, 78 nt, Homo sapiens
gacaacgcggagcggcgaagagcaaccagccagggagccaaggaccggagaacccagcccggacacaagcgggaggaa

SEQ ID NO: 11418 - RNA, 67 nt, Homo sapiens
cacaggaaaagcaggacaccaagcggcgagacgcaggagggaaacccagacgacaaggaaggccaag

SEQ ID NO: 11419 - RNA, 69 nt, Homo sapiens
aaacaaggccggcgaggaccacagacacaggacaaaccggcgaccacacacggggacgacggggaagcc

SEQ ID NO: 11420 - RNA, 59 nt, Homo sapiens
cagccgccccccccccggaaaaggcccacgccgggcgaggaaaaggcaccagaagaaag

SEQ ID NO: 11421 - RNA, 79 nt, Homo sapiens
ccaaaacaacggcgcggcacaaaagcgccggcagcccagagcaagcccagaagaacacaagccaagcccagcagcccag

SEQ ID NO: 11422 - RNA, 72 nt, Homo sapiens
ggagccgcaacggcccacaccaccaggacaggaagacccagagccccggaaggagcgcacagcagaaggaca

SEQ ID NO: 11423 - RNA, 82 nt, Homo sapiens
gagaagcccacgaggcaacacgcaaggccgccaccagagaaggagggggcagagcacggcaggcagaaggggccaacccggg

SEQ ID NO: 11424 - RNA, 73 nt, Homo sapiens
acacgaaaaaagccaagcaacaaagacccaaagacaggaccacgcaccagcagagaaggaaagcaaaccgaag

SEQ ID NO: 11425 - RNA, 66 nt, Homo sapiens
caagcagggggaacggcgaacggcccagagagcgcaggacgagaggaggagcaaagacaagaccaa

SEQ ID NO: 11426 - RNA, 74 nt, Homo sapiens
agcagagccgccggggagggagccagaagcaacgaggcccgggcgcacgaccgcggcccggcagcacccgagga

SEQ ID NO: 11427 - RNA, 34 nt, Homo sapiens
ccaggagaagggacgggggcgcgcaggccgaaca

SEQ ID NO: 11428 - RNA, 76 nt, Homo sapiens
acagacaccgaagcgacggagcagagacccccggagacccaaggccaacagagagagaaacacagaaggacgaaca

SEQ ID NO: 11429 - RNA, 76 nt, Homo sapiens
gccggaggggagacgggaggcaggcgaacagaagacaagacgaaaacgcaacgcgacgagcgcgaggaaaaaaaca

SEQ ID NO: 11430 - RNA, 69 nt, Homo sapiens
ggcccaagcgaaaaagcgggaacgcaggacccaaagcccgaacaaccgcagcagcgaaaccagggagag

SEQ ID NO: 11431 - RNA, 74 nt, Homo sapiens
cgcggacgcagcacggagcccacaaacagaagccagacagccacacaggcaggccgagcggcaagcaaccagga

SEQ ID NO: 11432 - RNA, 80 nt, Homo sapiens
ccccacggcacccccaccagaagcggacgccaggaaaaagggagaaagacaaacaaacaggagagaccaagacccacaca

SEQ ID NO: 11433 - RNA, 55 nt, Homo sapiens
ccgagcgggaacgcacggggcgcgccgggcggagcagaggcagcgagaagaaaaa

SEQ ID NO: 11434 - RNA, 70 nt, Homo sapiens
cagggaaaaggccaggcaggcgcacaaacccaaccaggaaagcccggcacagaggacagagacacaacga

SEQ ID NO: 11435 - RNA, 84 nt, Homo sapiens
cgccgcgaaggcccccaaaacagcccaaagcagccccaggagagaagaccagaggaagagggaccagaaccagccgagaagaag

SEQ ID NO: 11436 - RNA, 86 nt, Homo sapiens
gaagagggggagcggccagcgagagccagggcccaaagaaccgagcggccacggagacggcggccccagaccggcaccaggacccg

SEQ ID NO: 11437 - RNA, 80 nt, Homo sapiens
gccccgagccggccgagcggcgacggaccgcgagggggggcgcggggggcgagggccggagacaagggacagaagccggc

SEQ ID NO: 11438 - RNA, 82 nt, Homo sapiens
gacgcccggggagggaggcaccaggagcgaccaagcaccgaccagacggcacgggagacacagaagagccaagggggaagag

SEQ ID NO: 11439 - RNA, 74 nt, Homo sapiens
ggaaccgaaagacaaggaggcacagcagaaagagacaagcagaaccgagaaacgaaaaagacgaagaacgagag

SEQ ID NO: 11440 - RNA, 82 nt, Homo sapiens
aggggaggacccgggacaccgcacagccgggaaaggggaggggaggaagcgcccgggacgagaggagggccggcagaccgcc

SEQ ID NO: 11441 - RNA, 60 nt, Homo sapiens
cgcccgcgcggcgcggccggcgccagccaacagaaaaaaggcagcggaaagaagaaaaga

SEQ ID NO: 11442 - RNA, 79 nt, Homo sapiens
aagaggcggacgagaaggacagggaaggaacaagcggagcagccagccaaaacccaacagaaagcaggacccagacacg

SEQ ID NO: 11443 - RNA, 31 nt, Homo sapiens
ccagggccccggccggaaggcacagcgagca

SEQ ID NO: 11444 - RNA, 70 nt, Homo sapiens
cacaagcacgcggaagagccagccaaagagccccaggacgagacaaggacacacccagaaagagccaaac

SEQ ID NO: 11445 - RNA, 68 nt, Homo sapiens
cagaggaaacaacgcagagaaacacggaaacaggaagaggaaaaacacgacaaaggcggcgagccaag

SEQ ID NO: 11446 - RNA, 74 nt, Homo sapiens
aagacagggagacgcgcgcagcccgggacaccggggccgccgaggcaaaggcgaaccgcaaaagggggagaaag

SEQ ID NO: 11447 - RNA, 65 nt, Homo sapiens
ggcacgcaggccgggcaggcggcaaccaaacggcgccaaggaacaagggccagaagcagcgaaca

SEQ ID NO: 11448 - RNA, 67 nt, Homo sapiens
ccaacggcaggggaaaacaagacacacgcagagagccaacagcgaaaggacagggacaagcgcacag

SEQ ID NO: 11449 - RNA, 60 nt, Homo sapiens
gccaaggcacaggggcccgacccagcaggacagaaagaggaccgggaaagagaaaagcag

SEQ ID NO: 11450 - RNA, 57 nt, Homo sapiens
gccagaacagggacgccagccgcagaggaagacccggcaaacaggcgggcaacgcgg

SEQ ID NO: 11451 - RNA, 51 nt, Homo sapiens
aacgagaccaagaaaagggcgccaacacgaaaagggggccggcccagagac

SEQ ID NO: 11452 - RNA, 58 nt, Homo sapiens
gcggccgccgcccgcagcaagacgcgggcgcgcgaggacggggccaaccagaagacgg

SEQ ID NO: 11453 - RNA, 89 nt, Homo sapiens
ccggcggccccaccagcagacgcagccgagacaccagcccgaaacaccaccaaggcgggaggcagcaccgggccgaggacggcagccaa

SEQ ID NO: 11454 - RNA, 74 nt, Homo sapiens
cggaccacaggggcgcccccgaggaggcgccaaagggacaacccgccacaacgacaaaggaccccaaagacccc

SEQ ID NO: 11455 - RNA, 82 nt, Homo sapiens
gcagcgggcccggcgggggaccgagggaggagcggggacggcgacccaggagagagcaagggcaggaaaggaagaaaggaaa

SEQ ID NO: 11456 - RNA, 76 nt, Homo sapiens
ccggcacaccccgaggaccgccgggcccgggaaccggaaaggacagaagacaaggagacgcagagaaacggcagag

SEQ ID NO: 11457 - RNA, 75 nt, Homo sapiens
aagaacagaaaaagaacccagaaagcagaaccaaccggaaggaggagaagcgaaagacgaaaaagaaaaacaaga

SEQ ID NO: 11458 - RNA, 78 nt, Homo sapiens
cgggcacgcagcccacgcccagaggacagaacgaccgcccggccagcccaccccccgacgaaggccacggggagacac

SEQ ID NO: 11459 - RNA, 70 nt, Homo sapiens
ggaggcaacaccaaaagcaacccccagccacaacgcgaaccgggcggacgaaggaggcggcaacaggacg

SEQ ID NO: 11460 - RNA, 71 nt, Homo sapiens
caggacgggccagccagagagggacccgcacgccaggggaagagaggccaaagacaagaacaaggagcacc

SEQ ID NO: 11461 - RNA, 70 nt, Homo sapiens
aaaagggggaaccgcacaaagaaacacagaaacgacaaccaaggccgccggcccgcccggggggacccca

SEQ ID NO: 11462 - RNA, 77 nt, Homo sapiens
aagagcgacaggaggagacaggcgagagaggaggacacgaccgggggaaagggaagaagacagcggcaccgaacaag

SEQ ID NO: 11463 - RNA, 60 nt, Homo sapiens
ccacaacgcgccagggcccaacagggacacggaaaggacagggcagaccgccagcagcac

SEQ ID NO: 11464 - RNA, 56 nt, Homo sapiens
ccaggacagagcgcgagaaggccaggacaaaagagaacgaacgcagaccgggaaaa

SEQ ID NO: 11465 - RNA, 37 nt, Homo sapiens
gaaaaggccaagaaggcagagaagaggaagagagaga

SEQ ID NO: 11466 - RNA, 76 nt, Homo sapiens
acccagacccggagcccagggaagcagccgaccagccgcggagccgggggcaggagcaagagaagaaacaacagcc

SEQ ID NO: 11467 - RNA, 74 nt, Homo sapiens
cacagaaaaggacggcccacacccacgcacacacaacgaccaagccaaggaccagccaaagaaagcagacccgc

SEQ ID NO: 11468 - RNA, 74 nt, Homo sapiens
ggcgggccccgcccgccgaaggacacaggaaaaggggcccccccaccagacaaggggacaaccacccggcagaa

SEQ ID NO: 11469 - RNA, 41 nt, Homo sapiens
accagagaaagggagcaggaagagggccagcaaccggccgc

SEQ ID NO: 11470 - RNA, 67 nt, Homo sapiens
gcaagaccgaaggcgccggccaaaagagccggccagaacacacagaaaagggccaaaggaagaagaa

SEQ ID NO: 11471 - RNA, 77 nt, Homo sapiens
gaccggaccgagagcggaccgagagcgcgaaacgcacgagaagaagacgcacacgccagagcgcccaaccaggcaga

SEQ ID NO: 11472 - RNA, 75 nt, Homo sapiens
gacgccggacaaacaggaaaggccccacccccacaccgccaagagagagggacccaacaggaagagaggcccaga

SEQ ID NO: 11473 - RNA, 66 nt, Homo sapiens
agaagaaagcagcgaagcacacacagccacaggaggaaagcacaagaaacccgacaacaaaaccaa

SEQ ID NO: 11474 - RNA, 64 nt, Homo sapiens
caccccagacggacccaagaggaggggcagaaagggagcgcgacgacagaacaggacagggagg

SEQ ID NO: 11475 - RNA, 73 nt, Homo sapiens
gaaaccgggggaagaaggggaacgggggggccagagagaaaaggaacagccgaagccaggggcaagcgaaacc

SEQ ID NO: 11476 - RNA, 85 nt, Homo sapiens
aagaagcagcaaccgcagaagcagcggcaaccagaccggggcagaaccacggagcaggacccaggcagaggaggccggagcccac

SEQ ID NO: 11477 - RNA, 34 nt, Homo sapiens
aacaccggacacaggggaccaagaaaggcccagg

SEQ ID NO: 11478 - RNA, 82 nt, Homo sapiens
cgagaagcacccagggaagcgggccgaggccgggagacagaaagccccaagaaggggaagagaaacagaagcggagagacag

SEQ ID NO: 11479 - RNA, 59 nt, Homo sapiens
cgcggagcccgcacagacagacccaaagggcaggagcggcaagagaaagaacaaacaac

SEQ ID NO: 11480 - RNA, 76 nt, Homo sapiens
aaacgaagcccgaagagaagcaagagagccaaacgaaggcagccagcacaggagacaggagaggaagaacggcaga

SEQ ID NO: 11481 - RNA, 70 nt, Homo sapiens
ccgccaggaggcggcggaagcccacgagacaaagagacacgacaccagagacgaccaccgcgaaggaaaa

SEQ ID NO: 11482 - RNA, 79 nt, Homo sapiens
agagcggaggcgcccggcggagcagaggaaccacacgcgacagggaaaacaaaggcagagaagccagacggcaaaagca

SEQ ID NO: 11483 - RNA, 75 nt, Homo sapiens
ggaacagaggaagacacacggcccccagccaggaacagggagaagaaccaacaacggaaaaccagcgggacaagg

SEQ ID NO: 11484 - RNA, 78 nt, Homo sapiens
cccaggcgaccgggccggggagccggcaggacccgaagacgaggcggagaccaacagcaagaaaggaacaggagaaca

SEQ ID NO: 11485 - RNA, 82 nt, Homo sapiens
aggcaagcccacaggccaagaccggccccacacgcaacccgaagacaccaggcaagcacacggccaagcggagaagacacag

SEQ ID NO: 11486 - RNA, 74 nt, Homo sapiens
agaaaacacaaccgagacaccaaaaaggcggggagaaaccaagaagaaggccagaaaagacaaaagcacaacag

SEQ ID NO: 11487 - RNA, 80 nt, Homo sapiens
aagaaggcagcagaagaagccaggcacacaagccagccccccccgggaaccaccaggccgcggaacagaagagagcagga

SEQ ID NO: 11488 - RNA, 75 nt, Homo sapiens
cccacccggaccggcccggcgagagcaaaccaaccaaaggaaacaaagcgaacaagagaagacgaaaaaaaggga

SEQ ID NO: 11489 - RNA, 60 nt, Homo sapiens
ccaaaggccaccgcccgcggccagcggacacagacggaaaacaggcgcagggagcaggag

SEQ ID NO: 11490 - RNA, 90 nt, Homo sapiens
gccccgccgggagcccggcccagacacccaccgacagggccccgcaggaaagcccgggaccgggagcccgggaccgggagccggggggcc

SEQ ID NO: 11491 - RNA, 89 nt, Homo sapiens
gaaaaggagaaggaaagcgaaggggaaggcgccgaagaggacgaaggaaagcggcgagacaggaagcagagggcagggggcaaacaagc

SEQ ID NO: 11492 - RNA, 75 nt, Homo sapiens
agcaagcagcagggacgcgagggaagagacaaaggggaaagacggccagcagaaagcagccagagcgcaaacgag

SEQ ID NO: 11493 - RNA, 77 nt, Homo sapiens
cgggcccgaccaaccagagggggggcagaaagaaagaccgcaagcgggcagacaaccacaccacaaagcacaccaaa

SEQ ID NO: 11494 - RNA, 71 nt, Homo sapiens
cggaggacccagcccccagggcacgagcccagcacaaggccagcccgaaacacggcaccgggggcggaaaa

SEQ ID NO: 11495 - RNA, 81 nt, Homo sapiens
acccgacggccacgaacccgaggggaaaggacccggaagccaaggagagcaggcgaaccaggagcccagggagaccccaca

SEQ ID NO: 11496 - RNA, 39 nt, Homo sapiens
cgacgcaaggcgacgggcgccaagaccgaggaagggggc

SEQ ID NO: 11497 - RNA, 61 nt, Homo sapiens
gagaagagcgaaagggacgcaaggaacaaaaggaaacccaccaaggcaccagccgaggcca

SEQ ID NO: 11498 - RNA, 114 nt, Homo sapiens
ccaaagaagaagaacccggaagaaggcggagaaaaagccaacgcagggaagcaaggagccgcccggcaaagcgaaagcgcaggaccgaggagaaggagccgccggagcagccgc

SEQ ID NO: 11499 - RNA, 60 nt, Homo sapiens
gaggagacgggacagggcccgcgcaacgaagaaaacagaagacaccccggaagacgaaag

SEQ ID NO: 11500 - RNA, 79 nt, Homo sapiens
ggaagagcggaggcaccaagcagcagccaacacacggagcacagagagacccaagagaagggccagaagagagaaaaca

SEQ ID NO: 11501 - RNA, 51 nt, Homo sapiens
gccacgaaaagcaagacggaacgcaaaaacagggggcagcccagaaacagg

SEQ ID NO: 11502 - RNA, 54 nt, Homo sapiens
ccgagacacggggcgagaaggcggcgcacaaggggccgcaggaaaaacggaaag

SEQ ID NO: 11503 - RNA, 76 nt, Homo sapiens
ccccgggccgggcgcgccgaggaggaagcagagaccaggcagagcggagagacagaaagggagaaacacaacaggg

SEQ ID NO: 11504 - RNA, 103 nt, Homo sapiens
ggcccggccggcacggcgaaccacgcgaggggcgggagccgcgcacaccaccacaccacggagaaccacggggaccaagaagcgagcagcccaaacggacccg

SEQ ID NO: 11505 - RNA, 76 nt, Homo sapiens
ggcaggaggccgagcacgagaaggcccccagccccgccaccacacagcagcccccagcagccaccaagcacagacc

SEQ ID NO: 11506 - RNA, 56 nt, Homo sapiens
gaagcggcgcccaccggcgggcaacacccgccgcagaggcgcagagacaaggaagg

SEQ ID NO: 11507 - RNA, 78 nt, Homo sapiens
acacacggccgccacggacaccccgcgggccaggaggacggacgaaggacggcggagagcacagccaccgacgaccac

SEQ ID NO: 11508 - RNA, 75 nt, Homo sapiens
aagaaaacacagcgggccgccgcgaccggggaggccaggccaggaaaacacgggcgaaccgaccaagaacaacac

SEQ ID NO: 11509 - RNA, 72 nt, Homo sapiens
ccgacccaccggagcagcgcagaagcgagcggccagagaggcaagaggcccaccaacaacgccaaaagacgc

SEQ ID NO: 11510 - RNA, 74 nt, Homo sapiens
aacggcagaagccaccacaaaagcgaaagggcacaccacaggagaaggcgaccaggagaggacacggcccggaa

SEQ ID NO: 11511 - RNA, 71 nt, Homo sapiens
aaggccaccgagggaacccgaccggacccagccccagaaggggacgcacagaaaagacaaaacaaagacgc

SEQ ID NO: 11512 - RNA, 86 nt, Homo sapiens
agcccagcaggaccggccccaagaggaagggagcggcggccgcgccgcccaaggcgcaacggggggccccggccccaacaggcccg

SEQ ID NO: 11513 - RNA, 52 nt, Homo sapiens
cacaggccgagcccgggacccggaagaacgggggcgacgacagaaaggcaaa

SEQ ID NO: 11514 - RNA, 84 nt, Homo sapiens
ccagaccgacagagagaagacagaccagaggacaagacaaagggagcaagacaagccaaagaggaaaagcaaagcccaggggca

SEQ ID NO: 11515 - RNA, 81 nt, Homo sapiens
ggggcggaagaaaaacaaacacacgcaaaggagaaaggaaccgacagccaaaagaagcaagggaaagaccaggagccagaa

SEQ ID NO: 11516 - RNA, 95 nt, Homo sapiens
acaaggggagagcaccaaaacaccaccaccggggccaaacaaggcgcgagcagccggaggcgcccgccggcccggcccgggcccccgcgcaccca

SEQ ID NO: 11517 - RNA, 75 nt, Homo sapiens
ccgcccgggccagcggccgcgcacccccggccggaggcaccagcccgcggcgagccgcacagggcaacacacgca

SEQ ID NO: 11518 - RNA, 47 nt, Homo sapiens
aagaggagaaaaccgggcgcagccaacagggcagaagcaacagggaa

SEQ ID NO: 11519 - RNA, 76 nt, Homo sapiens
acagccccccccagccgaaaaaggacgcgcggacgaccggcacgaaagcaaagcccacaggagcaaaaacgagaga

SEQ ID NO: 11520 - RNA, 87 nt, Homo sapiens
gaagaagaaaggcgaaaggaaggcgcggaaacagaacaaccacccagaaaggaagcggacacaggaaaacgagaagaggcaggcaag

SEQ ID NO: 11521 - RNA, 82 nt, Homo sapiens
ccgagcgagcaggagggccaagacccaggagggggcccagaccggagaaggcacaccaaccagagagggggcaccccagaca

SEQ ID NO: 11522 - RNA, 80 nt, Homo sapiens
gcagcgaacgagaaccaaggcggacgcggcgagaaggagggcacggagcggggagccccgcgcacacaggacgcgccagc

SEQ ID NO: 11523 - RNA, 41 nt, Homo sapiens
ggcaaacccgagagaacgggaaaacagccccgaggacagag

SEQ ID NO: 11524 - RNA, 84 nt, Homo sapiens
gacgacgaggacgccagacccacggaaagcagccagcagcacccaggcccagcagcccgggagcgagcccacagcgcagcgcag

SEQ ID NO: 11525 - RNA, 77 nt, Homo sapiens
ccggaggagcccccaggccaccagacccacaccggggcagggccccacgagacacagccccccagcacaccccagaa

SEQ ID NO: 11526 - RNA, 81 nt, Homo sapiens
ggcaccagggcggaccccggggccaggccggaagcagaccccagcagcagcggacaaggcaaaaccagcaagcggacccag

SEQ ID NO: 11527 - RNA, 73 nt, Homo sapiens
caaaacagaacgccaagagcagcacccaaaaggagacaagagcaggcccaggacaaaaggggcgaaagaggag

SEQ ID NO: 11528 - RNA, 72 nt, Homo sapiens
caaccccccaggacgggcggaggcggggggaccggcgggcggcaaccagccaagggaccgcagggagacggc

SEQ ID NO: 11529 - RNA, 74 nt, Homo sapiens
gggcaccaaccgggcacagaggagcaagaggggggggcccccccgaagaaaggaaccggggagcggcgaaaaaa

SEQ ID NO: 11530 - RNA, 72 nt, Homo sapiens
ggacgggagacccgacggagcagacagaagcacgagaagagaagcccagagcaaaacaccccaaaccagacc

SEQ ID NO: 11531 - RNA, 70 nt, Homo sapiens
agacgcagggcgcccccgagccaaggagcaaaacgaacgaagaagccagagcagaaacaacaccaaggga

SEQ ID NO: 11532 - RNA, 102 nt, Homo sapiens
gcccccggggcggaacccccggcacgagcgcgcccagcgcccgcagaaggcccagggaagaaaacgccagagaagcagagcagcccggagcgaggggagacc

SEQ ID NO: 11533 - RNA, 79 nt, Homo sapiens
ccagccgccgcgcccgcccgacccgccaccgccaggccagaagcccaccagaggcgaggggaggaggaagcgagcgaaa

SEQ ID NO: 11534 - RNA, 76 nt, Homo sapiens
gggaaggccggcgggacgaaaggcaaggcaacggccccagagcagcagcgcgacggcagaccgaagcccggcccac

SEQ ID NO: 11535 - RNA, 65 nt, Homo sapiens
aaaacaggaacagagcgagggaggagagagggagagccaaagaagccgcaggggaagcccagcca

SEQ ID NO: 11536 - RNA, 86 nt, Homo sapiens
agcgcggcaaaaacacagccagcagcaagcagcacacaagccagccggacagcaacagaacccagaggacagagccaaaagaccag

SEQ ID NO: 11537 - RNA, 85 nt, Homo sapiens
cgcagggcgcccccgagccccggcgccgagcccacaggcgccacgggacacggaaccaggaggagcggagcgccgcgcgcccagg

SEQ ID NO: 11538 - RNA, 71 nt, Homo sapiens
acagaacagccaccaaaacagaagagaaggaacagaacagacaccaccgaaacgcgccaagcagacaggca

SEQ ID NO: 11539 - RNA, 83 nt, Homo sapiens
ggagagaccaacgcacaaaaaaaaccggagaaaaagcagacagcaggacaccaggggggaaaaaccacacaggcaaagaacgc

SEQ ID NO: 11540 - RNA, 53 nt, Homo sapiens
aagcagagcaggagggaagaggagggaaaaaacggcgcaagcaagcgccaggc

SEQ ID NO: 11541 - RNA, 76 nt, Homo sapiens
cgcggacgaaggccggaggggcgcgcaaagccacgaaaagcaaacgagcggccaggggggccacgacaagacaaga

SEQ ID NO: 11542 - RNA, 81 nt, Homo sapiens
cgacggaaaccaaggccaaccagggagacaggcgcgagcaacagggacaagggcgcccacccaggcccccaacaacacgcc

SEQ ID NO: 11543 - RNA, 81 nt, Homo sapiens
accaggaggcggccgccgcagcccaggcgcgggggcgacgacagggggaaaagcccaaaggaacccaaacaggccacaaag

SEQ ID NO: 11544 - RNA, 78 nt, Homo sapiens
cccacgagagggcaaacgcgcgcaggcgcgcccgggacgacggcgcggcgcgcccagcacgagccgccaaggacacga

SEQ ID NO: 11545 - RNA, 78 nt, Homo sapiens
gcaccgggacggaccgagaccggaccgagagcggaccgagagcgcgaaacgcacgagaagagagggacaccagcacca

SEQ ID NO: 11546 - RNA, 84 nt, Homo sapiens
ggaaagcagaagacaacaacgaacccgaagaagagggacagagaccgagaacacacacacaggaaccggagaaaggcaggaagg

SEQ ID NO: 11547 - RNA, 77 nt, Homo sapiens
aaaaggaggacaaccccagaacaaaaaaggaacaccagagaacaagaaccaggaagacagcgcccagcaacccggca

SEQ ID NO: 11548 - RNA, 75 nt, Homo sapiens
ccaaggaggcggcaccgggccggaagaggaaagagggggaggccagggacaccgaagacagcgcccgccgaaccc

SEQ ID NO: 11549 - RNA, 66 nt, Homo sapiens
ggaaagaagacgagacaaaacgaccgcccaacacggacaacaacagcggccagaccgcaaaccaag

SEQ ID NO: 11550 - RNA, 72 nt, Homo sapiens
cagaagcaggcccccagccgcagccacaacaccggcaggaaccaccaggacagaccaaaagcaggccggcac

SEQ ID NO: 11551 - RNA, 81 nt, Homo sapiens
gcgagcgcgagcggcgcgagaaagaacaagcagaaagcacgaacaacgagaacaagacacgagcaaaccccaccgaggggc

SEQ ID NO: 11552 - RNA, 74 nt, Homo sapiens
gcgacggcgcacggagacccacagacaggaccgaagggcggcccgacccaaaaaggcggcggaccggggcgcgc

SEQ ID NO: 11553 - RNA, 70 nt, Homo sapiens
cagagccgggccgccgaccgcccgcccgaacgcagccgacgcagaggacccccgagaaaaacgagaaagc

SEQ ID NO: 11554 - RNA, 73 nt, Homo sapiens
ccgaaagcacaccacgagcgacccgggaaacagaagacagccgaaccaagggcgacaaccagagacaagcagg

SEQ ID NO: 11555 - RNA, 77 nt, Homo sapiens
ccgagagccgcccgggccagcggccgcgcacccccggccggaggcaccagcggaaacccagacgacaaggaaggcca

SEQ ID NO: 11556 - RNA, 59 nt, Homo sapiens
aggcaccaacccaggaagaaccaaaagggaaaggaagcagacaccaagccaaaaagcag

SEQ ID NO: 11557 - RNA, 70 nt, Homo sapiens
gcccgcccaccgcccgaacccaacggggcggcacacaaggagcgaagggcagggagaacgccaggcacag

SEQ ID NO: 11558 - RNA, 74 nt, Homo sapiens
gcagaagcacagggcacgccaacccagggcaaacagaagacgggcaaaagagcggaagaaccaacgacagaaga

SEQ ID NO: 11559 - RNA, 84 nt, Homo sapiens
gagcaaaaacccaaaccccccaccagcgccaagagccggacgagcgggagaggacaccacacaaaaaacaggaaaagagaacag

SEQ ID NO: 11560 - RNA, 74 nt, Homo sapiens
ccgagcggcagacgagagcacagagaccgccaggcgccgaagaaagaaacagaagcggagagacagggacaagg

SEQ ID NO: 11561 - RNA, 73 nt, Homo sapiens
cccaggcacacagacaacagagcaacccaccggacggggcagggccccgggcgcgggagccagccgaagaaag

SEQ ID NO: 11562 - RNA, 69 nt, Homo sapiens
cagaaaagggacaggacagaggaagaaacaaaaagccaacggaaaaagaaacggcagagcacaggaccg

SEQ ID NO: 11563 - RNA, 62 nt, Homo sapiens
gcccccgagaaacaccggggccagcagaaacggggggggagggggacccggaagaggagaaa

SEQ ID NO: 11564 - RNA, 75 nt, Homo sapiens
aagcccgacagaagcaccgagacccaagaaagaaggaaaaccgcaccgaagcagccaaggccaagaagagcaagc

SEQ ID NO: 11565 - RNA, 75 nt, Homo sapiens
aggccaagcccaggccgaaggccgaaagaagaaaacccgagcagagaaaacaacaaagcgcccagcacacagccc

SEQ ID NO: 11566 - RNA, 69 nt, Homo sapiens
agacaggacccaccagcaacacggggaaaaagcaccgccagcacccaacaaacgaaggaccagggcaag

SEQ ID NO: 11567 - RNA, 70 nt, Homo sapiens
gcaggggcccgcaccacagccccaggacaaagaccaaaaggcaccacaaagggcagcgcagcccggaggg

SEQ ID NO: 11568 - RNA, 58 nt, Homo sapiens
ccagggccgggggccaggcagccggcacccgcacaacccagggggccgaacccagacc

SEQ ID NO: 11569 - RNA, 78 nt, Homo sapiens
cccaccaacagaagagacaaggagaagaccagagaccacccacacgaaaggagaggacgcagacggaaccgaccgagc

SEQ ID NO: 11570 - RNA, 38 nt, Homo sapiens
aagcaccagcacgccggcaagaaagaagcccacccaag

SEQ ID NO: 11571 - RNA, 86 nt, Homo sapiens
cgagccagccgcggccggaggagcccccaggccgcaggaaaccaagggaccaagccagcagcgggaagccaccaggacaagcaccc

SEQ ID NO: 11572 - RNA, 67 nt, Homo sapiens
ccccccgacacggccaagccggcgagaacgccgggagggaagaaagcaaaggagaaagaggacgcag

SEQ ID NO: 11573 - RNA, 76 nt, Homo sapiens
ggcaaaacgaaaggagcccaaagaacaggaaaccgaggaaggcagggaccggaaagaacaaaggcccaccggaaga

SEQ ID NO: 11574 - RNA, 77 nt, Homo sapiens
aggcaggagcccgaggaggagccaaggggcagcagcggaagcggaggaggggcagaggccggccccagggggcaaaa

SEQ ID NO: 11575 - RNA, 74 nt, Homo sapiens
gaggggcagcgggccggcaaccagacagacgcgcccagccccgcgcaggaggcaaaaagggagcgggaccacgc

SEQ ID NO: 11576 - RNA, 81 nt, Homo sapiens
cagcagcagagagaaacagcaggagaggccaggaagagaggagacaaacacgacgaagcaagcaagcaaccgcccccagac

SEQ ID NO: 11577 - RNA, 61 nt, Homo sapiens
gaggcggaggcgacgaggaggcggacccccggcgcagcggagaggagcgaagagcgaagcc

SEQ ID NO: 11578 - RNA, 76 nt, Homo sapiens
gaagaggcggccggcgaaaggagcgggccggcaagggagcacaacagaagggcaaagacagcccaagacagcagcc

SEQ ID NO: 11579 - RNA, 78 nt, Homo sapiens
ggggacggcgggcgagggaggggaccgccgcggaaaggcaggagagcgaaagagagcggaaaaacgaccaaagaagcc

SEQ ID NO: 11580 - RNA, 66 nt, Homo sapiens
ccgagaccgaggcaacggggccccgaggccacggcccggagcacgaacccaggagccgggcagccg

SEQ ID NO: 11581 - RNA, 74 nt, Homo sapiens
ccggcgcacagaggcgcagcgggccagcaggacgcagcaggggggacccaaacgagcagccagagcgccgccaa

SEQ ID NO: 11582 - RNA, 56 nt, Homo sapiens
aggaccaaacccaaagcaggcaagaggcagagaaaggagcgaagaaaccagcccca

SEQ ID NO: 11583 - RNA, 82 nt, Homo sapiens
ggaacccagaggaaacgacggagacgcagagggacgaaagaagcgcagcggaggaaggcgagcggcccagaaggacggaaca

SEQ ID NO: 11584 - RNA, 82 nt, Homo sapiens
ccagcagagcccgcgaccagggcggccaggcaaaagcagaccggaaaacccaccggcaagaccacacccgaggggagcccag

SEQ ID NO: 11585 - RNA, 61 nt, Homo sapiens
cccaaaccagggagccagagaccaccgggaacgcccagcagcccgggaccagccagcccgg

SEQ ID NO: 11586 - RNA, 73 nt, Homo sapiens
ccgagcgggccgacaaggggccaaagcaaccagccaagggaccgcagggagacggcaccaccaccggggggcc

SEQ ID NO: 11587 - RNA, 58 nt, Homo sapiens
ggcaaggggccaccaggaggccagggggcgccagagggccagcaaaagaagcgagcaa

SEQ ID NO: 11588 - RNA, 79 nt, Homo sapiens
ggaaaggcagaagggggaagaccaaaagacacagaaagacaagggaagagcccaaaacgccgggaggaccacagagcaa

SEQ ID NO: 11589 - RNA, 71 nt, Homo sapiens
cacaccacggcaggcgcaggccacagccgaaaccagccagcaacccagccacaggcaacgaaaacaacgag

SEQ ID NO: 11590 - RNA, 80 nt, Homo sapiens
caccccggagccagaggcgagcggcagggagggggggggcgcagcccagggagcgaaccccgcaggaccccgaggagacc

SEQ ID NO: 11591 - RNA, 40 nt, Homo sapiens
acagacagaacccgcaccaaagcaaaagaaagggagaggg

SEQ ID NO: 11592 - RNA, 98 nt, Homo sapiens
gcggcccggcagcaaggcgagaagaaagaggccagacaggaggcacgcaaaaaaccacgacaagcaacacgacaaaacacccacgaacggacgcgcac

SEQ ID NO: 11593 - RNA, 40 nt, Homo sapiens
cccaagcaccagcccacagcaccgaagaagcccgaagaca

SEQ ID NO: 11594 - RNA, 76 nt, Homo sapiens
cggccgccaccggccgccgagccacgcggaggcagcaccaccgcccgggcaagagccagccgccgcgccaagaaac

SEQ ID NO: 11595 - RNA, 66 nt, Homo sapiens
cgcaggcagacaaaagggccaaagaagggagagagagcgccagggaacagggacccaggaggccga

SEQ ID NO: 11596 - RNA, 35 nt, Homo sapiens
agggccgccccaggacaaaagagacggggcacgga

SEQ ID NO: 11597 - RNA, 70 nt, Homo sapiens
gagaaagaccccaccaaggaggcaggacgaggggcaaggacaccagaacagaagaggaacgacagcgcca

SEQ ID NO: 11598 - RNA, 66 nt, Homo sapiens
agaacgaaccgaagcgccagccagaaaagagcgacagggcagcccgcagaggaccgcacgaacgca

SEQ ID NO: 11599 - RNA, 67 nt, Homo sapiens
agcagggggggggggaagccgcagcggaaagcaggagcacaggaagaaacgcacagacgcgaaagag

SEQ ID NO: 11600 - RNA, 72 nt, Homo sapiens
gagaaacacagcacaagaggggagaaaaccagaggcccccacgagacagcccaggcaaaaaagaaaaacaag

SEQ ID NO: 11601 - RNA, 103 nt, Homo sapiens
cagagcgcagcgccgagcgcggcccgggcgccacgagccggcggcggacggcaggagcacagaccagcgcgcgaccggagccccacagcggcacaggccccag

SEQ ID NO: 11602 - RNA, 83 nt, Homo sapiens
acaccagagggccaggccagaagagccgaccacaaggggaggacaaccgcccgggaccagacaacggcaagcggagaagagca

SEQ ID NO: 11603 - RNA, 35 nt, Homo sapiens
ccagccggagacggcacccaggccacagaggagga

SEQ ID NO: 11604 - RNA, 80 nt, Homo sapiens
ccgggacggcaggaagaacaacacagccagccccccgagggagggacaagcaagacaaacagagaacaggacagcaagaa

SEQ ID NO: 11605 - RNA, 80 nt, Homo sapiens
gagccagagagaaacagcgaccaccgaggagacaagcggagcgagcgccggaaggggcgaccggaccgggagaagaaggc

SEQ ID NO: 11606 - RNA, 76 nt, Homo sapiens
acccggacccaaaggccagcaaggaaaacacccggcaaggacccggacggaagcggagaaaggacagggccacccg

SEQ ID NO: 11607 - RNA, 76 nt, Homo sapiens
ccaagcagggcgaagggaacgcaaggcccccgaccacacgcccgcgcgagaacgccaccagaggaagacgagagaa

SEQ ID NO: 11608 - RNA, 79 nt, Homo sapiens
gcaaagacgccacgcaaacaggaggccagcaaagaaacacgcgaacacacacaggggagccgccaccaaaagcagacgg

SEQ ID NO: 11609 - RNA, 97 nt, Homo sapiens
cggaagccggagaccccccccaagacccacgagcgaccagagccaagaccgaccagaacagccaagagaaaggcacccgggagcgggaccgcaagcg

SEQ ID NO: 11610 - RNA, 79 nt, Homo sapiens
agccacccgacacccggcagaccagacccccgaccggcgggggcccacaaccggggccgaaccaacccacagcgggcgg

SEQ ID NO: 11611 - RNA, 55 nt, Homo sapiens
agaagaaggaagaagacagcagcaggcgcaaaaacgaacccacaaccgaacgacg

SEQ ID NO: 11612 - RNA, 77 nt, Homo sapiens
gcgccgccgcaccccccggccgccgcccagaagacgaccccgacgcaggccaggagccgcggacagaagccgagcac

SEQ ID NO: 11613 - RNA, 41 nt, Homo sapiens
gaaaacaacgacaacgagcacagggcggagaacggaaaagc

SEQ ID NO: 11614 - RNA, 82 nt, Homo sapiens
gagccggggggagcggcggccacggcaccggcggggggcacgaggaaaggcaaggacggggacacaagaccagccagcccag

SEQ ID NO: 11615 - RNA, 80 nt, Homo sapiens
cgcagccagaagaacaagaagaggcagaccccgccagaccaacaagcggagacagggagcagagaaacagaaggcacagg

SEQ ID NO: 11616 - RNA, 71 nt, Homo sapiens
cggaaacacgccggaccaggaaccacgaagaaaagggaaaacaccaaagcgagaccaggaggacccaagcc

SEQ ID NO: 11617 - RNA, 41 nt, Homo sapiens
ccccggaggaaacaacaagacgcacgggggccacaggcgac

SEQ ID NO: 11618 - RNA, 74 nt, Homo sapiens
gaggcgggcaggaggacccaaacgaagcgcacccagcagacagcgcggcaggacggagcgccggaccgcccgac

SEQ ID NO: 11619 - RNA, 77 nt, Homo sapiens
ccgaccccaggagaaacaagccccaaggggagccccaacccggccaggaggaggccccaaaaggagggaaacaagca

SEQ ID NO: 11620 - RNA, 98 nt, Homo sapiens
cccagccgggggaccagccagcaggaccaaagacacagaccggccagggaccagaaacacggcgccaggcgccggcaggccggaaggcaaagaccggg

SEQ ID NO: 11621 - RNA, 40 nt, Homo sapiens
cagaccgacccacccgcgcgggggaaagggccgcggaggg

SEQ ID NO: 11622 - RNA, 70 nt, Homo sapiens
gaagcaaaagagaaaacgaggcccccaggacgcacccacaaggaagcgggagaggccacccgcccacgag

SEQ ID NO: 11623 - RNA, 90 nt, Homo sapiens
gcggccgagacaaaggcaccaggccaccacagaaacaaaagcaacaaagaggagacaaagcaggaggacacaagaagggaggaaaggcgg

SEQ ID NO: 11624 - RNA, 72 nt, Homo sapiens
gccagcgaggagaacagccgaaaggcggggacgggccggcccgcggaagaacgcaaggagggacaggacgga

SEQ ID NO: 11625 - RNA, 77 nt, Homo sapiens
cgccggccggcgacccggggaccggcccgcggcggcgcgccacccgccccgcagggacgcaacccaccacgaagcgg

SEQ ID NO: 11626 - RNA, 65 nt, Homo sapiens
agccaaccgcccaggaaggacaaagccaggaagaggcgcccccgcccgccagacaagccgaggcc

SEQ ID NO: 11627 - RNA, 68 nt, Homo sapiens
gcaggaagggagagccacccaagagacaagcagggcagacacaaggaacagccagccaggagaaaaac

SEQ ID NO: 11628 - RNA, 64 nt, Homo sapiens
agcaccgcagggcccgaaggacaaacgacaagcccgacacccagcggcaccggacagagcggag

SEQ ID NO: 11629 - RNA, 44 nt, Homo sapiens
gaagggccgagcacagcaagcaagcaaaggaaaggaacagaaac

SEQ ID NO: 11630 - RNA, 72 nt, Homo sapiens
acagcgaggggccaaggcagaagaaacggagaagggcaaagggaccccggcccagcacggccacaagaccag

SEQ ID NO: 11631 - RNA, 75 nt, Homo sapiens
caggcacccgggcccagccgggaacccccacgcggccagcgaaaacgcccagacacaagacacccaagaagccca

SEQ ID NO: 11632 - RNA, 71 nt, Homo sapiens
agccaggccaccgagagaagcagagcaccgcagagaagggcgacaaaagggcacacaggccccgagaacca

SEQ ID NO: 11633 - RNA, 46 nt, Homo sapiens
aaagggcccaacccaacggacacggaacaccagagcgccggcccag

SEQ ID NO: 11634 - RNA, 62 nt, Homo sapiens
gagaagaacggagccaagcaccacaagacaagcacagagagaagcgcagaggccaaaagaac

SEQ ID NO: 11635 - RNA, 53 nt, Homo sapiens
gggaacccggggccagagggcagagaaagagcgagagggaaaggaagagaacc

SEQ ID NO: 11636 - RNA, 52 nt, Homo sapiens
cacccccgcgacacagaacgggaggagggaagaaaagcgccgaccggaaaac

SEQ ID NO: 11637 - RNA, 83 nt, Homo sapiens
ccaaacacaagaagcaagaagccgcggagaaccgaaccaacagccagccaaagccaggcagcacagcacaggaaaacaaacga

SEQ ID NO: 11638 - RNA, 109 nt, Homo sapiens
caccccaccgggccccagaccggcgaccgagagcccggaccagcagagggccgacggaacgcaagcacaggaccagaaacgaaaggcagcagaagaggaaagccagaaa

SEQ ID NO: 11639 - RNA, 84 nt, Homo sapiens
cccccagaaggcaccaccacagccgcccaccggaaggccaccccgcaggccgggcgaggcgaggccacccgggccgccggcggc

SEQ ID NO: 11640 - RNA, 67 nt, Homo sapiens
cgcccgacccgccaccgccaggccagggcaagacggacgagacgcgcgggcagaggcagaacggcgg

SEQ ID NO: 11641 - RNA, 76 nt, Homo sapiens
cgcagggcgcggaggaggaggcgcccggaaaggagcacgaggcaagggaaaaacaccagcaaccgacggcagcaac

SEQ ID NO: 11642 - RNA, 74 nt, Homo sapiens
ccaaccacgggcgaggaggcgccgcgcagggaaagggagcagcaccggccacacccacagcacgaccggaaccc

SEQ ID NO: 11643 - RNA, 77 nt, Homo sapiens
acaaaacaaaaagcccgaggaaccaaggaaaacagaaaagggaacagcagcccagggcgccaacccccaacccacgc

SEQ ID NO: 11644 - RNA, 74 nt, Homo sapiens
ggggaaaacacggaggagggacgcacgaacgcggacccaaggacaggggcgggccgggcagaaacaaccacagc

SEQ ID NO: 11645 - RNA, 63 nt, Homo sapiens
ggaacggagaaacggaccgccaaagaacgcggcagaacggaggcaggcagcacgagacacacc

SEQ ID NO: 11646 - RNA, 68 nt, Homo sapiens
aggccagagcacgagcacgggaagcggagcaacaccccgcaccgggaaccgcggaacccgcaggccac

SEQ ID NO: 11647 - RNA, 75 nt, Homo sapiens
cgcccagcccccaaggagcgagaacaggacaagccacacaagaaggagaaaaaaaagagaaggcaccccacaccc

SEQ ID NO: 11648 - RNA, 75 nt, Homo sapiens
gggcagccgagcccaggacccaccagcccaggagaaaagacgcagcccgaaggcggccaaaaagaggggagacac

SEQ ID NO: 11649 - RNA, 79 nt, Homo sapiens
aagagaacgcccgggaccgagcacccgccccgggcaccaacgagaagacacccgggcgggaaaaaggagcaaagaaagg

SEQ ID NO: 11650 - RNA, 108 nt, Homo sapiens
ggcaggcgcccgcccccaggcgcgcccagccccgcagccagggcgaacccccgcagaccaaaggcagagcggaaagcagcgcccacaaagagaaggaccgacgaaaag

SEQ ID NO: 11651 - RNA, 76 nt, Homo sapiens
cacgaaaacgcaaagccaggaacccaggacaaggggcaacagaagacacacaaagaccacaagccagcagcacacc

SEQ ID NO: 11652 - RNA, 68 nt, Homo sapiens
cacccaccgacaccgacaggcacaaaccgcaagacaccagaaggacacaaaacagagaggggcaccag

SEQ ID NO: 11653 - RNA, 37 nt, Homo sapiens
acaacacccacaaggaccaggccaaccggagcgcacc

SEQ ID NO: 11654 - RNA, 78 nt, Homo sapiens
ggcaaaggggaaacagcagagaccccagacgccaccacaacccccagacgcaagccaaggcgaagagcagggacgcca

SEQ ID NO: 11655 - RNA, 64 nt, Homo sapiens
acgagagcaaccgacacagaagcacggagcccaagaagaagagaaggcacaaagacggaacgaa

SEQ ID NO: 11656 - RNA, 77 nt, Homo sapiens
cggcgcggcaggagcgcggagggacgccgaagagaacccagcgcagcgcagaacaaagacaaaagcacaaggagcaa

SEQ ID NO: 11657 - RNA, 69 nt, Homo sapiens
gccacccggaacgcgcgcacccaccgggcccgcgggccgccccaccccacaggacacgaagcaaagaag

SEQ ID NO: 11658 - RNA, 74 nt, Homo sapiens
gggccgacagaggaaaggagaagcaagagcaacaagacccaggagagcacaaagaccaacaaagaacgaaccaa

SEQ ID NO: 11659 - RNA, 82 nt, Homo sapiens
ggcagcgggacggacaggcagggaagcaacgcagaggggaggacgcgagcggaagagaagcaaaaagacaaggaggaaagcg

SEQ ID NO: 11660 - RNA, 72 nt, Homo sapiens
ggccggacgcacccggggggcccaggacccgacaaacggacagcaggaccagaacaaggagaagcaccgggc

SEQ ID NO: 11661 - RNA, 81 nt, Homo sapiens
gcacaagaacgaaaccggaaccagacagaaggcagaggagagcgaagaagaaacccgggccaccacgagggagcagcagga

SEQ ID NO: 11662 - RNA, 61 nt, Homo sapiens
cgaaggaccaccaaccaaaggaacggagggaaagcgacaaacaaccaacccacagagaccc

SEQ ID NO: 11663 - RNA, 78 nt, Homo sapiens
gccaaggggacgagcaaaggaagcgcgaacagcagcgcagcaaacgcacaggagcaaaaggacagacacggcagggaa

SEQ ID NO: 11664 - RNA, 83 nt, Homo sapiens
ccgggagcacgcacccacgagggcaagagaagccgagccaggccgcggagagccgcccgcgcccaccgccgcgacccgggccc

SEQ ID NO: 11665 - RNA, 79 nt, Homo sapiens
ccacccacacccaccaacaacaccacaaaaccacagccaaggagcagcaacgaaaagacaccacaagaaaccgggagaa

SEQ ID NO: 11666 - RNA, 79 nt, Homo sapiens
cgggggagcgcccacccagggcggcgccaaggagacggacccaggaagccacccgcagaggggcaaggagaaagggcaa

SEQ ID NO: 11667 - RNA, 63 nt, Homo sapiens
agaaacaaggcgaacggcacacgagaaggaacaagccacaacagcccccgggccggaggcggg

SEQ ID NO: 11668 - RNA, 59 nt, Homo sapiens
ggaagaggagagagaaaggcgggaagagacacccaggaacagcggaggaggacagaagc

SEQ ID NO: 11669 - RNA, 86 nt, Homo sapiens
gcgagaggggcgagaacgccacgcgggccggcgaaagcgaacccagaccggaccagaggcgcgcagcccgccccgcccagcgggca

SEQ ID NO: 11670 - RNA, 85 nt, Homo sapiens
cgggggggccaccgggcagcgggggagcggcgcagcggcggcagcggagagcgagagaggggagcaggccagaacacagcagaaa

SEQ ID NO: 11671 - RNA, 85 nt, Homo sapiens
gaggaccggaggccggaggaagccaggaggccgggaaccgagggagaagaccaaagaagagagagcaggaccaccaccgcccaca

SEQ ID NO: 11672 - RNA, 70 nt, Homo sapiens
cgacaaagcgaaagcacaccaagacggcaccaaacggcaaggaggaaaaaaccagaaaccagacggcggc

SEQ ID NO: 11673 - RNA, 51 nt, Homo sapiens
ggacaacaaaagagccacccaagggggccgccacaagccaacgaggggaag

SEQ ID NO: 11674 - RNA, 75 nt, Homo sapiens
ggaagcggacgcgggacggaagcacacgcggcggcacgaagggcagcagcacagggagcccccggagaccaagag

SEQ ID NO: 11675 - RNA, 79 nt, Homo sapiens
gaagcaacacgacaaagccaaccgacccaagcagcaaaggaaggaaaggccaaggcagagcagaaccccggggcacgga

SEQ ID NO: 11676 - RNA, 76 nt, Homo sapiens
gcaaggaagcaggcagccagaggggagggacaaagcggcgcacgcacggagacgacgggaggagcgagaccacccg

SEQ ID NO: 11677 - RNA, 60 nt, Homo sapiens
aaaggggccgacagagggacaggccgagaccaaggcgagaaggaccagacagaagggacc

SEQ ID NO: 11678 - RNA, 77 nt, Homo sapiens
ggacgaggaacgaagaggaaaggaccagagacgaggacgcgcacaggaaaggacgcggaacaagcaggcagccaggc

SEQ ID NO: 11679 - RNA, 69 nt, Homo sapiens
ggggcggagaagggacaaccgaaggcagagaggcggaccccgcgggcgcgcggcccgaacccagcgaga

SEQ ID NO: 11680 - RNA, 72 nt, Homo sapiens
cagcacacagccagagagccaggaagcaaggaggaacccggcaccagccgggcaaaaacccaaaccaacaga

SEQ ID NO: 11681 - RNA, 72 nt, Homo sapiens
agcccgagccgacaggggagaaggaaagcaacgaagaccaagaagggggaccggaggagagaacaaccaagc

SEQ ID NO: 11682 - RNA, 79 nt, Homo sapiens
ccggggggcacgcccgcccgggccgaacggccaaccagggaaaggaaggagaacaagggaagaaggagggcaaggacca

SEQ ID NO: 11683 - RNA, 53 nt, Homo sapiens
agggggccccaccgccaggcagcgggacagacgggagggagacaagagccggc

SEQ ID NO: 11684 - RNA, 79 nt, Homo sapiens
aaaccacgacacggcaggaaggaagaaaaaggagagcaaaacagaaggaaccacgaagaacagcagaaacagaaagagc

SEQ ID NO: 11685 - RNA, 86 nt, Homo sapiens
gggaggagcggcagccgcgaggaggcgcgggagggcgagaacgaccccgagacggaagcccggggcggcgacggagcacgacccaa

SEQ ID NO: 11686 - RNA, 84 nt, Homo sapiens
ggggagaggccggcgggaacgaacagccgacggggcgaccgccggcccaggggaggagacggaggcagagagaagagggagagg

SEQ ID NO: 11687 - RNA, 78 nt, Homo sapiens
gagcgcggcggcgggggacggaaagagagccgcagcgcagaacaagggaaaaaagggcaaaaagggcaaaaaagacag

SEQ ID NO: 11688 - RNA, 78 nt, Homo sapiens
agaagcggaggaagcgaagggaggaagcacgagagaggagccaaagaaccccgggagaccggaaacgagagaaacgaa

SEQ ID NO: 11689 - RNA, 77 nt, Homo sapiens
cgccgagcgcgcggagaaccagagaagccgggaagacgaccccgacgcaggccaggagccgcggacagaagccgagc

SEQ ID NO: 11690 - RNA, 41 nt, Homo sapiens
agcggcggacaggaaacaaggcggcacagggagaacacagg

SEQ ID NO: 11691 - RNA, 85 nt, Homo sapiens
aaccaccgcacaagagccaagaacaagggccgcgagggaagagcacagcaagcgggagcaggcagaccaaaggaacagaagccag

SEQ ID NO: 11692 - RNA, 61 nt, Homo sapiens
ggccacacgcaaggggaacagaagcacaaggaccgaggaaccacgccagggccccaaaaag

SEQ ID NO: 11693 - RNA, 75 nt, Homo sapiens
gcaagaccgcgaggcgagacccgagaagacagaggagccagaccaagagacagcacaggcgagcgagcagagaca

SEQ ID NO: 11694 - RNA, 76 nt, Homo sapiens
acaagcaggaaggaaccacgagaacaaaaaccaggcgaaaggcgaggcagaggggcacagaaaagagacacacaaa

SEQ ID NO: 11695 - RNA, 71 nt, Homo sapiens
aagaacagagaccaacgacagacggcccagaaagggaaaccagaagaaaggaaagcccggacagaacccag

SEQ ID NO: 11696 - RNA, 81 nt, Homo sapiens
ccgggacggccacagacccacagaggcaccccagacacagcacgcagcacgggggcaggggccgacccagaacgccagcgc

SEQ ID NO: 11697 - RNA, 111 nt, Homo sapiens
cccggagcaggccagcacagagggggcacgacgcacccaccaggaagagggcgcacgccaggggcccgcgcgaggagcggagaccagcccccaggaggacagggaggaggg

SEQ ID NO: 11698 - RNA, 73 nt, Homo sapiens
cgacacagaaggaacagcagacaagacgagcccaccacggacagcaaacagagacacaggacacccacccgcc

SEQ ID NO: 11699 - RNA, 78 nt, Homo sapiens
caaacccaagaacaaaaaggagcagcaagcagagacagagaacgcagaacagaagggaagaccaaaacgagagaaacc

SEQ ID NO: 11700 - RNA, 74 nt, Homo sapiens
ggcggcgggaacgagggcgagcagaggacgacaggccgggagggaaggggaagcaggccaacccagaacacacc

SEQ ID NO: 11701 - RNA, 70 nt, Homo sapiens
gccgcgcgcccgcgcccccgcgcgacgccagccggaaccaaaaagaagccccagagccggggccaggagc

SEQ ID NO: 11702 - RNA, 59 nt, Homo sapiens
gagccacggccacacgggagagaagacagaaggcaagcagcaaggaacaaggaaagagc

SEQ ID NO: 11703 - RNA, 74 nt, Homo sapiens
cgccgccgccacggcgcccacccaacgcgaagacggaacccgggacgacggggacaagagaaaaaaagggcggg

SEQ ID NO: 11704 - RNA, 80 nt, Homo sapiens
gagacgaagacagacacacaagaggacagggagaaagggccccaagaggagaagcccgagcacaacccggcaagggagga

SEQ ID NO: 11705 - RNA, 83 nt, Homo sapiens
gaaccccaacaagcggcggagcaccagggcacaagacgagcacgggcagacggaaaaccaagcaccgacggaaacaggcgaaa

SEQ ID NO: 11706 - RNA, 73 nt, Homo sapiens
ccaaaaaaaaaaaaggaagcacaccaagacgacagaaccgggaagacccaaaagggaaggaggaaggagacgg

SEQ ID NO: 11707 - RNA, 73 nt, Homo sapiens
ggcccccggcaccaggccgaaaacgaagcagaggaacaacaagaaagagccgcagacgcacagcaaccaccgg

SEQ ID NO: 11708 - RNA, 124 nt, Homo sapiens
ccgcacgacccagccccacacggcaagacacagagagacggcagccgcgacagacacaccacgagggcaccagaagcaaccccgacccggaccgcagaaaaaccgcaaacgcaccaagcccccc

SEQ ID NO: 11709 - RNA, 72 nt, Homo sapiens
caagaaagagaagaagacaggaaaaaaaaaacaccgagagaagggaaagggaaggacccgaggggccggacc

SEQ ID NO: 11710 - RNA, 63 nt, Homo sapiens
gggcggaaaggaggacggcagaagaccagagaggacaaccaaaagcaccgaaccggaacaaag

SEQ ID NO: 11711 - RNA, 57 nt, Homo sapiens
ccaccccccagacacacagaagaacaggcagcgccaacaaaaaaaaaccaagaaacc

SEQ ID NO: 11712 - RNA, 59 nt, Homo sapiens
cgcaggaccacagcgcagcaaagaacacagagggaccacgggacacgaaccggaaccca

SEQ ID NO: 11713 - RNA, 85 nt, Homo sapiens
cgcgcgccgcaacgccgagcgcaccgacacgccgccaaagagacaccaggcgccgagaaggccagcagagaaacaggcaggagag

SEQ ID NO: 11714 - RNA, 72 nt, Homo sapiens
ggccggggcggagacccccgcagaccgcaacccaccaaggagcacaggacgaagaggaaggaaaaaacaggc

SEQ ID NO: 11715 - RNA, 81 nt, Homo sapiens
ggggggccgccacagaggaggaggccgaggggagagcccaccgaggggagccgccgggaggggcccccccaaacggaagaa

SEQ ID NO: 11716 - RNA, 70 nt, Homo sapiens
cgaaagccgagacgagagagcgcgcgagcggccagcacaagcacaggaaccgacaagagaggggaaaagg

SEQ ID NO: 11717 - RNA, 76 nt, Homo sapiens
ggaagaccaagcaggagaaccgaccgcgggccacagacagcccgcagcgcgcacaagacccagaagggaggcgcca

SEQ ID NO: 11718 - RNA, 82 nt, Homo sapiens
gcccgccgcccgccccggcacacgcgcagccccggccccggcccgccggagaaacaggaacagaccaaacgcgaagaacccc

SEQ ID NO: 11719 - RNA, 69 nt, Homo sapiens
cggacaggcgacagcgaccgcggcaggaccaccccaggacaacaggggaagcaaaggaaccagaaaggg

SEQ ID NO: 11720 - RNA, 95 nt, Homo sapiens
ggggcaagagagacgagaaagaacacgcggccaaacccggaggaggaggaacacaagggcaagacagccgggaaccccaccccaccccacagcac

SEQ ID NO: 11721 - RNA, 77 nt, Homo sapiens
gagagcccggccaaggaccgggaggcgggagagagaacggaaaggagccaaggaaaacaaaagggcgagccagaaaa

SEQ ID NO: 11722 - RNA, 81 nt, Homo sapiens
ccgccgaccacacacaacccaagaagaaccacaagcagaccaggagagccccacacgccccccccgcagccacccgccagc

SEQ ID NO: 11723 - RNA, 66 nt, Homo sapiens
caggcaacggcagaacacaaagcacgcagaggagacaggaaaaggccaaagggagcgcgcaaggaa

SEQ ID NO: 11724 - RNA, 74 nt, Homo sapiens
gggaaccaaaccgccaggccgcacgggaccgaagacaagaacagacacccaggaacagcggaggaggacagaag

SEQ ID NO: 11725 - RNA, 90 nt, Homo sapiens
gcaggggcggccggagccgcggccacccagcgagaggagaggcgcccccggggacgccgcacaaacacgcagaggcaagaagagaggcag

SEQ ID NO: 11726 - RNA, 71 nt, Homo sapiens
ggagaaagcgaagccaagcccgaagccaaggggccaagaggagaagaagagcaagcgcgcggacccgcagc

SEQ ID NO: 11727 - RNA, 85 nt, Homo sapiens
aaggacaccacagccccgacgaacacggggacaccaacaggacccgccaaggaagagccagggaggcccgaccccccgggaacac

SEQ ID NO: 11728 - RNA, 81 nt, Homo sapiens
cgcaaacgcaacccagagaaggcacgggaccagagcagcacgaggagaacaacagaacagagagaaacaccaccagaggga

SEQ ID NO: 11729 - RNA, 72 nt, Homo sapiens
ggggaccaccaccaccacaagacccgcgaggcgccgagcggcagaccacaggaaagccggacacaagagggc

SEQ ID NO: 11730 - RNA, 89 nt, Homo sapiens
ggcgcgcaggaggaaggcgccgcgcgggacccggaggaccgaccccagcccacgggcacgcagggccaggagccacggggccagaagcc

SEQ ID NO: 11731 - RNA, 95 nt, Homo sapiens
gacccagggcggaaaggaagaggagacagagggccgagaaggacaggacaggccaaagagaagaggaagcccggaggaggagagagagagagaga

SEQ ID NO: 11732 - RNA, 82 nt, Homo sapiens
gcggacggacacccagcggcgacacgcgacgcgccaaaacccgcccggaaaggggacaccggcagccgccgcaaagggacga

SEQ ID NO: 11733 - RNA, 75 nt, Homo sapiens
caaaagaaacaggacagacggcaaaaaagaacaggaaaaagggcaagaagcaccaaaaggaagagaaaggagcgg

SEQ ID NO: 11734 - RNA, 71 nt, Homo sapiens
acgagcccagcgcaaccccaagcgcccaaagggaaacccagacgacaaggaaggccaagggacccacgacc

SEQ ID NO: 11735 - RNA, 64 nt, Homo sapiens
ggcggcagggggcggaacaaggagccggagcggggcaaaggccacccgaggcacaaacaacgca

SEQ ID NO: 11736 - RNA, 74 nt, Homo sapiens
acggagaaaacccggaaccgcgacggcggcagggcggagaacggaaaagcaccaggaagcagagaggaccgcag

SEQ ID NO: 11737 - RNA, 75 nt, Homo sapiens
ccgggaaggggagccaccagccccccgcgggaccccacaccagccagggaacaacggcccccagcagacagagcg

SEQ ID NO: 11738 - RNA, 73 nt, Homo sapiens
gcacaaccacaagaacccgaccgcgggagaagcgaacaacaacgggaacacagaaaaaggagcccccgcgccc

SEQ ID NO: 11739 - RNA, 74 nt, Homo sapiens
caagccgcgcgggcagggcggaggggcgcgcgggaacaccggagcccgcgggcagaaccagagagcgcgagacc

SEQ ID NO: 11740 - RNA, 74 nt, Homo sapiens
gggacccggaaaggccacaaaggccccggggggcgggaccggcaggaggagcaggaaaaagagagccacacccg

SEQ ID NO: 11741 - RNA, 77 nt, Homo sapiens
ggcaagccaccccgcccccaagagcaagccggccccccaggccacccaggaccagcggcacacccccccgcggccca

SEQ ID NO: 11742 - RNA, 69 nt, Homo sapiens
gagacccggacaccaggcacgcaaccccgggcagaagaaaggaaccagcacgcaagagcacagcaggga

SEQ ID NO: 11743 - RNA, 67 nt, Homo sapiens
aaaacggaaacacaagagaccagaggcacccccagcaggacagcacacccaaccagacacaccaccc

SEQ ID NO: 11744 - RNA, 77 nt, Homo sapiens
agcagcgccgcccggcagccagggcgcaggaaaccggacggggaagaaaaaccgaggccagacgaacggaaaagcaa

SEQ ID NO: 11745 - RNA, 67 nt, Homo sapiens
cgggcacgggccaccgggaaacgaccggaccgcccaacccagacccaggagcgacaccgaacccacg

SEQ ID NO: 11746 - RNA, 78 nt, Homo sapiens
gaagagaaaaggaggaagcagaaaccagaaacaaacgagaaaagaagagcacagaaggagcaggccgagagaagaaaa

SEQ ID NO: 11747 - RNA, 35 nt, Homo sapiens
gaagaaccaacccagcagacagaagagcccaagac

SEQ ID NO: 11748 - RNA, 38 nt, Homo sapiens
gcgggagggagacggcggaaaagaaacaggacgcagag

SEQ ID NO: 11749 - RNA, 58 nt, Homo sapiens
cagcgcacgggcgggcgaaggcagcccacgagggagagagcccaccaaggaaccacga

SEQ ID NO: 11750 - RNA, 65 nt, Homo sapiens
gaaccggggagcacggacggagaaccagccaaaaaagggcagaaccgacaacggggacccgcgcg

SEQ ID NO: 11751 - RNA, 78 nt, Homo sapiens
aaaacgaggcccagggagcaggaagaagcgacgaggaccaggacagagcgggagccaccagcgccaaagggaagccag

SEQ ID NO: 11752 - RNA, 58 nt, Homo sapiens
cggcggagcacacaagagaacccaccgcaagagaccaaaggccaagagcaccgcagcc

SEQ ID NO: 11753 - RNA, 65 nt, Homo sapiens
agaagggggcaaaggcacaaacaaggacccagcaaagccgcaggaaaccagagccacggcaccgc

SEQ ID NO: 11754 - RNA, 54 nt, Homo sapiens
gcaccggcccgaaacgccgaaaaacccaaggacgcaaaacgggagagcagagag

SEQ ID NO: 11755 - RNA, 71 nt, Homo sapiens
acccgccagaagagcacaggacggcgaggcccaaggaaaggaccaacgaggccaacgaaagacaacaaaga

SEQ ID NO: 11756 - RNA, 72 nt, Homo sapiens
agccgaaggagggcaagacagcgagggacgaaggagaccgcgcagaaggccggcccacagcccaaaaagaaa

SEQ ID NO: 11757 - RNA, 36 nt, Homo sapiens
ggcggacggggcgacagggggcgaggaagagacagg

SEQ ID NO: 11758 - RNA, 71 nt, Homo sapiens
aagaacaggacaaccagggccgaccagcacgagaccagacccagcggaccagagaacgcaccagcccgagg

SEQ ID NO: 11759 - RNA, 54 nt, Homo sapiens
ggaccgaccagcaggcaccgcaaagagggacggaaaaggcgcacacgacccgga

SEQ ID NO: 11760 - RNA, 77 nt, Homo sapiens
gaaaacgaaacggggaaagcaacaaccaaaggccagggcacaaaaaagccaccaacaacaccagggacacaacagca

SEQ ID NO: 11761 - RNA, 71 nt, Homo sapiens
aagcccaccacaagaagcggaagagagggggcgcccagcgccaacaccaaggaaaaagggccaccccgacc

SEQ ID NO: 11762 - RNA, 68 nt, Homo sapiens
agccggaagaccgggcccaacagcacaaggcacacccagaagccacaggagaagcaagaggcggcccc

SEQ ID NO: 11763 - RNA, 39 nt, Homo sapiens
aaagagcagacagacccaagagggacccacaggaccaag

SEQ ID NO: 11764 - RNA, 74 nt, Homo sapiens
acaggagcgaaaaacgaccaggccagcacgagagaaacagaggacgaccgggaggacaagaagaggaagaggac

SEQ ID NO: 11765 - RNA, 78 nt, Homo sapiens
caacgcacggggggaggaaccaacgggcaaggccagagaaggcgggagaaagacacgaaccacagaacgcaacaggac

SEQ ID NO: 11766 - RNA, 80 nt, Homo sapiens
gcccagcgccgcgggaccggggccgcggggcggacgggggcgccaggagcccccaacaagcccaagaggagagaccccag

SEQ ID NO: 11767 - RNA, 78 nt, Homo sapiens
ccagggcccgaaggcaaagaaccccaggaaagaccccaccaaggcgaggacaagaccaaagaacagaaaacaccaaca

SEQ ID NO: 11768 - RNA, 70 nt, Homo sapiens
agaaaaagaagaccaacaaggaaacaacaggaacacggcccaagcacgaagccccccagccgaggagaac

SEQ ID NO: 11769 - RNA, 59 nt, Homo sapiens
aaaagacaggcccaccgaagccgaccacgacccgcgggagaacaacgaccgaacaccca

SEQ ID NO: 11770 - RNA, 71 nt, Homo sapiens
gacaggcgaccccccacaggggaaagcgcgagcgagcacccggagcagcagagcacccaacaggggacagg

SEQ ID NO: 11771 - RNA, 73 nt, Homo sapiens
agcaaagaaacacaccacccaggcaaacgaccaaagacaagaagagcaaggacccagggagagaggaacccaa

SEQ ID NO: 11772 - RNA, 71 nt, Homo sapiens
aagagacagaggcagacgagagaggagacccaagcggaggaaacacacggaagcaagaaagggaaagcccg

SEQ ID NO: 11773 - RNA, 92 nt, Homo sapiens
caggacgacgggggagccggaccgcccccagccgacaggccgcgagggaaggagcacaaaggcacccacagccaccagccggagagaaagag

SEQ ID NO: 11774 - RNA, 80 nt, Homo sapiens
gccgacgaggaacggcggagcagggagcccaaagaccccggagacaggaacaagggcagcgagcgcagggacgcgaggaa

SEQ ID NO: 11775 - RNA, 73 nt, Homo sapiens
cgagagagggaagcgcccggccgcgaaacagaccccgaaaagcccggaaggacaagccagcccaaacgaacaa

SEQ ID NO: 11776 - RNA, 73 nt, Homo sapiens
ggaaaacgcggaaaaccgacacaacagagaggaagaagacacggaccgacggacgggaaacccagcgaaacgg

SEQ ID NO: 11777 - RNA, 79 nt, Homo sapiens
caccggcggaacccagcaagcgccacgcagagccccgccaggaagacacgccggggaacgaagcagaagacggaggggg

SEQ ID NO: 11778 - RNA, 78 nt, Homo sapiens
ccgccaggagaggccccaggaaaccccaccaccggaacaggccaagccaaggccgcccgagaggacagccggaccaga

SEQ ID NO: 11779 - RNA, 78 nt, Homo sapiens
gcacaccgggcagggccgagaggacgccagcggcgcgcaggaaccaccagacacaggaacgaaagcaacgagcacaaa

SEQ ID NO: 11780 - RNA, 73 nt, Homo sapiens
acagaagacgccgaggagggaaaaaaaccagagaaccccaaagacaaaagagcgaaaacaggcaagacggagc

SEQ ID NO: 11781 - RNA, 54 nt, Homo sapiens
aagcccggacagacggaacccaggacagaagcagcacagcagccacccgcccag

SEQ ID NO: 11782 - RNA, 67 nt, Homo sapiens
aaacaccacccaaacacccccagcccaaaaagcaggaccgggcgcaggggagaaacagccggaccga

SEQ ID NO: 11783 - RNA, 78 nt, Homo sapiens
gcgagccgcccccaggccgcgccgagcccgccgcgcgggcccgcccgacgcggaaggcccacagacaagccgcccccc

SEQ ID NO: 11784 - RNA, 102 nt, Homo sapiens
gcaggaggagacgccagagcggcggggcaggaggacgcgacggagcagcagcgaaaagaagcgcccgccggggacgcagcgccccggccccgccgcagccgc

SEQ ID NO: 11785 - RNA, 80 nt, Homo sapiens
acgccaccgcagagccggccaagaagacgccccacggccccggaacagcaggcgcgcacgcgggagaagcccacaccagc

SEQ ID NO: 11786 - RNA, 74 nt, Homo sapiens
ggccgagaaggcagaggcggaacaagcagaaagcacgaacaacgagaacaagacacgagcaaaccccaccgagg

SEQ ID NO: 11787 - RNA, 59 nt, Homo sapiens
caaaggcaccaggccaccacagaaacaaaagcaacaaagagggccaagcaacaacaggc

SEQ ID NO: 11788 - RNA, 68 nt, Homo sapiens
gggacaagcagaagcagagaggaaggaaaacccacccagagcccagaacacagcaggcaccgcaagaa

SEQ ID NO: 11789 - RNA, 70 nt, Homo sapiens
gggagccaaggaaacaggagcgaagcccagcgggccggacggggcggggggaacggagagaagaagagcc

SEQ ID NO: 11790 - RNA, 88 nt, Homo sapiens
caccgcacgggaggggaagaacccccgccaaggacaccggggccggaccaggaacgcaccaagaagaagcgccggggggaccggaccg

SEQ ID NO: 11791 - RNA, 75 nt, Homo sapiens
ccgcagccgcggccacccggcccgcggggagaagggcgacgggagggggaggcagggacggaaggacgccgcggg

SEQ ID NO: 11792 - RNA, 83 nt, Homo sapiens
agacacaccgaaaaggcgggcagccaaggcaggcgagaagaccaccgggccacaggcgggagaccagggccagcccggccaca

SEQ ID NO: 11793 - RNA, 73 nt, Homo sapiens
caaagagcgagaggaacaggcaaaaagcagagcggggccagaaaaaaaagccgaccagagagagaagaggacg

SEQ ID NO: 11794 - RNA, 86 nt, Homo sapiens
cgcagccagggcaacgccaagcccgaacagagccacacgaccccgcggccaaggacagagcgggagccaccagcgccaaagggaag

SEQ ID NO: 11795 - RNA, 77 nt, Homo sapiens
gcgggccggcccgcgcacccggccaccacgggaaccagccccaaaggagggaccgacgaacgaaaaagagaagacac

SEQ ID NO: 11796 - RNA, 67 nt, Homo sapiens
cccgggggggggagggggcggcgcccagcggccacacgccccaagcgccacgcccgggcgcccacgc

SEQ ID NO: 11797 - RNA, 76 nt, Homo sapiens
caagccgggggacgaccgggacagcaccggcgcaccagggaccggagggccggaagcgggccgggacaacgggcag

SEQ ID NO: 11798 - RNA, 75 nt, Homo sapiens
agcccggaagaagagggaagggacaaggaaggcacagaaaccgaaagagcaccgaaaacgggaaccccccgaaga

SEQ ID NO: 11799 - RNA, 80 nt, Homo sapiens
ggaaaaccgaagggaaggccagcagcgcgcggagaagaacggggagccagagggaacaggcacgccccacccgccagccg

SEQ ID NO: 11800 - RNA, 64 nt, Homo sapiens
ggcggcggcggcagcggggccgggccggagcgccacaagccgcgaagcagccacggaccccagc

SEQ ID NO: 11801 - RNA, 78 nt, Homo sapiens
acgagacaagaaccagagaaacacagagcaccaaacaggggggaaggaagacaaacagagccaagcagacagaaaccc

SEQ ID NO: 11802 - RNA, 58 nt, Homo sapiens
gcggcaacgcccccgggacagcacgccccggaccccaagggacgaaacgggaaaagcc

SEQ ID NO: 11803 - RNA, 77 nt, Homo sapiens
caggaccgcgacggcagcagagcagggaaaaagaaaagggcgaagacccgaagcagcgcaggaacagaagagaagac

SEQ ID NO: 11804 - RNA, 87 nt, Homo sapiens
acaacgacaggaacccaagaagaggcgccagaggagccgcccgcccagaacggcggaccggagagaaccggcccaagagaaacccag

SEQ ID NO: 11805 - RNA, 76 nt, Homo sapiens
agcggcggagagccgggagaaacacaaagagggaaagacaaggagccgggccgagaaaccgaaccagagaccagag

SEQ ID NO: 11806 - RNA, 73 nt, Homo sapiens
cgggaccagcgagcgacagagaccggcaaaaaccaacaacaagaggaaacgaagggagagaaaaccaagacag

SEQ ID NO: 11807 - RNA, 107 nt, Homo sapiens
gcgagccaagaggagcgcggaagcaaaaggcagacgaacagagccggaagcaacacgcagagaccagagagcggccagccggagaaagaggaggggacaagcgcggg

SEQ ID NO: 11808 - RNA, 84 nt, Homo sapiens
cagggacgcccagaaggaacgcagcaacagcgccggccaccggaggacaagcgagacgcggcgcaggcacgggacgaggcgcag

SEQ ID NO: 11809 - RNA, 69 nt, Homo sapiens
gaccaaaaccgagaaaggaaagggagcaaacacaaaagaaaaggacgggacacggagaggcgcgggagg

SEQ ID NO: 11810 - RNA, 81 nt, Homo sapiens
gcgagagcaagagggcaccagcagcgacggagccacccgcgaaaacggccagggccgccggcaaacccagcaggaagccac

SEQ ID NO: 11811 - RNA, 60 nt, Homo sapiens
gagaacagggcagaacgaggggaggaaagcagcaagaccaaggacgcacgaggcaaaggg

SEQ ID NO: 11812 - RNA, 58 nt, Homo sapiens
cgaggaggaaaggaggacgaggccccaaagcggaacccggcccgcccagaggagccac

SEQ ID NO: 11813 - RNA, 70 nt, Homo sapiens
cgggacgccccaccggccaggcgagcgaacccacacagcggaaggaccagaggcgacacggcaagggaac

SEQ ID NO: 11814 - RNA, 34 nt, Homo sapiens
aaagcccacacagaaggcaacagagcaggagaag

SEQ ID NO: 11815 - RNA, 76 nt, Homo sapiens
accgagagagcaaagcaacgaaaccaggcaccagcccgccgcagcaagagagagcaaggagcaggcgcagagcaga

SEQ ID NO: 11816 - RNA, 57 nt, Homo sapiens
aacaaacacagggaggaaggcgggagccccgcagcacagcccggcccgggccccccc

SEQ ID NO: 11817 - RNA, 72 nt, Homo sapiens
cggagagcccaagcggccagcacaaagcgagaaggagggagaagggcgcgagaaccaagagagcaaaaagag

SEQ ID NO: 11818 - RNA, 79 nt, Homo sapiens
gcaagagggggcacaacaggagcgagaagaagaaaagaagagagcgaggagcggcaggagcaagccaagaaagaaccga

SEQ ID NO: 11819 - RNA, 70 nt, Homo sapiens
gcaaagaagagcccgaacaaacaaacacccagaaacaagagacaggaagggaaggggcggagacgggcgg

SEQ ID NO: 11820 - RNA, 76 nt, Homo sapiens
aagagcgccccacgagagaacggcacacgcgagcgggcaacccgcccagaagaggcaccaggcccaccaaagaggg

SEQ ID NO: 11821 - RNA, 77 nt, Homo sapiens
agaacgagcacagccgaacaggaggccaaacaggagaaagcaacacacgaagggccagggcacacggcacggacagg

SEQ ID NO: 11822 - RNA, 68 nt, Homo sapiens
ggcagcacaagaaaacgaaaaaccaaacacgaaaccaccaaacagagagaacaaccaagcagaggaac

SEQ ID NO: 11823 - RNA, 78 nt, Homo sapiens
ccaccggccgcggcacggcccggggccgggagcgcccgaggaacacgccgcagagaaggagggggcagagcacggcag

SEQ ID NO: 11824 - RNA, 80 nt, Homo sapiens
caggaaccggacaccagaaccacaacggaaacagcaacagacaaagaacacggccaaagccccagaggacaagccagaag

SEQ ID NO: 11825 - RNA, 67 nt, Homo sapiens
gaaccacacacccagacaaaggaaggagagccccgaaaaagacaacagaccaaagcaagcccaagac

SEQ ID NO: 11826 - RNA, 94 nt, Homo sapiens
aacacccccgcggcaagaagacgcccacgaagccggaaaaagccaagccagaccgaaaggcccgagccaaaagacccagagaaaggagcacgaa

SEQ ID NO: 11827 - RNA, 69 nt, Homo sapiens
cgcgcggagaaagagaccaccgaggacagacccgagaaaccggacagcagaggaaacgagggacaacac

SEQ ID NO: 11828 - RNA, 57 nt, Homo sapiens
ccgccaggcagcaaaaacaagcaggacccaaagacaggaccacgcaccagcagagaa

SEQ ID NO: 11829 - RNA, 40 nt, Homo sapiens
acaccggaccagccaacaggaaccggagaggacacagcag

SEQ ID NO: 11830 - RNA, 89 nt, Homo sapiens
aaaccaacagaagggcaaccagccgcgagggagcccaagaagccaggggagaacaccaagcggcagcggcccgggcacgagggcagagg

SEQ ID NO: 11831 - RNA, 81 nt, Homo sapiens
caaggagcgaggaccagagagcaacggaaacgacgcccagaaaaaggaggaccggacagcgcacgcaggagaggccacccg

SEQ ID NO: 11832 - RNA, 67 nt, Homo sapiens
agaaggaccaagaaccaggggacccagaccaaacggccaaacggaccagacacaccagcaaacaaac

SEQ ID NO: 11833 - RNA, 41 nt, Homo sapiens
agcgcagaaagggagaagccggcagcggggcaggagaaccg

SEQ ID NO: 11834 - RNA, 74 nt, Homo sapiens
ccagccggcacgccaccgacaagcaagccgaagagaaagggcagcccaaggaccaagggagaagagacccagga

SEQ ID NO: 11835 - RNA, 72 nt, Homo sapiens
gaagccaggggcagaaggacgaagagccgaggagcgggcaccaggagggacacgagaggggaaagccgaaag

SEQ ID NO: 11836 - RNA, 42 nt, Homo sapiens
gacagcaacacgaccaccaagcaacagcgaagaagaggcagc

SEQ ID NO: 11837 - RNA, 55 nt, Homo sapiens
ggaaaggaacaacgggcaagaaagacaaagagagaagcggggaagaaagcaaaag

SEQ ID NO: 11838 - RNA, 83 nt, Homo sapiens
aggacacaagaagacggacagcggggacgaggcggacgacgaccggccaacaagagacgaggacgcgcacaggaaaggacgcg

SEQ ID NO: 11839 - RNA, 100 nt, Homo sapiens
cgccacaaccgccagacaaccggagccacgccccacgaccgccaggcccaggcggcggcgcagcagacgggcaccgcggccagcacccaaagggaaccac

SEQ ID NO: 11840 - RNA, 65 nt, Homo sapiens
ggaggcggaggcagaggggaggcgcgaaagcgccggcacggccgcacaggcaccacagcacgaca

SEQ ID NO: 11841 - RNA, 68 nt, Homo sapiens
gggggcagaggccggaccccagcacacagaagccgagacgacaaaaaccggcccagacggaaggaaca

SEQ ID NO: 11842 - RNA, 72 nt, Homo sapiens
ggagcaccgccccggcagaagcggcagcaaagcgggaccagcagagcaaaagaacgccacgcagccacacgg

SEQ ID NO: 11843 - RNA, 80 nt, Homo sapiens
cgaaaaggaaccgaagaaaccaagagagcagaaggcgaggcgggggaagcaccaaggccaggagacggcggaaggagcgc

SEQ ID NO: 11844 - RNA, 71 nt, Homo sapiens
aagccgggaaagggacaagaagggcaaagccgaagacccaaccgcccagggacaacaacccaagaaaggaa

SEQ ID NO: 11845 - RNA, 45 nt, Homo sapiens
ggacagagggggacagcgaaacgaaggagccacaagaccaagcgc

SEQ ID NO: 11846 - RNA, 62 nt, Homo sapiens
acggccccgccagcaaggcggcgcgcccaggaggaccccaacaacaggagagagcaagcgag

SEQ ID NO: 11847 - RNA, 74 nt, Homo sapiens
acccagggagagcagggcagggaaaagcgccgggcggaccagcagcgggaaggaagaaagaggaaagcgggcag

SEQ ID NO: 11848 - RNA, 71 nt, Homo sapiens
agacgcagggcgcccccgagggaaacccccggaaacagggccgaacaacagaacaccagacaacccggcgc

SEQ ID NO: 11849 - RNA, 84 nt, Homo sapiens
caaaagaaaaaagggacccacccagcgccaaacaaaggcagaccacgcaaaaagaaaccagcccacaaagaagagacacagggg

SEQ ID NO: 11850 - RNA, 74 nt, Homo sapiens
cagccacggacgccacagagggaagaccccaaggaggaggaagccaagaacgggagcgaagccacgcagcggca

SEQ ID NO: 11851 - RNA, 87 nt, Homo sapiens
cccagaggaagccgagccacaggagaggcccaggccgaccggcgcgcggaggcagggaccgcggcggagaagggcagccgcgcaaac

SEQ ID NO: 11852 - RNA, 75 nt, Homo sapiens
gggcacggacggggaacaagagacccggcaacccgccgcacaacaagcgcggaccgggaagaccacaagaggggc

SEQ ID NO: 11853 - RNA, 79 nt, Homo sapiens
ggaacaccccgcgccgccaacccgcccccagcgacagccggaaagagagccacccgccaggccacgccacgccggcacg

SEQ ID NO: 11854 - RNA, 59 nt, Homo sapiens
ccgagccagggcagcaaaagacaaacgaagcacaaaccagggccccggcgaggcagaaa

SEQ ID NO: 11855 - RNA, 75 nt, Homo sapiens
agacaaccgcagccacgcaggaaaaccaacacacagcaaggagagagaaggagagaagaggcagaggaggacgag

SEQ ID NO: 11856 - RNA, 61 nt, Homo sapiens
ccagggccgccagaagccagccacagaaagaagacacccgccacacaggacagagaagcca

SEQ ID NO: 11857 - RNA, 86 nt, Homo sapiens
ggcacgcacagcggcagggagcagcgggaggaccccagccgcggaggggagcagcccgaagcggaggacccggcccagccgggcag

SEQ ID NO: 11858 - RNA, 105 nt, Homo sapiens
gcccccgggggacccgcggccccaccggcagcggggcacacaagagaccgggagacgggagcaagagcagagacacaggccggggcgacaaagagcggcagggcc

SEQ ID NO: 11859 - RNA, 68 nt, Homo sapiens
cccgaccgcaaaaccacgggcgaggcgccgcggcacgcgaggccccgccagcacccgaaagagcgaaa

SEQ ID NO: 11860 - RNA, 84 nt, Homo sapiens
gacaggcccgaggcaggcccgacccgccccccggcgccgccgggccgacggagaccagcaggggacccccaccaaccaggaaaa

SEQ ID NO: 11861 - RNA, 73 nt, Homo sapiens
agcggggcggaaacaggaacagcccaaggaacgagaacacacaagaaaaacccggggaaggcaagacggggac

SEQ ID NO: 11862 - RNA, 35 nt, Homo sapiens
cccagaagagccgaagcgacaagcccagagaacag

SEQ ID NO: 11863 - RNA, 78 nt, Homo sapiens
cacgcagacggaaacaaggcaacagaaagagcaacagcagggcaacagcaaacccgaaacagcgcgaaggcaggaaaa

SEQ ID NO: 11864 - RNA, 108 nt, Homo sapiens
cgcgcggcgcccacccgcaccgcgccacccgccggcccgcgggcaccccaaaggacccaaagacaggaccacgcaccagcagagaaggaaagcaaaccgaagcaggcg

SEQ ID NO: 11865 - RNA, 75 nt, Homo sapiens
gaaccgccgcccgccacgagcgccccccgagcggggggacgcgccaggcacagcagcaggccccaagaaccagca

SEQ ID NO: 11866 - RNA, 74 nt, Homo sapiens
accacgggacgcagccaaagacgcgcccagaggggagcagaacccaacaacacagccagcaagcgcccggagga

SEQ ID NO: 11867 - RNA, 68 nt, Homo sapiens
gcgggcaagacacacggacggggcgggaaaccaacccgcaaggcagaaccagcaagggaagggcgaaa

SEQ ID NO: 11868 - RNA, 81 nt, Homo sapiens
aggccggcaacccacacaagcgaaggcgcgcaccggaagcaccagcgaggaaggagagccggagaggaggaaggagaagcc

SEQ ID NO: 11869 - RNA, 54 nt, Homo sapiens
cccacccaaggagaggccaagggcgaagagcgggggcaccaagacaggacgaag

SEQ ID NO: 11870 - RNA, 69 nt, Homo sapiens
ggggaaacccggaccgaaagcaccgcagacaccgggaagagggccggagccgcaccaggccacggcgcg

SEQ ID NO: 11871 - RNA, 71 nt, Homo sapiens
gacaccaacagcgaagaccaggcgggaaaaaggagcaaacagcaagagggaaacagaaaaaggacaaggag

SEQ ID NO: 11872 - RNA, 74 nt, Homo sapiens
agcgagaccggagcgccagggccacggcccaccacccgggcacggagcgagcagaggaggaggaaacccggaac

SEQ ID NO: 11873 - RNA, 58 nt, Homo sapiens
acgggggaaagaaacccacgcccaccaaggccaccagacacccaccggagggcccagg

SEQ ID NO: 11874 - RNA, 81 nt, Homo sapiens
acacagcacaccggagagacgagggccgggggagcacccagaacagcagcaaggcaagaaaggcaagggaaaaaggggggc

SEQ ID NO: 11875 - RNA, 63 nt, Homo sapiens
gcacggacagggcgaaagccgaccacccggcgaaggacccaaggccagccagccccaggcacc

SEQ ID NO: 11876 - RNA, 77 nt, Homo sapiens
agccggcaagggcgcgccaccgcaaaggcccgcgcaccgccagggaagaaacggacagagagagcaaaacgacgaag

SEQ ID NO: 11877 - RNA, 83 nt, Homo sapiens
ccaggcagacgggaagaacccagaaagaaaggagcgccccaaaaggaaacagcagaagaaaccagacaagagcggagaaaaaa

SEQ ID NO: 11878 - RNA, 77 nt, Homo sapiens
aggcgacaaggccaagaccgccagcaaaggaagacgagggcggagaacggaaaagcaccaggaagcagagaggaccg

SEQ ID NO: 11879 - RNA, 83 nt, Homo sapiens
cgcgcgccggcgacacggggcagggccacaacacaaccagcggaaggcagacaagcagcgcaaggagacaagcgacagagaag

SEQ ID NO: 11880 - RNA, 71 nt, Homo sapiens
gacagcgaccagagggaagcaacacaaggccgaagaacgaggcacgaagagaaggcagagcacggaaacag

SEQ ID NO: 11881 - RNA, 72 nt, Homo sapiens
ccaaacgcggcaacgcccccgggacagcacgccccggaccccaagccaaagagcacagggacagaaaaacag

SEQ ID NO: 11882 - RNA, 87 nt, Homo sapiens
gacgccggggagcgagccgccgccaagagccggccacagaggccggaaaagccccaaacgcgccaacgacaccacgacagcgaggca

SEQ ID NO: 11883 - RNA, 87 nt, Homo sapiens
gacgcgcgggaggcccgggagcggcagggaaccgaccccagaacccggacgggcggcgggaccaaaagccagccccacggaggaacc

SEQ ID NO: 11884 - RNA, 73 nt, Homo sapiens
gaacgaaacggaggacccaacccccccaagccaccgcagaaggggacaaagggacaggaaaggacaaccccac

SEQ ID NO: 11885 - RNA, 74 nt, Homo sapiens
ggagcgaagaacaaacacccgagcgcgaggccagaaaccgcagggagaggcccaccagaagaagccaaaaagaa

SEQ ID NO: 11886 - RNA, 52 nt, Homo sapiens
cgcccccgcccgcgcgcccagggagagaaccagccagagaacaagaaacaaa

SEQ ID NO: 11887 - RNA, 57 nt, Homo sapiens
agacaggaggcaaaggccccccgaaaaacggagagaccaggccccgggcgcgggagc

SEQ ID NO: 11888 - RNA, 57 nt, Homo sapiens
cacaaagcaaagacagagaaagaagggaagagggaaaggaacaggaagcagaagcaa

SEQ ID NO: 11889 - RNA, 69 nt, Homo sapiens
ggccagcccccccaaaaaggaaagacaccggcggaacccgaagcggcagcccgagaccagggccgcagc

SEQ ID NO: 11890 - RNA, 69 nt, Homo sapiens
cacagcgggaccggccgccccacaccgagcacccgcagaacaggagagggcccgccgaaacccacaaag

SEQ ID NO: 11891 - RNA, 84 nt, Homo sapiens
aaggaaaagacccggaaagaagggacacagacggagcaaacccccagaacaagaagaaggcgacagagcacagccaagcgcaaa

SEQ ID NO: 11892 - RNA, 80 nt, Homo sapiens
ggaggccgaggggaccagccgggaggcgcccacccccaccaccgaccgcgcacaaaggcagaggaaggcggaaggagccg

SEQ ID NO: 11893 - RNA, 76 nt, Homo sapiens
acgagagaagcgagaggagaagacacgaggccagagaggaaggaccagccaaggcaaacagcagaagggggagcca

SEQ ID NO: 11894 - RNA, 55 nt, Homo sapiens
cacaggggcgaagccaaggcaagcaagagccggagcggaagaggcgccgcgacgg

SEQ ID NO: 11895 - RNA, 65 nt, Homo sapiens
aagggcggcggaccgggagacaccccgcacacacacccaaggggacccaagggagagagggaacg

SEQ ID NO: 11896 - RNA, 81 nt, Homo sapiens
ccagacaagcaggcaaacgaaggaaaggccgaaaaagcggaggggaaaggcagaacaccgcaagaaaaaccagcaccgcgc

SEQ ID NO: 11897 - RNA, 73 nt, Homo sapiens
aaaacgagaaagaaagcaggagaccaagaaggaaaaaggcaacccagaaggacagaaaacgggccccagacac

SEQ ID NO: 11898 - RNA, 74 nt, Homo sapiens
ccgagcagccagagcggaccggggcagaccaaacggcaagggggagggaagcgcgccagcgccacggaggccag

SEQ ID NO: 11899 - RNA, 74 nt, Homo sapiens
aagaacgaacccaaaaggagccaggagaaaaaggacaggagagcgaccaaacccccacaacaaggacaaaggga

SEQ ID NO: 11900 - RNA, 81 nt, Homo sapiens
acgcccgcggacgacccgagagcaaacgaggccccgagagcccaccagcacaggaaaaacccacagcagaaccggagcagc

SEQ ID NO: 11901 - RNA, 87 nt, Homo sapiens
cagccccacagaccagcccagcacaggccccggcaacccacggccacacacaggccacagcccagccacagaacccagacagacgca

SEQ ID NO: 11902 - RNA, 65 nt, Homo sapiens
aaagccgaccgggccaaggagacaggcccggcccagggaagcagcccgagaaaagcacccaccac

SEQ ID NO: 11903 - RNA, 58 nt, Homo sapiens
ggccgccaccaacagagaagacagagcaccaacgaggagaaccagaggacaaaaagcc

SEQ ID NO: 11904 - RNA, 74 nt, Homo sapiens
caaggcacccaaaggcacccaaggggaccccacaccacaaaccgaggaaagaagggacagcagaaaacgcagag

SEQ ID NO: 11905 - RNA, 73 nt, Homo sapiens
gccaccgcagacaagcagaaacgaacggagaggcagacagcaaaggaggaagcagagccgaggaagacgagca

SEQ ID NO: 11906 - RNA, 101 nt, Homo sapiens
ggagaaaccaccggcggaccgcacaagcagcacccgacagcacaaaggcaagaaagaaaaagccccagccgcccgcccgcaacaggacaaaaaacaaccac

SEQ ID NO: 11907 - RNA, 75 nt, Homo sapiens
caccagacgccaccacgggcacccgcgccgggcaccgaggaccagccaagacagggccgggagacgcaaaaagag

SEQ ID NO: 11908 - RNA, 69 nt, Homo sapiens
agggcgcagcggggacgcggacgcacgggcggagacagaaaacccgaccaacgccccagcagcccaaga

SEQ ID NO: 11909 - RNA, 76 nt, Homo sapiens
gagcagcaggagcaccggcccaagaaacagggggacagccaaagagacggccggcagcgcacggcaccggacaaag

SEQ ID NO: 11910 - RNA, 87 nt, Homo sapiens
gaaaggaggaggaaccggagaccccgaaaacggaagcgcagggagaaggaagaggggaaaagaaacggcgaggaaagagaggagccc

SEQ ID NO: 11911 - RNA, 58 nt, Homo sapiens
ccaaacccaagggggagagggagaaggaaaaggaaaccagacgacaaaagaggaaaaa

SEQ ID NO: 11912 - RNA, 70 nt, Homo sapiens
acacccagcgacccggcaacgggagaggagcccggcacaacgacagagcccccagaccgaccagagagcg

SEQ ID NO: 11913 - RNA, 74 nt, Homo sapiens
agaaggaagaagcgagcgggaagggaagacccaggccacacaagaagggagcccggacaggaccaacggagagc

SEQ ID NO: 11914 - RNA, 74 nt, Homo sapiens
ggaccgcgggacaagaaaacagcggcgacaccgaaagaaccgagggaaggagagcccacaaggacaggacggcc

SEQ ID NO: 11915 - RNA, 76 nt, Homo sapiens
gccccggcaacccaggggcggccacgaccaccaggcgccagaccccgagagaaacggcgagaaaaccaaacaggag

SEQ ID NO: 11916 - RNA, 63 nt, Homo sapiens
agagacacggcggcagccccagggggcagacccaaaggaaacgcacgaaagaaacaggagagc

SEQ ID NO: 11917 - RNA, 72 nt, Homo sapiens
ggcccgggcacgcagcccacgcccagagcaacacagaagcggagcccaggcaccccccagcgccacggaccg

SEQ ID NO: 11918 - RNA, 63 nt, Homo sapiens
cagcggggcacacaagagcggagaagcggaggagaccaaggaggccaccaccacagaaggagc

SEQ ID NO: 11919 - RNA, 81 nt, Homo sapiens
gcgcaaggggggaggagaggagccgcgcacgagcgccaaccccgaaaggcccagcgcggcgcaggagaaccgagagacccg

SEQ ID NO: 11920 - RNA, 88 nt, Homo sapiens
cgaacccaggagcccgcacggagcgagaacccgagcagcgccagagcaacacaccgcgccccagcacgcaggccgggccccagcggcg

SEQ ID NO: 11921 - RNA, 71 nt, Homo sapiens
aaccagacaggcccccccccgaagcagagagccacgcaaacgaaaggcccgagccaaaagacccagagaaa

SEQ ID NO: 11922 - RNA, 36 nt, Homo sapiens
accccaacaacgccagccggcacaccaaagggaacc

SEQ ID NO: 11923 - RNA, 85 nt, Homo sapiens
aaagaaaaagagcgcaacgaacgcaaacacagggagaaggaaacaccgcgcaccagacaccaaaaagaaaaagaaacaccaaccc

SEQ ID NO: 11924 - RNA, 81 nt, Homo sapiens
ggcagcgggccagacccaggaccgcgacacgccagagccccacccccacacagggaggagagagccaccaggagcagggac

SEQ ID NO: 11925 - RNA, 78 nt, Homo sapiens
caaacgaggggagaaagaaggggaaggacgcgcggcaaacgaaaccggcagcagccggaggggaaggggaaaacacga

SEQ ID NO: 11926 - RNA, 77 nt, Homo sapiens
caacagccccgcccgacacagggaacagcaggccccggggcgcgcacaggggagccagaaaaacacagcgggaccgg

SEQ ID NO: 11927 - RNA, 82 nt, Homo sapiens
aaagcagcacagcaggcagccccaggggaggggcagcaggcccaaaccccaacagggagggggaaagaacgggaggaacaag

SEQ ID NO: 11928 - RNA, 80 nt, Homo sapiens
acccgggacaaggcagacgggagcgcaaggcgccccaaggccagacaaaacggacagcacgggccgagcggaccgagaga

SEQ ID NO: 11929 - RNA, 72 nt, Homo sapiens
cgacgggcggccggcgcgaggcgaggagcacccgaagaagacaagacaggggaaagacagcccagcagaagc

SEQ ID NO: 11930 - RNA, 64 nt, Homo sapiens
gcggcccaaggacacacaggacaaacacacagaaagcgaacggcggccaacgcccaacccaagc

SEQ ID NO: 11931 - RNA, 78 nt, Homo sapiens
accgcggcgcccagccccaggaaggacccaggacacccggaagccggaaagggccagaacgaagcacaacaggcagcg

SEQ ID NO: 11932 - RNA, 87 nt, Homo sapiens
gagacccccagcagcagggcaaccccgggggcagcagcaacgccggacgcccacgcaagcagacccgaggaggagaaaaggggcgga

SEQ ID NO: 11933 - RNA, 62 nt, Homo sapiens
gccgcggcaaaccaacaccacagcagcaaggagcagccacgcagccgacaagcccaagaaag

SEQ ID NO: 11934 - RNA, 76 nt, Homo sapiens
cgagccccggcacgccggcgcgagcacagaggcgaacgggagccaaagggccccggggggacccaccgacacccca

SEQ ID NO: 11935 - RNA, 69 nt, Homo sapiens
aaccaaagaagagacggccagcaggagggaaagagcgaaggccaaacgaagagcgcaaaaaccagacac

SEQ ID NO: 11936 - RNA, 52 nt, Homo sapiens
aaaagaccggaagggcccagacagcagacgccagggaccgccgaacccaggc

SEQ ID NO: 11937 - RNA, 79 nt, Homo sapiens
agcaccccgcgggagacaccgcggcggagcccacccagaccggggcggggaagacgcgaccggggaccgggaaggacgc

SEQ ID NO: 11938 - RNA, 68 nt, Homo sapiens
cacagcaccccgggcggcggaggcgggcgccacggaaaggagggcggccagaacacgcacaccacaag

SEQ ID NO: 11939 - RNA, 69 nt, Homo sapiens
cgccaacccgccgcgcaccgacccgacgcgccggcccacgcgcggccaagggcgaaaccaagaggaggg

SEQ ID NO: 11940 - RNA, 77 nt, Homo sapiens
gaagcgagggcgaagcacgacacagaaggggaggggagggaaaggcccaggaaaaagaaggaaagaggcagaaggcc

SEQ ID NO: 11941 - RNA, 85 nt, Homo sapiens
cggacgcgggaggacggcacaccgcggcgcccacagggcgagaacaagagaaacaaggaaggaaggaggcggagccaagacgggg

SEQ ID NO: 11942 - RNA, 67 nt, Homo sapiens
gacacacccggcgcgcaacgacagaaggcacaggcaaagcacagcgcccaagcaacccagagcagga

SEQ ID NO: 11943 - RNA, 79 nt, Homo sapiens
acacaaagaaccaaccagccacagaacaaggaggggaaggggaagacggcagcgggccggaggcccaaaagaaacaaga

SEQ ID NO: 11944 - RNA, 79 nt, Homo sapiens
cccgcccagcccccgagggcgggacacagaaaagaaagggggcccgagcagcaagaagaacagccccaagacgcaggag

SEQ ID NO: 11945 - RNA, 58 nt, Homo sapiens
accgaacagaaaccccccccccagccaccaagagaagggcacacgaaaagcagcagcc

SEQ ID NO: 11946 - RNA, 87 nt, Homo sapiens
ggcccaggccgcggaacgggagccgggccggacgggcgggcgcggacccgcgcccgggggcgacagggcacaggcacgagcacaccc

SEQ ID NO: 11947 - RNA, 69 nt, Homo sapiens
acaggaggcgcggaggacgccccaccgccgacgcccccagccaccaggaccaaaccacccaggacacgg

SEQ ID NO: 11948 - RNA, 70 nt, Homo sapiens
cgcgcggaccagggggcggcgccaggacaggacagggagcagaaggccccagaaacagcagggagaagag

SEQ ID NO: 11949 - RNA, 70 nt, Homo sapiens
ccgaacgagcggaggccaacaaaaaaggaagcacgcgcgcggacaagaccagaaagaaaagaaccaagga

SEQ ID NO: 11950 - RNA, 70 nt, Homo sapiens
cccggccagcgacgcaccgagaaaggaaggaaaaccgacgagacccagggcaccgccgggaaaaaagagg

SEQ ID NO: 11951 - RNA, 67 nt, Homo sapiens
ggaccacacagccagaacagcggacgccacacccaagagaagcccggagaaggggcgccacgcaccc

SEQ ID NO: 11952 - RNA, 119 nt, Homo sapiens
ggacccagggcagacggagcaaagcccccacgcccagccaggagcaccgccgaggacccagcacaccgaggacaccagaaacagaacggaggccggaagcgaccgaaacaccaaacacg

SEQ ID NO: 11953 - RNA, 60 nt, Homo sapiens
gggaaaggcacgaggggggaagggagccaagacacacaagcaggaaaaccgccgccgggg

SEQ ID NO: 11954 - RNA, 31 nt, Homo sapiens
cacagcgccagccaggaaccaaaggggagaa

SEQ ID NO: 11955 - RNA, 57 nt, Homo sapiens
aaaccgggacaaagggggccagacagcacgccagcagggggcagaagccaaggcaca

SEQ ID NO: 11956 - RNA, 70 nt, Homo sapiens
aaaaagcaaaaccgaacacgaccagcccaggcacccaaagccaaaaccaaccaacaacaacgaccggccc

SEQ ID NO: 11957 - RNA, 64 nt, Homo sapiens
acacacccgcagacaagaacggagagcggaccggacagcacccaaccccaacagagacacggaa

SEQ ID NO: 11958 - RNA, 60 nt, Homo sapiens
cgccagaggagagcaccggccacggaaaagcaaagacacgaagggacccgaggccacacc

SEQ ID NO: 11959 - RNA, 61 nt, Homo sapiens
ggagcccgaggagaaggggcacggaggaaccagggaagaaagggacaacaacacagcagag

SEQ ID NO: 11960 - RNA, 78 nt, Homo sapiens
agaccccgcccgcgggagcgggcaggggcagcacccaagaaaaagccaagaaacaacacaaaacggcaagacaacagg

SEQ ID NO: 11961 - RNA, 79 nt, Homo sapiens
gccggggccgccgaccaacacccgaggcggacgcagagacagagcacagcaaggaggaaacagcaagggaacaacaaca

SEQ ID NO: 11962 - RNA, 72 nt, Homo sapiens
gaaggagaacagagacggaccagggaaagaacaacacggaggaaaccaccgagcccgagcagccaaaagaaa

SEQ ID NO: 11963 - RNA, 73 nt, Homo sapiens
aaaacccggacgagagcgggacagcaagggaggcagcagacgggaagaagagagaaaacaaaagcgagacagg

SEQ ID NO: 11964 - RNA, 64 nt, Homo sapiens
accggcagacccagcaaaagcgccacaggcagacagcaacaagcagaaggcccaacaggaaggc

SEQ ID NO: 11965 - RNA, 83 nt, Homo sapiens
accggagagccgcaggacggcgcggcagagccccgacgccacagaacgcaaccggccaggaccagccggcggccgcaggggac

SEQ ID NO: 11966 - RNA, 71 nt, Homo sapiens
aagccccaggagccacaaacgccagaggccccaagacgagacgaaaagggagcggggcgcggggggagggg

SEQ ID NO: 11967 - RNA, 62 nt, Homo sapiens
agcagccaccaggagcccgagagagaagggcgcccaccacggccgaggcccgccacggcacc

SEQ ID NO: 11968 - RNA, 81 nt, Homo sapiens
gcgaaaccccccgggacagcgaggagagggacaagaaccaaggggacagcaagaacaaagaggccacgccaccggaacaca

SEQ ID NO: 11969 - RNA, 77 nt, Homo sapiens
gacggcggacccggggagcggccggaaggaagggagccacaggaaccacacccaggcacgcagcaggcccgcaaccc

SEQ ID NO: 11970 - RNA, 77 nt, Homo sapiens
acgcccacgagcaaccaagaaagaaaagggggcaccacgaagaggaaagagaaggacgcaaagaagaggcgccacac

SEQ ID NO: 11971 - RNA, 67 nt, Homo sapiens
cggagcggacggaaaggagcaggccacagaacaggacacggacgaagacacgcacggcccaaagccc

SEQ ID NO: 11972 - RNA, 82 nt, Homo sapiens
cacagggaggaggagagggcggggggaagacaaggaggaagaggccagacaggacaagcgcccagggccagggaccagagcc

SEQ ID NO: 11973 - RNA, 85 nt, Homo sapiens
ggcgagaggagcgcaaggggagagccgcggggaagggggcagagagaccccaagaagcccggcacggaaaaaggagggaagagaa

SEQ ID NO: 11974 - RNA, 71 nt, Homo sapiens
cgacaaagggacacccacaggcgcacagggaccgacagcaagaaaaggagaaaacaaggccgcgggcacac

SEQ ID NO: 11975 - RNA, 74 nt, Homo sapiens
gaggacgccgagagcgagaaacaaagccacccagccaagaagacaaggcacagggagaagaagagccacagcac

SEQ ID NO: 11976 - RNA, 80 nt, Homo sapiens
aggagacgagaggacgggaccaggcgaagcggccgagcaggcgagcgaacgacggggggccgaggccaggcagcagacga

SEQ ID NO: 11977 - RNA, 41 nt, Homo sapiens
aggcagagcgggagcgcgcagccaggagagcgcaaccaacc

SEQ ID NO: 11978 - RNA, 75 nt, Homo sapiens
cagaaaccggaagcgagggaagacagccgccaccaggcgcccccccagcaaccacccacagacccgagacaggac

SEQ ID NO: 11979 - RNA, 109 nt, Homo sapiens
agcagaaaaagaagagagggagagacgaagcacagaagccgcacgccgggaggagaaacagcccggcagagggaccgccaggaaaagcgggcccaagcccaaggacgag

SEQ ID NO: 11980 - RNA, 64 nt, Homo sapiens
cgccaccagaccgggagccggccccggcccagacgcccggagacaacccggaaacacgaagcaa

SEQ ID NO: 11981 - RNA, 89 nt, Homo sapiens
cacccgagcagccagagcggaccggggcagaccaaacggcaagagagccaacaccaccacgaagggagagcagcggccagacccccggg

SEQ ID NO: 11982 - RNA, 92 nt, Homo sapiens
acgggcgaagggaggggggcagcggagcccaggcggcagcgccagagaccaaaccgccagacacccgaaggaaccgagggggaagggaacag

SEQ ID NO: 11983 - RNA, 70 nt, Homo sapiens
gccaagcaccacaggaaacgagggaaagagcacggaccgcggaagcaagaagcagccaggggcgaagcgc

SEQ ID NO: 11984 - RNA, 53 nt, Homo sapiens
aagaagcccaggaagaagagcaaaacgaagacaagccgagccgcgggccgcgg

SEQ ID NO: 11985 - RNA, 79 nt, Homo sapiens
ggcagaacccagaggcgggaggggccgggaggcagaggggcaggggcgccacaggagccgcagaagcaaaggcaccgcc

SEQ ID NO: 11986 - RNA, 82 nt, Homo sapiens
ccaccacgccagccgcaccagccgcccaagccgcacagccgcggcggcagcagcaggagagggacaagagaaaaaaagggcg

SEQ ID NO: 11987 - RNA, 40 nt, Homo sapiens
gacaccaaaaacgcccgcaggagggaagcggacacacagg

SEQ ID NO: 11988 - RNA, 83 nt, Homo sapiens
gacccggagagcggaccaacgaggaacaggggaagacgggagcgccccaggcgcagcccagcccgaaagcagaacgacgccgg

SEQ ID NO: 11989 - RNA, 65 nt, Homo sapiens
gagcccagcagcgccaagccggacacaggacaacggccaccccgggaagccacgcgccggcgggc

SEQ ID NO: 11990 - RNA, 78 nt, Homo sapiens
cgggccgagagccgcccgggccagcggccgcgcacccccggccggaggcaccagccaacggggcggcacacaaggagc

SEQ ID NO: 11991 - RNA, 70 nt, Homo sapiens
gcccgagcgcgcagcaaagggcaagaagcaagcaaccaggcgccgcaccagaagaggacgcgcaggggag

SEQ ID NO: 11992 - RNA, 73 nt, Homo sapiens
ggggcgggcggcggcaaggagcgagggaacagacacccccgaggggcaccccagaggagcccccaccgacaac

SEQ ID NO: 11993 - RNA, 58 nt, Homo sapiens
ggcgacgcaaggcgacgggcggccaagccgacgccagcgggcgccacccaacaggcgc

SEQ ID NO: 11994 - RNA, 71 nt, Homo sapiens
caggccaccgcagccgacccgggccaggggaccccacaccacaaaccgaggaaagaagggacagcagaaaa

SEQ ID NO: 11995 - RNA, 94 nt, Homo sapiens
cagcgggggaaccggcgcgccggcgcgcggcgcggacaggcccaaacgccaccaggagagaacgccgcgccgcgcgacaacggcccggcaggca

SEQ ID NO: 11996 - RNA, 82 nt, Homo sapiens
gcagccccaggcgggcgcggccagcagccagaggagagggcggggacacagcgggcaggaagaagacgccgaggccccccca

SEQ ID NO: 11997 - RNA, 103 nt, Homo sapiens
gaagccgcgggcggcggccgccaccgcagcgggcaacacgcccccccagagcaacccccagccacaacgcgaaccgggcggacgaaggaggcggcaacaggac

SEQ ID NO: 11998 - RNA, 76 nt, Homo sapiens
acaggcccagacgagcggaggaggcacagggcgcggaccgcacgagcgcgcgagcgggcggacaccagaacgagga

SEQ ID NO: 11999 - RNA, 80 nt, Homo sapiens
caggaccaagaaaaagaaagggaaaagccgggaaacgaagaaaggagaacggggaggaaaaagcagcgaaacagacaacc

SEQ ID NO: 12000 - RNA, 66 nt, Homo sapiens
accagagccccggcaggagcgaggacacacaggagggacaaaggggaagacaagaaacggcagagg

SEQ ID NO: 12001 - RNA, 75 nt, Homo sapiens
gccggaagcaagccgccgggagaaggaagaacggcgagcccggagagcaccacagagcggacagcggagacaagg

SEQ ID NO: 12002 - RNA, 64 nt, Homo sapiens
cgaggaagaagaggacgacgacgacgaggaagaggaggcgaggaaaaccaagcaccgacggaaa

SEQ ID NO: 12003 - RNA, 76 nt, Homo sapiens
gcgcgggcgaagcacgcacaccgggcagggccgagaggacgccagcggcgcgcagaacccgccacccccacccggc

SEQ ID NO: 12004 - RNA, 85 nt, Homo sapiens
agagggccgagagccgcggggagaaggccacacccaggcagcaagggcaccgcgagcaagaccaaaaagggcagccgcagaagcc

SEQ ID NO: 12005 - RNA, 86 nt, Homo sapiens
agacaagacccagacggcgaacagacagaaggagaaaggaggaaaaacagccaggccgggaacgccacacaacagggccccgggag

SEQ ID NO: 12006 - RNA, 77 nt, Homo sapiens
ggaaagaagaaaaagaaagggcagccaaagaagacacgcggaagcgagggcgaaaaccacccaaggcccaacccagc

SEQ ID NO: 12007 - RNA, 52 nt, Homo sapiens
acaacagcccaacaacacccaaccaaccggcagaggggcagcggcgaaggga

SEQ ID NO: 12008 - RNA, 76 nt, Homo sapiens
ggggcacgccacagagaaggagggagcgccgcagacgcaagacgggagaagcggagagaggagaagagaagaaaag

SEQ ID NO: 12009 - RNA, 59 nt, Homo sapiens
gccacggccacacgcccagcgagcgccccacacaggggagaaccaggagggagacaaag

SEQ ID NO: 12010 - RNA, 87 nt, Homo sapiens
gggaggacagcagagagaaaggagaagacagggacgaaggggagaaggcacagagaagggcccaaccaaagccacagagacccccga

SEQ ID NO: 12011 - RNA, 88 nt, Homo sapiens
gagaaggaggaaacaggccccaggcccgacggccggccgcccgccgagggccgggaaccgcagagaagagcaggggggccaggagaag

SEQ ID NO: 12012 - RNA, 73 nt, Homo sapiens
gcagcccgggcagagaccaggacaagacgcggcgccgacgggccccgaggccgcgggcggggcgcccagccca

SEQ ID NO: 12013 - RNA, 74 nt, Homo sapiens
agcgcgaaacgcacgagaaggacaggagaaaagccccaaaggaagcccggcccaaagggaagcagccacgaaag

SEQ ID NO: 12014 - RNA, 81 nt, Homo sapiens
acgccgaggcaccgaggcaccagaggagagccaggacaaaaccaggcagaaccaacacgaacccaagcacaaacaagaaaa

SEQ ID NO: 12015 - RNA, 77 nt, Homo sapiens
gccggaaacccgggccccggccccaagggcaccgggacagaaggcagccggcacccgcacaacccagggggccgaac

SEQ ID NO: 12016 - RNA, 78 nt, Homo sapiens
gcgggcagccgccgccaccccgcggccgcacccccgccccagggaaaggcagcagaagcaacgcagcaagaaacgaag

SEQ ID NO: 12017 - RNA, 68 nt, Homo sapiens
aaagggaagggcaagggggccgaagcaaccaggaagacagcaagacaggaaaaaggcaacagggacag

SEQ ID NO: 12018 - RNA, 70 nt, Homo sapiens
gagcagcccaagcgccccccacggcgacgggacaaacacaggaaggaacacccggaccaaacaagaagaa

SEQ ID NO: 12019 - RNA, 81 nt, Homo sapiens
gaagaaacccagacagacgccggggaggcagcgcgggacccagcccaggcggcgcggacggggcggacgcgcacccagccg

SEQ ID NO: 12020 - RNA, 84 nt, Homo sapiens
ccggaggacgcggagcccaagaaacgggcagccaggcccccacagcccgcaggcccgcccccccgggagcgcggaacggagggg

SEQ ID NO: 12021 - RNA, 79 nt, Homo sapiens
ggcggaggacgagcccgggagcgacccgcgcaaacaaacaggcacaagggagcgccggaaacccgggccccggccccaa

SEQ ID NO: 12022 - RNA, 66 nt, Homo sapiens
gcacaaccacccagggccggccacgagcaaaagggcgccaacggggagaaggaggcacaagaagga

SEQ ID NO: 12023 - RNA, 54 nt, Homo sapiens
gcggaacagagaaaagaaagacaagagaagccacggagcaagacaccgaggacg

SEQ ID NO: 12024 - RNA, 74 nt, Homo sapiens
ccccgcgcggagggaagggggcccgaccgagagaacacaagacgacagaagaaaaccaccaaaggaaaagccga

SEQ ID NO: 12025 - RNA, 56 nt, Homo sapiens
ccccaggccaagagggacccacccggcgaggccgggaagaaggagggacacagcag

SEQ ID NO: 12026 - RNA, 72 nt, Homo sapiens
ggcggagggggaccccggcccggcaggagagcgcgcgccgcgcgcccgcacaaacgccggggacaacaaccc

SEQ ID NO: 12027 - RNA, 32 nt, Homo sapiens
cccagagcgggaacaggacggaggggggagga

SEQ ID NO: 12028 - RNA, 80 nt, Homo sapiens
gagaaaacacaaacaaaccgcgagggccagcacgacccagaaccggcagcgggacaaggggggagcccgcccaagagaag

SEQ ID NO: 12029 - RNA, 80 nt, Homo sapiens
cgggcacaccaacaagccacgaccggggagcagaaggagaagcggagaaaagagacacaagcacacgaccgggagcgagg

SEQ ID NO: 12030 - RNA, 79 nt, Homo sapiens
gcgcagcgcccccccagcaggccccccggaggccagccccccgcccccagggcaacgccaggcagggcacaaccgcacc

SEQ ID NO: 12031 - RNA, 72 nt, Homo sapiens
cggggaccccggagcccagaagacagagggcgaggcgaacggcagaagagaaccacgaaagccagccaggca

SEQ ID NO: 12032 - RNA, 86 nt, Homo sapiens
ggcaacgaccgaacccagccagcacggcccagaagaacgcgcccagcaccccccaggggagcagcgacggacccagagccagggcg

SEQ ID NO: 12033 - RNA, 74 nt, Homo sapiens
caaacacgccggaaaccccgcccacagcacgaggggccgcaaggccaggcgcgcagaggcacccaacggcacag

SEQ ID NO: 12034 - RNA, 60 nt, Homo sapiens
ggagaaggaccaagaaccaggaccgaaggagaagaaggagaaggggaggagaaggcaagc

SEQ ID NO: 12035 - RNA, 80 nt, Homo sapiens
ccggcccaggcccggcccgacaagagaacgggccagcggggcgagcagagcgcgcgaagggcgcacacacaccgagcagc

SEQ ID NO: 12036 - RNA, 71 nt, Homo sapiens
cgggggagggcggagcggcgcggccccagcccccgggggggcccgagaggcgcggccagcgaagaagacgc

SEQ ID NO: 12037 - RNA, 74 nt, Homo sapiens
gcgggggcaggcggagaaggagacaccggaggacgaagagggggagcagacgacagagagagggggaagggcca

SEQ ID NO: 12038 - RNA, 36 nt, Homo sapiens
acaaccggagggaaaccagaaacagggacccagcag

SEQ ID NO: 12039 - RNA, 72 nt, Homo sapiens
gaaggcaaaaagcaccgccacaagacagagaccccgcgaggcaagacaagaccaggcacacgaccaagaagc

SEQ ID NO: 12040 - RNA, 80 nt, Homo sapiens
cccacgaggagccaacacaccagcagaagccaaggcgcgagaaggcaccggggcaaacggcacacgaagcacggaacacc

SEQ ID NO: 12041 - RNA, 83 nt, Homo sapiens
cagcccccaagagcgggaacaggagaaagcgcgcaagaaacgaagggagaaggaggccacaaagaccccggggagggagcggc

SEQ ID NO: 12042 - RNA, 79 nt, Homo sapiens
gacagcagcgacagggccgggcgccggcgagagccgcaccgccaacccccgagcaagacggggaccgccgccaccagaa

SEQ ID NO: 12043 - RNA, 83 nt, Homo sapiens
acgaggagcgacccaagaacaagggacccggagacccgaggagagaggacgccagagccggacccggcacgcccgcgcagccg

SEQ ID NO: 12044 - RNA, 34 nt, Homo sapiens
gccagccccaacacccgagccagcgggccggcac

SEQ ID NO: 12045 - RNA, 69 nt, Homo sapiens
gacgcagggcgcccccggacagccagacaagaccccaacgaagggccagaaaagggagaggacaaaacg

SEQ ID NO: 12046 - RNA, 87 nt, Homo sapiens
agcggaggaggaaccgaaccaggaccaggccccaagcccgaggcccagaggaggagcccggcagagcccgaggcgcgccaggaaccc

SEQ ID NO: 12047 - RNA, 77 nt, Homo sapiens
gggcgcggagggccgagggagggccgagccagccgcggccggaggagcccccaggccgccggcagaggccgcccaga

SEQ ID NO: 12048 - RNA, 71 nt, Homo sapiens
ggcggcagagggggaagggaccagggcaggaaggaaagccaagcgcaggcagggacccgggcaggcagcac

SEQ ID NO: 12049 - RNA, 78 nt, Homo sapiens
gggagacaaagagcggcagacgccaagagaagaacaacaaacggcaaagaacacgacgagcccggaccgacaggaaag

SEQ ID NO: 12050 - RNA, 72 nt, Homo sapiens
aagagcggaaaacaaggggaacccaaggaccgcaaagaaaacccagagaacaccacccgaagagacaccgag

SEQ ID NO: 12051 - RNA, 70 nt, Homo sapiens
accccaagccgccacgaagggccaccgggcacacgggcgaggggggggccaaccagcgacggaggggagc

SEQ ID NO: 12052 - RNA, 78 nt, Homo sapiens
gaaagacacccaagaaggcaagaaacaacagcgcccgacaagccagaggccgggaagaaggagggacacagcagcgcg

SEQ ID NO: 12053 - RNA, 80 nt, Homo sapiens
ggccgggccccagaagagaaacgcagcagcccaccagcagcgggaagcgaacgaggcaggacaacccaaacggacaaaag

SEQ ID NO: 12054 - RNA, 81 nt, Homo sapiens
ggcgacagggcggcggcgccaggcagggcgcagacccaacagaggaagccgcaagaaacgggacgacaggaaggccagaga

SEQ ID NO: 12055 - RNA, 71 nt, Homo sapiens
acgccccagaggaccccggccggaggcaaggaaaaggaagggaaaacaagaggaaaaaaccagcaacccaa

SEQ ID NO: 12056 - RNA, 76 nt, Homo sapiens
ggagaagcgagcccggacagaccaaccgcaggcgcaaccaagacaagcaaacccaggaacacccggccggcccggc

SEQ ID NO: 12057 - RNA, 78 nt, Homo sapiens
cggcaaagcccaggaacagaggagagacgacaaagaccgaaagagcggagccaccgcacccaggcggagcacaaggca

SEQ ID NO: 12058 - RNA, 38 nt, Homo sapiens
cggaagggcacagaggacacaaggagcagagggcaccc

SEQ ID NO: 12059 - RNA, 71 nt, Homo sapiens
cacccgcgcgggcacacaaaacaccaaccaaaagacaccggacacgcaggaacagaagggagacccagagg

SEQ ID NO: 12060 - RNA, 31 nt, Homo sapiens
ggaaaggcgccgaagagcaacaggacaccag

SEQ ID NO: 12061 - RNA, 90 nt, Homo sapiens
gaaacaagacaacaaggggcagaaaccacaggcgaaccaaaccgaaagccgacaggaggaggagaacaagcagaagcgacacagagccac

SEQ ID NO: 12062 - RNA, 74 nt, Homo sapiens
accccaggcaacgccagcaaaaagaaaggccaccagaccaagcaccccagacccaaggcaaggggccccccaac

SEQ ID NO: 12063 - RNA, 83 nt, Homo sapiens
gaacacccgccaaagcagagaaaaagcacagaccagcagacaggacagaaaaccagaagcaccgcagggacgccccggacccc

SEQ ID NO: 12064 - RNA, 66 nt, Homo sapiens
cgggcgggagcgcagccccagaacacaacaccagagggggcccaagccaaggagcccagagaaaca

SEQ ID NO: 12065 - RNA, 76 nt, Homo sapiens
ccgagagccgcccgggccagcggccgcgcacccccggccggaggcaccagcccggggccaaagcgaccaacccccc

SEQ ID NO: 12066 - RNA, 80 nt, Homo sapiens
cgcggccgccgcaaggaaacacaacgagaagaaaaagagaagcgcagcgaaaagaagagcaccgaggaacggcagcaccc

SEQ ID NO: 12067 - RNA, 79 nt, Homo sapiens
gagccacagaggagggcccgggaaggaagagcccaggaagaaggcggaaacgcagggaaaccgccccaagaaaagggag

SEQ ID NO: 12068 - RNA, 72 nt, Homo sapiens
agcggcggcgggccgggcagcccggccgacaaccacgaccaggccagagagcacgcagacacgaccgcccag

SEQ ID NO: 12069 - RNA, 79 nt, Homo sapiens
gaacagacagaaacgacaacaggcagcaaagaccagaaccgcccggaagcagaggagaacacagacaccggagaaacaa

SEQ ID NO: 12070 - RNA, 39 nt, Homo sapiens
ggggaaaaagagaaagcgcccgccaagaaaccggacaga

SEQ ID NO: 12071 - RNA, 81 nt, Homo sapiens
caagaagcgacgagcccccaccaaccaccacaggggggccaggcggcccagggcgcgccaccaacgcaaacacacaggcgc

SEQ ID NO: 12072 - RNA, 104 nt, Homo sapiens
gcgccagcaccacgcccgcgccgcgccgccgccaccagcccaagagaaagcaacggggcggcacacaaggagcgaagggcagggagaacgccaggcacagcacg

SEQ ID NO: 12073 - RNA, 81 nt, Homo sapiens
cgaagggagaggacagcagggaggcgggacgcggaagcggcaaggagagcagaagacacacaaggaaagccaagacaaacc

SEQ ID NO: 12074 - RNA, 76 nt, Homo sapiens
acacggcgcccgggacaggaccacaaaaccaccaaccacccaccacacggaccaagccgacacagagccaacagaa

SEQ ID NO: 12075 - RNA, 40 nt, Homo sapiens
ggaagccaacccacagcggcccccagggaaacgaggaaga

SEQ ID NO: 12076 - RNA, 39 nt, Homo sapiens
agcgggacccggaccccaggagccaagagagagggaccc

SEQ ID NO: 12077 - RNA, 122 nt, Homo sapiens
gaagcacacgaccggcgacagcagccaggagcagagcgacagcggcgagcagaacacggcgagcggggagcacaaaagaacaaaagggaaaaaaggacggcagcacacaacaaaacacagga

SEQ ID NO: 12078 - RNA, 69 nt, Homo sapiens
aaccacccccacggagacacacgacaagccaagcaagaaaagcgaaagaagggccgggagaggaaggcc

SEQ ID NO: 12079 - RNA, 56 nt, Homo sapiens
cggaggaggaagaagaaggaagccaaagaaggcagaacgccaggagccagaacccc

SEQ ID NO: 12080 - RNA, 78 nt, Homo sapiens
gacggggaagaggcccaacgagaaccaggcgacaccagcggagagcggccgggaggaagcagagggaaccaggacaga

SEQ ID NO: 12081 - RNA, 75 nt, Homo sapiens
aaaccgggagaagcacaccggacggagagccgcggacacaggcgcagcccgaggacgagagaccggcgcaggagg

SEQ ID NO: 12082 - RNA, 71 nt, Homo sapiens
ccccgcagcccagacccgcaccgcagaagccaggaggaagcgaaccagaggcccaacaagagagggagaca

SEQ ID NO: 12083 - RNA, 72 nt, Homo sapiens
ggagcaccgcgcaaaaaaacggacccccaggcaaaccgccccgcagcaccacccggcccggcaaccaggaaa

SEQ ID NO: 12084 - RNA, 57 nt, Homo sapiens
aagcgccgcccagcagccgcaggcaaaagcagaccggaaaacccaccggcaagacca

SEQ ID NO: 12085 - RNA, 77 nt, Homo sapiens
gcccgcaagcccggccggcccggcccgccgcgcccggaggagccgcccacgaagggagggaaggaaggaagagccaa

SEQ ID NO: 12086 - RNA, 80 nt, Homo sapiens
gcgcaccccgcggacgccacagcgcagacgccggcccaccagccagcggggagccgcccaccccacaagggaggacccag

SEQ ID NO: 12087 - RNA, 83 nt, Homo sapiens
ggcaaacacacaaaagagaaaaacaaccagcaagggacgcgaaaaagacaagccgccgccagcgcgcacgcaaggaggcggcg

SEQ ID NO: 12088 - RNA, 63 nt, Homo sapiens
cgcggggcagcccgaggcgcaccaggcacaggcgggacagcagacaacaccccagaggacggg

SEQ ID NO: 12089 - RNA, 66 nt, Homo sapiens
aagcagcgcacacggggacacaacgacaaggacaaacgcccccggcgcagacaccggaacgggcaa

SEQ ID NO: 12090 - RNA, 86 nt, Homo sapiens
ccacgcaccggagagagcacaggcccaggaggccagagccacgaagcggcggcggccccgggggccagggggccggggacacgaga

SEQ ID NO: 12091 - RNA, 77 nt, Homo sapiens
gaaccagacaggcaggaaaagacaggccaaaagggaccaagcgcccaagggagcgcgggggcaggagaggagaacgc

SEQ ID NO: 12092 - RNA, 74 nt, Homo sapiens
acgggccaaacaaggcaaggcaccggagcggaaaaaccgaacaagaagagagaagaagcaaaccgggaccggaa

SEQ ID NO: 12093 - RNA, 71 nt, Homo sapiens
cgggaagcggccaggccggggaagagcaaccaaagcagacagggaagcgaccaaggccaaacacaacaccc

SEQ ID NO: 12094 - RNA, 67 nt, Homo sapiens
acccaagccaggaaggaagacagcgacgcagaccaaaagcagagaggcgcgagccaaaaggagaagc

SEQ ID NO: 12095 - RNA, 79 nt, Homo sapiens
ggagggcccacagaggagcaagggcccaggaacagaagaaggcaggcaaagagccaaggagggaccccaagaaagcaag

SEQ ID NO: 12096 - RNA, 78 nt, Homo sapiens
gacgaaggagagggggggccagaccagggcgcgccgcggaggaaggaagcagaggcgggaggacacgagcccagccag

SEQ ID NO: 12097 - RNA, 73 nt, Homo sapiens
cacaaaagcagagcgcgaacggagaaagggagacaagacccggcacagcaggccgagcagaacccgaaacgca

SEQ ID NO: 12098 - RNA, 74 nt, Homo sapiens
cggccgggcgccagcgcggcgcaggccaaggagaaaccagaggcaagcgacgggaaggaccaccaaacccagcc

SEQ ID NO: 12099 - RNA, 54 nt, Homo sapiens
agcaaaaagcacgacacagagcagcaaaaaggaaacacagagcaaaggcagcag

SEQ ID NO: 12100 - RNA, 65 nt, Homo sapiens
acgcaagaggcagccaccacgggccggagggcgaagacaggacggcccaggcagacacggaggag

SEQ ID NO: 12101 - RNA, 82 nt, Homo sapiens
gggccagacccacgcggcgccagcccggcgggaaggaaaaccgcgcagagagagaagacggaacaagaaaggaccaggagcc

SEQ ID NO: 12102 - RNA, 69 nt, Homo sapiens
gaaccggcggggccggcagccccgagcccccgggcagggcccggggccccacgaagacgcgccgaccgc

SEQ ID NO: 12103 - RNA, 79 nt, Homo sapiens
agcaccaccacccgggagggcccgcaagggagggacgaacgccagcccgaagaaggaaagcccggggagggccaacaac

SEQ ID NO: 12104 - RNA, 49 nt, Homo sapiens
cggacaccgccccgagaccacccaagggacaggaagggaaggggcggag

SEQ ID NO: 12105 - RNA, 71 nt, Homo sapiens
cgaaggggggagaacgggagcacggcacaagcaccagggggccacaagcgcagaggcaccgacagcaaccc

SEQ ID NO: 12106 - RNA, 72 nt, Homo sapiens
aaaagggagaagaagaaccaaacaaccagaagaagagagcagagaaacggagaagggagcacccgccccacc

SEQ ID NO: 12107 - RNA, 61 nt, Homo sapiens
caacaacaggccaggaaaggagcaccacgacacacggccggaccaaggccccaggggaccg

SEQ ID NO: 12108 - RNA, 82 nt, Homo sapiens
agacccagcaccagaccaggcggcacccgccccgaggaggggaccagacacacaccaaagaccgcacagaagcagaagaacc

SEQ ID NO: 12109 - RNA, 77 nt, Homo sapiens
aaaccggggaagcccacaaaacaccagagcgaccaagaaggagagcgacagcccaagcaccaggagcaggaacccac

SEQ ID NO: 12110 - RNA, 70 nt, Homo sapiens
cggaacgaaaccaaagcacaaaccagcccagaggaccgcaacaccaggacagaacaagacaacccgaacc

SEQ ID NO: 12111 - RNA, 67 nt, Homo sapiens
cgggcagagaccgcaggaagaagcgaagaggaaggccgaaagaaggaaaacaccagcagggacagaa

SEQ ID NO: 12112 - RNA, 74 nt, Homo sapiens
cgacggacagacgaagaggagggcagaggcacccaaagggagccccggggaggcacaggcagcacagccaggcc

SEQ ID NO: 12113 - RNA, 84 nt, Homo sapiens
gagcacagagcccgccgccgaccgccgcccgccacacccgccgccaggggaccgcaaagcggagcggcaagcccgaacaaggag

SEQ ID NO: 12114 - RNA, 75 nt, Homo sapiens
cccggagccgagcaaccaggcacaggcagcacagccaggccaaaaccccagaggcacagaggcaaagaaacaacc

SEQ ID NO: 12115 - RNA, 55 nt, Homo sapiens
aagggcggcaagcgaaagcacacagaggagaacagggccgccccaggcgccgacc

SEQ ID NO: 12116 - RNA, 81 nt, Homo sapiens
aagagccaggaaacaggaggaagaacccaagccaaagcccagagcgggaccgccagcaccgccgcagcccgccgggagcgc

SEQ ID NO: 12117 - RNA, 84 nt, Homo sapiens
cgcggcggccgccaccaggcacccggaagagcgcggccgaaggccgaggagcgagcgacaggcagaggaggcgagccccaccgg

SEQ ID NO: 12118 - RNA, 82 nt, Homo sapiens
acgggcaggaaggcagcgcacgacagcaaaagggcggagaacggaaaagcaccaggaagcagagaggaccgcagaagggaag

SEQ ID NO: 12119 - RNA, 59 nt, Homo sapiens
gccgaggaagcgcagcagccgggcaggccacgagaggaccaggaagagaccgagaccag

SEQ ID NO: 12120 - RNA, 73 nt, Homo sapiens
caaggcgaccaaccaacaaccacgggaagccgcggccccaagcaccagcccacagcgcacacaagagggaagc

SEQ ID NO: 12121 - RNA, 68 nt, Homo sapiens
gagaaggcggccacagcaggaggacgcggaacgccaaggccaccgagccacaagaccacagcaccgac

SEQ ID NO: 12122 - RNA, 87 nt, Homo sapiens
cccccccccagcccgccccaaaagaggcgacaggaagaagggaacagccgccggaagccgagaggcgcagacagcacgacgaggcgg

SEQ ID NO: 12123 - RNA, 54 nt, Homo sapiens
gaaggccagaagcgcgcgccagaccggaaacccaggaaggggccagccgcgggc

SEQ ID NO: 12124 - RNA, 71 nt, Homo sapiens
agaagacggggacgcaccacgaggacaggacaaagcccccagaacaccggggaaccacccggccccagagg

SEQ ID NO: 12125 - RNA, 77 nt, Homo sapiens
ggaaggcagcgcacgacagcaaaagaggcgggggcgaacccgccccaggaaccggagcgcaaacccagaagcagccc

SEQ ID NO: 12126 - RNA, 77 nt, Homo sapiens
caagaagccaaccgagaaggacaggaaagcaccaggcacgaacccgagaaaacaggcaacgcgaaaggaggcaagaa

SEQ ID NO: 12127 - RNA, 83 nt, Homo sapiens
ccggcgccccgccaagggcgcagaccgacgccggaaggggcgaccggaccgggagaagaaggcgccgaggcaaggggacagca

SEQ ID NO: 12128 - RNA, 78 nt, Homo sapiens
cgccgcaggagacgagaggacgggaccaggcgaagcggccgagcaggcgagcgaacgacggcaccccacgccacagcg

SEQ ID NO: 12129 - RNA, 78 nt, Homo sapiens
ggcgcacggcccgagcgggggcagccgcagaggcgcgggacgaccggaccaaggaacaaggcccaacaggcccaagga

SEQ ID NO: 12130 - RNA, 75 nt, Homo sapiens
acagggcggaggaaaaaagacgcacacagcaagacgacaggaagccaacaagcgacagagagacaggacaccagg

SEQ ID NO: 12131 - RNA, 72 nt, Homo sapiens
cgacgcaggagggagagcacagcaagagccaggaccaccggaagccagaaagagaggaaaacccaagacaag

SEQ ID NO: 12132 - RNA, 101 nt, Homo sapiens
ggggaggagaggagaggaggcgcgggcggagcggaaagaggaggagaggggaggaggcgaagacaagcagaccggaagaccgacggaagaccacaccccga

SEQ ID NO: 12133 - RNA, 73 nt, Homo sapiens
gggagccccaaggcaggaaccagaggaagagaggacaccgacagagcaccagaccaaaagccccaacagcggc

SEQ ID NO: 12134 - RNA, 75 nt, Homo sapiens
ccgagacgggagagacgagccagaggccacaagccggcggacagcaaaaggagaaaaaccgcacaaaggcccaac

SEQ ID NO: 12135 - RNA, 73 nt, Homo sapiens
ggagccagaagaagaagaaacccagcaaaaggaaaaaagagaggcccaaagaaaaagcggggaaaacaaaaaa

SEQ ID NO: 12136 - RNA, 88 nt, Homo sapiens
gaagcgacaaaaaccaaaccggagaagcgaagcagaagaggcagaagggaggagagaaagagagacacagagagacagagagccaaag

SEQ ID NO: 12137 - RNA, 71 nt, Homo sapiens
cggcgccggccgagaaggcagaggcgaacgaggggccgagggcccaacaccgacggccggcgggaccccca

SEQ ID NO: 12138 - RNA, 84 nt, Homo sapiens
agagaagaagaagcaggagaacgaaacggagccagagaaggcagaagggcccaccagaaaacacgaaggagaagcgcaaaggaa

SEQ ID NO: 12139 - RNA, 81 nt, Homo sapiens
aacccaccccggaccacacaccaccgggacggggacaacggggcaaagcagcccgaggaggggagccgacccgcagcagcc

SEQ ID NO: 12140 - RNA, 72 nt, Homo sapiens
caaaagcggaaagaccaaccgcggcagagccagagcccaagcccccgcagggagcccaccgcgaccaggacc

SEQ ID NO: 12141 - RNA, 76 nt, Homo sapiens
gggggccgcagcaggaggcgacaagaggacagagcgggagccaccagcgccaaagggaagccaggagcccgggggc

SEQ ID NO: 12142 - RNA, 84 nt, Homo sapiens
aagcaagggaccagcagccaaagcccacagccggggaggcgagagaaacccagccgaagcaaaaagcaagcacaaccaagcaga

SEQ ID NO: 12143 - RNA, 76 nt, Homo sapiens
gcaccaaggagaaggggagcaaaccccggaaccaggaaaaacaggcggaccagaacgccaagaagagagcgggccc

SEQ ID NO: 12144 - RNA, 62 nt, Homo sapiens
cggcaccccggcccaggacacagggacgggacgccacagaggacaaagcagccagaccaaag

SEQ ID NO: 12145 - RNA, 60 nt, Homo sapiens
cgggcgccccccgcaggccagaacccaggagaaacgagagggacagcaaggaagacgcca

SEQ ID NO: 12146 - RNA, 82 nt, Homo sapiens
cgcccgcgccggcaccggggcggccggccaaagccagcagaaaaagccaccggagcgaagcgaaggaagcgaggacaacacc

SEQ ID NO: 12147 - RNA, 87 nt, Homo sapiens
aggcacgccacgggagcccggcaagccgccaccgggagaagcggccgggccaagggcaccacaggaggcagggaggacagcacgcgc

SEQ ID NO: 12148 - RNA, 58 nt, Homo sapiens
caagagcaagacaccggacaccgagggcccccaaaaggaagcccggggcggcgacgga

SEQ ID NO: 12149 - RNA, 83 nt, Homo sapiens
cgggggcggccgggacggaggacgcgcagaacaggcaggaacacccgaacgcacagaacaacacgcgcccgaacagcccgggg

SEQ ID NO: 12150 - RNA, 77 nt, Homo sapiens
ccagaaacaccgccgagaccagcccaacaggaccaggagcgggagagggccagggaccgacgcaggcgggcccaagc

SEQ ID NO: 12151 - RNA, 77 nt, Homo sapiens
gccgcagagcaaagggggcccccagggaggccgcacggcccacgcgagaggcagcacggcaggagacgaggagagga

SEQ ID NO: 12152 - RNA, 83 nt, Homo sapiens
gacgccgggcggcaaaggacaggaaggaccccaggaaggcggacggcagcggaaacgaccaagagacggaccgccccacgacg

SEQ ID NO: 12153 - RNA, 81 nt, Homo sapiens
cccaaaaagaaaacaccgaaggacaccaagagaacagggacaggcccagccccgacagcggccacgaccgccaaccggccg

SEQ ID NO: 12154 - RNA, 72 nt, Homo sapiens
cgcccccacggccccggcggccaaacaccggacagggcagaccgccagcagcacagcaagccacagagaggg

SEQ ID NO: 12155 - RNA, 91 nt, Homo sapiens
gagagacaggggagagccggaagccaggcacaccgcaaggacccaaaggggaggccccagagaaggagaagagagagacgcgccgggagag

SEQ ID NO: 12156 - RNA, 67 nt, Homo sapiens
ccggagccgggggcggagaaacgggaggggaaaaacagaggcaaggaaccgaaggaaaagcacagaa

SEQ ID NO: 12157 - RNA, 71 nt, Homo sapiens
aggaacccacccacagcacaagcccaggcaagagcgcagggagaagaaacgaacggaacgaggagagcacg

SEQ ID NO: 12158 - RNA, 82 nt, Homo sapiens
ccgaggccgggacaagcagcaaggcgcggggggccacgcgaggccgaggcagaccagggccagagcaccagaccagcagagg

SEQ ID NO: 12159 - RNA, 79 nt, Homo sapiens
agagagcgcgagagaggagagggcagacggacaagagcgcggaacaggacgccccgacgcggacaccgaagcccgaggc

SEQ ID NO: 12160 - RNA, 68 nt, Homo sapiens
aggaaacacgcagagaaggaacagagacagacccgggggcccccaaggagagggaagaagccaggcag

SEQ ID NO: 12161 - RNA, 70 nt, Homo sapiens
cgccgcgccggcgagggaagcggaaccaaccgggaaagcccggggcaggggaaggggcccggccaggacc

SEQ ID NO: 12162 - RNA, 82 nt, Homo sapiens
gacacccgcacaaccaagagacaccaaggagacgcccaaggaaccccgccggccaccggcggcacagccagagaacaacaca

SEQ ID NO: 12163 - RNA, 79 nt, Homo sapiens
ccacaaacacagaggaagaccaccaggcagaggcaacagaggagcaacaaggagggaccgacacaagaagcagccagaa

SEQ ID NO: 12164 - RNA, 73 nt, Homo sapiens
aacagacaaccaccaaaggggaaacagaaacaaggggaggcaagcaggggggcaaaggaaagaaggcagaaag

SEQ ID NO: 12165 - RNA, 90 nt, Homo sapiens
aagaagcggcccccgggaaggagcgcccggcggagaagaccgaacggccccacagccgggcggggggaaagaacaaaggcagggagggaa

SEQ ID NO: 12166 - RNA, 86 nt, Homo sapiens
ggagcgcccagacgcggggagccgccggagcgagaaggccaaggagcgggagcggaacgaagaacaccggcagagaacaagccagc

SEQ ID NO: 12167 - RNA, 81 nt, Homo sapiens
ccgcggcagcaagaacagagagagaggggacagacgagagaacgaggcaagaagcaagcaaccaggcgccgcaccagaaga

SEQ ID NO: 12168 - RNA, 73 nt, Homo sapiens
ccagacgcccccacggcagaaggggaagccagcaacgcggaagggagaaaagcccagaaccgagacagagcgg

SEQ ID NO: 12169 - RNA, 67 nt, Homo sapiens
cgagaacgagggcggaagaaggaaagggggaggccacaaaacagaaggagagaaccaggagaccgaa

SEQ ID NO: 12170 - RNA, 75 nt, Homo sapiens
ccccccccccccccaagcccgccccccccgccacgggccaccaccgcagacaggggcgcagaaagcaaaacgaaa

SEQ ID NO: 12171 - RNA, 82 nt, Homo sapiens
gggcgagcggggggacgccggcggagacgcgggcgagacaagcagaccggaagaccgacggaagaccacaccccgagggagc

SEQ ID NO: 12172 - RNA, 70 nt, Homo sapiens
aaaagcggagcacgcgggcacgcgcggaaacggagggggaagaagaaaaggaccaaaaaggcacaccaag

SEQ ID NO: 12173 - RNA, 67 nt, Homo sapiens
cagccaaggcaagaaccgcaaaagcacccaacgccacgggaaccacaagggccggacccgaaaacac

SEQ ID NO: 12174 - RNA, 82 nt, Homo sapiens
cagaccaaacagacaaccaggaaccgagagcacaaacagggccaaacagcaggaggaggcagcggaagaggagcgaagcaga

SEQ ID NO: 12175 - RNA, 55 nt, Homo sapiens
gcggggacggcggcgccgcaaccagcagacccgcagcaagaaggaacgacaaggc

SEQ ID NO: 12176 - RNA, 72 nt, Homo sapiens
aaacgagaaaagaagagcacagaaggagacaaaacaacgagggcagaaccagagaggggagaggcccgcaaa

SEQ ID NO: 12177 - RNA, 79 nt, Homo sapiens
agccacgacacggacgggaccccccaggggaacagcgagcagacaaaggccgaccccgggacacacccagcccgggacc

SEQ ID NO: 12178 - RNA, 76 nt, Homo sapiens
caagcagagaaccacgccaagcggcacagagaaacagacacaacagaaccgcaaggccacaaaccagacggaagca

SEQ ID NO: 12179 - RNA, 80 nt, Homo sapiens
gggaggaacggaggaagaaccacacacccccaaaccaggaaaaacaggaacagccgcccccacagcaccagaaacagcca

SEQ ID NO: 12180 - RNA, 81 nt, Homo sapiens
gggaaaccagacccacagaaaggaaggcggaggaaggcgggagccgccagcaacaacgcaagaaggggaaaagcaggcccg

SEQ ID NO: 12181 - RNA, 96 nt, Homo sapiens
cgaagcaaccaggaggccaaagaggaccgagacaaaccacggggcgaagaaaccacgaacaaaaggggacacaagcaaggacaaaaaagcccagcc

SEQ ID NO: 12182 - RNA, 72 nt, Homo sapiens
gggcccgggcagccgcgggcgcaaagacgcaggaagggcagggcccacccgagggagcacgggagaagcgag

SEQ ID NO: 12183 - RNA, 77 nt, Homo sapiens
cgccccgggccggagcccagcagcggggagccccgagaacgccccagcggggagacacagaagaccggggaagcccc

SEQ ID NO: 12184 - RNA, 62 nt, Homo sapiens
caacagccacggaagaaagcagggaaagggagcagcaccggccacacccacagcacgaccgg

SEQ ID NO: 12185 - RNA, 71 nt, Homo sapiens
caaggaggaagaaaaaaaggcaaacaagcggaaagcacgaacgcacagagccggaggagccaccaacagaa

SEQ ID NO: 12186 - RNA, 80 nt, Homo sapiens
ggaacgcgggcgccgaaggagggccggcagcgcccgcggagacggaagagacgaagaagacacgaacaggggacgaaaaa

SEQ ID NO: 12187 - RNA, 67 nt, Homo sapiens
gagaaagcaacggaaacgaagaaggcccagcccaccaggagaaaacccccgaaacagagaaaccagc

SEQ ID NO: 12188 - RNA, 79 nt, Homo sapiens
gcgaccggcgcgacagccccgccagacccgggagccgcggggccggaagaaacgaaccaaaccagacccaagcaagcca

SEQ ID NO: 12189 - RNA, 83 nt, Homo sapiens
ggaggcgaagaggacgagaagaagaagaagaagagagagggccagggaggaaggcaaagaggagccgaccgacagcggcacga

SEQ ID NO: 12190 - RNA, 69 nt, Homo sapiens
aacggaaaaccagagagcgagaacacaagcacgcggggagggggagacaaagagaacagacgaacaaga

SEQ ID NO: 12191 - RNA, 76 nt, Homo sapiens
aaggggacgggcccagaggcccagggaggcaggggcagaaacagagaaggaacagggcgcccgcgccggcagagga

SEQ ID NO: 12192 - RNA, 113 nt, Homo sapiens
ggaaggaggccaagaaaaagaaaggggaggacgcagaggcggcacaaggagggaaagcacaaggcagggaggagaaccccaagagcaccaaaaggaaagagagaaagcgagga

SEQ ID NO: 12193 - RNA, 41 nt, Homo sapiens
gagagagagagggaggggcggacgaaagaaagaaggagcac

SEQ ID NO: 12194 - RNA, 81 nt, Homo sapiens
cacgcgcccgcaacccgaaccacggacaggacccgcccagcccaacggggaggacccaaagacaggaccacgcaccagcag

SEQ ID NO: 12195 - RNA, 85 nt, Homo sapiens
cccgcccaagggaacccgggacaagaacgcagccgccggccgaccaccggaacggacagcccccccagcggccccggaggcggca

SEQ ID NO: 12196 - RNA, 84 nt, Homo sapiens
caagacccgaaaggaggcaacccccaagggaagccagggagaccagggggcaggggaggagcgcccaggcgaccggcgaacagg

SEQ ID NO: 12197 - RNA, 58 nt, Homo sapiens
aaaagacgaaggaccccaaccaagaacaggccgagaacgaacaaacaacacacccgcg

SEQ ID NO: 12198 - RNA, 74 nt, Homo sapiens
acgaccacaggaacggaaaaaacagaaaaccagacgagagacagaagacgaaagggcaagaaagagagcacgga

SEQ ID NO: 12199 - RNA, 59 nt, Homo sapiens
cgcagcgggaccgcgcgaccggcgcccgcccgcggcacacagagaaaaaaagggaacaa

SEQ ID NO: 12200 - RNA, 100 nt, Homo sapiens
gggcccccggccgccggcgccagggcaagccacacggggggcccaacgaggcgcggggcaggccagagaaggacaagaagccaagccgaaaggacagcca

SEQ ID NO: 12201 - RNA, 69 nt, Homo sapiens
cgcagcaacccgggcaaggaccccgccgagcccccaagagcaggacaagggagacggacggaacgcggc

SEQ ID NO: 12202 - RNA, 52 nt, Homo sapiens
aaacagacccccccccagacacagagcaccgccggccaggaggagagcgcac

SEQ ID NO: 12203 - RNA, 76 nt, Homo sapiens
accacccagaggacgggagggggaaggggccggagggcagggggcagggcggcagaggaccagggcccgaggaggg

SEQ ID NO: 12204 - RNA, 89 nt, Homo sapiens
acagcgccacccgagggcgaagcagccaagaaacgccacacccagaggaaaggcccgacaaggcacgcggccaaagagaccagaaacgc

SEQ ID NO: 12205 - RNA, 74 nt, Homo sapiens
cgcgggcgcaccccggcagcgacccccgggagaccggccccgccacgggcggccgcgcggacggaccggaagga

SEQ ID NO: 12206 - RNA, 63 nt, Homo sapiens
acgcacggaaaaacgagaaggaaaagaacccaacaccagagggcagagagaagaagaaaggaa

SEQ ID NO: 12207 - RNA, 75 nt, Homo sapiens
gaagagcccagggcgagccccacagcggaacacacaacacacaggggcacgggcagcagggcgacagcaagaagc

SEQ ID NO: 12208 - RNA, 89 nt, Homo sapiens
gcggcgcgcccgacggggcggccgggggccagagaccaaggcgcgcccggcgggccggaccaaggaagcacaagccagcagacgacaac

SEQ ID NO: 12209 - RNA, 77 nt, Homo sapiens
ccaggggccacggagaaagccgcagcaagcccggacgaaagggagaaaagagcaaaagcggaggaaggggggggacg

SEQ ID NO: 12210 - RNA, 57 nt, Homo sapiens
accccagggagagcgggcagccccaggggacagagagaggccgcagaagggcagaag

SEQ ID NO: 12211 - RNA, 99 nt, Homo sapiens
cgcggaccgcggcccgacgaggaagcacgaaagcaccaacgagacccgccacacgaaaaaagaagcacgaggcgcgagaagacccaaaccgacaaaaaa

SEQ ID NO: 12212 - RNA, 78 nt, Homo sapiens
gggacacccgggcggggcagagcagcccccagccagccgcgagggcgacccaccaacaggcaacccagacaaagaaga

SEQ ID NO: 12213 - RNA, 74 nt, Homo sapiens
acagccccagaccaccaccgaagggccgacagcgacccccagacagcgaaacccccgaggaaagaacaaacaaa

SEQ ID NO: 12214 - RNA, 75 nt, Homo sapiens
ggccccggcaggaagagaagcgcaggaggaggagaccagcggagaacgcaggacacgacacaggaacagggggag

SEQ ID NO: 12215 - RNA, 77 nt, Homo sapiens
cagacagaaggagcaggaaccaaagggacaaaggaaaagaaccaacagacggagcacggcgccgaggaaaaagcaaa

SEQ ID NO: 12216 - RNA, 83 nt, Homo sapiens
cagacccgcaggccccggagggcccccccagcacccccaggccagccaccccgcaggacagcgagccaagcagacaaagccaa

SEQ ID NO: 12217 - RNA, 70 nt, Homo sapiens
gcgagcagaacaaagacagagaggaagacccagccccaagggaaggggccgcaaagcccagagagcgccc

SEQ ID NO: 12218 - RNA, 72 nt, Homo sapiens
aacagaaccgccggaaagcgcaaaccaagaggcgagggcgaaaaagagaccgaaacaaacccgaaaaacccc

SEQ ID NO: 12219 - RNA, 77 nt, Homo sapiens
ccgcccagcccaaagcgggaacaggcagagccaggcaccgaccaaggggaaggaacaaagcagagaaaccaaaaggc

SEQ ID NO: 12220 - RNA, 77 nt, Homo sapiens
ggcgcccaaggggagaagcgcaggcgcgccggccgcgaacccggacccaagaagcgagcaggcgacccaaaagagcg

SEQ ID NO: 12221 - RNA, 74 nt, Homo sapiens
aaaacacaaacgagggagcaaggacaccaccagggagccaggagagcccaagaagacggcagaacacccagcac

SEQ ID NO: 12222 - RNA, 61 nt, Homo sapiens
cgggagccccacgcccacaagaggagcgggagcagggaacccaaagagagaacgcccacca

SEQ ID NO: 12223 - RNA, 70 nt, Homo sapiens
caggaccccagcggaggccgcccaagcggcacccagccccgggcccccagagcacggccacaccaaacac

SEQ ID NO: 12224 - RNA, 71 nt, Homo sapiens
cagcagaggacgcggccaggcgacgggaagcgaccgcaggcgggcccccgaccggaacagagccgagcgaa

SEQ ID NO: 12225 - RNA, 63 nt, Homo sapiens
ggggcgggcaagcaccacagccaagccaacccagaagaaaaggagggagacaccaggcgcaag

SEQ ID NO: 12226 - RNA, 79 nt, Homo sapiens
gacgggaccacgaggcaacgccccagaacagacaccccgaagaaccccaaagaaacccagagaccaacaaagaaaaaaa

SEQ ID NO: 12227 - RNA, 76 nt, Homo sapiens
aaagaacaggccagaaaacagaaggccacgcggaaacaaggcgaccccagaaaggggggagacacagccagagcga

SEQ ID NO: 12228 - RNA, 82 nt, Homo sapiens
ggcacgccggcgcgagcacagaggcgaacgggagccaaagggccccgggccgcccgacacacggccaaaacggaggagaaca

SEQ ID NO: 12229 - RNA, 84 nt, Homo sapiens
cgcacccggccggcccggccccagccccaggaccccgagcagacgagagggagccgaaggagagagggaccgcaggaggggaag

SEQ ID NO: 12230 - RNA, 69 nt, Homo sapiens
cccccggcaccaggccgaaaacgaagcagaggaacaacaagggaaacacaaagaagacaccagaagggc

SEQ ID NO: 12231 - RNA, 77 nt, Homo sapiens
ccgaacccccccgcgccgggagccgggcccgaccagaccgggcaggcacacgagcggccacgagcaaccaagaggag

SEQ ID NO: 12232 - RNA, 74 nt, Homo sapiens
agaccggagcgccacggccacgccccccgcaacaacccacaagagcaaggcaccggcaccggaccaacacgaag

SEQ ID NO: 12233 - RNA, 88 nt, Homo sapiens
aggaggggccccagcagcccccgaaggcccacaggacaggagagaaagacggccaaagggccaaacaacagacccacagaacaacaac

SEQ ID NO: 12234 - RNA, 71 nt, Homo sapiens
ggcccccaaaggggaaacagacgaaaagaaaagcgccggccgagaagacccgaggcccgggcaacaagagg

SEQ ID NO: 12235 - RNA, 56 nt, Homo sapiens
gggagcggcggcgaacagcgcgacacaggagcccgccccccaaagcgaagccaaag

SEQ ID NO: 12236 - RNA, 77 nt, Homo sapiens
aggaacacccagggaccccgaaggaaaaagaaggcagaaagggcacaggcccaggcccagcgggccccgaggcccca

SEQ ID NO: 12237 - RNA, 77 nt, Homo sapiens
acagcgcgcagaagcccaaggcgaacggagagacacagggacaagcaaggggccaaggagccaaggaggaaacccac

SEQ ID NO: 12238 - RNA, 78 nt, Homo sapiens
aaaggaacccacaacgaagggaagccacggaagaaagggagacccgaccaccggaagccacggcccggacccccgcca

SEQ ID NO: 12239 - RNA, 78 nt, Homo sapiens
aagccacggaccagagacacgccaagcagccagcccaggagagaaaagaagaggagcacaggcagccaaggcaagcaa

SEQ ID NO: 12240 - RNA, 59 nt, Homo sapiens
caaggcaccaacgggcaaaaaagccagaaagccaaggaaggggggaagaagccagagcg

SEQ ID NO: 12241 - RNA, 77 nt, Homo sapiens
ccggaaacaggcgaacagaacaagaaccaaagaaaacaaaaggggacaggaaacacaaagccggggaagcaaagaga

SEQ ID NO: 12242 - RNA, 79 nt, Homo sapiens
cgccgacgccggggcacggccacgcacgccaccaccgcccagcgcgcccccccaggaggccccaggccaccaccccacc

SEQ ID NO: 12243 - RNA, 73 nt, Homo sapiens
gaaaacggaagccgcaaagaccacgccccacaaccaggaaagagaacaagcagaggaaagacacgccagagaa

SEQ ID NO: 12244 - RNA, 58 nt, Homo sapiens
cgaaaagccacaaagggaaccaggaaaaggaaagcgagagcccacggcccaggacaca

SEQ ID NO: 12245 - RNA, 79 nt, Homo sapiens
gccccgagccggcccgggcgaggacagcagggaagaacggaaaccagagaaagaaacgcccccacacaaaagcgagacc

SEQ ID NO: 12246 - RNA, 54 nt, Homo sapiens
gggaaggaagcaggcccaggcggaagccaggagggaagcccagaagacgcacaa

SEQ ID NO: 12247 - RNA, 96 nt, Homo sapiens
ggcgaacacaaaaggcgccgaagcaggacccgaagccaaaccaggagggacccaaagacaggaccacgcaccagcagagaaggaaagcaaaccgaa

SEQ ID NO: 12248 - RNA, 78 nt, Homo sapiens
ggacccaacgacaggcgccccggcccaacgcaggaagaagagagccaggcgaacgccgaggaacagggaccggcaaga

SEQ ID NO: 12249 - RNA, 65 nt, Homo sapiens
cagcagcgcagcaagaagggccggagagcgcaggacaacgaacggcgacaggggcaagaaaagaa

SEQ ID NO: 12250 - RNA, 66 nt, Homo sapiens
aaacgggccagaccacacacacggcacagaaggcaacagggaaacagcagccagaacggggcagcc

SEQ ID NO: 12251 - RNA, 83 nt, Homo sapiens
aaagcgacggcggacgaagaggggagaaggaagcgagaccaacgcaacccaagcgcccgcaaggccaagccggcgaagcccgc

SEQ ID NO: 12252 - RNA, 55 nt, Homo sapiens
ccagaaggacgccagcggagaacgcggcaaagcgagaggaaaggcaagggcagaa

SEQ ID NO: 12253 - RNA, 81 nt, Homo sapiens
aaacagaccaacaaccgcgaaaaagggccgaccaggcagggaacaaccacagggcagcaggccagggagcggagagcagag

SEQ ID NO: 12254 - RNA, 81 nt, Homo sapiens
cgaaagaccacggacagcaggcccacacccaggaaagagcaaaagaggcggcaaggcagcccaggcaaagaagaaaggcga

SEQ ID NO: 12255 - RNA, 57 nt, Homo sapiens
gcaacaggaccagcaaaaaaagaacccaacacgacggggaagggagaccgcgagaca

SEQ ID NO: 12256 - RNA, 73 nt, Homo sapiens
cccaagacagacacagcaaaacgaggcagagggcgcgccgggcaccaaagcgaaccagacaggggaacggaaa

SEQ ID NO: 12257 - RNA, 77 nt, Homo sapiens
cccagcaaagccaaaggaaggaccagcaggcaggcagggccaacgggggcgacccgccaggaaccaaggcacgcgcg

SEQ ID NO: 12258 - RNA, 59 nt, Homo sapiens
ggaagcagagcgcacaaagggaaagggccaaggaaccgaacccaaaccagccggccaaa

SEQ ID NO: 12259 - RNA, 79 nt, Homo sapiens
cgcagcaaacaacccgcaaacgaaaaagaacgacagagcaaccaggaaagaagaggaacagcgcgagccacaaggcaag

SEQ ID NO: 12260 - RNA, 91 nt, Homo sapiens
gggcggccaacggagagacgccggccgggacacggggcagcgacccgcccacgcccagcagcagcagcaacaggaaaaagaccagaaggcc

SEQ ID NO: 12261 - RNA, 86 nt, Homo sapiens
gcggagagaccgggcgaccagaagggcgcacccgcaggaacccgccgaggacaggaggggcaaaaaagagcgccccgcgcaagagc

SEQ ID NO: 12262 - RNA, 79 nt, Homo sapiens
agaagagggcggagcggagacgggagaagaaaagacgacagggccgagggggcaccccgccaggacaaaacgccaggca

SEQ ID NO: 12263 - RNA, 87 nt, Homo sapiens
aagaaaaaggaaaaaaagaaaaacaaagcacaccgggcccccaccagaaggggacaggaccaagaggagcggggaaaagagggccga

SEQ ID NO: 12264 - RNA, 87 nt, Homo sapiens
gaccggaccgagagcggaccgagagcgcgaaacgcacgagaaggcccagcaggagaagacagacacggccgcgcacaagccgccgcc

SEQ ID NO: 12265 - RNA, 86 nt, Homo sapiens
gaagagagaaagacagagaagcagaagaggagacggacaagcaacagaaggaggcagcacccagggcaccggagcaaaacgacccg

SEQ ID NO: 12266 - RNA, 77 nt, Homo sapiens
gcgccgccaggcccgcaggaccgccggagacagggcaaggcgccggccgagcccgggaaaacgacagcagcagcagg

SEQ ID NO: 12267 - RNA, 84 nt, Homo sapiens
gccaggcccgcgaacacacgccgccaccgggaggcccagggaagccacacgcacagacgccgggaccggaaagcagcaagcccg

SEQ ID NO: 12268 - RNA, 67 nt, Homo sapiens
cccacagaaaggagacgcaacaccaggacaacggcaagcggagaagagcaaggccgaaccgagagga

SEQ ID NO: 12269 - RNA, 88 nt, Homo sapiens
gccagaacaaccgggcgccgacgagacggggcgggacgaccccacaacccgagcgcccaagccccccgcgcagagggagaaggcaccc

SEQ ID NO: 12270 - RNA, 60 nt, Homo sapiens
gaaaaaccggggccgcggaagcacaaaacacgcgacggaagcacaaagcgggaagaacac

SEQ ID NO: 12271 - RNA, 74 nt, Homo sapiens
gaggcccaggagacgacaaagccccgccaagggccgcagaaagcaacaaagcgagagcacaagaaaacagcccc

SEQ ID NO: 12272 - RNA, 78 nt, Homo sapiens
ccggccacccagaagcacagagcgaggacaaccaccgagcaaacgacgagccaggaacgacagcgaaacagagaacgg

SEQ ID NO: 12273 - RNA, 80 nt, Homo sapiens
ccagcaagaacgggaacaaaaccgaaacgagagggagaacgaccgaacacagaccaggagcgggagaggaagaggacgag

SEQ ID NO: 12274 - RNA, 73 nt, Homo sapiens
ggacaggcaaaacgcgaacaacccacagaagcccaacagcgggaagaacaacgcaccccgaaagcgccacgaa

SEQ ID NO: 12275 - RNA, 78 nt, Homo sapiens
gaagggccccgcaacacaggaaaacagagaaagaaggaaggagggccgagaaaaagcggggaaggggggcaaaaaaaa

SEQ ID NO: 12276 - RNA, 68 nt, Homo sapiens
cagagaaccacgccaagcggcacagagaaacagacacaagacaccagcagaaaacgaagagacaaagg

SEQ ID NO: 12277 - RNA, 82 nt, Homo sapiens
gagggccgcccgcggaggagccgccgcgcagcccacgccggccaaaacggacaagccaaggcacgagccaaagaaacaaaca

SEQ ID NO: 12278 - RNA, 68 nt, Homo sapiens
accaagcaggaagcgccgcgggcaacccggcacacgcccccggcccgcccgggccagcgagacagacc

SEQ ID NO: 12279 - RNA, 74 nt, Homo sapiens
ccggcaccgcccgcgccaacagcccagccgcaggccagaacccgcagagccgaggccggcacggacccagcccg

SEQ ID NO: 12280 - RNA, 75 nt, Homo sapiens
ccccaccagcaccgacagggaagcacaggcacgggccagaggcaagcggcacagccggccccaacagccgacccg

SEQ ID NO: 12281 - RNA, 81 nt, Homo sapiens
gagagcccacagggcaaagagagcagacccgaggagcccgcaggccagcaacagaagaaagcaagcaccggggaaagcggc

SEQ ID NO: 12282 - RNA, 88 nt, Homo sapiens
aggaggaggaggagccgcagccacgccacacggccgggaggccgagggcgcagaagggggagaggcaccagcaacagaccaaccgcag

SEQ ID NO: 12283 - RNA, 71 nt, Homo sapiens
cgcgggcggccgccgcgccgcccaggcccggaccagcaacacagaaggagaaaaagacagagaagcagaaa

SEQ ID NO: 12284 - RNA, 63 nt, Homo sapiens
ggcccgagcggcgcggggacggcggggaccggaaacccgaagaggggagaaaaggaacaagaa

SEQ ID NO: 12285 - RNA, 82 nt, Homo sapiens
cgaccgccagaccccccagagcccggcggagggggccgagaacaggcccccccagggaccgcaggggaaggacagacggaag

SEQ ID NO: 12286 - RNA, 83 nt, Homo sapiens
gcaggcggggggcgcagaggacacgaggcggcgggcggagacaggaccgcggcgagcaaggaacacaccagcgggcacagcac

SEQ ID NO: 12287 - RNA, 74 nt, Homo sapiens
caacgccgacggaacgaggaggagccaggaaagaagaccagcgcccagggaggaagagagaagaaaagcaaggc

SEQ ID NO: 12288 - RNA, 80 nt, Homo sapiens
ggccgggggcagaccccagcccacaacccacgcgcaccggggacgcggcgcggcagccagccccccaccgaagaagaaac

SEQ ID NO: 12289 - RNA, 68 nt, Homo sapiens
cagggggagccaccccgcgggccgaaggcgcagcaaaaccaacaacgccggcgggcgaagccccccgc

SEQ ID NO: 12290 - RNA, 86 nt, Homo sapiens
aaccccaacacagagccaagcgccaaggcaccacaagccgaacagccagccagcaaaagaacagcagcaccagaagcagccagcag

SEQ ID NO: 12291 - RNA, 66 nt, Homo sapiens
cgaaaaaacgagacacaggaaaaccggagaagacagaggagccagaccaagagacagcacaggcga

SEQ ID NO: 12292 - RNA, 77 nt, Homo sapiens
ggccccaagcgggcgcgcgagggacgacggaggaccgaacgagaagccaacgccccggggcgcggcagcggaacccc

SEQ ID NO: 12293 - RNA, 86 nt, Homo sapiens
cccgagagaaccgcggcagaagccgagcaacaccccggccaccgacccacaagggagaagcccaccacgcaacgggacggcgcggc

SEQ ID NO: 12294 - RNA, 68 nt, Homo sapiens
ggggggacagacagaccggaggggaacagcagcgaaaggccgggcaacggcggagcagagcaaagaaa

SEQ ID NO: 12295 - RNA, 63 nt, Homo sapiens
gccaagccacagacccaggcgacaggagacaccccgacccagacaggagacccaacaccccag

SEQ ID NO: 12296 - RNA, 60 nt, Homo sapiens
cgcagcgcgggccgggacccagccaggcagaccccgggcagcagggagaagacgaacaca

SEQ ID NO: 12297 - RNA, 73 nt, Homo sapiens
gggcccaggcggcgagcgggacccagagagggaccagggccaaagaagagccggggggcaggcggacagcaag

SEQ ID NO: 12298 - RNA, 119 nt, Homo sapiens
ggaacaagaccaaaaggcaaacacaacccacggaacaccaccacagcccagccacagaacagccaaaaaccagcggccaaagcgccccagggccgccggaccgaagcacgcaaaagggg

SEQ ID NO: 12299 - RNA, 68 nt, Homo sapiens
cgagggcccccagccagcccgacagccgcaaaacaacggaaagccaggcacgccccagaccacgggca

SEQ ID NO: 12300 - RNA, 84 nt, Homo sapiens
aggagaagcgacgaggaaggcccccaagggacagacagggagacgcggcggcagcggagacgaaccagcggacaggacgccacg

SEQ ID NO: 12301 - RNA, 41 nt, Homo sapiens
agcccgggcacccgcggaccaggggggccggagaccacgac

SEQ ID NO: 12302 - RNA, 72 nt, Homo sapiens
aggaaggaagcccacccccagaagagcgcgcaaaagacccgaaccgggacccaccgggagcagagcaagaac

SEQ ID NO: 12303 - RNA, 76 nt, Homo sapiens
aaaaccaaagaggagccagaccagaccaccagcccagcaggccagggccaagggcacaggacaagaagggccagca

SEQ ID NO: 12304 - RNA, 86 nt, Homo sapiens
ccgcccgcccccgcggcgagccaaaccccaaaacccgcagccggccggcggccgggccgcagaagacgccagggcccgaaacacac

SEQ ID NO: 12305 - RNA, 74 nt, Homo sapiens
gaacaggggccagggaaaggagcagagagagagagcagaagcgagaagaagaaaagaagagagcgaggagcggc

SEQ ID NO: 12306 - RNA, 80 nt, Homo sapiens
acaagggaaaccacaaggaccaaacaccaaaacaggaaagaaacgcggcaagaaagcgacccgagggccaggaacagaag

SEQ ID NO: 12307 - RNA, 76 nt, Homo sapiens
cgagagcgcgaaacgcacgagaaggaggaaaaaagcagccaagcagcagagaacgagaagcaaggaaggaagagga

SEQ ID NO: 12308 - RNA, 75 nt, Homo sapiens
ggaaagagcgccccagaccacccgacagaccagaaaccacccagagcaaagaagccacaaaagaagacccaaagc

SEQ ID NO: 12309 - RNA, 78 nt, Homo sapiens
ggcaacggagaggcacaggaacacgaggaaacccacgggaggagacaacaggagccaccggacagggacgagagaccg

SEQ ID NO: 12310 - RNA, 73 nt, Homo sapiens
ccagcaggaaggccaccgagggaacccgaccggacccagccccagaaggacccaaaagcccacgccgcagggg

SEQ ID NO: 12311 - RNA, 66 nt, Homo sapiens
cagaagcaaccaaaaggaagacgggaacccggcgcaaggacaacggcaagcggagaagagcaaggc

SEQ ID NO: 12312 - RNA, 53 nt, Homo sapiens
aaggggcccagagacgggccggacacaagagggcaagaaaggcgcgacgggcc

SEQ ID NO: 12313 - RNA, 72 nt, Homo sapiens
cgagaggaaagaggagccagagaagcgccaaagggacacggagaaggcaagagaccaaggggagagcgcggg

SEQ ID NO: 12314 - RNA, 77 nt, Homo sapiens
cacaacgcaaggaaagaggacgcaaagcagacagcccaacagggagacggagaaaccgaaacacacaaagcaacgaa

SEQ ID NO: 12315 - RNA, 75 nt, Homo sapiens
gggcgcaaacgaaccgaaaaggagggcagaaagcaccccaacgcaggccgcccagagccgacacgcagaagcagc

SEQ ID NO: 12316 - RNA, 86 nt, Homo sapiens
gaagaccgagcccccgaaccgcaaagccccagaggacaaccaccccaggacaggagcagagacaggccggacacaaccacaaacga

SEQ ID NO: 12317 - RNA, 80 nt, Homo sapiens
gggaaggcggggcgacccggggggcgcgcccagagccccgcgcagcccagggaaggcgagccagaaacccgaaacgccca

SEQ ID NO: 12318 - RNA, 66 nt, Homo sapiens
agccccagccggagaaggagcccacaacaaccacagaaagggccgaccacccaggcggacaggcgc

SEQ ID NO: 12319 - RNA, 66 nt, Homo sapiens
cggccccggcccacaggggggggcaaacccgagagaacggccaccagggaaaaacagagaggaaca

SEQ ID NO: 12320 - RNA, 85 nt, Homo sapiens
gcaaccagcagaagaaaggacggagaccgcccaagccccaagaaaaggcgacggcggagacagaagagaggagagcccacaaacg

SEQ ID NO: 12321 - RNA, 82 nt, Homo sapiens
cgcgaccacagaccaacccccggcagggagaaggaggaggaggaggaagccaagaacgggagcgaagccacgcagcggcacc

SEQ ID NO: 12322 - RNA, 78 nt, Homo sapiens
ggagcacaacccgaagcggccggaccggaacagggcgggggaaagaccaccccagaacaggcccaagggggacccaga

SEQ ID NO: 12323 - RNA, 50 nt, Homo sapiens
cagacaacggagaggaaagcaggcagcaaggcaggacacaaagaaagcaa

SEQ ID NO: 12324 - RNA, 74 nt, Homo sapiens
cggcgcccccgccccgggaccgcggggagggcccgcgagaggcgcgggacaaccaacacaaccaaagagaagaa

SEQ ID NO: 12325 - RNA, 59 nt, Homo sapiens
ccgacagccgcagaacgacccaaagacaggaccacgcaccagcagagaaggaaagcaaa

SEQ ID NO: 12326 - RNA, 73 nt, Homo sapiens
cgcaaacagcccacaaagcggaccaagcggcccagaagaggccacaaggaagaagcagcagcgccaaggaccc

SEQ ID NO: 12327 - RNA, 80 nt, Homo sapiens
gcggcggcggcccccgccggcggcgcgcccgggggcccggcggcccccagggaaacacacagaagaccgcagaccaaggg

SEQ ID NO: 12328 - RNA, 74 nt, Homo sapiens
cgagacgaggcacgccaggccccggccagaaggaccggcggacacgagggcccggcagcgccaggagccgagcc

SEQ ID NO: 12329 - RNA, 42 nt, Homo sapiens
gcgccgccacgccgcaggaggcggagaggggcaccggcccag

SEQ ID NO: 12330 - RNA, 60 nt, Homo sapiens
ggaagaacgccgccaccagccaccaccaagggcccccaagccggcaggggaacgaggagg

SEQ ID NO: 12331 - RNA, 79 nt, Homo sapiens
caagaaaaagccagccagaagaggcgcgcgcgcggcacaccgggcggagggggcagggcagaaggaccaggggcgacga

SEQ ID NO: 12332 - RNA, 96 nt, Homo sapiens
ccgccggcgcgggaaacgggcgaagcgacgagccgcgaggaggagaaggggacaagagaaaagcacgaagcgggacaagcccagcagaggaaaaga

SEQ ID NO: 12333 - RNA, 47 nt, Homo sapiens
gccgcggacacaggaggcaagcgccaggaccgcggggggcgagccgc

SEQ ID NO: 12334 - RNA, 83 nt, Homo sapiens
acggcgcgcgcccgaggcgaggaggagcgcggcggagcgggccccgccgcagcccggagaggcgggaggcaccgccggaagcc

SEQ ID NO: 12335 - RNA, 80 nt, Homo sapiens
cgccggagggccccccgccgggcccgcagcgcgcaccacccagggccagaaacagacagcgcccacaggcagccgaagaa

SEQ ID NO: 12336 - RNA, 67 nt, Homo sapiens
aaaccggcgaagagacccgaggaaggcggcgccaccagagcagaaggaaccgagcaaaagagcagac

SEQ ID NO: 12337 - RNA, 81 nt, Homo sapiens
gacggcccggaaccggcaccagggagcgggggagacacagaaagagaccgggagcgaagacgaaagcgcgcgcgcagggag

SEQ ID NO: 12338 - RNA, 77 nt, Homo sapiens
ccgcgagccaggccggcgccccccgagcgcagaccgcggccgcaggggcgcgcgcagccagccccaggccgcgagcc

SEQ ID NO: 12339 - RNA, 84 nt, Homo sapiens
gggcaaccgcggggcaagcgggccacgcacccgcaccaaggccaaggcacacagaggagaccgcccggagaacaggaccgacaa

SEQ ID NO: 12340 - RNA, 77 nt, Homo sapiens
cagagccccacaacaccaagcagcagcaaccacgacccgcccaagagccaagggaaacgcacggacagagaacagac

SEQ ID NO: 12341 - RNA, 82 nt, Homo sapiens
gcggaggagggccgggggcaagccaaaccaagagggcccggaggagaaacgagcagaggagcgagaccgaggggacgaaccg

SEQ ID NO: 12342 - RNA, 79 nt, Homo sapiens
caaagagcaagccaaccaagccaggcacacaggaacgaacgaagacagccagccccagaacgagcgcgcaagcccaccc

SEQ ID NO: 12343 - RNA, 32 nt, Homo sapiens
cccgcgggggacgagccagcgggccggcaccg

SEQ ID NO: 12344 - RNA, 87 nt, Homo sapiens
acgaaaacgagccccaccaggaaccgaagggaaacagagagccagaaggaagacaagcgagccccccccggggccgcaggagagggc

SEQ ID NO: 12345 - RNA, 73 nt, Homo sapiens
ggccaggaaaaaaggagcaagaaagcaaaggaacaacacaccaccaccaagaaggaggacgggccaccgcacc

SEQ ID NO: 12346 - RNA, 57 nt, Homo sapiens
cccaaaaggggggaaggaagccggagcagggcagacagccgcacgagaaccacccaa

SEQ ID NO: 12347 - RNA, 70 nt, Homo sapiens
ggcaaaacagggaaggcccccaggagaaggaagccaacaccggagccagaaagccgaacccacggccaga

SEQ ID NO: 12348 - RNA, 73 nt, Homo sapiens
agaaccaggaagagccagacagcaacgagggggaaccaagggcggacagcccaacgacaacaaagaagccaac

SEQ ID NO: 12349 - RNA, 75 nt, Homo sapiens
ggcccaagggaacacagcacgagaccccccgcgagagcgcaaacacccccagacaaagccggcccaggccgggga

SEQ ID NO: 12350 - RNA, 74 nt, Homo sapiens
acgggcagggaacagcggacaagaagaagacagaacgcccccaccaccgcaaacagacaggacacgggccccaa

SEQ ID NO: 12351 - RNA, 73 nt, Homo sapiens
cccaaagacgcaagggggagaaacaacccccgcccggggcgggacccagggaaaggaaagggccgagaaagaa

SEQ ID NO: 12352 - RNA, 43 nt, Homo sapiens
acgcggggacagcccccgagggagaaacggcagcggcagagac

SEQ ID NO: 12353 - RNA, 114 nt, Homo sapiens
ggagaagaaggcggggggcgggggaggcgagcgcgccgcccggagccgcgcacacgaccgccgcaggcggcgggcacggaaacaccccagcgcaccgcggggacaggagggaga

SEQ ID NO: 12354 - RNA, 95 nt, Homo sapiens
acacgaagaacggacacgaagaaccacaagcaagaaacacaggagcccggaggaagagggcgagaaggaaagaggccaaagagaaagggggcggg

SEQ ID NO: 12355 - RNA, 72 nt, Homo sapiens
gagaaggcaggcaccacaaaaaggacagaacagaaaaccaggaccgcagaggacccaggagcacaaccgaac

SEQ ID NO: 12356 - RNA, 56 nt, Homo sapiens
gcacggcccgagcgggggcagccgcagaggcgcggaaacagaacgacagcccgcac

SEQ ID NO: 12357 - RNA, 69 nt, Homo sapiens
aaagcagcggcgcagcccggggagagaaaacggaccagacgacgcaagccggaggaacaaacccagaac

SEQ ID NO: 12358 - RNA, 59 nt, Homo sapiens
aaacagagaggggaaggagcccagcgacggcacacggacggcagcaggggccagcagcc

SEQ ID NO: 12359 - RNA, 89 nt, Homo sapiens
ggaaaaggcggacgggaaggcgggagacgagaagccgaaaagcgcagcgagcggagccgccggaggcgggggagcgggaggagccagag

SEQ ID NO: 12360 - RNA, 70 nt, Homo sapiens
cagcgggaacagggccgcaccacacccggggccacagaccgagaaggccggagacgaaaaacagcaagca

SEQ ID NO: 12361 - RNA, 77 nt, Homo sapiens
cacggggaacgcagggcagagaggagcaaaaaaggaacaagacagaaaaacaacgaccaaaaacacacggaagcaca

SEQ ID NO: 12362 - RNA, 80 nt, Homo sapiens
gcgccagaccgcgacaggcccgaaaaaaacccaggcggcccaggcgagcacacaagaaaagaacagaacagccaggcccc

SEQ ID NO: 12363 - RNA, 74 nt, Homo sapiens
cccggaccggggacgcacggaccaaaaacccgcaacagcccccgcccaagagaggagccaagcccaacgggacg

SEQ ID NO: 12364 - RNA, 89 nt, Homo sapiens
cgggaccccgccgccgcacaacccgaggacaaccaccaccagcgagcaaaagaacaaagaccaagaccaagaagcgccccagcggcaac

SEQ ID NO: 12365 - RNA, 79 nt, Homo sapiens
cacgcggccagcgaaaacgcccagaacagaaaggaccaagcgggcccgagacaagcggccgcacaccaaggcagcaagc

SEQ ID NO: 12366 - RNA, 79 nt, Homo sapiens
cccgggagacccaggcgggacagagggagccaggcagaggaggcagcacggcaggagacgaggagaggacagcaggaca

SEQ ID NO: 12367 - RNA, 72 nt, Homo sapiens
accaaaggaccgccccgggaggcaccgagaggaaaggcgagggaagcgccggaacagagaagcacaccgaca

SEQ ID NO: 12368 - RNA, 79 nt, Homo sapiens
aggcgcccccgagaccccgcggaacgcccaccgcggagagcagcacgaccccagcacagaaaccccaaggcgcagacac

SEQ ID NO: 12369 - RNA, 87 nt, Homo sapiens
gcggaaggggggggcggcggcacgccggcggggaccgcgggaaggcgaggacgaggacgaggacgcaagggggcggggacaggacgg

SEQ ID NO: 12370 - RNA, 58 nt, Homo sapiens
ccgcacaagaggacagcccagccaaggcgagcaggccccgggaccaaggacacgcaga

SEQ ID NO: 12371 - RNA, 74 nt, Homo sapiens
agccaaagaagccagccccgaggccgaagggcaagagggcacagaagacggcgccccacacacggcccacacgg

SEQ ID NO: 12372 - RNA, 55 nt, Homo sapiens
cgcaggacgcgaacccgccacgcggccgacacaaggggggcccccggagagacag

SEQ ID NO: 12373 - RNA, 65 nt, Homo sapiens
cgaacgcagacgaaggccacagaagacgacggacagagagacacagggaggggaacagaccgagg

SEQ ID NO: 12374 - RNA, 76 nt, Homo sapiens
aggagcaacggcgcacagaaaaagaagaggcccaccagacagagaccagaggggaccacaaacaggcccaccggag

SEQ ID NO: 12375 - RNA, 56 nt, Homo sapiens
gccggccaggggcggaaacgggggaccacacgccaaaggcacggggcaagccacag

SEQ ID NO: 12376 - RNA, 79 nt, Homo sapiens
agacgacgaacgcgccccccgccggagcgcccagccaaacgcaagcacggggagagggggagacccggcaagggagaac

SEQ ID NO: 12377 - RNA, 77 nt, Homo sapiens
acccggacaaccagaggcagccagcagggggaggagccgggaaaccgaagaaggcagagaaggcaaacaggaggcgc

SEQ ID NO: 12378 - RNA, 69 nt, Homo sapiens
aaagaagaggggaaacaaaccggagaagagggggaggggggcgaaaccgagcgcggggcagagaaacac

SEQ ID NO: 12379 - RNA, 86 nt, Homo sapiens
aaggccaagccgccagccacaagccacgaggagggagaaccgaggagcagccacaagggacgagggcagcagacaacaccacgacc

SEQ ID NO: 12380 - RNA, 85 nt, Homo sapiens
gccgcggggcgcaggaggcgggcacagcgccaagacaagcaagcggagcgcaagaagccaagaccgccaaaggagaaaggggcaa

SEQ ID NO: 12381 - RNA, 82 nt, Homo sapiens
ccagaaaccgccccagcgaggaagaggacaggagcggagaggcacacagaggagaccgcccggagaacaggaccgacaaagc

SEQ ID NO: 12382 - RNA, 74 nt, Homo sapiens
gaacccccagaacaaccggaaacgcaaggcagaaagggcgggcagcagcggcgcacaaaagcaggaaaggcagc

SEQ ID NO: 12383 - RNA, 71 nt, Homo sapiens
cgccaccaaggaagaagagcgccaaaagacaggaccaagggcccggccacaggaggggcgccaggccgggc

SEQ ID NO: 12384 - RNA, 108 nt, Homo sapiens
aaaagcagcccgccacccagagacacccccgaaaccacccccaggggagaggaagagaagcagagagagagaccagaaaaaccggaagacccgagaaccagacacaga

SEQ ID NO: 12385 - RNA, 81 nt, Homo sapiens
gccaagggaaaaagaaaggaacagaaacaagagaggaacggagcaagaagcgacacaaggagaaaagaggaaaaacaggga

SEQ ID NO: 12386 - RNA, 72 nt, Homo sapiens
gcgcaaaggaaggccccccgccagaaaaaccgaggccccccagcccgcggaacgaagcaaggaggggggaag

SEQ ID NO: 12387 - RNA, 80 nt, Homo sapiens
cgagggcgggccgaggcggaaagggggcagggacaaacaaccaccccagcggcacgagcagcagagcaaccagagcacag

SEQ ID NO: 12388 - RNA, 72 nt, Homo sapiens
gcggaacacacagcaagccgccgggacagccacgacggcaggacgccgccacacaacgcaagggaggcagaa

SEQ ID NO: 12389 - RNA, 77 nt, Homo sapiens
cccccagggagggaacaaagcccacagcaccgacgccggcagaaaccaacggcaagagaggcgacgcacacgagacg

SEQ ID NO: 12390 - RNA, 71 nt, Homo sapiens
ggacgggcgcccagccaggggcaagaaaggaccccgcaaaagaacaagaagccagaggaggggaaccgacg

SEQ ID NO: 12391 - RNA, 84 nt, Homo sapiens
cggacgggcgcggcggggacggcgcccgcgccaccaccggcgaagcgcgcgagcacagacccaagggcggggaagaccgagccg

SEQ ID NO: 12392 - RNA, 85 nt, Homo sapiens
aagaaccgcgggaggacggagagaaggcggcgcgggagggaaggcgcgggccgcacaaacacgcagaggcaagaagagaggcagg

SEQ ID NO: 12393 - RNA, 77 nt, Homo sapiens
aaaggggccaccccacacgggagaggacaggagaccggaacaggggagagaaggcgcgcaggagagcgcagagaccc

SEQ ID NO: 12394 - RNA, 69 nt, Homo sapiens
gagcgccaacgaaccgaggggggggagaaaggaaagaccacagagaagcaggcgaccaggcgcgcgggc

SEQ ID NO: 12395 - RNA, 81 nt, Homo sapiens
gacgaacaggagaacccccagcggagcgcaaggggcagccgaccgaagaagcggggccaaggagcggagaaggagcgaccc

SEQ ID NO: 12396 - RNA, 63 nt, Homo sapiens
gacgcagggcgcccccgggggacggaagcacagagagaaggaaagccagaaggaaagaggaaa

SEQ ID NO: 12397 - RNA, 73 nt, Homo sapiens
ggccaacccaggaggaggagaaaagaaggcaacaggccaggggcgcccgcgcgaagacagagccccaagaacg

SEQ ID NO: 12398 - RNA, 77 nt, Homo sapiens
ggcagccacgccggaggggaaggcgaggaaagagcaggagcgaccgcccacacgccggcccgagcaaaggacagcgg

SEQ ID NO: 12399 - RNA, 39 nt, Homo sapiens
aacacagagccaagcgccaaaacaaacgaggcgaaggcg

SEQ ID NO: 12400 - RNA, 78 nt, Homo sapiens
ggaggccgcccagaagcggcgcgcacggacgcggagaggggagccgcagaaagacaaggccccagcagcaggcaaagg

SEQ ID NO: 12401 - RNA, 77 nt, Homo sapiens
cagcaaccccacgcgcgcacggacagcgagcgcgggccccgcaggccccccagaaaaagaacggggacacgcgagac

SEQ ID NO: 12402 - RNA, 71 nt, Homo sapiens
ggggagaaggcaggcaccacaaaaaggacaggccaaaacagaagaggcaaagcccagccacagcagcagcc

SEQ ID NO: 12403 - RNA, 41 nt, Homo sapiens
ggagaggaggagccgcgggccggcggaggcaaggcgggacc

SEQ ID NO: 12404 - RNA, 37 nt, Homo sapiens
gacggcaggccagcgcggccccgagacaaggccccgg

SEQ ID NO: 12405 - RNA, 84 nt, Homo sapiens
ggcggcaaggcccaagcaccggagagcaaccgccgcagccagcggccaccagccggacagcaaggaccagcaaaaggaccggac

SEQ ID NO: 12406 - RNA, 79 nt, Homo sapiens
cccccaaagagagaaccggagagcacccaacaaggagaggagacgccggagcgggacgaccagagaccgagagcggcgc

SEQ ID NO: 12407 - RNA, 73 nt, Homo sapiens
acaagaccaaaaaggggggacgcgcagaacaaaagaaccagcacaggcaagaccaacaggggaaccaaaggac

SEQ ID NO: 12408 - RNA, 75 nt, Homo sapiens
ggaaccaccgcccaaagagcgccgcccggcgggcgccgggagccgccaggaacccccaagacccccgcccggcca

SEQ ID NO: 12409 - RNA, 77 nt, Homo sapiens
cgacgcccgccggcacgaagccgagccaaaggcaagcagaagaggaacagaagaagcagagcagagacggagcagca

SEQ ID NO: 12410 - RNA, 81 nt, Homo sapiens
cagagcagcgccaagaacgagcaggagcgagagagccgccggccgacgagacacgccggaggaaacagacgcacgggaaac

SEQ ID NO: 12411 - RNA, 41 nt, Homo sapiens
ccgacagccgcagaacgaccagcagcaggggccaggacagg

SEQ ID NO: 12412 - RNA, 80 nt, Homo sapiens
cacagaaaggcgcaaacacggaacaccagacaagcaggcagaacaagaagaggaccacaaaagacaacaaacaagcagaa

SEQ ID NO: 12413 - RNA, 79 nt, Homo sapiens
cacagaaggaagaaaagccaggcaaggggcagcgagaggaagaaaggacacaaagcagaagaaaagccacaaacagaag

SEQ ID NO: 12414 - RNA, 78 nt, Homo sapiens
gaccaggcggggcgcaggcagcaaagggccgcgacagaaaggagagccagcaaaggggaaaaggggaggggcacaagc

SEQ ID NO: 12415 - RNA, 87 nt, Homo sapiens
ggaacaccccaacgggagacaagaagacgccaacgagcggcgcggacggcgcgcggacaccagacggacaacacaagaggaagggag

SEQ ID NO: 12416 - RNA, 60 nt, Homo sapiens
aacagaaagagcaacagcagggcaacaggaccaacggccaaccgagcgccgcaagcggac

SEQ ID NO: 12417 - RNA, 109 nt, Homo sapiens
ggaagaggcccgcccggcacgggcggcgggcccggggacgcgcgggagccgccccccaagacacgccaagagaaagaccagaagagaaggcaaaaagaaggaagagaaa

SEQ ID NO: 12418 - RNA, 79 nt, Homo sapiens
gcagccacgccccccggaccgccgcagccgggcccggggccgacagccccccaggaaggagggccccggagcagccaca

SEQ ID NO: 12419 - RNA, 87 nt, Homo sapiens
gcagcgggcccgggagcagaagcggcggcggcacgacgcccagcagcgcagcagccaagcgccggagccagccagaaccagaaaagc

SEQ ID NO: 12420 - RNA, 82 nt, Homo sapiens
gagaaggcgaagcaccacgcagaagggcgcagcccaagcgacaaagaacggcaccagggcaggagggcgaggccagcaggca

SEQ ID NO: 12421 - RNA, 81 nt, Homo sapiens
ggggcaggggcagccgccagcccaaacaggcggcacaggagcaggggaaggagacgggcaggagcgagccacccggaacaa

SEQ ID NO: 12422 - RNA, 74 nt, Homo sapiens
cacagcgacaaccggcgaaccacaggagaaagcaccagacaagggcaaaaaaagacccagaagcccaaccaagg

SEQ ID NO: 12423 - RNA, 51 nt, Homo sapiens
aaagacgggccgccgaagaaagcggaggggccaggcccagggggcgaaagc

SEQ ID NO: 12424 - RNA, 73 nt, Homo sapiens
gcagagggaacgagaagacagcgcggacagaaccacacagacggaacggaggccgggcgcacacacaaagggg

SEQ ID NO: 12425 - RNA, 78 nt, Homo sapiens
ggggaagggaaggcggagcaacggagagagagcacagggaagaggacgacacagaacagagaaacggaaccggacgac

SEQ ID NO: 12426 - RNA, 78 nt, Homo sapiens
gaacagcgagcggagccggcaggaaggggaccgggcggcggagcggcggaagaaggcggcagacgcagacaaacaaaa

SEQ ID NO: 12427 - RNA, 72 nt, Homo sapiens
ccaccagagagagagccgagaacggacggcaaaagccgaccccaagaggcacaggcggaagaggaggagacc

SEQ ID NO: 12428 - RNA, 71 nt, Homo sapiens
gcgaacagaggcagaacaagcgaccaggcacaggaccagggcccgggccacagcgggggggcacggccggc

SEQ ID NO: 12429 - RNA, 78 nt, Homo sapiens
gaaaagaagcaccagaaagaggagcaccaggacaaagaacagagagacgacgcgagaaccggaacgggagaaagaaga

SEQ ID NO: 12430 - RNA, 60 nt, Homo sapiens
caggagggggaagggaaggaaagcccagaaaccggaagaaagcacgaccaagagggaagg

SEQ ID NO: 12431 - RNA, 52 nt, Homo sapiens
ccaccggccgggagggcccagggcggggcccgagaaacaaaccgagcagcgg

SEQ ID NO: 12432 - RNA, 86 nt, Homo sapiens
aaagaagcacagaagcaaaagcgcagcaaagcgggaagacaaaaaacgcacaaggcagagaagccaaggaaagcagacccgaagac

SEQ ID NO: 12433 - RNA, 59 nt, Homo sapiens
gaaaaccccgagaggacgaaggaaggacggccagagaccccagccgcaccgaccacagg

SEQ ID NO: 12434 - RNA, 71 nt, Homo sapiens
aaaacaggagaagaaagcaaggcgggaaccgagaaaagcccacccagcacgcgaaggcggggaaacgccac

SEQ ID NO: 12435 - RNA, 59 nt, Homo sapiens
gggccaccacacgcccaggcgcccagaggagaaggcagagcccccccaggcagaagccc

SEQ ID NO: 12436 - RNA, 81 nt, Homo sapiens
agaagacacgagcacaaacgggccaaccgccccccagcagcaggcacgggcgaaccccgagccccgccccacgcccgccgg

SEQ ID NO: 12437 - RNA, 99 nt, Homo sapiens
gagaagacagcgcggacagaaccacacagacggaacggaggccggcgagaaaagccgacgcaagagggaaagcggagcacagccccagcgggaaaggac

SEQ ID NO: 12438 - RNA, 81 nt, Homo sapiens
cacaggcacagaaggccaaaaaggcaaccacagagagagagagggagggaaccacggagcaggacccaggcagaggaggcc

SEQ ID NO: 12439 - RNA, 81 nt, Homo sapiens
gccgaccccccggcgccgcgccggcggcgaggcacagggccaggcacacaacgagaccacggcccaaacaacagggcaaag

SEQ ID NO: 12440 - RNA, 77 nt, Homo sapiens
acggcgaaggagcggaaaccgagccagggcgagccggcgacaacagagacgaaagcccgaaaacggacaacccccgg

SEQ ID NO: 12441 - RNA, 74 nt, Homo sapiens
ccccaacccacgagaggacagcccagcagaccagccagccccaagcagccgcacgacaaagaacgaagacaaga

SEQ ID NO: 12442 - RNA, 57 nt, Homo sapiens
ccaaggcggacgcggcgagaaggagaagagagcggacccacaccagggaagacaggg

SEQ ID NO: 12443 - RNA, 84 nt, Homo sapiens
ggagacaagggccagcaggggaggcaacggaaccggggaacggggaggacagccccgagagcgccagagggacccacaggacca

SEQ ID NO: 12444 - RNA, 85 nt, Homo sapiens
gggagccgagcccagcaggaagcagaccccgaaaaccaagccgaggacgcggggccgggccacgcagagacacgagaaacaagaa

SEQ ID NO: 12445 - RNA, 63 nt, Homo sapiens
acccagagacggaggaaacccgacagcaaagaggacggaagcaaagggcagccaccgaagaca

SEQ ID NO: 12446 - RNA, 78 nt, Homo sapiens
cccgccggaagagcgccacagagaccacgcaggacagccggacgaaccaggccgggagaccaccgaggaacacggagg

SEQ ID NO: 12447 - RNA, 72 nt, Homo sapiens
ggggaaccagacgggcaaggcacacccccaagcgcggggcccccccccggcgcgggagcgacagacggccgg

SEQ ID NO: 12448 - RNA, 57 nt, Homo sapiens
ccaaagaagggagagagaaccagcacggagcaacagccagaggaaaaacaagacaag

SEQ ID NO: 12449 - RNA, 70 nt, Homo sapiens
gaagcgcgggaagggaaaagcccaagagaacgaaagcacagaaaacaacgccccaggaccgcagaggggg

SEQ ID NO: 12450 - RNA, 82 nt, Homo sapiens
caagaaggagaacaaaagcaaagccccagacggacgccagagacggacacgggaaaaagacacaaagagagcacaaagagcc

SEQ ID NO: 12451 - RNA, 60 nt, Homo sapiens
ggcagaggagaccgccgccggccacacccagcggagaccggcccgagggcgaaccgacac

SEQ ID NO: 12452 - RNA, 67 nt, Homo sapiens
ccggcagagcagaacgaaacagccgaagcggggaaaacgcgaagcccagaaggagcacagcagccca

SEQ ID NO: 12453 - RNA, 74 nt, Homo sapiens
cggcgcccccaagaagccgggacaaggagccaggcggcggcccgcgcgggggcccggaacagcaggaaggagaa

SEQ ID NO: 12454 - RNA, 74 nt, Homo sapiens
acaccggaaagcgaacaaaagaggaaaaccaaccgcacccgcgaacgaggcaccaggaaaagggaacaaaaaga

SEQ ID NO: 12455 - RNA, 84 nt, Homo sapiens
gcaggccgcgacgagggcgcgagccagaaaccccgagcgcgggaaagcacgcggggccggccggcgaagccacccaaccgacgg

SEQ ID NO: 12456 - RNA, 60 nt, Homo sapiens
cccagacaacaggcaggggaggaccagcgggaacccaggccgcacagcccagggacgaaa

SEQ ID NO: 12457 - RNA, 79 nt, Homo sapiens
ggcaccgggccaccgccgccaggcggacaaaaggaccgacccaaccgaagaaagccaaaagaaaaaaaacaagaggaaa

SEQ ID NO: 12458 - RNA, 83 nt, Homo sapiens
gcacaagccaaagggcccacaggagaagagcacagggggcgacaagacaggaagaaagaagaggaacaaaaggaccagcagag

SEQ ID NO: 12459 - RNA, 87 nt, Homo sapiens
ccgccgccagagcgagcccgcagagccggcacccgggacccagacaggagcgcgggaagaagccggcccggggccgcggacgaggac

SEQ ID NO: 12460 - RNA, 53 nt, Homo sapiens
ccacacagacccacggggggacccacaagaggaagcggagaccccggaggccc

SEQ ID NO: 12461 - RNA, 54 nt, Homo sapiens
cagagcaaccccaggcaaagacaacaggcacaaagagagaaggaacacccacag

SEQ ID NO: 12462 - RNA, 36 nt, Homo sapiens
ccggcaggaagacgaacgggggacgcccaaaaggga

SEQ ID NO: 12463 - RNA, 54 nt, Homo sapiens
cgccagcgaaggggaaagagcacagggccggcccagggagaacgcaaaaccacc

SEQ ID NO: 12464 - RNA, 52 nt, Homo sapiens
acccaaaagccgacaaccccagaaacagggcccagacccgggaccagccgga

SEQ ID NO: 12465 - RNA, 73 nt, Homo sapiens
ggaaaagggaaggacaaggaaacaaacacaaacggggcacacaagccgaagccaacacgcccagaacagcgga

SEQ ID NO: 12466 - RNA, 76 nt, Homo sapiens
gcgcgagcgcccggggcacgcccgcggccgccggacggccgggcgcggaggccgcggggggcagacaaccacgcgc

SEQ ID NO: 12467 - RNA, 77 nt, Homo sapiens
gaaaaccggcaaaaaagcaggggagaagggaagcgccaagaagcaacaagcacaggaggagacagcacgcagccacc

SEQ ID NO: 12468 - RNA, 64 nt, Homo sapiens
caacgggcgccgggagcggagaacacacagcggggggggcacagcaacgaggacgcaaaacagg

SEQ ID NO: 12469 - RNA, 71 nt, Homo sapiens
gacaagcaggggggagaaccagaacaccaacagaagcccacagggacacaagcaggcaccaccacagcaaa

SEQ ID NO: 12470 - RNA, 66 nt, Homo sapiens
aaccacgaagcccaagaagccacaaaccccccgccggaccaccaagacggagccaagaccgaagaa

SEQ ID NO: 12471 - RNA, 67 nt, Homo sapiens
gaagacccagcgagcgaagcggaaccggacggaagcccgcgcagccgccagcgagggccacgcagcc

SEQ ID NO: 12472 - RNA, 63 nt, Homo sapiens
cagccgacgaaccacggaggggggaggggaacagcagcggagaacacggcagagacaaaacgg

SEQ ID NO: 12473 - RNA, 84 nt, Homo sapiens
agaagcgcagccgcaccggccaaggggggaaagaaaaccagaccaccgcccaaggggaaccagggaaggaagaaccaagaacca

SEQ ID NO: 12474 - RNA, 62 nt, Homo sapiens
gacaaaggcaagaaggcggagaggcacacagcccggagcccggcgagggggggaagagggac

SEQ ID NO: 12475 - RNA, 63 nt, Homo sapiens
agcccggcaccccccgccgacaaggaggggcggagaacggaaaagcaccaggaagcagagagg

SEQ ID NO: 12476 - RNA, 82 nt, Homo sapiens
ccgaacccgggaaaagaggaacaaggcggaggaacgagacgcgaaccaggcgagagcgggcgcggcacaggggagccggaaa

SEQ ID NO: 12477 - RNA, 75 nt, Homo sapiens
aggaaccgccccaagaggagagaaggcgcgggaccgccccgcggcccagacgggcacgcaggcaggacccccaca

SEQ ID NO: 12478 - RNA, 72 nt, Homo sapiens
gaaacccgccgccgcgcagacggagcccaggcggacagaggacgaagcccagagcacaacccaaaggaaccc

SEQ ID NO: 12479 - RNA, 60 nt, Homo sapiens
gacaaccccgcacgcaagcggaaaccaggcgagggaaaaagcgggaggaggcgggccaga

SEQ ID NO: 12480 - RNA, 43 nt, Homo sapiens
gccagaaacagccagagaaggggacaccacgccagcgcaaggc

SEQ ID NO: 12481 - RNA, 69 nt, Homo sapiens
agcccaggcaacaaaagcgaaggaggccaaagagaaagagaaaggagagcaagagaaccgggcagaagc

SEQ ID NO: 12482 - RNA, 78 nt, Homo sapiens
ggcaaaaaagaaacgcaagcacaaaaggaggaaggacgcgcgcagggcggcgacggcggcgcgaggaccgaccgggcc

SEQ ID NO: 12483 - RNA, 80 nt, Homo sapiens
cgccaaccgcagggacgcgccaaggccacggccgagagcgcccaaaggacgcggaacagcaccacggccaacaccggcca

SEQ ID NO: 12484 - RNA, 71 nt, Homo sapiens
gaccaagagggaaaggagccagacccaggacccggccccgccgccggggcgccacggcaagagggaacccc

SEQ ID NO: 12485 - RNA, 88 nt, Homo sapiens
cagccccgccgagccgccaccgcaggcgaggacggcggaccccgcggcgggaggagccgccccgaggcccgaaaaagcccaagacagc

SEQ ID NO: 12486 - RNA, 89 nt, Homo sapiens
caggagggacaagaccggaccagccagaggacgcgggccgaggagagcggaggaggggcgccagcaaagcacggacagagaaggaggag

SEQ ID NO: 12487 - RNA, 87 nt, Homo sapiens
ccaccaacaccgcagccgcagcggacggcaggcccgagggcgagggcggcacccaccccccgagcccgcccgccggccccagccccc

SEQ ID NO: 12488 - RNA, 65 nt, Homo sapiens
gagaccgcagagacagccaacacggcacccacagacaccgaaaacgagaaacgaaagagacacgg

SEQ ID NO: 12489 - RNA, 74 nt, Homo sapiens
gcgccccgcgcggaagaagcggcggccagggaccaaggccgcgcacaaagacaccaaacgcgaaccagcaggcg

SEQ ID NO: 12490 - RNA, 68 nt, Homo sapiens
gacaccgcacgcgcacggacggcacagcccgccgaacccgaaaggaggaaaaagacaagggcagagca

SEQ ID NO: 12491 - RNA, 77 nt, Homo sapiens
gcagaacccggccccaaggacaagagaaagcgcgcaaagcggaccaaaaccagggggcaagaaacccggccgcgaga

SEQ ID NO: 12492 - RNA, 75 nt, Homo sapiens
ccacaaaggaaacccgagagacagcacccccgggggcgcaccaaggggcgggcccgcagggcagggcccccacgc

SEQ ID NO: 12493 - RNA, 74 nt, Homo sapiens
cgaccaacccgcggaggcaaccacgggagggagaaggggacccccccgcggcaggaacgcacccggcggcccca

SEQ ID NO: 12494 - RNA, 80 nt, Homo sapiens
accaccacacacggagcggaaccaggcagaagccccagaggagcccgaaacccccaggcgggcaggaaggagagccccag

SEQ ID NO: 12495 - RNA, 75 nt, Homo sapiens
gcaacccaccgccagcccggaggagccccagcagaagcccagcggcaaaaaccagaaaccagagacgaccacaag

SEQ ID NO: 12496 - RNA, 73 nt, Homo sapiens
cgaccgaaggcgacaacaagaggcaacagaacggcccacccccgagccagccccaagcagacaccacggcccc

SEQ ID NO: 12497 - RNA, 66 nt, Homo sapiens
agcgagacccccccgcaagacgggcccaccgagcaggacagcccaaggcggaaaagcgaaggaagc

SEQ ID NO: 12498 - RNA, 68 nt, Homo sapiens
ggggaacgaggcgccgaccccacaggaagggaagcacagcgaccccacgaaagccaccgggccaggga

SEQ ID NO: 12499 - RNA, 80 nt, Homo sapiens
caccaggccaccacagaaacaaaagcaacaaagaggacaggaagcaccaaccccgcgaaacccaggacacacagggccac

SEQ ID NO: 12500 - RNA, 72 nt, Homo sapiens
agggaagaagaaaggagagaacgcgcagcagacgcggcgcccgagaagaaggccccaacggaaccaccaggc

SEQ ID NO: 12501 - RNA, 81 nt, Homo sapiens
ggagcccggccccggggaacagggagcgcccggcgcacagcgccagagacggccggcgaagagccggaacaacagaaagag

SEQ ID NO: 12502 - RNA, 60 nt, Homo sapiens
cagcagcgcgcggccacaaggaggccgggcggaaagccaggaccccggcagcacacccgc

SEQ ID NO: 12503 - RNA, 79 nt, Homo sapiens
cccgaggagaggcgccgccggcgaccggcaacggggagggccagggcgaaccagggcacacaggccccgagaaccaaga

SEQ ID NO: 12504 - RNA, 75 nt, Homo sapiens
aaaagacaaccccagggaaggggcagcacagagccaccaccccgaagacgagccacgcccagaaggcaggacaac

SEQ ID NO: 12505 - RNA, 78 nt, Homo sapiens
caagggcaaaacgaaaaagccaagcccagaaacaggaggagacacccgcagggcgagaaggcccaaggagccagggac

SEQ ID NO: 12506 - RNA, 74 nt, Homo sapiens
cgaaagcgcccgcaaacgcagaacaggacagagccacgaccaggggacacccccgcccccaacccagaaggaaa

SEQ ID NO: 12507 - RNA, 79 nt, Homo sapiens
cggcccacaggggggggcaaacccgagagaacggggagacggaacacaccaagaaccccacgggccagagcgcgcagac

SEQ ID NO: 12508 - RNA, 77 nt, Homo sapiens
ccagacgcagagaccgagaggcaagagaagaacgacaacaacaaccccccaggcaaaaaagccacggagaccagacc

SEQ ID NO: 12509 - RNA, 58 nt, Homo sapiens
gaacagcgggaaagaaggcaaaacacgggacgcaaaagaaggacaaggagaacaccac

SEQ ID NO: 12510 - RNA, 81 nt, Homo sapiens
cagcgccgacaccccagccggcgacacaggcgggggagcgggaggagccagagcacaccgcaccacggccacaggcgcccg

SEQ ID NO: 12511 - RNA, 82 nt, Homo sapiens
ggcccgccaacgaaccacaggcgagaccgagacaagcccacccgggaacgccagaggcggcaaaccaggaaacagcagggcc

SEQ ID NO: 12512 - RNA, 102 nt, Homo sapiens
acgaccagcaggaagaacaaacgagaaggcagagaggggaagaccaagagcacaggacagaaaacgggccccagacacaagccccaccaagaggacacccca

SEQ ID NO: 12513 - RNA, 74 nt, Homo sapiens
gcagggaaagacagcgggaccggaccgccgcgccccccaacgaccaggccccaacaacacgcgcaggacagcag

SEQ ID NO: 12514 - RNA, 77 nt, Homo sapiens
cagcggacgagggagggccgccgcgcccaggagggcgggaagaagcgagagccaagccgacgcccgccgcggccggg

SEQ ID NO: 12515 - RNA, 72 nt, Homo sapiens
gcgaagcgaacaaaaagcagcaaaccggaccaccccgaagaaagcacagacggaacagaacaacagggaaga

SEQ ID NO: 12516 - RNA, 81 nt, Homo sapiens
caggagacacaaaacccagacaccgacgggccgcgaggggaagaggaagcaaagccaagggacacaacacagggacgggcc

SEQ ID NO: 12517 - RNA, 69 nt, Homo sapiens
gcacccacaaagcaacgggacagagaaaaaggaaggcaaccccacccccaggaagagaagacgaaagga

SEQ ID NO: 12518 - RNA, 77 nt, Homo sapiens
acgacaccaaggaaaggcgcaccaaggaacacgacgagcacagcaagcgggagcaggcagaccaaaggaacagaagc

SEQ ID NO: 12519 - RNA, 61 nt, Homo sapiens
ggggcgccacccccaccagaggcccgcacagcccagccaccgaggccgccggagccccaga

SEQ ID NO: 12520 - RNA, 71 nt, Homo sapiens
gaaggcacaagagaaaacgacggggcacacaagaggaggagcacccagaacagagaagcaccaagacggag

SEQ ID NO: 12521 - RNA, 81 nt, Homo sapiens
gcggagaggcccaccaggccaggaggaccgcgccaacaggacgaggagaccgaccaggagaccccagcggagacgaccgcg

SEQ ID NO: 12522 - RNA, 69 nt, Homo sapiens
gaacgggaagaggaaagcaagccggacacacaaaacgacagggccgggaggaagaaacccccacgcaag

SEQ ID NO: 12523 - RNA, 51 nt, Homo sapiens
accaagaacaaccgcggacacggagaggaaggccgccgccaagaagacgag

SEQ ID NO: 12524 - RNA, 63 nt, Homo sapiens
gaagagaaaggccaccagagcacacccggcacagagaacaacggcgggcaaccagaaccaaag

SEQ ID NO: 12525 - RNA, 79 nt, Homo sapiens
agcgggacgaggaccgagaccgcggccgggaccgaggggccggggccagggccaccggccagccaggcagcgggcaagc

SEQ ID NO: 12526 - RNA, 53 nt, Homo sapiens
aaggaccaagaaccagggacaaaagggcccaaccagcacagcacagaagcaag

SEQ ID NO: 12527 - RNA, 79 nt, Homo sapiens
cgagacaccagcccgaaacaccaccaagaaagacaacgaaacggcaaaccgagccacgcaaaagaaaaggacgggagga

SEQ ID NO: 12528 - RNA, 69 nt, Homo sapiens
caacggggccacagaaaggaggagaaggccgacaccaaaccgaaggaaaggaaccacaacagcacaagc

SEQ ID NO: 12529 - RNA, 72 nt, Homo sapiens
cagagcgcaaaaacagggacagagcgaagaaccccccaagaagacgaaacccccgggccacaagaagggggg

SEQ ID NO: 12530 - RNA, 50 nt, Homo sapiens
ccgccggaacaaccacaaagccagccagacccacgcacacgcgcgccaac

SEQ ID NO: 12531 - RNA, 71 nt, Homo sapiens
cccaacaggagcacaagagaccacagacacagaaaagccaaaggaagaaccaggaaggaaagccagggaag

SEQ ID NO: 12532 - RNA, 75 nt, Homo sapiens
cacagaggacagcggcagcgacgagaaccggacagaaccggaacagaagacagggaaggacccaagagcggagaa

SEQ ID NO: 12533 - RNA, 71 nt, Homo sapiens
acggcgggccgcgggaggacaccacccacagcgagacgacgggaccgaaggaccccgccagagacaaccga

SEQ ID NO: 12534 - RNA, 82 nt, Homo sapiens
ggaccgcggcggcgaacacaggggacacacgaacgccgagcagcagccgagcgcagcgccgcccagaagaggacaagcacgc

SEQ ID NO: 12535 - RNA, 72 nt, Homo sapiens
cgacagcgccgaacagaggccacgcaagcccccccgggagagcaggaagacagcagggacccagggagccag

SEQ ID NO: 12536 - RNA, 74 nt, Homo sapiens
gagggaccgaacgcgcaccccagaggggcccgacccgaaaagcgcagccaaccagacgcgcgaagaacgggaca

SEQ ID NO: 12537 - RNA, 77 nt, Homo sapiens
gggagcgcgcccgccgagcgcaacagcggcgggcggggcaccccaggaaccagagacgcgaacaccgacagagagaa

SEQ ID NO: 12538 - RNA, 67 nt, Homo sapiens
agacaagacggaggagcgggaccgacagcaagaaaaggagaaaacaaggccgcgggcacacagcaac

SEQ ID NO: 12539 - RNA, 80 nt, Homo sapiens
ccacaccccccggcgagccaagaacacggccacccaacagaaggccgagggagcaacaagagcagaaaggaagaaccacc

SEQ ID NO: 12540 - RNA, 79 nt, Homo sapiens
gaagacaggagacagggacacaagaacagggccaaacgggcccaagccggaaaaaagaaaacgaaggaaggaggacccg

SEQ ID NO: 12541 - RNA, 75 nt, Homo sapiens
aggaagacggggagcagaaaacaagagccgcaaagaaaacagaaaaagcaccagagaaaaagcagaaccccaaac

SEQ ID NO: 12542 - RNA, 84 nt, Homo sapiens
gagaggaaggaaccgccacgaacacagccagagaggcaccccagcaacaccccgccacgccgcccaacccccgagcgcggccag

SEQ ID NO: 12543 - RNA, 77 nt, Homo sapiens
aggaagacagggagggggcaccgccagagccaaggccagggggcaaggcggaccggagaccgggcccaaacaacaag

SEQ ID NO: 12544 - RNA, 50 nt, Homo sapiens
aacaaggaaagagagacgaacaggagaaggaacaaaggaaacggacagaa

SEQ ID NO: 12545 - RNA, 82 nt, Homo sapiens
aacgccgcgcgaggacgcggagccaggacaaaaccaggcagaaccaacacgaacccaagcacaaacaagaaaacgagcaggc

SEQ ID NO: 12546 - RNA, 75 nt, Homo sapiens
aaaaggcccggaagacaagaaagcccaaacaccgacggcagcagccaggaggagcaaccagaacgagaagacccg

SEQ ID NO: 12547 - RNA, 82 nt, Homo sapiens
gaagaacagagacagcagccaaacccccaggcagcgacaccacccacggaaggcacgaagccagaggggccagccggcacgc

SEQ ID NO: 12548 - RNA, 76 nt, Homo sapiens
ccacgcacaaggagcgagcagaacacacagagccaccagccacggcgaaccccagcaggcaccaggaagcagaaaa

SEQ ID NO: 12549 - RNA, 75 nt, Homo sapiens
ccccaccagaggaaaaagagggaaccaagggaaaagccgggccacagaagcaccaccacaagccacaccaacaaa

SEQ ID NO: 12550 - RNA, 58 nt, Homo sapiens
gggaccgcgacgagaggaggaacaggacgaaccgaagcgagcagcccaaggggaagcc

SEQ ID NO: 12551 - RNA, 80 nt, Homo sapiens
caaggcaaagcggccccccccccacaaaggaaaggggaaaagccagcgaaagcggacagaaggcacgggggcccgcacga

SEQ ID NO: 12552 - RNA, 40 nt, Homo sapiens
cagaaggggagcgaacgcgcaagagaaaaggggagaaaga

SEQ ID NO: 12553 - RNA, 81 nt, Homo sapiens
gccccaaaagaaaggcagacgagaagaggacagacggaggagaaggaggaagaacaacacagggagacgccgccgaagcca

SEQ ID NO: 12554 - RNA, 74 nt, Homo sapiens
cgcaacaaagagccgccacaaaagaggcaacaccgcagcggcagacacaccaaaacgaaagaagagcagcggag

SEQ ID NO: 12555 - RNA, 65 nt, Homo sapiens
gacgcaccgcaggcagacaaaagggccaaagaagggagagaggggagggcagaacaacagcagca

SEQ ID NO: 12556 - RNA, 48 nt, Homo sapiens
cacacaacaggaaaacaaaagaggagaaagaagagaggccggccacac

SEQ ID NO: 12557 - RNA, 74 nt, Homo sapiens
cccaaacgcgaccaacacaaccagcagcgccccacaggaagcccgcagaaggcaagccgaaagaaggacgaagc

SEQ ID NO: 12558 - RNA, 71 nt, Homo sapiens
gagaaaccaaagggaacgggggagagaagccacaaagcaagcaggaggacacacagaggggcagccaaaag

SEQ ID NO: 12559 - RNA, 33 nt, Homo sapiens
cacccgcgacccagaaggacgcaagaggggggc

SEQ ID NO: 12560 - RNA, 87 nt, Homo sapiens
caccaaggaacgggcgcagcgagagacccaagcacgcaagccagagcaacgggagccggccaagggacgacaagaccagccggaaag

SEQ ID NO: 12561 - RNA, 80 nt, Homo sapiens
caggagaaaaccaagaaggagagaagagcagaacccaggaaagagaaaggagaccacaagaccccgcgccaccaaaggga

SEQ ID NO: 12562 - RNA, 81 nt, Homo sapiens
agagacacccgaggcagggcacaaacggagaaccaccaaccggaccacccccgggacgacccagaacggaccacacagaaa

SEQ ID NO: 12563 - RNA, 65 nt, Homo sapiens
cccagacaccacaggcgggaaaggacccagaggcagccaccaaccaggccaccgccaacccaaag

SEQ ID NO: 12564 - RNA, 82 nt, Homo sapiens
agaaacaagaaaagaccaaggaaggaaacagagacacagaaaagcccacgaggaaaaacggccaacaaaaacacagcgcaga

SEQ ID NO: 12565 - RNA, 83 nt, Homo sapiens
ccccggacgacaggcaagggaccagcggagggagcgaaacagcgcacacgaccgcagaaggagcggcaccacaccacgcccgg

SEQ ID NO: 12566 - RNA, 86 nt, Homo sapiens
gccccgcccgcccgcggcccccagccccaggccgggaggagaacacgagacccgcacaaaaccccgccccccaggccacacagggg

SEQ ID NO: 12567 - RNA, 67 nt, Homo sapiens
agaacgaagcgaccaaagcgcacggcagcgagaggcaaaccgacaccagcgacacaagcgcgaggga

SEQ ID NO: 12568 - RNA, 86 nt, Homo sapiens
acgaggaccgagaccgcggccgggaccgaggcccgcgggaggaccagacccagcacccagcagcgccgccccaggacgacagcccg

SEQ ID NO: 12569 - RNA, 81 nt, Homo sapiens
acagcaaaaaaccagccccacgccaacggaccacaccaaaagccaccaaaggaacacgccaggaaaccagagacacacaaa

SEQ ID NO: 12570 - RNA, 71 nt, Homo sapiens
ccgagaaggccgccgccagcagccacagaagggagcgacgcaagaaggcaggagaaaaagagaagaaacga

SEQ ID NO: 12571 - RNA, 76 nt, Homo sapiens
aagacccacacggcaagcgcaggccagccgggggcagcccgaggccaaccgggggacacagccagggcgcaggcag

SEQ ID NO: 12572 - RNA, 73 nt, Homo sapiens
cggcacaccaggcggcaggggcaaccagacgggccaagagaaaggcgaggcaaggcaggaagacccacagcag

SEQ ID NO: 12573 - RNA, 60 nt, Homo sapiens
gacacagaacggccaagagagagaggagcagcacccggaccgcgaccacacagaccggag

SEQ ID NO: 12574 - RNA, 71 nt, Homo sapiens
aggcagaagaagaaacaggcaaacgaggaccggaacaggaggcccggacccccagcacaagcgcaggccag

SEQ ID NO: 12575 - RNA, 82 nt, Homo sapiens
cccagggcccgcagccgcagcaggaagaagaggagagaaggcgaggaagcccaagcacaaaggagaagacgcccaagccaag

SEQ ID NO: 12576 - RNA, 57 nt, Homo sapiens
gggagacaggaacgccgacagcgcagaggagcggagccacgcgggccaagaaggaga

SEQ ID NO: 12577 - RNA, 79 nt, Homo sapiens
aaggaacaagaaaacaacggaggaacaggagcaccacgagagcacccagaggacccaaaaggcgggcgaaaacgccaaa

SEQ ID NO: 12578 - RNA, 81 nt, Homo sapiens
gcagaagcgggcccagcgcaagaaccccacagggaaagcaccgaaaaaacgaagaacgaaacggagaaggaacgagccagc

SEQ ID NO: 12579 - RNA, 81 nt, Homo sapiens
aagcggccccccccccacaaaggaaaggggaaaagccagcgaaagagaaccaggagcggcagaccgccgccaggaggaggc

SEQ ID NO: 12580 - RNA, 53 nt, Homo sapiens
cggccggacccccccccggcgcccaagcggaagaaggagagaagcaagcacgc

SEQ ID NO: 12581 - RNA, 62 nt, Homo sapiens
gggcaaacgggaggcgacagggaggaacaaaagaaaaaggaacgggggaacgacagcagcag

SEQ ID NO: 12582 - RNA, 78 nt, Homo sapiens
cgcccgccggaggagcagccagcagaagaggcggccacccacgagccgacggcaaacgccagggagccaccaagggca

SEQ ID NO: 12583 - RNA, 58 nt, Homo sapiens
cggaggcgaaagcggaacgaggaacgaggcgcgacacaccagcggagcgggggaaccc

SEQ ID NO: 12584 - RNA, 74 nt, Homo sapiens
ccagcgagcgcaggcagcaagagcaggaggagacgcacagcacaggaccagaggaggcacaaaaagaacaacca

SEQ ID NO: 12585 - RNA, 87 nt, Homo sapiens
cgggcgccggggcccacggcgggaccgcacacggggccaggagcccccacagccgggaagagcaagggacgccaggagagcccagca

SEQ ID NO: 12586 - RNA, 59 nt, Homo sapiens
ggaaccagggagaagggcaaaagggcacaggaagacaccagagcgcagcacgaacaccg

SEQ ID NO: 12587 - RNA, 36 nt, Homo sapiens
gagaccagcccgccaacaggccccggcacccgacag

SEQ ID NO: 12588 - RNA, 100 nt, Homo sapiens
cacggcagagcaaagcagaagaagaaagacaagcgcccacccacccagaacaaaagaggcacagagagaagaaggacagcgcagaaaaaagagacccaaa

SEQ ID NO: 12589 - RNA, 57 nt, Homo sapiens
ccaacagccagagaaacggaggaaggggacagaagggaccaacggccaaaagccccg

SEQ ID NO: 12590 - RNA, 87 nt, Homo sapiens
ccggcggggaaaagggaaggaaaagagacgcagccgcagacccaagcagagaccaaccccccccccagcaagcagcccgcggaaagg

SEQ ID NO: 12591 - RNA, 69 nt, Homo sapiens
acggaggaaagaggagagaacccaacacagggaaaggaaccgcggacaggagagacaagggaaccaacg

SEQ ID NO: 12592 - RNA, 82 nt, Homo sapiens
gggcgagcggcggggagcggcgaagccgcgggcgagagccccggggcggaaagaagccaaggccaaggagcgggcggcagcg

SEQ ID NO: 12593 - RNA, 96 nt, Homo sapiens
acgccggaaacagcgccacgccagacgcaaaggagccccccaagggccaaagcacagccaagccagcagccgggcaaggaggggaggcgagaacac

SEQ ID NO: 12594 - RNA, 59 nt, Homo sapiens
cagggagagaagccaagaaagacagggcggcgacggcggcgcgaggaccgaccgggccc

SEQ ID NO: 12595 - RNA, 85 nt, Homo sapiens
agacccaagagcagcggaaaagaccagcacagggaaacacaaagaagacaccagaagggccagcaccacgacaacacggcgacag

SEQ ID NO: 12596 - RNA, 67 nt, Homo sapiens
gaaaccgccgaagacgaaggcaaccagacacacaaccaccagaaggagagaagaacagaagccagag

SEQ ID NO: 12597 - RNA, 70 nt, Homo sapiens
cggccacgcgggaccaccggcaccaccaaacgcagacgggacacggccggccaggagcggccgcaccaca

SEQ ID NO: 12598 - RNA, 76 nt, Homo sapiens
ccccggcccgcagcccccgccggccgcccaacaccgaacacccaaggccagcagagcccaagggcgccagccacca

SEQ ID NO: 12599 - RNA, 66 nt, Homo sapiens
agaaaggaaaacagaggagaggcgacaagaaaagcacggcgccgagaggaaggacacaaggcaaga

SEQ ID NO: 12600 - RNA, 76 nt, Homo sapiens
gcgcaagaaacgagcagaagaggaacaagggggggaaacccaccgggaaaaggcacgaaggcaccgccggccagga

SEQ ID NO: 12601 - RNA, 58 nt, Homo sapiens
gacgaggaacgaagggacaagacccgccagaacaggcaaggaagagaaaaggaacccc

SEQ ID NO: 12602 - RNA, 98 nt, Homo sapiens
caccgggacggaccgagaccggaccgagagcggaccgagagcgcgaaacgcacgagaaggaacacggccaaagccccagaggacaagccagaagagac

SEQ ID NO: 12603 - RNA, 71 nt, Homo sapiens
agccacagcccagagaccagaagcaaaagcggcgagcacaagggcagaagacaggaaacgccaagaggggc

SEQ ID NO: 12604 - RNA, 83 nt, Homo sapiens
cccgccgcaccggacgggcacggcggccggaccaaagaaaccacgccggccaggggcaaaggagaggaagaggaagaggaaga

SEQ ID NO: 12605 - RNA, 79 nt, Homo sapiens
cggcagaacagagcgaaaggacaaacaagaggcccagggaccaagaggggcgacccgcagcccggccaccaccgcaggg

SEQ ID NO: 12606 - RNA, 78 nt, Homo sapiens
ggagaccccgaaggcgcaaacgacaccacccgaccgggagacgcccaaccgggaacacggggccaaaagcgccccagg

SEQ ID NO: 12607 - RNA, 76 nt, Homo sapiens
gaaagcacgccgagcaacaccccgaccggaaacaaccgccagggccgggaacaagcgagcgaaaccaagagaaccc

SEQ ID NO: 12608 - RNA, 75 nt, Homo sapiens
gcccggccaccgcgcccgacgagccgcaggcgaccgcgacgacagagcagccacacaacacgaaccagaggacca

SEQ ID NO: 12609 - RNA, 80 nt, Homo sapiens
cgcagaagcgcggcagggagcgcgggggcccgcgcagcagcgaccacgccggccaggcgccgcacccacaggaacgccgc

SEQ ID NO: 12610 - RNA, 61 nt, Homo sapiens
gaacacaggaaccgccccgagaggaaacacccccagaagagggagcagaaagcgagaaaag

SEQ ID NO: 12611 - RNA, 88 nt, Homo sapiens
ccgccgagggccccggccccggagcacagccccggcgcgcgcacgaccaccacccagaggcccagcagcagacaccaccggaggccag

SEQ ID NO: 12612 - RNA, 75 nt, Homo sapiens
ccgcccccaagcccccagggacccgcgaagaagaagaggacacgaggagggcagcgagcaaaagacagagagggg

SEQ ID NO: 12613 - RNA, 73 nt, Homo sapiens
caggccaagagggacccacccggcggcacacagacgagaacgcacccccccccccccaagaacgggacgcaga

SEQ ID NO: 12614 - RNA, 74 nt, Homo sapiens
gcgcgcaggacccagacccccccccgagaccggaagagaaagagcaggccacggggcgccggccacgaggggcg

SEQ ID NO: 12615 - RNA, 73 nt, Homo sapiens
agaaccgagggggagagacgcaggaagagcgaaaaaacaggaggacacaagaggaaccagaagacacaaaaag

SEQ ID NO: 12616 - RNA, 58 nt, Homo sapiens
gcgccggcgcgcacacaccacgggcgaggcaacggggccaagcgacagagaagcgacg

SEQ ID NO: 12617 - RNA, 64 nt, Homo sapiens
ccagggccaacggaaacacgaccaggggaacccagggagaaagcgacaaacacgggccaaacca

SEQ ID NO: 12618 - RNA, 74 nt, Homo sapiens
aaacgccgaaaggacgaggaacgggccggaaaagccagagcaagacccacgaagggcacacaaaggacccaccg

SEQ ID NO: 12619 - RNA, 80 nt, Homo sapiens
ccgagcgccgagaaagccccgggagaagcagcgccgcccggggcagaccaggcagaagacgaccccgacgcaggccagga

SEQ ID NO: 12620 - RNA, 83 nt, Homo sapiens
acagcaaaagaccaaaaacccgggcaggcagcccagaggaaagcccggagaagaaaggcagcccagaagaccagccaaccgag

SEQ ID NO: 12621 - RNA, 74 nt, Homo sapiens
cacaagaagcgcaaaaagcgcagggaaaacgacaaccagccgcaggcgaaagcacgaaggacagcagccaaaca

SEQ ID NO: 12622 - RNA, 60 nt, Homo sapiens
acggaaaagacccccagacgaacaaggccccccaggccacccaggaccagcggcacaccc

SEQ ID NO: 12623 - RNA, 79 nt, Homo sapiens
ggacggaacccgggcccacgggcgacagacaaaggcagaaaagcgagccaccccaggggaagaacacagacgcaacagc

SEQ ID NO: 12624 - RNA, 75 nt, Homo sapiens
cccgaacgggcgcgggccaagcacgccacccggaaggacgagcagggggaggaacaaagcgaggaagggaaggga

SEQ ID NO: 12625 - RNA, 38 nt, Homo sapiens
gagggaaaaggcgagaagcaagggcgggaaaccagacc

SEQ ID NO: 12626 - RNA, 63 nt, Homo sapiens
aaccccaggcccgccgcacaggggcccacgagagggaagaagagaggaagaagacacagcaca

SEQ ID NO: 12627 - RNA, 54 nt, Homo sapiens
ggccgcccgacccaaagggaaaacagaaacagcgacgcacaaggaaaaacagag

SEQ ID NO: 12628 - RNA, 67 nt, Homo sapiens
aaaacgaaaacaggacccaccacagcccaaagaggcgcgaacagggcccacccgccacgacacaggg

SEQ ID NO: 12629 - RNA, 78 nt, Homo sapiens
acccaaaggccagcaagagaaaaaggcagccccggagacgaaaagacaaagcaccaccaacagacgaggaacagcgaa

SEQ ID NO: 12630 - RNA, 77 nt, Homo sapiens
ggcggcgaccggagaaccgcacggggcacggagggggaggcaagcaggggggcaaaggaaagaaggcagaaagggag

SEQ ID NO: 12631 - RNA, 76 nt, Homo sapiens
gaaaccagccagagagccaagaagaacagacagacaggcccagggcagcgcaagaccccgcacggaagcagcaagc

SEQ ID NO: 12632 - RNA, 67 nt, Homo sapiens
ggacaggagaagcggaaaagaaggaacaaagggaacaagcaccaagaagagagaaagagaccaagca

SEQ ID NO: 12633 - RNA, 79 nt, Homo sapiens
gcagagcaagcgcagccgagccccagggaccccagaccccccgcccagagcaggcagcccgggcggagaacggaaaagc

SEQ ID NO: 12634 - RNA, 36 nt, Homo sapiens
gaacaaggcaaaagggccgggacaaaccagccagca

SEQ ID NO: 12635 - RNA, 56 nt, Homo sapiens
ggaggcagagcggcgccagcaccaggacaaaagaagggcagcacaaaggaaagccc

SEQ ID NO: 12636 - RNA, 62 nt, Homo sapiens
ccgcccagcgcgggcaccgcggccggagcggggcgaagcgacccccgaagggacccgccacg

SEQ ID NO: 12637 - RNA, 55 nt, Homo sapiens
cgaagaggcaccggaggaggaacaagcacaaggaagagcccacagaaaagacccc

SEQ ID NO: 12638 - RNA, 60 nt, Homo sapiens
gcacccggaccggagaggaggggagcacccaggccacagaggaggaaagagaggggaaag

SEQ ID NO: 12639 - RNA, 61 nt, Homo sapiens
cggaggaacgaagacacggggaggacaccagacacgaaggaccacaggccccggagggggg

SEQ ID NO: 12640 - RNA, 68 nt, Homo sapiens
cgcgcaaacagggacgacacaaagccagcagacgggaaagggccagcgcaaggacgaacacacgaaag

SEQ ID NO: 12641 - RNA, 85 nt, Homo sapiens
cccggcccacaggggggggcaaacccgagagaacggggccaacgggccaacgccggcaggggacggcccacgcgaccggagcccg

SEQ ID NO: 12642 - RNA, 51 nt, Homo sapiens
gcaagaccccccgggaaccacccgcgcccccaggcagcccgggaccgggcc

SEQ ID NO: 12643 - RNA, 87 nt, Homo sapiens
ccggcgcgccgcgggcggccggcggccggcggggcggggagcccccggaagaaggaggccgaccaggccgacaaagcagacgcccgc

SEQ ID NO: 12644 - RNA, 51 nt, Homo sapiens
gcccgcagggagcgccgccagcagggggggcagcgcagcaggcgggcaccg

SEQ ID NO: 12645 - RNA, 82 nt, Homo sapiens
gcggcggcgccgcgcgcgcagggccgccggcccgcagccgccaccacccaggaccagaagggaagaccaaggaccaagaacc

SEQ ID NO: 12646 - RNA, 80 nt, Homo sapiens
aacaaggcaacagaaagagcaacagcagggcaacagacaaagggagccaaaggaaaaaagaccccagacccgcagaaaac

SEQ ID NO: 12647 - RNA, 65 nt, Homo sapiens
aagggagaggacaggaaaaccaaacagggggaaacccgcccagggcgggagaccgccaagaaaca

SEQ ID NO: 12648 - RNA, 37 nt, Homo sapiens
caggcgcggaggcgaggccagcaggagagagagagag

SEQ ID NO: 12649 - RNA, 75 nt, Homo sapiens
cgcgcccccaggggcggccgcggcgccgggcgccgagaggcagagcggcagacgagggccaccagagggccccca

SEQ ID NO: 12650 - RNA, 76 nt, Homo sapiens
gcccgggcggcggcgaccggacgagaagcccacggccaggggagaagcagaccgcaccaggcgggaccccgaaaaa

SEQ ID NO: 12651 - RNA, 60 nt, Homo sapiens
gggcagccgccacacgggggcaccacccccagccgcagggaaacacacagaagaccgcag

SEQ ID NO: 12652 - RNA, 70 nt, Homo sapiens
gcggagggaccagcgagcgggaggcaaggacaagaaagacagcgacaaaagcagcccacaaggagacagc

SEQ ID NO: 12653 - RNA, 72 nt, Homo sapiens
gcggggacggaaccgggacccgggcgcccgcgcccgccccaacccagccacagagccggagggaaggagaaa

SEQ ID NO: 12654 - RNA, 100 nt, Homo sapiens
acgcggcgcaggggggaggaaaaggcgcccgcaggggaccagacggcaccacagagggagaccgcccccggggcgagagaccccaaccccccaagcgaag

SEQ ID NO: 12655 - RNA, 72 nt, Homo sapiens
gaaagccagacacaagagaggaggaaagcaggagagacccaaaagacacgcaagacagaaagacagacgaga

SEQ ID NO: 12656 - RNA, 53 nt, Homo sapiens
ggagccacgccgggaacccaggcagcggacacgcagagcgaagccaccacagg

SEQ ID NO: 12657 - RNA, 59 nt, Homo sapiens
gagaggggaaaccccgaaaggggggcagggagagaagcacggcgaagcagcggagaagc

SEQ ID NO: 12658 - RNA, 71 nt, Homo sapiens
caaaggacgccaggaggaagggacaaaaggagcagccgcaacagcgcaccgacacaagcccagaagcccca

SEQ ID NO: 12659 - RNA, 67 nt, Homo sapiens
gcaagccagggcaacgaggggcggcacaaagagagaaaaccaggaaagacccaggaagggcaaaggc

SEQ ID NO: 12660 - RNA, 77 nt, Homo sapiens
agcaagcacacggaggcaccaaccagcaacagggaccagggcgacagaacaaagcccgcaaacacagcgagaagagg

SEQ ID NO: 12661 - RNA, 77 nt, Homo sapiens
cagaggaggccccccagccacgggaacccggacaggacaaaaggacacaacccacacaagaggagaagagaacaggc

SEQ ID NO: 12662 - RNA, 67 nt, Homo sapiens
ggaacgcgcagcgcccgggggcccgagcaagcagaggcgccgaacagaggcggaggagggcagaccg

SEQ ID NO: 12663 - RNA, 81 nt, Homo sapiens
gacgaggaggcggacccccggcgcaggggcccccggagggccacaagccagagcgccccggccaaggcagaccagcgggca

SEQ ID NO: 12664 - RNA, 82 nt, Homo sapiens
ggagccaggagcgacgcaccgccaggcaggcacaaagaaagagccgcagacgcacagcaaccaccggacccgaaggccacca

SEQ ID NO: 12665 - RNA, 71 nt, Homo sapiens
gggcaccacgccaaaagcagccacagaaaggcggcaggaaagcagaacgaaagacgggcccagccaaaaac

SEQ ID NO: 12666 - RNA, 77 nt, Homo sapiens
aaccagcaagggaacacagcccgacggaccagcacaggcggagaacggaaaagcaccaggaagcagagaggaccgca

SEQ ID NO: 12667 - RNA, 81 nt, Homo sapiens
aaaacgccaggcggaccagaaggccagcaaaggaagaaggagaaagacaaagccccgagaaagaccagcaccgccgaaaag

SEQ ID NO: 12668 - RNA, 55 nt, Homo sapiens
gaagaggcgaggagcaacccaaacccgccacccccacccggcgccccgcgacgag

SEQ ID NO: 12669 - RNA, 70 nt, Homo sapiens
gaacgggggccccgaaaaaagagagggggggaccgaccgcaacagaacggacccggaagaccgcaggaaa

SEQ ID NO: 12670 - RNA, 74 nt, Homo sapiens
agaccgaacagaaggaacgacgcggaccagaagccagagcgaggacgccggcaggggacaaagccgcgaaaagg

SEQ ID NO: 12671 - RNA, 49 nt, Homo sapiens
gaccgggggcccagaaagacacggcaacccagaaaggcagcacagcaag

SEQ ID NO: 12672 - RNA, 84 nt, Homo sapiens
ggccgcgggccagaggacaggcacaggaagcgccgcccaagagagagaagagaggcgcgagggcagggaagaggcggacaagcg

SEQ ID NO: 12673 - RNA, 46 nt, Homo sapiens
aaaaagcacacaccacgcaacggccaggccagcacacggaccccgg

SEQ ID NO: 12674 - RNA, 81 nt, Homo sapiens
cccgcaggcagcgcgcgaacggggcgggggaggccaccagccggacagccggcgggcagagaccaacagaccagcaacagg

SEQ ID NO: 12675 - RNA, 52 nt, Homo sapiens
cgcagggcgcccccggagaacagcaagagaaagagcaggaaacagacccgaa

SEQ ID NO: 12676 - RNA, 84 nt, Homo sapiens
gccgagaggaagacgagccgggaggaacggcccggaaacaggaggacgagcagcaccgaggccccccccaccccccgcccgcgg

SEQ ID NO: 12677 - RNA, 73 nt, Homo sapiens
agacacagaggagccacacccccagggggaccaacggggacccgccaccgcagggccgcgccgagacgccaac

SEQ ID NO: 12678 - RNA, 79 nt, Homo sapiens
ggcagcgccaagaggccggagagaaacgcggaggagaaagccccgccggagcgggcagggcacacaaccgggcagcgga

SEQ ID NO: 12679 - RNA, 79 nt, Homo sapiens
gcggccgggagacagccggaagcaaggcagaagaggccggaacaaggcaaaagccgagaagcacccgagacaacagcgg

SEQ ID NO: 12680 - RNA, 62 nt, Homo sapiens
gagcgaagacagcccccaccgaggccagggcgaacgggccaggcccaggacaggccacacgg

SEQ ID NO: 12681 - RNA, 86 nt, Homo sapiens
ggagaaggagaaaagggggaaaagcccaggaggaagcaggagcagcccaagcgccccccacaagacgaccccgacgcaggccagga

SEQ ID NO: 12682 - RNA, 75 nt, Homo sapiens
aagggaaaccgggggccccggacaacccgagcagacccacaggaccgcgaacaaggaggccacaaaacacccgga

SEQ ID NO: 12683 - RNA, 80 nt, Homo sapiens
gccggagcaggaaccagcacggggggcacacccccagaaacggcggaaccgcgaaaccgacggagcaggagcgggagaac

SEQ ID NO: 12684 - RNA, 63 nt, Homo sapiens
cgacacccacggacgccacaggggcaagaaggggcccggaccacggcacgggaccgaggaggc

SEQ ID NO: 12685 - RNA, 57 nt, Homo sapiens
agggacaggggggccgggggaacgaggaagcgcccaaggagggagccgagcgcgccc

SEQ ID NO: 12686 - RNA, 88 nt, Homo sapiens
caagcagaaggcggaggacccggggacaggccacaccccacagcgcaggcggcgacagcggaccagggggaggccagggccccccacc

SEQ ID NO: 12687 - RNA, 75 nt, Homo sapiens
gagaccagccgggcaacaagaaagaaccaggaagcacaaaggagaagggacagacaaagagaccgcaggagggac

SEQ ID NO: 12688 - RNA, 61 nt, Homo sapiens
aagcagaaggagcgaagaagaggggcagcacacccgggccccccacccccgccgcaagccg

SEQ ID NO: 12689 - RNA, 74 nt, Homo sapiens
gacaaacagaacacaagacggaggaacaggaagggacaggaaacgggcaccgggcacccggcgcgcacacaaag

SEQ ID NO: 12690 - RNA, 68 nt, Homo sapiens
gaccagacgccacaacacagaagagacccgcaaccgcaccccagagggagcccagggaagggacaccg

SEQ ID NO: 12691 - RNA, 55 nt, Homo sapiens
ccccccaagccacagcacaggcacaagccaccgagcgaagacccgagaacaagac

SEQ ID NO: 12692 - RNA, 80 nt, Homo sapiens
gacagagggacgaagccaggagaaaagggcaagcccggaacagcgcaaccagcgcggagacacgcggagcccgcagggcc

SEQ ID NO: 12693 - RNA, 58 nt, Homo sapiens
ggacagaaggcaaaggcagcaccccaggaaaaaacggcaggcaaaccccgggagaggg

SEQ ID NO: 12694 - RNA, 76 nt, Homo sapiens
gcgcccaccccccccggacccgcgggagaaggccggaacaacgaaggggaggcaccaaggagaaccgcggacacaa

SEQ ID NO: 12695 - RNA, 78 nt, Homo sapiens
ggggagccgagcggagcgccgcggcgcagccaggaccccgcgcccacccaacaaggcaggcgaaacagcaggagaggg

SEQ ID NO: 12696 - RNA, 38 nt, Homo sapiens
gagcaggcacgaggaggaaacagaacgacagcccgcac

SEQ ID NO: 12697 - RNA, 75 nt, Homo sapiens
gcaaaaaagcaaacacgaggccacggggaaacacagcagaacacaggcggagcaggagcaaaggagcaagaaacc

SEQ ID NO: 12698 - RNA, 66 nt, Homo sapiens
cacccagcagccggaacagggccagcaccgcaagcgagcaagaggaggagacacacaaaaagagga

SEQ ID NO: 12699 - RNA, 77 nt, Homo sapiens
gacgagggagaaagaacccaccccaaacagaagaagcaaagcagaggcccgcgaggggaaggggcagaccaacacca

SEQ ID NO: 12700 - RNA, 71 nt, Homo sapiens
gaagggagacggcagagacacccggcccgggggcccccaaagggaagccaaacacaaaggaagaagcccgg

SEQ ID NO: 12701 - RNA, 72 nt, Homo sapiens
gggcggcgcagcggccgcgcgacgccacaccgccggaacagcaaacccaagccgggcgggggcccgagcaac

SEQ ID NO: 12702 - RNA, 58 nt, Homo sapiens
cgggacacccgggagcaggaaaggagagagacgaggaaagaaggaagcagcgaagcag

SEQ ID NO: 12703 - RNA, 62 nt, Homo sapiens
gccgacccgcggagacagacaagacaagaccggcggggaagcggaccgcaggccccagaggc

SEQ ID NO: 12704 - RNA, 75 nt, Homo sapiens
aagccaagggaccgcgaggacgagagagaagagccggaggagccaccaacagaagcaggagccaggaaaccaaaa

SEQ ID NO: 12705 - RNA, 76 nt, Homo sapiens
ggcgagggccgccgccgccgacagaaaacggccgagcgaccaggagaggagcccccgcccgaagaccggggagggc

SEQ ID NO: 12706 - RNA, 70 nt, Homo sapiens
gcaaaccacccagacggcaagagagccggccaggacacacagagccgcggcccgcggcccaccggacaaa

SEQ ID NO: 12707 - RNA, 71 nt, Homo sapiens
ccccgcccaaggaggcccagcgagaaaccaggcggggaacaagccagcagcccaaggagaagccccacaga

SEQ ID NO: 12708 - RNA, 40 nt, Homo sapiens
gagagagagagggaggggcaggggcacaccagacagacag

SEQ ID NO: 12709 - RNA, 77 nt, Homo sapiens
caaacacccaacgagacgggcaaggcccaaaaggcaccccgaaggagggacaaggcgaccaagggcgggacggacgg

SEQ ID NO: 12710 - RNA, 55 nt, Homo sapiens
agaagaacacaagggcacgagaagaagcccacgcaacgcagagccaggacgcaac

SEQ ID NO: 12711 - RNA, 55 nt, Homo sapiens
ccgcccccggcggagcagccgcagccacggcgacaagcgcgaaaccggagcccag

SEQ ID NO: 12712 - RNA, 79 nt, Homo sapiens
agaaagaggcacagccccaaaagaaaggcagacggagaaaagaaacgggagacccacaagagcggccaaaagaaaacca

SEQ ID NO: 12713 - RNA, 77 nt, Homo sapiens
caagggcagagggccagagcccagaaaagaacacggccgagaccccgacgcccgacggccacacgccagcgggcccc

SEQ ID NO: 12714 - RNA, 81 nt, Homo sapiens
ggaccacaccggaggcaggaccggggccaaaagccaagacacgagaggcgagggacgacagagcaagcggcagagggcaag

SEQ ID NO: 12715 - RNA, 71 nt, Homo sapiens
cccagaagcaagaaagaacgcacagccacgcacacagagaccgcacccgagcaggagggggagccacgcgc

SEQ ID NO: 12716 - RNA, 74 nt, Homo sapiens
gaccgggcaccagaagaggacggagcagaccagagagaacaaggaggacagcagggagccaggcaggccaagcg

SEQ ID NO: 12717 - RNA, 102 nt, Homo sapiens
cacacagaacccggccaggacagaagggcgagaaaaggagcagcaacgaaaagacaccacaagaaaccgggagaagcagaaaacccggccagggacaggaaa

SEQ ID NO: 12718 - RNA, 83 nt, Homo sapiens
ggggacaccggggagggcgggaggcagcggcacggggacgagagccggcagaggcgggcagaaggacgacagcaaagggaaac

SEQ ID NO: 12719 - RNA, 78 nt, Homo sapiens
ggagacgccgaaggaccggaggaggaccacgccgcaccccacaaggcagaagcccccggggagagacagacagaggga

SEQ ID NO: 12720 - RNA, 79 nt, Homo sapiens
gaaccagcaaccagagaacaacagaaaaccaaaaaccacgggcgggagcaaccgaaccaccagcgacggaaccagcaac

SEQ ID NO: 12721 - RNA, 71 nt, Homo sapiens
aaagccgagacccagaccagcaggaagggaaggaacaaagcagagaaaccaaaaggccagacgaacacgag

SEQ ID NO: 12722 - RNA, 84 nt, Homo sapiens
gcgcgggcggccccggcccccacacccgagccaggaacagacaaggccagcgcgcaggcccggaggagcgggaggccagaaaca

SEQ ID NO: 12723 - RNA, 55 nt, Homo sapiens
caggccagggcagccgcgagcaacgcgagccgcaggaaccgacaagaagaccagc

SEQ ID NO: 12724 - RNA, 70 nt, Homo sapiens
acagagcgcaaaaggcacggggaccccggagagcaaacagaggagaaaaagaacaccagggacaggcacg

SEQ ID NO: 12725 - RNA, 79 nt, Homo sapiens
aaccgccaagcgggggagcaaggcggaccggcgacccaacggagaaacgcccccccaccccacccgaaggaaaagccag

SEQ ID NO: 12726 - RNA, 68 nt, Homo sapiens
gacagagggagccaggcagaggagcaaaagaagagcagagcacaggaagacccaggaagaagcacaga

SEQ ID NO: 12727 - RNA, 98 nt, Homo sapiens
acgacgacggaaggagcagaacaaacggccaagaagggccaccccacagacgagcggaaacgcgggcaggccagccaggagagaacacaccccgccgg

SEQ ID NO: 12728 - RNA, 67 nt, Homo sapiens
aagcaagcagaagaaaggagagccaggcaaagaggcacacccagaagccacaggagaagcaagaggc

SEQ ID NO: 12729 - RNA, 73 nt, Homo sapiens
ccgcggcggcgcggggcccgggccgaggccgcggcccgagggcccggaaaggggagcacagaggcggaacaag

SEQ ID NO: 12730 - RNA, 70 nt, Homo sapiens
agcaagacccaccacccgagaaggggcacacagacaaagggcaacccaaccgggcaaggccagagaaggc

SEQ ID NO: 12731 - RNA, 61 nt, Homo sapiens
aaggcagcggggggaaggcagagcggccaacaaagcccaagcaggggaaggcgaagcacga

SEQ ID NO: 12732 - RNA, 56 nt, Homo sapiens
agccgcagggagaacacccaacgggagggaggccaacgaacaaagagagcagcaac

SEQ ID NO: 12733 - RNA, 67 nt, Homo sapiens
aggggagcgaaccgaaaaacacccagacagcgaggaacaaaaaggagaagagacagccacgacaaaa

SEQ ID NO: 12734 - RNA, 39 nt, Homo sapiens
ggaacaagcaccacagaggacacggaggcaaaggaaacg

SEQ ID NO: 12735 - RNA, 76 nt, Homo sapiens
gcaccagaaaacggcgaggaagcgggccgggaggagacagagagcccggacaacaggcgagaagggggacgaacag

SEQ ID NO: 12736 - RNA, 73 nt, Homo sapiens
agaagaagagaaaaggaggccaagaagcggggcccccaacaggagaaagcgcaacacgggaggaaacgaacca

SEQ ID NO: 12737 - RNA, 73 nt, Homo sapiens
agaggcaggcgcggcccgcggggcgccaggcacgcgaggcccccaggcccccacagagagcacacaaacaaag

SEQ ID NO: 12738 - RNA, 69 nt, Homo sapiens
acgggaggaagagagaaaagagagaaccccaaccggggaggaaaaccgacgaaggggccggcgggccca

SEQ ID NO: 12739 - RNA, 84 nt, Homo sapiens
gccccggccggcccggaggagcggccgcgccgccgcgcgagaggaagccccacacaagaccacccaaggcagcgcaaaagggga

SEQ ID NO: 12740 - RNA, 71 nt, Homo sapiens
caacggaccaagaaccaaacgaccgacaccgcaagaccccgaagcccagggcgacccaccaacaggcaacc

SEQ ID NO: 12741 - RNA, 73 nt, Homo sapiens
acagaaaacacgggcccgacgacccagggggggccccagcccggccgaacgggcgcacgacacaaacacaacc

SEQ ID NO: 12742 - RNA, 80 nt, Homo sapiens
agagacaggaggcagagccaaacacccaggaaagacacagagaagcgaccggcgcaaaagaagcaaggaaagccacaaag

SEQ ID NO: 12743 - RNA, 82 nt, Homo sapiens
cgggaagcaccaaagcgcgccaagaggacacgacacagggacgggccaagaacccaggaggagggaaagccggacccggcag

SEQ ID NO: 12744 - RNA, 68 nt, Homo sapiens
agccgaacgccggaagcacaaggacacacagcaacgaagcaggggaggagggaagaccggacagcgag

SEQ ID NO: 12745 - RNA, 71 nt, Homo sapiens
accgagacgggcggagaggagaaggacccagagagggaccagggccaaagaagagccggggggcaggcgga

SEQ ID NO: 12746 - RNA, 85 nt, Homo sapiens
cgacggcggaccgacccgagccgggacccggcaaagagagaggcacacgccgccgaaggccaggagcagaggccaacgccccaag

SEQ ID NO: 12747 - RNA, 75 nt, Homo sapiens
cgcgccggcgagaagcggccgagccagcagcagaacgggaccagacacacgcaaggacacgccaaccaaggcaaa

SEQ ID NO: 12748 - RNA, 67 nt, Homo sapiens
acccaaaggcagcggagacacaagacgggaaggagggccgccagaaggagccggccaaaacggaagc

SEQ ID NO: 12749 - RNA, 87 nt, Homo sapiens
gaggccggaaccgcccagccccgggaagaaaacgccagagaagcagagcagcccggagcgaggggagaccggggaagcggcgaggcg

SEQ ID NO: 12750 - RNA, 58 nt, Homo sapiens
caaaggcgcgcaaggaggaaggaaaccccccggagccccaaagccaggacagcccagc

SEQ ID NO: 12751 - RNA, 66 nt, Homo sapiens
gggaaggaaacccgcgaagcggaaccacaaaaccaaacaggccagaagcgaccggaggggcagcgg

SEQ ID NO: 12752 - RNA, 74 nt, Homo sapiens
caaacccggggacccagcccccccagcagccaaagaagagcagaggacggaaagaagggacgaggagggagaag

SEQ ID NO: 12753 - RNA, 89 nt, Homo sapiens
cagggagagaggcgcccccaccggccgcgcagccgggcagagccgccaagcggggagcgaagagacgccgaaagcgagaagaaagagca

SEQ ID NO: 12754 - RNA, 67 nt, Homo sapiens
aacgaacagagacgaggcggaacagagaaaagaaaggggagcccccaagcagaaccgcccaaaaacc

SEQ ID NO: 12755 - RNA, 83 nt, Homo sapiens
aacagcagcagcagcaggaggggcagcaacaaggagggaaaaaagagcaggggaaaaggaaagggggccccaggacccggaca

SEQ ID NO: 12756 - RNA, 78 nt, Homo sapiens
gcccagacggccaccggcgggaggaacaaaagaacagccagcaaagacaagagcagaccagcagccgcagcgcgacag

SEQ ID NO: 12757 - RNA, 68 nt, Homo sapiens
cccaggagcacgccgcacaggccgcgaacggggcaaagggaggaccgacgcaagaaaacaagaaagga

SEQ ID NO: 12758 - RNA, 83 nt, Homo sapiens
ggagcaagacaagccaagaagcggaggacaggagcagcgggcccgacagccaaggagaggcgcgcagcaagcagcagagccgc

SEQ ID NO: 12759 - RNA, 95 nt, Homo sapiens
agaccaaaggaccgccccgggaggcaccgagaggaaaggcgagggaagcgccgggggagccaaacacacccccaccgagagcggccacaaaagac

SEQ ID NO: 12760 - RNA, 72 nt, Homo sapiens
aaacgggaagaaaagaaaacacagcaagaggcacgcccagagcaagaaggcagggagaccccaaggcaaaac

SEQ ID NO: 12761 - RNA, 77 nt, Homo sapiens
gcgcgcgccgcgccgcccgagcacgccgcgcagcccggccgccggcccccaacagcgccgacaacgaagaaaggagc

SEQ ID NO: 12762 - RNA, 76 nt, Homo sapiens
agaaacaagggagacagccgcccggccaagcacccgcagcagagcacagccccaggcacaacacaagaaaagcggg

SEQ ID NO: 12763 - RNA, 68 nt, Homo sapiens
cccggcgcacggggcgcacaccacggcccggaagcgcgcaagacgcaacacaaacgagaaagacagcc

SEQ ID NO: 12764 - RNA, 126 nt, Homo sapiens
gcgacggggcaagggcgagaccggagagccgcaggacggcgcggcagagccccgacgccacagaacgaggggggcgggccgagcacccgcaggccccgcagaggcgcccacagcggacggcaggcc

SEQ ID NO: 12765 - RNA, 76 nt, Homo sapiens
aaagcccgggcgcggaagaagccaagggcaaagcagagcagaaaagaagcagaaaacacacccacaaagggacagg

SEQ ID NO: 12766 - RNA, 68 nt, Homo sapiens
gcgagaaaccaaagacggcagcgcggaccagcagagcccgagccaggaaggaccagaagagaggaagc

SEQ ID NO: 12767 - RNA, 81 nt, Homo sapiens
agaaggaaccgggccagacccacgcggcgccagcccggcgggaaggaaaaccgcgcagagaggaagcccggggcggcgacg

SEQ ID NO: 12768 - RNA, 78 nt, Homo sapiens
aaacgaggagcgcggccaccccccggagagccagcaggccaagggaaaagcagcggaaaaccagcccaaaaggccgag

SEQ ID NO: 12769 - RNA, 56 nt, Homo sapiens
cgcgggccgggcaacacgcagccgagcgaaaaggccagaggaaccaagaaccaaca

SEQ ID NO: 12770 - RNA, 67 nt, Homo sapiens
aagggccaaagaagggagagagaagcaccagcaccaagaccagccagggagacgacccgcgggaacc

SEQ ID NO: 12771 - RNA, 66 nt, Homo sapiens
aggggagaaggcaggcaccacaaaaaggacaggaaccaagaaagaccagcaccagcaccccagaac

SEQ ID NO: 12772 - RNA, 49 nt, Homo sapiens
aggggcggaagccacacaggccagaacgaggccccaggaggggagcaac

SEQ ID NO: 12773 - RNA, 70 nt, Homo sapiens
agcggagcgaagcgaacaaaaagcagcaaaccggaccaccccgaagaaagcacagagaccccgcggaaga

SEQ ID NO: 12774 - RNA, 72 nt, Homo sapiens
gagcgagaccgccaacaggacaccgaagccaaccggcagaaagacacaaaggcccagaaggaaagaccacaa

SEQ ID NO: 12775 - RNA, 84 nt, Homo sapiens
gccaccgggacccaagaccgagaaccccgcggaggcaacaggacacaagcggcagacagcacccaagaaaacccaggccgcgaa

SEQ ID NO: 12776 - RNA, 77 nt, Homo sapiens
cggaacagaggagcaaaggacaaaacagccacgggaaacaaccagggagacaaagacacagcagacaggaggggcag

SEQ ID NO: 12777 - RNA, 71 nt, Homo sapiens
aaaggaagacgggaacccggcgcaagggggagcccacaccggaggagaggaaagcaccgccaagcggagaa

SEQ ID NO: 12778 - RNA, 79 nt, Homo sapiens
ggaagcggaaaccagggccacagcacgcagccccaggcagggacaaagaggaggacaagaacccacccgcgcccaaccg

SEQ ID NO: 12779 - RNA, 79 nt, Homo sapiens
ccagccgccgcgcccacagccagcagcgggaccgacgagagcccagcaagaccacgacacgagagcgccgccagccgga

SEQ ID NO: 12780 - RNA, 86 nt, Homo sapiens
gagcaaggacaccaccagggagccaggagagacagcgggaggcacggcagaaacggaaaaaccaaagcagcccgaaggagcagacg

SEQ ID NO: 12781 - RNA, 83 nt, Homo sapiens
ggaaaaaaagcagagaggagcggggagcaagcaggaacgggcaggcaaaaggcccccccccacagcacaggagcgaggaggcc

SEQ ID NO: 12782 - RNA, 84 nt, Homo sapiens
cagcacagccccaccaggccccaggggccggcccccccggggcaacccagacggcaacaaaggcgagacgaggcgaggaaccaa

SEQ ID NO: 12783 - RNA, 74 nt, Homo sapiens
gggcgcccaggccgcccgacccaaagggaaaacagaaacagggacaggcggggaagaaagccggagaaaagcac

SEQ ID NO: 12784 - RNA, 74 nt, Homo sapiens
gaccgccgcagaccgcgacgcgccgcacagagcaacgcgccccagcacagaccgggcgcaggaccgggccgggg

SEQ ID NO: 12785 - RNA, 69 nt, Homo sapiens
ccgaaggcgaccccgccagaacacccaggcgacagcgagaaaagccgacgcaagagggaaagcggagca

SEQ ID NO: 12786 - RNA, 60 nt, Homo sapiens
agccaaccgcgcaagaggagaagagaaggaggaagaacggcaaaacggaggagcagagcg

SEQ ID NO: 12787 - RNA, 75 nt, Homo sapiens
gggcaaaagaagaagcagcgaggagagacaccccacgagacagaggccgcagaagcagggccagggccaccgaaa

SEQ ID NO: 12788 - RNA, 73 nt, Homo sapiens
cacgaggcccaaaccgccaaggccaaggaagcacgggaagaacagaaaagagaagcaccacggaaaccaccgc

SEQ ID NO: 12789 - RNA, 80 nt, Homo sapiens
gccagaaggggagcgaacggacggcccagcgccccccggccacaccacgccgacaagaagcgcgcaggaagggcccccaa

SEQ ID NO: 12790 - RNA, 71 nt, Homo sapiens
agggaaccagcaacaagccggaggcaaggaggccacggggccgaagacaccaaccgggcaccagccaaacg

SEQ ID NO: 12791 - RNA, 79 nt, Homo sapiens
ggacacagggcagcagggccaccggaaagcaccaggaagaagaggcggaagaaacaacaagcgcaaggagcgcccaaac

SEQ ID NO: 12792 - RNA, 80 nt, Homo sapiens
aaacgaggcaccagggaagagccagcaagggcggcgagaagaggagcagaaagacagaacaaacccaccgaggaagcccc

SEQ ID NO: 12793 - RNA, 66 nt, Homo sapiens
gggaaccgaccgcggcgcgccacccggccgcagcaaaaggcccacgcggaccggcagcgccaccgg

SEQ ID NO: 12794 - RNA, 85 nt, Homo sapiens
ggaggagaccaggacgagaacagggagaggcgacccgacccccagggcccgggccaggacagggagaccagcacgagccgggcgg

SEQ ID NO: 12795 - RNA, 77 nt, Homo sapiens
agcagggcgagagggcaccgcggacggggccgcccaggagagccaggaggggccagagagaaacaagaagaacacaa

SEQ ID NO: 12796 - RNA, 76 nt, Homo sapiens
cgcccgccccgcagagaggacgcggaggccagcacaccaggacgccgcgcgccaccagccaccgacccggagggcc

SEQ ID NO: 12797 - RNA, 104 nt, Homo sapiens
gaaacaagacgggaggagaagacaaggacccgagagagaaagggacagagagagagagggacgagaggacgccagaagaccagggcccgacccagccagcggcg

SEQ ID NO: 12798 - RNA, 86 nt, Homo sapiens
gaaggagccaagagaccaaccaaggaaacccccacccagcggagaaccccacaagggagaccgcaaggccggggcaggccagaaag

SEQ ID NO: 12799 - RNA, 77 nt, Homo sapiens
cgacgccagaagaccaagaccgcagaccgaccccgagagaggacgcgccgggaggaaccgaggccacagagaggcac

SEQ ID NO: 12800 - RNA, 79 nt, Homo sapiens
aaagcgcaagcggacacaacaggcaaacagaaaggcaaagaaaccccaaagccagcaagaccacagcagcacgcaccag

SEQ ID NO: 12801 - RNA, 68 nt, Homo sapiens
aacgaagcacagacaccacaaagacacggccggccgcaagacgccacggaaggccaaagcagccggcg

SEQ ID NO: 12802 - RNA, 77 nt, Homo sapiens
gccaggccccagggcgagcacagcacacaaggaccaccaagcaggacccgaggaaaaaagaacacccgagcaaagga

SEQ ID NO: 12803 - RNA, 52 nt, Homo sapiens
ggcgaagaaccagaccggaccagcaacgaaccaaacaaaggaccgggagagg

SEQ ID NO: 12804 - RNA, 83 nt, Homo sapiens
gcccgccgccggccacgccgaggcgcccgcagccacgcggaggcggcggggagccgcgcgcggcaggacggaagggaaaccgg

SEQ ID NO: 12805 - RNA, 77 nt, Homo sapiens
gccgcccgagcacgccgcgcagcccggccgccggcccccaacagcgccgcagcgaaaaggggccacagaggcgggcc

SEQ ID NO: 12806 - RNA, 82 nt, Homo sapiens
ggggagcgaagcgagggcgaagcacgacacagaaggggaggggagggaaaggcccaggaaaaaggaggcagccgaagaagca

SEQ ID NO: 12807 - RNA, 75 nt, Homo sapiens
gaaaaaaccgagccagccagcaggaaaacagcagggacagaacaaaaacaaaccccgacgggaagccccccaacc

SEQ ID NO: 12808 - RNA, 72 nt, Homo sapiens
cagcgggccggacggcccgcagaaggcggccgaaccgggccaaggaccaccgcccagcccccagaggcagga

SEQ ID NO: 12809 - RNA, 83 nt, Homo sapiens
gcgaggacagcgcggcccgcgaggagccgccgcgcgcccgcgcccccgcgcgacgccagaaaccaggcccaagaaggaaaaaa

SEQ ID NO: 12810 - RNA, 51 nt, Homo sapiens
ggccgaggcaggggacacgaggcgggacgcaaagcagaccgcagaaaggcg

SEQ ID NO: 12811 - RNA, 81 nt, Homo sapiens
ccgcacgacccagccccacacggcaagacacagagagacggcagccgcgacagacacaccacgccgaccgagaggcaggag

SEQ ID NO: 12812 - RNA, 77 nt, Homo sapiens
ggacccccagaagaggaccgcggagcagaagcggaggaagcccggagacaaggaccgcccaagggacgggccaacgg

SEQ ID NO: 12813 - RNA, 61 nt, Homo sapiens
agaaaaggaaaacaagaaacaacgcaaccccaagcgcccacccaagccgcgaaagaagaag

SEQ ID NO: 12814 - RNA, 80 nt, Homo sapiens
caagacccgcggcaacggcgccggcaggcacaacaaccaagaaaaacgggggccgccgccaaggccaagccgacgccagc

SEQ ID NO: 12815 - RNA, 61 nt, Homo sapiens
cgcgagcaaaaagagccggggggcacaccggggagcccagccaaggagccacacagaagcc

SEQ ID NO: 12816 - RNA, 89 nt, Homo sapiens
cagcagcccagggaagagggaggcgaggagaagccgaacccaagaaggcagaagccagccccgcaggccgccacccgcccccgggccgc

SEQ ID NO: 12817 - RNA, 71 nt, Homo sapiens
ccggagcaccgaaacgccgaaaacgagccgcaggacaagcggcagaaaaaacaacacgggaaagcaacaga

SEQ ID NO: 12818 - RNA, 70 nt, Homo sapiens
aaggagagaacgcgagggaagaaacacaggcaccaacaacagggacaaccagccaacacagagagaagga

SEQ ID NO: 12819 - RNA, 83 nt, Homo sapiens
gagcgcgaaggccgggacccggccccggcccacaggggggggcaaacccgagagaacggccgaaaaggaagagcagccgagga

SEQ ID NO: 12820 - RNA, 81 nt, Homo sapiens
ccacggagacaccagccagcgaggacaaagagaagccaccccccaagcagcggaggcagcagcacgaccggccacgcaacc

SEQ ID NO: 12821 - RNA, 70 nt, Homo sapiens
aaagcccgaacgaggaaaaacagccaagacggcaaagccccccagaagaccagccggagagaagagagag

SEQ ID NO: 12822 - RNA, 68 nt, Homo sapiens
agagcaccgcagcagaagacccccacacccaggaccaacaaacagccaagagggagagaggcacggcc

SEQ ID NO: 12823 - RNA, 71 nt, Homo sapiens
aaaccgcgccccgcaagagaaggccacaaacggaaccagcgaggacggggacccagacgcaggagaggagg

SEQ ID NO: 12824 - RNA, 73 nt, Homo sapiens
gggaacaacggcgccagaaggcaagacgcagaggacaagggaccccaacccggggcagaagagaaagaaacgg

SEQ ID NO: 12825 - RNA, 95 nt, Homo sapiens
ggcacggcgcagccggagggaagcaagacgcgaagccacccagcgccggaggaaaccccccaggcaagaggcgcaggaccgggaagaccaacaaa

SEQ ID NO: 12826 - RNA, 106 nt, Homo sapiens
cggagaagccacgagcagacagcaacaagggcccgggaagggaagagaggaagaaagaagcgaaagagagaagagcaagagaaagcaaagaacaaacgcagacaga

SEQ ID NO: 12827 - RNA, 74 nt, Homo sapiens
caggccagaacccccaacccggcgccgcccacaagccaagaaaagggagacgggagagagaaggggggacaccg

SEQ ID NO: 12828 - RNA, 77 nt, Homo sapiens
ccgggagcaacgggcagcagcaagccagacacaaggcggcagcggacacaaggggacggacgaaccggaaacccagc

SEQ ID NO: 12829 - RNA, 69 nt, Homo sapiens
cgcggcgcccggccccccaggggcccccgcggcggccagaaggacagggggaccgcccaggccaaggga

SEQ ID NO: 12830 - RNA, 86 nt, Homo sapiens
ccacggagagcacgagagacccgagcacgccacccccacccgcacaggaccaagagacgaggagaggcagaaacggaaggcggaca

SEQ ID NO: 12831 - RNA, 60 nt, Homo sapiens
cccaccccacaagggcccggccccaccaaaccgggaaaaccagacgagagacagaagacg

SEQ ID NO: 12832 - RNA, 77 nt, Homo sapiens
ggaaccacaagagccagaagggacggagaagacagcggacacaccgccacccagggagccagaacaacccgaaccgg

SEQ ID NO: 12833 - RNA, 75 nt, Homo sapiens
ggcagggacagcgcaggcagcagcccaaaaaaaggggagacagccaaggcaacggggacggaagggccgaggaac

SEQ ID NO: 12834 - RNA, 76 nt, Homo sapiens
agcccacacggcgcacgaggggaagggcaggaggaggaggaggggcccggcggcggggagacccagagcaggacgg

SEQ ID NO: 12835 - RNA, 109 nt, Homo sapiens
gcgcggagggcggagagacccgggggcgagcacaaacggggcggggccggggaacacacagggaagagcgagacaagagccaaggacagggcccgccaccagaaggacc

SEQ ID NO: 12836 - RNA, 76 nt, Homo sapiens
agacaacagacccggcgcggcgccccgggcccagcacgcggggcaggcgaaagaaggacgcagccaagccacaaaa

SEQ ID NO: 12837 - RNA, 73 nt, Homo sapiens
aggcaggccggaagcgggccggaggacgccgggaggcgacgacgagagggaggaggagaagggcagagacgga

SEQ ID NO: 12838 - RNA, 82 nt, Homo sapiens
ggaggggccagcgagccccaccgccgccgagaggaggccagagaacaggggccaagacaagcagcagagaggagcagcgggg

SEQ ID NO: 12839 - RNA, 67 nt, Homo sapiens
agaaggaagcggcgccgaaaaaaaggggggaagcacaagagggaaacaacaacagccaaaggaccca

SEQ ID NO: 12840 - RNA, 80 nt, Homo sapiens
gccacgaggagcggaccgcgcacacggcacaggcaccagcccgggcagcgagcgcaaaaagagaagaagaaggaggccgc

SEQ ID NO: 12841 - RNA, 81 nt, Homo sapiens
ccgccccagccacccaggccccgccgcccgggggcgccgcccaccgcgcccgccggagacggcgaagaacagaggaacaac

SEQ ID NO: 12842 - RNA, 40 nt, Homo sapiens
cccccagccgcaggcccggcggagagcaaagagcccgaca

SEQ ID NO: 12843 - RNA, 68 nt, Homo sapiens
gccaaggagcacacagcacggacgaaagggcggaagaccgagaccggcaaacccgaacacaaaccagc

SEQ ID NO: 12844 - RNA, 80 nt, Homo sapiens
gagcggcagggaaccgaccccagaacccggacgggcggcgggccaacgggccaacgccggcaggggacggcccacgcgac

SEQ ID NO: 12845 - RNA, 68 nt, Homo sapiens
cgcgagaccggggcgaaacaagacggaagaaggcccaccagcagagagaacggcccgggacaaacagc

SEQ ID NO: 12846 - RNA, 55 nt, Homo sapiens
acaaagagccgcgggggcgggacacaaggacaccagcgaacccaccagccccagg

SEQ ID NO: 12847 - RNA, 82 nt, Homo sapiens
ggccgcgagaccgcagaaggagcggagcggcagcagaaggaggacaccagaggacgcccggcagaagggagcgagcagcacg

SEQ ID NO: 12848 - RNA, 73 nt, Homo sapiens
gggagaagacagaaagacccaccccggaaggaaacccacaaccagcccccgagaaggaagagacacaaagcac

SEQ ID NO: 12849 - RNA, 83 nt, Homo sapiens
gcgggagccggcggggcggcggcaacggggcacgaccgggggaaagaaaccgacggccccaggagagagccagcaggcagcag

SEQ ID NO: 12850 - RNA, 86 nt, Homo sapiens
acacaccgagcccgcacggagccagggagggacagcgcccgagaccagcgccggacacggaacggagccggccaagggagaaagcc

SEQ ID NO: 12851 - RNA, 68 nt, Homo sapiens
gccagaaaaacaaaaaccccccccacaggaccaacaaaggcgcacaaaagagcacaaaagcaccaagg

SEQ ID NO: 12852 - RNA, 86 nt, Homo sapiens
aaaaagcccgcaggggcgagggaggggcaaagaaaaaggagagaaaaagaggcaaaacaacaagaagaaaagagaaaaaagagagc

SEQ ID NO: 12853 - RNA, 68 nt, Homo sapiens
aggcagaacaaccgggcacgcgagaggaacgggaggcgaagaaagccagccaaggccgccgcagcccg

SEQ ID NO: 12854 - RNA, 82 nt, Homo sapiens
cgggcgccggcaagacaagaggcagccagcggacggacaagcagaccggaagaccgacggaagaccacaccccgagggagcc

SEQ ID NO: 12855 - RNA, 76 nt, Homo sapiens
ggaaagcgccacagcgagcaagccaccaacagcggcccaccacaaaagggcggagaacggaaaagcaccaggaagc

SEQ ID NO: 12856 - RNA, 79 nt, Homo sapiens
ccccggcgggaccgggcggcacgcacgcgggcagggaacaggcggagcggaaggggccgggagaggaaggccccaagca

SEQ ID NO: 12857 - RNA, 78 nt, Homo sapiens
ccgcgacagaggagggaggaaaacaaccgagggcagacagcaagcagcaagcggaaaaccacggagcgccccgcacgg

SEQ ID NO: 12858 - RNA, 51 nt, Homo sapiens
ccgagcccgaccccacaccacacaaaacccgggagaagacaacacgaagaa

SEQ ID NO: 12859 - RNA, 55 nt, Homo sapiens
cagagcacagacaggcaaaagccaccgagcgaagacccgagaacaagacgccggg

SEQ ID NO: 12860 - RNA, 55 nt, Homo sapiens
gcggacacgcggggaacgggggaggacacgacgccccacgccacccggacccccg

SEQ ID NO: 12861 - RNA, 83 nt, Homo sapiens
agaagaccaccacaacaagagacaacaccgcgcggaccacaaaccgcgccagaaaacacacaaagggcggagggccggaaacc

SEQ ID NO: 12862 - RNA, 68 nt, Homo sapiens
agggggaacgggaggggggaacagaaagacaacggacaaggcaggaagaaaacccacacgaggacgga

SEQ ID NO: 12863 - RNA, 82 nt, Homo sapiens
cgggggcgacccccccgcgcccccccccccgccagaagggaaagggagcagcaccggccacacccacagcacgaccggaacc

SEQ ID NO: 12864 - RNA, 72 nt, Homo sapiens
cacaacccgacccgacgaaggaaacacgaaagcaagacccaccaggggaggaccggggaagggacccgaggg

SEQ ID NO: 12865 - RNA, 103 nt, Homo sapiens
gggcaaccagaacccgccccgcccaaaagaccaccgcccaacacaacacgcagggagcaagcccaaaccagaagcaccagcggaacaagaagagccagaggga

SEQ ID NO: 12866 - RNA, 65 nt, Homo sapiens
gaacaggacgcccggcgaggacaaccagaagaaaaagcagaggaaaccagagaccaaaagcacca

SEQ ID NO: 12867 - RNA, 76 nt, Homo sapiens
agaggggaggcgcgaaagcccagggccgaaaagaaaacaggagaaccacccgccaacagcaagcgacccaaggcgg

SEQ ID NO: 12868 - RNA, 85 nt, Homo sapiens
gacgggagggcggaggcggcggcgagcacaggcccgccagggcggcgccccgggacccgcagggagagaacagcacacagaggcg

SEQ ID NO: 12869 - RNA, 74 nt, Homo sapiens
agccgagaggcaagacaacacacccagaaggacccagccaaacagggagaggccgcagccacccccacccagag

SEQ ID NO: 12870 - RNA, 66 nt, Homo sapiens
gaaggcaaacccgaaaccaacacgaaaaaccgggaacagacgcaaaaccgacagagcaacggggaa

SEQ ID NO: 12871 - RNA, 78 nt, Homo sapiens
cacaaggcacgggggccagcaaccaccaagggaacagcacagggaagccaaagagacgaagggcccgggaccgggaca

SEQ ID NO: 12872 - RNA, 72 nt, Homo sapiens
gcgggggaagaagagaaagaaaaccagcaagacccacggcaagaggacgaaaaacacggccagaggcaaggc

SEQ ID NO: 12873 - RNA, 82 nt, Homo sapiens
gggaccacgaaaggagcaagagcaagacaccggacaccgagggcccccaaaaggcgggagggcaagccggggaccaagccag

SEQ ID NO: 12874 - RNA, 80 nt, Homo sapiens
ccacagagggaaaggacccaggaggagaagagccgggaaaacagagaggagaagaaggaacagaccaggcaccagaaaag

SEQ ID NO: 12875 - RNA, 66 nt, Homo sapiens
gccaagcgccagcgcggacccacagcggcgaacagccaggcacaccaacaaccaggcccgccaaac

SEQ ID NO: 12876 - RNA, 72 nt, Homo sapiens
acagacaagaagaaaaccgccacgccaccgaacagcccacaagaaaaggcacacacacccgcaggagagcgc

SEQ ID NO: 12877 - RNA, 57 nt, Homo sapiens
gcgcgggggaggccggcgacgagaaggaagaacagcagcagcgccacaggacaggca

SEQ ID NO: 12878 - RNA, 80 nt, Homo sapiens
ggggagcgacccggggaccgaccggggaccccgccgaagagggaccagaaacgaacaaagccacgagggccaaaaagacc

SEQ ID NO: 12879 - RNA, 69 nt, Homo sapiens
aaaagaaagaaaagaagggcccaacacccacaggccaaagagccccaggacgagacaaggacacaccca

SEQ ID NO: 12880 - RNA, 85 nt, Homo sapiens
agcggacgcgcccccaagaaagcccaccgggggacggcacggcaggcggacgcccggggccccccggaccacgaggagcaccgag

SEQ ID NO: 12881 - RNA, 59 nt, Homo sapiens
acacacaggcgcacccggggccaaagcaggacgagaagcggccaggaagaaaaccaccc

SEQ ID NO: 12882 - RNA, 42 nt, Homo sapiens
acccaggagggcaaacccaagcccaacgcccagacaacacaa

SEQ ID NO: 12883 - RNA, 78 nt, Homo sapiens
ccaaaccaggcgcgacgaagagccccccaagcccgaagaggaaggagcgggcccaagaaaagccgaccagaaacggcc

SEQ ID NO: 12884 - RNA, 57 nt, Homo sapiens
aagccccagggaagccacagcaccccagcacccagaaagccgaaggacggagaacac

SEQ ID NO: 12885 - RNA, 79 nt, Homo sapiens
gaacaaaccgaagaacagcgggaaagaaggcaaaacacggaccaagacacccaggagaaagacagcggggaaaagaaaa

SEQ ID NO: 12886 - RNA, 81 nt, Homo sapiens
caaaaagagcgaaagagagagagccaacaagagccagacaaacagcgcgagagaagaaaggaagaaacacacagcagcagc

SEQ ID NO: 12887 - RNA, 76 nt, Homo sapiens
ccaccaggaggccgagaaggacagagaaccgggaacaggcggacggccagcccacacagcccccgcaagcagagga

SEQ ID NO: 12888 - RNA, 78 nt, Homo sapiens
cgacgcgagaggaagacacccgaccgacaaaaggcgggcacgaaaggaaagccgagaaggcacgacaagccggacccc

SEQ ID NO: 12889 - RNA, 80 nt, Homo sapiens
aagcaaaagcgagaccacagaaaagcaaacaaggcgggaagaagaggagacagaacagacagaaaaaacaacaagaaacc

SEQ ID NO: 12890 - RNA, 72 nt, Homo sapiens
ggagccagggaggacgaagaaagacaagaggaaaagggagaaccaacaaagagggcaccacgaaacaaagca

SEQ ID NO: 12891 - RNA, 110 nt, Homo sapiens
agacggcccagcgacgcaccagcaagacggcaggcgagagccgacccaggccgccggccccacagggcacaaagccacgccgcaacggcaagggaccgccaacaaggccc

SEQ ID NO: 12892 - RNA, 71 nt, Homo sapiens
gcgagcgagggggggcgcgccggaaaccggagcgcgcagcagcccagagcaggggaccccaccggcgccgg

SEQ ID NO: 12893 - RNA, 75 nt, Homo sapiens
cggaaaggaaacaaccacagcagagacgcagcagagccaaggacaaaacgacgcgaaaaagaaacaaagacagac

SEQ ID NO: 12894 - RNA, 56 nt, Homo sapiens
gcgcgagggacaagagcagacgacagcagggccagcaaaacgcacgcacacaggaa

SEQ ID NO: 12895 - RNA, 85 nt, Homo sapiens
cggggggggggggcggcccgggaaggggcgggcagacgcggggacccggcgcggggcgcgggacgacgacagcaccccccacagc

SEQ ID NO: 12896 - RNA, 75 nt, Homo sapiens
agggacccgggaccagcaggagagacaaaggcaacggaggacaccagaccccaagacaagcaaacccaggaacac

SEQ ID NO: 12897 - RNA, 70 nt, Homo sapiens
accccaaacaagaacagaaaacgggaagagagggaacacgcaggagggaaccccaggaccccagcgaacc

SEQ ID NO: 12898 - RNA, 88 nt, Homo sapiens
gggagccagcccgcggccccccgccccccgaaggcgcgccccaaacagcggcagagaggaggaggagcacgagcaccccgcccgaaac

SEQ ID NO: 12899 - RNA, 75 nt, Homo sapiens
ccccccccgacagagacggcggagaccccgaaggcgcaaacgacaccacccgaccgacaagcaacgaaagcccag

SEQ ID NO: 12900 - RNA, 78 nt, Homo sapiens
gcgggagccgcaccaccaacgcggccgacaacagccggcgccgccacgggacaagagaaaaaaagggcgggcgaacaa

SEQ ID NO: 12901 - RNA, 79 nt, Homo sapiens
cgcccaagccgcacagccgcggcggcagcagcaggagagcggggacgacgagcccacggcacaacggaccgacagagca

SEQ ID NO: 12902 - RNA, 89 nt, Homo sapiens
gaaacaacacaaccagaagcggaaacaagcggaaaggacacagcaggacccaaaagaggcccagaggaaccagaacaaccaaggagccc

SEQ ID NO: 12903 - RNA, 51 nt, Homo sapiens
aagcccccaaagagagaaccggagagcacccaacagccgaggagggaagaa

SEQ ID NO: 12904 - RNA, 59 nt, Homo sapiens
gcggaaggccccaacacccggagcagcgccacaagggacaggcaacgccccccaaaggc

SEQ ID NO: 12905 - RNA, 91 nt, Homo sapiens
ccgacccagggcccgcgggccaggagagcgccggcggcagcacccgcggccgccccgacaagcgggagggaccgccgggacccagggaagc

SEQ ID NO: 12906 - RNA, 77 nt, Homo sapiens
aaacgggcgaagcgacgagccgcgaggagcaaggccaagacaggggacagccggccgaacggcagccccgggaccca

SEQ ID NO: 12907 - RNA, 74 nt, Homo sapiens
cggggaacgggcgagcgcggcgcggggcggcgggccggccgaagaggcacacccagaagccacaggagaagcaa

SEQ ID NO: 12908 - RNA, 82 nt, Homo sapiens
cgcggacagagagcggacgggccaacccaaaaccagggcggcaaaacgagcgggccagagagccccgcagggccgccccgcg

SEQ ID NO: 12909 - RNA, 75 nt, Homo sapiens
gggcagcagggggcgcacaacggcaagacccaaccaggggagacaaggccagagcaggggcggggcacacggggg

SEQ ID NO: 12910 - RNA, 73 nt, Homo sapiens
acggaagccgacagacaaccaggccggaaaccccccggaaggggaggaggcgggacaccgacccaagacgaaa

SEQ ID NO: 12911 - RNA, 60 nt, Homo sapiens
aagacgcgaccgcggcgcgagcaccaggaaggagggccccggagcagccacaccaccgag

SEQ ID NO: 12912 - RNA, 83 nt, Homo sapiens
ccgccaccagcccaagagaaagcgcccagcgccagggagccaccccagcccgggccgagccaacaggaccagcagggcgggca

SEQ ID NO: 12913 - RNA, 56 nt, Homo sapiens
ccaaggggagagagggaacagaaaggagaacaccacagccagcaagcgcagagcgg

SEQ ID NO: 12914 - RNA, 74 nt, Homo sapiens
agacaggagagggacccgacaggaagcgaagcaagacaggacaagaagaccccaaaggaaaccgagaagaaacc

SEQ ID NO: 12915 - RNA, 84 nt, Homo sapiens
gggaagcaggacgcgccgcgccccaaggggggcaacaacgccggccacacggggggggagggaaagagacgacccaccgcgccc

SEQ ID NO: 12916 - RNA, 67 nt, Homo sapiens
gagaaggacccgaaagaaagcagagcagcacaagagcaaggagaggggccccccagccggccggccc

SEQ ID NO: 12917 - RNA, 84 nt, Homo sapiens
aggaacgaaacagaaaacacgggcccgacgacccagggcggcacccaccccccgagcccgcccgccggccccagcccccaccag

SEQ ID NO: 12918 - RNA, 77 nt, Homo sapiens
gccagaaagccgccagagcggggcacggagcgggccagagaccaaaaaaccgaagaaggagcccaaacaacccagag

SEQ ID NO: 12919 - RNA, 88 nt, Homo sapiens
cgccagggagcccccgcgcgcccggccggcccggagcaccgagccgcggcacggaggaggggaaggcgcgagccccgcgcgggcagag

SEQ ID NO: 12920 - RNA, 38 nt, Homo sapiens
agacgaaagaaagaccggaccacccaacacacaacggc

SEQ ID NO: 12921 - RNA, 84 nt, Homo sapiens
aaggaaacagcaagcgaagccgaaaaagcgcccgagacgggcccgccgaaagggccaaccacgacaacagaagcgagcagacca

SEQ ID NO: 12922 - RNA, 50 nt, Homo sapiens
ccggcacaggccccgcaagaccaaacaccccacgcccaggccagaagaga

SEQ ID NO: 12923 - RNA, 70 nt, Homo sapiens
aaaggcagcgacggccaccacgagcacggcccgcgcacgcccggagagaggccaagccgacgccagcggg

SEQ ID NO: 12924 - RNA, 77 nt, Homo sapiens
cagaagaggggagaagagaaagaaaggagcaaccgggggccacagcaaagcagaacaggggcaaccgcgcaacggcg

SEQ ID NO: 12925 - RNA, 81 nt, Homo sapiens
gggcaccacagaaaagaccaaaccggaccacccaaaaagccgaagacccccaagaccacagccagcaagcacacgcgcgca

SEQ ID NO: 12926 - RNA, 82 nt, Homo sapiens
agacgccagagcggcggggcaggaggacgcgacggagcagcagcgaaaagaagcggggcggagggcgccccgagccccagac

SEQ ID NO: 12927 - RNA, 76 nt, Homo sapiens
cagcgcccagacgggccggcccagagccccgggcgccggggccgcgagggagagaacagcacacagaggcgcaagg

SEQ ID NO: 12928 - RNA, 75 nt, Homo sapiens
ggcaagaggcgcccggacggggaaggacggggggagaccagaccaagacacccaggagaaagacagcggggaaaa

SEQ ID NO: 12929 - RNA, 77 nt, Homo sapiens
aaccaggcacggcgccgaaacccacacagaggagggcacgcggccagaggcgggggagagcccggaaaaccaaaagg

SEQ ID NO: 12930 - RNA, 75 nt, Homo sapiens
cccacgacgcaccggacagcaaggaaggaacaacaaaccaagagagacgagcccggaaaggaacgagacgcagca

SEQ ID NO: 12931 - RNA, 78 nt, Homo sapiens
acgaagaagaaccgagaagggagccgagaaaggggggaggaaggaaggggccacccagagcagagccggggggcgaac

SEQ ID NO: 12932 - RNA, 80 nt, Homo sapiens
ggcggcgacggccgcggccgcccgaagaaccccgagacgaggaggaaggccaggaacgcagaagaccgcaggggaaaacc

SEQ ID NO: 12933 - RNA, 38 nt, Homo sapiens
cccggccccaaggccggagcgggaagcagcacaagcgg

SEQ ID NO: 12934 - RNA, 67 nt, Homo sapiens
acggaaccggggggagccgaaaacaccagccggcccaagcgggcccccgagggaacaggcacgcccc

SEQ ID NO: 12935 - RNA, 103 nt, Homo sapiens
cgacaaccagaaggggaacgaaagacagaagcagagcgaacagaggaacggagcgacgaagacggggaagagccaagaggcaccacacgccacacaccgcacc

SEQ ID NO: 12936 - RNA, 74 nt, Homo sapiens
acggcccccgcagcccaccgcacgcaccaggaagaagaggcggaagaaacaacaagcgcaaggagcgcccaaac

SEQ ID NO: 12937 - RNA, 86 nt, Homo sapiens
caggggaaaacccccgggaccaggcgccgcgggcggacacgccagaggaggaggccggggaaggccgcgggggcagcaagcagcag

SEQ ID NO: 12938 - RNA, 79 nt, Homo sapiens
cgagcccagcccccagaaaggaggacaacgggacccagaagagacggacacccgacacccggacccaggagccccgcac

SEQ ID NO: 12939 - RNA, 73 nt, Homo sapiens
cacggcgaggcgggggcaggcggagaaggagacaccggaggacgaagagggggagggcgcggaagcgaaaagg

SEQ ID NO: 12940 - RNA, 76 nt, Homo sapiens
cggacaccgacagcacagacagaacccgcaccaaggacaggccaaaaggggaggggaacgaccagaaaacaaccca

SEQ ID NO: 12941 - RNA, 84 nt, Homo sapiens
aacgaacagcagccagaagaggacgggaccgggaccgcccggacccggccgggagaagcagcagagaaagaacccgggccgaga

SEQ ID NO: 12942 - RNA, 79 nt, Homo sapiens
gggggaggaagagaagacaacgcacaacagcccgggcgcgccaggcacagccaagagcggaccggcagcggccagcgca

SEQ ID NO: 12943 - RNA, 72 nt, Homo sapiens
gcgggacaagaacagggccacagggccggaacacagaagccggacggaaacaagaggcaccaggccgccaga

SEQ ID NO: 12944 - RNA, 75 nt, Homo sapiens
ggaaaaggaaaaaacaaggggaagacccaaggaaccaggcgaagcagaacaaagccagaagccaaccgccccgcc

SEQ ID NO: 12945 - RNA, 87 nt, Homo sapiens
acccacgcccccaccccccgagagccgggcgcccgcgccggcagaggaggcgagcacccgccagggagaggaacccccgcgcaccca

SEQ ID NO: 12946 - RNA, 73 nt, Homo sapiens
agaggaggagagggcgggcaggcagaggccccaccgcccgagccgcccagagacagcgccaccggacggggcc

SEQ ID NO: 12947 - RNA, 79 nt, Homo sapiens
agaagggacgccaccgccccacacggcggagaagcagcggggggccacgcgacaaggggcccgggcagagggaaagcag

SEQ ID NO: 12948 - RNA, 82 nt, Homo sapiens
ccgaccgggcccgggcggaggaaaaccccacgacaaaggaccaaggagaagaaaaaaggaaaccgacaacaggccaaggggc

SEQ ID NO: 12949 - RNA, 85 nt, Homo sapiens
gagccagccgggacggacagcgcgggagggcgccgcggggcagccgccgcccccgggggacgaggagcacaaccagacagggcca

SEQ ID NO: 12950 - RNA, 53 nt, Homo sapiens
acagggcagaccaaccaggcggaagacagccagaggagggggagagcggagca

SEQ ID NO: 12951 - RNA, 78 nt, Homo sapiens
agagcgagaggaaggggggccggggggggcacagagccccggaagacagcccccagcgaccagacccagggccagagc

SEQ ID NO: 12952 - RNA, 78 nt, Homo sapiens
cgggggcagcaggggacccgacacccccccccaccgaaccgcgaggccgccaagaacgagcaggacaaaaacaccgaa

SEQ ID NO: 12953 - RNA, 76 nt, Homo sapiens
ggcacgagaacgggacccggccagaggaaagaacccgaggccaaaacagaagaggcaaagcccagccacagcagca

SEQ ID NO: 12954 - RNA, 82 nt, Homo sapiens
gaacaagacgggagccacaccggcacaacaccccggaacaaggccggccaacggagacaggcagcgaaaccaccccagagca

SEQ ID NO: 12955 - RNA, 79 nt, Homo sapiens
agaagcgggaagcgacacaaacaaaccgaaagaagaagaggagaagaaaagaccagacgcggccgagagcaggaggcgg

SEQ ID NO: 12956 - RNA, 79 nt, Homo sapiens
accggcaccaccaaaggaagaaggacagaagcaccaggcgagcagacagacgcagaggcaagaagaggagagaagaaga

SEQ ID NO: 12957 - RNA, 74 nt, Homo sapiens
aaacgagggacaacacagacccaccagcagagaccacaaaccagcgccgacggaggaggagaaggaaaaggagc

SEQ ID NO: 12958 - RNA, 56 nt, Homo sapiens
ggacagcgcacacagcaagcacgaggccggcacacaaagaaagccccccagcgacc

SEQ ID NO: 12959 - RNA, 81 nt, Homo sapiens
ccggccgacggccagccacaagcaaggcccaaccccaaacaccgagaagacaggcaagaccaccacagaggccgggacaag

SEQ ID NO: 12960 - RNA, 69 nt, Homo sapiens
caggccaaaaccgacaagacacaagagacagcaacaaagcaaccggaaagggagacgaggccacaggcc

SEQ ID NO: 12961 - RNA, 68 nt, Homo sapiens
ccacggcagagcaaagcagaagaagaaagacaagcgcccacccacccagaacaggagccaccgcaccc

SEQ ID NO: 12962 - RNA, 82 nt, Homo sapiens
cgaggccaccgaggcgaggagaggagagccagaaacccaagaggaggaggaggagagcaacaccagcaaaggcccacgcggc

SEQ ID NO: 12963 - RNA, 101 nt, Homo sapiens
aggagcagaaaccagccacgggccggaggcaaaaaacgaggcaggaaaaggaggaggcaccaagagggagggcccggaagaggaacagaaagaggcagaag

SEQ ID NO: 12964 - RNA, 84 nt, Homo sapiens
acacacgccgaggccaaagaaaggcggacgaaagaaagaaggagcaccaacgcaaagaaaaagaccaagaagaccagggacgcg

SEQ ID NO: 12965 - RNA, 61 nt, Homo sapiens
aagccaaccaagccaggcacacagaggaaccgggccgggcagagcgagagaggcagccagg

SEQ ID NO: 12966 - RNA, 90 nt, Homo sapiens
gcaccccaccgaccagcggacacgggggacgacaccggagaaggcagcgacgacagcgacagcgagaagaggaggccgaggagcaggagg

SEQ ID NO: 12967 - RNA, 77 nt, Homo sapiens
cagaggcccaagacggcacaaaggcggacacgaaaccaccgggaagcgccggggaacgcaggagaagaaaacagcga

SEQ ID NO: 12968 - RNA, 71 nt, Homo sapiens
gcccccgaacggagaagagcgaaccgccagacccccagcgcagaaaacggggacggacccaggccaggaaa

SEQ ID NO: 12969 - RNA, 104 nt, Homo sapiens
aacgaagagcagagaccaacccaagcgaagaagagcggaaaacaagggaagccgcaaggcgaaaagggaaagaaaagaggcgcccggaggccaaaacgcacaaa

SEQ ID NO: 12970 - RNA, 74 nt, Homo sapiens
agccgagggcaggacagcgccagaagcagaggcgcaaagaagcgaaaacaaaaccagccaagcagaggagaaaa

SEQ ID NO: 12971 - RNA, 80 nt, Homo sapiens
gcagagcgcccgggggagaaggccgagggccgggagcccgcaccgggccggcagcacccggaggagaagaggcgcggaac

SEQ ID NO: 12972 - RNA, 80 nt, Homo sapiens
agaagaaccagcaaaaaaaccaacagaaagaaacagaacaggaagacacagagagaagcgacccaagagaagcaagacaa

SEQ ID NO: 12973 - RNA, 56 nt, Homo sapiens
aggggaaaaagcaaaccagaccaaggggaaggcagccggcacccgcacaacccagg

SEQ ID NO: 12974 - RNA, 58 nt, Homo sapiens
cccacggaggcggaagccgcccccgaaagaccgaccggaagcagggacaggaagaggg

SEQ ID NO: 12975 - RNA, 77 nt, Homo sapiens
acgaggccaccacaaccccgcaaacaccaccacgaccccgccccccgaggcgcagcccgaacccagcagccacacgc

SEQ ID NO: 12976 - RNA, 80 nt, Homo sapiens
aggcacaaggaacagagagcggccacaaaccacacggaagcgggagaggaaagacagaagagaggggagaagaagcccgg

SEQ ID NO: 12977 - RNA, 81 nt, Homo sapiens
acaagccaggcagaccggggacaacaaagcgcgggaacaaagcagcccaggcagaccccaggcagcgcacgggaaagcgcc

SEQ ID NO: 12978 - RNA, 54 nt, Homo sapiens
aaagcaagggaaggcgccccaacaaagggaagcgagaagagagaacgagagcgc

SEQ ID NO: 12979 - RNA, 67 nt, Homo sapiens
aggaagaggcacgcgagggggcgcgaggggaacggaggccagagcgcggagagaaggcaggcggaga

SEQ ID NO: 12980 - RNA, 55 nt, Homo sapiens
gcggccaggcgacgccacccaagacacaaacggcgacacagacaacggcaagcgg

SEQ ID NO: 12981 - RNA, 84 nt, Homo sapiens
cgaccgcgcggccccaaccacgcggcgcgagccccgcccccgccgccgcgcacaaccgcacggcagacgaagccacaaaagagc

SEQ ID NO: 12982 - RNA, 76 nt, Homo sapiens
cggccccgcccgggcacagaggcacaacggagcgaaacggaaaagacaaggaaacaggggcaggaagagaacaggg

SEQ ID NO: 12983 - RNA, 72 nt, Homo sapiens
aggcccaccagccccgccaaacagagaggggcgaaaacgcggaagcggagacacaggcggcgcgggacgcag

SEQ ID NO: 12984 - RNA, 78 nt, Homo sapiens
accccaagcgacgcaggcagaagcgagacggcaaggagagcgcgcgccgcgcgcccgcacaaacgccggggacaacaa

SEQ ID NO: 12985 - RNA, 85 nt, Homo sapiens
agcagccggcccgggcgggcgcccgccggcacgccgccagccccgggggccacgagcggaggaagaaggccgaggacagaggaca

SEQ ID NO: 12986 - RNA, 75 nt, Homo sapiens
cagaagggaggagaacaccagaacagcaggaacaggaacaccacaagaaacacagaaagcggaaaagaggaaaga

SEQ ID NO: 12987 - RNA, 68 nt, Homo sapiens
cacaaacgcacaacaaaaggagcaacgaaagcccggaacgaagaaaccaaagcgaaaagagacaggaa

SEQ ID NO: 12988 - RNA, 79 nt, Homo sapiens
cccgcccacaaccaggaggcaggacagcggcccaacagcccccgggaccgggccgccgcccacagaccagcccggggcg

SEQ ID NO: 12989 - RNA, 81 nt, Homo sapiens
gccaaaaggacaaacaaggaaaaccaacaacagggggaaaaaaacgagccggggaaaaccccagggcaaaacgccagaaag

SEQ ID NO: 12990 - RNA, 69 nt, Homo sapiens
aaaggagcagggaggcccccagagaggggcgccaggccaggcggcgaaccgagccaaggaccgcccacc

SEQ ID NO: 12991 - RNA, 74 nt, Homo sapiens
ccgaacccaaccagaagagcccaaccaaccccacgaaacgagaagcacgacgcaaaccgcaacccaccaaggag

SEQ ID NO: 12992 - RNA, 110 nt, Homo sapiens
cgggaaagacaccacacagcgcagcgggaccacgccggagccgaggacacccgcgcacagaggaaacgggagacgagagagaaaaaaaagaggaagcagaagaaaaccag

SEQ ID NO: 12993 - RNA, 61 nt, Homo sapiens
gaagagaacaagagagcaggaaaaacgaaaacgcaaagccagagcaagaaagaacaggcca

SEQ ID NO: 12994 - RNA, 53 nt, Homo sapiens
gagaacacgggcacacaggggaagcgacgaggaagccaagcaggccggaaggg

SEQ ID NO: 12995 - RNA, 51 nt, Homo sapiens
gacccaccacccaggccccgacgccccgagggaaacccagacgacaaggaa

SEQ ID NO: 12996 - RNA, 79 nt, Homo sapiens
cgcagcaagacgggacggacacaaccagagggaagcacgcccgggcacagcggaagagacgacggaacagccccggcga

SEQ ID NO: 12997 - RNA, 75 nt, Homo sapiens
accaaccacggcccaccacacaaaggccaggccaccggaagacgcaaaacaaaaggggccaaggacgcacacacc

SEQ ID NO: 12998 - RNA, 83 nt, Homo sapiens
gaggggccagccgaggagacgcccagcgggcagagcacccagggcacacaaagcgggaaagggaaagccccaaagcagccgca

SEQ ID NO: 12999 - RNA, 100 nt, Homo sapiens
gccggacggagggagacaaagcagcgcccgcgccgggcccggaaagcgccgcccagcagccgcagaggcgcggccagcgaagaagacgcagccagacccg

SEQ ID NO: 13000 - RNA, 60 nt, Homo sapiens
ccgaacccaaaccgagccaaacaccaagaggcccccgaggagggaacaagccagaccagg

SEQ ID NO: 13001 - RNA, 81 nt, Homo sapiens
aaacccaaacaaggggaccgcagagagaccacagcccacaagacagaagggccaaccagaagacggagcaggcaaaggaga

SEQ ID NO: 13002 - RNA, 80 nt, Homo sapiens
gagcagccccgcgcgcgcgagagcccacgagcgaggccgcaggggagcccggcagccgcccggaagcgccgcaagagagg

SEQ ID NO: 13003 - RNA, 95 nt, Homo sapiens
gcccagcaccggcgaagccgggccaaaggacgaagaacccacagaggaaaccagccaagcaaccggaaagaggcagaacaccaaggaaagaagaa

SEQ ID NO: 13004 - RNA, 82 nt, Homo sapiens
agaccagcaggaggacaaggagaacagaccaggaagaggcagaagaggaggaccacacgcccgcaccgcccgggcaccacca

SEQ ID NO: 13005 - RNA, 73 nt, Homo sapiens
ggaagacacacgcaccgcaacaaaacacgaaagacacggaagcacacagaaacggggcaccggagccaggagg

SEQ ID NO: 13006 - RNA, 74 nt, Homo sapiens
gggaaaccggcccaaccaaaaaggaaaacaacgaagaagaacagaaaggggccaaaaaggggcggaaaaagcca

SEQ ID NO: 13007 - RNA, 86 nt, Homo sapiens
acccggccgggagaagcagcagcgcaaggcccagccaaggcccggcaccggccacgagcacgcgcccgaggccaccccaagcaccc

SEQ ID NO: 13008 - RNA, 81 nt, Homo sapiens
agaggcagccaccacgggccggggacccaaccagagccggccgggagccaggaggccaccacaaagccgggaggccgggac

SEQ ID NO: 13009 - RNA, 86 nt, Homo sapiens
gggacagcaaaaagacccaccaaggaagcagcggccacgccaggagccaggcagaaaagaaaagaagaaaagaaagagaaacggga

SEQ ID NO: 13010 - RNA, 81 nt, Homo sapiens
agcggacagacaccagagacagggcagccagcagaagaaagcaagcagaggcgaggaggcagcgagagcccagagaaggga

SEQ ID NO: 13011 - RNA, 77 nt, Homo sapiens
accgggaccgccaggagcagacaaaccggagagcccaaagagagcgcccaaccaaacgcaaagcaccgcgccaggga

SEQ ID NO: 13012 - RNA, 78 nt, Homo sapiens
aaaggccaagaaggcagagcacgcagccgggggaggccacagcgagccaccagcccgccacacagagaggccacgacg

SEQ ID NO: 13013 - RNA, 81 nt, Homo sapiens
aaaccaaacaaacgcagccaggaaccagagaaggggcaaacggcagcagagcgggagcgacagggagaagaagcgaaggag

SEQ ID NO: 13014 - RNA, 77 nt, Homo sapiens
ccgcgcagcggcccggcggggcccggcaccaggaccaccgcggcagcacgcggcgaaaagcccaacaccacgagaag

SEQ ID NO: 13015 - RNA, 76 nt, Homo sapiens
cgcgagggcggcacaccgcgaggccgaggaccacgacgcccagaagagcacaaagaaccaacgccaaggcagcgcg

SEQ ID NO: 13016 - RNA, 80 nt, Homo sapiens
gggggaggggaagagcaggaaccggggcaggcgccagggcagagcgccggcgcaggcagggaagcagaccagcaggagga

SEQ ID NO: 13017 - RNA, 79 nt, Homo sapiens
gacccgggccccacagagagcccggcagcgacaagcccagaaaacgcgcgaaaagcaggagaagagaaacaggacgcga

SEQ ID NO: 13018 - RNA, 89 nt, Homo sapiens
caggcccaaaaggcgaagggggcgcagcggagaccgagagcagggggaggggcagaggacgaggagggggccgggaacccaagacagaa

SEQ ID NO: 13019 - RNA, 83 nt, Homo sapiens
ggccggccgcagcacccgccaccgcgccggccgcccgcacgccgccgcagagaacaaagaaggcccccacaacccaagcacgc

SEQ ID NO: 13020 - RNA, 83 nt, Homo sapiens
ccgcggaccaccgccgccaggggacccggcaaagagagaggcacacgccgccgaaggccaggagcagaggccaacgccccaag

SEQ ID NO: 13021 - RNA, 83 nt, Homo sapiens
cccgagaccagcgccaccaccgcagcacggggacagacagagcagggggaaggcagggccggcccgcagccgcccagacccag

SEQ ID NO: 13022 - RNA, 83 nt, Homo sapiens
accgggacagcaacacccacaggacacgaaggcggcccgccggcagagcgagggcagaggccaagaccggcccaagaaggaga

SEQ ID NO: 13023 - RNA, 73 nt, Homo sapiens
gaaaggacaaaaccagaagcaggggcaccacacccagaccaccaaaacaaagggccaggaagaaagccacaga

SEQ ID NO: 13024 - RNA, 76 nt, Homo sapiens
ccagcagacgcagccgagacaccagcccgaaacaccaccaaggcggagagagcagggacgccaaggacccaccaga

SEQ ID NO: 13025 - RNA, 70 nt, Homo sapiens
ccgggacaagaaaccaggcaaaaaccggcgccacaggcacaccgacagaacaacgagaaccagcgcggaa

SEQ ID NO: 13026 - RNA, 84 nt, Homo sapiens
gagaaagacaaccaaccccaccgaggaggacagagacgcaaagacaaagcaggaggacacaagaagggaggaaaggcggaccca

SEQ ID NO: 13027 - RNA, 76 nt, Homo sapiens
gcaccccgaggaggaagacgaacgaaacacgaaagggcaggcggccaaggaacaagacacagaaggaagaaggagc

SEQ ID NO: 13028 - RNA, 73 nt, Homo sapiens
agaaacaggaaaagaaaccgaaagaacgcgcaggaagaggagaggcggacgcagggccgaacggagaccagag

SEQ ID NO: 13029 - RNA, 75 nt, Homo sapiens
gaaggcgcgaggaggaaaggaggacgaggaaacagacaggagccaaaccggagcagggacagcgcgggaacaaac

SEQ ID NO: 13030 - RNA, 89 nt, Homo sapiens
gagagggaggcgggaggagcggcagccgcgaggaggcgcgggagggcgagaacgaccccgagacgggaccaaaagccagccccacggag

SEQ ID NO: 13031 - RNA, 70 nt, Homo sapiens
ccgcacaccagacaagacggccaaagggcgggcacaagggaagacagcgcccgggacccaacggaagagg

SEQ ID NO: 13032 - RNA, 71 nt, Homo sapiens
gcacagaagagacaaaaaccaaacggaacagccccaagccggaaacccaggaacggaaacagaacggaaca

SEQ ID NO: 13033 - RNA, 67 nt, Homo sapiens
aagagggagaaggacaaaagacaccgagaagggaaaaaggagcaccaggcaaaagcaagaaccaaaa

SEQ ID NO: 13034 - RNA, 97 nt, Homo sapiens
agccaagcaggaccacccaccagccaccaggagcgcggcgccaagagagggagaggagaacccagccagcaagcccacgccgggcaggacgacaggg

SEQ ID NO: 13035 - RNA, 72 nt, Homo sapiens
acaaaagaggaagcgaaggccacccccaaccaggaccaaagacgaccaccaaagccagcccccagaacacgc

SEQ ID NO: 13036 - RNA, 83 nt, Homo sapiens
agcgcgccggaggcccggccacccgagaagggagacgacgcgcgggccgcgagcggggcgacccgagcgggagagggaaagcg

SEQ ID NO: 13037 - RNA, 79 nt, Homo sapiens
accgcaggcgaagcggaaggaagcacacacacccgcacgagaccccggcccgcaccgagcgagggcggcaggcagaggg

SEQ ID NO: 13038 - RNA, 85 nt, Homo sapiens
gccgccccgcgagcacagagcccgccgccgaccgccgcccgccacacccgccgccagacccacaggaccgcgaacaaggaggcca

SEQ ID NO: 13039 - RNA, 44 nt, Homo sapiens
gccacaagagaaagagcacaaagaaccaagagggagacaaggga

SEQ ID NO: 13040 - RNA, 77 nt, Homo sapiens
cacaaaccacaaaaacaacaaggccaccaaacgagagcagccaacgcgcggcgagagacccaggaggcagagccagg

SEQ ID NO: 13041 - RNA, 84 nt, Homo sapiens
ccccaaaggcgcgaacaggaaacggagaggcgggcggaccaagaccccccccaggagcaggccccccccccaacaaccggccac

SEQ ID NO: 13042 - RNA, 69 nt, Homo sapiens
gaacagagccggaagcaacacgcagaccgaacggagaagacaacagcaagcagaaacacccgaggaaac

SEQ ID NO: 13043 - RNA, 60 nt, Homo sapiens
gggacaagaggaggagacggagcacgccaaagggaaggaaaacgaaaaggaaaggaggcc

SEQ ID NO: 13044 - RNA, 39 nt, Homo sapiens
ccagggaggacgccccggggaccagagccaccgccggcc

SEQ ID NO: 13045 - RNA, 75 nt, Homo sapiens
cgggagcaacgggaggccggacccagcgagcgggcggcacgcacgcagaaaaggggaagaaggccaaccgggggc

SEQ ID NO: 13046 - RNA, 54 nt, Homo sapiens
cgccgagaaggagcccccgcagaacaaggaaacacgcagaaggaaaagcgcaga

SEQ ID NO: 13047 - RNA, 68 nt, Homo sapiens
aggacccagcgcgggacagccaggagggcacaggaaaagaccccacaagcaaggacaaagaccccgcg

SEQ ID NO: 13048 - RNA, 71 nt, Homo sapiens
cgcaacagcccggcggacgcagagaaaaggggcgggcggcgacggcggagggcccgaaccagaacccgagg

SEQ ID NO: 13049 - RNA, 83 nt, Homo sapiens
accaggggagcacacgagccagacgcgccagcggagcgaaggccaagaacagccgacagaggcaacgcccccagccccccacc

SEQ ID NO: 13050 - RNA, 71 nt, Homo sapiens
agacgcagggcgcccccggcacgagaagagaagcccagagcaaaacaccccaaaccagaccaccgacgccg

SEQ ID NO: 13051 - RNA, 51 nt, Homo sapiens
ggagcggcggagcgccaaggaccgaagacagcggccaggagcacacggcgc

SEQ ID NO: 13052 - RNA, 76 nt, Homo sapiens
ggaagagcaagcgggggaccgaacaaggcaaaagggcgacagagccaacgcaaaaccagaccaacagccacaggac

SEQ ID NO: 13053 - RNA, 91 nt, Homo sapiens
gaacacgcacacggcggagaacgggccggggaagaaacgagcgagcccgggacagcaagagccaagcgccgggacagccagggccagccag

SEQ ID NO: 13054 - RNA, 85 nt, Homo sapiens
agaagaagaagagcaaagggcccgcaggcccagagaaccaggcacgccaagggaacgccaaggcacgaccgggcaccaccacccg

SEQ ID NO: 13055 - RNA, 94 nt, Homo sapiens
gacgagccccccgaggaggaggacggccgcgggggggccgccaccggccgccgccgccgccgcccaggcgcagcaggaaaaaccagccgcaaga

SEQ ID NO: 13056 - RNA, 76 nt, Homo sapiens
gagcgcccaagggggcggagagcggggggggagcccacgcaggagacgggaggagcgacaacggagcacacccacc

SEQ ID NO: 13057 - RNA, 73 nt, Homo sapiens
ggccgaggcaggcggacacgagaccaccgccagggagaaaacccacacaggcagccaccagagagcaaaggac

SEQ ID NO: 13058 - RNA, 72 nt, Homo sapiens
ccaaaggaaggagggaagaccccaaaacagcgagcgggaagcacgcagaggggccaaggcgccccaaggaga

SEQ ID NO: 13059 - RNA, 78 nt, Homo sapiens
cgaggcagggggccacacgcaaggggaacaggggcaacacccccacaaagagcaagccagccggacgcaccacggggg

SEQ ID NO: 13060 - RNA, 82 nt, Homo sapiens
aacccccacgcggccagcgaaaacgcccagaagaagccacacacagaagacccaaagagaacacaggagaggcaagagggga

SEQ ID NO: 13061 - RNA, 74 nt, Homo sapiens
gaagagcaggcgcacaggcacccggaaaggcagcggacagaaaggaagaacagaagaccgaaacaaaaacacaa

SEQ ID NO: 13062 - RNA, 83 nt, Homo sapiens
cccaggccagcgccccaggccaagagggacccacccggcgcaacaggcgacaaggccaagccgccaaagcgccaacaggacgc

SEQ ID NO: 13063 - RNA, 68 nt, Homo sapiens
gacacaaacagcagggagaagagacaacaagacaggggaagggaaccgcgaaaacccggcaggaaaca

SEQ ID NO: 13064 - RNA, 74 nt, Homo sapiens
gaagcagaacgcaggaggagaacgacagaaacccggacacaaaacaagacccaagcaacaaaaacagcggcaca

SEQ ID NO: 13065 - RNA, 56 nt, Homo sapiens
ggagcgggggaaggggagaccccaaaggaccagaccccagcagggaaagcaccgcg

SEQ ID NO: 13066 - RNA, 76 nt, Homo sapiens
caggacacgcgagcagaccgcgaccccggaggccggcggacaggccgcacaaaaaggaaacgcagcagaggcagaa

SEQ ID NO: 13067 - RNA, 76 nt, Homo sapiens
ccagcagacgagcccagaccgacagcagcgaaagaccagcaaagcgaggcagcaagcggacacagaagcacacgaa

SEQ ID NO: 13068 - RNA, 77 nt, Homo sapiens
ggaagcgagggcggccgcgccggcccagcgggcaccggggcccacagaacaagcagccacgggacagggggcgcccc

SEQ ID NO: 13069 - RNA, 55 nt, Homo sapiens
gagacccgccaggagcaaagagggccgcgggagggaggggcaagaaaagacggca

SEQ ID NO: 13070 - RNA, 80 nt, Homo sapiens
gcaaacaaagaaccccccaaggaagccagcagagcagggaggaaaaccaaggcaacgccagcacaccaggcgaagaggcc

SEQ ID NO: 13071 - RNA, 80 nt, Homo sapiens
cccggagcagaggagccaaagcaggcaccagagaaggaggaaccggccggcagcagacggaaggaagaaaagccccgccc

SEQ ID NO: 13072 - RNA, 39 nt, Homo sapiens
agcagcaggaggacaccaaagccgcagccaccaccaagg

SEQ ID NO: 13073 - RNA, 75 nt, Homo sapiens
agcaggagacaaagcaagcaagccaaggacaaaggaccggagcaggggccaaggagaccgcacgccggacggagc

SEQ ID NO: 13074 - RNA, 74 nt, Homo sapiens
cgaaccggcaggcccagcgggacgcagagcaccgacccaacgggcaggccccagccaccggggaccgcaaggcc

SEQ ID NO: 13075 - RNA, 73 nt, Homo sapiens
agagacgagagcacgacacggccgcacgggcccacgccagagagacccgccccgcgcacgagccggaacgccc

SEQ ID NO: 13076 - RNA, 71 nt, Homo sapiens
gaaaaccccccagaagcgcaaaaaggaaagagaggcaggcgcagcccagagggcacccgcaaacagcggga

SEQ ID NO: 13077 - RNA, 70 nt, Homo sapiens
aaagggcaaaggacacacaaagccggaaacaagacaccgaaagagaagaagagacaggaagaaggcggcc

SEQ ID NO: 13078 - RNA, 57 nt, Homo sapiens
gagcgacggaaaagcacagaaaccccacaggaacccaggacgagaaaaaacagagcg

SEQ ID NO: 13079 - RNA, 54 nt, Homo sapiens
agccacagggccggagaggggaaccagcagaagagccaaggagcaccaggaaga

SEQ ID NO: 13080 - RNA, 128 nt, Homo sapiens
ccaaaggcagcgacgagaggagaaccagagaagccgagaaggcgcgaagcacaggaggagaccagccgacagcgaccaaggccagagcgaaaggccacggccagccgccggcacgcagcgcgagcgga

SEQ ID NO: 13081 - RNA, 76 nt, Homo sapiens
cggaaaggcaaaaggacaggcaacagcaagagaaaagcccacagaagaggggccgaggcagcacacagaggaacac

SEQ ID NO: 13082 - RNA, 70 nt, Homo sapiens
cacacgggccggaacgaaaagcaggaagaccgcaggaaagcaggaaggcaagaaagccaaggacgaaacc

SEQ ID NO: 13083 - RNA, 78 nt, Homo sapiens
gcaacgggccacccagaacagaccagaccgaagggcgcggccaccaggcagcgcgaaacccaaaggcaaggaacgggc

SEQ ID NO: 13084 - RNA, 80 nt, Homo sapiens
ccgccccaagaccgagccccacggaccggcgacccaccggcgggaaacacggggacaaagcgggagaaaaacagcgggaa

SEQ ID NO: 13085 - RNA, 81 nt, Homo sapiens
aaggaagacgaacgcaccccagagccgacccccaccgcaaggcggcgcggcggcggcccgggacccgcggaagccggcagc

SEQ ID NO: 13086 - RNA, 72 nt, Homo sapiens
agacacaccccacaggaccccagagcgacagcccgggacaccaagaaagaacgcggcgagcaaagaagccag

SEQ ID NO: 13087 - RNA, 67 nt, Homo sapiens
gaagcacaacgggaagaaagccaggacaaaagaagggagaaccgcgaggaaaaaaccaccaaagaga

SEQ ID NO: 13088 - RNA, 75 nt, Homo sapiens
caagcggaagacacaaacagcagggagaagagacaacaagacagggacggcagcggacccagaaaagccccagaa

SEQ ID NO: 13089 - RNA, 74 nt, Homo sapiens
accaacggaaaacaacacagggcccggacaagcaccacagacaggagcaccagcacccgcaaggcagagaggac

SEQ ID NO: 13090 - RNA, 76 nt, Homo sapiens
aaacaaccaacgacaacaaggcagaagggccaggaaacaacccagcgcagccaaaacacaccacaaacagacccgc

SEQ ID NO: 13091 - RNA, 72 nt, Homo sapiens
ggagaggcggagccacaagcacgcggaagagccagccgccacagaagaagaaagaaccacaggagaccaaaa

SEQ ID NO: 13092 - RNA, 70 nt, Homo sapiens
acccagcggaggccaagcgagccccacggagaagaacacggccccagggccacccagcagacagaggagg

SEQ ID NO: 13093 - RNA, 75 nt, Homo sapiens
cagacccaagcgaggaagaaacagaaaagaccaagaccaccaaggcaaagccaccaggaagacaaagcccggaaa

SEQ ID NO: 13094 - RNA, 87 nt, Homo sapiens
gcaaacagcggccacgaaagccgccaggaaaagcgcccccaccggcgggggaagaagcccacgcacaggcccaaaagaccccgggca

SEQ ID NO: 13095 - RNA, 49 nt, Homo sapiens
gacgcagggcgcccccggcacaggccgcgagacgacgacccgccccgca

SEQ ID NO: 13096 - RNA, 68 nt, Homo sapiens
ggcaggggacaggcacacaagaggccacccccgacgccaaccaagggaacagacaagagggacacagg

SEQ ID NO: 13097 - RNA, 88 nt, Homo sapiens
acgccgggagagagagcagagcaaggggccacaacgaagaagacagagagacaacgcaaagcagacgcgcacaaaaagaaaaacgaag

SEQ ID NO: 13098 - RNA, 77 nt, Homo sapiens
ccgagaacgagagagagaccaaaccacggccaaccacagagggcccggagcggggggaaaacccccaggggaggacg

SEQ ID NO: 13099 - RNA, 65 nt, Homo sapiens
aagacaaacaaccaacccgaccgcccccagaggccgggccgcacccccgggaaagagggaccagc

SEQ ID NO: 13100 - RNA, 78 nt, Homo sapiens
ggcaagaaggccggggaagacagagccccagaaaaaagaggcccaggagacaccagcgggggcgccgcgcagggaaag

SEQ ID NO: 13101 - RNA, 71 nt, Homo sapiens
ggacacgcagaccgaagcaggaggaaagacaagcacaaaagccccaagacgaggagcagcaagaaaaaaga

SEQ ID NO: 13102 - RNA, 79 nt, Homo sapiens
gaacacgcagaagcccccaggacagaccgagcccccggaaaccccagacgccgacaccccaggccacgagccccaggcc

SEQ ID NO: 13103 - RNA, 67 nt, Homo sapiens
ggagcccgcagaccgcagaaggccggagacaccagcaggggagaagcagaccgcaccaggcgggacc

SEQ ID NO: 13104 - RNA, 89 nt, Homo sapiens
caaaacagccggacacagaccacaaccgccgacaaccccgagaggaacagcgcgagccacaaggcaaggaagcaggcggcaccacccaa

SEQ ID NO: 13105 - RNA, 69 nt, Homo sapiens
ccggggcggacagaggggaagcaagagccccagcaggaggcaacgagggaacaaccgccgaagagcccc

SEQ ID NO: 13106 - RNA, 79 nt, Homo sapiens
aacagggcggcaacaggggcgagaaagggccgagacgcaccagagccggaccggggacgcgaagcaggcccgggagacg

SEQ ID NO: 13107 - RNA, 60 nt, Homo sapiens
ccagaaaaagggagcacaaggaagaacacgcacagaacccaaagcccaagagggccccag

SEQ ID NO: 13108 - RNA, 83 nt, Homo sapiens
cccggcggcacggcgccgaccagcaccaggggaagcgggacaacggggggggcccgaaggcaccgcagaacggggcgggacga

SEQ ID NO: 13109 - RNA, 69 nt, Homo sapiens
accgacacgaaggccaaagaagaagggggggccacagaacacgcaccgcagacaacaagcagacccgag

SEQ ID NO: 13110 - RNA, 78 nt, Homo sapiens
cagaagaagggaaggcgcgaggaggaaaggaggacgagcaccaaaaagcccgggcaccgcccagcgcccagaccacca

SEQ ID NO: 13111 - RNA, 75 nt, Homo sapiens
ccaaacagggccagcacgccaccgggaaggcggggaggaggccccaaagggcgagaagggagggcaagcagaaag

SEQ ID NO: 13112 - RNA, 87 nt, Homo sapiens
gaacagggccggagcagccccagcagcagcagaggggaggaagagagagaagcagaggaaaccagaaggaggcgaagaggaacagaa

SEQ ID NO: 13113 - RNA, 68 nt, Homo sapiens
ggcaggggaaacccgcgagcaccgaggccaggacggaggggggaggagcaggcccccaccgcgaccca

SEQ ID NO: 13114 - RNA, 75 nt, Homo sapiens
gcccgcgccccccggagccagacgcagggcacgggggggagacggcgggcagggcaagcgaggagggcgaggcag

SEQ ID NO: 13115 - RNA, 78 nt, Homo sapiens
agaccaagaaggggccccccggacgggacagggcaccggcaagaacggccgagcgaccaggagaggagcccccgcccg

SEQ ID NO: 13116 - RNA, 88 nt, Homo sapiens
cccacagagggcgagccagggggagaagagccagcccagccccaggagagcagcagaggcggccaacaccgccagccccacacagcac

SEQ ID NO: 13117 - RNA, 87 nt, Homo sapiens
cagagccagaccagcaggaccaaccggaggcccgccaggcggcaagcggagcagccaacgcgccggagagccggacgcaccagcgcg

SEQ ID NO: 13118 - RNA, 82 nt, Homo sapiens
cgaaagcaagcccagaagggagacacagcaagaaggccccaccagagcgagcagagccggcaccagccgggaccccagcccc

SEQ ID NO: 13119 - RNA, 77 nt, Homo sapiens
aaaacgcaacagaaacaacaggaggggcagcagcaggacagggaacccgggagacagcaacagacggaggaacgggg

SEQ ID NO: 13120 - RNA, 92 nt, Homo sapiens
ggggcgcgcggggacaggaccgggggcccgcccagagcgcggcgggggcggcggccggcgggcaaaggacgccaggaggaagggacaaaagg

SEQ ID NO: 13121 - RNA, 76 nt, Homo sapiens
ggcgccccggcccccgccccagcccgccggcggcggcggggaccagacaggcaaaacaccagagaaaaaccaagcc

SEQ ID NO: 13122 - RNA, 84 nt, Homo sapiens
cgagaaaggaccccgggcgaggccgcgggcgcggcaaccgggcaaaggagaaagaggagccaaagggccaaggggaaaacgggg

SEQ ID NO: 13123 - RNA, 87 nt, Homo sapiens
ccaaggcggccaagcacaacggcggcacccacgcagacaccagccgcgccagagagccgccgcccgggagccggacggcccgaagag

SEQ ID NO: 13124 - RNA, 49 nt, Homo sapiens
agccgagacaaacggcaccaagagggggacgaccaccagccaggccggg

SEQ ID NO: 13125 - RNA, 71 nt, Homo sapiens
aaacgcgaaaaggaagcggaagggcgcgcagagaaggggcaagccaaggaaagaaacagaaacaggcccgc

SEQ ID NO: 13126 - RNA, 70 nt, Homo sapiens
aaacaccaacaaagggaaggagaacaaaggaaacaaagccagaccgccgaggggggacgaacccaggagg

SEQ ID NO: 13127 - RNA, 49 nt, Homo sapiens
aggacgagaacgccgcgacagaaaggccgaaacaaaaaaaaaaaccaag

SEQ ID NO: 13128 - RNA, 79 nt, Homo sapiens
acggacgaggccgccccaggcgcccgacgcggaccccagaccaaggcgacaaaaccagacccccgacgccgggcagggc

SEQ ID NO: 13129 - RNA, 75 nt, Homo sapiens
acagaggacgcagaaaacaaccacccccaggaccaaccaggcccgaccacgaagaagaggacaggggacgcgcgg

SEQ ID NO: 13130 - RNA, 59 nt, Homo sapiens
agaaagacacacaggccaaggcaccaaaggggcaaggaagaccgcccccgacaaagaag

SEQ ID NO: 13131 - RNA, 78 nt, Homo sapiens
cgagacgcgcggggagcgcgccggaccaagcgggcccagaagcgggcagcgcaccgcaaaggccccagggagccccgc

SEQ ID NO: 13132 - RNA, 94 nt, Homo sapiens
gggagagacaccgcacacagcgcgcaacgcgggagagcccgggccacccccccaggcaaggcaccggggccgagaagccgcgccgggaaccgaa

SEQ ID NO: 13133 - RNA, 63 nt, Homo sapiens
aaaccaccaacaacacgccggcaaccaacaggaagggagcccaaacaaacacagaaacgaagc

SEQ ID NO: 13134 - RNA, 71 nt, Homo sapiens
ccccgggccaagacgcgaaccggaggaccgagaacaggagacagcggagaaagagcccgggaagcacgaag

SEQ ID NO: 13135 - RNA, 73 nt, Homo sapiens
ccggccaacacgagaccccaggggggcaggaggcccgggccacgccccccgaccaccaaccccacagcccggc

SEQ ID NO: 13136 - RNA, 73 nt, Homo sapiens
ggaccagaggcccacgaaagcccaccaagccgagaacaccaggaaacagcccaggggaaggccacggagaagc

SEQ ID NO: 13137 - RNA, 68 nt, Homo sapiens
gaaggaccaagaaccaggagagaaacagcaagaaaacagcgggaaccaccagacacagcagacacaaa

SEQ ID NO: 13138 - RNA, 70 nt, Homo sapiens
gagagagcgagcgagggggggcgcgccggaaaccggagcgcgcagcaggaaacagaaccgaagccggacc

SEQ ID NO: 13139 - RNA, 74 nt, Homo sapiens
agggagacacggcaggaacccgcgaagcgggaagagcgcagaggcaggcgggccgggggcagcgagcccgggca

SEQ ID NO: 13140 - RNA, 77 nt, Homo sapiens
cggccgccccaccggcggaacccagcaaggccggcgccagcgccagcgaggaaccgaacccagccaaaaggccccgc

SEQ ID NO: 13141 - RNA, 75 nt, Homo sapiens
cacaaccgacccgccaagcgcacacaaaagaggagaaaaccgggcgcagcccaaggccggccgacaacaccgagc

SEQ ID NO: 13142 - RNA, 76 nt, Homo sapiens
gaaagcacgaggacaaacagccgccgcaaggggagccagccagcggacccgacaagaacgcgcaaaaaaaaagaga

SEQ ID NO: 13143 - RNA, 81 nt, Homo sapiens
ccagaccccgggacggggaggaagagcgccgggacccggagcaagcaaagcgccaaaccaagcacccagccacaccccacc

SEQ ID NO: 13144 - RNA, 69 nt, Homo sapiens
accacaccccccccgcaaggcacacacagcgaccgggagcacaccacaggcaagacggagcgccggccc

SEQ ID NO: 13145 - RNA, 72 nt, Homo sapiens
gcacggcaccgagacacgcgggcgccacccggaagccagagagaggggcgggcgggggccgcggagaccccc

SEQ ID NO: 13146 - RNA, 78 nt, Homo sapiens
gcccccgccgcccgggaggcgcgacgagaaaccaaagaaaaaggaaacaaaggaacacagccacgcagaccaaccacc

SEQ ID NO: 13147 - RNA, 63 nt, Homo sapiens
ggcgccgcgcggcgaccggggcgggcgcggcgagacagcgcgcgaagaaacacacggaggaca

SEQ ID NO: 13148 - RNA, 87 nt, Homo sapiens
acgggaaggcgggagacgagaagccgaaaagcgcagcgagcggagccgccggaggagaaagacagcaaagaaaaggagaagaaagga

SEQ ID NO: 13149 - RNA, 49 nt, Homo sapiens
gagagggagagaacaaccagcggaaggaagcggcgccagggcgagacca

SEQ ID NO: 13150 - RNA, 76 nt, Homo sapiens
gcagggcgcccccggcccggacacagacagcagcagggcccgggagaccccgggacccagacagcgaaaagggcgc

SEQ ID NO: 13151 - RNA, 74 nt, Homo sapiens
gcagggaccagaacgcacggaggaaggccggccaccaccagcagcacgggacccaggaggaacggagaaaagca

SEQ ID NO: 13152 - RNA, 88 nt, Homo sapiens
gaaccaggagcgcagaacacggaggaggggaggccaaagagcagagccggagcgcccccagcaggaagggagaagccaggccgggcgg

SEQ ID NO: 13153 - RNA, 74 nt, Homo sapiens
cagcccccagagcgggaccacaggaggggccgaccgaaacccgggcggacaccgacgggccccacccacccccc

SEQ ID NO: 13154 - RNA, 65 nt, Homo sapiens
ggccgcccgccagcggccaagaagcccgcccagcggcagagaggcgagacacggaacggcgaaga

SEQ ID NO: 13155 - RNA, 57 nt, Homo sapiens
gagcgcggggcgcccacacgggaaaacgaggagcgaggcacccagggcccgggggca

SEQ ID NO: 13156 - RNA, 83 nt, Homo sapiens
acccggggccggcccgcaaggcgcccccccagagagccagaaagaaggcacacaggcccgagcacaaacacaagaaacgcacg

SEQ ID NO: 13157 - RNA, 76 nt, Homo sapiens
agaccgccaaaccagagaaagaaacacccgaacagcgagaagggaccacagaccagcacgccggcgccacgaaccg

SEQ ID NO: 13158 - RNA, 69 nt, Homo sapiens
aaacaacgcaagaccaagacgacgaaggcacaaggaagaggagcaggacggagggagaaggggccacac

SEQ ID NO: 13159 - RNA, 70 nt, Homo sapiens
caccaggccaagccaaccagccagcaggccgggcggggaaccccggaaaaggagacagaagcgcaagaac

SEQ ID NO: 13160 - RNA, 85 nt, Homo sapiens
agagaaaagaggagcgcgcccgagggcaaaacccagagcagacaccgcagccaccgcggagcaaacaacacgaagaagagacgaa

SEQ ID NO: 13161 - RNA, 71 nt, Homo sapiens
gcaccgcaggcagacaaaagggccaaagaagggagagaggagcccccaacaagcccaagaggagagacccc

SEQ ID NO: 13162 - RNA, 72 nt, Homo sapiens
ggcgcgcaggagccaagcgcccccacgagaaggggacccagacccaccggccccgaacgagcacgccccggc

SEQ ID NO: 13163 - RNA, 73 nt, Homo sapiens
cgcggagggggcccaagaaagggacggcccgcggacgccagaccccaacaggaaccccccggcggcagagagc

SEQ ID NO: 13164 - RNA, 74 nt, Homo sapiens
gcggccacgagaagcgggcccaggacaagacagaaggccacgcgcagagcgaacaccaccgcgaagacgcagcc

SEQ ID NO: 13165 - RNA, 69 nt, Homo sapiens
ggggcagcccgcaggagcaagcgcagcaccaccaacaacggcccgccacgggccccgcagccgcgcccg

SEQ ID NO: 13166 - RNA, 78 nt, Homo sapiens
ccacacaacaagccaccgcgacccagccaaagaccacagcacccagacaacaagcggcacagggagaacacagggccc

SEQ ID NO: 13167 - RNA, 55 nt, Homo sapiens
caggaaggaggaggaaaaaaggagcaaaaggaacacagggccaggagcgaggaga

SEQ ID NO: 13168 - RNA, 69 nt, Homo sapiens
cgccccgcacgggacccgcgggccccggcccagcaaccgacaacgcggcccgagccgagggaggagaag

SEQ ID NO: 13169 - RNA, 59 nt, Homo sapiens
gcaccagcagccaccaggagcccgagagagaaggggcgacccagcaacgcggccggcca

SEQ ID NO: 13170 - RNA, 70 nt, Homo sapiens
ccgaacagcaggcgccaccagcccggaggcggaggcagggacacacgcggcaggaaccacagacccgaag

SEQ ID NO: 13171 - RNA, 56 nt, Homo sapiens
cccacagaggggcgacggcacccaaaagcaagcgcgggaagcgacacccagacccc

SEQ ID NO: 13172 - RNA, 61 nt, Homo sapiens
gcgcggggccccgcggcggagagagggggagaagagaagaagggaagaagcagagaggaag

SEQ ID NO: 13173 - RNA, 75 nt, Homo sapiens
gggacgggagcggcagccccgacgagaggccgagacaggaagacaaagcgaagccagccggccaagacagcgaag

SEQ ID NO: 13174 - RNA, 74 nt, Homo sapiens
aaaagggcagggagaaggaggaaaggacaaccccacagggagaaccggagacaaagcaggaccccacggaagcc

SEQ ID NO: 13175 - RNA, 74 nt, Homo sapiens
cgcaaccagcccagggcggcggaggcccgacaggcccccagagccgcccacaggaggccccgggcagcgcgggc

SEQ ID NO: 13176 - RNA, 74 nt, Homo sapiens
aaagcgcccgcccgaccggggcacacacggaacgcacagccacaagaaggaaaagccaagaaagacccaaaaga

SEQ ID NO: 13177 - RNA, 67 nt, Homo sapiens
gcagcgcagcgaccggggaccggagcgacgccagaggaagcggagggcaccacggggaggaaccaag

SEQ ID NO: 13178 - RNA, 74 nt, Homo sapiens
cacgcgcgccacgcggcaagggcgcagccggaagcccagcacaaaaggaacgacacagaaaaggaagagaaaaa

SEQ ID NO: 13179 - RNA, 81 nt, Homo sapiens
gcacaccaggaagcaaggagagaggaccagaaccagaccggaaagcaccaggcaaagaaaaaaacaggagccaagaaggcc

SEQ ID NO: 13180 - RNA, 76 nt, Homo sapiens
gaacgacaaagagagcgaggaagcaaagaacagagaacgcgaccagcagcagaagaaagcccacgccaggaggcag

SEQ ID NO: 13181 - RNA, 72 nt, Homo sapiens
ccgcaacggcaggggcaggccaggaccgacagcccccacaagggggggccccagcccggccgaacgggcgca

SEQ ID NO: 13182 - RNA, 80 nt, Homo sapiens
gggacggcggcccagcgagggcggcccggggcacccgcacgggaagcaggcccgccacaggaagaacccgcagcgcacag

SEQ ID NO: 13183 - RNA, 73 nt, Homo sapiens
gcaagggaagcggcccaagggagccgaccaaagggaagaaggccaggaaggaaagaagccagaacagaggaac

SEQ ID NO: 13184 - RNA, 65 nt, Homo sapiens
ggcagagcgccggccagcacacgacccagagaacccaccccaagagagaagaagaaggaggccgc

SEQ ID NO: 13185 - RNA, 75 nt, Homo sapiens
aaaaagccaaggaaaggagaccccccgggaaagcaagaaagaaacaaaagcacccgcgaagaaccaccacgaacg

SEQ ID NO: 13186 - RNA, 82 nt, Homo sapiens
ggcaaccagccccgccgcaccccgccgaccccggcggacaacggagacgccccagcaagcccgagagccccaaccagaaacc

SEQ ID NO: 13187 - RNA, 86 nt, Homo sapiens
cggcaggagaaaggagcagccagaaagcggcacgaacagagccgggagcaagaagaacacccagagagccaggacgccccaaggcc

SEQ ID NO: 13188 - RNA, 65 nt, Homo sapiens
gcccagccggcaacccacccaccacacaacaaagggcacgcacacacaacacggaacacccggcg

SEQ ID NO: 13189 - RNA, 81 nt, Homo sapiens
ccacgcgagagcaccaccagccacggggccaccaggacaagcgggcagaacagcgcggcaggggggacgcgagcgaagggc

SEQ ID NO: 13190 - RNA, 75 nt, Homo sapiens
gcaccccagccccgaggcggaccggggcaccggagagagcgagagcggagaagagagaagaagcaaaccgggacc

SEQ ID NO: 13191 - RNA, 76 nt, Homo sapiens
caaggaacccaagcgaagccaccacccgggaaggaaagaccacgagacaccggcggcgaagagcaacaaggccgcc

SEQ ID NO: 13192 - RNA, 75 nt, Homo sapiens
acccaacaagaaggaagaaagaacaagcggagagggcacacagaagaagggacagcacaaagaaagcagggccgc

SEQ ID NO: 13193 - RNA, 78 nt, Homo sapiens
cacaacagagacgacgccaaagaggccaggagcacccaaccgacggaaggccacacaaaagaacacgaaagacaccag

SEQ ID NO: 13194 - RNA, 34 nt, Homo sapiens
cacccaggggggccccaggagcaccgaagacgag

SEQ ID NO: 13195 - RNA, 82 nt, Homo sapiens
acagcccgccaccgcccaagggggaaaccgcagaaaccccaaccgagcccgcacccagccgagcccaaccgggcgacaccgc

SEQ ID NO: 13196 - RNA, 80 nt, Homo sapiens
aaaagagcaggaaagcgaagaaaaggaccaaaaacacaacaaaagaaaccaacaccgcaaagcacacaaggaagacagga

SEQ ID NO: 13197 - RNA, 115 nt, Homo sapiens
cccccgcccgccggagcagcgagggcccccagccagcccgacagccgcaaaacagagaacccaccgcaagagaccaaaggccaagagcaccgcagccaccagcccggaacccgcc

SEQ ID NO: 13198 - RNA, 92 nt, Homo sapiens
cagaccacacaagaaaagcgaaccacaccagcaagacgacgaagaacagcagggaagcgggagaggccacccgcccacgagcggaagaacca

SEQ ID NO: 13199 - RNA, 62 nt, Homo sapiens
gggagcccgagcccaggcagcccagcccgcccccagaaaccaggcagcgcagacagaccccg

SEQ ID NO: 13200 - RNA, 59 nt, Homo sapiens
caagccaagaaggacggagcgagaagaggcgacaccagggcccaaagaacaaccgaaag

SEQ ID NO: 13201 - RNA, 71 nt, Homo sapiens
cgcggccgagacaaaggcaccaggccaccacagaaacaaaagcaacaaagaggggcccaaccaagaccgaa

SEQ ID NO: 13202 - RNA, 74 nt, Homo sapiens
cccccgcaggaaccacaacccaaccagggagaagaaaaagcagaaaggaacagaaaacaaaagaacaaggcaca

SEQ ID NO: 13203 - RNA, 82 nt, Homo sapiens
accagcacgccccgaaacgccgccccaggaagccaagaccgacaagcgggcacggcggccaaggccccgggggcgccgaggg

SEQ ID NO: 13204 - RNA, 76 nt, Homo sapiens
agaccaacaacccaacccagccagaaagggagcccgcgaccacacgcccccaggcaagaacgccccggcaaggacg

SEQ ID NO: 13205 - RNA, 68 nt, Homo sapiens
caacccgccccagagccggagagagcgaagcaccgcgcagaccgaaaggcacacggagcgaaacccaa

SEQ ID NO: 13206 - RNA, 72 nt, Homo sapiens
gaaagcagagggagaagacagaagaaaagaaaaccccaaaaagcagagaacaaagaaggcccccacaaccca

SEQ ID NO: 13207 - RNA, 77 nt, Homo sapiens
ccagcacccgagccgagccccagcgcagccaccggaaggccgcgggggaaggaggacgcagagagggcacacggggc

SEQ ID NO: 13208 - RNA, 76 nt, Homo sapiens
aacaaagcgcagcagcccgagccggaacaagaagaaggagcgcacggagcgcagcgggcccaggaggagagagggc

SEQ ID NO: 13209 - RNA, 57 nt, Homo sapiens
ccacgcagcaaaccacaggagaggagcaaagcagcccgaggaggcacgcaaaacaac

SEQ ID NO: 13210 - RNA, 91 nt, Homo sapiens
gagccgcccgggccagcggccgcgcacccccggccggaggcaccagcgagcacagaccagcgcgcgaccggagccccacagcggcacaggc

SEQ ID NO: 13211 - RNA, 45 nt, Homo sapiens
cacagacacggaagacagcgggacaagaacccaagaaacaggaaa

SEQ ID NO: 13212 - RNA, 79 nt, Homo sapiens
aagaagaaaccaagggcagagcaacaagagaccgcaaccccgaacgggcccaggggacccgcaccaccagccaggcaga

SEQ ID NO: 13213 - RNA, 83 nt, Homo sapiens
ccaggcgaagaagcgcagccgcaccggccaagggccgaccaaagcaacaaggaaccccagaaccagaaccagagaaaccccca

SEQ ID NO: 13214 - RNA, 76 nt, Homo sapiens
agcgcaggaacccgaggcgaagagcgccaccaaggaagaagagcagacaaggacaaaccggcgaccacacacgggg

SEQ ID NO: 13215 - RNA, 74 nt, Homo sapiens
cccagcacggcaaagcccggagacaagcaggcaaacggagaggcaagaccagcagagggagccaccaccgaggg

SEQ ID NO: 13216 - RNA, 69 nt, Homo sapiens
cgcccgcccgagaacaccaggagacacaaggacgagcacagcccgggggagccgggagacaacacagca

SEQ ID NO: 13217 - RNA, 75 nt, Homo sapiens
agacaaggcagagaacgaggaggcgcgcggccagaccgccccccggagcgggcccgccccagcccacccagagcc

SEQ ID NO: 13218 - RNA, 74 nt, Homo sapiens
gcgccgccacccccgacacgaaagcagacccaacaccggacaagagagggaagcggccggcaggcaggagggcg

SEQ ID NO: 13219 - RNA, 69 nt, Homo sapiens
gaagacccaaaagccaacagcaggcgcaaaaacgaacccacaaccgaacgacggacgggaacaaagaag

SEQ ID NO: 13220 - RNA, 69 nt, Homo sapiens
agaaaccggcaagaaaaccagcaggacaaaaggcaagggcggaaagacaagaacaacggcgggggacga

SEQ ID NO: 13221 - RNA, 77 nt, Homo sapiens
caccacacgcagacccagaccgccaagcgcagagccaccgaaaaacccaagcagaagaaagggcaccacggccaaaa

SEQ ID NO: 13222 - RNA, 119 nt, Homo sapiens
aaagcaccaagaagaccaaaacgccaggaaaggaccccagaggcaccgaaacagcggaccggagaaggccaaagcggcggagagcaacgagcaaaagaaaccccaaaacaagcacaaaa

SEQ ID NO: 13223 - RNA, 51 nt, Homo sapiens
aaggaggaagaagacaccggggacagacaggagccggacgagcgggagagg

SEQ ID NO: 13224 - RNA, 72 nt, Homo sapiens
cagcacacagcaacaacccagcccgacaccggcgaacgcagcagacaaagacggggcgccagggccagacgg

SEQ ID NO: 13225 - RNA, 73 nt, Homo sapiens
ggcacagcggaccccgcccgaaggggaaagaaaaagagcccaccaaaaggaacagacggccccaggcggacaa

SEQ ID NO: 13226 - RNA, 62 nt, Homo sapiens
gcaaggcccaagacccaggcgcagccaagaagagggaaagaagacaggaaacaagggaagga

SEQ ID NO: 13227 - RNA, 54 nt, Homo sapiens
gcacaaaagcggaggaaaaggaacagacggggacccacagagacagaggagggc

SEQ ID NO: 13228 - RNA, 81 nt, Homo sapiens
cgcggcccccgggggggccagccggcgagcgcgcgggaggggaacggcgagggaacccaggaaggagggcgacaaacacca

SEQ ID NO: 13229 - RNA, 74 nt, Homo sapiens
gcaaggaagagaccaagcaccaagaaaacgccaaggaacggaagacccacacgaggagacaggggaaagcgaaa

SEQ ID NO: 13230 - RNA, 75 nt, Homo sapiens
gggccgcgcgcccacccaacccgagcaaacggggacagcgccgaccggaacagggaccacggaagcccaggacca

SEQ ID NO: 13231 - RNA, 70 nt, Homo sapiens
agcaagggcgccaccaggaccacaaagccagaacccaaggaggaaaaacagcacaagacgcaagaacaga

SEQ ID NO: 13232 - RNA, 86 nt, Homo sapiens
cacacaccacaggaagccaacaaaaggagccacggagaaagaaaaaagaaagaagcccgaaccggaaccggagaagaaggagggaa

SEQ ID NO: 13233 - RNA, 61 nt, Homo sapiens
cgaagccacacagagggcaagcaccagggcaagagcgcaagacaaggacggacgggcaggc

SEQ ID NO: 13234 - RNA, 85 nt, Homo sapiens
gccgggaaaccgggcagagagacaggaacggaaaagcaccaaggccaaccaggagggaaccccgaagccgacaggccgacccagc

SEQ ID NO: 13235 - RNA, 77 nt, Homo sapiens
gggaggaggccggggccgcgcgagggcgcccagcgcgccggggaggcagaaggggccgggagcggcccggcccggca

SEQ ID NO: 13236 - RNA, 80 nt, Homo sapiens
gcggagagcgcaagccgggcagcagcccagcggcagcagaaagagcacccacgaccccccagggcaccacaacagaacca

SEQ ID NO: 13237 - RNA, 82 nt, Homo sapiens
ccacaggacgggcgcccgggggcccccagcacccccagccccacccaccgccaggagcccccccaggaggcagcacggcagg

SEQ ID NO: 13238 - RNA, 73 nt, Homo sapiens
ccagcaccagccagagccagacacggcagcgacaccaggaaagcaacggcgcaagcggcggcggcgggcagag

SEQ ID NO: 13239 - RNA, 80 nt, Homo sapiens
ccagccccgagagccgggaacaggccggagggaagaaccacggacacgcagacaggcagcggcagcagagagaacccacc

SEQ ID NO: 13240 - RNA, 81 nt, Homo sapiens
gcacgagacaaccgaagacaccaccggaaaggccacaaaaaagagaaagagacggaaggaaagaccacagcaagaccacgc

SEQ ID NO: 13241 - RNA, 50 nt, Homo sapiens
agaaggaaacggagagcgcgccgccgcaacaggggcaagagaggccgacc

SEQ ID NO: 13242 - RNA, 68 nt, Homo sapiens
ccaacacgcccgggagcgcggcggggagaggaccagcgggaaaagagaaagggggacgaaggacaaca

SEQ ID NO: 13243 - RNA, 65 nt, Homo sapiens
aaagcaagcaagagcgcgacacccaaggccgcaaaggagccccggaaaaacggcgagcgaacgcc

SEQ ID NO: 13244 - RNA, 110 nt, Homo sapiens
caagcaggcaaagacggcaaaagcacaaggaccgcggacagagacaacaccgagagagaacagggcagaaaagaacagacccagaagaagcgaaaggggagaaagaagaa

SEQ ID NO: 13245 - RNA, 75 nt, Homo sapiens
ggacaccggaagcgggaaaggagccacagggagaagcagacacacagcgcgagacggcgacgacgcaccagccga

SEQ ID NO: 13246 - RNA, 71 nt, Homo sapiens
acccacagggcaacggacaccggagaccgaagaacggaagcgcacgaacaaggcggaccaaccgggaaaag

SEQ ID NO: 13247 - RNA, 82 nt, Homo sapiens
ggcggcgcgcgccgggcgccggaggcaggcagcggaagagaaagaccgaggcaaagaagcaggagcacacaaagaacagcgg

SEQ ID NO: 13248 - RNA, 82 nt, Homo sapiens
aggcacaaaggaagaccaccaacgcaagcagggaccaaaggaaaacgggcaaacaacgaaggaaagaaccggagaccggcac

SEQ ID NO: 13249 - RNA, 73 nt, Homo sapiens
ccccaaaagcacccccccaccggccaggaacagcaacgcacggagacgccacccggggccagaggaagaaagg

SEQ ID NO: 13250 - RNA, 70 nt, Homo sapiens
acagacgcagggcgcccccgccaaaacgacacagggggagcagacaaaaggcaacacagaacccgcaaag

SEQ ID NO: 13251 - RNA, 79 nt, Homo sapiens
ggaaacagcggagacggaacgggagaagaggcaaagaaacaccaaggcggagaacggaaaagcaccaggaagcagagag

SEQ ID NO: 13252 - RNA, 77 nt, Homo sapiens
cgagagcgacaggcgcgcccggggccagaaggccgggcgccagaaggcgcgcgacggccacgagccccgcacaaagc

SEQ ID NO: 13253 - RNA, 73 nt, Homo sapiens
caccccgcacgccagacgacggcaacccccggggagggggcgggagagccgcgggccacagggcagagaaaga

SEQ ID NO: 13254 - RNA, 67 nt, Homo sapiens
acacagcacaacacaacacgccccgaagagacgaggacgcgcacaggaaaggacgcggaacaagcag

SEQ ID NO: 13255 - RNA, 79 nt, Homo sapiens
aagaagggcaggaccgggcggaggccgccaagacgggggaaacaggacgaaacaacccggaaaacaacaacaaaggaaa

SEQ ID NO: 13256 - RNA, 66 nt, Homo sapiens
ggagccgaaagggaagcacacggaccagcagaacagaaacaaggaaagccaaagaagccggaaaaa

SEQ ID NO: 13257 - RNA, 67 nt, Homo sapiens
acaaaacgacagccacaacaacccggaggggcgagaggcaagacaaaagaaaaccccagacggaaag

SEQ ID NO: 13258 - RNA, 40 nt, Homo sapiens
gaagcgacgagccgcgaggaggcacgcgagaaggggaggg

SEQ ID NO: 13259 - RNA, 74 nt, Homo sapiens
ggcagacgcgaggccggccaacaagacagcgaacacaaaggcccaagagaaacaggcacgccgcaccacccacc

SEQ ID NO: 13260 - RNA, 76 nt, Homo sapiens
agcacaggcacagaaggccaaaaaggcaaccacagagagagagagggaggggaaaacagcaagagagcagacgcca

SEQ ID NO: 13261 - RNA, 69 nt, Homo sapiens
gaaccagggagaagccgcccgaacaccagggaggccaacagacccaacccagaaggcaccaaacggagg

SEQ ID NO: 13262 - RNA, 80 nt, Homo sapiens
acgggccggcgcaggcccgcggggagcgcagcccggcggaggaaagcgaagccaacaaagaaaggaccggggcaaaacgg

SEQ ID NO: 13263 - RNA, 79 nt, Homo sapiens
aggggggggaagggagccggacaaagggcccaacacaagacaacggacgcaagaggagaacgggaaagcgcacaagcca

SEQ ID NO: 13264 - RNA, 75 nt, Homo sapiens
ccaagccggagcgaaaaaggaccgacgaaagcagaggcagaggagccgaagaccagacgaaaaagagccacgccc

SEQ ID NO: 13265 - RNA, 49 nt, Homo sapiens
ccagcacaccggcaagacaagaaccacggcgggaaacgccagaaggaga

SEQ ID NO: 13266 - RNA, 61 nt, Homo sapiens
gacaaaacagaaagcacagacacaaggacgaacaccgaaaggaggaagaacggcaaaacgg

SEQ ID NO: 13267 - RNA, 80 nt, Homo sapiens
aagaagccaccgaaacagaaaacgggagggacaggagaacaggcacgaccccaccggcaccaccacggggacagcgaccg

SEQ ID NO: 13268 - RNA, 60 nt, Homo sapiens
acccaccaaggaagcagcggccacgccagggcacccacagaaggagaacaagcagagcac

SEQ ID NO: 13269 - RNA, 74 nt, Homo sapiens
caaggaaacgggcagaaaggggccagggggaaccgaccagaggaagcggaagcagcagagcgccaaagaaaagc

SEQ ID NO: 13270 - RNA, 85 nt, Homo sapiens
ccaccgcgccggggcgcgggcgccgaacacagaagcccagggggccaggagagccagcaagacgaaacaccgcacccagaagccg

SEQ ID NO: 13271 - RNA, 61 nt, Homo sapiens
aacggaggagcccgccgaagcagaaccaaggggaaaacagcagaacacgggcagagggcag

SEQ ID NO: 13272 - RNA, 77 nt, Homo sapiens
cgcggaagaagcaggaggcaagaaaggggaaccccggagaaaaggccaagaaggcaggcaacggggaagacagaaac

SEQ ID NO: 13273 - RNA, 76 nt, Homo sapiens
ccgccggcgcgcccgcgcggcgcggggaccgcggcccgagccacccggcaggcagaggcgcgaccggcccgggcaa

SEQ ID NO: 13274 - RNA, 86 nt, Homo sapiens
cccacccaggccccgcaagaagggccgggggcgagccggagcgaccccggcaggcagaacaaccgggagggcggagcaggggagcg

SEQ ID NO: 13275 - RNA, 85 nt, Homo sapiens
acgaggccgcgggggaggcggcggcgccaagcaaggccacggccgcaagaccacgagcaggcaacagacccgccccggaaccgcc

SEQ ID NO: 13276 - RNA, 61 nt, Homo sapiens
aggagccgagggagccaaaaaagacaacccaaaagacccgcaaggcagcggcacaaagccc

SEQ ID NO: 13277 - RNA, 67 nt, Homo sapiens
ggagacccggggacccccgacgccaggcagcgcccccaaacggacgcaaagccgaccacagaaagac

SEQ ID NO: 13278 - RNA, 79 nt, Homo sapiens
caccgaagaggaagacggggcggaagaccaagacacgagaggagagaacggagagccccgcccaggaaaccagaaccga

SEQ ID NO: 13279 - RNA, 36 nt, Homo sapiens
ccgacagccgcagaacgcgccggaccgaaggcgcga

SEQ ID NO: 13280 - RNA, 64 nt, Homo sapiens
agcaaagggccaaaggagagaaacgaggagcagccggggaaagaggcaagagaacgccacgaaa

SEQ ID NO: 13281 - RNA, 78 nt, Homo sapiens
ccccaaaaacagaaggggaaaagcaccaaggaacacaagggcaagacagccgggaaccccaccccaccccacagcaca

SEQ ID NO: 13282 - RNA, 73 nt, Homo sapiens
caggccaccagccaaagaggcacaccaccggcccgagcagccaccccggcccggaagacccgcgcccccaggg

SEQ ID NO: 13283 - RNA, 85 nt, Homo sapiens
gaaacaggcgaagccaaagcagcacgcgaggaggaaaggcaccccaccagaaagcaaggagaggccaccaaggagaagcgcaggc

SEQ ID NO: 13284 - RNA, 82 nt, Homo sapiens
cgaccgggcgggggccccgcgccgagggacgccaccgcacacgcccacgaccccccagggcaccacaacagaaccaggcaca

SEQ ID NO: 13285 - RNA, 76 nt, Homo sapiens
cgcgggcagccaccccgcccccgccccccccgccgcaccagaaaccgaagcgaaagacggcaccccgggggcacgg

SEQ ID NO: 13286 - RNA, 67 nt, Homo sapiens
aaacaaggagccaaacaaagaccacagcaggccgcggccgcaaaagagggaaggggaccaccccagg

SEQ ID NO: 13287 - RNA, 80 nt, Homo sapiens
aggcgaccgcggaccggcgccccggcgcgaagaggcggaccggacggccgaggagaagccagaggagcagcgcagaagag

SEQ ID NO: 13288 - RNA, 74 nt, Homo sapiens
ggccagcagccccaacccccgaacccacggggagcgcggccacagacgcacaggcagagacacaaggggagaag

SEQ ID NO: 13289 - RNA, 80 nt, Homo sapiens
ggaaccgggcaccaccgaaaggagaagacggcaacccagccgaggggggacacggaaagcacaaggagaaaaaaggccag

SEQ ID NO: 13290 - RNA, 76 nt, Homo sapiens
ccgaagagaagccaaggccgaagccgagcagaggacaaaacaagagggccagacaacggcaagcggagaagagcaa

SEQ ID NO: 13291 - RNA, 57 nt, Homo sapiens
ccgccacacgggggcaccacccccagccgcagagcgcgacagagggagagcacccgc

SEQ ID NO: 13292 - RNA, 77 nt, Homo sapiens
ccggcagccacccaccgccgccgcccccagacagaagcgaaggggacagggggagaaccgccagggaaacccggggg

SEQ ID NO: 13293 - RNA, 57 nt, Homo sapiens
gcggcccgcagaacgccagcagaaggccacgcgcagagcgaacaccaccgcgaagac

SEQ ID NO: 13294 - RNA, 75 nt, Homo sapiens
ggaaacgggcgaagcgacgagccgcgaggaggcacacagagaaaaaaagggaacaaaacacagcaagcagacaaa

SEQ ID NO: 13295 - RNA, 75 nt, Homo sapiens
caaaccacgaaggccaagagagcaacaagggaaaccagccaaccaggggcaccagaccaaggagaacgagggccg

SEQ ID NO: 13296 - RNA, 77 nt, Homo sapiens
gaaaacagggaccaggaaaagaaacggggcgcacccccgagagagccacggaagggcgccaaggagccaccgccacc

SEQ ID NO: 13297 - RNA, 101 nt, Homo sapiens
ggaggacagggagaaagacaagacgcacgggaaccaacagggacccagcaggcagccaccggaagagaaaaccaagaacgacagaggggcaaaaaaaaaag

SEQ ID NO: 13298 - RNA, 83 nt, Homo sapiens
agcgccaaggacccgggacagggaccagcgggaaggcagacagcgagggcgacgagcagggagaccccaaggcaaaaccacca

SEQ ID NO: 13299 - RNA, 72 nt, Homo sapiens
gccacgcgcggaaggcagcgcccagcagcgcaggcggggccacgcaggggccggcggggcgcgaagaagcag

SEQ ID NO: 13300 - RNA, 72 nt, Homo sapiens
agaggcaaggggccaccaggaggccagggggcgccaggcagaggggcgggcaaaggagaggcacaggaagca

SEQ ID NO: 13301 - RNA, 94 nt, Homo sapiens
agacgacgcaccgcaggcagacaaaagggccaaagaagggagagaggggaggggaaacacagagaacggaacagaagcgagcccgacggaggcc

SEQ ID NO: 13302 - RNA, 69 nt, Homo sapiens
cgaagggcaacaaagaaagaacacaaacgacacagcggaacgcagggcgcaccaccagagacccaacac

SEQ ID NO: 13303 - RNA, 63 nt, Homo sapiens
ggaagcacacaagggccgaagcagggcacaaaaccaaggccaagcaaggacgccaagccagca

SEQ ID NO: 13304 - RNA, 79 nt, Homo sapiens
ccccacgcggccagcgaaaacgcccaggacgggaggcacaagaccgcaccagcacaaagagcccaacccggcagcggcc

SEQ ID NO: 13305 - RNA, 58 nt, Homo sapiens
ccggcccgaccgcccacagacccaaacaaagcccggacgccacaagagaaaggacgcc

SEQ ID NO: 13306 - RNA, 53 nt, Homo sapiens
caacacagaacgaagagaagaagcgagaaaagcaccaaggaccggaagagggc

SEQ ID NO: 13307 - RNA, 66 nt, Homo sapiens
cgggggaagagccgcgacacgcggagagccaccacccccccaggcaaacccaggcaggagacagag

SEQ ID NO: 13308 - RNA, 70 nt, Homo sapiens
acgcacagacagagccaacaccgcagccggaacagggacgaccgcaaaccgacaccagcgacacaagcgc

SEQ ID NO: 13309 - RNA, 80 nt, Homo sapiens
cacccagaagaaacacgaaagagaccaaccccacgagaagaagggagccccacaaagagaccaaacggaacgggagcggc

SEQ ID NO: 13310 - RNA, 68 nt, Homo sapiens
ccaaccggggaggaaaaccgacgaaggaaaacaagaagagcgaaggaaccagaccaaagagacgcaaa

SEQ ID NO: 13311 - RNA, 102 nt, Homo sapiens
agcagaagacagacccgggggaggagacgaggacgcgcacaggaaaggacgcggaacaagcaggcagccaggcagcagaaggcaggaagaacaaaggaagca

SEQ ID NO: 13312 - RNA, 71 nt, Homo sapiens
caagccaccgaccacaccgcccggggccgggcagcgagcccacacagggccaccacgacgacaaagggcgg

SEQ ID NO: 13313 - RNA, 73 nt, Homo sapiens
gagcccccgccacaggggaaagaagcagccaaggccaccgagccacaagaccacagcaccgacccccgacccg

SEQ ID NO: 13314 - RNA, 74 nt, Homo sapiens
cccggcaggacgaggacgaaggccgaggcaagagcaacgaaccaaagcaaaggaggccgggggaagacggaaaa

SEQ ID NO: 13315 - RNA, 75 nt, Homo sapiens
gagcagagagcgagccaaggcgacagaaggagcaaagagcacggaaagacgaacagaacgaggggagaaaaaagc

SEQ ID NO: 13316 - RNA, 74 nt, Homo sapiens
ggcggggccccccgggcaggcggggcagggcggccgaacccagcacgggaggccgaggcggccggagccgaagc

SEQ ID NO: 13317 - RNA, 82 nt, Homo sapiens
caaacagccccagcacaggacaccagcagcaaaaccgggcccgaaaaccaccgcgcagagcgcggacagcaagccacagcca

SEQ ID NO: 13318 - RNA, 75 nt, Homo sapiens
ggggacgcacacggaagaaacgcaacccacaagaaacacagagcaccagccgaggaaccgcccaagccccccacc

SEQ ID NO: 13319 - RNA, 59 nt, Homo sapiens
cccccaaaggcggaacagcaagggagcaccccccgggagacacgaagcaggaaacacgg

SEQ ID NO: 13320 - RNA, 107 nt, Homo sapiens
caaaggcaagagaacagcagcgccgcccgccgacagccaggcccgggagaaaccaagggccacaaggggggacgaaccaaagcccaagacgcgccccccccgccagc

SEQ ID NO: 13321 - RNA, 81 nt, Homo sapiens
ccacaggaccggaggcagggcccacagaaaccgcaaacaaagcacaggacgagacaagggcaacgagacacccagcggccc

SEQ ID NO: 13322 - RNA, 68 nt, Homo sapiens
gggcagcccggccgacaaccacggagcacagaccaacagaaaacagacgacgggcacgacaagaacga

SEQ ID NO: 13323 - RNA, 62 nt, Homo sapiens
cgacaccggcgaggaacggcaggaaacacgagccccaccaaagcaaaggccggaccaggaga

SEQ ID NO: 13324 - RNA, 88 nt, Homo sapiens
cagagaggcggaagaggaggccgagggggggccgacgacgagccccgcgaggagcgcagcggagaggccagaacgcccgccagcccag

SEQ ID NO: 13325 - RNA, 87 nt, Homo sapiens
gaaaaagaagaaacaccaagacaaaaacaaaggccgggccgagaacgaacagcaaggcgccaccggaagaaacgggaggggaggagc

SEQ ID NO: 13326 - RNA, 67 nt, Homo sapiens
cgacgccaggcgcgcgccgggacaggccaagaggacgggaccaccaggaggagggcagcaccggaca

SEQ ID NO: 13327 - RNA, 73 nt, Homo sapiens
cacagggcccgcgcaccgcccagaggccggacacacagcagcggacgacgggagcagacggacgggccacggg

SEQ ID NO: 13328 - RNA, 73 nt, Homo sapiens
acaccgagagaacaagacccccacgggcagagaggcagaaggggcacaggcaaccagggagaggagccgcaag

SEQ ID NO: 13329 - RNA, 72 nt, Homo sapiens
ccgaccagccacccagacagacaacaggaaggggaacgaacccaaccggcacccaacaccagagaaagggaa

SEQ ID NO: 13330 - RNA, 75 nt, Homo sapiens
gagaaggggccggagcagcaccggcccgccagagcccaagccacccgccccggccccgcccgcggaccgagccag

SEQ ID NO: 13331 - RNA, 57 nt, Homo sapiens
cggccgaggaccccccaggacaccaggggggaaaaaccacacaggcaaagaacgcgc

SEQ ID NO: 13332 - RNA, 74 nt, Homo sapiens
ccagaaagcccggcaggcgagcacagcaagacaggaccgggcaaaacagggagaaacgccacaccgggaaagga

SEQ ID NO: 13333 - RNA, 86 nt, Homo sapiens
ccagaagacgacccaaggacgcacggcaggaggagaggaccgaaggacacagcaagaacaagaaacggcagagcggcggaacaacg

SEQ ID NO: 13334 - RNA, 82 nt, Homo sapiens
acgagcgacccgggagacacgacgaggcacagaggagaacccgggagggcccaagcacaagggagcagaggccccaagagca

SEQ ID NO: 13335 - RNA, 34 nt, Homo sapiens
cgaagccgcaaaagaaggagacccaggaagaaag

SEQ ID NO: 13336 - RNA, 78 nt, Homo sapiens
cgccaggcgccccgggcgcggcaaggacgagccggggcgcgaaggcgcgcgcagaaccaacaaaagcgaaggaaaagg

SEQ ID NO: 13337 - RNA, 75 nt, Homo sapiens
acaaagccgaagagggaaaacaaagaaccaagcacacggccgagaagaagcagcagcaacagccagagacggagg

SEQ ID NO: 13338 - RNA, 61 nt, Homo sapiens
acggcccccggccacggcaacgcccgcgcccggcaacgcacccggccagaggaaaaccagc

SEQ ID NO: 13339 - RNA, 71 nt, Homo sapiens
caggaggaagcgcagacccgcggcacaggaagagggcggcacgcggccagagagcacaacgggaggaaggg

SEQ ID NO: 13340 - RNA, 63 nt, Homo sapiens
cgaaacgcgggccagagagaggaagacagaccgcgaggccacacccaagaccgagcccaagcc

SEQ ID NO: 13341 - RNA, 80 nt, Homo sapiens
ccgggcggcccacccgggcgacgcagggccaggaggccggggggcggccaggggccgacggaagccaggcagacaaaccg

SEQ ID NO: 13342 - RNA, 77 nt, Homo sapiens
gcagaagccaggcccagcagggcccgagggccggggacaaccacagcagcggggagaggcggggcgcaggaacacca

SEQ ID NO: 13343 - RNA, 40 nt, Homo sapiens
aagaagggggccaacaccacaggaaaagaaggaggccagc

SEQ ID NO: 13344 - RNA, 74 nt, Homo sapiens
gcggcgcgcgggcgcaagagccggcccggggcccgcagggggcacccggcagggcccccaaaaacgaagggaga

SEQ ID NO: 13345 - RNA, 34 nt, Homo sapiens
cgccacagggaggagacgaaaaggggaaaggaga

SEQ ID NO: 13346 - RNA, 84 nt, Homo sapiens
agcagacacagagaagcaccgagaagcgccacacgggaaggggaaaaaggcagacggcagaaaacagacgaagcaacagcgaac

SEQ ID NO: 13347 - RNA, 84 nt, Homo sapiens
cccgccagcgcgcgaaagccgaggaaaaagcggccgcgacgacgcgggccaccgcacacccagggaaccgggacaccccggcac

SEQ ID NO: 13348 - RNA, 63 nt, Homo sapiens
caagaggaggagacccagggaggacaccaccccaaccccacgaagaggaaaacagccaagaga

SEQ ID NO: 13349 - RNA, 75 nt, Homo sapiens
gaagaggcggacggcgggaccacaagacaacgcggagcggcgaagagcaaccagggacaagcacaacagaaccac

SEQ ID NO: 13350 - RNA, 59 nt, Homo sapiens
caaacagcccgcaggaaggagaggcaaccaccgaaacgggcgaaaaagaagaacagcaa

SEQ ID NO: 13351 - RNA, 80 nt, Homo sapiens
gcggggaagggggcgggccgcagagcaggacccgaaccacaaagacacacagaggacaagaaagcagaaagcagcacagc

SEQ ID NO: 13352 - RNA, 74 nt, Homo sapiens
ggcccgcaggccgggaaccgcccccaccaagccggagccacccaaagccagcaggcggggccggggagcccggg

SEQ ID NO: 13353 - RNA, 74 nt, Homo sapiens
gacaaccagcagccgagaggggacgcgaagaagcccccaccaccacgagaccgacccaggacgacaccacagca

SEQ ID NO: 13354 - RNA, 81 nt, Homo sapiens
cgggagccggggcaccacagagagcgggcccccagcacaagggggcaccaggcggagaaggacgccacacgcagggacccg

SEQ ID NO: 13355 - RNA, 75 nt, Homo sapiens
gcccagacacgccaccgacaggaggaagaacaccacccgcaagggcaagaacacagagaggagcgagaggaagcg

SEQ ID NO: 13356 - RNA, 81 nt, Homo sapiens
cggaagaccacagcagccaagggggggcccgacacaggcacggaaaaagcacgacaccacccagacagaacacaaaggcgg

SEQ ID NO: 13357 - RNA, 76 nt, Homo sapiens
gcgcgcccgccagggcccagaggccggcacaaaccaagaagaagcaagacaagaacggacacaaagggggacccag

SEQ ID NO: 13358 - RNA, 58 nt, Homo sapiens
cggagacaagccaggaggaccgggacaaggcgcccgggaacagggaccacagggcaca

SEQ ID NO: 13359 - RNA, 90 nt, Homo sapiens
gccgaaggcgcccaagcagcagcgccggagcccgagggacggggacggagagaacacgagcccacagggaacgacacagccccgagagcc

SEQ ID NO: 13360 - RNA, 77 nt, Homo sapiens
agcacgagagcggccaaccaaagcgggggaagcgcgcgcggacggagggaacccgcagcagagcaacaggaaaggcg

SEQ ID NO: 13361 - RNA, 91 nt, Homo sapiens
acgagcaccgcgccggcccagcaccccgagaaccgcaggagccagaggagcagggccgagagccaggggaaaggccagcgcagaaacgcag

SEQ ID NO: 13362 - RNA, 109 nt, Homo sapiens
gagaccacgcagagacagcacccaaccggcagcagcagggagccacaccaagccaacagaacccccaacggagaggaaacggcacccaccaccaccggccgccacagag

SEQ ID NO: 13363 - RNA, 58 nt, Homo sapiens
agaccgacacccaagacaagacagcgcaaggcaggcacggagaaaagcggcacagaag

SEQ ID NO: 13364 - RNA, 77 nt, Homo sapiens
gaaggcgcaccaaaggcggccacggagcgggggcccggggaggaggacaagagaaagcagaagaagaagagccgccc

SEQ ID NO: 13365 - RNA, 73 nt, Homo sapiens
agcccggccgccggcccccaacagcgccggagaaggaagaccaaagaaaaacacaaagcacgcaagccaaaag

SEQ ID NO: 13366 - RNA, 73 nt, Homo sapiens
gaacacagacggacaagagaacaacaaacggcacggcacgaaggcaaaagaagcaggcaggccacaagccggc

SEQ ID NO: 13367 - RNA, 71 nt, Homo sapiens
cgaccgggacagagcaccagaggaacagcagggcaagaccagccacaggaaagcagaaaagcacggcgccg

SEQ ID NO: 13368 - RNA, 82 nt, Homo sapiens
cgcaggcgagcgccgaaaccgggcgcaggcggaccacaggcccaccaaccgggcaccgaccgcacgaggccggaaccaccga

SEQ ID NO: 13369 - RNA, 75 nt, Homo sapiens
ggggacccacaagccacgcaagggaacaacgagaagacagcaaagcgaaccggaacaaacaggacacaggagcgg

SEQ ID NO: 13370 - RNA, 74 nt, Homo sapiens
cagaaacacacaaaccggcagaaccccacagccgagccaaaggccaacacaagcacacaagggaggagaccggg

SEQ ID NO: 13371 - RNA, 77 nt, Homo sapiens
caggccgccagccggggcaagaaggcacacagccgggcggaagcgccaaggcccggggccgggggccacaccagcgg

SEQ ID NO: 13372 - RNA, 73 nt, Homo sapiens
gccccacacggcggagaagcagcggggggccacgcgacaagcaagaacggcagaaggggaaaagacggacagg

SEQ ID NO: 13373 - RNA, 53 nt, Homo sapiens
gcacgacgacaacgccacacgagaaccacgggggagagcacaaggcgaacaag

SEQ ID NO: 13374 - RNA, 70 nt, Homo sapiens
ccccagacacccgccgacgggcagcacacccaccgagccgagaggggggcccaaggagcggaaggacagg

SEQ ID NO: 13375 - RNA, 111 nt, Homo sapiens
cggcagcaggccgcagcggcggcagcagcaccaggccgcagcggcaacccccagcggcaagccaggcgccagagggcccaaagcggagaggcacgagcacagggacccaga

SEQ ID NO: 13376 - RNA, 60 nt, Homo sapiens
ggcaggcgaggagaaagcggcgcgcggaggaaggagggccccggagcagccacaccaccg

SEQ ID NO: 13377 - RNA, 72 nt, Homo sapiens
aagaacagggaagagaaaagaaggcccgacaaaagagaggaagcagcggcccggaacgcacacggcccagac

SEQ ID NO: 13378 - RNA, 72 nt, Homo sapiens
agaaacgagcggcggagaccggaaagagccaagccgaagacagccaagacaagcgcgcacgcggccacacgg

SEQ ID NO: 13379 - RNA, 86 nt, Homo sapiens
aggaccggaccggacggcggcccaacccaacggcgcgccaccaacgccaccaccacgcacaagggacccccggccgccgggacaag

SEQ ID NO: 13380 - RNA, 56 nt, Homo sapiens
acagcaccaacaggcagggagaccccaaggcaaaaccaccacacgacaaaaaccgg

SEQ ID NO: 13381 - RNA, 86 nt, Homo sapiens
ccccgagcagagacagaggcgggcgaccgcgcacgcgacgccaccaggagcaggcgaggaccggcccagccaggcccggggcagcg

SEQ ID NO: 13382 - RNA, 78 nt, Homo sapiens
acccaaagcaggaccaagacaccaaaaacagaaggccaacagcagggacggggaaagacggaacgagcgcagccgccg

SEQ ID NO: 13383 - RNA, 78 nt, Homo sapiens
gccagagacccgagaacgagagagagaccaaaccacggccaaccacagagcgccacagcaccggaggaaacccagccc

SEQ ID NO: 13384 - RNA, 69 nt, Homo sapiens
ccaccagagccgcagaacgaagccaacgaagaaaaagacagaaggccagggaaagcacaaccccaggca

SEQ ID NO: 13385 - RNA, 59 nt, Homo sapiens
gacagcgggccggagaaagacccaggaaaagagacggaagaaagggcaggcgagagagg

SEQ ID NO: 13386 - RNA, 83 nt, Homo sapiens
cccagcccccgagggcgggaacaggcgaggaaaaccaccacacaggggaaacacccagacaacacacacaacaggaaagaaca

SEQ ID NO: 13387 - RNA, 82 nt, Homo sapiens
gaccacagagggacccggacaaccagaggcagccagcagggggaggggaggcaagcaggggggcaaaggaaagaaggcagaa

SEQ ID NO: 13388 - RNA, 69 nt, Homo sapiens
gggggggagaagggagggaaaacaaccacagcccccgagcacaacaaggagagggagaggggcagcggg

SEQ ID NO: 13389 - RNA, 73 nt, Homo sapiens
ccagcagcccgaccacaccacccccgccagcagaagaaggaaccagcaaagcgccacgaagcacaagcaagag

SEQ ID NO: 13390 - RNA, 87 nt, Homo sapiens
agcggccaaagccgcccagacggccaccggcgggaggaacaaaagacgcaccacgacggggaagagaggcccggccaggcacacggg

SEQ ID NO: 13391 - RNA, 82 nt, Homo sapiens
cagaggcggcacggccagcggcaccacccccagcaccaccccagccccgcgcccggcgccacgggacacggaaccaggagga

SEQ ID NO: 13392 - RNA, 78 nt, Homo sapiens
gagccgaccggaggacgcggagaaccggcacagcccccgggccccagggaaaggaccgaggcaggaaagaggccagac

SEQ ID NO: 13393 - RNA, 83 nt, Homo sapiens
aaccagcccacacagaccacgcaccacgccaagagacagccacagccacgacaggaccaccagaaccccacaccccgacccca

SEQ ID NO: 13394 - RNA, 71 nt, Homo sapiens
aaggcggggcaggcgggcaggcggccggagagagaggacaccacgggcaagccaacaaggcaggcacggag

SEQ ID NO: 13395 - RNA, 77 nt, Homo sapiens
gggagaggccgcggcggccaggccccagacacagacgagcaggggaaggaagcccggacccaagaacaccacacgca

SEQ ID NO: 13396 - RNA, 64 nt, Homo sapiens
gcacgggccgggcacgggaaaaacaacggacaagcaacgggcagggaaggggaagcaggccaac

SEQ ID NO: 13397 - RNA, 78 nt, Homo sapiens
gaagggagacgacgcgcgggccgcgagcggggcgacccgagcggcggagaaaccaccacaaacacgaggccagcaacg

SEQ ID NO: 13398 - RNA, 88 nt, Homo sapiens
ccaggccacaagacaccgccggaaccgacaacccgccaagaccggcccacgggcacgccaaaaccagaaacacaggaaggggaaggcc

SEQ ID NO: 13399 - RNA, 86 nt, Homo sapiens
gccggccggcagcagcgcgggacacggagccgcgaggagacagcgaggcccgcggagaccagggggccaggcggaaaggcaaccgg

SEQ ID NO: 13400 - RNA, 65 nt, Homo sapiens
gaaggaccaagaaccaggcaccggaaggcaaccaaccagccgccgaaacaccacgccacacacca

SEQ ID NO: 13401 - RNA, 61 nt, Homo sapiens
acgagcgggagaaggcgcgcgcaagcacgcgaggaggagccaaacacggacggaggaagaa

SEQ ID NO: 13402 - RNA, 88 nt, Homo sapiens
cagaaggagcggaaggcggagcgaagagccggaccaagcgccagcagaagaggagccccgccgaggcagagggccggcccccccagag

SEQ ID NO: 13403 - RNA, 57 nt, Homo sapiens
gcagcgcgaccgccaccgcggggaccaggaagcacgcagcgaaggagacccaacacc

SEQ ID NO: 13404 - RNA, 83 nt, Homo sapiens
gggcggcacccggccaggaagcggagggcgcgcgaggagaaacacagcccaaagaaacacacccccccacaacaaggcccaaa

SEQ ID NO: 13405 - RNA, 70 nt, Homo sapiens
gccgaagaagcacgaaagccccacccgccgcagcaagcagaggaagaagagagggcgaaggaggccacac

SEQ ID NO: 13406 - RNA, 77 nt, Homo sapiens
cacaccccagggagagaggacggggacccgcgacccagccccccacccaacgcggacggaggggagagcaggagggg

SEQ ID NO: 13407 - RNA, 61 nt, Homo sapiens
gcggggcccacccgcagccaaggaacgcagcgagcaagaacaagccaggaggcggagaaaa

SEQ ID NO: 13408 - RNA, 69 nt, Homo sapiens
ccggcgggaaggaaaaccgcgcagagagacaaggcgagaccaccagaaggaggccggggagaaccacgg

SEQ ID NO: 13409 - RNA, 81 nt, Homo sapiens
gcaccccgagaaccgcaggagccagagacgagccaacggaggcagccggcggaaacgaagaaaaaacagaacaaagcgaac

SEQ ID NO: 13410 - RNA, 69 nt, Homo sapiens
caagcccaagagggagccccgcagacgggacacagcacaccggagagacgaggggccagcgcagcagaa

SEQ ID NO: 13411 - RNA, 81 nt, Homo sapiens
accggagaccccgaaaacggaagcgcagggagaaggaagaggggaaaaggaaggaacgcggccacgaaaaacgaaaaaagc

SEQ ID NO: 13412 - RNA, 75 nt, Homo sapiens
aaccaagagaaaaaggccgaagaagacacagacaacaaagagagcccagccgaggagggagaaaagacaaggaaa

SEQ ID NO: 13413 - RNA, 76 nt, Homo sapiens
ccggggccgggcgacaggagcagacaccacgccacccaagagagagcaaaaaccgagaaccagaggcacacagaca

SEQ ID NO: 13414 - RNA, 76 nt, Homo sapiens
gaggcagcccccggagcccagcacagagcccgacagcacagacagagccccaggaaaacacgccaaaaagacgaac

SEQ ID NO: 13415 - RNA, 62 nt, Homo sapiens
aggccccggcgccacaggaccacaccacggagccaggaggaagccaggacacggaaggagag

SEQ ID NO: 13416 - RNA, 73 nt, Homo sapiens
gacacccacaacaggaggccccccgggacccccacccagaggagcaccacgaaaagcgaagcgaaccccgaag

SEQ ID NO: 13417 - RNA, 110 nt, Homo sapiens
cagccgggacaaaagcagaaaacaaagcaaaacaccagagaaacaccacccacagcagagccagcccccagacacagcaagggacgacaccaggccaccaccgcgcacgc

SEQ ID NO: 13418 - RNA, 71 nt, Homo sapiens
gacaaccggcagaaacagaggacaaggcagcaaagaagagacggagaacaccgaagggaagacaccaagcc

SEQ ID NO: 13419 - RNA, 75 nt, Homo sapiens
cgcggcacgcccaggaagccaccaccgagggcaagaagccgcccagacgcccgcccgggagaagcccgccacacg

SEQ ID NO: 13420 - RNA, 91 nt, Homo sapiens
caagacccaggaagccgcgggcaaaccagaccgaaggagcaggggagagaagacagaagaggggagaggcagggagggccagacaggaggc

SEQ ID NO: 13421 - RNA, 75 nt, Homo sapiens
aaagaaggcaaaacacgggcgccaaaaggaaacacggaagaccacaacacacaacccagcccggggagcccagaa

SEQ ID NO: 13422 - RNA, 78 nt, Homo sapiens
aggagcacacacaaagaggacccgacagccaccagccaaggacagagggcaagagagacccagccaaggcgggacaac

SEQ ID NO: 13423 - RNA, 72 nt, Homo sapiens
ggaccgggagggaaagaaaacaacccgccgcagccgcagaaacccgagaagcaagggaaagcgggcgaaaag

SEQ ID NO: 13424 - RNA, 69 nt, Homo sapiens
aaaaagaacgaagcacacacagagacccgaacaaacaaagaaaagggccagaccaagagcaacccaacc

SEQ ID NO: 13425 - RNA, 38 nt, Homo sapiens
caaggcggcggaggaggaagaggaccgcccacaaggga

SEQ ID NO: 13426 - RNA, 55 nt, Homo sapiens
agacgcggagacacccgcagggggaggcccaccaggaggccggggggggcacaga

SEQ ID NO: 13427 - RNA, 70 nt, Homo sapiens
ggagaaacggaaaccggggaaagcaagccacacgaaggcaaaaaacacgaggagaaaaaacagaagcgcc

SEQ ID NO: 13428 - RNA, 66 nt, Homo sapiens
agcacacgagaaggagacacgagacaagaaccagagaaacagcccacagagccaagccaggcgaga

SEQ ID NO: 13429 - RNA, 84 nt, Homo sapiens
gagggggagacggcagcccgagcaccaccggggcaccaggcggcccaagcggaaccggccaccccggaagaagagagaagaggg

SEQ ID NO: 13430 - RNA, 73 nt, Homo sapiens
gaaggaccaagaaccaggaaaaccaacccaaggcccaccaacagcagaaaccaccacagaaagccaacacaga

SEQ ID NO: 13431 - RNA, 68 nt, Homo sapiens
caccgaccaaaacagggaaagacaaggagccgggccgagaaaccgaaccagagaccagagaagaaacg

SEQ ID NO: 13432 - RNA, 79 nt, Homo sapiens
cagaggaggagcgcagcccggcccggcaaaccagaaccagggccacacccagcagagcccgcaacaaagaaacaaggaa

SEQ ID NO: 13433 - RNA, 68 nt, Homo sapiens
ccaacaacaccgcgagacgagacgggaacagccgccgaagcgcccgagacagcaaaccccacaacccc

SEQ ID NO: 13434 - RNA, 85 nt, Homo sapiens
gcagaggggagcaccgcgcggcggcacacaacacggcgcaagcggcgcgccagagcggcacgaggaagcgagcacgcccagcgcg

SEQ ID NO: 13435 - RNA, 64 nt, Homo sapiens
ccacaccaagggaaggaaggaccagagaaacgaaagggccgaccaagcagaacccgagaagagc

SEQ ID NO: 13436 - RNA, 78 nt, Homo sapiens
gcagacccccaggaagccagagccacacacaccacaggccgagaggaaaaaagccgcaagagaggagaacagaaaaca

SEQ ID NO: 13437 - RNA, 72 nt, Homo sapiens
cgcggagggcacgagccgcccagacaccgccggagcacgaagccagaggcagaagacagagcgcggcccagg

SEQ ID NO: 13438 - RNA, 69 nt, Homo sapiens
cagccccaaaagaaaggcagcgcaaaagaaggagcgggcggagaagaggaaaaagcagagagaccgaga

SEQ ID NO: 13439 - RNA, 74 nt, Homo sapiens
ccgagaaccccacagcgaaggaaaagacaagcagaccggaagaccgacggaagaccacaccccgagggagccca

SEQ ID NO: 13440 - RNA, 59 nt, Homo sapiens
ccggagaggagggcccgcccgcggcagaccgccaggccgcaggggccgagagggggaca

SEQ ID NO: 13441 - RNA, 79 nt, Homo sapiens
aacggaggaggagccgcagccaaaagggagccacgaaagaacaccaaaaagaaaacgggaaacccaagacagcaaccag

SEQ ID NO: 13442 - RNA, 62 nt, Homo sapiens
ccaagagcagcggaaaagaccagcacaggaccgcgacgagaagagcaaaacggagcccaaaa

SEQ ID NO: 13443 - RNA, 68 nt, Homo sapiens
agaacggaaaaaacaaagcgaaacagcggggccacccagaacaaaaagggccagcaaccaccgaaacg

SEQ ID NO: 13444 - RNA, 85 nt, Homo sapiens
ccgcgcgcacagagcccagcgccgccccagccacagcccccgcgcccgccagcccaacaggagcagaaaaccacagaggagggga

SEQ ID NO: 13445 - RNA, 92 nt, Homo sapiens
agccgggcaaaccagaggcggccccggcgcgcgcaggggaccgagcggcgccccaaccggccaaagaagaacgacccgaaaagagagacaaa

SEQ ID NO: 13446 - RNA, 91 nt, Homo sapiens
ggcgggaacccgaagaagaccaccgggagagagggaaaaaacaaccccgccgggcaccagcccaccccaggcgcagcgccgggcggaaccg

SEQ ID NO: 13447 - RNA, 63 nt, Homo sapiens
ggcggccaggccagacccgaaggccaggagacccgaccccaagaaaacgcgcgaaaagcagga

SEQ ID NO: 13448 - RNA, 80 nt, Homo sapiens
caaacaagacaacgagcgaaagcgaaaaacagcgaccagagagaaaagcagaagcccaggacgcccggcaccggagacgc

SEQ ID NO: 13449 - RNA, 63 nt, Homo sapiens
cgggcagaaaccgggaaacaacaggagcccaggaaggggaggagcacagaacgccaggaccaa

SEQ ID NO: 13450 - RNA, 95 nt, Homo sapiens
gccggcgggcaaaggacgccaggaggaagggacaaaaggcagcagaagagcgcaggaccgacacacagcacaagccagggcgacaagagaaagca

SEQ ID NO: 13451 - RNA, 82 nt, Homo sapiens
gcagcacagcccaacagaacccaggacccagaccggcgggcaaacccacccggcccaaccacgaaccagacacaaagaggaa

SEQ ID NO: 13452 - RNA, 69 nt, Homo sapiens
cccagcaccccgagaaccgcaggagccagagcggggacgagagccccggcacaaacggaccaccagaaa

SEQ ID NO: 13453 - RNA, 54 nt, Homo sapiens
acgcagcgcgacccagcagggaacggagggaaagcgacaaacaaccaacccaca

SEQ ID NO: 13454 - RNA, 70 nt, Homo sapiens
acagaaaagcaccagcgcggcaaccagacagggacaccagaagcccacccagagagagaagaacaaggcg

SEQ ID NO: 13455 - RNA, 73 nt, Homo sapiens
gggggagagaagaaggaaaccaggggacaacaccgcacggaccgcacggcccaagcacgcccacaaacacaag

SEQ ID NO: 13456 - RNA, 77 nt, Homo sapiens
ggaggaagcagacacgagcaaagccaggagacacaagacagcaccgggagaggcgggaagaagaagggagccaggcc

SEQ ID NO: 13457 - RNA, 35 nt, Homo sapiens
gcgaaccagcaagccgaaacgggggcgcacaggaa

SEQ ID NO: 13458 - RNA, 78 nt, Homo sapiens
cgccccaaccccgacacaccacacaaaaagaaccagcaacacacaagaaacccagccaccaagggaaaagagaagcaa

SEQ ID NO: 13459 - RNA, 100 nt, Homo sapiens
gcccgcgcacccagggcacagcgcgggagccgcacgggccaaggaaagagaggcgacgagcgacagaagaaaaagagagggagagcagcagcgcgagcca

SEQ ID NO: 13460 - RNA, 82 nt, Homo sapiens
acagagacagcagccaaacccccaggcaccggaacagcacaaccgcccggcggaggaacccccgcgcacggggcaggcagca

SEQ ID NO: 13461 - RNA, 80 nt, Homo sapiens
cgcggagcaaaaaaagagcccgcaagaagaacagagacagcagccaaacccccaggagaagcagagaaccccagacacag

SEQ ID NO: 13462 - RNA, 78 nt, Homo sapiens
cgaagagccccagccccggccgggccgaccggcagcaggcgaaggcgagaagcaagagcaaggcggcacgagagggcc

SEQ ID NO: 13463 - RNA, 78 nt, Homo sapiens
gggagcgcccgcgacagaggagggaggaaaacaaccgagggcagagggcagcgcgacgccagggccgcagaggcgcga

SEQ ID NO: 13464 - RNA, 76 nt, Homo sapiens
cgccaggccgcccccaggagaaggagcgagcgcaacagccggcgagagagagagacccgggccagaggccaggcac

SEQ ID NO: 13465 - RNA, 78 nt, Homo sapiens
ggaccgaggcaagacgacaccgccagagaagggccaccgcgcccaggcggaggcggggcgcgacacggccacgcagcc

SEQ ID NO: 13466 - RNA, 56 nt, Homo sapiens
gcacggaggaacagaagaaaagccagcccagagcgcggaagggaccacagaccagc

SEQ ID NO: 13467 - RNA, 74 nt, Homo sapiens
agacccacgacgccgccgcggcagccaacccacaccaaagggcacacagaggagaccagggaacacagaggaac

SEQ ID NO: 13468 - RNA, 69 nt, Homo sapiens
ggagagaagccaagaaagacagaccaggggggcacgccgaagacacgagaaagaagcaaaagccagaaa

SEQ ID NO: 13469 - RNA, 72 nt, Homo sapiens
aaaagcggcaagccacgcggagaagaggaggaggagacgccgaaagaacagcagcacagggcgcaagcagcc

SEQ ID NO: 13470 - RNA, 58 nt, Homo sapiens
cagccggcagcccccccccaggaacccggacagaagccagagaaaggaacaggaagca

SEQ ID NO: 13471 - RNA, 81 nt, Homo sapiens
caagcaggaccacccaccagccaccagaaggacaggacacgcagaccggcccgacccgaggcccgagggggaagggacacg

SEQ ID NO: 13472 - RNA, 72 nt, Homo sapiens
cggagggcagacgacaacggagacagcacgcacgaaacagaaacaggcacccggcggagcacgccccggccc

SEQ ID NO: 13473 - RNA, 69 nt, Homo sapiens
gcaaagccaggcaagcgcaaagacggaaaagagaagccaggcacagccagagaacaacacacacacaca

SEQ ID NO: 13474 - RNA, 43 nt, Homo sapiens
cagcaccccaagcagggggagcccaaagagagcaacacacaca

SEQ ID NO: 13475 - RNA, 82 nt, Homo sapiens
aaggaggcaggcacgggagccgaaggcaccgcggaaccgagcagcaggagcggacggacggaagaagccagccaagggaccg

SEQ ID NO: 13476 - RNA, 65 nt, Homo sapiens
ggacggaacgaggaaggcccgcacacaggacaggccccccagccaccagcggggcccacaggagg

SEQ ID NO: 13477 - RNA, 75 nt, Homo sapiens
gaggacgcggccaggcgacgggaagcgaccgcaggcgggcccccgaccggagggagagcacggcgcaccaacggc

SEQ ID NO: 13478 - RNA, 78 nt, Homo sapiens
ccccgggacccccccggaccgagccgacgccgcggggcagcgggccggcgccggcgcgggcgaccagccgacgaagga

SEQ ID NO: 13479 - RNA, 73 nt, Homo sapiens
aggcgacgagacccagggcagggcggagaacggaaaagcaccaggaagcagagaggaccgcagaagggaagga

SEQ ID NO: 13480 - RNA, 72 nt, Homo sapiens
aggaacagggacggcccgggagcgaacggggccaagggacaaggcaccgcccagaggacaccccaaggcacc

SEQ ID NO: 13481 - RNA, 74 nt, Homo sapiens
gcagaaagagcgggcagccagcggggcaccacaccaccaggaggaagccccggccacccaaacagagccaggcc

SEQ ID NO: 13482 - RNA, 63 nt, Homo sapiens
aggaggaagcgacaaaaaccaaaccggagaagcgaagggaaacgaacagccaagacccaaaca

SEQ ID NO: 13483 - RNA, 89 nt, Homo sapiens
gcgggagcgcggaacagcaggcccgagcccaccgcgccgggccccggacgccgcgcggaaaagaccccgagagaaacggcgagaaaacc

SEQ ID NO: 13484 - RNA, 63 nt, Homo sapiens
ggcaggcggaggaagaagccacccgagcggaccccgagcggacgaaaagaacaagcgcccgga

SEQ ID NO: 13485 - RNA, 72 nt, Homo sapiens
ggagagaagccaagaaagacaggacggaaaggaaggccaacccagagagacacacaggaccaacacaaaacg

SEQ ID NO: 13486 - RNA, 72 nt, Homo sapiens
ggcaccgacagacgagcccgaaggaggacccagaggggggacgacaaagcgacaacagccgagcggagaggg

SEQ ID NO: 13487 - RNA, 75 nt, Homo sapiens
acaagaagaagacagaacgcccccaccaccgcaaacaaccgggaagccggaagcaggacgccgcccgaagcggga

SEQ ID NO: 13488 - RNA, 54 nt, Homo sapiens
gcgccgccggcacgcgcccgcacggcaaagcaaagaagagccgcgcagaacaga

SEQ ID NO: 13489 - RNA, 79 nt, Homo sapiens
gcagcggacgccggccgccgcaggaggagacgggcagacaacgaacaagcgaagaaccagcagcaagacaacggagaga

SEQ ID NO: 13490 - RNA, 88 nt, Homo sapiens
acccaccccaagcacagcagaaggcgcacaggcagacagcacagccggcgccaagacgagagacgacaggaagaaaagacgcaggaag

SEQ ID NO: 13491 - RNA, 75 nt, Homo sapiens
gaacacgggagaaaaaggaaaacgcggaaaaccgacacaacagccagcaacacccaacacaaagcggaagaacac

SEQ ID NO: 13492 - RNA, 78 nt, Homo sapiens
cacgccaaaagacgaaagggggcgaccacagaacaggagcaaacaaagaaggcgaggacacagagaagaaagagagcc

SEQ ID NO: 13493 - RNA, 85 nt, Homo sapiens
aaaaccggaaaaagaagccaagaagcaaaaaagggacgcaagaagaaccaccagaagcagaccccacgagcgaaagggaaaaaac

SEQ ID NO: 13494 - RNA, 82 nt, Homo sapiens
cgacggggcccagcagacagccgaggggagcgcggggcccggcagaaagcggcggaggcggaccggggggcccgggcccgcc

SEQ ID NO: 13495 - RNA, 74 nt, Homo sapiens
agggcagccccgcaacgaagcggccccagcccgaaagcaaccgggcgcaggccacaggaacaggaggcccggac

SEQ ID NO: 13496 - RNA, 80 nt, Homo sapiens
cccacaccacgacaccgaaaacccaccgagcccgccaaagggcggagaacggaaaagcaccaggaagcagagaggaccgc

SEQ ID NO: 13497 - RNA, 52 nt, Homo sapiens
ccgccccccccgcaggccagccgccagcagagacacaggaagcgaccgggag

SEQ ID NO: 13498 - RNA, 71 nt, Homo sapiens
gaagacggggacgcaccacgagaaaaagagcgggacccccagacacaccgacgaggagagacagaaaaaca

SEQ ID NO: 13499 - RNA, 78 nt, Homo sapiens
gggcaaaggggaaacagcagagaccccagacgccaccacaacccccagacgcaagccaagggaaaagcacagggccag

SEQ ID NO: 13500 - RNA, 79 nt, Homo sapiens
ccccagagccaggcacaaggagaacacgccgaagagaacaagacgggaagaccagacaagggacagagacaagaggaaa

SEQ ID NO: 13501 - RNA, 69 nt, Homo sapiens
gagccggaagaaaggaaagaggacacacggcagccccgcaggagccaggagaacggcgcaagacagaac

SEQ ID NO: 13502 - RNA, 84 nt, Homo sapiens
agcacaggacaggggacgcaacgcccagcaaagggaagagccacaaagggaaccaggcgaagaggaaaaaaggaagaaaagcag

SEQ ID NO: 13503 - RNA, 72 nt, Homo sapiens
aacaggcggcaagaacaaaaggagccacagcaaaaagccacgccacaacaccgggaaccccaagaggaacag

SEQ ID NO: 13504 - RNA, 82 nt, Homo sapiens
acaggacagcacaggcacagaaggccaaaaaggcaaccacagagagagagagggaggggagcagcaagcagagacagagaac

SEQ ID NO: 13505 - RNA, 53 nt, Homo sapiens
gcagaacacaagaccaacccgccaaaagacgacggacaagaggagacgaccca

SEQ ID NO: 13506 - RNA, 72 nt, Homo sapiens
gccccacgacggagggccagccgcaggaagccgcggcgcggaagagccgagcccacaaagaagaagaacaag

SEQ ID NO: 13507 - RNA, 58 nt, Homo sapiens
ggaagaaccccccgggagccagaccggcaccgaagacccaaggcagccgcggagcccg

SEQ ID NO: 13508 - RNA, 112 nt, Homo sapiens
caaaagcgaagggagaaagccccggagcccgcagagcacagagaaccacacagggcagccagagcgggaaaggaggcaggccgggagaaacagcagaggcccaagcgggcga

SEQ ID NO: 13509 - RNA, 80 nt, Homo sapiens
cccggggcagggcaagcacgggaagaagcagcggacccgccaccacacggcaccggaacacaggcagcaccccaacgcag

SEQ ID NO: 13510 - RNA, 73 nt, Homo sapiens
ggaggcgaaacacaaagggacaaggcccccagagagcccgacgggaaggcaccggagggagagaggccaccag

SEQ ID NO: 13511 - RNA, 76 nt, Homo sapiens
cgagacgaacccgcagaaccccaggcagaagggggagcaggccaagaaagccggacagggccagcaaacaagaacc

SEQ ID NO: 13512 - RNA, 84 nt, Homo sapiens
cgcgccccggagggcgcggcgcgcgaggagcaggaaaagcggaagccgacaccggaacagaaacacaaacagggaccaccccaa

SEQ ID NO: 13513 - RNA, 79 nt, Homo sapiens
aaggccgggacccggccccggcccacaggggggggcaaacccgagagaacggacaaggccgacgcgcacgaacacgggg

SEQ ID NO: 13514 - RNA, 74 nt, Homo sapiens
aagggggccgaagcaaccagcggggagcgcaaggccaagaaagaagcaggagaggcaccacacagagcacagcg

SEQ ID NO: 13515 - RNA, 72 nt, Homo sapiens
ggccagcacaaggcgggggagcaggaacacaccaagccgacccaacagaaacggagacgcacgacccagcca

SEQ ID NO: 13516 - RNA, 82 nt, Homo sapiens
caggccccgaggacgcccgacggcacaaccagcaggaggacccagcgaggaacaagcagaaagcacgaacaacgagaacaag

SEQ ID NO: 13517 - RNA, 73 nt, Homo sapiens
cgagaacaccaggcccgcagcccgcacgcaaggccccccgggcagaagaaacaccaccagcgagcaccccaga

SEQ ID NO: 13518 - RNA, 37 nt, Homo sapiens
acccagacgcaaaaaccaacgcaaacagcagacggaa

SEQ ID NO: 13519 - RNA, 79 nt, Homo sapiens
cacccgaggccggggcaccggcccaccacggccacccacagaaagaagcagagggccagcagacaggccgcaccaacaa

SEQ ID NO: 13520 - RNA, 75 nt, Homo sapiens
gaagacaaaggaccaggccccaagaagaaaaccagacgagagacagaagacgaaagggcaagaaagagagcacgg

SEQ ID NO: 13521 - RNA, 80 nt, Homo sapiens
ggaaaggccggacggcccaaagaggagggcgcacagcgcccgaggacaggaaggaaggagaaagacaaacccaagaaaac

SEQ ID NO: 13522 - RNA, 76 nt, Homo sapiens
cgaaaccggaccgggcccggaggagcgaacaaggcgacaacacaggagccagagaccaagagcccagagaacagag

SEQ ID NO: 13523 - RNA, 78 nt, Homo sapiens
cagggcgggcacccaccaagcccaacgaccaccaacagggcgacccggccggggaagagggaccggcacagaaggacc

SEQ ID NO: 13524 - RNA, 89 nt, Homo sapiens
gagagagcgcgagagaggagagggcagacggacaagagcgcggaacaggacgccccgagagaaggaccgccccacgaggggacccggcc

SEQ ID NO: 13525 - RNA, 54 nt, Homo sapiens
accaggaaaaccccccaaggagacggcgcaggaccggggaaccgccaaagcccg

SEQ ID NO: 13526 - RNA, 85 nt, Homo sapiens
ggcagagggcaccgagcggcggagagccgggagaaacacaaagaggaagcagccaggacggcaaagaggaagagaagagaaggaa

SEQ ID NO: 13527 - RNA, 76 nt, Homo sapiens
cgcggccccgcgccggcccgaccaggccccgcagacccaacgggccaaaaggagaaagagcgaggaaaggcacaga

SEQ ID NO: 13528 - RNA, 75 nt, Homo sapiens
caaaaaacggacagagaggccgaaaaggacaggacagaagcaaaggcacaagaagaaccggcgaaccgcaaaaga

SEQ ID NO: 13529 - RNA, 67 nt, Homo sapiens
ggcacccggaagcaaccaccacccaccggacagagagccagaaacgaaggcgggccacaccgaaccc

SEQ ID NO: 13530 - RNA, 77 nt, Homo sapiens
caaggcacgccagacggagccaaaaaccgaacacccggaaggggacaagggacggcgaacagaccccgcgcgggggg

SEQ ID NO: 13531 - RNA, 81 nt, Homo sapiens
gagcagaacggcagccccagggagcccgcgggaggcccaacggcgccgggccaaggccggggaggacaggagagacaacgg

SEQ ID NO: 13532 - RNA, 86 nt, Homo sapiens
caggaacagacagcccccccagcccagcccagccagggcagcaggaggggggaagcaggaggcacggaggggaccccagaacccca

SEQ ID NO: 13533 - RNA, 82 nt, Homo sapiens
ccggcggggagcgccaaggccgcagacgagccaacggaggcagccggcggaaacgaagaaaaaacagaacaaagcgaacgga

SEQ ID NO: 13534 - RNA, 64 nt, Homo sapiens
cagacgcagggcgcccccggcagcacccaccgggggaccaacaggagaagccaaaggaaagaag

SEQ ID NO: 13535 - RNA, 76 nt, Homo sapiens
caagccggaaaggaggaaaaagaagaccagcgacaaaagagaaacccggcagagcggaacggagaagaaaccccaa

SEQ ID NO: 13536 - RNA, 67 nt, Homo sapiens
cccgcgccccccagcaaggaggcagcacggcaggagacgaggagaggacagcaggacacccggaccc

SEQ ID NO: 13537 - RNA, 76 nt, Homo sapiens
gcccgcgggaagcaggacgcgccgcgccccaaggacccaaagacaggaccacgcaccagcagagaaggaaagcaaa

SEQ ID NO: 13538 - RNA, 69 nt, Homo sapiens
ccgggcagcagcccagcggcagcagaaagagcaacccagaaaaacaagcacaaaagggcagagaagacc

SEQ ID NO: 13539 - RNA, 74 nt, Homo sapiens
gaagagagacagaagagcaacacgacacgccaaaagaacacaacgaaaagccccccggcgcaggaagccaggag

SEQ ID NO: 13540 - RNA, 87 nt, Homo sapiens
gcagggccgcagcgggagcggacggcgagcgcgagcggcgcgagaaaggaaagggagcagcaccggccacacccacagcacgaccgg

SEQ ID NO: 13541 - RNA, 73 nt, Homo sapiens
ggaagaagagagacaccacgagacaaaagcaacaagaggcaggaaaaacaagggaccccaagaaaaggccccc

SEQ ID NO: 13542 - RNA, 85 nt, Homo sapiens
gaaaaaggaccaaccggcaagggacaacggccaaaggccacaagaggaagcgaagaagaggacgccgccagcgagccagcaggga

SEQ ID NO: 13543 - RNA, 75 nt, Homo sapiens
ggaaacaaggcgaccccagaaaggcgggcgccccaggaaagcccccagcagggcgcagggggagagaagacagga

SEQ ID NO: 13544 - RNA, 72 nt, Homo sapiens
ccgccagacaaccggagccacgccccacgaccgccaggaccaggaaagaaaaggagcagacgaaacccggaa

SEQ ID NO: 13545 - RNA, 79 nt, Homo sapiens
acgacggaggaccgaacgagaagccaacgccagcccgcggccccaaaaagcggcgcaagacggagggcgggagaaggag

SEQ ID NO: 13546 - RNA, 61 nt, Homo sapiens
ccggccggagcagcagcccgagaagacgaccccgacgcaggccaggagccgcggacagaag

SEQ ID NO: 13547 - RNA, 74 nt, Homo sapiens
accaacgcgcagccccgcccaagcccacacccgggaccagccccaggaagcaagaccgaagagcgggccaggac

SEQ ID NO: 13548 - RNA, 89 nt, Homo sapiens
cggagcccggagaaggaagaaggagaaagggccaaccccgaagaagcaaacagaaacgaaggagacagagaagaacgacaagaaacagg

SEQ ID NO: 13549 - RNA, 86 nt, Homo sapiens
gggccgaccgccgggccggagcgggcaaggggcacgaagaagcagcaaccaggagaccagggcggcagcagcagcggagcagagcg

SEQ ID NO: 13550 - RNA, 71 nt, Homo sapiens
ggcagaaaagaagcacggcgacgggcccaaaaaagaaggacaggagaaacaggggccaaaaaaccaaagga

SEQ ID NO: 13551 - RNA, 94 nt, Homo sapiens
cggagcaggagcggcggcgacggccacaggggcggcgacggcgcaggcgaagcgaaacagaaccggggcaccagcaccagagccccacggcacc

SEQ ID NO: 13552 - RNA, 79 nt, Homo sapiens
gcgggcagccgggaggagacaacaacaagaccaagggaacggaagccccagcccgcgcgagccaggcgcccacaggaga

SEQ ID NO: 13553 - RNA, 84 nt, Homo sapiens
cgaaggcccacaggacaggagagaaagacgagcagcccgacggccaggaggcgaagagacgaggaagcccaggagcccgaacac

SEQ ID NO: 13554 - RNA, 69 nt, Homo sapiens
cacgacccaacaccacagcagacaggcagcaaagaaaggaggagaagcccagccgcgcgagggcgggag

SEQ ID NO: 13555 - RNA, 80 nt, Homo sapiens
gggaagaggaccgacacagcgggacacagagacgacacacgcacaagggccagggacagaacgaagggccggccaaccag

SEQ ID NO: 13556 - RNA, 81 nt, Homo sapiens
accgaccaggcaaccacgggagacaacaggagacacggaagccccggaccaagaaggacagaacgagacccaaggagaagc

SEQ ID NO: 13557 - RNA, 114 nt, Homo sapiens
aagcgacccgggggaggccggggggccacggaagcaccagcgcacacaacggccgaccgacagcccgagagggaaaccagaagagaaaaagaaacaaaagcccgcaaccgccgc

SEQ ID NO: 13558 - RNA, 53 nt, Homo sapiens
agaagcacagacacgacaaggcaggagacaaaggaacgaggggagaacaacca

SEQ ID NO: 13559 - RNA, 66 nt, Homo sapiens
ccgagagcaaccagacagaccagggagagggagagcgaacagagacgacccacgcgaaaggagaga

SEQ ID NO: 13560 - RNA, 73 nt, Homo sapiens
gggaggaagagagaaaagagagaaccccaaccggggaggaaaaccgacgaagaagagagaagaagcaaaccgg

SEQ ID NO: 13561 - RNA, 80 nt, Homo sapiens
ggacaggaaagggcacaaggaaggaaacccgaacccagcggagagccaaagggagcggacaaagccacccgggaaagcag

SEQ ID NO: 13562 - RNA, 81 nt, Homo sapiens
ggcccacacaccaagaccaaggcaggagaggaggagggcccgccccggcggccacaggcaagccccccacgcggggaaggc

SEQ ID NO: 13563 - RNA, 76 nt, Homo sapiens
ggcggagcaagaggcggacaccccggacgaaccacaggaagcgcggggcggcggcgaaaggacgagaggggaccag

SEQ ID NO: 13564 - RNA, 85 nt, Homo sapiens
cggcgagcccggcagagcggcgaggccggcggggcccggggcgcccgaagcggaggacccggcccagccgggcaggccgaccccc

SEQ ID NO: 13565 - RNA, 72 nt, Homo sapiens
gaacacccacaagccaggacaagcggacccacccgcaacggacggcacaaacaggccccagcaggaggaccc

SEQ ID NO: 13566 - RNA, 86 nt, Homo sapiens
accagaaaagaccgacgagaacaggcacccgggacaacggcacaagcgccgcaaaaccgggggcaagagaaagcccaccacaagaa

SEQ ID NO: 13567 - RNA, 75 nt, Homo sapiens
agacggcgcgaggcgcgggcacaggcgcaaaaaccagacaccccacaccaccacccagacgaccaaaagggcacc

SEQ ID NO: 13568 - RNA, 51 nt, Homo sapiens
accagggcccaccgcccagccgagcagagaaggaaagagggccgggccccg

SEQ ID NO: 13569 - RNA, 65 nt, Homo sapiens
gggccgagcaaccagaaccggagcaggaggcgcacaacacccaggccacggcgagccccgaggac

SEQ ID NO: 13570 - RNA, 73 nt, Homo sapiens
cgcgaccacgacaacacaagcggccggcagcgggcaagaaaacagacaaaacagaggagaccagaccagaagc

SEQ ID NO: 13571 - RNA, 67 nt, Homo sapiens
ccgacccaaccagccaaggacccacgggggcagccccgggcaaccagcaagcccagagaacccacag

SEQ ID NO: 13572 - RNA, 79 nt, Homo sapiens
cgggccgagacacgcagcggcggccagggaccaaaacggcgaggaaagagaggagccccggaaagaaaaggacagaccc

SEQ ID NO: 13573 - RNA, 65 nt, Homo sapiens
aacccaagggccgacgaggggggcggggccggcagggaggcaggcgacaacagaggagaaggcga

SEQ ID NO: 13574 - RNA, 78 nt, Homo sapiens
gaagacgagccgggaggaacggcccggaaacaggaggacccggcacagccacaccgagaagaccggcccaagaacccc

SEQ ID NO: 13575 - RNA, 66 nt, Homo sapiens
cgcccccgcaagaggacggcgccggcagccgcccggaaacagacagcacagaaaaacagggaaaac

SEQ ID NO: 13576 - RNA, 76 nt, Homo sapiens
gacccgcaccggaaggccacgccaagagaaggagggggcagagcacggcaggcagaaggggccaacccgggggaac

SEQ ID NO: 13577 - RNA, 69 nt, Homo sapiens
gaagcagcagcccgcccagaagccacgccgcccgaaaaggggaagaccggggcgagcgaggcaaggaaa

SEQ ID NO: 13578 - RNA, 52 nt, Homo sapiens
aaggcgccgcgcacgaagcccacacggcggcggagccggccaacgcacacca

SEQ ID NO: 13579 - RNA, 90 nt, Homo sapiens
gagccgggacccagggcccgggacgccgagcccgacccgggcgccccgccggcaccccgcgcggacaccagggcagcggggaagaagaaa

SEQ ID NO: 13580 - RNA, 83 nt, Homo sapiens
ggccggcccgccaaggagaacggacaccgcaacccggacccagccaggagagcccagccggagggacacgccaggacccgccc

SEQ ID NO: 13581 - RNA, 57 nt, Homo sapiens
acagaaagcacaggccaaggccgaccggaccccagcggggacaccaccagaaggaaa

SEQ ID NO: 13582 - RNA, 89 nt, Homo sapiens
ggcaagggcaaccgcggggcaagcgggccacgcacccgcaccaaggccaagccagacagacacagcacagcagccacgaagagcaaagc

SEQ ID NO: 13583 - RNA, 67 nt, Homo sapiens
gcgggcggcgcgggggagaggccggacagcccgggagacgagccccggagccccaacgaaaggcaga

SEQ ID NO: 13584 - RNA, 77 nt, Homo sapiens
aaaacaacaccaggacacagaaggcgaaacagaaggcggaggcagaacgaaagagcaccaggaagaagaggcggaag

SEQ ID NO: 13585 - RNA, 72 nt, Homo sapiens
gacaccgcccccccaggccgccaaagccgacgccaaacgagggccgaaccggaggagaaccacaaagaagaa

SEQ ID NO: 13586 - RNA, 82 nt, Homo sapiens
gcggcccggcgacacaagggcgcaggcccgaagggacgccccagcaggcggcaggaggagaccacgccaaagccaagcagag

SEQ ID NO: 13587 - RNA, 74 nt, Homo sapiens
gcggggcgggggcgcccgccgcgccgccacggcgaggagcaaaaaaaaagcaacgagcaggagcaaccaaccac

SEQ ID NO: 13588 - RNA, 72 nt, Homo sapiens
gggcagaacacacaacggacgaacagggaacaagccgccaaaggaagagcaacagagggaacagcagcagaa

SEQ ID NO: 13589 - RNA, 92 nt, Homo sapiens
aagaaacaaccagaccccaaagaagccacagaacaggggaggcagccagggaaagaaaggcacccaaagaagggaacacgaacgaaagggaa

SEQ ID NO: 13590 - RNA, 72 nt, Homo sapiens
agaggacaaagaccgcagacacagggcccacacccaagaggcacacccagaagccacaggagaagcaagagg

SEQ ID NO: 13591 - RNA, 78 nt, Homo sapiens
aaaaaggagcaggcgccagcaaagagaagggaaccgaaccaaggacgagagcacagcccccaggagaggcaggcgcaa

SEQ ID NO: 13592 - RNA, 73 nt, Homo sapiens
aacaagaggaggagagggggaaaacgccggccgaacagcccacgccaagaggggcggaaaaagccagcacaag

SEQ ID NO: 13593 - RNA, 57 nt, Homo sapiens
gaagaggccagaaaccgcccggagcacgaccgaggcgggcggcgacggcggcgcgag

SEQ ID NO: 13594 - RNA, 132 nt, Homo sapiens
ggcgggccagccagcggcgaacaggcagcgggccgccacggaggagccaggcccgcgagccagaaacgagaggaagcaaagagaaaacaagaagaagaagagagaaagaaaagggaagagagaaaaacgcac

SEQ ID NO: 13595 - RNA, 107 nt, Homo sapiens
acacaacaacaaaacaggcacacaagaaacagggagcgcgaaccaccaaggaccggacagaaaaaacaccaggacaccaagaggaccgcgggccaagaaccccgagc

SEQ ID NO: 13596 - RNA, 86 nt, Homo sapiens
gggagagccgagcagccccggccgggcacggacagggcgaaagccgaccacccggcgaagggcccaccagccgagcagacagaaga

SEQ ID NO: 13597 - RNA, 76 nt, Homo sapiens
gggaacccccacgcggccagcgaaaacgcccaggcacgcagaaaagaagagcgaaacgggaccacacggcgcacac

SEQ ID NO: 13598 - RNA, 70 nt, Homo sapiens
acaagaggcaaaaacagccacgaacacagcaggggcaccacacagaacccaaagacgggggaaaccagaa

SEQ ID NO: 13599 - RNA, 72 nt, Homo sapiens
ccaaagaagggagagaggacagcaacaccagccaccgcaccgagagaagaggggcgaagacccaccaggaag

SEQ ID NO: 13600 - RNA, 57 nt, Homo sapiens
acacaagagaccagagccgagaccagcaccacccaagcaaggcgagagagcaaggac

SEQ ID NO: 13601 - RNA, 62 nt, Homo sapiens
aaaccccagggcccgcccaggacccccaagccgccgcggacgcagggccacgggaaacaggc

SEQ ID NO: 13602 - RNA, 91 nt, Homo sapiens
ggccgggccgcacgagaagagagccagaggggggacgaacccacagaggacaagaagggcagagaagccagaacggagaaacaacgaagac

SEQ ID NO: 13603 - RNA, 48 nt, Homo sapiens
aaagggccaaagaagggagagaggagaaccaccaaagcccaaaccacc

SEQ ID NO: 13604 - RNA, 73 nt, Homo sapiens
acaagaccacaccggacaccaccaccccacgagccgcgcccagaggagcagcaagagggacgagaacgacggg

SEQ ID NO: 13605 - RNA, 68 nt, Homo sapiens
aacccaaaaacaggacgccccaggccggcggagggcggagaccgagaaggaagcgaggggccaggagg

SEQ ID NO: 13606 - RNA, 73 nt, Homo sapiens
aggagccaccagagggagaagaaacagaacgccccacgaggcggcgcccgcgaaagaacgccagaacaaacag

SEQ ID NO: 13607 - RNA, 73 nt, Homo sapiens
ggagaccgacaacgacgcaccgcgcggccgccgccggaaacgaaacagcgcagccaggaacaggacgaagacc

SEQ ID NO: 13608 - RNA, 63 nt, Homo sapiens
ggaccgaaaggacagaacaggaccggaaagggcggaaaacaccccaaaagccaaaagggaaag

SEQ ID NO: 13609 - RNA, 68 nt, Homo sapiens
gacgcagggcgcccccgagcagcggagcccaccaaaaaacacggcgggcgggggcagcccagccagga

SEQ ID NO: 13610 - RNA, 76 nt, Homo sapiens
caccgacacgcggcccccacccgcggggcacaccccccggaccgcacaccaggccgcacacacacagacacagcgg

SEQ ID NO: 13611 - RNA, 82 nt, Homo sapiens
aacagaacgcggccccagccacaccaagcagacacaagagaacggcgcagccacacgccaacgccgggacaggagccacacc

SEQ ID NO: 13612 - RNA, 75 nt, Homo sapiens
gccgaccggacaggagcaggcagaccggaaggaggcggccaaccagggcacggacgcccgccacagcaaggaccg

SEQ ID NO: 13613 - RNA, 82 nt, Homo sapiens
aaaagccaaagccacagaaaaccagggaagcaggagaagcagcaaacgccgagcagagacgaccaccggaaacaggcgaaca

SEQ ID NO: 13614 - RNA, 76 nt, Homo sapiens
gagagccgacgcgccggcaggagcgccgaccgcagggcccacgggcccacaccgaagccgcccagcgcagcaggag

SEQ ID NO: 13615 - RNA, 88 nt, Homo sapiens
acagcgggacaggagcagcggccgggagcccagggaggcagcaaagacacgaggacccgggcccgaggaagacggcgaggacagaacc

SEQ ID NO: 13616 - RNA, 73 nt, Homo sapiens
gaaaggaaccgaaagacccaccagaggccaaaaaacacggcgaccggaaagcgaacgacccccacgacccagg

SEQ ID NO: 13617 - RNA, 72 nt, Homo sapiens
caagaaaacaagcagccgcacgacgcacggcccaggaccgcacaaggacaggaagagcacccaagcgcaagc

SEQ ID NO: 13618 - RNA, 71 nt, Homo sapiens
agaagaaggaacaaacgaggcccagcaaccaaaacaggacaagaaacaccaaacaagcaacagccaagaaa

SEQ ID NO: 13619 - RNA, 80 nt, Homo sapiens
ccaccaagaacgaggccaggcgaggagagcgaacaaccccagaagagggaaaggaagcagacaccaagccaaaaagcaga

SEQ ID NO: 13620 - RNA, 67 nt, Homo sapiens
gaccccagccgcgcccgggagagcaagccgacaggaacgaagagggaccgcgagaagagggcgacga

SEQ ID NO: 13621 - RNA, 51 nt, Homo sapiens
gaaaaaagaagaaaaacgaaggaaaacggcaaaccaggcgagacagcagga

SEQ ID NO: 13622 - RNA, 73 nt, Homo sapiens
ccaggaagcagccagaccaagaacaaccgcggacacggagaggaaggaagacaaggcacagaaacaccccaaa

SEQ ID NO: 13623 - RNA, 51 nt, Homo sapiens
gaaaagagaaacccaaaaagcggcccggagaggaagccgccagccaccaag

SEQ ID NO: 13624 - RNA, 81 nt, Homo sapiens
acggggcaagggcgagaccggagagccgcaggacggcgcggcagagccccgacgccacagaacgggaaaccaagccccagg

SEQ ID NO: 13625 - RNA, 74 nt, Homo sapiens
ccccccaaacgacgcagccacggagagacgcaaacagcagacggaagaccccacggcaaaaccacacccgaggc

SEQ ID NO: 13626 - RNA, 53 nt, Homo sapiens
gcacagaagcacagccacagagcaggcacaggcgcgaacaccaaggggcagaa

SEQ ID NO: 13627 - RNA, 71 nt, Homo sapiens
gcccgaacacacaccgacgcacaacgcagcccaccgcccccacggagcagcccaaggagcaaccggaagga

SEQ ID NO: 13628 - RNA, 73 nt, Homo sapiens
aagaacagaacaaacgagaccaagagagaggagcaaagagaagcagcgcgcagaagcaaaccgacaccagcga

SEQ ID NO: 13629 - RNA, 79 nt, Homo sapiens
ccagagggcccggccaaggccaggaagagcggggagaagggcgggaaagcaggcacccaaccaaccacccaggggagag

SEQ ID NO: 13630 - RNA, 82 nt, Homo sapiens
acgagcggggagagaggggagcgcacaagaggacagcagcggacggccggaccaagaggcgccgccccccagcaaacgagaa

SEQ ID NO: 13631 - RNA, 68 nt, Homo sapiens
gaaggagccggcggaacaccaccgagcacgaaaggcgggccaagcagaagccacggaccggcggaaag

SEQ ID NO: 13632 - RNA, 54 nt, Homo sapiens
agaacgaagcgaccaaagcgcacggcagcgagaggaagggccccacaccaaacc

SEQ ID NO: 13633 - RNA, 75 nt, Homo sapiens
gaaggacggagaaaggaagagaaacaggccacaaaccacgacagcagagacaagagaagccacggagcaagacac

SEQ ID NO: 13634 - RNA, 75 nt, Homo sapiens
ccccccagccagagccgaccgccgccgccgccgagagagaggagaaggagacaacggcaagcggagaagagcaag

SEQ ID NO: 13635 - RNA, 85 nt, Homo sapiens
accgaacaccgggggcgggcagccgaggccgggaaccagcgaggcggaaagaacacccggaaagaaaggccaccaagaagaaagg

SEQ ID NO: 13636 - RNA, 85 nt, Homo sapiens
gccggcgcgccgcccaccgggcccgggcaccacgggcggcgccaggccggcccaacaacgaagagaggaaagaagcggaaaggag

SEQ ID NO: 13637 - RNA, 76 nt, Homo sapiens
gagaagggaagacacacaacccaacagagcgcgaggagggaaacgcgagggccaccagaggagccgccgcgcccag

SEQ ID NO: 13638 - RNA, 82 nt, Homo sapiens
gcaaagggaaggggggaccgcggcgcaggacgccgacacgggccgcgccaggggaaccccgccagacagccagacaggagga

SEQ ID NO: 13639 - RNA, 78 nt, Homo sapiens
ccgggcggaaccggggagacagcgagccccacgggaccaagacacccgcgagagagccaaggcagagaggaaggaccc

SEQ ID NO: 13640 - RNA, 51 nt, Homo sapiens
gcaaacaccaacaaagggaaggagaacaaagaggcagagcaacagggacac

SEQ ID NO: 13641 - RNA, 81 nt, Homo sapiens
gaccccggaagccaaaaaggagaggaccaacagcaagagaccgcagacaaagcacagggaagaaaagccaaaaacaagaaa

SEQ ID NO: 13642 - RNA, 77 nt, Homo sapiens
aggcccagacaggagcgggagaaaagaaccgacccacaccaagccaaaagaaacccccaaaaccggaagaaagagaa

SEQ ID NO: 13643 - RNA, 44 nt, Homo sapiens
ccccacaggggccaagcaaccgcggaacagagcccccgcaccac

SEQ ID NO: 13644 - RNA, 66 nt, Homo sapiens
gcgaaggggagaagccgaccgaacgcgccagcgcggggcaacagcccgacggagcagcagcgccgg

SEQ ID NO: 13645 - RNA, 85 nt, Homo sapiens
cgaggcgccccagagcccagggcaggacaccgacaggaacagggaccacgggggcaaccacgagaaaacggaaccgaaagcaaga

SEQ ID NO: 13646 - RNA, 60 nt, Homo sapiens
gcaggcagcccccaggggcagggcagcaggcccaaacccccacagggacacagagccaca

SEQ ID NO: 13647 - RNA, 77 nt, Homo sapiens
agaacccagacaacaggacgccgccaaggcgaaaaagaaagccaagaaaagacagcaaaaagcaaaggacaaaagag

SEQ ID NO: 13648 - RNA, 80 nt, Homo sapiens
gacacagagccaccacccaaagcggaggaagcgagcaaaggcagagccacaaacaggagggccggcacgaagaacgccaa

SEQ ID NO: 13649 - RNA, 79 nt, Homo sapiens
cagacaacaggacgccgccaagggagaagagcaaccggacacagaaggggaaggaaaccccaagcagcagaggggcagc

SEQ ID NO: 13650 - RNA, 80 nt, Homo sapiens
cgggccgggggccgccgggacccggccaccagcaagccggaaacacacgaacgccggaggaggaggggacccgcgcgcga

SEQ ID NO: 13651 - RNA, 78 nt, Homo sapiens
gagacggagcgaaggccggagcaccggaagaagcgaccacgaaccgagaagaagagcaagcgcagcaaagggacggca

SEQ ID NO: 13652 - RNA, 51 nt, Homo sapiens
ggacaagaccaaaacccacgagagacacaccaacaaaggcagcgcgacaga

SEQ ID NO: 13653 - RNA, 72 nt, Homo sapiens
cacggggggccggagcaagggcggagaacggaaaagcaccaggaagcagagaggaccgcagaagggaaggag

SEQ ID NO: 13654 - RNA, 73 nt, Homo sapiens
gaggagacgcgcggggcgggccgccagcggggacaggcagcgacccagcccagcggcccgaggcacaacccgc

SEQ ID NO: 13655 - RNA, 77 nt, Homo sapiens
caaaagaccgcagaaaaggaagcggggaaaaagagaaagaaaagagagaagcgagcagagcagaaaagagcaaaacc

SEQ ID NO: 13656 - RNA, 89 nt, Homo sapiens
agaaagacaaagacccaggaacaaaccgggggcaaggccaaaaagaagaaagcagaggagggcaccacgccaccgggaagccaccacac

SEQ ID NO: 13657 - RNA, 76 nt, Homo sapiens
aggcagaggggaggcgcgaaagagccgcgaagcagccacggaccccagcacgaaaagacgggagaaaaaggggcca

SEQ ID NO: 13658 - RNA, 79 nt, Homo sapiens
cccacagagaccagagaaagggaggccccgaaggagcaaggaaacgcgaaccaagggccacggggagacaaggcaaaaa

SEQ ID NO: 13659 - RNA, 62 nt, Homo sapiens
gcggccccggccgccccgcgagggcaccaggagggaagcagggaaagggagcagcaccggcc

SEQ ID NO: 13660 - RNA, 86 nt, Homo sapiens
ggcccagggcgagaacggcccggagacaggcggcagacgggagccaggcagcgagcgggagcagacagggaaccgaaggcagcaga

SEQ ID NO: 13661 - RNA, 60 nt, Homo sapiens
cgggcgggcgggagcgcccaagggggcggagagcggggggggcgccgcgccaggacggca

SEQ ID NO: 13662 - RNA, 58 nt, Homo sapiens
caccgccaccaggggaaggggacaagcagaccggaagaccgacggaagaccacacccc

SEQ ID NO: 13663 - RNA, 65 nt, Homo sapiens
cagaaaaaagaaccagagcaaaacgacagaaagcaagaccaggacggcagggaaaaaccaaagcc

SEQ ID NO: 13664 - RNA, 86 nt, Homo sapiens
cgggcccccgacgcgcgcagccggcagcccaccgccgcccggcgcgaccccaacccagccccagcgaaccacgggaacaaaggcga

SEQ ID NO: 13665 - RNA, 87 nt, Homo sapiens
gcgcggcgcggccgagagccgcggcccggcggaaaggacagcaggacccggccgccgaacgacaggaggacgccccggggaacgaac

SEQ ID NO: 13666 - RNA, 68 nt, Homo sapiens
ggcccgcggagcccagcacggcagaaacagccaagggacggaacgaagcaccgagagaagaaaccccc

SEQ ID NO: 13667 - RNA, 78 nt, Homo sapiens
cgagagcggaccgagagcgcgaaacgcacgagaaggcaaaaagccaggaagaggagagggacccaagccgcgagggag

SEQ ID NO: 13668 - RNA, 69 nt, Homo sapiens
agaagaaggaaggaggagcaaaaggccaacagcaagaaagggaagccgagaaacagccagacgcaaaga

SEQ ID NO: 13669 - RNA, 57 nt, Homo sapiens
cgaaagacacgccccagaccaaggaaggggggccacgggccccgaccgcccacaagc

SEQ ID NO: 13670 - RNA, 75 nt, Homo sapiens
gccggccaggccggccgcgccgcgaggagacagaagacccgccccagaggggcggcgccagagacgagcacccaa

SEQ ID NO: 13671 - RNA, 75 nt, Homo sapiens
gccgccgaccccccggcgccgcgccggcggcgcccccgggaccgggccgccgcccacagaccagcccggggcgcc

SEQ ID NO: 13672 - RNA, 66 nt, Homo sapiens
cgaagagagggccaaaaaggacagacagacaagaagaggcacgaaacaaagagcagaacagaccca

SEQ ID NO: 13673 - RNA, 76 nt, Homo sapiens
cgagcagccgacccgcccaggccagagccagacaaaaaaacgaaggaaggaggacccgaggagagagaagacggaa

SEQ ID NO: 13674 - RNA, 74 nt, Homo sapiens
agacacacggcgagaagccaacaaaagagaggaccgacaccacgggggagaccgacaccaagaagcccgcaccc

SEQ ID NO: 13675 - RNA, 52 nt, Homo sapiens
ccacgaagggacacacccacaaacggccggacagaagccagccagagcccac

SEQ ID NO: 13676 - RNA, 76 nt, Homo sapiens
ccgagaaaccagccacgcagaagagacaaggaccacagccgagcgagagcaggaagacggggccaaccggaaccca

SEQ ID NO: 13677 - RNA, 85 nt, Homo sapiens
agcgcccacaccccccggccccgaagggcacgcagcagacagccccgggcaccaggcagcaacagcaaaaaggcagggagaacga

SEQ ID NO: 13678 - RNA, 87 nt, Homo sapiens
cggacacaaacaagcagcaggaggacaccaaaggccaaaacagaagaggcaaagcccagccacagcagcagcccagcagcaaacaac

SEQ ID NO: 13679 - RNA, 74 nt, Homo sapiens
cagcccccagagcggaacacagggcaccaagcccaggcaagaagccacacaaggaagaagcaaaagggaaagag

SEQ ID NO: 13680 - RNA, 63 nt, Homo sapiens
agaggcccaaagagagagagcaacgggaccaaaagaaggagcacagcaagcgggagcaggcag

SEQ ID NO: 13681 - RNA, 55 nt, Homo sapiens
ggacacaaaagaaagcgacaaggaacaaggcagaagagacaacacagaaaccagg

SEQ ID NO: 13682 - RNA, 69 nt, Homo sapiens
ggcccagcagaagaggcgagcagaccaaaagagaaaggaccagcaaacagaaaagaggagccgccgccc

SEQ ID NO: 13683 - RNA, 73 nt, Homo sapiens
accccccggcgccgcgccggcggcgcaggagagggcaggacagggagaggcgaccacccagaaccgccgagcc

SEQ ID NO: 13684 - RNA, 72 nt, Homo sapiens
gcagcacgaccacgaaggagggcaaggcccgaaaagaaagcgaacacacaaaacaagaaaaggcacgcaaac

SEQ ID NO: 13685 - RNA, 77 nt, Homo sapiens
cgcgccgacggcgccaaacacagggcccggcaccccggggaccgcccccacggccacacgcccgccccaggacgagc

SEQ ID NO: 13686 - RNA, 52 nt, Homo sapiens
gaagcaggaaaggccggacaccagggaaacacaaagaagacaccagaagggc

SEQ ID NO: 13687 - RNA, 78 nt, Homo sapiens
cacacagggacccacggccagagcccggagcaggaaaaacacagagacagacggcggcagggccaggccgagcacggg

SEQ ID NO: 13688 - RNA, 59 nt, Homo sapiens
ggcgcaagacgcgaccaaagccgacggggcaagagaggccgccggaaacaccaggagga

SEQ ID NO: 13689 - RNA, 74 nt, Homo sapiens
ccaaaccgccggccaaccaggaccgaggagaaggcagaagggacacagaggaggggggacgggaagccagcggg

SEQ ID NO: 13690 - RNA, 75 nt, Homo sapiens
acccacaacaccaggcgccaggcggaaccggggaccggaccggggcgaggaagaggagaggcaaggcaacggaac

SEQ ID NO: 13691 - RNA, 77 nt, Homo sapiens
agggccagacccgggccacgcgccccgcagcccggcagcggaacagcagcagaggacgacagcacgcaggcaacaga

SEQ ID NO: 13692 - RNA, 81 nt, Homo sapiens
gcccggaccggccgagaggaagacgagccgggaggaacggcccggaaacaggaggacagccaggacaaaaccaggcagaac

SEQ ID NO: 13693 - RNA, 52 nt, Homo sapiens
agaccggccacaggcagacggcagggccggggagaagcagaccgcaccaggc

SEQ ID NO: 13694 - RNA, 76 nt, Homo sapiens
cccaccacccggaggagcagcccgccccgccgggggagacgacccccgccaggaacaagcagaaagcacgaacaac

SEQ ID NO: 13695 - RNA, 80 nt, Homo sapiens
agcccgggcccaggccccggcagcgccgggacaagagaaggagacccggacccgccccgggaccccgccgcacccgggca

SEQ ID NO: 13696 - RNA, 74 nt, Homo sapiens
ggaaacaacaaaacccccaaccggcaaagggggacggcgcgaagaagagaagacaggaacggcaaagcaaccag

SEQ ID NO: 13697 - RNA, 35 nt, Homo sapiens
gcgaggagcgagcagaggaaaaaccagaagagaaa

SEQ ID NO: 13698 - RNA, 77 nt, Homo sapiens
caacaaacaccagcgcggccccccgccccccccgcagcgcgcagagcccggccaagaacaagcagcagccgaaccga

SEQ ID NO: 13699 - RNA, 72 nt, Homo sapiens
gccggaacgcgagaccgggagacggcagaccgccgcgcggaaaggcccccagggaccacgggcacggggcag

SEQ ID NO: 13700 - RNA, 68 nt, Homo sapiens
ccgaacgaggaaaaacagccaagacggcaaagccccccagaagaccaggcagccaccggaagagaaaa

SEQ ID NO: 13701 - RNA, 77 nt, Homo sapiens
aaggcgccacggcagcgaaagagccgcagacgcacagcaaccaccggacccgaaggccaccacccagaggggccgcc

SEQ ID NO: 13702 - RNA, 75 nt, Homo sapiens
aggagaaaccggcacccagcgcagcgaaggagcgagaccccgccagggccgccgcacacggagcagcagggaacg

SEQ ID NO: 13703 - RNA, 82 nt, Homo sapiens
cggcgcgcccgggacggcggagaggcgccccccgcagcagggggcacccgaggaggaagagggcagggcccacggaaagaag

SEQ ID NO: 13704 - RNA, 81 nt, Homo sapiens
gcacccgcaggagagggaggcaggccgaggcacggagcgcccccacaggagagggggggccccagcccggccgaacgggcg

SEQ ID NO: 13705 - RNA, 80 nt, Homo sapiens
gaccgagagcgcgaaacgcacgagaaggccgccgccacccccacgggccgggccggccgcggggagcaccaggacaccag

SEQ ID NO: 13706 - RNA, 67 nt, Homo sapiens
cccgggaagaagacacagaaaacagggggaccagacgcaggccaagaaagccaaaaagagcggaaag

SEQ ID NO: 13707 - RNA, 73 nt, Homo sapiens
cgcccgcccaaggcaggaagaggggccgcaaagaagacgccccaacccacagagagagcagcaggaaccaccg

SEQ ID NO: 13708 - RNA, 67 nt, Homo sapiens
ggcgaacagcaaaccacccagcaggaaaccaagagaaggcacccggaaacaagccacgaaggagaga

SEQ ID NO: 13709 - RNA, 73 nt, Homo sapiens
aagcagcagaggggagcacggagaagcagagggaccggcagcgagcagcagcaggaaagcaagaaagagagag

SEQ ID NO: 13710 - RNA, 77 nt, Homo sapiens
aacccaaccacgccccagcagcaggaaggaaaccccccaggcaagaggcgcaggaccgggaagaccaacaaacgcac

SEQ ID NO: 13711 - RNA, 69 nt, Homo sapiens
gaagcgcccgagaaaaagcggcccgccagcgggaccccccacaacaacccccgaggcagaaggggaagg

SEQ ID NO: 13712 - RNA, 80 nt, Homo sapiens
gcagaggcaaggggccaccaggaggccagggggcgccaggggccaccacagagcccgcagggacacagcagaacaagcaa

SEQ ID NO: 13713 - RNA, 76 nt, Homo sapiens
ccgcggagcaaggaaaagacccggaaagaagagacacagaggagccacacccccaggaaaccacacgagacgcgac

SEQ ID NO: 13714 - RNA, 72 nt, Homo sapiens
ccgggcccggaggagcgaacaaggcgacaacacaggacacacagcaacgaagcaggggaggagggaagaccg

SEQ ID NO: 13715 - RNA, 76 nt, Homo sapiens
ggaaccacgcgagcgcagccaggacgccaaaccaccggccaggaggcacaggacgcgacgccagacgaggccaccg

SEQ ID NO: 13716 - RNA, 75 nt, Homo sapiens
gagcagcccccaggaacagggcaaaggagagcacaaccacgcagggaagcccaggggcaggaacacacaggcgac

SEQ ID NO: 13717 - RNA, 89 nt, Homo sapiens
caagacccaagaagaagaaggcgaaggaccccaacggggaggccaacggaagaaccacgaaccgacggggaccccaagaggaaggaacc

SEQ ID NO: 13718 - RNA, 67 nt, Homo sapiens
gggccgcaccccagggaccaggaccgaggagagccccgccagaaccagggaaaccagaaggcacgac

SEQ ID NO: 13719 - RNA, 84 nt, Homo sapiens
aggaggaagcgcaacccgcgacagcagcgaggagcggacagccagaggagagcgacagacagcgaggcccccagcccccaggcg

SEQ ID NO: 13720 - RNA, 78 nt, Homo sapiens
ggcagggccccgcccggcggggaaggaggagacaccagccgcaaggacacaggacgaagcaggagcgcagaacggcgc

SEQ ID NO: 13721 - RNA, 77 nt, Homo sapiens
agacgcagggcgcccccggagccagagaccaagagcccagagaacagagcgccccaccgaagagccccagaccccca

SEQ ID NO: 13722 - RNA, 75 nt, Homo sapiens
agaacccagcgcccccccagaacacccagccacggaaccaggagcgcagacagacagaaagcgcccaggacagga

SEQ ID NO: 13723 - RNA, 75 nt, Homo sapiens
cgaagagccccagcaggagagagcgccagaaagagcaaaacacagagacgcggccaacagaaggaaccaaggaca

SEQ ID NO: 13724 - RNA, 72 nt, Homo sapiens
cgggaaagccaccgaaaagcaaccaccgaaacgggcgaaaaagaagaacagcaaaacacgaaaggcaaagag

SEQ ID NO: 13725 - RNA, 81 nt, Homo sapiens
agcggcaccgaccccggcgggagaagagccggacagcaaggaggaggggaccagccaggcccacacccccgacgcccgagc

SEQ ID NO: 13726 - RNA, 50 nt, Homo sapiens
ccacgccaccacgcgcagggcacaccagcgggagggacaggagaacaggc

SEQ ID NO: 13727 - RNA, 86 nt, Homo sapiens
agacggccacgaccgggagcagcagccaaaacagagggagacgagaaaagggccgagcacaagccaagaaggcgccccaaagcagc

SEQ ID NO: 13728 - RNA, 75 nt, Homo sapiens
ggcggacaggcggaacaaaggacccaaagacaggaccacgcaccagcagagaaggaaagcaaaccgaagcaggcg

SEQ ID NO: 13729 - RNA, 78 nt, Homo sapiens
caacccagcaggaaacagcagcaagcagaaacgaagaaaagagaagccgcaggagaaaagcagcacgagagggaaacg

SEQ ID NO: 13730 - RNA, 81 nt, Homo sapiens
gggaaggcgagcgccccccccaaccacaaaacaggcggagggcggcgagaggccgcgacagccaccaaagcagcgcggaca

SEQ ID NO: 13731 - RNA, 92 nt, Homo sapiens
gaaggagggcaagacagcgagggacgaaggagaccgcgcagccagaaaaggcgaaagaccacacaacccagaggcgcacacaaaaccaccga

SEQ ID NO: 13732 - RNA, 74 nt, Homo sapiens
ggagcaccacggaccccaaggaagccacggcagacacacaacccgacccgacgagcaggcgagaacgaaaccaa

SEQ ID NO: 13733 - RNA, 72 nt, Homo sapiens
agacggcgaagagcagacgcacgccaacgaaaaggaacgagaaaaagaacagccaagaaagacaacaagaaa

SEQ ID NO: 13734 - RNA, 75 nt, Homo sapiens
cggcgggacccccaagggaaagccaacggggcaaagaaaaaggagagaaaaagaggcaaaacaacaagaagaaaa

SEQ ID NO: 13735 - RNA, 56 nt, Homo sapiens
ggagccaacgccggaccagcaaggcgagagggaaagggcgggggcaagacccagag

SEQ ID NO: 13736 - RNA, 68 nt, Homo sapiens
agcgcgcaagaagggaggccaagccgacgccagcgggcgccacccaacaggcgcaccgcccacggccc

SEQ ID NO: 13737 - RNA, 72 nt, Homo sapiens
acccggagcgacaagcgccccgacggagcgccaggacggcaaaagcagaccggaaaacccaccggcaagacc

SEQ ID NO: 13738 - RNA, 84 nt, Homo sapiens
gcagccaccagcagcccccagagcgggaccacagcagccacgccccagccccaacagcccccagccccagcggacccgcccagc

SEQ ID NO: 13739 - RNA, 49 nt, Homo sapiens
ccccggcgcacgcaccccagcaggaagagcggggagaccaaccaagaga

SEQ ID NO: 13740 - RNA, 104 nt, Homo sapiens
ggggggacgcagccaggggcaacaagcacccaccaccccccgcgccccgagagaggcgccccggagcccgccgcccgccaccaggccagcagcgaaggagccca

SEQ ID NO: 13741 - RNA, 66 nt, Homo sapiens
ccaaaaagcaaacggaccagaccgaccaccaaaacggagacgcccccccggcacacaggaaacaag

SEQ ID NO: 13742 - RNA, 83 nt, Homo sapiens
ggagacacaggcagaaacaagggagacagccgcccggccaagcacccgcagcagaccgccagagcggaacgaccccagagcga

SEQ ID NO: 13743 - RNA, 77 nt, Homo sapiens
gccggaggcgggagcagccaggacgcaccgccaccgcggaccgaggcggacgggaccggaggcacaaaagaagaaac

SEQ ID NO: 13744 - RNA, 80 nt, Homo sapiens
caccgggaacgggaggggccgggccggaagaccaagggggcacagaagggcccgaaaaaaacccccggcggccagaggaa

SEQ ID NO: 13745 - RNA, 76 nt, Homo sapiens
ccgccccgagcccgccgccacacccgaggcgcgagacccacggcggcagcaacaacagcccgacgacagcaggggg

SEQ ID NO: 13746 - RNA, 73 nt, Homo sapiens
cccggacgccgaaccgccgggccccaacgcaggcccgaggccggcccccagaccggaccaaaccagagacaaa

SEQ ID NO: 13747 - RNA, 64 nt, Homo sapiens
aaaaagcaccggacggcaagcacaacgccaaaaaccacaggagaaaagaggagaaggcagaaga

SEQ ID NO: 13748 - RNA, 111 nt, Homo sapiens
gcgcgagggaccacggcgggcgcgaccgggcggcccgggggggcgggcgcagcgcggacagcaccgaggagcaacacccccagggagcccagaccgacaggacgcaagggg

SEQ ID NO: 13749 - RNA, 56 nt, Homo sapiens
agacgagaaggagacgccggacacagaagaacaaggcagagaacgaagagcagcca

SEQ ID NO: 13750 - RNA, 76 nt, Homo sapiens
caaaagagccacccaagggcggacacggaagcacagccaaagaaacggaacgcaaggcggaagcagacaaaggccg

SEQ ID NO: 13751 - RNA, 87 nt, Homo sapiens
caagcgacgaaaagcggaaggggcagcgcggagacgagaagggagcaagaggcaggaaagagcacagaccgacgcagaccgggcccg

SEQ ID NO: 13752 - RNA, 80 nt, Homo sapiens
agagaaccaccaccaccgaaaaaaaaagaaaaggaaggagagaagagaggacaagccgccgcaagaaaaggagacaggaa

SEQ ID NO: 13753 - RNA, 82 nt, Homo sapiens
gagaccagccgggcaacacggcccgggagccggcagagagccagcgaccgaagaggcagcagaagaggaggaaggaggaagc

SEQ ID NO: 13754 - RNA, 78 nt, Homo sapiens
ggcagaagacggggagccagcaggcaggaccgaaaagacgcggccccaaaggaaacacccgaagaacacagcgccagc

SEQ ID NO: 13755 - RNA, 72 nt, Homo sapiens
cgaggacaggacgcgccgagagcaaaaccgccggccggaccagaccggggggaaaggcgaggagccgcggcc

SEQ ID NO: 13756 - RNA, 73 nt, Homo sapiens
aggcgacccagcggagggagagcccacgacacacaagccaaccacccagaacaagcagaaagcacgaacaacg

SEQ ID NO: 13757 - RNA, 83 nt, Homo sapiens
cgaacaccggacaaacagaaccagagcaaaaggacccaagaacacgggagacacacacaaacgaaacccgcgccagagagcca

SEQ ID NO: 13758 - RNA, 50 nt, Homo sapiens
aaagcaaagaaagaagcaccgaaggacgacgaaggggaaacacccccaag

SEQ ID NO: 13759 - RNA, 71 nt, Homo sapiens
cagacggagggccgcgccacaagcagcaggccaagggaaccaaaggaaagggaggagcggggagcagcgag

SEQ ID NO: 13760 - RNA, 61 nt, Homo sapiens
ggcacacaaggccggcccccagcaggaagagagcaggagaaagggggagccagcgggccag

SEQ ID NO: 13761 - RNA, 72 nt, Homo sapiens
acaagcccacccgaaaccacaaggccgagaagggccaaaggaacacacagagcccagcaaggccacagcacg

SEQ ID NO: 13762 - RNA, 73 nt, Homo sapiens
aaggaccaagaaccagggggaggcacccaaaacggccaaagaccacagccaaaagaagaagcaaacgaaagaa

SEQ ID NO: 13763 - RNA, 88 nt, Homo sapiens
gcgggaccgcggccacggacggaacccggagggcggaccacaaggcagggacaaacaaccaccccagcggcacgagcagcagagcaac

SEQ ID NO: 13764 - RNA, 35 nt, Homo sapiens
acagagcagggggagaccagagacgaagaggagca

SEQ ID NO: 13765 - RNA, 61 nt, Homo sapiens
ccaccaagcagggcgaaaggccccggagcccgagggcgaaagacccgaaggaccgggggga

SEQ ID NO: 13766 - RNA, 52 nt, Homo sapiens
acggcacccccaggggaagacgagccaccgaggcacaggagaccaaggaccg

SEQ ID NO: 13767 - RNA, 85 nt, Homo sapiens
gacacacaaacaacacagacccacaagcaagcacagacgcgcgcacgcccacgcggaccgacacgagcacgcgcgccgcgccgcc

SEQ ID NO: 13768 - RNA, 72 nt, Homo sapiens
acagcagagagcaacccgaaaaggagcagggacggggggaaaagcgcacccgggcccgggcgagaaagaaga

SEQ ID NO: 13769 - RNA, 92 nt, Homo sapiens
aggaaaaaaaggaggccagaaaagagagcagcaggaggaagagcgccgagacgccacagccgggagggcaagccgacccgggggagccggac

SEQ ID NO: 13770 - RNA, 80 nt, Homo sapiens
ggccgcgaaccgcagacagcggccaagaagacacaaaggacggaggcacgcaaacgaacacaagagacagggaacaccag

SEQ ID NO: 13771 - RNA, 40 nt, Homo sapiens
ccccggggacggcgcaggacaggcggaccccgccgcacaa

SEQ ID NO: 13772 - RNA, 36 nt, Homo sapiens
aaccagcaacaagccggcaggaaacagccggagggg

SEQ ID NO: 13773 - RNA, 64 nt, Homo sapiens
cagcgcccccaaacgcagcgacccacaagaagaagcccagacgaacgccaggcccagcagcggc

SEQ ID NO: 13774 - RNA, 73 nt, Homo sapiens
ccaacagaggaacacgacaaaaaaaagaaaggcaagccaaggggcgacagacaaaggcagaaaagcgagccac

SEQ ID NO: 13775 - RNA, 63 nt, Homo sapiens
ccggccgccccggagggagacgcgcgccgaggagaacccagcggggccccgggcgcgggagcc

SEQ ID NO: 13776 - RNA, 84 nt, Homo sapiens
accggcggcgggcacacagacacgcacggagggcccaacccacagcgccccaggcagggagaccccaaggcaaaaccaccacac

SEQ ID NO: 13777 - RNA, 78 nt, Homo sapiens
ggaagacgccgcgccaccgagccggaccggagacggggccaacaggggaacacccaggcaggccgaagccggcagcaa

SEQ ID NO: 13778 - RNA, 94 nt, Homo sapiens
aaaaaaccagcaggccaggaacacaacccaccgacaggacccacgggaagcaaaggaagccagaggaaaagggaacccgacacagcaaagaggc

SEQ ID NO: 13779 - RNA, 59 nt, Homo sapiens
gcgggggggggccgaccggagcgggccaggccgggagcccaggaggcaaaaacaaaacc

SEQ ID NO: 13780 - RNA, 75 nt, Homo sapiens
cccagaaccgaccgcgggcccaggacaggacaaaccccccccccgggcggaccccccacagcaggagccaaggca

SEQ ID NO: 13781 - RNA, 46 nt, Homo sapiens
cgaacagcgacgcgcagagacgaacggagccaaccggcccgcggag

SEQ ID NO: 13782 - RNA, 87 nt, Homo sapiens
acggccagagcacgcagcgagcgagaagaggaggacaacagcacaaccgggggaagacaagagcaagaggagacaaaaaacacagcc

SEQ ID NO: 13783 - RNA, 83 nt, Homo sapiens
cccgcggccgcacccccgccccaggaccgcaagcgcaggaccgagcccaccgcacgggcagcagaacgagggcgggcccgccc

SEQ ID NO: 13784 - RNA, 41 nt, Homo sapiens
agaaccgaggaggaagcagggccgcggcccacgcgcccacc

SEQ ID NO: 13785 - RNA, 58 nt, Homo sapiens
aagcgcagcaacagcaagccccgggcagcaaaccagccggcgggcgccacaacggacg

SEQ ID NO: 13786 - RNA, 79 nt, Homo sapiens
aagaagcccgaagggccagaaacgggaagagaaagggagcacgagacagcgccggccccaacgagggagacaccaagcg

SEQ ID NO: 13787 - RNA, 75 nt, Homo sapiens
caggacaacacgccgaggcaagaacagaccaagaaggggagaccggaaaacacacccgagaagccaggggaggcc

SEQ ID NO: 13788 - RNA, 76 nt, Homo sapiens
gagccgccggaaccgggccacgagcgcagggaggcaccagggaagccaagaccacgaccagagaaaacaagaagga

SEQ ID NO: 13789 - RNA, 85 nt, Homo sapiens
gcgcagaggaggcggcgaggcgccgcggggcggccgccagcacaagcgcacccgcacaggaagagagaagggcacagaccaagac

SEQ ID NO: 13790 - RNA, 74 nt, Homo sapiens
aggccgaggcccgccggggagacccaaggcccgagccggacggaggagaccaggaggaagaagccaccaggggc

SEQ ID NO: 13791 - RNA, 72 nt, Homo sapiens
ggcagcggccgcgccgcgccacccaaggggggggcggaggacgccaccccgggcacccggccacaccccccc

SEQ ID NO: 13792 - RNA, 73 nt, Homo sapiens
cagccgagcagggcagcagcaggcacccaaaagcaagcgcgggaagcgacacccagaccccacgggagaagca

SEQ ID NO: 13793 - RNA, 74 nt, Homo sapiens
agacagcggcggaccagaagacaaggaggggagcccggggcgccgggccaccgggggcgccgccagcgacggcg

SEQ ID NO: 13794 - RNA, 69 nt, Homo sapiens
gagggccgagggagggccgagccagccgcggccggaggagcccccaggccgcgaaacagaccccgaaaa

SEQ ID NO: 13795 - RNA, 134 nt, Homo sapiens
ccaggccgagacccagaagggagcgaagggcgcgccaacgcaggaccgaaggcccgccacgcccgggacccaaagacaggaccacgcaccagcagagaaggaaagcaaaccgaagcaggcgggcaccaccgaca

SEQ ID NO: 13796 - RNA, 78 nt, Homo sapiens
aacgacacaaaaagaggcccacgcggacagacagaaaacggaacagaggacgccggggccgaaagggaagaagcccaa

SEQ ID NO: 13797 - RNA, 56 nt, Homo sapiens
gcggccacgcccgccggaccgcgcccaggccccccaggcaagccaggcgagcgcgg

SEQ ID NO: 13798 - RNA, 76 nt, Homo sapiens
ggcgggacccgagcggagagccgcggagccggaagagccccgagcgagacaggaagacgaaagaaagagagccgag

SEQ ID NO: 13799 - RNA, 105 nt, Homo sapiens
gagcccggccgccagaccacagcacagccgggaaggggagccaccagccccccgacgaaaaggggaaaggagaaagaagggagaagaaacagagaaccccaagga

SEQ ID NO: 13800 - RNA, 86 nt, Homo sapiens
cgaggccagcgcagggccggagcagagaggcacaggagacccaggccaaggaccgagggcggggaagcagggcagagccgaagcag

SEQ ID NO: 13801 - RNA, 56 nt, Homo sapiens
aagaagaaaaaagcgccgcccagcgcgcagagaagaacggcacacaccccccagaa

SEQ ID NO: 13802 - RNA, 75 nt, Homo sapiens
accagcacccgcagcccggaaccacgcaccagacaacacaggagcgaaagcacacgaagaggcagcccagaagaa

SEQ ID NO: 13803 - RNA, 89 nt, Homo sapiens
ccacccacacaaacccgggacgggccgagagggaaagggagcagcaccggccacacccacagcacgaccggaacccagcgaccgacgcc

SEQ ID NO: 13804 - RNA, 84 nt, Homo sapiens
cggacccacacccagagcgccccggacgaccaggcaccgcgcgggcagaaaccgagcagaggcaggacagccaacaacaaaaac

SEQ ID NO: 13805 - RNA, 58 nt, Homo sapiens
cccgaaaacagaggaagaaacgaagacccgagccccaaagacagaaaagccccgagac

SEQ ID NO: 13806 - RNA, 80 nt, Homo sapiens
acgccgccagaccgcgcgccaagccgcacgcaaccaccgcccggccacaccaggagcccacgcaggagacgggaggagcg

SEQ ID NO: 13807 - RNA, 70 nt, Homo sapiens
gcagcgcgagcgacaacgggacgggaaacggccacccccaaccaggaccaaagacgaccaccaaagccag

SEQ ID NO: 13808 - RNA, 81 nt, Homo sapiens
ggaggagccaggcagccacggaggagaccagcggcacggaagccgcccacccacgcaacccagacagaagagccgggaaag

SEQ ID NO: 13809 - RNA, 87 nt, Homo sapiens
gcaggcagccccaaagccgaacaggcagggccagacccagcaggaggcaaagggaccccaagaaaccaaagggcaagagccgcagcc

SEQ ID NO: 13810 - RNA, 60 nt, Homo sapiens
caagggcgcgcccggcacacgaaaccacgacccacagaaaggaaggaaaaaccacgcgcc

SEQ ID NO: 13811 - RNA, 73 nt, Homo sapiens
gcgggagggaccagagccacaaccaaaagaagcacaccgggagggaagcgcacagcccgcaagaaacgaggcg

SEQ ID NO: 13812 - RNA, 86 nt, Homo sapiens
gagacagcacgcccagcccggaggcggaggcccccagcccagacagacaccgcacccggggccgggagaggagcggaagacccggg

SEQ ID NO: 13813 - RNA, 52 nt, Homo sapiens
acaacgaaagaggggacgcaggaggcaaccagaaggacaggagaaacagggg

SEQ ID NO: 13814 - RNA, 71 nt, Homo sapiens
ccaaacacgccggaaaccccgcccacagcacgagaacggcagcccgccgcgaggaacgcaacgcagcgccg

SEQ ID NO: 13815 - RNA, 81 nt, Homo sapiens
cggccgggccagcacccggccgagacggcggcagcagcggcacaggaagaagacggcacgggacccccagcacaggcagca

SEQ ID NO: 13816 - RNA, 71 nt, Homo sapiens
ggccaggaaaagcgccaacagcagaaaacacggaagacagaacgaaacagaaacaacacaacggcaaggac

SEQ ID NO: 13817 - RNA, 85 nt, Homo sapiens
cgcaacccgcgccgcgccgcgccgcgccgaaggaacggcggacccaaggaggccaggaccgagaaacaagaggcgagcaagaagg

SEQ ID NO: 13818 - RNA, 67 nt, Homo sapiens
ggacaacagacagagcagcgaagcaccgagagaaaaggggaaggaacaaaccaaagagcagaccccc

SEQ ID NO: 13819 - RNA, 74 nt, Homo sapiens
agcgacgcgagggccgagacggcgcggcaaggagcgccaaaagcaggggaagccggaagacacagaggacaagc

SEQ ID NO: 13820 - RNA, 69 nt, Homo sapiens
gaggagaagcaagaaggcccggacacagcaaaccgggccacagagacaaccaggggaccgcaggcgcac

SEQ ID NO: 13821 - RNA, 77 nt, Homo sapiens
agacaacaggcaggggaggaccagcgggggaagggcaggcgcccagccaaagagaacagagagcggaaaccaacgcc

SEQ ID NO: 13822 - RNA, 54 nt, Homo sapiens
ccccccccacaggaccccaagcaaaccgggccgccgacccagcggaacaagagg

SEQ ID NO: 13823 - RNA, 71 nt, Homo sapiens
cgcggaggagcccccagcggggcggagcgaccccgcggggcgcggggaccccgggcccgggcgggggagaa

SEQ ID NO: 13824 - RNA, 111 nt, Homo sapiens
agaagcaggaggcaagaaaggggaaccccggagaaaaggccaagaaggcagggaagcccaccggccacggcagaaggaaacaacgaggggaggggacccccacgaggccgg

SEQ ID NO: 13825 - RNA, 70 nt, Homo sapiens
ccgcgcacggccagcgcagcaggacaacgcccacgccgcccagcaaggccaaagagcggagaccggagga

SEQ ID NO: 13826 - RNA, 39 nt, Homo sapiens
acccccaggcccggccgggccaagcaggaggaacagcga

SEQ ID NO: 13827 - RNA, 74 nt, Homo sapiens
caccaggagacacgaaacgaacggcaaacaacaggccgacacccacacgcggaacgcagagaccagagagaaac

SEQ ID NO: 13828 - RNA, 66 nt, Homo sapiens
ggggaacgagaaaacaggaccaagaagaagaaccagcaaaagacaagcaggccacgccgcaagcga

SEQ ID NO: 13829 - RNA, 72 nt, Homo sapiens
agaaaggacccgagaaaggagccagaaacagcgagccgacagccagccacagaccagccggggggcagcagc

SEQ ID NO: 13830 - RNA, 66 nt, Homo sapiens
caggaccaggcacccgggaaggaccccaggaacaggccggggagcggaggagggaacgcacgggca

SEQ ID NO: 13831 - RNA, 76 nt, Homo sapiens
ccccccccagccgcagccccggcaaacaggaaagaaggagggagaggaccggaacgacacgcagaccgcccaagcg

SEQ ID NO: 13832 - RNA, 69 nt, Homo sapiens
cacacaggcacgaacacgggacgccccagaggaccccggccggaggcaagccaccacccggaagaggca

SEQ ID NO: 13833 - RNA, 84 nt, Homo sapiens
aaacagaaagcaacaaaggggcagcacagaccagacaagaaagcgaagcgcaccagacaagacgaaccaacccagccaggacag

SEQ ID NO: 13834 - RNA, 80 nt, Homo sapiens
caacacagaagcaagacccgcgcaaggacccacgaacagcagcagcagcagcgcaggccaaggaaaaggagacgaggagc

SEQ ID NO: 13835 - RNA, 78 nt, Homo sapiens
gcgaggcgcggccaaagccggccggcgggcacgagaccaaggggcccaccgcaccacgcggcgcggagaggaaagaca

SEQ ID NO: 13836 - RNA, 77 nt, Homo sapiens
gaaaagaaggcccgaagagaggaccagaaccagaccggaaagcaccaggcaaagaaaaaaacaggagccaagaaggc

SEQ ID NO: 13837 - RNA, 69 nt, Homo sapiens
aggcgggaagaggcgaaggccagagcacgagcacgggaagacaggcgggaaccaaccacccgagcagca

SEQ ID NO: 13838 - RNA, 81 nt, Homo sapiens
ggccgcccacaaaggaagggaccaggacacagaccggaaaccgaggaggcggaaccaccggaccaaaacacccccaaggga

SEQ ID NO: 13839 - RNA, 55 nt, Homo sapiens
cagggccagacggagggaaagcgccagcagcgaaccccagacggaaagcccaccc

SEQ ID NO: 13840 - RNA, 73 nt, Homo sapiens
cccgaccggacccagccccagaagggccccccccccgcaaccagccccacaacggcgggcccgggccagacga

SEQ ID NO: 13841 - RNA, 78 nt, Homo sapiens
acagaaggaagaagaaaccggaggcaccgagcgacaaggaagagaaaaacgacagaggcacaacaacagagaagcaac

SEQ ID NO: 13842 - RNA, 77 nt, Homo sapiens
gccagagacgcacaaaccagacaagggcaaagagaagagccagcgaacggacaaaggcggaagcagcgcagcacagc

SEQ ID NO: 13843 - RNA, 71 nt, Homo sapiens
gggggaggaggggcaggcccggcggacaagaaaggaaacagcagagagaggagggagaaccaaacaaggga

SEQ ID NO: 13844 - RNA, 53 nt, Homo sapiens
gcagcccaaaagcgcagcagaaaacgaggaaagagaagaagggcaagaaaaca

SEQ ID NO: 13845 - RNA, 54 nt, Homo sapiens
gaaggaccaagaaccaggagcgaccccaggcccaacaccccaaagccccaacac

SEQ ID NO: 13846 - RNA, 93 nt, Homo sapiens
gccccaagcgagcacgcccgacccccacaaccacacccagcgaccacgcaggcaccccggccccagaaaaggcgacggcggagacagaagaga

SEQ ID NO: 13847 - RNA, 79 nt, Homo sapiens
aggcacaggcgccgcggaccacccgcccgaaaacaaggaggccgagcccgaaacaaccccaccggccccccccccacca

SEQ ID NO: 13848 - RNA, 54 nt, Homo sapiens
agacgaagcgggcggcgaaggaagagagaaggccacgcccgaccccaagcaaca

SEQ ID NO: 13849 - RNA, 75 nt, Homo sapiens
aagggaggaaagagggaaccaccaggccaccaccgaagcgcccgagaaacaaaaaagcgaggaagcacacaggga

SEQ ID NO: 13850 - RNA, 70 nt, Homo sapiens
ccgaggcaaaagaaagaacagggccggaagaaacacaccggaaaccggagaaagacggaaggggaaggga

SEQ ID NO: 13851 - RNA, 81 nt, Homo sapiens
ccgacgcgcccccgccagccgacagacacagccgcacgcacgccggccccgcggccgagagaagaagaaggaggccgcggc

SEQ ID NO: 13852 - RNA, 83 nt, Homo sapiens
ggaacaaggccgcaagacggcaggcaccgagaccagcgaggaggaagagggaggggaccaaaggagggaaaggcccagcgcga

SEQ ID NO: 13853 - RNA, 76 nt, Homo sapiens
cgacgagccgcagggcggagagacaccacagagacagggaccagaaaagaaacggccaccgaagaaaaaacaaaca

SEQ ID NO: 13854 - RNA, 57 nt, Homo sapiens
ccccgcgcccgcaggacgccccagccaggcgaggccaggggccaaaacaacgccgga

SEQ ID NO: 13855 - RNA, 77 nt, Homo sapiens
acacagacacacgcccagaaaccagcagaaccgcgggacaagaacagggccacagaggagccgccgcaccaggcgga

SEQ ID NO: 13856 - RNA, 60 nt, Homo sapiens
caccccgcgaggcccccgggcccgggaaaacacacggccagcgcaccgcaaccggcagaa

SEQ ID NO: 13857 - RNA, 77 nt, Homo sapiens
aaaaacaaacgcacacagaagaacacacagcggggaaaagacgcaagaggcgccccaaggaaaggggccaacgggcg

SEQ ID NO: 13858 - RNA, 100 nt, Homo sapiens
cagcacaggcagggcggccacagaggccccaacagggacaaaacagggcggaacgggaagggcacaggaagaaaggaccaaggaaacaggaacccgcaac

SEQ ID NO: 13859 - RNA, 82 nt, Homo sapiens
cagggcagacaaggaggggagaggaagccgagagagcagcgcacaacccagagcgggaagaacccgaagccacgccgagcgg

SEQ ID NO: 13860 - RNA, 82 nt, Homo sapiens
gcgaaagaacaggccagaaaacagaaggccacgcggaaacaaggcgaccccagaaaggcacccaggaaaggaacacaaagcg

SEQ ID NO: 13861 - RNA, 62 nt, Homo sapiens
acccggaagcccgcagacagcagcggggaaaaacaagaggaacgccacacagaccagacccc

SEQ ID NO: 13862 - RNA, 74 nt, Homo sapiens
acaacaagaaggacacagggcggaaaaaaaaggaggcgaaaaccaagagacacggcccgcccaaggaagaaaaa

SEQ ID NO: 13863 - RNA, 78 nt, Homo sapiens
gccgggcggaaggcgcgcaccacggagcgggcgcggcggcagcaccggaacaacagcaaccagccaagggaccgcagg

SEQ ID NO: 13864 - RNA, 73 nt, Homo sapiens
aaccgcaccacaacgacggccaagggagacagacaacagcgacaccagccacaggaacgacgaacagcagaca

SEQ ID NO: 13865 - RNA, 56 nt, Homo sapiens
caacccaaccagaaaggacagggcagaccgccagcagcacagcaagccacagagag

SEQ ID NO: 13866 - RNA, 75 nt, Homo sapiens
cagcaagggacgaaggagagccaaagaagaacgacccgaaaagagagacaaaaccagacaaagcaaaaaacaggg

SEQ ID NO: 13867 - RNA, 77 nt, Homo sapiens
aaccccgaggacaagccccagcaccgcaagcccccggacggcaagaccgagggacgaagccgaacccacaacggggc

SEQ ID NO: 13868 - RNA, 76 nt, Homo sapiens
accccggggggagaagaacacgagaaaaccggaagagaaaggccgggaagcaggaaagaaaaaaacaacagaggag

SEQ ID NO: 13869 - RNA, 58 nt, Homo sapiens
aggggcaacagaagcgacgacagaaaagaacccacacccgccaaagacacacagagcc

SEQ ID NO: 13870 - RNA, 76 nt, Homo sapiens
gaagcgagggcgaagcacgacacagaaggggaggggagggaaaggcccaggaaaaagaccaagaagacacaaaaag

SEQ ID NO: 13871 - RNA, 89 nt, Homo sapiens
accacaacccccagacgcaagccaagacgagaacagagcagagaaacggaacaacaggaacagcgcaccaacagacaagacaagcaaaa

SEQ ID NO: 13872 - RNA, 79 nt, Homo sapiens
aacagaggaggcagccacagcaacacaacagaagggccgccacaaaccccaggccccaaacagaggagccaccgcgccc

SEQ ID NO: 13873 - RNA, 81 nt, Homo sapiens
gcagaacagagaagagaagaaaagagcagacagacccaaggagcaaagaaggacgcagagccagccacacagccccacagg

SEQ ID NO: 13874 - RNA, 88 nt, Homo sapiens
caacaaaggaagaagcaaaaggcggcaaagacccacagacaggaagagcacccaagcgcaagcaaaagaaggcccccccagcagagcc

SEQ ID NO: 13875 - RNA, 66 nt, Homo sapiens
aagcccgacaacgaaggagcagcgacgcaaaagggcacaggcgaagacggaagcccgggacaagaa

SEQ ID NO: 13876 - RNA, 77 nt, Homo sapiens
cacccacacccaccaacagaaacagacccaaacacgagagccccacaagaagaccaggagcacccagccacgacacc

SEQ ID NO: 13877 - RNA, 59 nt, Homo sapiens
gggggggcaaacccgagagaacggcgagggcagaaagggcccagccggcagagggaccg

SEQ ID NO: 13878 - RNA, 75 nt, Homo sapiens
cggcggcgcggacaccacgaaacaagccggaacagagcggcaccggccgagcggcacaacgagcacggcgaagag

SEQ ID NO: 13879 - RNA, 52 nt, Homo sapiens
agccgcgccgcagggcgcccggccgccaggccagcggacccaaagacaggac

SEQ ID NO: 13880 - RNA, 71 nt, Homo sapiens
caggacacagaaaaggccagagaacaagagccaggaggccgcacaaccaaaaaacacacccggagaagagc

SEQ ID NO: 13881 - RNA, 81 nt, Homo sapiens
aaaaccgccgaaaaagagaagacgcacccgaccgggccgaccacgccgaaagaagcaggagccaggaaaacagaaagggcc

SEQ ID NO: 13882 - RNA, 82 nt, Homo sapiens
cccaggggcccaggcgcaggaagcccaaaggcagggcggggccgagcaaaaaaggagccagacaggacaagagggcagcacc

SEQ ID NO: 13883 - RNA, 81 nt, Homo sapiens
ggaacggcggagcagggagcccaaagaccccggagacagggccccagcgcaaagcccaaggccacaccaggacccagcacg

SEQ ID NO: 13884 - RNA, 45 nt, Homo sapiens
gccccccccacgcaggccaacagggaggacagcaagacgacccgc

SEQ ID NO: 13885 - RNA, 76 nt, Homo sapiens
ccgaccccccggcgccgcgccggcggcggagaagacagaggagccagaccaagagacagcacaggcgagcgagcag

SEQ ID NO: 13886 - RNA, 76 nt, Homo sapiens
acggacaaaaacacacccaggaggaaaaccacagcgacggaaaacaccggacccaacagggaaaacgggaaagcac

SEQ ID NO: 13887 - RNA, 74 nt, Homo sapiens
gcgggaggggaccagggaagcggcagccaaagcaccggcaggcagaacaaaacgccacccaggcaggaggacca

SEQ ID NO: 13888 - RNA, 75 nt, Homo sapiens
gacagcgacgggaacgggagcaaaaccgggaacagagggacagaggccacgacaggcacagagcgccggcccagg

SEQ ID NO: 13889 - RNA, 40 nt, Homo sapiens
cagagggggacagcgaaaagggacagcgggaggggacagc

SEQ ID NO: 13890 - RNA, 62 nt, Homo sapiens
gacccagccccagaaggcaagaggcgagcagggaacaacaaaaacagggcccagagccagcg

SEQ ID NO: 13891 - RNA, 67 nt, Homo sapiens
caccagaacacaaaaggaaagagcacaacagcggccccacaagccagccgcacgcgggaacagaagc

SEQ ID NO: 13892 - RNA, 57 nt, Homo sapiens
gcggcgcgaggagcagcgaaaacggggagagccggaccccaggcaaggccccagccc

SEQ ID NO: 13893 - RNA, 71 nt, Homo sapiens
cagggagaacccgaggcggagagacacaccaacaaaggcagcgcgacagagaaagcgaacgaggaaagacc

SEQ ID NO: 13894 - RNA, 82 nt, Homo sapiens
gccagcggagcgaggggaagcgcccggagagaggagagaaaagccacggacccgccagcccagaagaacaggcggcgggcag

SEQ ID NO: 13895 - RNA, 53 nt, Homo sapiens
aggcgccaggaacagcgggacccagagcaccggcaaaggggcaaaagcagcag

SEQ ID NO: 13896 - RNA, 60 nt, Homo sapiens
ccgggaccccggccgcggagcgacgccgacggagcggaaagggccaaaggcagaggccac

SEQ ID NO: 13897 - RNA, 77 nt, Homo sapiens
caccccggcaaaggagcgagccggagcgccagcccaccggacacgagacgggacaccccccaggcacagccacaccc

SEQ ID NO: 13898 - RNA, 76 nt, Homo sapiens
aaccccacggagaaccagaggggcaggcccgaaacccaaaggacgggcggcccacaccaccaccgaggaaaaggcg

SEQ ID NO: 13899 - RNA, 79 nt, Homo sapiens
cgaaaaaccacaggaagcccagcaccaacaacaaggagaggaaaaaagccgcaagagaggagaacagaaaacaaacaaa

SEQ ID NO: 13900 - RNA, 78 nt, Homo sapiens
cagcccggaacccgaaacagacggcccgccacgggccccgcagccgcgcccgagcgcccgagcagggacagcgaccac

SEQ ID NO: 13901 - RNA, 101 nt, Homo sapiens
agcgacccccacaagcacaaacgaccaagcacagagcaccagccaagaagcaagggaaaccccaaagagaggagaaacagcgacgacccaaaggggaaacg

SEQ ID NO: 13902 - RNA, 81 nt, Homo sapiens
cgaggaaacgcccccgagaagaaggaggcgcagcgagagcccgaaaacacacccgcagcccagggaggaggaaggggcaag

SEQ ID NO: 13903 - RNA, 73 nt, Homo sapiens
acaagacgcaggaagagacccagaccccagaagagaagaaaaggcagagccagagaggccaccaggcccagaa

SEQ ID NO: 13904 - RNA, 72 nt, Homo sapiens
acaccaggcggagccaggcaaccgagaggccccggaccccagccaaaggacaagacggacagaaacgaacag

SEQ ID NO: 13905 - RNA, 35 nt, Homo sapiens
ggggaaggagcgaaagagacggagcagcaccaggc

SEQ ID NO: 13906 - RNA, 83 nt, Homo sapiens
gccgcaggagacgagaggacgggaccaggcgaagcggccgagcaggcgagcgaacgacgggacagcaggaagccagaggagaa

SEQ ID NO: 13907 - RNA, 88 nt, Homo sapiens
gccgcaaggccaacggaaccggcaacgggcgccaagccgcggagccccagacggggagaagaaaggggaccggggacacacccacgaa

SEQ ID NO: 13908 - RNA, 63 nt, Homo sapiens
agacagcacaaccagcgggcagcgggggcagagacggggaacagggccacccacacggacgcc

SEQ ID NO: 13909 - RNA, 66 nt, Homo sapiens
gccaaacacacgcccgaccccgccggccgcccgccggaaaagaccaaacaacaaaagcgacacaaa

SEQ ID NO: 13910 - RNA, 76 nt, Homo sapiens
agcacacaaccagaagccagggagaaggaaggaggaggagaacacagggggaggacagagagaaccggagaacgag

SEQ ID NO: 13911 - RNA, 76 nt, Homo sapiens
aacacgccgggaggaagagaagccaaaacaaagacaggccaccggaaacgcaggcccggcgaggggaaggacgggg

SEQ ID NO: 13912 - RNA, 65 nt, Homo sapiens
cgaaaaagcgcccgagacgggcccgccgaaagggcccacaggccacccgccagacgcagcggggc

SEQ ID NO: 13913 - RNA, 84 nt, Homo sapiens
agaccgggccggaacgaaagcaggacggaggagcgaccaccggagcacagcaagcgggagcaggcagaccaaaggaacagaagc

SEQ ID NO: 13914 - RNA, 39 nt, Homo sapiens
cacccacccccaagaccaccgcccgcagagccgccagga

SEQ ID NO: 13915 - RNA, 63 nt, Homo sapiens
gggacaccccggaagcgggaaagccgcccacaagaagcaaggggagacaaaacagcaaaagca

SEQ ID NO: 13916 - RNA, 101 nt, Homo sapiens
aggaaaccaaagccacacaccgcacaacgcaaccagccggcacgggcagaacaaggcaggagacagagagaaagcaacagcaggccagccccagagcccgg

SEQ ID NO: 13917 - RNA, 73 nt, Homo sapiens
aagaagcacggggccggaggaaaccagggccgcaaaaggaaagacaagcagcagagaaggcaacaagacgggc

SEQ ID NO: 13918 - RNA, 50 nt, Homo sapiens
caaaccagacacgaaaagcgaggagaccgcagccgagcagcaccgcagca

SEQ ID NO: 13919 - RNA, 75 nt, Homo sapiens
ccaggcccagacgccaacgcaggagcacccaggcgccacgggacacggaaccaggaggagcggagcgccgcgcgc

SEQ ID NO: 13920 - RNA, 78 nt, Homo sapiens
ccccccaacaaagggacacgcggaggaggaccgcccaggagcaacccccagccacaacgcgaaccgggcggacgaagg

SEQ ID NO: 13921 - RNA, 76 nt, Homo sapiens
aagcgcacaggaagccggaaacggagaagagaaaagggaaggcacggaggaagcccgagaccacgaggcagagaag

SEQ ID NO: 13922 - RNA, 83 nt, Homo sapiens
gcgggacaagcgcggagcgaggcagccacgccggaggggaaggcgaggaaaggaacaggacacccaaccgcgagaccagcaag

SEQ ID NO: 13923 - RNA, 88 nt, Homo sapiens
cgcagggcggcgcaaccagcccagggcggcggagggagagaaggcgcgcaggagagcgcagagacccgcccggaagcgaggcaacagg

SEQ ID NO: 13924 - RNA, 76 nt, Homo sapiens
gacggccaccggcgggaggaacaaaagaaacacggccgaggagacgccagagccccagccacccacaccaagaagc

SEQ ID NO: 13925 - RNA, 82 nt, Homo sapiens
cgcgacaccccggccagggggacggcgccacgcaccggacgacgcccggcgccagcacacgcagcaccaggagcgaggagcc

SEQ ID NO: 13926 - RNA, 74 nt, Homo sapiens
aaaagggagaagaagaaccaaacaaccagaagaagagagcagagaaacggagaagggaaagaagaggacaaagg

SEQ ID NO: 13927 - RNA, 74 nt, Homo sapiens
aaggccccccgaacagcaggcgccaccagcccggaggaaacagaagacagccgaaccaagggcgacaaccagag

SEQ ID NO: 13928 - RNA, 81 nt, Homo sapiens
agcagggggagcagggcgagagggcaccgcggacggggccgcccagcgggaaaacaaagaaccgaacaacggaacacccaa

SEQ ID NO: 13929 - RNA, 75 nt, Homo sapiens
aagagcgacccacgcagaggcgaagacggggagccacgagggcccaggacagaaggcgggcaaggagcgcccccc

SEQ ID NO: 13930 - RNA, 79 nt, Homo sapiens
gcgcccacgcagcagccggaaacccaccagagaaggcgcggccacccaggacccgggggaggcagcgaagaaaacaaaa

SEQ ID NO: 13931 - RNA, 68 nt, Homo sapiens
ggaagacgcaccacgcagggcaggaagagggacaagacgcagaggaagggggcggcgggaggcccagc

SEQ ID NO: 13932 - RNA, 77 nt, Homo sapiens
gacacggagaagcgagccaccggaccccacaaggaaaggaaggcgccgccggacccacggggaacacacggggcgaa

SEQ ID NO: 13933 - RNA, 64 nt, Homo sapiens
cgccgcagcaccccccggacccagccccgggcggaggcagagggaaccggccgcgcagcccgcc

SEQ ID NO: 13934 - RNA, 71 nt, Homo sapiens
agcaaaacaaaaagagcagaggagacaaaccggagaaggagccaagaaagagaaggacagcagaccacagc

SEQ ID NO: 13935 - RNA, 75 nt, Homo sapiens
aagacaggagaccaaaaagagagaaacgaggcacaaacgcaagaacgccaggaaagaagaaaggacccggaaaga

SEQ ID NO: 13936 - RNA, 84 nt, Homo sapiens
ggggccgcaaggccggagaaggccgccgggcccgggcaggggcggggcaacgcggaagagaggagccacgagccaggcggcgaa

SEQ ID NO: 13937 - RNA, 69 nt, Homo sapiens
cagagccggaccaggagaacggcggcggcaaggcaacggggcccgccggcaaggagaacgaccaaggag

SEQ ID NO: 13938 - RNA, 75 nt, Homo sapiens
ggggccccgaaaaaagagagggggggaccgaccgcaacagaacggacccggagaccgcaagcagagcgacaagca

SEQ ID NO: 13939 - RNA, 44 nt, Homo sapiens
ccccccaagacaccgccagcaaaccaaacagcccagcagcccag

SEQ ID NO: 13940 - RNA, 68 nt, Homo sapiens
ggacaagaagaaccaacccagaccaacggcacagcagccacgacgccagggaaaaggaaaccagaaga

SEQ ID NO: 13941 - RNA, 55 nt, Homo sapiens
gccacaggcgcaagcaggccaagccaggaagcccccgcccaaacagcggcgccgc

SEQ ID NO: 13942 - RNA, 86 nt, Homo sapiens
accggagagggagaggaggcagggcccggggaagacgcagaaagaaccggaagacagaggcggagaacccacaaacaaagcaccag

SEQ ID NO: 13943 - RNA, 74 nt, Homo sapiens
cgccggcgccgccgcccgggaccggcgagaaggccacaaccaagagaaacaaccaaagccaacaggcagaccag

SEQ ID NO: 13944 - RNA, 61 nt, Homo sapiens
acgggggagccacccggcggacagggccacccagggaaacaccacagagggagggcgggca

SEQ ID NO: 13945 - RNA, 103 nt, Homo sapiens
ggggcaagagcgggggcgggaccccgccgcggcgggaggcagaagaccgaagaagcagccgaacacggagcagaaacgagcgcgaacgggacccaacagagga

SEQ ID NO: 13946 - RNA, 62 nt, Homo sapiens
caagccaaccagagccggcggcagagaccagcccagcacagacagcgcggagcaacacccga

SEQ ID NO: 13947 - RNA, 71 nt, Homo sapiens
cacaaagaacagaagcaaggaagcgggcaagcccaaaacagagaagcagaaaaagagaccgaccaacaaga

SEQ ID NO: 13948 - RNA, 87 nt, Homo sapiens
ccacaggcccacgacaccggagagcgagcagagccaaggagagagagagggaggagaagcagccccaaaagacgaaggaaccccaaa

SEQ ID NO: 13949 - RNA, 59 nt, Homo sapiens
gccggaccaaacagaggaagcaacaaagcgaagggccaaccagacgccaggaagccgga

SEQ ID NO: 13950 - RNA, 79 nt, Homo sapiens
aggagcaccaggagacgcaaccacgggagccccaagggggggcaggcagcagagaggcccccaagggcgggaaagaacc

SEQ ID NO: 13951 - RNA, 67 nt, Homo sapiens
cgccccacagaggcgggacacaaaaccaaccccggcaaaagggaaagcaaggggaagggcccaagaa

SEQ ID NO: 13952 - RNA, 71 nt, Homo sapiens
cacgcaacccaaacgaaacacaggagcgcaaccgacaccaggaacaccaccaggagcaaccgacgagacca

SEQ ID NO: 13953 - RNA, 72 nt, Homo sapiens
agaaagagcccgaggaagggcggaccaaccacggcaaaccaacaagggcaggggaccaaaacgaagagaggg

SEQ ID NO: 13954 - RNA, 83 nt, Homo sapiens
accaaggcccccaagccccccggcgacgacgcccgagggcgacaggcgcggacaaccgcaacggcgaggcccagcagggccac

SEQ ID NO: 13955 - RNA, 77 nt, Homo sapiens
cacccgccagccgaccggcgcccccaaacggcccgggccccgcagggccccgagaaaaagaccaggcaggcagagaa

SEQ ID NO: 13956 - RNA, 73 nt, Homo sapiens
ggcgcgagacgaacgccacggggcagccgcaacaggggagaagacgcgcgccagcgggcgggacccaccgggg

SEQ ID NO: 13957 - RNA, 81 nt, Homo sapiens
gaagggcggccgcgagcacggcgagccgcggcacaccaagagaaagcagggaaggcaaccacagaaccagagacaagccac

SEQ ID NO: 13958 - RNA, 80 nt, Homo sapiens
ggccgaacagcccacgccaagaaagccagacgggacgaaagccacagaggaggacaaagccaagaacacgaggaggcgcg

SEQ ID NO: 13959 - RNA, 76 nt, Homo sapiens
aggcaaacaggaaaccgaagaaagggggacagaggagcaaaccacacacccaaaaaggccgacagaagagacaacc

SEQ ID NO: 13960 - RNA, 72 nt, Homo sapiens
ggcccccccccccgcgacgaaggcggccacgaagaaggaaaaacagcacaaaaagagcagaagaagcaagga

SEQ ID NO: 13961 - RNA, 80 nt, Homo sapiens
gaagcgaggcaaacacgagaagcacgacaagaacgccccgagaaaaggagcgaccccccaagcccgaggaaaaaacaaaa

SEQ ID NO: 13962 - RNA, 51 nt, Homo sapiens
gcaacaagaaggaaagccaagcacaaaggaaaggcaagggcagaaaagagg

SEQ ID NO: 13963 - RNA, 75 nt, Homo sapiens
cagcgccggcgcccccggggacggcagcggcaccaccgcgcagaggggcagggggagcacacgagggcccaaaac

SEQ ID NO: 13964 - RNA, 70 nt, Homo sapiens
acgagagcaccacaaggccaagggcccaaccaccgccagcagagggcggccgggagagcggccaacagcc

SEQ ID NO: 13965 - RNA, 82 nt, Homo sapiens
gaacacgccggcagacgccccaaaaaccacacacccggcgacggccaagcagacccaggggagaaggcgcgggagaccagaa

SEQ ID NO: 13966 - RNA, 70 nt, Homo sapiens
ccggacaagcagcgccaacccccacaaagccacagcagcgcaggagcaccagagaaggaagagaagaaca

SEQ ID NO: 13967 - RNA, 83 nt, Homo sapiens
gagagccgaaggagcagcccaggaccgagaccggagcagccggggcggagcggcgaggcagaccggagcaagaaaagcccgaa

SEQ ID NO: 13968 - RNA, 73 nt, Homo sapiens
cccggacaaggacgcaaagaaggcaggcggaaaaagccagcaagacgaccgccgcgacaacgaaaaagaacac

SEQ ID NO: 13969 - RNA, 78 nt, Homo sapiens
aagaaccaaaggaaaggaccagcgaagccaccaagggccagccccgaggcccagccgcccgccggggcacaggacagc

SEQ ID NO: 13970 - RNA, 99 nt, Homo sapiens
gagagcgcaccaccacccagggagacagggacagcgacccgcagccccccgggcccgcccccccgggagcgcggaacggaggggggcgcccgcgggcac

SEQ ID NO: 13971 - RNA, 77 nt, Homo sapiens
cccggcggagcagaggaaccacacgcgacagaccacccaagaagaccaaggcccaaaaggacccaagagagaagcga

SEQ ID NO: 13972 - RNA, 88 nt, Homo sapiens
ggaagacaagaggaggaaaggacgaggggaaagggaacaaagaacggccggcaggcccggagaaggaggggagagcagggggcccaca

SEQ ID NO: 13973 - RNA, 82 nt, Homo sapiens
ggaggacccaccgaccccaggcaccacgagggcccggccagcggaagccgccaccccaggcggaccaccacaacaagaagcc

SEQ ID NO: 13974 - RNA, 73 nt, Homo sapiens
gcgccggagggccgacggcaccgagagcagacggaaccccgagagaaggagcccccggcgggaacaagaggag

SEQ ID NO: 13975 - RNA, 64 nt, Homo sapiens
accccggcacgaccgcgacccagcagaagaacgggaaacaagaagggcccgagggcaggacagc

SEQ ID NO: 13976 - RNA, 79 nt, Homo sapiens
gaacccaaaggcagcggagcaaaccagccagcacgggggcccagccagccagcagcgaggggggacggaggcggcacgg

SEQ ID NO: 13977 - RNA, 81 nt, Homo sapiens
aagccccccaaccccaccacccaccaaagggggcgcgaccgagagagccaccagccagagacaagagcgacgggaaaccgc

SEQ ID NO: 13978 - RNA, 73 nt, Homo sapiens
gaaaggagaaaacacccaaacggaaggacacagagccaacccagaagagccaaggaaaacgaaaaacgggcag

SEQ ID NO: 13979 - RNA, 83 nt, Homo sapiens
ggagcggagcgcccggccggcagcgggaagggaaagggagcagcaccggccacacccacagcacgaccggaacccagcgaccg

SEQ ID NO: 13980 - RNA, 79 nt, Homo sapiens
ccggagggaaagaaagagcccggacggaagaggaggagaccaagcgcacagccagagccagaagaccacccgaggccgc

SEQ ID NO: 13981 - RNA, 79 nt, Homo sapiens
caacggagagacaacaagggccacggacgggaacgcaaccccaccccccaccccaccaccaccagcagccccgccccgc

SEQ ID NO: 13982 - RNA, 45 nt, Homo sapiens
cgcacgggcaaccccgaagacgaacgagaaagcgagcgaggaaaa

SEQ ID NO: 13983 - RNA, 76 nt, Homo sapiens
agaagcgggcaacccagcgcaggagggcacggaggaaccgcaggcggggaccagcccaacaccggaaagacaacgg

SEQ ID NO: 13984 - RNA, 71 nt, Homo sapiens
cgccccccgcccccccaccgacacagcccagccggaccagagaagacacacaacaaccccacggagcccca

SEQ ID NO: 13985 - RNA, 73 nt, Homo sapiens
ccccccaaagagcgagacagaagacaacggcgaccagcccaccgaaaggagagaagcagcaaagaaagggaga

SEQ ID NO: 13986 - RNA, 78 nt, Homo sapiens
ggcaggagaaagccgagagaaggacaacaccacagggcaggcggccgcgcagaccccgagggccggcccgggagccaa

SEQ ID NO: 13987 - RNA, 82 nt, Homo sapiens
acaggcgccaggagcacagaagagcgaggaggaagaggagcaggacggagggagaaggggccacacggaagggccgaggagg

SEQ ID NO: 13988 - RNA, 83 nt, Homo sapiens
gaagaaaggagagaacccagaagccacaagaagaacgaagaagcggaggccagacagcgagcccccgccggaggaggagccag

SEQ ID NO: 13989 - RNA, 78 nt, Homo sapiens
cgggcccccacaaacacgacgccacgacaagcggaagccgagccacggagcacccaaagagaccacccgcagcgagca

SEQ ID NO: 13990 - RNA, 95 nt, Homo sapiens
gcgggagaggcccagcgggagcgcggaacagcaggcccgagcccaccgcgccgggccccggacgccgcgcggaaaagcaccccaggacaaaagca

SEQ ID NO: 13991 - RNA, 78 nt, Homo sapiens
caaagagaaagaagaagaaaacgagacccaaaagggagaaagaagagaagacaggaagaccccaaaggaaacgagaga

SEQ ID NO: 13992 - RNA, 80 nt, Homo sapiens
gggcgcgcgcacggcaggacggagcacaccgaggagaagaccaggggaacaccaaaaacggaaaaagaaaacgagggcag

SEQ ID NO: 13993 - RNA, 35 nt, Homo sapiens
gggcccgcccagggggcggaccagcagacaacagg

SEQ ID NO: 13994 - RNA, 43 nt, Homo sapiens
agggcaagggccaaaagagacagacgagaacaaggcaagaaac

SEQ ID NO: 13995 - RNA, 43 nt, Homo sapiens
ccggaacagccaaaagagaagggaagggggaaaggccaagaac

SEQ ID NO: 13996 - RNA, 52 nt, Homo sapiens
agcgccggccacccaaagcacgggggcaacagaggccagcgcagccacggga

SEQ ID NO: 13997 - RNA, 82 nt, Homo sapiens
gggacaccccggaagcgggaaagcgccagcaggaagggaccaaagcacagaaggccccgccacaccggaaacaggggagaga

SEQ ID NO: 13998 - RNA, 83 nt, Homo sapiens
ccaccaacccagaggggagcacccacacgccaggcgcggcccaaggcggaagacacaccgaagaaccgagaagccaagaagcc

SEQ ID NO: 13999 - RNA, 90 nt, Homo sapiens
agggcaacaccaaaaacaaaacgaaccaggacggcaagagccgcccggcaaagcgaaagcgcaggaccgaggagaaggagccgccggagc

SEQ ID NO: 14000 - RNA, 64 nt, Homo sapiens
ggggggacgccggccaaacacgcccgggggaggcgaggccgcagggcggagaaaaagggaaccc

SEQ ID NO: 14001 - RNA, 75 nt, Homo sapiens
cgggcggggccggcagcaccgcggccgcagggagccgaaaaaacagggaaagcagggaagaggcgggacgagaac

SEQ ID NO: 14002 - RNA, 70 nt, Homo sapiens
gccacaagcgcgagcaagccaaccaccagagcgggaaggccggccaaaggacccgcgcaaaggcggagac

SEQ ID NO: 14003 - RNA, 52 nt, Homo sapiens
cacacaacgcgagcacacccccagaaggaacacaacagcgagcaacagcaca

SEQ ID NO: 14004 - RNA, 78 nt, Homo sapiens
gaggcgcgaggagccggcgcggcgcagcccacggcgcaggcccacggagcgcagccgccgaggcagcgggagagagga

SEQ ID NO: 14005 - RNA, 48 nt, Homo sapiens
cgcgagaagccacacgagggcgaaccaaagaaggaaggcgacccaaaa

SEQ ID NO: 14006 - RNA, 71 nt, Homo sapiens
accaaggccgagagccggaacaaacgagggcccgggaggaccgacgcagccagcgacaggggccagaacaa

SEQ ID NO: 14007 - RNA, 37 nt, Homo sapiens
aaacacagcagcagcagcaaacaggcggacgacacca

SEQ ID NO: 14008 - RNA, 61 nt, Homo sapiens
ggagacccccgcccaggcagcgcgcaggagaccccccgagcagcaagccgcaccacaccca

SEQ ID NO: 14009 - RNA, 74 nt, Homo sapiens
ggcagggggcacccgcggccggcccggggccccgggaccggcgcccccccggccccgcgagcggccaccgccca

SEQ ID NO: 14010 - RNA, 77 nt, Homo sapiens
caacagggaaaggaaaaacaggccggaaagcacaggaaaaaccaaaggaaccagcagaacgagaaacgcgcagccca

SEQ ID NO: 14011 - RNA, 75 nt, Homo sapiens
ccagccggcccgcgggggagccccgggagccgcacgacaacggcaagcggagaagagcaaggccgaaccgagagg

SEQ ID NO: 14012 - RNA, 75 nt, Homo sapiens
aacccaaccaagaaggcccagggcggagagcagccggagcccgggcaccccgagccgcgaggcacgggcccaaac

SEQ ID NO: 14013 - RNA, 77 nt, Homo sapiens
gggcaaccagaggggccaacggacgacagagagaggaacaaacaggcaaggagcgccacggaaggagagcgcagacg

SEQ ID NO: 14014 - RNA, 76 nt, Homo sapiens
ggaaaaaagaaaaccagaagcggagcgggggcccgagaagccgacggcaagacggcgcccgaccaagagacaggag

SEQ ID NO: 14015 - RNA, 75 nt, Homo sapiens
ggcgccagcaagaaagacagagcaccaggagacggcaccaccccacaagagcgcggagcaccgaagagcacccca

SEQ ID NO: 14016 - RNA, 79 nt, Homo sapiens
gcggagacagagcaagaaaagcccgggagcagaagggaggcccaagacccacaacaaaaggcccaaaaaaggaccaagc

SEQ ID NO: 14017 - RNA, 83 nt, Homo sapiens
aagagcacacagccaaggaagccccacgcccaagggagccgccaccaaaagcagacggaaaacccacggggaagaccacaccc

SEQ ID NO: 14018 - RNA, 72 nt, Homo sapiens
ccaagaaagcgacaccgcagcaacaggcgacagcaaacaccagggcaagagcgcaagacaaggacggacggg

SEQ ID NO: 14019 - RNA, 56 nt, Homo sapiens
gaggcccgaggagcggccacgcaagaccgcgcgcggggaagacaccacacaaggag

SEQ ID NO: 14020 - RNA, 73 nt, Homo sapiens
cccacacaccacgacgggggagcaacgcacagcaagccaagcgccggagcgggcagggcacacaaccgggcag

SEQ ID NO: 14021 - RNA, 57 nt, Homo sapiens
gacagacacggaaggagaacgcacagaggaggggcgcggccaggccggagaacagca

SEQ ID NO: 14022 - RNA, 71 nt, Homo sapiens
cgagcaaagaacccgaagaaagaggcaagggagggcgggggcggcagagggcacgcccaggggacgggcag

SEQ ID NO: 14023 - RNA, 56 nt, Homo sapiens
aaagggccaaagaagggagagagaaaagcaggacaaaggaaggaacagccgcagaa

SEQ ID NO: 14024 - RNA, 83 nt, Homo sapiens
gggagcagggagaggagcgggaaacgggagggaaccagcaacaagccggaaggaagcagccaccccgccaggccccccgcccg

SEQ ID NO: 14025 - RNA, 75 nt, Homo sapiens
gaggagagaagaaggcaagcgacggcccgaacgagcggaggccaacaaaccacggagagaaccagaccaggaggc

SEQ ID NO: 14026 - RNA, 84 nt, Homo sapiens
aaccagaggcagccagcagggggagggcccaggccccagaggacgggagccgccccggaaaaggggggagagggggagccagag

SEQ ID NO: 14027 - RNA, 77 nt, Homo sapiens
ccggaggaggagacgccccgaccacgaaaccccgcggggaaaaggacccaagacaagacgacgccccagagagcaca

SEQ ID NO: 14028 - RNA, 79 nt, Homo sapiens
agcccagggaagcagccgaccagccgcggagccgggggcagccacccacacagaaagccagggccggagggagaacaga

SEQ ID NO: 14029 - RNA, 59 nt, Homo sapiens
ggggccagggaacccggcaccgccccagccgagcgggcccgccgggccccggagcccag

SEQ ID NO: 14030 - RNA, 74 nt, Homo sapiens
ccccgagagcggggcacaggccgggcaaaagacaggagaagaaggagaggcaccagccaaaaaaaaaaagccag

SEQ ID NO: 14031 - RNA, 60 nt, Homo sapiens
caaaggaagagccccgaggagaccagagcaaggccgcaagaggacgaaggaccaagacga

SEQ ID NO: 14032 - RNA, 62 nt, Homo sapiens
agcgacaagaacaaggccagccaaaggggaagaggaaacaagcccaggcgacggagcgggac

SEQ ID NO: 14033 - RNA, 73 nt, Homo sapiens
cacaacgaggacagagagcgaagagacccaacagaaagagaaagggacacaagcagaagaggacagagggacc

SEQ ID NO: 14034 - RNA, 71 nt, Homo sapiens
agagcaagcaagcaagaacgagagcagcagagaagggagaaggacccagcccagcggccaggccccccagc

SEQ ID NO: 14035 - RNA, 80 nt, Homo sapiens
cgccgccccagcccgcgaacgccacaacacagcagcccccaggagagcaggaaaagccggagaagccaacaggcggaagg

SEQ ID NO: 14036 - RNA, 75 nt, Homo sapiens
aggggcggaggcggaggcagaggggaggcgcgaaagaaaagaagcaagcaacccccgccccaagcaccgagccgg

SEQ ID NO: 14037 - RNA, 58 nt, Homo sapiens
aaaaagcggccgcagggccagaagaaacagagacaacaaggaaacaggaacccggaga

SEQ ID NO: 14038 - RNA, 81 nt, Homo sapiens
acccgcccggccccgcagccggaaccacgccagaagagacaggggacacgaacccgaaacaggaacaccggaccccagaac

SEQ ID NO: 14039 - RNA, 84 nt, Homo sapiens
cgcaggaggccggcgaggagcgccgcgcccgcccgcaggacagcggccgaagccagagccggggcggcgccaggccccacacgg

SEQ ID NO: 14040 - RNA, 75 nt, Homo sapiens
agggagcagagccagacagccaccacccgagacgaggacgcgcacaggaaaggacgcggaacaagcaggcagcca

SEQ ID NO: 14041 - RNA, 83 nt, Homo sapiens
ccagagcgggagcgcgcgcggcgcggcggccgggccccgagacggggacgggggggccccagcccggccgaacgggcgcacga

SEQ ID NO: 14042 - RNA, 79 nt, Homo sapiens
ggagcgccagggccacggcccaccacccggcaccgcagcggacggcgagcacagagggcgaggcaaagcgcgggcacag

SEQ ID NO: 14043 - RNA, 83 nt, Homo sapiens
gacgcccgccggcacgaagccgagccaaaggaaccggagaggacacagcagaagagaacacgcccgaaggagcccagagagcg

SEQ ID NO: 14044 - RNA, 62 nt, Homo sapiens
gagccggacacgaaacggggaacaccgcagcaggagacgcgccgaaaaagcaaagcaaaaaa

SEQ ID NO: 14045 - RNA, 70 nt, Homo sapiens
gaaggagcaaaagagaccgacaccccagacccaacaggagaggcgacacggcgggcagaacggccagacg

SEQ ID NO: 14046 - RNA, 52 nt, Homo sapiens
gacagacaaccaccacccacagaagacgcgcggagaccgccagcccggggca

SEQ ID NO: 14047 - RNA, 80 nt, Homo sapiens
ggggcaaaggggacgcggcaccacggcacgcacaaggcgaggcggaaagaggggagccgcccaacccggcccccgaggcc

SEQ ID NO: 14048 - RNA, 71 nt, Homo sapiens
cccaccgagcccgccaaaggaccaggggccggcaaaaccggacccagaggacgagaggccagccacgacag

SEQ ID NO: 14049 - RNA, 75 nt, Homo sapiens
aacaacgccaagagggaaggggacccgccgggaggacgcgccaacggggcgccgagccgcagcagggccgggcgg

SEQ ID NO: 14050 - RNA, 82 nt, Homo sapiens
cccaaagaacaaggagggggccagggcgagggacaggccgagcggagcccaaccagacggaggacaggcgcggccaaaccca

SEQ ID NO: 14051 - RNA, 58 nt, Homo sapiens
gaaaacgaagaaggcaaaaccaagaggaaaagagaccaaaaagggcagccgcagaagc

SEQ ID NO: 14052 - RNA, 77 nt, Homo sapiens
cccgagcccggaggggggagaaaaggccaaccccaggcgaccacacaccccaggacccccaccgaccagcaagagcg

SEQ ID NO: 14053 - RNA, 59 nt, Homo sapiens
gcggcgcggggaccgcggcccgaccgggagccgcagggcaccgaccgggcaagccagaa

SEQ ID NO: 14054 - RNA, 73 nt, Homo sapiens
ggaagagaacgcgccaccccgcccccccgcaggggccagcaaacgaaaccggcagcagccggaggggaagggg

SEQ ID NO: 14055 - RNA, 85 nt, Homo sapiens
ggacgcccaggacgcccgaggagccgcgccgccgggacacaccaggagaacaagcccacgcaccggccggagcgagggagagcag

SEQ ID NO: 14056 - RNA, 83 nt, Homo sapiens
acaggagaccaccaccccggcgccaccaccgacgagcgaagagcaagggacccaaccagagccggccgggagccaggaggcca

SEQ ID NO: 14057 - RNA, 83 nt, Homo sapiens
caagaggaaaggagaacagcagcaagaagcagccacagaaaggcacccgaaaggggaaggaaaagaaggaagaacaggcacag

SEQ ID NO: 14058 - RNA, 74 nt, Homo sapiens
gagcggaaaacgggccaaagcaggaaacgcccagaagaaacaggaccgcccgcaccaggaggagcagggccaca

SEQ ID NO: 14059 - RNA, 56 nt, Homo sapiens
gcagccagggccgccaacaccggcgggggagagaacagcacacagaggcgcaaggg

SEQ ID NO: 14060 - RNA, 49 nt, Homo sapiens
ccaaaaacagagggaagggggcagcggcaagcaggggagccagccacac

SEQ ID NO: 14061 - RNA, 98 nt, Homo sapiens
ggcaaccaacgcggaggccgcggccgaaggccacgcagggacgccgggccggaaggaacccgggcaccccccccccggcccgaccgcccgcggccgga

SEQ ID NO: 14062 - RNA, 47 nt, Homo sapiens
aaagggcccagcgaaacaaccacaagaaggagagacgcagagccaga

SEQ ID NO: 14063 - RNA, 77 nt, Homo sapiens
ggacggacaggagcgccgacccaggggaagagccacacccacccacagcccgaagaagccagcgcccacgcgcaccc

SEQ ID NO: 14064 - RNA, 89 nt, Homo sapiens
ccaccgcccccgccccaagccggccaccccagacaccaaaagagaacggagaaacgaggccggagaaagggcagagaagacaacaccaa

SEQ ID NO: 14065 - RNA, 62 nt, Homo sapiens
agcacgagcgaagaaagcccgagaagacgggcgcagaagaaagaccaggcccgcggacgcgc

SEQ ID NO: 14066 - RNA, 84 nt, Homo sapiens
aaggacgcccacgagcaaccaagagaggaagaacggcaaaacggaggagcagagcgaaacggaagagaaaaccgaaaaagcaga

SEQ ID NO: 14067 - RNA, 77 nt, Homo sapiens
cgcaggaaacccacaccgggccgggagcaaccacggagaaaaaaggccgacaacgagggagaagcacaagacagcac

SEQ ID NO: 14068 - RNA, 80 nt, Homo sapiens
cgggaagcagaggccacccagagagaaggcagaaacaaaaaagggagagaaaaagcccggcggggagggcacagaaggac

SEQ ID NO: 14069 - RNA, 78 nt, Homo sapiens
aggacagaccaggcccgccacaccccggcgccggaaaggcagccaaagagacggggcgacggacccaggcggccaacc

SEQ ID NO: 14070 - RNA, 77 nt, Homo sapiens
cggccgcaagcgccccaccccaacgccgggccggcccagagggaggcacaacagcgaggacaccaccgagcccccac

SEQ ID NO: 14071 - RNA, 53 nt, Homo sapiens
cgggacccgcccgcccgcgggaggaaaaaccagaagagaaaaaacaaagggga

SEQ ID NO: 14072 - RNA, 107 nt, Homo sapiens
aaggggcaaaccacgaaggaacagaaacaagaaggagcaaacacaggaccaagaaaggcccagggaccaaagcccggacaaggcccgagcaccaggaccgcagaagg

SEQ ID NO: 14073 - RNA, 81 nt, Homo sapiens
ggcccaggcgccggcgccgcgcggcgaccggggcgggcgcggcgagaaagccaacaggcagaccagagacagcgccacgca

SEQ ID NO: 14074 - RNA, 75 nt, Homo sapiens
ggaaccacgcccacggcccacacgcaagggaaaccccccagagacgcgcacgaaacgacgaagaggcccgaggac

SEQ ID NO: 14075 - RNA, 84 nt, Homo sapiens
caaagagcagaggaggccgagagggggagggcacccgccggagggcagccgagacaccaggagagacccccgccagaacgggcc

SEQ ID NO: 14076 - RNA, 37 nt, Homo sapiens
ggccggagacaccagcagggcaacaaggaaaggaaac

SEQ ID NO: 14077 - RNA, 71 nt, Homo sapiens
aggaagaacaaaagaaaaaaaagacccggaagaaagcaggagagggaaagcggcggcggcacaccaacaaa

SEQ ID NO: 14078 - RNA, 76 nt, Homo sapiens
aaagagccccgcaagggggcacacacagaccagacaaagggagcaccagccagaccgggaagaaacgaagggggga

SEQ ID NO: 14079 - RNA, 71 nt, Homo sapiens
ggacccggaaaagcggacaccaaaacggcggagaaagacaggcagaggagagaaagaacccacgcaggacg

SEQ ID NO: 14080 - RNA, 70 nt, Homo sapiens
gagaccagaggaggaagagcaagcgggggaccgaacaaggcaaaagggggcgccggccgagcccgggaaa

SEQ ID NO: 14081 - RNA, 76 nt, Homo sapiens
aaaacagacacgaacagcccgggagcagcagccgacgcaggcgaaggcgacagaacaccgccagagcaaaaaacca

SEQ ID NO: 14082 - RNA, 104 nt, Homo sapiens
cgacccgaagaccgacccgagagcccacccccaacgcgacggaaaggcacgaaagccagcgcggccccgcaaggacccaccacaccaggacgaacggccaagga

SEQ ID NO: 14083 - RNA, 87 nt, Homo sapiens
aacgacaccgacccgaagagccggacccggaacagcaagaacgcaccgaaccagggccagagcagaggcggagaggggcagacccag

SEQ ID NO: 14084 - RNA, 73 nt, Homo sapiens
cccaggggggacagagcggcccggaagcaaagagaaggcgcagcccacgggaaagggagacaagggcggcaaa

SEQ ID NO: 14085 - RNA, 57 nt, Homo sapiens
cagaagaagacgggacagcggaaagagcaagcgggagagagacgaaagaaaaaccaa

SEQ ID NO: 14086 - RNA, 76 nt, Homo sapiens
caagaggaggagagggggaaaacgccggccgaacagcccacgccaaggcaagacacaagcacacaaagaaagccac

SEQ ID NO: 14087 - RNA, 70 nt, Homo sapiens
ggagagccacaaaaaaggaagcgaaaggaagcccagaggcacggggcagaacaccaacagagggccgacc

SEQ ID NO: 14088 - RNA, 82 nt, Homo sapiens
ccaagcagaaaggaacagaacgcggccccagccacaccaagcagagcaagcccccaacaccagcaaccccgggggagacaag

SEQ ID NO: 14089 - RNA, 56 nt, Homo sapiens
ccaacgagaggccaaaaaccggaccagaccagcccaggcaaacgaagaaaaaaagg

SEQ ID NO: 14090 - RNA, 77 nt, Homo sapiens
gcgaccaggagcgccgaagagccaggacgcccagggccccgcgaaggggaagggccaaggagaggacagacggccaa

SEQ ID NO: 14091 - RNA, 85 nt, Homo sapiens
gccccggcgcccccaggcccacacccaaggacccgcccagacccgcagagaggggcagcggcaggaggccacgggccagcacagc

SEQ ID NO: 14092 - RNA, 67 nt, Homo sapiens
gaacgaagaaggggaaaacaacaggaagaggcgcaaggaagaaccaacaccaaagaaacagcccgca

SEQ ID NO: 14093 - RNA, 69 nt, Homo sapiens
ggaggaagaagacaccggggacagacaggaggccgcgacagccaccaaagcagcgcggacaagaaaaga

SEQ ID NO: 14094 - RNA, 74 nt, Homo sapiens
ggagccggcgcgcgggcggggaggcgaggccggacgcacccggggggcccaggccagaaaggccgaggaagcgc

SEQ ID NO: 14095 - RNA, 67 nt, Homo sapiens
cacaagaccaggagagggcaggaagcgcgggaagcccaggacgggacgacccgggcggaggaaacaa

SEQ ID NO: 14096 - RNA, 71 nt, Homo sapiens
gcgcaggaaggggaaaacacagaacgggagaaagcaccaagaccgaggaagggggccaggcgaccagaccg

SEQ ID NO: 14097 - RNA, 78 nt, Homo sapiens
cagaggagccaggaggaaaacacaccaagcaagccacacccagaaccagcagcccgcagaagaaaggcaaacccaagg

SEQ ID NO: 14098 - RNA, 60 nt, Homo sapiens
agcgcgaccgcggggcaccagcgcgcccaggcgccggggaaggaaccagaacggcacccc

SEQ ID NO: 14099 - RNA, 57 nt, Homo sapiens
gccacggcgggccgcgggaggacaccacccacaggaaaagaaggaggccagcgggac

SEQ ID NO: 14100 - RNA, 70 nt, Homo sapiens
ccgagccgccgagcgacaacccgcgccccgaggcagagcaggacccacacgacacaagggagaccaggaa

SEQ ID NO: 14101 - RNA, 62 nt, Homo sapiens
cacagggggcagcccccaaggccaaagcacaggccccacaaaggccagagagaaccgccaac

SEQ ID NO: 14102 - RNA, 64 nt, Homo sapiens
agagacaggggaggcacgcgaggagacacagcagggaccaagaaaggcccagggaccaaagccc

SEQ ID NO: 14103 - RNA, 77 nt, Homo sapiens
cccaaaggaacacaaaaaggaagcagggacgaacaaaacagcggaaaagggcacagaccagcacacagaccaccccc

SEQ ID NO: 14104 - RNA, 78 nt, Homo sapiens
accggcccccaagcaaggaagacccaaaaagagagaaaacgaagaggcaacagaagagagccgcacagccacacgggg

SEQ ID NO: 14105 - RNA, 69 nt, Homo sapiens
cagaggccccagcaaaggaaaggggaaacaggaacacgaaagaggaaaaacgcacaagaaaccgaagcc

SEQ ID NO: 14106 - RNA, 71 nt, Homo sapiens
gaccaccacaagacccaggccacgccgagccgccaggcagcaggacggagacagcccagagcaagcacacg

SEQ ID NO: 14107 - RNA, 71 nt, Homo sapiens
ggacgcgaaaagcggcgggccaggacggggccacaaggggagcgcagagaagggaggcgccggcagaaaac

SEQ ID NO: 14108 - RNA, 82 nt, Homo sapiens
gaaaaacaaagccaaggaaaccccaacacagagccaagcgccaagagaccagaccggaagggggggaggacgccaccacacc

SEQ ID NO: 14109 - RNA, 80 nt, Homo sapiens
gaagaaagaacaaaagacggggcaaccacgacacaaaggacgaaagagggccccacgcccaaaccaaacgaacaaagaga

SEQ ID NO: 14110 - RNA, 37 nt, Homo sapiens
aacagacgaagagcaggggggaaccgccaaaggcaga

SEQ ID NO: 14111 - RNA, 86 nt, Homo sapiens
gcgccaccgcaaaggcccgcgcaccgccagggaagaaacggcaagggaccgcaagcgggacgaacggacgaaagacggagcaaaag

SEQ ID NO: 14112 - RNA, 79 nt, Homo sapiens
ccgccggccagagaagagaacaggaacggcccccggacgccgccaccgccccggcacacacccacacgaagccagagcc

SEQ ID NO: 14113 - RNA, 82 nt, Homo sapiens
gaaggcaccgccgcaccggagcagaaaaagcggggaaggggggcaaaaaaaagaagcaagcgaagcaccgagcacccacccg

SEQ ID NO: 14114 - RNA, 34 nt, Homo sapiens
ccggagcgacagcagcaaggcccaggaccaccaa

SEQ ID NO: 14115 - RNA, 77 nt, Homo sapiens
ccagaagacccacccgcgcgagccccaaagaaggggcccacaaccggagagcgccaccgaagagccaaaaccacaac

SEQ ID NO: 14116 - RNA, 91 nt, Homo sapiens
gccacaggcccgaccgagaggaaagaacagggggacccaagagccaacaggcagcaaaaggcagaacaaagcacaaaggccgcaagagccg

SEQ ID NO: 14117 - RNA, 76 nt, Homo sapiens
ccaagggacgcgacaacggccagacgagcaaggcgccaagggggaacaggcaaagggcagcaccgaccaccgccga

SEQ ID NO: 14118 - RNA, 57 nt, Homo sapiens
ggcaaagggcgggggcaaagcggagaccgggaaacaaggaagcaggggacacacaag

SEQ ID NO: 14119 - RNA, 77 nt, Homo sapiens
agcagcagcagcgagaagggcaggcccaccagggaacggccccggaagacagacgagccagcgcagcagccgacacg

SEQ ID NO: 14120 - RNA, 130 nt, Homo sapiens
acacacgacacggggcaaacagcaagagccagcaggaggagccacgggggcagggcaacacaggccccagagagaccacccaaaggagcggccgagacccgcaacagaagaacagaccacagcgggcgag

SEQ ID NO: 14121 - RNA, 61 nt, Homo sapiens
cagcgggacgaggaccgagaccgcggccgggaccgaggagacacgcggaacaagacaggcc

SEQ ID NO: 14122 - RNA, 58 nt, Homo sapiens
cgccggcaagagccgggcggagaaccggggccgaaggcagaacgccaaccaggaaccg

SEQ ID NO: 14123 - RNA, 84 nt, Homo sapiens
caggaaaaaaccaagggcggaacaaaggaaacagggacacccgagaaagcggacggggcgccacccggacacgggaggcaggcc

SEQ ID NO: 14124 - RNA, 54 nt, Homo sapiens
cacgcaccacagaaacaggggcgagggcagacaccccaggagcgggggccagcc

SEQ ID NO: 14125 - RNA, 81 nt, Homo sapiens
gaaacgacagacgaacacgaaccccggacgggagagcgccggcggagaaaaaggggcgcaggaaggcacacgagcgcagaa

SEQ ID NO: 14126 - RNA, 67 nt, Homo sapiens
cgaggcccccgggcccgggaaaacacacggccagcccgcggcgccaggccacgcggccccgcaagcg

SEQ ID NO: 14127 - RNA, 77 nt, Homo sapiens
caagcgggagcggagaaccagacacacgagcaggccgggagcagggagcaacgacagaggagggggggagcgaaagg

SEQ ID NO: 14128 - RNA, 76 nt, Homo sapiens
gggagcccggcccagacacccaccgacagggccccgcaggaaagagcccgagacacccaccccgggcagaagccag

SEQ ID NO: 14129 - RNA, 57 nt, Homo sapiens
agaagagaggagggagaacacagaaaccggccccaggagcacagcaagcgggagcag

SEQ ID NO: 14130 - RNA, 71 nt, Homo sapiens
cggagagaggacaaaaggaaagaaaaccaggagaacaacaccggaagaagggaagagccgcaggaggagaa

SEQ ID NO: 14131 - RNA, 76 nt, Homo sapiens
gcggcaacaggggcgagaaaggagggcaccagaagcaaccccgacccggaccgcagaaaaaccgcaaacgcaccaa

SEQ ID NO: 14132 - RNA, 88 nt, Homo sapiens
cgcgggagccacgcagaggacgccggaacacccggaagccgagaaagcacaaaagaccccacagcgagagagagcaaacgaaacaggc

SEQ ID NO: 14133 - RNA, 76 nt, Homo sapiens
gcggcccggcccggccccgaggccggcaacggagacccaagaaggacaagcaggagacgccagggggaggaagcag

SEQ ID NO: 14134 - RNA, 85 nt, Homo sapiens
ccaggcccgcagcagcagccaccagagggaccacagagcaccagccgcaggaaccccccaccagccccacggccagcgggacagg

SEQ ID NO: 14135 - RNA, 53 nt, Homo sapiens
gagacccagggcgccaaaaacagggggaccagaggagggggacagcacacccc

SEQ ID NO: 14136 - RNA, 81 nt, Homo sapiens
ggcccagaggccggcggcagcagcccagagcgcaaagagacagagcgggagccaccagcgccaaagggaagccaggagccc

SEQ ID NO: 14137 - RNA, 70 nt, Homo sapiens
caagaaagaagacacacagaagccggacacaagagggcaagaaaggcgcgacgggccgaaaagggacgaa

SEQ ID NO: 14138 - RNA, 79 nt, Homo sapiens
cccgccacccaggaggggagaaccaaaggcgagggccgggcacccacccgcgcggaccaacacaaccggcccagaccag

SEQ ID NO: 14139 - RNA, 77 nt, Homo sapiens
cggaagacacagccaggggaagaagggacggcgcaaaccagcaaccgacaaaagaagcgaagccaggaacaagaggc

SEQ ID NO: 14140 - RNA, 74 nt, Homo sapiens
gagcaagggggggccacaaagccagcagcccaggcaaacaccacaacagggagcagagaaacagaaggcacagg

SEQ ID NO: 14141 - RNA, 82 nt, Homo sapiens
accaacacgagggcggcggaaaaagccgccacacgccaaaggaagcaagaggcccccaagaacacaccgaggaaaaggacag

SEQ ID NO: 14142 - RNA, 76 nt, Homo sapiens
agaagcagcgcaaggaccaggaagcgaagaaagcacacaaagcaacagaaaagaacaaccggcaagaagaagaaga

SEQ ID NO: 14143 - RNA, 64 nt, Homo sapiens
cagccgagaccaccgcagcccaccccagggccacaggaagaacaggcagcagaacccggaggaa

SEQ ID NO: 14144 - RNA, 84 nt, Homo sapiens
cgggcggcgcggccgcccgggccgggccccaccggacgaacagcagagaacacaacacaggacaagcaagcccagagcgccgga

SEQ ID NO: 14145 - RNA, 76 nt, Homo sapiens
cccaggccaagcaaccaccagcagcccccagagcggaacacagccccgaaccagaagcggcaaacagcacagccag

SEQ ID NO: 14146 - RNA, 63 nt, Homo sapiens
ggagacagaaggaagaaagagaggccggagaaaacaccaagagcccccaggacaggcacaccc

SEQ ID NO: 14147 - RNA, 84 nt, Homo sapiens
gagaggcagacaaacccacagccaggcgcagaggggcccacagaggagaaccggcccaggccgagcagcaacagcccccgcgga

SEQ ID NO: 14148 - RNA, 73 nt, Homo sapiens
acaaaacccagacaccgacgggccgcgaggggaagaggaagcaaagccaagacgaaggagcaagggcaacacc

SEQ ID NO: 14149 - RNA, 40 nt, Homo sapiens
gggaggaacacccagaaagcccccgagcggaaaacgcagg

SEQ ID NO: 14150 - RNA, 81 nt, Homo sapiens
cgaaggagcaagaacccagaagaggcagcagcggaaggcagcgggagccgaaaacggaaggaccggcgacccccggccgcc

SEQ ID NO: 14151 - RNA, 43 nt, Homo sapiens
aggcacagccgacgccgcgggcaagagcggagggcgagagccg

SEQ ID NO: 14152 - RNA, 71 nt, Homo sapiens
ggacccgcggcgcggcacgacccacgcggccggcagggcgggcggcccccgcgggcggcggggggcaccga

SEQ ID NO: 14153 - RNA, 64 nt, Homo sapiens
ccgaggcaccgaggcaccagaggagaggaccacccgcacccaggggacgcacggcccaaccccg

SEQ ID NO: 14154 - RNA, 81 nt, Homo sapiens
aggcccgggcgcggcaccacacggacgcgagcgcgcgcaagcacgcaccccgcgccgccgccccccaccaaggaagcccaa

SEQ ID NO: 14155 - RNA, 55 nt, Homo sapiens
gaagcgcccacgcagcagccgcagagaagaccagaaaggggacagcgacagaggc

SEQ ID NO: 14156 - RNA, 48 nt, Homo sapiens
gccaaagaagggagagaggccaagaaagccggacagggccagcaaaca

SEQ ID NO: 14157 - RNA, 77 nt, Homo sapiens
aaaaggggaccggggggccgggcgcagaaggacagaaccccgaacaggcccaagggccggcagagagacaaccccag

SEQ ID NO: 14158 - RNA, 68 nt, Homo sapiens
gggccgcgccgcgaccccacggccgggcaccgaaaggcagggaaaaaccaggacaaaaagcaaaggac

SEQ ID NO: 14159 - RNA, 83 nt, Homo sapiens
ccagaccaagcgaagaagagcaaaaggcggagcgagccacgagcagcaagacaccaacagccccagaaacaaggaggacccga

SEQ ID NO: 14160 - RNA, 90 nt, Homo sapiens
caggacgggcacagcagagaccaaaggcagggcaaggaaacggccacaagacagcccagagcaagcacacggaggcccgggagccagacc

SEQ ID NO: 14161 - RNA, 80 nt, Homo sapiens
cggacccccggaggacccagggccagggcggacggaacgaagacgaggcagcggagcaggcgggagcaggggaggccgac

SEQ ID NO: 14162 - RNA, 86 nt, Homo sapiens
aggccgcggcagggcccgcaggcggcgcacaggaagcacgggcgaagcggccaggcccgggcggacgcagagccagagcgccccag

SEQ ID NO: 14163 - RNA, 57 nt, Homo sapiens
gaaaaacggagggagaaaaagcaagaggaaagcacgcccaaacccaaaagaggagag

SEQ ID NO: 14164 - RNA, 65 nt, Homo sapiens
caggaggaagacaaaagaggcagaagcaacacggaaagacaccgagcagacaaaccacccacaac

SEQ ID NO: 14165 - RNA, 41 nt, Homo sapiens
acaacaccagaacaaaaggcaggaggcaggcacacaaagaa

SEQ ID NO: 14166 - RNA, 74 nt, Homo sapiens
ccgagcgagacagaccagaagagaccacagacgaggccagagccagcaaagcggagaccaacaagaaagagaaa

SEQ ID NO: 14167 - RNA, 58 nt, Homo sapiens
accgccccaacccacgagaggacagcccaggcaaggacgcccacagaaaacacagaga

SEQ ID NO: 14168 - RNA, 87 nt, Homo sapiens
ggaggcggcggagcgcgagagccgagcggaccagcgccacgcagagccccgccaggaagacacgccggggaacgaagcagaagacgg

SEQ ID NO: 14169 - RNA, 78 nt, Homo sapiens
caaggcgacgccagaggaggaaaggaagacaagagcacaagcggcgcgaggaaggccagaacacaaaacgcagcaggc

SEQ ID NO: 14170 - RNA, 54 nt, Homo sapiens
ccggcaggacgacaggagggacaaaaaggcaggaacagaaccggagcaggccga

SEQ ID NO: 14171 - RNA, 72 nt, Homo sapiens
cggagaaaaggccaagaaggcaggagccaagaggccacgacagaagaacagcaacagaacacaccaagagac

SEQ ID NO: 14172 - RNA, 59 nt, Homo sapiens
gcacaaacagaggaaccgccaagagcgcagccagccagaggcccaggaaggaacccgag

SEQ ID NO: 14173 - RNA, 72 nt, Homo sapiens
acacaagagacagcaacaaagcaaccggaaaggggcccgccaaagaggcacaccgaacccacaccaaacaac

SEQ ID NO: 14174 - RNA, 64 nt, Homo sapiens
ccaccgggccaggccggcagggcgaaaaagcagcaaagggagaaaagaaggccaaacagaagca

SEQ ID NO: 14175 - RNA, 29 nt, Homo sapiens
ccgcccccacacgggaagggcaggaggga

SEQ ID NO: 14176 - RNA, 73 nt, Homo sapiens
gcgggagccggcgaggggaagaccaagacaggccggaacccgaaaggacacaaaagcgcagccaggcccggaa

SEQ ID NO: 14177 - RNA, 82 nt, Homo sapiens
ccgacaccgccggccaacacgggcaaggacgcggaagggagagaagcaggaagagcggggagcgcgaccaaccagggggaga

SEQ ID NO: 14178 - RNA, 73 nt, Homo sapiens
cggcgcccgccccaggcccagcaacggccacccaaagaacaccacgcgaggcaaaaaggagagaaacgcaaga

SEQ ID NO: 14179 - RNA, 74 nt, Homo sapiens
aacccagaggccaaacaagaggcaaggggggaggagcgccgccccccgcacaaggaaggaaaacacccggcagg

SEQ ID NO: 14180 - RNA, 80 nt, Homo sapiens
cccagcgcggaagaagcaggaggcaagaaaggggaaccccggagaaaaggccaagaaggcagacagcccaagcacaaaac

SEQ ID NO: 14181 - RNA, 77 nt, Homo sapiens
ccacgcagagggcggagcggcagagaggacagagacgaggcgggcccaagggcaccaccggcacccacaaagaggca

SEQ ID NO: 14182 - RNA, 70 nt, Homo sapiens
ggggccagacagcaccggcaagaccacccacagccgaagacccagaaaccaccgccgagacaaaagagga

SEQ ID NO: 14183 - RNA, 38 nt, Homo sapiens
accacagcaggacacacaggcggaggcagcggcacaac

SEQ ID NO: 14184 - RNA, 80 nt, Homo sapiens
caccagggggcaggcccggagagcagccagcgggacagaaggaggaagagggagcaccacggaccccaaggaagccacgg

SEQ ID NO: 14185 - RNA, 76 nt, Homo sapiens
cacaccagacccaaggaacacagcaagccggccaccggcacacggaaacgcacaggaagcagccagggaagaaacc

SEQ ID NO: 14186 - RNA, 81 nt, Homo sapiens
gaggggagcaccaggaccgggccggaacgagacgcacgcagaaagcgaagcagaagccgagaacagcggcgagccggaaag

SEQ ID NO: 14187 - RNA, 61 nt, Homo sapiens
gacacaaaagcgaaccagagcaacagcgcaaggcagggaccaagaaaggcccagggaccaa

SEQ ID NO: 14188 - RNA, 53 nt, Homo sapiens
aaacaagagacgcgaccaggacagagaggcagggagacgacccggagacgcgg

SEQ ID NO: 14189 - RNA, 88 nt, Homo sapiens
gaggaggaagggcaggacgagggcggcgcgggagcagcacccacagccaaggcgggagccacgccacaacacagcagcccccaggaga

SEQ ID NO: 14190 - RNA, 84 nt, Homo sapiens
agcgcccgacccggcgaggaaccaaccgggagccccccaagagacccaggggaagacccaaaggcagcaaaaacaagagcccca

SEQ ID NO: 14191 - RNA, 76 nt, Homo sapiens
cacaaccggaccaccccacacacagaccaaagcaccccagcacacacaccaccacgggacaagccacgaaaaggcg

SEQ ID NO: 14192 - RNA, 87 nt, Homo sapiens
cggccagccagggccgggccgcgaccggccccggagcacagccaggcagagcagcccaccagggaggggagggggggaggcgcaccc

SEQ ID NO: 14193 - RNA, 77 nt, Homo sapiens
ccagcaggaggccaaagaaagaagaaacgaaggcaaagcaacagaaaggcacccaaacaacaaaccgagggacaagg

SEQ ID NO: 14194 - RNA, 40 nt, Homo sapiens
gagcgggccggaggaaaagaaaggcaaggaggagaagacg

SEQ ID NO: 14195 - RNA, 74 nt, Homo sapiens
cggagcccgcagaccgcagaaggccggagacaccagcaggggaacaccaaggaaaaggaaacagagaacaaagc

SEQ ID NO: 14196 - RNA, 69 nt, Homo sapiens
gccgcgacgagccagaccgccaaaccagagaaagaaacacccgaacagcgacgagacgacgggaccgaa

SEQ ID NO: 14197 - RNA, 78 nt, Homo sapiens
agaagaacgaccaggggacaaaagaggggaaacgagagcccaaaaaagaagcagcagcaggaaagaaaagcacaaggc

SEQ ID NO: 14198 - RNA, 74 nt, Homo sapiens
gccaccaccaaaaaaccaccccccaggaaaaagcaaaccgccacgccaaggcagcgaggccaagaaagccagaa

SEQ ID NO: 14199 - RNA, 72 nt, Homo sapiens
gccgggcgagcgcaaaggaaggcgccgggcccgacccgcgagagcaaggccagcagagcccaagggcgccag

SEQ ID NO: 14200 - RNA, 76 nt, Homo sapiens
aaaaacaggcgcgccaggccgacgccgagaaagagaaggccaagagaagcagggacagacagccacaacagggaaa

SEQ ID NO: 14201 - RNA, 56 nt, Homo sapiens
cgccagcagaagaaacggcacaaagacgcagcgaacgcagccaaagaaacccccaa

SEQ ID NO: 14202 - RNA, 76 nt, Homo sapiens
cgcggagagcccaggccgccccgccggagcccgggagcccgaggagaggaagaaacagacgcacgccgaaaaaaaa

SEQ ID NO: 14203 - RNA, 57 nt, Homo sapiens
agcccaccaaacacgccggaaaccccgcccacagcacgaggggaaggccaccgagaa

SEQ ID NO: 14204 - RNA, 92 nt, Homo sapiens
caaacccaggcaagaacggagcaaaaaacggacaacggaaaaagccagaccagaggagaacaagcagagagcacacgcgcaagcggcaggaa

SEQ ID NO: 14205 - RNA, 61 nt, Homo sapiens
ggcccgggggggaagaggccagccgcgggggaaagaggaaaagcaacggcgcaagaggcgg

SEQ ID NO: 14206 - RNA, 79 nt, Homo sapiens
acgaaaggagcaagagcaagacaccggacaccgagggcccccaaaagagaacggcgccgagagagccacgggaagaaac

SEQ ID NO: 14207 - RNA, 69 nt, Homo sapiens
ccggagaggaagcccggcaacgggcaccaacgcagaaaagggaccaaccacaacgaaacagaagagaac

SEQ ID NO: 14208 - RNA, 87 nt, Homo sapiens
ccaggagaccaaggaccagccaccacggagaacacaccgacccacaaggaagcgaagcaagcaaaagccacgcaaaccacaggccga

SEQ ID NO: 14209 - RNA, 62 nt, Homo sapiens
gaaggaccaagaaccagacaggaagggaaggggcggagacgggcggaacgcaggaggccaga

SEQ ID NO: 14210 - RNA, 42 nt, Homo sapiens
ggcgcgcccggcgggccggaccaagaaccggacaacagaagc

SEQ ID NO: 14211 - RNA, 80 nt, Homo sapiens
ccccccaagcgcgccaaccagcggggggaagacaccaagacacgcgcgccccagacccggcacacccccccggacgaggc

SEQ ID NO: 14212 - RNA, 70 nt, Homo sapiens
gaggcgggagagggaggagcccagaccgggcgacccgcccaggagagagccaaaacgacaggccagggaa

SEQ ID NO: 14213 - RNA, 77 nt, Homo sapiens
aaacacagcgaaaagaaacggaaagcaagcacagagcacaccaagaaagcggggaagcgaaggcagaaacacccaca

SEQ ID NO: 14214 - RNA, 53 nt, Homo sapiens
ggaccgagagcgcgaaacgcacgagaaggagccccccgagaaagaagcgccgg

SEQ ID NO: 14215 - RNA, 71 nt, Homo sapiens
acgcgcagcggaggagaaagcaccaacagcagcggcagccaaggcagggagcacgcgggcaggcagcccag

SEQ ID NO: 14216 - RNA, 45 nt, Homo sapiens
cgacgcggagagagcaccccacgacagaacaaacccccccccccc

SEQ ID NO: 14217 - RNA, 77 nt, Homo sapiens
aagcccgagcgacggaccccacacacccgacgaaccgagcacgaagaggaaaacggcaaaccagaaaccagggaacc

SEQ ID NO: 14218 - RNA, 95 nt, Homo sapiens
cgccaaggagacaccagcacaagggcgcccgcggaccaggggggacggggcccgagaacagaccggccccccaaacacccgagcccagccccgcc

SEQ ID NO: 14219 - RNA, 66 nt, Homo sapiens
cgacgcccgcgccccccagcaagaaaaccagaaggcaccgacaggaaaggaaaaggagaaccaggc

SEQ ID NO: 14220 - RNA, 74 nt, Homo sapiens
gagacaggcggccacagggggaaggaaccccgggaaaagaaagagcagcccagcgcaccggaccccaacaggaa

SEQ ID NO: 14221 - RNA, 79 nt, Homo sapiens
gccagacgaagagcagagcccacagaaccgagaaagagagacgaggagccggcgccaaccacgagccccaaccccaaga

SEQ ID NO: 14222 - RNA, 70 nt, Homo sapiens
aaggcacacacagcgaccgggagcacaccacaggcaaggagcaaagacacagcaacgagggaagaaccag

SEQ ID NO: 14223 - RNA, 61 nt, Homo sapiens
acaagggaaagcaagcagcccaacgcgaacagaccaccaggagcaaacccaagcaaaaaac

SEQ ID NO: 14224 - RNA, 78 nt, Homo sapiens
ggcgcgcgggcgcgaccggcggcggcgcggagcacacccaggccacagaggaggaaagagaggggaaagaagcagcca

SEQ ID NO: 14225 - RNA, 75 nt, Homo sapiens
gcggagagaagaccccaggggcgacaggccgcagcacacaaaggggcgggaaaggaagaggacacaggcacgccc

SEQ ID NO: 14226 - RNA, 88 nt, Homo sapiens
ggaaagccggcaagacgagaaagcaggcagaggggaggagacacgaagcgacgcagagccagaagggaggcagggaacacgcggaaca

SEQ ID NO: 14227 - RNA, 74 nt, Homo sapiens
ccgggccagcggccgcgcacccccggccggaggcaccagccaaacgcacaggagcaaaaggacagacacggcag

SEQ ID NO: 14228 - RNA, 79 nt, Homo sapiens
ggcagcacggagggcccccgcgccgcaagcagacggcaaggacggcggccccggaccagggcgaaagaggccaagagga

SEQ ID NO: 14229 - RNA, 56 nt, Homo sapiens
ccagccaagccccgcgcagcccgccgacacaccagacagaaagcgggacacaagca

SEQ ID NO: 14230 - RNA, 66 nt, Homo sapiens
aagcgagagcgaagccgccacccaaaccagcaaaccagacagggaaagcggaaccaccaaaaggag

SEQ ID NO: 14231 - RNA, 89 nt, Homo sapiens
ggaggcgccgcccggggccccgcggcgcaggaggcggggagcgcagagcgggcgagcgcggagacaccaaaggaggcaagcaaagacca

SEQ ID NO: 14232 - RNA, 74 nt, Homo sapiens
gcggaggaaggaccccgccaaaggcgcggagcgggaaagacacggagcaggccggaggagaccgggcaggacca

SEQ ID NO: 14233 - RNA, 66 nt, Homo sapiens
gcaaagcagcggcgcagcccgggggacacaacccgccacgcggagcacgccaaaggagccgagggg

SEQ ID NO: 14234 - RNA, 67 nt, Homo sapiens
gcaccagccaacccggccaaggccccccaacccccccagcaccaggaagaagaggcggaagaaacaa

SEQ ID NO: 14235 - RNA, 94 nt, Homo sapiens
ggcaagggggcacccagcggcacaaaaaggacgccggcaaccaagaacacgaaaaggacggagggaaaagcgccgggcccaagcaaacagccga

SEQ ID NO: 14236 - RNA, 85 nt, Homo sapiens
cacacaggccagaacgagggggagaaggacggcagaaaacgagacgccggcggcgaaaaaaggggacaagaccggaaccagacga

SEQ ID NO: 14237 - RNA, 71 nt, Homo sapiens
ccgaacacgacagaaagaaaggccaaagcagcagaaagcaccgggaggaaagagagccacacgaagaacac

SEQ ID NO: 14238 - RNA, 73 nt, Homo sapiens
ccggcgagccgggaagcggaggcggcgaggccagcagggagaggaggaggaagagccaccgaccacagacaaa

SEQ ID NO: 14239 - RNA, 38 nt, Homo sapiens
agccagcccgagcaagaaagagggaaagaaaacaagcc

SEQ ID NO: 14240 - RNA, 61 nt, Homo sapiens
aggagcgaagaaggcacgcaaacagggccccacgaaggacggccagcgcggcagggaggag

SEQ ID NO: 14241 - RNA, 81 nt, Homo sapiens
ccaccggagcagcccgggaaaggccaggaggaccaagaaaggcccagggaccaaagcccggacaaggcccgagcaccagga

SEQ ID NO: 14242 - RNA, 64 nt, Homo sapiens
gcagaagagcacagcacgaacagacagaaagcaccacagaaaggggacgccgccagccaccggc

SEQ ID NO: 14243 - RNA, 82 nt, Homo sapiens
cgaagcgagggcgaagcacgacacagaaggggaggggagggaaaggcccaggaaaaagacaaaacagaggagaccagaccag

SEQ ID NO: 14244 - RNA, 85 nt, Homo sapiens
cacgggcgaaggcagcacagccagaggagcagaagcagccggcgggccccacggcccaggagccggagagcacagggccgcagaa

SEQ ID NO: 14245 - RNA, 78 nt, Homo sapiens
ccgggcccacgacccagcggccccggaaaagacagagacagccggccggcagccaggagcgggagaaggcccccgccc

SEQ ID NO: 14246 - RNA, 76 nt, Homo sapiens
cccacaccgaggaaagacaacccacccgcgggaacccgccgccagggggccaccgaacacgcagaacgaagaagga

SEQ ID NO: 14247 - RNA, 49 nt, Homo sapiens
agcgccaccgccgaccgaagccgcaaaagccagcgaagacggaggacca

SEQ ID NO: 14248 - RNA, 79 nt, Homo sapiens
cccgcgccgcccggaccgccacggaaaggaagaaagaccgagggagaagggagggcagagggaagcgagaaccaggaac

SEQ ID NO: 14249 - RNA, 58 nt, Homo sapiens
gcaccgacgcgggagaagccaagacgggaccgaaggaccggagggcggcagaaacgcc

SEQ ID NO: 14250 - RNA, 79 nt, Homo sapiens
gaacccagcaagaacacaggaggccaccggggcgagcgcacagacccacaggaaacccgaaagaacagacagcaagagg

SEQ ID NO: 14251 - RNA, 92 nt, Homo sapiens
cgcgcccgcgccagccccgccccgggcaaagcccacggccgccgagcagacaacaggcacaaagagagaaggaacacccacagggcagacag

SEQ ID NO: 14252 - RNA, 64 nt, Homo sapiens
acagaaggaagaaaagccaggcaagggaaacgagccgagaccaccaggaggaggagcggggcgg

SEQ ID NO: 14253 - RNA, 69 nt, Homo sapiens
agaagccaccaggggcacaagaacagcgccaagaacaggcaggaggcaaggaggccacggggccgaaga

SEQ ID NO: 14254 - RNA, 83 nt, Homo sapiens
cacagcaaagcgagacaccgcccagaaagacacccagcacagcaacacgggcacgaaaggcggagacagcaaaggcaaaaagc

SEQ ID NO: 14255 - RNA, 74 nt, Homo sapiens
gaaaaaaaagcaaacaacgaggagcgccaaaacagccacagccacggcacgggggaggggagccagacaacaaa

SEQ ID NO: 14256 - RNA, 89 nt, Homo sapiens
gcgaaccaaaacacagcaaagcaaggaacagcccaggcgcccggccgccccacccggccagccccagcccgccggggccgcaggccagc

SEQ ID NO: 14257 - RNA, 76 nt, Homo sapiens
cacaaggacaggagaagaaacgggggggcgccagaacgaccaggaccagaagccgagaggaaggaaccaagaagac

SEQ ID NO: 14258 - RNA, 78 nt, Homo sapiens
agcagggagaggagcgggaaacgggagggaaccagcaacaagccgggagcggcaaaggaagagagcgcacaagaaaaa

SEQ ID NO: 14259 - RNA, 73 nt, Homo sapiens
acacagagcaaggcaaccgaccagcaaagcagagcgcagaacgaagcaacccaaaaaggcgcaagaaccaaaa

SEQ ID NO: 14260 - RNA, 50 nt, Homo sapiens
cggacggggcgagacacgagacgacgggaccgaaggaccccgccagagac

SEQ ID NO: 14261 - RNA, 76 nt, Homo sapiens
cacgcagacggaaacaaggcaacagaaagagcaacagcagggcaacaggacaagcccccacgaggaaaaccccccc

SEQ ID NO: 14262 - RNA, 75 nt, Homo sapiens
caagggacccccggagaggagacccggaagacaacaaggcgagcagggcacaagacacagaggagaagaaacaga

SEQ ID NO: 14263 - RNA, 82 nt, Homo sapiens
gccagcccagcaccgacagccgacgcgcagaagcagagccaccggggcagggccgccaagaccggagacaggaacacggccc

SEQ ID NO: 14264 - RNA, 57 nt, Homo sapiens
cacggcaaaacaggacggcgaacacaaccagagccggggacaaccagcaagccaggg

SEQ ID NO: 14265 - RNA, 76 nt, Homo sapiens
cgcacccagagaggcgggcaggcccaagaagacaggcaaggagggggcggagggccgcgcaaccggagcccgcgcg

SEQ ID NO: 14266 - RNA, 62 nt, Homo sapiens
ccggaagcaggcgccgcgggaaacgagacggcgaaagagcaagcgggcacaccgacggacga

SEQ ID NO: 14267 - RNA, 71 nt, Homo sapiens
ggagaaccggggcgcaccgccaagagcgggacaaaaaacacgcaccaagaagaaaccagaagagacggcaa

SEQ ID NO: 14268 - RNA, 75 nt, Homo sapiens
ccggaggacccgccgcaaggccaaagagcacagggacagaaaaacagcgcagacgagccgcaaggacaagacgga

SEQ ID NO: 14269 - RNA, 75 nt, Homo sapiens
gaaaaggagcaccccaggcgagcagcaggcacaccgcagcaaggggagccggaagagggaagaaggaagcagaaa

SEQ ID NO: 14270 - RNA, 73 nt, Homo sapiens
cgagcgagggggggcgcgccggaaaccggagcgcgcagcaggcgaggcccgggcagcgggccagcgggagggg

SEQ ID NO: 14271 - RNA, 69 nt, Homo sapiens
cccggccaccccccggcccgaagccccacgccagggagaggcagagcaggagggagagccaccacggac

SEQ ID NO: 14272 - RNA, 65 nt, Homo sapiens
ccgaacaaagccccgaggacggccggaaaaacgaacagacgcacaccacggcaccggcgggcacg

SEQ ID NO: 14273 - RNA, 74 nt, Homo sapiens
ggacaccaggaaacagcaacgccagggcagcaccgcaggaacccaaaaaggcgcaaggaagaagagacgccgcg

SEQ ID NO: 14274 - RNA, 72 nt, Homo sapiens
agggccaccccggcgagcgccaacccaaacgagcgagacacacagaaaggaaaagggaacagcggcaagaac

SEQ ID NO: 14275 - RNA, 71 nt, Homo sapiens
aaagacagcaaaaaaaaggaagcacaccagaggaaccgggaccaaagaagagaacagcaggaaaagaaagc

SEQ ID NO: 14276 - RNA, 83 nt, Homo sapiens
aaaggaagggcgggaccaacagggagccagagaggagccaaccagcgcgggaggccgaggcggggagggagccaagcggccaa

SEQ ID NO: 14277 - RNA, 73 nt, Homo sapiens
ccgcacacagaccgcagagcccagaacaaaggcgggagacacaacaacggcaagccccaagggccaagaagcc

SEQ ID NO: 14278 - RNA, 60 nt, Homo sapiens
gcccaccgaaaggagagaagcagagaagggcgcccaaggagacaccagccgccagcccga

SEQ ID NO: 14279 - RNA, 76 nt, Homo sapiens
cgccgccgcaacgggcgaggagcagcgacccgccgggcccagggccccagggacggccaagaagaggcgagcgcgg

SEQ ID NO: 14280 - RNA, 62 nt, Homo sapiens
acagcacgcacagaagagcccggcaaaacagggcagagcacaggcaacagagcacacaagac

SEQ ID NO: 14281 - RNA, 62 nt, Homo sapiens
cacaagccggaaaggccccgagagcaaccgggcgggagaccaggggccagcgccaacacaag

SEQ ID NO: 14282 - RNA, 84 nt, Homo sapiens
cgacgcagagccgaggcagaagacggggcccgggaccacaggccccggcccagagcaacagcacccacccggagccggagccgg

SEQ ID NO: 14283 - RNA, 67 nt, Homo sapiens
agcgcgcccagacccgccggacacaagagggcaagaaaggcgcgacgggccgaaaagggacgaaggg

SEQ ID NO: 14284 - RNA, 88 nt, Homo sapiens
gcgggaagaagccggcccggggccgcggacgaggaccagcagaggccagcacgagaacccaggggccagcagcccccccgagggcgca

SEQ ID NO: 14285 - RNA, 66 nt, Homo sapiens
gcgaaggaggacaggagacgaccgagcagaacccccgaacagaacggggggaaaggaagggacgac

SEQ ID NO: 14286 - RNA, 40 nt, Homo sapiens
ccgggagcgggcggccaaccagggaacaagagccaacaag

SEQ ID NO: 14287 - RNA, 70 nt, Homo sapiens
agacccaagggcaagccaagaaaaggggaacaggacgcaagagacgcgccacagccagcggacaaacagc

SEQ ID NO: 14288 - RNA, 78 nt, Homo sapiens
ggagccgggcgcgcggccgaggcccggggagaaaagaccagaggacagacacaagaccgggaggcagaggaggacagc

SEQ ID NO: 14289 - RNA, 82 nt, Homo sapiens
gcacaccaagagcaaggaaagacggcaaagaagagaaaggaaccaagaaagaggaagaagaggagacaaaggaaaagagaag

SEQ ID NO: 14290 - RNA, 79 nt, Homo sapiens
gagcgcacgggggaaacaagcgaaaaacaggcaagggagaaagacagcaaagaaaaggagaagaaaggaaaaaaacaac

SEQ ID NO: 14291 - RNA, 93 nt, Homo sapiens
ggagcccgcgcccgccgcgggagagaggacccccccccccccccaagccgccacaggaccaggcaccaaggaacaccgaccagcgccaaccga

SEQ ID NO: 14292 - RNA, 79 nt, Homo sapiens
gcggccaggcccgcgaacacacgccgccaccgggaggcccagggaagggcaaaaggcacaaaaaacaagcaaaacccgg

SEQ ID NO: 14293 - RNA, 85 nt, Homo sapiens
accgggccgagccgggccgcccgggcgcagcaaccaggcgcccccaagaagaaaaccgggagaaaccaaagagccaggcgacccc

SEQ ID NO: 14294 - RNA, 72 nt, Homo sapiens
gcggagcccaccgcgagaagagcaagacagggggccgggaaacacaccgaacagagggaaggcggcagccag

SEQ ID NO: 14295 - RNA, 78 nt, Homo sapiens
agggaagacgccgcgccaccgagccggaccggagacggggccaacagggaaacaacacgaggaggacggcacaaaaag

SEQ ID NO: 14296 - RNA, 84 nt, Homo sapiens
gccagcgcgcaagaggccacggcgggggcaccgagaagccccgaccgacgccccgcccccggagagggaacagaagggaggaaa

SEQ ID NO: 14297 - RNA, 74 nt, Homo sapiens
aaaagcagcggccggacagcgccacggcgggccgcgggaggacaccacccacaggaaccagacgccgcaggccc

SEQ ID NO: 14298 - RNA, 50 nt, Homo sapiens
cacaccgggaaaagccgcaggaggaaggcgaacaaggaccgcgacaccaa

SEQ ID NO: 14299 - RNA, 75 nt, Homo sapiens
caaccagccaagaagacacaagcgcaagcacacccaccgaaacaagacagccacaggcaagaggaagaacagcag

SEQ ID NO: 14300 - RNA, 59 nt, Homo sapiens
gcaccagaagaagagaacagggagacacgagccagaacagaaccagccaagccccaccg

SEQ ID NO: 14301 - RNA, 80 nt, Homo sapiens
gcaccacgcccgcgccgcgccgccgccaccagcccaagagaaaggacgagaacccccgcgaaccagaggaacccagcgag

SEQ ID NO: 14302 - RNA, 78 nt, Homo sapiens
gacaaagacccggaccgcagcaagacaggagcagcaggaccgcagcaacaaggaacaaaagaagaagaacacaaacgg

SEQ ID NO: 14303 - RNA, 69 nt, Homo sapiens
gacacggcaaacccagcaacacggagacacagggggaaagccaagcccgaggaggccggagagaaaaca

SEQ ID NO: 14304 - RNA, 55 nt, Homo sapiens
acacgcggccgcccggccgggaaccaagcgcaagccccggggcagagacacagga

SEQ ID NO: 14305 - RNA, 77 nt, Homo sapiens
ccgcgcccgccaggcgacaggggaacagacagaaggagcaggaaccaaaggggaggagggaaccgcccgagcacccc

SEQ ID NO: 14306 - RNA, 54 nt, Homo sapiens
aacggcgggagagcaaaggcggcacggcagccggggaaaaccccggccgccccc

SEQ ID NO: 14307 - RNA, 91 nt, Homo sapiens
gccacacagaggaaagcacaaaggaagacgaaccggagaagaggacccagcaaggagaaaccccacacacaacgcacaccgccgcacggag

SEQ ID NO: 14308 - RNA, 78 nt, Homo sapiens
gacccacacgaggccacccagcccaccaaacacgccggaaaccccgcccacagcacgaggccacggaagaagacaccc

SEQ ID NO: 14309 - RNA, 53 nt, Homo sapiens
agcaggaaccagggcacgcggagcacaacgggggccgacacagcaaggaagag

SEQ ID NO: 14310 - RNA, 70 nt, Homo sapiens
aagacagcagaccgggggccagcacacaacaacacagaaaagaaggaggccagcgggacacacaaagaaa

SEQ ID NO: 14311 - RNA, 84 nt, Homo sapiens
cgccccgccccgcagccgcacgcccgccgagccacagccacgagacgcgggcccccccggccaagacaaagaggccacaggagg

SEQ ID NO: 14312 - RNA, 85 nt, Homo sapiens
cacaccacgccggcaaaacaggaccgaaggagaagaaggagaaggggaggagaaggcaagccggaaagagcgaaagaaagaaggg

SEQ ID NO: 14313 - RNA, 94 nt, Homo sapiens
caccgcccgcgacagcgccacgcgaacgacccaagacacgccgggggcccacgagaagagcaggcgacgggggagagggagacagcggcgcaaa

SEQ ID NO: 14314 - RNA, 88 nt, Homo sapiens
gggaagaacaaaggaaggggagcccgggacccccgggggcgcaggccccgagccccggccccaaagacccaaaacagagacacccccc

SEQ ID NO: 14315 - RNA, 59 nt, Homo sapiens
aaaaacagaacagcgcccgcgaaaggaccaagacccacggcgaagaccaacgaaagacc

SEQ ID NO: 14316 - RNA, 76 nt, Homo sapiens
cacgccggaagagaaggagcagaagaccggggcaagcagccggagaaccacaaagaacggcagagcacgaaagaaa

SEQ ID NO: 14317 - RNA, 70 nt, Homo sapiens
acagggcacacagaaccgaaaaagagcgggcgcagacccgcagaccaacgaaaaccacggcgccacgaag

SEQ ID NO: 14318 - RNA, 54 nt, Homo sapiens
gaagagagacagagaagacgcaggagggccgagccagcccggcgcagaaagagg

SEQ ID NO: 14319 - RNA, 38 nt, Homo sapiens
cagccccaagaccaggaacagggggggcaggcaccaaa

SEQ ID NO: 14320 - RNA, 81 nt, Homo sapiens
ggccgcacgcggggcgcgcccaaggcagccaaggccgaaacaacgaacaaggacggaccaacgaggagcaagaaacgaaaa

SEQ ID NO: 14321 - RNA, 87 nt, Homo sapiens
aaccgccaggagaggggagcggagacaaagccgccaggagccagcgggcgacaggcccaggcagaagacccccccaggcccaaccag

SEQ ID NO: 14322 - RNA, 74 nt, Homo sapiens
gaaacagcacggagaaacacaagaaaaaggcgcagcccaacagaacccagaggaaccagaaggaggagcccaaa

SEQ ID NO: 14323 - RNA, 60 nt, Homo sapiens
acacccgcagacaagaacggagagggagaacaacaagaagaaacccaccaagagaaaacg

SEQ ID NO: 14324 - RNA, 63 nt, Homo sapiens
cgcgagggggcgcgaggggaacggaggccagagcgcggccgcccaccaggcggacgcaggagc

SEQ ID NO: 14325 - RNA, 84 nt, Homo sapiens
aagggagcgaggaacaagcgggaaccgccgcaaccccccagcaccccgaagggccacagaggccacagaggggaagcacagccg

SEQ ID NO: 14326 - RNA, 84 nt, Homo sapiens
ggacggcgcaaccgcgcccgccggcccccccccgcgcccgcgaccgccgcggcgaagagacgccccagggccaccgccagcaga

SEQ ID NO: 14327 - RNA, 127 nt, Homo sapiens
ccagcgccaccaccacgccagccgcaccagccgcccaagccgcacagccgcggcggcagcagcaggagagccggaaccaaaaagaagccccagagccggggccaggagccccaagcgccccagcagc

SEQ ID NO: 14328 - RNA, 67 nt, Homo sapiens
gcagaaacgcaccaggccaaagaaagagaagggagcagaaggaaacccaccccaagagaaggcaaaa

SEQ ID NO: 14329 - RNA, 85 nt, Homo sapiens
ggggacgaaagggaaggacaggcagagcaaacaaggaaaccagagaaacccaggccagcaaagacacacccacaagccacagaaa

SEQ ID NO: 14330 - RNA, 72 nt, Homo sapiens
gacggacacgggagagaggccgggcgagcagcaggagcaccggcccaagaaacaggaacccccaaaacaaac

SEQ ID NO: 14331 - RNA, 78 nt, Homo sapiens
cgcagacagccccacaggagcagcccaggggaagagagcgaccaaacccccacaacaaggacaaagggacccaaggac

SEQ ID NO: 14332 - RNA, 75 nt, Homo sapiens
gaacaccaaggccaaaaacacagcaacccagcacgaacaaggacaagagaaggcacagaaacccacaagaaaaaa

SEQ ID NO: 14333 - RNA, 71 nt, Homo sapiens
aagcaaagaaccaggacaaaaaggaaggacccagagagggaccagggccaaagaagagccggggggcaggc

SEQ ID NO: 14334 - RNA, 84 nt, Homo sapiens
ggaggaggaggggaccgccgacaccggagagagaaacgaaggaggcccaaccacaaaaggagccgacggaacccagacggagaa

SEQ ID NO: 14335 - RNA, 83 nt, Homo sapiens
cccagaaagcgacccagcccagcagccagggccaggagggcccgcacagcggagcgaccccaggcaccaagcaaaaggcaccg

SEQ ID NO: 14336 - RNA, 53 nt, Homo sapiens
accgaccccgaggacacaaagccggacagcagcgcccgggccgccacccaacc

SEQ ID NO: 14337 - RNA, 35 nt, Homo sapiens
gaggggaccgacacccaacagggagcacgaggcag

SEQ ID NO: 14338 - RNA, 83 nt, Homo sapiens
aagcaacagcaacagcagcccagaggcaacagcaccccgcggaacagggaacacgcagaagagaacaagaaccgcagccccag

SEQ ID NO: 14339 - RNA, 80 nt, Homo sapiens
acacacagacccaaaagaaaaaaaaagggcgcaaacggcgccccaggccggagagagaagcgccggaagacccgacagcc

SEQ ID NO: 14340 - RNA, 75 nt, Homo sapiens
ccccggccgaggggcggcggccccaggaggcacggcacaaaggcccgacgccggcgaaagacggaaacgagcgcc

SEQ ID NO: 14341 - RNA, 82 nt, Homo sapiens
ggcaccgcggagcaaaaaaagagcccgcaagaagaacagagacagcagccaaacccccaggaaacagaacgacagcccgcac

SEQ ID NO: 14342 - RNA, 71 nt, Homo sapiens
cggacacgaggagaaacagcagaaacgcaccaggccaaagaaagagaagcaaaagacggggagaggaagac

SEQ ID NO: 14343 - RNA, 73 nt, Homo sapiens
agcggaaaagagaacaaaaaaaagaaagagaagcacacaaacaagcagcgaggggggggacagacagcgaggg

SEQ ID NO: 14344 - RNA, 64 nt, Homo sapiens
agaaagcaagacaaagcagccaacaaaggaacgagcagcaacggccaggaaccaggccagggcc

SEQ ID NO: 14345 - RNA, 63 nt, Homo sapiens
aagggccgcacgaaacaaccaagggacaaggagggcaagaccccagaagaggggcagccagac

SEQ ID NO: 14346 - RNA, 48 nt, Homo sapiens
cccccccccccaaggaacaagcgggaaacggagccaccaacaagcggg

SEQ ID NO: 14347 - RNA, 82 nt, Homo sapiens
ccacgaaaaaaccaaacgcagagagacacacaagaagaaaagacgcccccaagagggacccggagaagaaaagcaacacagc

SEQ ID NO: 14348 - RNA, 77 nt, Homo sapiens
aacgagaaggcggaaacagcccgcaaagcgggccaaccacgagcaaacagggaagacgggccaaacaaggcaaggca

SEQ ID NO: 14349 - RNA, 68 nt, Homo sapiens
caaaagaccacaacaggacacaaaaaggagagaagaccacagggagaaacagagagcaggcggaaagc

SEQ ID NO: 14350 - RNA, 75 nt, Homo sapiens
cgggagccaggagccggggcgcgcgggaaaagggggagaccagagcaaaaaaggaccaagcgacgagacaagacc

SEQ ID NO: 14351 - RNA, 86 nt, Homo sapiens
gcgcaccggagagcagccgcgggagcagcgcccacccgacaggaggagcagcagcagcggcgcgggaggcagcgaggggcgcgcag

SEQ ID NO: 14352 - RNA, 73 nt, Homo sapiens
cagcaagacgggagacaaacacaggaaccaagggcaacaggaaggcgcaaggcgaggccaggggccaaaacaa

SEQ ID NO: 14353 - RNA, 128 nt, Homo sapiens
aaaaacggggggagggcaaccaggagacaaaaaccaaagcccgcgggaaacccagacagacgccgaggacgccagcggcccaggccccccccccagcagcgccccagaaccaggagagcgaggaacac

SEQ ID NO: 14354 - RNA, 85 nt, Homo sapiens
cccgccgcggggcgcgcggcgccggcggcgcgcgacccccgcgcaggcacacaggaccccgcgagccagcggcgacgggaacaag

SEQ ID NO: 14355 - RNA, 68 nt, Homo sapiens
caaagacgagaacgaaagccagcgcccgcagggaagcggaaggcccacccgagcacacgacacaccac

SEQ ID NO: 14356 - RNA, 73 nt, Homo sapiens
gcccagcggaaacgacacgaaaaaaccggagagaaagaaagaaaagagcaggaagaagagcaccggcgacaaa

SEQ ID NO: 14357 - RNA, 85 nt, Homo sapiens
agaaccgaacgaagaggaggaaaaggccaaagcgacaagaaagagaaacagaaggagaagaaaaggagggcgaggaggacgacag

SEQ ID NO: 14358 - RNA, 84 nt, Homo sapiens
ggcccgcagcccccgccggccgcccaacaccgaacaccgaaaagcagggaaccagggagaccaggacaaggaacagaaagaccc

SEQ ID NO: 14359 - RNA, 75 nt, Homo sapiens
gaagcaacacgagaaccaccccgacacaacaccaccacccaaagggagaagaaagaacaaagacaaggaacagcg

SEQ ID NO: 14360 - RNA, 41 nt, Homo sapiens
ggcggaaaagcccaaacagggccaccacgggaccccaccgg

SEQ ID NO: 14361 - RNA, 78 nt, Homo sapiens
cagcgcgcggcagaccaccgcaccccgcaggggaagccccaccgggccagccgacaccggacagcggcgggaggcagg

SEQ ID NO: 14362 - RNA, 89 nt, Homo sapiens
gccaaccccgaacggggggagacgccacggaacgcagccgcgcagagggagcgcgcgccggggcggaggcgggcgcgcggcaaggcgcg

SEQ ID NO: 14363 - RNA, 35 nt, Homo sapiens
ggacgcgcgggaggaccccgagagccccccccaac

SEQ ID NO: 14364 - RNA, 58 nt, Homo sapiens
gcccccaggccgcccagcagccgcgccagccaggaaaccaagcacccaaaaggccacc

SEQ ID NO: 14365 - RNA, 66 nt, Homo sapiens
cccagcccaggcggcgcggacggggcggggggagcgggccggagagaagagaggggcgcgaggaga

SEQ ID NO: 14366 - RNA, 71 nt, Homo sapiens
gcccaaaaccggaagcagggaggcccaagcagccccaaaaaacagacaaacgcaggcaaggggcaagcgcg

SEQ ID NO: 14367 - RNA, 73 nt, Homo sapiens
ggagcgagaccggagcgccacggccacgccccccgcaacaacccacaagcgaacaacccagccgccagcccag

SEQ ID NO: 14368 - RNA, 70 nt, Homo sapiens
gcaagaaggacaaaccgagaaagaaaaaagccggcgacaacgagcacaaaaagcaagggcaagagaaccc

SEQ ID NO: 14369 - RNA, 55 nt, Homo sapiens
agaaagaacacacacaggaccaagaaaggcccagggaccaaagcccggacaaggc

SEQ ID NO: 14370 - RNA, 75 nt, Homo sapiens
cccagcacaacagagggacgggagccagaccaggagccaacccagagaaccagggaggccgcagggcaccaccgc

SEQ ID NO: 14371 - RNA, 76 nt, Homo sapiens
gccacggaggaaggaagccggcagcccagcacacaacccccgccaccagagcaggaagacacccacgaggacaacc

SEQ ID NO: 14372 - RNA, 72 nt, Homo sapiens
aggcaaccggagaaaccgcaagagcccagccaagccagaaccaggggcaacagacacagccaccacaaggag

SEQ ID NO: 14373 - RNA, 59 nt, Homo sapiens
ccaacacgccgcgcaggaacgggccgacgacaccagaagggagccacaagaagaaagaa

SEQ ID NO: 14374 - RNA, 64 nt, Homo sapiens
ggcagccgcgaggaggcgcgggagggcgagaacgaccccgagacggcaagcggcaccacgacaa

SEQ ID NO: 14375 - RNA, 58 nt, Homo sapiens
gaaagcccgaaaaccaaagcgacacgcgcgacggaggccgcagggccagaacaacgaa

SEQ ID NO: 14376 - RNA, 73 nt, Homo sapiens
gcggcgcgcgcccagcgccgccccgcgcgcgcccgccacggcgccgagccgcggccgagcacacagagaaaaa

SEQ ID NO: 14377 - RNA, 73 nt, Homo sapiens
cgcacgaccagcccgaacaagacaggaaggaaagagggcaaccgaagaccaacaaggggcggaaaggccaaga

SEQ ID NO: 14378 - RNA, 73 nt, Homo sapiens
gccgcacggggccgaggggagaaaacgcaggccacaaagacaggaccaagaggaaaaaacaaccgccggggca

SEQ ID NO: 14379 - RNA, 74 nt, Homo sapiens
cgcaccagagaccggacccgccaggaacaagacaccaagggaaggaaacacaaaccagcacgaagaaaagccgc

SEQ ID NO: 14380 - RNA, 76 nt, Homo sapiens
gacacaccacaaaaacacaagagaacccaagaaaaggaaacaccacaaagaaacagaaaacaccacgcccaggaag

SEQ ID NO: 14381 - RNA, 83 nt, Homo sapiens
gaacgaacaggaaagaaaaggcaaaaacagaagagaacaaccgggaccgccgcccccaaagccaagacgcaggcagagacgac

SEQ ID NO: 14382 - RNA, 122 nt, Homo sapiens
gcagcaaaagccagaccgaaggccagcccacccgaaggagcagggccaaaaccgccgcggccgaccgcgggccgcgcacccaccgccaaggacaaaaggagcccagcgcacagcgcacccga

SEQ ID NO: 14383 - RNA, 61 nt, Homo sapiens
gacccccacccagccggagcaaccgggaccccagaggaaccgggccgggcagagcgagaga

SEQ ID NO: 14384 - RNA, 84 nt, Homo sapiens
acggagaaaccagcgccgggagcaacgcgccggcccgggacccgaagccggcccaggacccccaggacggggggcccccgcaag

SEQ ID NO: 14385 - RNA, 69 nt, Homo sapiens
ggggagacccggggacccccgacgccaggcagcgcccccaaacgcaaaagagccaacacccaggccagg

SEQ ID NO: 14386 - RNA, 76 nt, Homo sapiens
acacaagccaggcgagcagcgaggcccccagaagcgaaggagaggagcaaccggaagggacaaaagaacaaaaaag

SEQ ID NO: 14387 - RNA, 73 nt, Homo sapiens
ccccgagaacgggaacaggaccccaaaggacaagaaagcagagaggcagccagaagccagcgaagaagcaccg

SEQ ID NO: 14388 - RNA, 77 nt, Homo sapiens
gacggccgcggcaaggcaagagcggcggcgccaaggaccaaagaagccaaccgacacaacagcaagacgcaaggggg

SEQ ID NO: 14389 - RNA, 74 nt, Homo sapiens
gagaagcccacccccgcggcgccgcgccccagaccagaggaaaaggcaccagaagaaagcacgaaagagaaaga

SEQ ID NO: 14390 - RNA, 66 nt, Homo sapiens
aagaaggggaagaaaacgaagagcagacaacaaagacagaagaccacacggagccaaagaagcacg

SEQ ID NO: 14391 - RNA, 74 nt, Homo sapiens
agagcgcgccccggccgccgagcaaacagaggcgccaccacagagccacacgagaagcaacccaggcaccccca

SEQ ID NO: 14392 - RNA, 72 nt, Homo sapiens
caagggggacagccaacaaagagaagagaaaccaagcccgaacgaagcagcagaaggaacacaggcaaaccg

SEQ ID NO: 14393 - RNA, 78 nt, Homo sapiens
cgacgacgaggaagaggaggcgaggagaaaagagccggaagcaaaccccaggaccaaagcaaacacggacgaccaggg

SEQ ID NO: 14394 - RNA, 67 nt, Homo sapiens
cacacaaaccgaaagccaccaaagcaaaaagcgaagagcacaaggagaagaacgccagaacaaacag

SEQ ID NO: 14395 - RNA, 83 nt, Homo sapiens
gaagagaaaaagcaaacgaccagacggcagggaggcacaaaggggaacacagcaaaaagaagccagacaggcaaaggacggaa

SEQ ID NO: 14396 - RNA, 79 nt, Homo sapiens
caggaacagacacggggaagcgcaaaaacaagacggggcgccccacagaggggcgacggagccccgcgccccacccgac

SEQ ID NO: 14397 - RNA, 60 nt, Homo sapiens
gaagggcaaagccgaacgcagcaaaaaaaccgacaggaccaacgaggcaaagcacagagg

SEQ ID NO: 14398 - RNA, 71 nt, Homo sapiens
gagagacagaagccacagcagcaaaacaccgaggaacacaagaagcaaggagccgccacccagcacagacg

SEQ ID NO: 14399 - RNA, 40 nt, Homo sapiens
ccgacccagcaggacagaaaggccggcaaagcaccaggca

SEQ ID NO: 14400 - RNA, 71 nt, Homo sapiens
gaccggagcgccagggccacggcccaccacccggcccccaaaggaccaaaacgcaaccaaggaaaagcgca

SEQ ID NO: 14401 - RNA, 51 nt, Homo sapiens
cccccccggccgcgaggggaggcaagcaggggggcaaaggaaagaaggcag

SEQ ID NO: 14402 - RNA, 81 nt, Homo sapiens
ggccgagcaggcgagcgaacgacggagaagacagaggagccagaccaagagacagcacaggcgagcgagcagagacaccag

SEQ ID NO: 14403 - RNA, 37 nt, Homo sapiens
ccgcgcgcggccggcggggcaggaccgccccgcccgc

SEQ ID NO: 14404 - RNA, 72 nt, Homo sapiens
ggaggacacgggggccacaaagccccccggagacgcaaccaagggaacagggcacaaccaaggagggccagc

SEQ ID NO: 14405 - RNA, 71 nt, Homo sapiens
aaggagacgaaaacaccggaacaaaaggacggcaacaaggagggcaacaacaagcagagacgcgacaaaga

SEQ ID NO: 14406 - RNA, 75 nt, Homo sapiens
caggccaacggcgagcgcccaacacaccagcgagcgcccaggaaccgccagaaccacacccaggacggggagcca

SEQ ID NO: 14407 - RNA, 39 nt, Homo sapiens
gcccccaagagccaggaacagaggagccgcccgcaccca

SEQ ID NO: 14408 - RNA, 73 nt, Homo sapiens
acaagaggggacagaaagagcaaagaccaggggacgaaggccgcagacgaaggggaaagggaagcaagagcca

SEQ ID NO: 14409 - RNA, 69 nt, Homo sapiens
aggaggagaaaccgcggcaacgagccacgcagagccgagcggggcccgagccaggcgaaggcaacacaa

SEQ ID NO: 14410 - RNA, 64 nt, Homo sapiens
agagcccccaaacagcaagcgaaacccgaacaaaggccaggccacacaagccccagccaaaacc

SEQ ID NO: 14411 - RNA, 71 nt, Homo sapiens
ggcggagggggacacccgggcggggcagagcagcccccagccagccgcgagacaggaagggaaggggcgga

SEQ ID NO: 14412 - RNA, 58 nt, Homo sapiens
aagccacaaaaggggagaggcccaggaggacagaccagcaagaaagagcgccaaacac

SEQ ID NO: 14413 - RNA, 42 nt, Homo sapiens
cggcgcgcaggcacccgccccagccaggcccaaggccggaac

SEQ ID NO: 14414 - RNA, 80 nt, Homo sapiens
gccagcgcaacgggacgggaggacacgccgaacacccaacaagaaggcaacgacaaacagccaagcaagccccagggccc

SEQ ID NO: 14415 - RNA, 45 nt, Homo sapiens
ggggaagaaccacaggaaggacacggacacaggaagggccggccc

SEQ ID NO: 14416 - RNA, 80 nt, Homo sapiens
cccggacccagagggcggaaccgacacggcagacaggaacggcggccaaagcgccagacaagggccgagccccggagagc

SEQ ID NO: 14417 - RNA, 74 nt, Homo sapiens
gcgagaacccgaggaaagcagcaacaaagaaaaccaccgaaagcgcggcccgcgagcaagaaggaggccccacg

SEQ ID NO: 14418 - RNA, 84 nt, Homo sapiens
cgggaccacaggccccggcccagaggagcgcccagccgccccccgcgcgccgcagaagcccccacgcgcccgggcccccaccag

SEQ ID NO: 14419 - RNA, 72 nt, Homo sapiens
aggcgccccagcaaaagcacgcgccaccaggacaaaggaacggggaggcgagcccacacgccagcgggaacg

SEQ ID NO: 14420 - RNA, 79 nt, Homo sapiens
gaaagacagaggagacgaaagaaaaaacagaaacagccaaccaagaacacacagggggcccccgcagaccccgcaaggc

SEQ ID NO: 14421 - RNA, 92 nt, Homo sapiens
caaagaaaaccaaaacgcaacagaaacaacagggaccaagaaaggcccagggaccaaagcccggacaaggcccgagcaccaggaccgcagaa

SEQ ID NO: 14422 - RNA, 52 nt, Homo sapiens
aggaccgagccgacgcgggccgcgcgggcgacagcgaccgaagaacagagcg

SEQ ID NO: 14423 - RNA, 51 nt, Homo sapiens
agccgacgagacagaccccggccaccgggagcaggagagggccagaagaca

SEQ ID NO: 14424 - RNA, 72 nt, Homo sapiens
cgacacaaaaagagcgaaagagagagagccaacaagagccagacaaacagcaaaccagccagcacgggggcc

SEQ ID NO: 14425 - RNA, 75 nt, Homo sapiens
cccacccgcccgcgccgagggcggaggagcgcccggggccggaaacagagggaggaccaagccacagggggccca

SEQ ID NO: 14426 - RNA, 78 nt, Homo sapiens
gagaacgaagaggcagagagcaaagaacccccaagcaggaagaaacgggagcaggagaagaagccaggggcagagcgg

SEQ ID NO: 14427 - RNA, 84 nt, Homo sapiens
ccaggccccgccgaggcggccagaaccacacgggaagaccaacaaaggcacacccaggcggagaaagcccacacaaccccaacg

SEQ ID NO: 14428 - RNA, 75 nt, Homo sapiens
ccccccacccaccaaaccggagggggaaaaaacccaaggcgcaaagccgagacgggccccaagaaggcaaaccgg

SEQ ID NO: 14429 - RNA, 57 nt, Homo sapiens
ccaaaccagcagcacaacagggaccgggagaggggacgaaggcgaaccagcaagaca

SEQ ID NO: 14430 - RNA, 77 nt, Homo sapiens
ggcgcgaggagacaccgcagagcccccgcccacagcagggcaagcgggcgaagacagggcgcggcgagccggaccca

SEQ ID NO: 14431 - RNA, 71 nt, Homo sapiens
agacgcggcggcgcggcgccggcggagggaagaagacggcgaagcaccaacgccaagggacagcaaggaca

SEQ ID NO: 14432 - RNA, 64 nt, Homo sapiens
aggaagccacggcagacacacaacccgacccgacgagggacccaagaacagggaggaaagcaga

SEQ ID NO: 14433 - RNA, 61 nt, Homo sapiens
gaaccaacccccaaaggcgggacaggggaggcaagcaggggggcaaaggaaagaaggcaga

SEQ ID NO: 14434 - RNA, 68 nt, Homo sapiens
aaagccacagcgaaacgacaaaggggagaaagaaaacacgaaacaggaaagaaaggaaaaaaagcaag

SEQ ID NO: 14435 - RNA, 80 nt, Homo sapiens
cggaccaacagagagaaagccagaaaggagcagcagggaagaccaaagcaagggaggagaagccagccccgcggcgggcg

SEQ ID NO: 14436 - RNA, 71 nt, Homo sapiens
aaagcccgagggagcagacaagggagcggcgaccagaaaacaagggcgaccggccaggggacagcagcccg

SEQ ID NO: 14437 - RNA, 78 nt, Homo sapiens
acggagcagcaaggaaaaggaaaccgcccgcccccaggcaggcaacgaacccccggcagggccacgcgaccgaacgcg

SEQ ID NO: 14438 - RNA, 73 nt, Homo sapiens
ccaccccgccagcacccggcgagacgacaggccaagggccgcgaagaacacgagacccgagcagcccaacccc

SEQ ID NO: 14439 - RNA, 73 nt, Homo sapiens
aagaagaacccacaggggccaacagaggaaggggcccacccccaagcagcaggggaagcagggaagcacggcc

SEQ ID NO: 14440 - RNA, 72 nt, Homo sapiens
ggcggcaggcaaaccccgccagggccaccagaaacgagcaaagcagagaagagcgaaaacagaaagaacgga

SEQ ID NO: 14441 - RNA, 72 nt, Homo sapiens
gagagccagccacagcccagagaccagaaggagggccagaccaggacggcaaacaccccagcaggcagagca

SEQ ID NO: 14442 - RNA, 71 nt, Homo sapiens
ggaaggcacagggagccaaaggaagacacgcaaaggaggcaagaacaacgcagacagaaaaccccgcacaa

SEQ ID NO: 14443 - RNA, 68 nt, Homo sapiens
ggagagcggggaagggggaaaggcaccaggacaagcaaagcacgcagcagagagcaaaagaagacgcg

SEQ ID NO: 14444 - RNA, 74 nt, Homo sapiens
gaggaaccaagccaaccaaaaaacaagacgacaacaagagacagaaagcaccgggaggaaagagagccacacga

SEQ ID NO: 14445 - RNA, 73 nt, Homo sapiens
cgggcggcggggaccgccagcccagcgaccagcagccaaggccgacaaaaccggccgggaagcaagaaaccga

SEQ ID NO: 14446 - RNA, 61 nt, Homo sapiens
cccggggacccccgacgccaggcagcgcccccaaacggacacagcaggggccagacaacca

SEQ ID NO: 14447 - RNA, 86 nt, Homo sapiens
gggcggacccccggccgcagccaggggacccgcgggcagcaggggggaggcaaagaaagaagcccggaaacgggcggaagccagcc

SEQ ID NO: 14448 - RNA, 77 nt, Homo sapiens
agcccaaggcaggcaaagagagagccgaagaggagagaaacagagaagacaagagagaggagcagaacaaggccaca

SEQ ID NO: 14449 - RNA, 78 nt, Homo sapiens
caccaaaccaagaggcggccagcaggaggcgagaaggagagagagaacccggcgagaggaagagagagagacagaaga

SEQ ID NO: 14450 - RNA, 76 nt, Homo sapiens
aaagaaagggaagagacacaagccccgcagcaccaggcccacaaaaggacacggcgggggccagcggccggacacc

SEQ ID NO: 14451 - RNA, 65 nt, Homo sapiens
cagacaggagaccagaggggagccaggacaacacacacaaagaggcagaaaaagaaaacgggaac

SEQ ID NO: 14452 - RNA, 77 nt, Homo sapiens
cggagccgggccgcagcgcgaggccgggccgggggagaccgcaggcggaagggaaagaacgcacaacacccgaacaa

SEQ ID NO: 14453 - RNA, 62 nt, Homo sapiens
aggccgaggcggcggcgcgaggcagggaggaggacggacaccagccgagagccacggggcca

SEQ ID NO: 14454 - RNA, 82 nt, Homo sapiens
caaaggcggaccgacaccacgacgacgggccacagcagccggcggcggcagagggggccggaggacgcggggaaccagaccg

SEQ ID NO: 14455 - RNA, 55 nt, Homo sapiens
caagcaaccggcgacaaagaagagcagcccaggggggagaggaggcaagaaaaga

SEQ ID NO: 14456 - RNA, 76 nt, Homo sapiens
aagcaaagggagagaaaggaccaccagggcggccacaacacagggggagcgggccggagagaagagaggggcgcga

SEQ ID NO: 14457 - RNA, 69 nt, Homo sapiens
ccggcacacagggacagccgcaaccggaccggcggcgaggagagacggaggcccaacggagaaacagag

SEQ ID NO: 14458 - RNA, 73 nt, Homo sapiens
gacacaaccgacccgccaagcgcacacaaaagaggagaaaaccgggcgcagccagcgcggcgcccaggcggag

SEQ ID NO: 14459 - RNA, 93 nt, Homo sapiens
cgcggccggcccggccccccgcgcacggccagcgcagccaaaccaaacaggaagcacccaccagccaagagcaacagaacagcaagaggaagg

SEQ ID NO: 14460 - RNA, 43 nt, Homo sapiens
acccaccgggcgccgccaaagaaaccaacccgggaccggcaga

SEQ ID NO: 14461 - RNA, 79 nt, Homo sapiens
ggcgcgcgcccgcgcgcgcggcgcagacgggagagaagcgccggccggaaagaagacggggaggagcaggacgagccca

SEQ ID NO: 14462 - RNA, 53 nt, Homo sapiens
cgccacaaggcagagcagcgaggccccagcaggaggacccgccggaccagcca

SEQ ID NO: 14463 - RNA, 74 nt, Homo sapiens
cggcccgggggcaggggaggagacgagggggagccccccagacccgaaaggagacaagaggacagccgcacgga

SEQ ID NO: 14464 - RNA, 35 nt, Homo sapiens
caggccgcgccaaccagccaaaacagcagccggac

SEQ ID NO: 14465 - RNA, 39 nt, Homo sapiens
ccagggcaacccagacgccgccacaccaccacggcagca

SEQ ID NO: 14466 - RNA, 91 nt, Homo sapiens
cacccgggagccgccggcaccgccggaaccggcgcagagccaggacaaaaccaggcagaaccaacacgaacccaagcacaaacaagaaaac

SEQ ID NO: 14467 - RNA, 79 nt, Homo sapiens
gaggacgacaccgaccccgccgagcggcgggagcggcgacaagccacacaccaaacccagaacaggaagagaaagacac

SEQ ID NO: 14468 - RNA, 90 nt, Homo sapiens
ggcggcgcggggcccccagaaggacgccagcggagaacgcggcaaagcgagaacgccaaaagacgaacacaaagggaaagaggagaggca

SEQ ID NO: 14469 - RNA, 76 nt, Homo sapiens
ggggagcccaaacgaaaagagaagacacgcagaaaaggacgggacacggagaggcgcgggaggaaacggaggcgcg

SEQ ID NO: 14470 - RNA, 82 nt, Homo sapiens
gcccaggccgcccgacccaaagggaaaacagaaacagaagggacacaaaaggcccgggaaaccgcaagaccgcacgcgccaa

SEQ ID NO: 14471 - RNA, 68 nt, Homo sapiens
ccggccaaacggccagacgccgacgcgaccagcagagacggggcaagggaagccccagacaaggagcc

SEQ ID NO: 14472 - RNA, 78 nt, Homo sapiens
caccacagccgcggcaaggaggaagccagccaggcccacgaggcccagagaacaccaggccagaccgggccagggccg

SEQ ID NO: 14473 - RNA, 78 nt, Homo sapiens
ggcgcccggagggcagcgagaggggaaccacgacccaacaaaaaacggaaggaaaagggagcgaacccaccaaagcag

SEQ ID NO: 14474 - RNA, 84 nt, Homo sapiens
caacgagccgcagagagccggacaaaccagacacgggaggacaaaaacgcggaggggaccagagaccaaaaaaaaaacgcgaac

SEQ ID NO: 14475 - RNA, 77 nt, Homo sapiens
ccggcgacaccggccggcgcaggccaccaagcggacccgccggggagagcccagcagggggaggacagaagagagac

SEQ ID NO: 14476 - RNA, 64 nt, Homo sapiens
gcggcagcgcggacaggggcagccgcacaagggcgcacagagcagccggagaccacacaagggg

SEQ ID NO: 14477 - RNA, 75 nt, Homo sapiens
cggagacggagcgccgcgcccccaccagaggggaaagaaaaagagcccaccaaaaggaacagacggccccaggcg

SEQ ID NO: 14478 - RNA, 38 nt, Homo sapiens
ccccagagcgggaccacaggcagccagccacagagccc

SEQ ID NO: 14479 - RNA, 80 nt, Homo sapiens
ccaacccccagccagggcaccacaaaaggaagaacccagccagggaaggccaagaaagcaccgggaggaaagagagccac

SEQ ID NO: 14480 - RNA, 70 nt, Homo sapiens
cagaggaacggggcaacgcgagcagaacagcccagcccaacccagaccaacaagcagcaaagaggaccgc

SEQ ID NO: 14481 - RNA, 81 nt, Homo sapiens
gagagcccacgagcgaggccgcaggggagcccggcagccgcccggaaagagggggcagacccggaagccgaaccaacggag

SEQ ID NO: 14482 - RNA, 33 nt, Homo sapiens
acaccgggaaacggagagacggggcaccagagc

SEQ ID NO: 14483 - RNA, 71 nt, Homo sapiens
cagaaagaagaacagggaagaccagcaacaaacaagacggaggaagcagggaccaggcagacgaccaagga

SEQ ID NO: 14484 - RNA, 62 nt, Homo sapiens
cagcgccccacccccggcggcggcacgagcccgaccaggaggaccaaccccgcccccaccgg

SEQ ID NO: 14485 - RNA, 39 nt, Homo sapiens
gcaccaggccccgcccggcacaagagacaggaccacggg

SEQ ID NO: 14486 - RNA, 78 nt, Homo sapiens
cacgcagcaggggcggggggcagcagagggagagacaagccaacgagaagagccccgagccacggagaagcagaccaa

SEQ ID NO: 14487 - RNA, 78 nt, Homo sapiens
gcggagccacgcaccgaccaagcggggcagagaagccagggagccacacaaaggccagacccagagccaggaagggcg

SEQ ID NO: 14488 - RNA, 89 nt, Homo sapiens
gggccgggccccaccggacggaagcaggccggggaccaaggggacgcggagcggacggcggaagggcccaccacgcggccgagacgcgg

SEQ ID NO: 14489 - RNA, 50 nt, Homo sapiens
gggggaaagaagccaaaggaagaggggagcggaggacagaaaagacaaag

SEQ ID NO: 14490 - RNA, 69 nt, Homo sapiens
gcagaagcgcgcccagaacggacgcgagaacagaaacagcgaaccagcaggacaggggaacccaccagc

SEQ ID NO: 14491 - RNA, 80 nt, Homo sapiens
cgccaccgcaggcgaggacggcggaccccgcggcgggaggagccgccccgagaccaggcaaaagaaaccaccgacgaagc

SEQ ID NO: 14492 - RNA, 76 nt, Homo sapiens
ggagaaagccgacaaaggagagggagaggacaagacccaggaaacagaacgacagcccgcaccgacgccggcggcc

SEQ ID NO: 14493 - RNA, 80 nt, Homo sapiens
acgcgacggaaaggcacgaaagccagcgaagcgccccgggaggcaaggggccaacacgccggcagggcagcagcgcggga

SEQ ID NO: 14494 - RNA, 74 nt, Homo sapiens
aggagaacaaaaagagacaaagccaggcaccggcaagaagacccaccccagcgggcgaaagcagaggaaaaaaa

SEQ ID NO: 14495 - RNA, 104 nt, Homo sapiens
cgagggggaggagacgcgcggggcgggccgccagcggggacaggcagcgcagccaccggaagagaaaaccaagaacgacagaggggcaaaaaaaaaagccaaca

SEQ ID NO: 14496 - RNA, 87 nt, Homo sapiens
gcggagggcgcccggcgaggagcgccaggcgagccacccggggacacggcaccaggcggccagcgcaagacccgaacccgagaaccc

SEQ ID NO: 14497 - RNA, 83 nt, Homo sapiens
cgcccgcgccacagccaccagagccggcagcaaagagggaacagacagaagcgaaggggacagggggagaaccgccagggaaa

SEQ ID NO: 14498 - RNA, 68 nt, Homo sapiens
gaaggaagaggcaccgccggagccgccggaagggcgcccgcagccccccacggaaccgcgggagcgac

SEQ ID NO: 14499 - RNA, 75 nt, Homo sapiens
cggcccacaccacaaagcccccgccacggaccggagaggcagcgagaagaaaaagaagagagagacacggacaag

SEQ ID NO: 14500 - RNA, 50 nt, Homo sapiens
cgagaacagaagaaagaagacaaaaagccagcgagaaccagccaaaacac

SEQ ID NO: 14501 - RNA, 60 nt, Homo sapiens
ggccggggaagggccaggccgggcagccgccgacgagcaggcccagcacgacagagaccc

SEQ ID NO: 14502 - RNA, 84 nt, Homo sapiens
cggcagccgagcccgcccgcgcgccgaccaaacccgacgacagggacaccacccacccagcccacaagggcacacgcaaggcga

SEQ ID NO: 14503 - RNA, 79 nt, Homo sapiens
aggccgaggggcggacgcggccggggacccgaagaggaacccgaaggcagcaaagaaaagggagcacgggacccagggc

SEQ ID NO: 14504 - RNA, 40 nt, Homo sapiens
aaaagcgaaccaagaaacagccaagaaaccaccaagaaag

SEQ ID NO: 14505 - RNA, 70 nt, Homo sapiens
cgacgcgggcgcgagggcagaaccggggcgccgaaaaaaacagcaagaggacaaacaaggcgacaagaac

SEQ ID NO: 14506 - RNA, 78 nt, Homo sapiens
cgcgggcgcccgaggggccgagcgaggacccaaagacaggaccacgcaccagcagagaaggaaagcaaaccgaagcag

SEQ ID NO: 14507 - RNA, 74 nt, Homo sapiens
gacccacccgggggggcagcgcacggaggagcggcgggccagacagaaaggggaagagcgaagaccgccccagc

SEQ ID NO: 14508 - RNA, 49 nt, Homo sapiens
ccggcccggccgccgcgccagacccaagccccgggggggaccacgcagg

SEQ ID NO: 14509 - RNA, 73 nt, Homo sapiens
cgagcgcaccggagggacggcacagggaggccagccggagaagcgagcagcgaacgcaaggagggacaggacg

SEQ ID NO: 14510 - RNA, 59 nt, Homo sapiens
caagagaaagaagacacagaaaaagagagacgcgaccagaggaaggcggggaggcggaa

SEQ ID NO: 14511 - RNA, 74 nt, Homo sapiens
ggaagcccccccggcacgacaccgccccaacccacgagaggacagcccaggcaggcaggggcagaaggcgaccc

SEQ ID NO: 14512 - RNA, 71 nt, Homo sapiens
cccacgggaacaagaggggacagaaaggacacaggaacgccacaagaaacaacagcaaggcgagggccacg

SEQ ID NO: 14513 - RNA, 68 nt, Homo sapiens
caggcagaccccggggaagagccccaaggagaagaagcaggcacagaccccaagaagacccagcggac

SEQ ID NO: 14514 - RNA, 64 nt, Homo sapiens
aaaaagggacgggcggacaggacgaagaaacagaagccaacaaacagccacgccgaagggaaaa

SEQ ID NO: 14515 - RNA, 52 nt, Homo sapiens
gagaccagagcgccacggacacggccccccgggccccgacggcagcccaccc

SEQ ID NO: 14516 - RNA, 53 nt, Homo sapiens
cacacggacccgagagaaagaaaacgcacaggaacgccgcgaccaccggggag

SEQ ID NO: 14517 - RNA, 77 nt, Homo sapiens
gaagcaagccaaaacaaccaacgcagacacaaagggagcgcacgagaaagggggggaccgaaccaacggcgacgaaa

SEQ ID NO: 14518 - RNA, 76 nt, Homo sapiens
ccacccagacgcgaacaggacacccaagggaccggcacaaacgcgagaagacggccaggaggcagcaacacagaga

SEQ ID NO: 14519 - RNA, 75 nt, Homo sapiens
aaccaaagaaacagaaaaagaaaacaccaaggggagcgggaagaagaagccaagaaccccaaaaccaagacccag

SEQ ID NO: 14520 - RNA, 69 nt, Homo sapiens
cgaacagagaacccaagacagccaagagagaaaaccggaagagaaaggccgggaagcaggaaagaaaaa

SEQ ID NO: 14521 - RNA, 77 nt, Homo sapiens
cccgaaagcgggacgggcgaccaggaggcaaccagaggccaggccagagacaccccaagccgcagacccggaaccgg

SEQ ID NO: 14522 - RNA, 79 nt, Homo sapiens
gcccccacccagacggacacgggagggaaagagagcgaggagacggcgaccgacaacgaggacgcacaccgagacgaac

SEQ ID NO: 14523 - RNA, 81 nt, Homo sapiens
accggcgcgcgggagcgcacggccccaacggggcaagacggaagcaaggcaaaggaaagaccgagcggcgggagcgaagcg

SEQ ID NO: 14524 - RNA, 61 nt, Homo sapiens
cgaggccaaggccccaggacaggcgcgcggagccaggacagcggagcagcgcggaccccgc

SEQ ID NO: 14525 - RNA, 79 nt, Homo sapiens
gcggccagggcaggaaacaagcaacccaaggagacggcgcgggggcggagagggaaagagagcccagcagaccggcccc

SEQ ID NO: 14526 - RNA, 73 nt, Homo sapiens
caagcaagcaaggacacacgggcgaccccccacggcgcgcccccgaaacgagacgaacaagagaccccgcgag

SEQ ID NO: 14527 - RNA, 85 nt, Homo sapiens
gagaaggggcgccgcgccgcgcccgcggcaaggcagccgcgcacggaagaaggcacacaggcccgagcacaaacacaagaaacgc

SEQ ID NO: 14528 - RNA, 74 nt, Homo sapiens
cagcggccccggcggggcaagagcgggggcgggaccccgccgcggcgggaggggcggagaacggaaaagcacca

SEQ ID NO: 14529 - RNA, 74 nt, Homo sapiens
cagcaggacaggaaaaaaagaggccaagaagccaccaccagcacccaccccccagccaccgaccccagaccgaa

SEQ ID NO: 14530 - RNA, 73 nt, Homo sapiens
aaaggagaaccccacaccagaacccagaaacagacccggacagaaccggcagccgagcagcagccgccccgag

SEQ ID NO: 14531 - RNA, 73 nt, Homo sapiens
agaacaggggagaaaaaaaggcaggcacagaacgaaccaaaaaggaaaggacccacaaagacagaaagagaac

SEQ ID NO: 14532 - RNA, 72 nt, Homo sapiens
ccccgccccggccaggccacaggcaccgcgcgccgcgcccccccaccagccccgccgggcgggggcggccac

SEQ ID NO: 14533 - RNA, 52 nt, Homo sapiens
gcggcgggccacgcgcgacgccgcgcgaggggcggccaggggcaagcaccac

SEQ ID NO: 14534 - RNA, 110 nt, Homo sapiens
cacccacccacgaagggaggaaaagggcagggacagcgcaggcagcaggggcaaagaaaaaggagagaaaaagaggcaaaacaacaagaagaaaagagaaaaaagagagc

SEQ ID NO: 14535 - RNA, 67 nt, Homo sapiens
cccgagagcgggagcagaagcaacggggcaacagaggggcacaaacgggaaaaaaagagaacagcga

SEQ ID NO: 14536 - RNA, 71 nt, Homo sapiens
gacgaccgaaccccccgggcacagggaaaggggagggggccagaagcgggccaaaggagaaacaagaagga

SEQ ID NO: 14537 - RNA, 66 nt, Homo sapiens
ccgagaagaccggcggccaacacagccacggacaggacaggaagagcacccaagcgcaagcaaaag

SEQ ID NO: 14538 - RNA, 47 nt, Homo sapiens
caagagaaacaccaaacaagaagcaaacacaccacgggagacgggga

SEQ ID NO: 14539 - RNA, 85 nt, Homo sapiens
gggaggaagaaggagaaaaaccgcaagaaaccacagggcgacacccagggcaaagaaggcgacacacaacaacaggacaacccca

SEQ ID NO: 14540 - RNA, 46 nt, Homo sapiens
ggaagacgcagaggaaacggcagcagaacggagaggcgccacccca

SEQ ID NO: 14541 - RNA, 72 nt, Homo sapiens
cagccgcgcgccgagaagcacccgcgacccagaaggaaaaacgggccgagaaagcgagcgaaaagaagaaca

SEQ ID NO: 14542 - RNA, 79 nt, Homo sapiens
gcgccacgcgagaacagagaagggagccaagcggagggagaacgcaaggcgccaggggagaggaggcagaaggagaccg

SEQ ID NO: 14543 - RNA, 81 nt, Homo sapiens
cggggccacgcgcgggcccgggccaggccgccgccgagccgaggcgagaacgcggacaagcaaacaaagaggaaaaagagg

SEQ ID NO: 14544 - RNA, 79 nt, Homo sapiens
gcagaccaccaaacccaggaggagacccccggaaaaccccccccggagagcccgcgagccagaccaacacggagcagga

SEQ ID NO: 14545 - RNA, 71 nt, Homo sapiens
ggaccaaacacgaagagacaaaagagggacacgcaggcacaccgacagagaacccaggccaacacacagac

SEQ ID NO: 14546 - RNA, 38 nt, Homo sapiens
cgcgcagcagcagaggagaccaggaaaccacacacaga

SEQ ID NO: 14547 - RNA, 75 nt, Homo sapiens
aggggcgccggcccgaggccgcgcgcggcgcccgcggggcacacacgcagggcccgcgaggcagccacgcgaagg

SEQ ID NO: 14548 - RNA, 67 nt, Homo sapiens
cgccacgaagaacagcagcaagaccccccgggaaccacccgcgcccccaggcgagagagacagccgg

SEQ ID NO: 14549 - RNA, 72 nt, Homo sapiens
ggagcacggcgagcagccaggccaggagagaacaacaagacggccgaagggcaccgaaacagaaacagccgg

SEQ ID NO: 14550 - RNA, 51 nt, Homo sapiens
gaaccgccccgagaggaaacacccccagaagaggaagaagagagggcgaag

SEQ ID NO: 14551 - RNA, 76 nt, Homo sapiens
gagacacgcagcggcggccagggaccaggcaccacacggcaacaggcgacgggcggccaacacacagacgcccaga

SEQ ID NO: 14552 - RNA, 53 nt, Homo sapiens
gaggaagagaacacccaccggcacaacacacaaaggccggaaggggagcaaag

SEQ ID NO: 14553 - RNA, 72 nt, Homo sapiens
gccaggagccacgaggacgccaaccagccgcggacgacaacggaacaccagcacgccaacaggccacccccc

SEQ ID NO: 14554 - RNA, 56 nt, Homo sapiens
gacaccaagaggagagaagaacaaccggacaacaggcccccccagggaagaaccac

SEQ ID NO: 14555 - RNA, 75 nt, Homo sapiens
acagagggcacacggcacagaccaggcccaaaaacccagaacagaagacaaagagaggagccgaaggagaagcag

SEQ ID NO: 14556 - RNA, 72 nt, Homo sapiens
gcaggaccggggcccggcacccggggagaaccggcgccggggcggacgcacccaaacaacggcaagcggaga

SEQ ID NO: 14557 - RNA, 59 nt, Homo sapiens
caccacaccgagcccaagcggaaagcacgcgcacagagccccccgccccccccgcagcg

SEQ ID NO: 14558 - RNA, 71 nt, Homo sapiens
cggggcgcgaggcgcgaggcgcaggacccaccggcccaggggaacaagagaaggcaccccggaccacacca

SEQ ID NO: 14559 - RNA, 83 nt, Homo sapiens
gaagggcggcgccggcagcggacagccggacagcgcccagggccggagcccgagcccggagccgacgcagcgaaaggagaccg

SEQ ID NO: 14560 - RNA, 69 nt, Homo sapiens
ggggcacgagcgccacaaccccagggcggagaacggaaaagcaccaggaagcagagaggaccgcagaag

SEQ ID NO: 14561 - RNA, 72 nt, Homo sapiens
gacaacccccaccagaccaccgccccaacccgagggacgcaaagaagaaaaagacgaaacgggagccgcaga

SEQ ID NO: 14562 - RNA, 56 nt, Homo sapiens
accaccagcagcccccagagcggaacacaggacagggcagaccgccagcagcacag

SEQ ID NO: 14563 - RNA, 40 nt, Homo sapiens
cccggaagagcgcggccgaagaacagagcgggagagcccc

SEQ ID NO: 14564 - RNA, 63 nt, Homo sapiens
gaggcggcggcgcccggagggcagcgagggccaaccgccccccagcagcaggcacgggcgaac

SEQ ID NO: 14565 - RNA, 86 nt, Homo sapiens
accggaagcaccccggcggccgcggaagcggggcgcacaccaccggacaaccgacaaaaagagacaagagagacaccccaaccgac

SEQ ID NO: 14566 - RNA, 71 nt, Homo sapiens
gggacggagcacaaacggaggaaacgacaaaacggaggggacagggaaggcagacaacagcggcgaaagcc

SEQ ID NO: 14567 - RNA, 65 nt, Homo sapiens
aaaccagggaaaacagccacggaaagaagaccaggccccccccacggaaacacgaggcaacaaaa

SEQ ID NO: 14568 - RNA, 67 nt, Homo sapiens
gagagaacccgccggcacgacggcacaaggggacaaagacccaagcgaccaccacaacgcagaaacc

SEQ ID NO: 14569 - RNA, 84 nt, Homo sapiens
aggacggccacgcccacggccggcgccgaaaagccaaaacagagggagacgagaaaagggccgagcacaagccaagaaggcgcc

SEQ ID NO: 14570 - RNA, 79 nt, Homo sapiens
gagcacagcggaacaaccacagccacccaggacccaggaaaaccaaggagaggacacgccagcagggggaaggaaacga

SEQ ID NO: 14571 - RNA, 72 nt, Homo sapiens
ggacagcagggaggcgggacgcggagcggacaaaagcggggaaaaaacagcaggacccaaggaaaagaaacc

SEQ ID NO: 14572 - RNA, 76 nt, Homo sapiens
aaaaaagggacgacagcaagcaaccaagggaccagaacgagacagaagagcgcaggcaaacgacaaaaagcagcaa

SEQ ID NO: 14573 - RNA, 71 nt, Homo sapiens
ccgggaggcagggcaccacagagcaaagaacaccacacaacaacacaaaggcgagacgccaggggcagaag

SEQ ID NO: 14574 - RNA, 84 nt, Homo sapiens
ggcagagcaaggggcacgcagaaggaccggccacgagcgaagaagcaggggagaggccgagcgaagaaccagcggccaaggagg

SEQ ID NO: 14575 - RNA, 64 nt, Homo sapiens
gaagagagggagagaacaaccagcggaaggaaggcaggcacaaggcgcggccaacagagacagg

SEQ ID NO: 14576 - RNA, 73 nt, Homo sapiens
gccaagcagccccgcccagccccaaaggcggaaacagggggaaccgagagacacaggggcacaagacgggaca

SEQ ID NO: 14577 - RNA, 79 nt, Homo sapiens
ggccgccggggccgccaggagcccgaccgggagaggacaagaccacgagccaggccagccaaggacggcaacggggaga

SEQ ID NO: 14578 - RNA, 77 nt, Homo sapiens
ggcgcaaaacaggaccccgcggagaccccgagaaaccgccgaccaagagcgaagcgacgcgccccaggaccgcgacg

SEQ ID NO: 14579 - RNA, 70 nt, Homo sapiens
gcagggacagcgcaggcagcaggggagcccggggagcaagaagggaccacaggaccacaccagaaaccgc

SEQ ID NO: 14580 - RNA, 139 nt, Homo sapiens
ccgggccaggacggggcggcaggcgcccgcggaccgagccgacggagccggaggcgggagccgcggcggccgggacccgccccgccacgagaacacacccccaggcggagaaaaaagagaagccaggaaagagagcgag

SEQ ID NO: 14581 - RNA, 48 nt, Homo sapiens
aggccaagcaccgaccgggggggagccgcacgacccgaacgccagaga

SEQ ID NO: 14582 - RNA, 63 nt, Homo sapiens
gcaggcgccaaggccagcgggaaggggaggcagcaagggcacgggcggaccacaacagcccga

SEQ ID NO: 14583 - RNA, 51 nt, Homo sapiens
cagggcaaaccagaaagacggccaaggcccagcgacaaagagcaaggggca

SEQ ID NO: 14584 - RNA, 80 nt, Homo sapiens
gcgccaccggagagaggccgcgccgggcagaggccggggaagcccgcagaggcacagcgccgcgcccgcgcgccgcccgc

SEQ ID NO: 14585 - RNA, 40 nt, Homo sapiens
cccccaaaggcggggacaggaaacggagaggcgggcggac

SEQ ID NO: 14586 - RNA, 74 nt, Homo sapiens
gacagaacgaacaggcaaagcccaaaaggcaaggcacaagaagaaggaaccagcaaagcgccacgaagcacaag

SEQ ID NO: 14587 - RNA, 87 nt, Homo sapiens
gcaacaggggcgagaaagggaccgaggaccggaagaagcagaggagccagacaggaggaagacgagacagaaagcggaaagagaacg

SEQ ID NO: 14588 - RNA, 77 nt, Homo sapiens
cgcgaaggcacgagcggagggagaacaagaacgcagggaaagacaaggagccgggccgagaaaccgaaccagagacc

SEQ ID NO: 14589 - RNA, 72 nt, Homo sapiens
gccaagaccccacacaaagggaaacgggcccagagccgccaagaagcagacagaagaccgggaaaaggaaag

SEQ ID NO: 14590 - RNA, 92 nt, Homo sapiens
aaccccaccggagaagcgaagacacaccacaggaacccaagaaagcggagaaccgaacaacggccgcgaccagaaaaaggcacggaggccag

SEQ ID NO: 14591 - RNA, 72 nt, Homo sapiens
cagacaccaggaggaccagcagcaaaagaaggagggccccaggaaaggaaaaagccgaaagcagcccgaagg

SEQ ID NO: 14592 - RNA, 72 nt, Homo sapiens
aagaagcccgaggcgcaagagacaaggcggagaacggaaaagcaccaggaagcagagaggaccgcagaaggg

SEQ ID NO: 14593 - RNA, 86 nt, Homo sapiens
ggacccaccgaaaacgggccgagagacgggcagaaagacaagcaagggcaagaccacaccccaagcacagccaaccgagcccgagc

SEQ ID NO: 14594 - RNA, 111 nt, Homo sapiens
cgggggaggggagcccgcgcccgccgcgggagagaggacccccccccccccccaagccgaaagcaggaagccacggaagaccagcagacaagcagacaaccaagaggaaca

SEQ ID NO: 14595 - RNA, 58 nt, Homo sapiens
aaaaaagcagaaagcagaagaaaacgaggccaaaacaggaagacaaaaaggaccaaga

SEQ ID NO: 14596 - RNA, 56 nt, Homo sapiens
cacagcacgggcagagccagagggaacagaaagaggaaagaacaaaggaaaagggc

SEQ ID NO: 14597 - RNA, 72 nt, Homo sapiens
ggaccgcggaaaggagggcggcccggaccgggagacacggccagacgcccccaccaagagaaaccaccaaga

SEQ ID NO: 14598 - RNA, 85 nt, Homo sapiens
cgcgccgagcgcacgcccgaacgcgaggccaacagccccggaccgggcaagcggaaagccggaagacgccacacgcggggagaga

SEQ ID NO: 14599 - RNA, 92 nt, Homo sapiens
gagccacggagccgcaccagacaacgccccgggaccggagcagaacccccgcagagaaaggccaagagacagacaccaaacagacgagaaac

SEQ ID NO: 14600 - RNA, 68 nt, Homo sapiens
gggcccaagcggaagggccagccccgcagacccaaaccaaagaacaagacgcacagggcaggaaagga

SEQ ID NO: 14601 - RNA, 56 nt, Homo sapiens
cccacccaaaaagcagacaacgcaccaaagacaaagagggacagggcgagccaaga

SEQ ID NO: 14602 - RNA, 60 nt, Homo sapiens
cagagacacgccaagcagccagcccaggagaggaagagacacccgcgcgcccgggagggg

SEQ ID NO: 14603 - RNA, 47 nt, Homo sapiens
agagaaggaagaagaacaggcagcgcccaccaagccaaaccacggag

SEQ ID NO: 14604 - RNA, 80 nt, Homo sapiens
ccgaacccaggacagcaccaggcccaggacagcacgagagcacggcccccggagcggggagccccaaccgaccagacgcg

SEQ ID NO: 14605 - RNA, 71 nt, Homo sapiens
aaggaacccagcccaacaccaccaaaagacgaagagaacaagcgcggaggcacagaccggaagcagagcga

SEQ ID NO: 14606 - RNA, 68 nt, Homo sapiens
ccaccggagacacaggaacaaacgagcacgcaagacagaggaacacgcccacaggagacccacccgcc

SEQ ID NO: 14607 - RNA, 71 nt, Homo sapiens
cggcggcagagggcggaagacgcacgggccaggaccaagacgggaccagcgcccgagcccaacacgcagcg

SEQ ID NO: 14608 - RNA, 74 nt, Homo sapiens
aaggcgaggcacgaccccacccccgaggcccgaccgccgcgacaagaagagaaagaacaagaccgggacacagg

SEQ ID NO: 14609 - RNA, 80 nt, Homo sapiens
aaggcacggaggccgcggcgaaacgccgccaaccggacgaagggcggcgcaaccaagagaacgagcaccgaggaggacac

SEQ ID NO: 14610 - RNA, 83 nt, Homo sapiens
gcagacagaaacaccaagccgcaggacgagagaggagcgcgggccgagagcggagagcgggacgcaaggaggaggacggacag

SEQ ID NO: 14611 - RNA, 79 nt, Homo sapiens
ccagaggcaccgcaagcgggacaggccacaggcgccaagaagccgagacaagccagaaaagccaaaaaccgacagcccc

SEQ ID NO: 14612 - RNA, 71 nt, Homo sapiens
aggaccccagggagagcgggcagccccaggggacagaagcaagaaccgagcagacaaggagaacaccgcgg

SEQ ID NO: 14613 - RNA, 73 nt, Homo sapiens
gaggcccggaacccgggaggggaggaccaaagacgagaacacgacgcagccagagcagcaagaggccaagggg

SEQ ID NO: 14614 - RNA, 72 nt, Homo sapiens
caaagaaaacaggagggcagcagagcaggcaggcaaacgaggggaggaccagcgcaaccacgacagcaacgc

SEQ ID NO: 14615 - RNA, 67 nt, Homo sapiens
aggggaaacagagacagaaaggagggacgaagacaccgacggccacagaccccgccggggaagaaca

SEQ ID NO: 14616 - RNA, 71 nt, Homo sapiens
gacggccagcagggagcggcccggccaggacaccccccaggcacagccacaccccagcggccaaggacgaa

SEQ ID NO: 14617 - RNA, 76 nt, Homo sapiens
caagccgccgcgaggagcggcgcgggccccccccaccgcgagcaagccaaccaaaaccaagaagggcaggcaggac

SEQ ID NO: 14618 - RNA, 79 nt, Homo sapiens
gaaaggccgcgggggcaacggagaaaacccggaaccgcgacggcggcagggcgcaacagacaacgacaacaggagcccc

SEQ ID NO: 14619 - RNA, 77 nt, Homo sapiens
ccgccagcagaggcggagcccgcagaccgcagaaggccggagacaccagcaggaagcgcgccgaacgggagcccggc

SEQ ID NO: 14620 - RNA, 53 nt, Homo sapiens
cgccgcgggaagaagggccagaaaaaagaggcacggacacaagcgacccaaga

SEQ ID NO: 14621 - RNA, 82 nt, Homo sapiens
cgccaacccccgagcaagacgggcagaagcagcacacacaaagaacaagaaacacaagaaacaaaaaacacaaggaaacgcc

SEQ ID NO: 14622 - RNA, 80 nt, Homo sapiens
ccgcgccccggaccgggccgcgcacgccgcccagggggcacccgaggaggaagagggcagggcccacggaaagaagggaa

SEQ ID NO: 14623 - RNA, 79 nt, Homo sapiens
agcgcgccgagcggagaccggacggcaaaagcagaccggaaaacccaccggcaagaccacacccgaggggagcccagga

SEQ ID NO: 14624 - RNA, 66 nt, Homo sapiens
cagggaacggacgacaagaaaggacaagccccgaaaaaagggacccaagaaagccccgaacaacaa

SEQ ID NO: 14625 - RNA, 80 nt, Homo sapiens
ggacgccggagaggcaggcgcggcccgcggggcgccaggcacgcgaggcccccagggcacaggggaagaagaaaggaagg

SEQ ID NO: 14626 - RNA, 56 nt, Homo sapiens
gagagaagaccagaagggaggagagcagcacagaaacggaccagacccagaaaaag

SEQ ID NO: 14627 - RNA, 89 nt, Homo sapiens
cgcagcccggcacagccggcggcgaaggcagcgccgacggcagccggcaccgacggcggaccgacccgagccgaaaaaggacggcagca

SEQ ID NO: 14628 - RNA, 78 nt, Homo sapiens
cgacagcccaccaggccaccacgcggcgggccggcacccacacagccgacagagacagagcagacccagcagaacacc

SEQ ID NO: 14629 - RNA, 94 nt, Homo sapiens
ggaccaagaccagcgccggccgggccagcgaccggcccacaacacgcccggcaaagggagaagcgcaccaagcgccaggcagccagagccagca

SEQ ID NO: 14630 - RNA, 55 nt, Homo sapiens
gggagaagcacaagacagcacagagacgccagcagcccggacgccaccaagccga

SEQ ID NO: 14631 - RNA, 82 nt, Homo sapiens
cgcgcagcggccggggagaggcaccgggaacaccgcagcaggagacgcgccgaaaaagcaaagcaaaaaaaaaggaacagcc

SEQ ID NO: 14632 - RNA, 59 nt, Homo sapiens
cccccggacagacgccgacgcccagacaagagagggcggcagaaggaacaccgagaaac

SEQ ID NO: 14633 - RNA, 73 nt, Homo sapiens
gacccagacgggggacagaaggaaaaaccaccccccggcagcggaagaccgaaccccgagacaaacgaaggaa

SEQ ID NO: 14634 - RNA, 79 nt, Homo sapiens
cagaaggaacggagacaaaaacggcccggagaggaggacacgagaccccagcaggcaccaccaccagccaagacacgag

SEQ ID NO: 14635 - RNA, 75 nt, Homo sapiens
aagaaaagacaacgacaggaagaggaacaccaagaaccccaagaaaggcacagggcggagggggaggacacagca

SEQ ID NO: 14636 - RNA, 81 nt, Homo sapiens
agagcgcagcaaggagaaacaggagagagaaggagagaagaggcagaggaggacgaggaagacaaagcggaaaaggggaag

SEQ ID NO: 14637 - RNA, 77 nt, Homo sapiens
cacgccgcccgaggcccgcgaccgccgagccgcagccgccccgcggccaacagagccgaggacaagagcaagccaaa

SEQ ID NO: 14638 - RNA, 70 nt, Homo sapiens
accgaacaccacaccccaaaagaaggacacggaaacagagccccccacagagcacaagacaggacgaacc

SEQ ID NO: 14639 - RNA, 69 nt, Homo sapiens
acagaggccagacagacacccccacaaggccacgaaaggagaggaagaggcagccgaaaaggaagagca

SEQ ID NO: 14640 - RNA, 56 nt, Homo sapiens
ccgggggcggcggccgcgaggcgagcggcgagaagaagagccgaaacgcgcggcca

SEQ ID NO: 14641 - RNA, 37 nt, Homo sapiens
caaacccaaaccaaggaaacgggaagaacgggaagac

SEQ ID NO: 14642 - RNA, 75 nt, Homo sapiens
ggggcggcccaccaacaggaacagggcagacgagcggaggacacccaacccgggcgccggcggcagagcggggag

SEQ ID NO: 14643 - RNA, 68 nt, Homo sapiens
aggggaagcaggaccagccagcagccgggagcagcgccccgggagcgaagaggaaagaaagacccccg

SEQ ID NO: 14644 - RNA, 76 nt, Homo sapiens
ccgggcgccggcagcccagcgggccggcggcacccacgcgggggacgggcggccgggcccaccccggagcgacgaa

SEQ ID NO: 14645 - RNA, 86 nt, Homo sapiens
aggcagacacaggacgagagggagagcaagaccacagcgcgcggcccccacaccacacagagagcgaaagaccagcaacaggggac

SEQ ID NO: 14646 - RNA, 79 nt, Homo sapiens
agccagggaaaaccacaggaagccaggaccggagaacaaggccggcggaaccagcgagcacgggggggaagacacacgg

SEQ ID NO: 14647 - RNA, 81 nt, Homo sapiens
accacgaaagcagccccacagagcaggaggccgacagccggagagcccggaccgacaggaaagaaggagcccacaaagaaa

SEQ ID NO: 14648 - RNA, 58 nt, Homo sapiens
acagcgaacacacaccaaaaacagaaggagacagagggcaccgcccggccaaaggagg

SEQ ID NO: 14649 - RNA, 85 nt, Homo sapiens
gccccgcgcccgccccggccagggccgccccgggagcccgcgagggccaacggaccacaccaaaagccaccaaaggaacacgcca

SEQ ID NO: 14650 - RNA, 84 nt, Homo sapiens
acccagcacgacaccgggcaaccaaagacgggcgccacagacacaaaaggaacccaagaaggcagaagccagccccgcaggccg

SEQ ID NO: 14651 - RNA, 77 nt, Homo sapiens
gacggagggaacacaccaccaggacagcacccaacaagccaagacaccacccaccaaacacaggcaaaacccggaaa

SEQ ID NO: 14652 - RNA, 77 nt, Homo sapiens
gagacgaggcacagaaggccggaaacaccagaccgcgcccaccaagaccacccaacagccggcgagaacgcggacaa

SEQ ID NO: 14653 - RNA, 106 nt, Homo sapiens
aggcaagccgcccgccaacaacggcgccaagagcccaccgggggggaccggaagggacaagaacccaagaaacaggaaaaaacccaaaacaccaaaaggaccagcg

SEQ ID NO: 14654 - RNA, 82 nt, Homo sapiens
cagaagcaaccgcccacagcacggcggggccgcccagcgcaagagaaagcaccacccagcagcagaagggaacagaggaaca

SEQ ID NO: 14655 - RNA, 59 nt, Homo sapiens
cggggccgggcgcccggccgcgcaccgggacgaacagcggggacgccccagcagaccgc

SEQ ID NO: 14656 - RNA, 53 nt, Homo sapiens
gcggagaacgcaggaaccggcccacaggcgacccacaccccaacaagcgaagg

SEQ ID NO: 14657 - RNA, 85 nt, Homo sapiens
cggagcccaagccccagcccccgggcgaggcacaccccggagccaggagggggacgagcagccaaaggcacgacgcccgggaaga

SEQ ID NO: 14658 - RNA, 78 nt, Homo sapiens
cgcgaccgagacggcaggcggcggaagcggaaggcaagaaagagcgggaagaccccagggcagaggaaacaaccgaaa

SEQ ID NO: 14659 - RNA, 54 nt, Homo sapiens
gcacacaaaagaggagaaaaccgggcgcagccagacgaggacgcgcacaggaaa

SEQ ID NO: 14660 - RNA, 72 nt, Homo sapiens
gaggaccgggcaacggaaacaagcaggacaccccccaggcacagccacaccccagcggccaaggacgaacgg

SEQ ID NO: 14661 - RNA, 51 nt, Homo sapiens
gccaggcccacgggaaaagaaccaggaagacaacaggcccagacccagagc

SEQ ID NO: 14662 - RNA, 73 nt, Homo sapiens
ccgccaggagaggggagcggagacaaagccgccaggagccagcgggcgacagacaaccaagccgaggccggca

SEQ ID NO: 14663 - RNA, 76 nt, Homo sapiens
gccgccagcaggggcgccccggacgagagcccggcgggggcgcagcccacagaggaacacaaaaaacaggcgacgg

SEQ ID NO: 14664 - RNA, 71 nt, Homo sapiens
aaaccagccgaaggggcagacaggagaggagagacgccacgaacagccacaaccaggcgcacccaccaacg

SEQ ID NO: 14665 - RNA, 79 nt, Homo sapiens
cgagagccgcaccgccggacccaaagcacggcaccggacagaaacgaaggaggcccaaccacaaaaggagccgacggaa

SEQ ID NO: 14666 - RNA, 56 nt, Homo sapiens
ggaaggaccaacacaccacaccgaaagcagcaaccagaacaaagacaggagggcag

SEQ ID NO: 14667 - RNA, 77 nt, Homo sapiens
cggaacccgagacagccacagccaaaacccgaaccagaggcagggaccacaacagacaaagaacagaaaaagaaagc

SEQ ID NO: 14668 - RNA, 83 nt, Homo sapiens
gagagggagcggagaacacagcaacgggcagggggccccagcccaaccagagcgaccaggcagagacaagagaagaggagaca

SEQ ID NO: 14669 - RNA, 57 nt, Homo sapiens
cccagagcggaacacagcggaccaccagaaagaccgaaccaggaagagaaacgacgg

SEQ ID NO: 14670 - RNA, 75 nt, Homo sapiens
caggaacccccgacgcccaggcagccggcacccgcacaacccagggggccgaacccagaccaacaaaaggacccc

SEQ ID NO: 14671 - RNA, 71 nt, Homo sapiens
ccagaaagccccggaacaaaaagccccagaccagagacagaagcagaggacgccagagaggagcgccggcc

SEQ ID NO: 14672 - RNA, 75 nt, Homo sapiens
gaggaaaagaccagacagacccaaagcagcacaaggaaaacgagagaaacgaaggcgagagaaacagcaaggccc

SEQ ID NO: 14673 - RNA, 80 nt, Homo sapiens
cacggacagcgaaccaaagcgaacaaggcaacgcaaccaggagaaaagacagcaaggaccgaggagccaggaggagaacc

SEQ ID NO: 14674 - RNA, 73 nt, Homo sapiens
cgggcccacagaggaaggacccaaaagcccagcacgccggacaaagaaggcggaccaaagaaccagagcaacc

SEQ ID NO: 14675 - RNA, 67 nt, Homo sapiens
acggaaccggggggagccgaaaacaccagccggcccaagcgggcccccggaagaacgaagcgcgcag

SEQ ID NO: 14676 - RNA, 70 nt, Homo sapiens
cggcggggcaagagcgggggcgggaccccgccgcggcgggaggaaggaggggcagagggaaaaagaaaag

SEQ ID NO: 14677 - RNA, 86 nt, Homo sapiens
aggaggaaggcgccgcgcgggacccggaggaccgaccccagcccacgggcacgcaggcgccgaccccgacagaacgggccccgcac

SEQ ID NO: 14678 - RNA, 73 nt, Homo sapiens
gcgcgaacaagggcgaccagccggacccccacgagcccaaagcgaaagagcaacccagccaagaagcaagaga

SEQ ID NO: 14679 - RNA, 79 nt, Homo sapiens
gggggaagaaaggaaacaaaccgaaaaggaaaggagggccgcagaccgaacgaaccccagccggagagagaagaagaag

SEQ ID NO: 14680 - RNA, 75 nt, Homo sapiens
gcccccgaggagcgggacacagaacgggcagcgagcccgaggcacaccggaccccaacagcacaggagcggaggg

SEQ ID NO: 14681 - RNA, 78 nt, Homo sapiens
gccggccgccgcaggagggcggaaaacaccccaaaagccaaaagggaaaggaaaagaccaacaacagcgcaggacacg

SEQ ID NO: 14682 - RNA, 77 nt, Homo sapiens
caagcccccaggaggggagcagaaggggggcgcggcaccccaggggcaggaaccccaccagcggagcccggagccca

SEQ ID NO: 14683 - RNA, 62 nt, Homo sapiens
ccaaggagacacacacaggggcgcaagacagccagccggcacgaaaacacgccgggaacagc

SEQ ID NO: 14684 - RNA, 56 nt, Homo sapiens
aacaccgaaccgccacccaggcccaagaagacaaaacaccaacaaaaaaaagcaag

SEQ ID NO: 14685 - RNA, 84 nt, Homo sapiens
cagcaccgcgcccaggcagagccagacccggcacagcgaagacaggacacagccgcgggggcaccacgacgggaccgggcagag

SEQ ID NO: 14686 - RNA, 80 nt, Homo sapiens
gccccagcagacaagaccaggccacggcagcgcgagaggagggaggagagccagagaggcagaggagcgacaacaaagaa

SEQ ID NO: 14687 - RNA, 81 nt, Homo sapiens
ggaggcacagcggagcggcgagccgcaggcagagacccagagaacccaaacaagaccaaaaccacgagcgaagaggaggga

SEQ ID NO: 14688 - RNA, 74 nt, Homo sapiens
aaaagccggagaaagaggccgggaaccgaccgcggcgcgccacccggccgcagcaaagccgggcccgggaggag

SEQ ID NO: 14689 - RNA, 78 nt, Homo sapiens
gaagagaccaagcgcacaggagaggccaggccagagggaccaacgaaggcaaacaccacacgcagaggggggacacac

SEQ ID NO: 14690 - RNA, 73 nt, Homo sapiens
caagccacaacagaagaaaaagaacacaaagccgacgaagcaaagggaagcccaaagccagcacaagagaagg

SEQ ID NO: 14691 - RNA, 64 nt, Homo sapiens
caagcaaacaacgccaagaacagccacacaaacaggaaagaggacagaacagaagagagccgac

SEQ ID NO: 14692 - RNA, 74 nt, Homo sapiens
gaaggcgcgaggaggaaaggaggacgaggaggccacacgagcaccgagagaaccgagccggcgagggccgaggc

SEQ ID NO: 14693 - RNA, 52 nt, Homo sapiens
aaagcagcacgcaaagacaaaccaggccgggcaaggacaagcaagccagacc

SEQ ID NO: 14694 - RNA, 85 nt, Homo sapiens
ggagaccagcacccagaagagagaccgcaacgagaacaaagggccgggagcgaggcacccgggggagcgcccaggacacaccccc

SEQ ID NO: 14695 - RNA, 87 nt, Homo sapiens
cacagcggacaccaggacccaaaaggcgcaggggcacgagcgcccaaacgaaagaaccagcccagggagcacaggggagcggcagca

SEQ ID NO: 14696 - RNA, 83 nt, Homo sapiens
cggagcggagccggccgacgcgggcgcgagggcagaaccgggaccgacccaaccgaagaaagccaaaagaaaaaaaacaagag

SEQ ID NO: 14697 - RNA, 80 nt, Homo sapiens
aaacggaagcgcagggagaaggaagaggggaaaagggcccacaagggaggcgcggagccacccgccggcggcacccacca

SEQ ID NO: 14698 - RNA, 84 nt, Homo sapiens
caaaaagaggcgaaaggaagcaagcagcagaagagccaaggaaaaacagcaagaacccaaaaggagcgggccgcacgggggaaa

SEQ ID NO: 14699 - RNA, 70 nt, Homo sapiens
cgcgcccagccccagcaacagcacagccaagcaacgcacacaacagcagcaggacagggcccaaaaaggc

SEQ ID NO: 14700 - RNA, 74 nt, Homo sapiens
cggcgggggcggcggggcaagcggcgccaccaccagcaccagaccgacagaaccccgggaagcgacccgcgggc

SEQ ID NO: 14701 - RNA, 75 nt, Homo sapiens
gcccccgaaagcgggaacagggaacaaccagcaggagaggaaaaaggcccacgacaccccgcaggccggcaaaga

SEQ ID NO: 14702 - RNA, 86 nt, Homo sapiens
gcccagcgcaggcccgacccgccaagaagcaccgcagaccccaggagagggggcccggaggggcgcccaggccgagcacccaggcg

SEQ ID NO: 14703 - RNA, 71 nt, Homo sapiens
aaggaacggggcgggccgggcccaaaaaaaccgccacggacgcgcggcgaaaccaccccaaagcgcacccg

SEQ ID NO: 14704 - RNA, 87 nt, Homo sapiens
ggccgagaagcgggcagccgagaagggccgaggcccgcaaaaaagccccccagccgaggagaacggcaaaaagcgagggagacaaca

SEQ ID NO: 14705 - RNA, 85 nt, Homo sapiens
cccaagagcacagccggaagaggggcgcgcacaaccaccagggcaagaacaaccagccagccaagacccaccaacaacgccacca

SEQ ID NO: 14706 - RNA, 76 nt, Homo sapiens
acccaccagcccgcccacgcagggaacgagcccggaggggggggagcgcagaccgggcgaggaggcacccgggaag

SEQ ID NO: 14707 - RNA, 39 nt, Homo sapiens
gggaacaggcggagcggaagacaccggacaagcacagac

SEQ ID NO: 14708 - RNA, 60 nt, Homo sapiens
agaaagcacagaagccggagccagccgccaggagcagacggccagacgaagaaacaggaa

SEQ ID NO: 14709 - RNA, 69 nt, Homo sapiens
aagaagacagacgaaaaggaccgagaacccgcagggagaagaaccaacaacggaaaaccagcgggacaa

SEQ ID NO: 14710 - RNA, 80 nt, Homo sapiens
gccggagaagcgggaccgcaagaccggacggaggggggcggcccacgggaggcagggcaggaaccacagagaacagcccg

SEQ ID NO: 14711 - RNA, 102 nt, Homo sapiens
gcacagcagaaggggccacaagacagcacaaaaagaccgcagagccaagcccccggacaggcaagacaggccaccacgggcacgcggaagccgggccagccg

SEQ ID NO: 14712 - RNA, 78 nt, Homo sapiens
acggccaacccaccgcgccgaaagaagaaagcggaccagcaccaccacagccagccagaacagaaggcccgaaccagg

SEQ ID NO: 14713 - RNA, 93 nt, Homo sapiens
aggccagaaaacagaaggccacgcggaaacaaggcgaccccagaaaggcccccacagagagcacacaaacaaagcgaaaccacggaagaaaag

SEQ ID NO: 14714 - RNA, 77 nt, Homo sapiens
agggcacgcggaagcgcagaggacacaacggacaaagagaagccgaggagcagacccgagaccgcgaacggaagaga

SEQ ID NO: 14715 - RNA, 69 nt, Homo sapiens
ccacccgacccggcaccacacgcagaacgggcggacgggcgcccagccaggacggccggagcagcagaa

SEQ ID NO: 14716 - RNA, 46 nt, Homo sapiens
caagccacaccaggccggaagacagcagccagagacgcgcacgaaa

SEQ ID NO: 14717 - RNA, 76 nt, Homo sapiens
acaggaaaaaaacgcggacgcacagcagagcggacggagagcccaagagcccacggacagggagcaaaaaagcagg

SEQ ID NO: 14718 - RNA, 77 nt, Homo sapiens
gacgccaaccacgacgaagcggaaggcagaaggaacggggcgcgaaagacacggacaacgcaaacccggcccccccc

SEQ ID NO: 14719 - RNA, 72 nt, Homo sapiens
cacccagaccgcagagagagaagaacagccacaagcagggggagcggagccgggaagacggacagccaagag

SEQ ID NO: 14720 - RNA, 75 nt, Homo sapiens
ccggagagccaaaaggacgccccaggcagcagcagagccacccgcagggggagcgggccggagagaagagagggg

SEQ ID NO: 14721 - RNA, 77 nt, Homo sapiens
gggagcccaaacgaaaagagaagacacgcagcaacagccaaccagaaaaccagaaacaccggcagggagcaaacccc

SEQ ID NO: 14722 - RNA, 78 nt, Homo sapiens
aaagggagcggcagccccgagaccccaacaccccacggcaaggggagccaacagacagacagcgacccaaaaaacgca

SEQ ID NO: 14723 - RNA, 80 nt, Homo sapiens
cccaccacaggaggccagccaggcgagaaaccggagggaacgaagaaggacagaacggacaaggcagagcaaggaaaaga

SEQ ID NO: 14724 - RNA, 72 nt, Homo sapiens
ggacggccggcggcacccgcacccggggacaagcgcgggaacggcgcggaagggagaggcgccaccccagcg

SEQ ID NO: 14725 - RNA, 106 nt, Homo sapiens
aaaagaagggaaaggagcagggaaaagaccagaagcagagcgacacacaccgaaagacccagaagacccacgggcgaagagacacgcgagcagaccaggaagagag

SEQ ID NO: 14726 - RNA, 74 nt, Homo sapiens
ccggcggcagcagcccagagcgcaaagagagggccccaaggcggcagccccgaccgacggggcaacgcgaagaa

SEQ ID NO: 14727 - RNA, 76 nt, Homo sapiens
acccccccggacccccccccgagccaggggcgcagaaggacgcggagcaggagcacagagagagcggagaccagga

SEQ ID NO: 14728 - RNA, 44 nt, Homo sapiens
gggggcggcccggccccgcaggcccagggccccggccaggccca

SEQ ID NO: 14729 - RNA, 76 nt, Homo sapiens
ggcgggcccggcggcccacaccagaacaggccaagacaaccgggaaagcagcccaaggagggcgacacacgaccaa

SEQ ID NO: 14730 - RNA, 86 nt, Homo sapiens
aaagggaaacaaagcgaagagaagaagaagcagagagccaggaaaagaaagagaacccagccgccgacaggcagcgcccacacgac

SEQ ID NO: 14731 - RNA, 58 nt, Homo sapiens
ccaccaccgcagggccccccacggacccaggaggcagccaccagcaggaggaaaacca

SEQ ID NO: 14732 - RNA, 70 nt, Homo sapiens
cacacacgccagcagaccaccccgggagggaaggaagagaaacaccaaggaaccacacaagaaaagaaag

SEQ ID NO: 14733 - RNA, 68 nt, Homo sapiens
ccaacaggaaggaaagggagagggccagaaacgaccagagaggacagacagacaccgagaacacaaca

SEQ ID NO: 14734 - RNA, 87 nt, Homo sapiens
caggccccggggacgccagcaccagcaggagcagccaaccagcagcagccacaggagcaccccgccagaccccagggcgcgcggcca

SEQ ID NO: 14735 - RNA, 65 nt, Homo sapiens
acaagggacaccgcacccccaaacgcccacgacaagagagccggagcacgaccgcaggccgggac

SEQ ID NO: 14736 - RNA, 66 nt, Homo sapiens
aaaggcgcaagagcggcgggggggagcagacgggacagggaggagaagacaggagaacggcggccc

SEQ ID NO: 14737 - RNA, 40 nt, Homo sapiens
ccacgcagagggcggagcggcaggaggccgagcccgaaac

SEQ ID NO: 14738 - RNA, 88 nt, Homo sapiens
aaaggagaaagagagccaaaacggagacagagaggcaaacaccagcaacacccgggacaaaaacgggggccaccacccccaccgaacc

SEQ ID NO: 14739 - RNA, 63 nt, Homo sapiens
ggggaggccaaagagacacagcccaagggaccaagaaaggcccagggaccaaagcccggacaa

SEQ ID NO: 14740 - RNA, 57 nt, Homo sapiens
aacagagacccacagcagaagccaaagcaccccaaaagacgacggacgcagaaggac

SEQ ID NO: 14741 - RNA, 56 nt, Homo sapiens
gcacgcaccgaagcaaaaccaacgcaaccaccccagggccgcgagggcccggaaca

SEQ ID NO: 14742 - RNA, 82 nt, Homo sapiens
ggaagacaggccagcgcggccaagacccaccgcaagcccagcgaccccggcccaaagcgcagggaagaacaaacaccaaggg

SEQ ID NO: 14743 - RNA, 81 nt, Homo sapiens
cgaggaagaagggggaaggaagaggaagaagagccaccagagagggcgcccaggagcgcaggacaagcaccaggagccccc

SEQ ID NO: 14744 - RNA, 76 nt, Homo sapiens
ccccgggccccgagccagcccacgcagccgccccgaaggagccagaagcaaaaagggaaagacagggaaaccaaca

SEQ ID NO: 14745 - RNA, 56 nt, Homo sapiens
agaaacacaccggcgcccagcggcaggggcaggcccaggaggagagaaagaaccca

SEQ ID NO: 14746 - RNA, 72 nt, Homo sapiens
aacacaggagacgacaagcgaaaagggcgacagcaagccagggggcagagacccgggagcggcccgcccccg

SEQ ID NO: 14747 - RNA, 70 nt, Homo sapiens
ggcaaagccagagcaagaaacaagaaacaaccagggcaaaaggaaaggacccaccaagaggcaaggaaga

SEQ ID NO: 14748 - RNA, 74 nt, Homo sapiens
gggagcagagccgccaggcagaaggccccccgaacagcaggcgccaccagcccggagccggaaacgaaacagcg

SEQ ID NO: 14749 - RNA, 84 nt, Homo sapiens
ggcaggcgcccagcccggcaggcccagccggcagccggcggccaccaggccggggggggcacagagccccggaagacagccccc

SEQ ID NO: 14750 - RNA, 83 nt, Homo sapiens
cccccccgcgcgcgggggggcagcaggccccgccagcaggcgaagcagggagagcagacgcacacggagcggagaaggcagca

SEQ ID NO: 14751 - RNA, 72 nt, Homo sapiens
gcaggccgcaggaggcagcagccccgaagagaaacacacggacaacaaacgcacggcaggaccccacccccg

SEQ ID NO: 14752 - RNA, 75 nt, Homo sapiens
cagagaaaaggcggaagaccgccaaaaaggacacggagccaggaggcagcacggcaggagacgaggagaggacag

SEQ ID NO: 14753 - RNA, 75 nt, Homo sapiens
cgagaccaccggccaacagccagaacaccgaccccggcgcgcgacaccaaggaggaggaagcccggcggggcggg

SEQ ID NO: 14754 - RNA, 62 nt, Homo sapiens
cccagccccggagcccaaaccagacccaccaccacaggcaccaggaggcaacgaggagaagg

SEQ ID NO: 14755 - RNA, 81 nt, Homo sapiens
cgagccccgacaaggaaccaccacacaacaaggcggagggagggcggcgacggcggcgcgaggaccgaccgggcccgcgga

SEQ ID NO: 14756 - RNA, 74 nt, Homo sapiens
ggaaaggagggggcggggagaaagggacaacaagacagaaccgcaaggccacaaaccagacggaagcagccaca

SEQ ID NO: 14757 - RNA, 86 nt, Homo sapiens
ggggcgccgaggcggcacagccgcccagccacccccaggacgcccgcaacccgacacgacgggaggggacgggagaagaaccagga

SEQ ID NO: 14758 - RNA, 86 nt, Homo sapiens
cgcgccccgggagggagggggaggccaggcccaagacgccgcgcgagagccccagcccccagcagccgacaggaggcccgcaagag

SEQ ID NO: 14759 - RNA, 56 nt, Homo sapiens
gaagaacccggagccaggaggagagaaagaacccacgcaggacgacagaagaggcc

SEQ ID NO: 14760 - RNA, 87 nt, Homo sapiens
cagcgcccggaacccgaacaacagcaggcccaaccgcacgcagcacagccagagcggcgcccaagcaaaaccccggacaagaaagcc

SEQ ID NO: 14761 - RNA, 76 nt, Homo sapiens
cacaccaaccgacgggagacgacggcgagaaacacgccaagggacaccaccccggcacgagaccggcggaccccgg

SEQ ID NO: 14762 - RNA, 88 nt, Homo sapiens
ccagcgacccggggcgcacgcggaggacgcgagggggacgcgccggccgcgagagaagaggaccccaagggaccgaaagacaagagca

SEQ ID NO: 14763 - RNA, 52 nt, Homo sapiens
ggaagaaagcaaggaggggccaggggagaagcagaccgcaccaggcgggacc

SEQ ID NO: 14764 - RNA, 68 nt, Homo sapiens
aaaagacgggcgccgcgggcagcgcgcggcccgggcagcaggcgaaccgcgcgcacaaagagcacaac

SEQ ID NO: 14765 - RNA, 88 nt, Homo sapiens
agcagacccaagaagacagaccccgaggagacggagcgagaacccgagcagcgccagagcaacacaccgcgccccagcacgcaggccg

SEQ ID NO: 14766 - RNA, 84 nt, Homo sapiens
agaacccgcggcagcacaagcgcagaccaaggaagaaaaggggggacacagcgagccacgcgccaggaagcccggccaaggagc

SEQ ID NO: 14767 - RNA, 73 nt, Homo sapiens
ggagcgggggaggcacagaaggggacaaccggaacccccgaccaacagaagagcaccgggaagcaagaccccc

SEQ ID NO: 14768 - RNA, 52 nt, Homo sapiens
cgccggacaaggagaggaggggccaagggcccccagcggccgacagcgccag

SEQ ID NO: 14769 - RNA, 75 nt, Homo sapiens
cagccggaaagaagaggaggaggagagaaaggcaacagcggaaggcgagcggccggaagaagaagaacacaggcc

SEQ ID NO: 14770 - RNA, 74 nt, Homo sapiens
agaaagagaggaaacgggaaagagccagaacggcaagcgaaccagacacagaaaggaacaggcgcccgaagggc

SEQ ID NO: 14771 - RNA, 110 nt, Homo sapiens
ccggcccgagcgcaccggagggacggcacagggaggccagccggagaagcgagcagcggaagggccccacaccaaaccgccacgcaacagacgcagagccagccaggagc

SEQ ID NO: 14772 - RNA, 84 nt, Homo sapiens
gaccgcagcccccgggcacgaccccggacacgggcaggcagacaagcagaccggaagaccgacggaagaccacaccccgaggga

SEQ ID NO: 14773 - RNA, 78 nt, Homo sapiens
agcagaggcggagcccgcagaccgcagaaggccggagacaccagcagagggaacaggcacgccccacccgccagccga

SEQ ID NO: 14774 - RNA, 74 nt, Homo sapiens
gagcaaagagaccgccagcgccgcaagcagcaagagaacaggagacagcggagaaagagcccgggaagcacgaa

SEQ ID NO: 14775 - RNA, 43 nt, Homo sapiens
ggaaggggcccagcagacgcaaagacgcaaaaagagcccgcca

SEQ ID NO: 14776 - RNA, 86 nt, Homo sapiens
cggccgccggcccccaacagcgccggcaggcagcggaagagaaagaccgaggcaaagaagcaggagcacacaaagaacagcggcag

SEQ ID NO: 14777 - RNA, 66 nt, Homo sapiens
cacgaaccggcaccaaaaggaagagacaccacgccacccaagagagagcaaaaaccgagaaccaga

SEQ ID NO: 14778 - RNA, 64 nt, Homo sapiens
acaacacgcaggaaaaggcagcacccaccgggaagcacaggcagccagcagaacagcagaaaaa

SEQ ID NO: 14779 - RNA, 83 nt, Homo sapiens
aggacagggaaacaagcaggaccaaaaaccagagacgccgaacggaacaaggaacagcaccacaacaggaaggaacccaggag

SEQ ID NO: 14780 - RNA, 85 nt, Homo sapiens
acgcgcacgcaacaacagcagcagcaggcgcaaaaacgaacccacaaccgaacgacggacgggaacaaagaaggagaaccagcgg

SEQ ID NO: 14781 - RNA, 85 nt, Homo sapiens
gaacgcggcgaccgccaagaaaggcagcgaggggagagcgggacagagaaagaagcaagaaaaaccagccaaaagagagagaaag

SEQ ID NO: 14782 - RNA, 51 nt, Homo sapiens
acccccaccagaaccagccacgcggcaccaggcagcagggaggaaaccagg

SEQ ID NO: 14783 - RNA, 85 nt, Homo sapiens
ccggcgcgggaaacgggcgaagcgacgagccgcgaggagccggaccgcaggccggccaggaacccaggcacggggacacgccccc

SEQ ID NO: 14784 - RNA, 111 nt, Homo sapiens
gaaaagccaaaacgcagccagagagcagacagaaccgcccacagaacaccggcacagagagcacagaagagggaggagcgccaaagaaggaccgaaaaccgaagcgaaaag

SEQ ID NO: 14785 - RNA, 74 nt, Homo sapiens
gcaagaggaacgaggagaaaggaagcaaagcgaagcaaacccccgaagcagagcaggaaggaacacgagaccaa

SEQ ID NO: 14786 - RNA, 75 nt, Homo sapiens
caaacacccagaaacaagagccaagacacggcaagggaggaagaagggcgccgaggccgagccccggcgagccaa

SEQ ID NO: 14787 - RNA, 39 nt, Homo sapiens
cccgagagcgggacgcaggggcgcgggcgcggacaccag

SEQ ID NO: 14788 - RNA, 76 nt, Homo sapiens
aaaaagaacgccaaaacaacacaacagggcgggaacgcggaagaagaggaacacaagcaccaaaccaccaaaccag

SEQ ID NO: 14789 - RNA, 59 nt, Homo sapiens
aacaccaacagcaacaaggaaacagagccgggggcggcaccgacgacagcccaggaaga

SEQ ID NO: 14790 - RNA, 70 nt, Homo sapiens
aaggaagaagcccggagacgaccaagagccggacacaagagggcaagaaaggcgcgacgggccgaaaagg

SEQ ID NO: 14791 - RNA, 77 nt, Homo sapiens
aaagccacagaaacagagaaacaagcccggagaagcacaaaaaggagccaaggcgagcgcaacagcagggacaaaag

SEQ ID NO: 14792 - RNA, 79 nt, Homo sapiens
aggccgggacccggccccggcccacaggggggggcaaacccgagagaacgggacccggcgccacaagaccaaggcgcgg

SEQ ID NO: 14793 - RNA, 84 nt, Homo sapiens
cacgcgcgaccaccgggcgcccgcgcccccggagcgcagaaaagaaacgaagccgggcacggacaggacagagaaagcaggcgc

SEQ ID NO: 14794 - RNA, 86 nt, Homo sapiens
cgccgccccggaacaaacgggggaggcacacggaccaacgggaaaacgcaagccccagccaagacccaccaggcaggggaagaaga

SEQ ID NO: 14795 - RNA, 46 nt, Homo sapiens
gaggcgggccgaagcaacaaggaggccccaaagccggggaagacca

SEQ ID NO: 14796 - RNA, 86 nt, Homo sapiens
acggcgcacacgcacccggaggagggagccaacgcaccgaggaggaacccacagggggaggagcccagggcaccccggaagaggag

SEQ ID NO: 14797 - RNA, 70 nt, Homo sapiens
agaaaccaccaagaagaagacgacaacagcgagcagcaaaaagaacgaaaagcgcaacaaaccagaacac

SEQ ID NO: 14798 - RNA, 79 nt, Homo sapiens
cgggagccaaccggcgcccacaaggaggcagcccgaagcagcccaggaacaaggccccaacaggcgggagacaagcccg

SEQ ID NO: 14799 - RNA, 72 nt, Homo sapiens
ggagcaagcacagacgcaaaaacaggagccagggagaacaaggaacgaccaagcacaaaagacaaaaaaggg

SEQ ID NO: 14800 - RNA, 74 nt, Homo sapiens
gggggcaagaggacaaccccacacgggacgcagcccgggggaccccgaagaagaagacccgggccaagaccggg

SEQ ID NO: 14801 - RNA, 35 nt, Homo sapiens
acacggacaacaaacggccagaggccaccccgagg

SEQ ID NO: 14802 - RNA, 83 nt, Homo sapiens
aaacggcgggcccgggaagcgggccggcagcgcccggacgaggaggagccggaaagccagggaaaagcagagacagaagcaca

SEQ ID NO: 14803 - RNA, 87 nt, Homo sapiens
ggcggcgccgccacccccccccagcaggccaagacaaggggcgcagagcggggggacaggcgcaagaccggagaagcaggagcggaa

SEQ ID NO: 14804 - RNA, 80 nt, Homo sapiens
gaggggcggacgcggccgaccccgccccccgaggcgcagcccgaacccagcagccacacgccaacaacgagacagccgcg

SEQ ID NO: 14805 - RNA, 72 nt, Homo sapiens
agagggcgcgccaggaccagcaagggacccagaaagcgggaaacaggaaaaaaccaacaaaagcagccgaaa

SEQ ID NO: 14806 - RNA, 65 nt, Homo sapiens
aacgcagaaaccgaaaaagcagcaggcgcaaagaaagagcgggaaagggcgccccaaaagaagcg

SEQ ID NO: 14807 - RNA, 75 nt, Homo sapiens
cccgaggcgcagcagcaggaggaggaccgcagcaaggccgggcaaaagacaggagaagaaggagaggcaccagcc

SEQ ID NO: 14808 - RNA, 75 nt, Homo sapiens
agagcccgcaagaagaacagagacagcagccaaacccccaggacccaaagaaagggaagaaaagacccaaagacg

SEQ ID NO: 14809 - RNA, 78 nt, Homo sapiens
ggggcagacaaccgcccggagccacaacggacgcacagaacagccccggggaggagacaaggggcgccaccaccaccc

SEQ ID NO: 14810 - RNA, 92 nt, Homo sapiens
cgccagccccgggagaggagccgcacccggccggcccggccccagccccaggaccccgagcagcagcacccgcggccgccccgacaagcggg

SEQ ID NO: 14811 - RNA, 55 nt, Homo sapiens
cagcagccacacagcagggccgacgcccgccgcggccggggaacaggccacagcc

SEQ ID NO: 14812 - RNA, 79 nt, Homo sapiens
cacaaagccccccggagacgcaaccaaggagcgacaaaagacacaggacgaaggaacaaggccgaccgggccaccaccc

SEQ ID NO: 14813 - RNA, 110 nt, Homo sapiens
agcggcacgaacagagccgggagcaagaagaacacccagagacaccacgacagcgaggcagccagcagcagccaccagagcccaagagcacagccaaagggcggcacccg

SEQ ID NO: 14814 - RNA, 67 nt, Homo sapiens
ccagaaggggagaaggcaggcaccacaaaaaggacaggcgaaaacagagagccgaagaacaaaaaag

SEQ ID NO: 14815 - RNA, 72 nt, Homo sapiens
gggggacaacccaagagaagaagcgcgagacagacaagagaagagaggaaaagaaacccgggggagaggcgg

SEQ ID NO: 14816 - RNA, 68 nt, Homo sapiens
cacacccccaggaggcagccagcaagcccaaagacaagccagccaggagcccgcccaacagccgacac

SEQ ID NO: 14817 - RNA, 73 nt, Homo sapiens
cgaaaacagaaacaaacacaccaggaaacacggcaccgggggcggaaaagcagaaaggaaagggaagagcaag

SEQ ID NO: 14818 - RNA, 71 nt, Homo sapiens
aagagagccgcgacggcccagaccaggcgaggcgcagaaggggacagaacacacgcaccccgcgccgccgc

SEQ ID NO: 14819 - RNA, 68 nt, Homo sapiens
cagccagaggagcagaagcagccggcgcaccacaagccaacaaaccgaaaaaagagacgaagacggac

SEQ ID NO: 14820 - RNA, 76 nt, Homo sapiens
aaacaaccagaaggggagaaggcaggcaccacaaaaaggacaggagccgggaaaccgaagaaggcagagaaggcaa

SEQ ID NO: 14821 - RNA, 67 nt, Homo sapiens
caggagcccccagggaacagcaacaagcagagcaaggcgcacgggcgaggacagggagccaccaacc

SEQ ID NO: 14822 - RNA, 70 nt, Homo sapiens
cagcagccagggcacccgccagccgacgaaggggagccacaggagagcgcccagacaaaagagcaacgag

SEQ ID NO: 14823 - RNA, 79 nt, Homo sapiens
aaagagcaaagaaagaaaagaaaaagagaagaagagaagaaacccagcgaagggccgcgggggacccgagggggaccca

SEQ ID NO: 14824 - RNA, 47 nt, Homo sapiens
acgcccacaccccgacggcacaccaagcaacgacgaaaggggccgcc

SEQ ID NO: 14825 - RNA, 77 nt, Homo sapiens
aaaaacccgcaacagcccccgcccaagggacaagaaaaccagaaacgggggcccgacaagacacaaaaagggaacgg

SEQ ID NO: 14826 - RNA, 73 nt, Homo sapiens
cggaagcaacgccgccgccgccccacccggggcaggggccagggccagcaagcccgagaagcaagaccgcccc

SEQ ID NO: 14827 - RNA, 77 nt, Homo sapiens
gaagcccggccgcagagaagagcgaccaagagcaggagacgaaaggggcgaggccaacaggagggcagaagagaggc

SEQ ID NO: 14828 - RNA, 86 nt, Homo sapiens
ccgcaggcagcccgccgaaggcgccgccaaggaagaggggaccaaaagaacccagccaacccgcagagggaggggaggggcgagcg

SEQ ID NO: 14829 - RNA, 81 nt, Homo sapiens
aggagccgccgcgccccgcgcgcgggaagcagcaccaagcacggccaacgccggcacaggcagacaagaaggaagaggaag

SEQ ID NO: 14830 - RNA, 37 nt, Homo sapiens
ccggcaccgaagaccgacacgacgaccgaaacaagag

SEQ ID NO: 14831 - RNA, 75 nt, Homo sapiens
gcagacggagacggggccggaggcagcaggcaccagaacggaaaaaggggccggcacaagcgaggaggcggaggg

SEQ ID NO: 14832 - RNA, 77 nt, Homo sapiens
gacacagcccgggcgccggcgagaacgagcgcagacccgggaagaccccacaagggaagggacgagaaggacaccgc

SEQ ID NO: 14833 - RNA, 68 nt, Homo sapiens
gaaagcgcccccggcagcaggaaacaccaggccaggaggggaggagggagggccacggcaagggaagc

SEQ ID NO: 14834 - RNA, 69 nt, Homo sapiens
gcgccccgaccagggacaagcagacgaaaagcaagaagagacaggagaaccgaaacaaaccagcgcgca

SEQ ID NO: 14835 - RNA, 67 nt, Homo sapiens
gaacgcaaggcccccgaccacacgcccgcgcgagggggacaggagccaggccaagagaaagaaacac

SEQ ID NO: 14836 - RNA, 69 nt, Homo sapiens
accagcccccgggcgcacagaaccagaggaccggcaacaacccgaggacgaaccaccccgcgccagcag

SEQ ID NO: 14837 - RNA, 81 nt, Homo sapiens
agaaagaaacgaccggcggggcgggggaacggaaaaggagcgcaggaggacagaaaggaggagaagaggggaagagaggag

SEQ ID NO: 14838 - RNA, 60 nt, Homo sapiens
ggagagacagcacagcacccacaaagcaacggaggacagcaagacgacccgcaagcaggc

SEQ ID NO: 14839 - RNA, 40 nt, Homo sapiens
ggaggaccccagaccacggacagaggggcgcaggacaagc

SEQ ID NO: 14840 - RNA, 77 nt, Homo sapiens
gcccccggacagcagaaaccaagcagacaacgcagagggcgacgccaacaagccggccagaaggaggacaggaaaaa

SEQ ID NO: 14841 - RNA, 93 nt, Homo sapiens
ccgagagcggagcgcaggacagcgcaggagccccggcgcacgcggcgcgcacagacccagagacaccaggcgccgagaaggccagcagagaaa

SEQ ID NO: 14842 - RNA, 66 nt, Homo sapiens
agagagagagcggaacgggagaaagcacgggaggagagcgcacagaagagggaccaccaaagggaa

SEQ ID NO: 14843 - RNA, 114 nt, Homo sapiens
aagcgccgcgacacaccgcacccacacgggcgagaagcccacgaggcaacacgcaaggccgccaccaggcaaaagcagaccggaaaacccaccggcaagaccacacccgagggg

SEQ ID NO: 14844 - RNA, 78 nt, Homo sapiens
cgggaccaaggcggagcaaagcgccgggggggggggccacgcaggggaggcgccgagaacaccggcagagagagagac

SEQ ID NO: 14845 - RNA, 67 nt, Homo sapiens
aacccgggacgacgggcggcgggaaccgaccgggggggacccgggcgcgcaccgggaccagagagaa

SEQ ID NO: 14846 - RNA, 79 nt, Homo sapiens
gccaggggccaaagggaccgagggggggccgaagaagccagggggaggaaagcagacagacccaccaagagggcgggag

SEQ ID NO: 14847 - RNA, 79 nt, Homo sapiens
aaaagagacaccgacaagacaccacggacgagagacaaacgccgaagcaaggaagagaaaggaaccgcccgaacccgga

SEQ ID NO: 14848 - RNA, 80 nt, Homo sapiens
cccaccggaggcaggaccagcgcagcgcgagggcgagcaggccacgcggaagccaagcccgagcaggccggggaggcgag

SEQ ID NO: 14849 - RNA, 64 nt, Homo sapiens
gccaggggagagaaggccgagacagagaagacgacaagcagggggaaagaggcgcggcaggcag

SEQ ID NO: 14850 - RNA, 70 nt, Homo sapiens
gaaaaggaaagccacgcaggcaacaacagcacacaggaccgaccagccggaagaccaggcaccagggaca

SEQ ID NO: 14851 - RNA, 78 nt, Homo sapiens
cggcccgcccggcccccaaccgcgccagcggagcgaacccgagagcgggagcgggcgggccaggaaaagcagacgaaa

SEQ ID NO: 14852 - RNA, 67 nt, Homo sapiens
gcacgggaccaaagaggaaccaagcggagagcagcaagaggcgacacgggaaacgcacccgcacaga

SEQ ID NO: 14853 - RNA, 80 nt, Homo sapiens
ccgcccgggaacgcgacgcgagagaaggacccacggcgcgcgaagaccaggagagaagacgaaaaagaagaagcagcgaa

SEQ ID NO: 14854 - RNA, 83 nt, Homo sapiens
agacaacccaacccgccaaggagccaccggccacaaggcccgagggacacagagagacggaaggccacaggccgaggagaagg

SEQ ID NO: 14855 - RNA, 82 nt, Homo sapiens
gacgcccgaagcaaaagccacagaaaagacaagagcccggaggaggcagccgaagaagcaggaaggccggaggggaagacag

SEQ ID NO: 14856 - RNA, 57 nt, Homo sapiens
gcggacgaggaggccaaggaccaccccgccgagacgaggacgcgcacaggaaaggac

SEQ ID NO: 14857 - RNA, 85 nt, Homo sapiens
agaagcggcaaccccacccacaccagcccaagggaaagccaagaaaaacaaccaccagcgagcaaaaaggcaaagaccaagacca

SEQ ID NO: 14858 - RNA, 78 nt, Homo sapiens
gccaaaacgcccccaacccagcgcaaaggaagaggaaggaccgcgacgagaagagcaaaacggagcccaaaaaaggac

SEQ ID NO: 14859 - RNA, 74 nt, Homo sapiens
agccaacccccccacgcgcacgccgggggcgaggagacaaaaaagcccaaggggaagagacagcagcgggaagc

SEQ ID NO: 14860 - RNA, 77 nt, Homo sapiens
gcggcgcgcgcccagcgccgccccgcgcgcgcccgccacggcgccgagccgcggccgaacccgaaacagacaccgcc

SEQ ID NO: 14861 - RNA, 78 nt, Homo sapiens
accgagagcggaccgagagcgcgaaacgcacgagaagggacaagacggacagaaacgaacagcgggcgagccagggga

SEQ ID NO: 14862 - RNA, 79 nt, Homo sapiens
aaaaggacagaaacgggaccgaagagcaggagcgggacgacgccacaagacacccagaaacagagagcagcgaggaaac

SEQ ID NO: 14863 - RNA, 66 nt, Homo sapiens
aaagaaccacaccaagagacccaagaggacgaaacaggagaggagccaagcccaacgggacgggaa

SEQ ID NO: 14864 - RNA, 75 nt, Homo sapiens
agagcaagaaacagaagcgagaggaaccagaaaaagggagcacaaggaagaaacagaaggacaaacgagaccgcg

SEQ ID NO: 14865 - RNA, 110 nt, Homo sapiens
caccgggcaaggacaaagaacccaacaggagaaagggcagggacagaacgaagaagagcggcacccgcagaccccaggaagggagaaaggggaaggccgagcagaagcag

SEQ ID NO: 14866 - RNA, 80 nt, Homo sapiens
ggagagacaagaagggccgcacagaaggaagaaaagccaggcaaggggcaagcaccgacgaagcagaggagacaagaggc

SEQ ID NO: 14867 - RNA, 78 nt, Homo sapiens
agacgggagagccacgggcccccggcaacgaacggccgaaaagacgaggcgaggaggcgagacacccaacccacccca

SEQ ID NO: 14868 - RNA, 91 nt, Homo sapiens
acagagacaagcggggaagaacggcggagcacaccgaccaaaaaagaaggaaccaggaagacaacaggcccagacccagagcccggagaca

SEQ ID NO: 14869 - RNA, 83 nt, Homo sapiens
cggaggagcggggagggggacacacaaccgcccagccggcgagggacgccgcagacaacaggcacaaagagagaaggaacacc

SEQ ID NO: 14870 - RNA, 44 nt, Homo sapiens
cagcccgccgccgccccaacgccgccggaaccaaaaagaagccc

SEQ ID NO: 14871 - RNA, 87 nt, Homo sapiens
agcaccaccagcaggcacagggaccgcagagcaggacgcagcccacaggcccgcccacgcacagaggacaccacggggcagcagacc

SEQ ID NO: 14872 - RNA, 76 nt, Homo sapiens
ccagaacaggaaagaggacaacacagagaaccggaaagaacaagccaccaaaaagaaggagaaaaagaaaacaagc

SEQ ID NO: 14873 - RNA, 39 nt, Homo sapiens
ggcgccgagccgcggccgaggccacccggggaccagcaa

SEQ ID NO: 14874 - RNA, 75 nt, Homo sapiens
accaagaaccaggcaaacgagagcgccagggacggaagcgacagcgcaggaggcggggcaagggccggccccagg

SEQ ID NO: 14875 - RNA, 50 nt, Homo sapiens
gagaagggagaacaagaacgggcacgggggggccagcccacaaaacacag

SEQ ID NO: 14876 - RNA, 71 nt, Homo sapiens
gaaggccaaccgcagcggaaaggaagaacgaaacccacagaacgagggcacccaagagggagagaccccca

SEQ ID NO: 14877 - RNA, 74 nt, Homo sapiens
ggaagcgcggacgggacggaaccacccccagacaagaggaccaccaaggggcggaggcgccaccacacagagag

SEQ ID NO: 14878 - RNA, 108 nt, Homo sapiens
ggggcacggcgcgggcgcgggccagaccgcgcacaagaacagcgcagcgaaacagaaccgcagagggaaagaggaaagggaaccgggcccaccaggaccaccaccaga

SEQ ID NO: 14879 - RNA, 77 nt, Homo sapiens
agaaacgaagaagaaacaacaagagaaagacccaggaagcagaagaagcgaggagaagaagaggcgggcgacaaacc

SEQ ID NO: 14880 - RNA, 83 nt, Homo sapiens
cacacgcaaaggagaaaggaaccgacagaaagaaccaagagggagacaagggaaaaggaagacaaaaaacacaaggaaagaac

SEQ ID NO: 14881 - RNA, 115 nt, Homo sapiens
gccaaagcccaaaccccaggccaagcaaccaccagcagcccccagagcggaacacagggagagccggggagacaggagagccgcccagaacccccggaagggaccagcgcaaaga

SEQ ID NO: 14882 - RNA, 76 nt, Homo sapiens
ggagccagagccccacgggaaggagagcagccagcagagcccgaagccaccgcgaccaagcagagaagagccacca

SEQ ID NO: 14883 - RNA, 72 nt, Homo sapiens
agaaggccggagacaccagcagggggcacccgaggaggaagagggcagggcccacggaaagaagggaaaccc

SEQ ID NO: 14884 - RNA, 81 nt, Homo sapiens
acaccccacaggaccccagagcgacagcccgggacaccaagaaagaacacaagggccgaacaccaacagaggaagaaagga

SEQ ID NO: 14885 - RNA, 70 nt, Homo sapiens
ggggagggcgcggcacgccggcccgcagggaaaaccccccgagcgacccaacgagccagcggcccagcgc

SEQ ID NO: 14886 - RNA, 67 nt, Homo sapiens
cgacacaggaagaagacaggaccacaaagcaaaaggaagagaaggaaagaaaccaaccggaacagag

SEQ ID NO: 14887 - RNA, 73 nt, Homo sapiens
gaagaccgcaaaaaagccagcaacgcgcagccggacacccaccgaccagacgacgcccgaacaggggcaacac

SEQ ID NO: 14888 - RNA, 52 nt, Homo sapiens
accggcggggaacgaccccaacgcacaaaaggggcaagcaccggaagcagaa

SEQ ID NO: 14889 - RNA, 75 nt, Homo sapiens
gcgccccacgcacgccggcgcccaaagagaccagcgccaccgacccggaaccaagaagaagcaggggagaagaag

SEQ ID NO: 14890 - RNA, 90 nt, Homo sapiens
cccagggaagcgcagaaagcaggcgaacccgcggcgcaaaacggccagagacccagcaggagccaggaagagaagaaaagaagaaacaac

SEQ ID NO: 14891 - RNA, 65 nt, Homo sapiens
cacggacaggccgcagccgccggggcagcgccacgcagagccccgccaggaagacacgccgggga

SEQ ID NO: 14892 - RNA, 72 nt, Homo sapiens
ggccacgacgcaagaagaagcgcggaccccgggggcacaagaaggccaaccccaaaagagagaacacaggca

SEQ ID NO: 14893 - RNA, 77 nt, Homo sapiens
gaaagagcagaaaggagggggcgagaaggcgggaagccgaaggcagccacaggcaaggacggggacacaagaccagc

SEQ ID NO: 14894 - RNA, 52 nt, Homo sapiens
agaacgggggcagcagcgaggacccccccggaccccagaaaagcggcacgaa

SEQ ID NO: 14895 - RNA, 73 nt, Homo sapiens
caaccccgcccaacacccaccgagaagcaaacacaccagggcacagcacaaaacagaagaagcgaagcacccg

SEQ ID NO: 14896 - RNA, 70 nt, Homo sapiens
gaaggaaccacgagggaaggagagcagcaaaaacaaggaacagcaagccaaagagcggcgggccacccaa

SEQ ID NO: 14897 - RNA, 68 nt, Homo sapiens
ggccgaaaaggcgaccgccccaaggaaccacggcacacagagaaaaaaagggaacaaaacacagcaag

SEQ ID NO: 14898 - RNA, 70 nt, Homo sapiens
gggggccccaccaaagagaagaaccacccggcgcgggggaccgcggcgggccgaaggggcagagccggcc

SEQ ID NO: 14899 - RNA, 60 nt, Homo sapiens
cgggggaggaggcaacgccgcgggaaagggagcagcaccggccacacccacagcacgacc

SEQ ID NO: 14900 - RNA, 78 nt, Homo sapiens
acgcggcacagagagggccgggagcgcgcagccagggccggaaagagggcgggcccgcacggagcgcggggagaaacc

SEQ ID NO: 14901 - RNA, 70 nt, Homo sapiens
ccaccgacacagagaacacacagggaaagcaggcaaaaaagaaccgaacaggaaaagccaagaaaacaaa

SEQ ID NO: 14902 - RNA, 68 nt, Homo sapiens
gaacgcgagagccaagggaaaagaaaaggaaccacagaaggagggaggcaggaggaccgacggaggca

SEQ ID NO: 14903 - RNA, 84 nt, Homo sapiens
cagcaccagccagaaagcaacggagccacaacgcacaacccagaggcgggaggcggcagaagcagccagaggagggcacaggcg

SEQ ID NO: 14904 - RNA, 80 nt, Homo sapiens
gaggcgcccggcggagcagaggaaccacacgcgacaggccccaacccgcccagccagccacgcgggccggcccccagacc

SEQ ID NO: 14905 - RNA, 81 nt, Homo sapiens
gaggcgcggagcgggcagccgccgccaccccgcggccgcacccccgccccagaaacgggcgaaaggcagaaaaccacgcgg

SEQ ID NO: 14906 - RNA, 78 nt, Homo sapiens
gccccagcggaccgaacagagccccccaagagaacccagggggagccacgccggagcgggcaccggcgcggacccacc

SEQ ID NO: 14907 - RNA, 70 nt, Homo sapiens
ggggaggaggccccaaagggcgaggcaaccaggggcagagagcaagcgcaaaaagagcggagaaaaccaa

SEQ ID NO: 14908 - RNA, 69 nt, Homo sapiens
cacgagcaaaaaaaccgggcgggacgacaaaggacccaacagagcaagacggggcccggagagcagccc

SEQ ID NO: 14909 - RNA, 38 nt, Homo sapiens
cccggcaccacccacgagacgaccaagacacccaggag

SEQ ID NO: 14910 - RNA, 74 nt, Homo sapiens
ggccgcagcagacacagcacagaaaccagacaggagacccaacaccccagccagacggcaccaggcggcacccg

SEQ ID NO: 14911 - RNA, 78 nt, Homo sapiens
gccacgcacccacgccggaggaggcaaacgagaccggacgagccacagaccacccaaggccccccagccaacccgaca

SEQ ID NO: 14912 - RNA, 73 nt, Homo sapiens
gcgggaggagccgccccgaggagggaaccaccaccgcgcccgccggccgcgccccacacagacagggggcgga

SEQ ID NO: 14913 - RNA, 72 nt, Homo sapiens
cacaaaccgaacacacgagccacgaaaacagagagacacagcaggcgaaccacgacagcagagaagaaagca

SEQ ID NO: 14914 - RNA, 89 nt, Homo sapiens
cacaagcgcacgagcggaggggagcccagccagacaggcccgaaaggcgacagagaagagagggacggcgcaaaccagggcgaggcggg

SEQ ID NO: 14915 - RNA, 67 nt, Homo sapiens
gggcaccaagagaggcgagagaccagacaagcccagcagagcgagggacccgaaccggagggaagcg

SEQ ID NO: 14916 - RNA, 69 nt, Homo sapiens
agagagcgaaaaaaacggaggccagagcgggaggggacacagacaagagggcagagcgaagacgcaaga

SEQ ID NO: 14917 - RNA, 63 nt, Homo sapiens
ggaagagcgcggccagcaccccaacgggccaaagggaaacccagacgacaaggaaggccaagg

SEQ ID NO: 14918 - RNA, 82 nt, Homo sapiens
cgccgccgccgccacgcgcggagccggaggaggaggggagaggccggaggacaccaacaggaacccgcgcccagaagggaag

SEQ ID NO: 14919 - RNA, 82 nt, Homo sapiens
agccacaaacaacaacaagacacacccaacgaggcaccgacagcgggagccacacgccagcccgcggccggaacagccagaa

SEQ ID NO: 14920 - RNA, 88 nt, Homo sapiens
gggacagcccaagggccagcaccgcgcccaggcagagccagaccaccaacccacagaggaccagagagaggacgggcgaagacaccaa

SEQ ID NO: 14921 - RNA, 81 nt, Homo sapiens
cgaccaagacaccaacaccaggaagagaggaagcgggggccgagaccacacaggggaaggccaccgagaacaggagacagg

SEQ ID NO: 14922 - RNA, 74 nt, Homo sapiens
gcagccggaccccaccggacggcggggccacgggcgccgggagccccaagcccccagcccacgacacagcgacc

SEQ ID NO: 14923 - RNA, 74 nt, Homo sapiens
cggccacacgggagagaaggacaacacggcacgaacaaaccgggcggagcagaggcgcaacaggaggagagcac

SEQ ID NO: 14924 - RNA, 73 nt, Homo sapiens
aaaccaccaaagacaacagccaccggaggacaggaaccaagaccaggacaaagaagacccggagagacaagcc

SEQ ID NO: 14925 - RNA, 75 nt, Homo sapiens
cgcagggcgcccccgagcaaggggaacaaagcggcaaaagaacccacaaaaaaagccacaaaagcaagacgccga

SEQ ID NO: 14926 - RNA, 78 nt, Homo sapiens
gcggaacaccccagccccgacgcaaaacagaccaggaggagaagaagggaggcagagaaggaaagaccacagcaagac

SEQ ID NO: 14927 - RNA, 74 nt, Homo sapiens
ccggcgccaggcaccgcaggaagcggcggagacgcgcggaggggaaggaacgggaggaggaccgggaagaagaa

SEQ ID NO: 14928 - RNA, 70 nt, Homo sapiens
aaaggcacccgcgagcgcaacccaagcaccggaacccagacccaagaggggccccaggcaagacagcagc

SEQ ID NO: 14929 - RNA, 57 nt, Homo sapiens
gagaggcggcagcggcgggggcaggaggaagaggccagcccgggaggaggccacccg

SEQ ID NO: 14930 - RNA, 79 nt, Homo sapiens
cccgaagaaacaagcacaggagcagaaggcaagaaagggagaagccagaaaagcagaaagagacagcgggaaaacggca

SEQ ID NO: 14931 - RNA, 84 nt, Homo sapiens
aaaccggaccggcccgccacccgccaggagcaacagccaaaggcaggccgagcagaccacaagggccgccgggcagaagcacga

SEQ ID NO: 14932 - RNA, 38 nt, Homo sapiens
ccgaagacagcgcagcccgaggcgagaagagagaagag

SEQ ID NO: 14933 - RNA, 58 nt, Homo sapiens
acccaggagcgccagcccagacccgccgaagaccccggaacggaaaccaggacccacc

SEQ ID NO: 14934 - RNA, 84 nt, Homo sapiens
cgacagccaggcccgggagaagaggccccgggggccgcggcccggccccaccaggagccagcgaggacgacacagcaccgacgc

SEQ ID NO: 14935 - RNA, 74 nt, Homo sapiens
ccagaagcgggcggcgcgggggagaggaaccccaaagaggcccggaggaaacaggaacacccaagacaaaaagg

SEQ ID NO: 14936 - RNA, 76 nt, Homo sapiens
gggagaccaccgggagggcaggccaccggcacaagaagaaaagaaaggagggggagaaaaacaccccccaccacga

SEQ ID NO: 14937 - RNA, 80 nt, Homo sapiens
gcaccaagacaccagccgaaggccaccagagccccacccagaaaggcagaggggagagccagagcaccccaacccggaga

SEQ ID NO: 14938 - RNA, 74 nt, Homo sapiens
gagcagccgaccaggagccccagaagggaggcggagcgggcccacacaagaacacaaagggccagcagaaaagg

SEQ ID NO: 14939 - RNA, 74 nt, Homo sapiens
gcacagaaaaaaaaccaaggagccgggggaggcgcgggggcgaggaagagacaggcgggggagaagaagcaggg

SEQ ID NO: 14940 - RNA, 76 nt, Homo sapiens
cagcggaccagaggaaagcccagccaccgggcaaccccagagaccgacgcagaggccccacaaaggcagcccgagg

SEQ ID NO: 14941 - RNA, 80 nt, Homo sapiens
ggacgagacgcagaggaccaggggagcggacgcaggacgccccagccgggccaacccagcggacacaaggaccagcaaga

SEQ ID NO: 14942 - RNA, 83 nt, Homo sapiens
cggccgcggccaacaggcggagcgacggggaggcgcggccaacggggccacaagaaaggaagcacgcgcgcggacaagaccag

SEQ ID NO: 14943 - RNA, 78 nt, Homo sapiens
gcggaaaagcaaccaacaaccccacagaggacaggagaaaggcgaaggcaggaggggcaaccagccagagggcaccgg

SEQ ID NO: 14944 - RNA, 72 nt, Homo sapiens
agaagaccagggggcagcccaagacaaaggacagcaaaggaaaccggaagaggaagcacaccacagccccga

SEQ ID NO: 14945 - RNA, 79 nt, Homo sapiens
cgggcggaggccagaagaggcgccagaacgaagacccacaggcaagaggagcaagaggggggggcccccccgaagaaag

SEQ ID NO: 14946 - RNA, 77 nt, Homo sapiens
aggaaccaggacaacaagcagacgccaaacaagcaaacggcaccccaccaggggcgaagaccacaacgcaccccgga

SEQ ID NO: 14947 - RNA, 75 nt, Homo sapiens
gacgacgcaccgcaggcagacaaaagggccaaagaagggagagagaggagaacgccaagccaaccgaaaaagccg

SEQ ID NO: 14948 - RNA, 63 nt, Homo sapiens
ggaaacggaggaacacaaccagggagcggggaaagagccgcagacgcacagcaaccaccggac

SEQ ID NO: 14949 - RNA, 74 nt, Homo sapiens
accgagagcaccacaaggccaagggcaaggagacagaccgcacaggccgcacaacaacccacaagaccagcaca

SEQ ID NO: 14950 - RNA, 72 nt, Homo sapiens
cgagacgcaaccgcgcgcaaaaaccaccgggccaggaggcaaagaaggcaaagaaccaaaggaacagagagc

SEQ ID NO: 14951 - RNA, 69 nt, Homo sapiens
gaagaccaggaaagacaggaggccacccccaaagaaaagggaagccaccgcaaaaggggacgcaacggc

SEQ ID NO: 14952 - RNA, 71 nt, Homo sapiens
acaacacgcgacacaaaggagacgacccgacccacaaaaaggacagggaaccaggcacgcccgaacaagac

SEQ ID NO: 14953 - RNA, 68 nt, Homo sapiens
cccgagcaggaggacgagaccgaccaggccgccagcaagcagagcggaaaaggacgccccacagacag

SEQ ID NO: 14954 - RNA, 77 nt, Homo sapiens
gcccgccaagaccagagaaggaggagggaccacgcgcgaggcggcggccggggcagcgccgcgagccagcaacgggg

SEQ ID NO: 14955 - RNA, 74 nt, Homo sapiens
cggaggccgccacacgcccggccgcacgcaagcagacccaaagacgccacagaccacacagaaaacgcacggag

SEQ ID NO: 14956 - RNA, 82 nt, Homo sapiens
gcaccccacgggggcgagcggagcggcagaggcgcagaggcagaccagcagcggagcaggccgcggcagagccaaccaccgg

SEQ ID NO: 14957 - RNA, 49 nt, Homo sapiens
gcagaacaaccgcacccccaggacagaagcagacaggacgacccggaca

SEQ ID NO: 14958 - RNA, 78 nt, Homo sapiens
cccaggacgggcggaggcggggggaccggcgggcggaggccgggaagaaggagggacacagcagcgcggagagcggcc

SEQ ID NO: 14959 - RNA, 74 nt, Homo sapiens
gccagagggagcaaggaaagccgcgaagaaggagaaggaaagaaccggacaaccaggcccgagcggagcagcgc

SEQ ID NO: 14960 - RNA, 72 nt, Homo sapiens
ccggacccaacgggaaaggaagaaacacaggggaaacacgagagagcaacagccgacagagcggcaccgacc

SEQ ID NO: 14961 - RNA, 90 nt, Homo sapiens
gggagggagcgagccagcaagcggaagcgccccaccgcgggcgccaaggggagcagaaggaccggacacaggcgacacaccaaagaaaaa

SEQ ID NO: 14962 - RNA, 74 nt, Homo sapiens
ggccagagcggggcgaccaggaaaggagaagacagaggagccagaccaagagacagcacaggcgagcgagcaga

SEQ ID NO: 14963 - RNA, 58 nt, Homo sapiens
gaagaggagaggggaagagccaccacgggcgcccgacccgcaccaacggagaaaccag

SEQ ID NO: 14964 - RNA, 81 nt, Homo sapiens
aacaagagaagagacacagaaacggaggacaagaagccggacacaaggcgccacggcagcgaacagccagcaaagacaaga

SEQ ID NO: 14965 - RNA, 75 nt, Homo sapiens
ccggccgccgcaggagagagaccccggagccagcgccgcaggggccaaggaaggaaggaggacacaggacaagaa

SEQ ID NO: 14966 - RNA, 71 nt, Homo sapiens
caggggaaaagaggacccgccaggcggagaacggaaaagcaccaggaagcagagaggaccgcagaagggaa

SEQ ID NO: 14967 - RNA, 79 nt, Homo sapiens
gcagcgccagcagcggacaggcacagacaaccagcccacagaacccagcccgggggggacggagaaaggaacgcagaga

SEQ ID NO: 14968 - RNA, 77 nt, Homo sapiens
cggggaacaaacggcaagagccagaagcccggcggaagaaggccagcagagaagccgcaggagacccgccagaaagc

SEQ ID NO: 14969 - RNA, 103 nt, Homo sapiens
aagaacaaacgagcaccacggcgaccaacggacgaacccaaaacacccggggcgaccaacggcggacaggaggagcaagaaaaaaaacgggccagacaacagc

SEQ ID NO: 14970 - RNA, 83 nt, Homo sapiens
gccaagcaaacgcagaaggacgcccacgagcaaccaagaggggaagaggagagcgccgaacaacgaagaagggcgaagggagg

SEQ ID NO: 14971 - RNA, 76 nt, Homo sapiens
gagaaggcagggcaaaccagaaagacgggaaaggaggacaaaaggaaaaaaaaaaagggaagacagagaggcgggg

SEQ ID NO: 14972 - RNA, 72 nt, Homo sapiens
aaaagcaaacaaacgggggacaacccaagagaagaagcgcgaggacagaaacccaaagaaccaaagccgaga

SEQ ID NO: 14973 - RNA, 65 nt, Homo sapiens
aaaagcgagaaggaagaaagacgcaggccacaaaaacccaacaggagcggcgcccggaagcggcg

SEQ ID NO: 14974 - RNA, 74 nt, Homo sapiens
gccaaacgccggggaccccggcagccacccaccgccgccgcccccagggggaaagcaggggagaaaagaaaaga

SEQ ID NO: 14975 - RNA, 76 nt, Homo sapiens
agaaacaagaagccgcagcgccgcgcaaagaaagaacggaaaacccagagaaggggcaggcgcagcccgcaaccag

SEQ ID NO: 14976 - RNA, 76 nt, Homo sapiens
gggaacagacgcagggcagggccccgcccggcggggaagggaacaggaccaacaccgaccccaagagaagaggaaa

SEQ ID NO: 14977 - RNA, 79 nt, Homo sapiens
agagccaccggcaccccggaccgaccaccagaacgcacaaggagcgggagccaggagacagccagagaagcccacgacc

SEQ ID NO: 14978 - RNA, 73 nt, Homo sapiens
acacccaagaagccacaaagagaaagcaagaggagcagaaacaggacgaccagaaaagacgaagacgagcccg

SEQ ID NO: 14979 - RNA, 85 nt, Homo sapiens
gcccgccacccgcgcgccgccgccgaggagaaagcaagaggagccaggagcacggggggaacaagaccgccgggacggaagacgg

SEQ ID NO: 14980 - RNA, 78 nt, Homo sapiens
gaggaccggacccccgcaaggcaaccgggaggggaggccccggcagggcaggacaggcacccgaaccgaagcagaacc

SEQ ID NO: 14981 - RNA, 76 nt, Homo sapiens
acagcgagacccgccaggagcaaagacacgagagggcgaagggcgccaacgcggaaaaacaagggcaacaccccgg

SEQ ID NO: 14982 - RNA, 83 nt, Homo sapiens
ccgggccgcggggggcggcggcgcgagccagcggggccggagaaggaagcgccggccaaacgagcacagcaaacgcgaaagag

SEQ ID NO: 14983 - RNA, 72 nt, Homo sapiens
gccggccccagagcccaccgggaggagaaggaggaggaacgggcaacggagacagaaaccaggaggccaagc

SEQ ID NO: 14984 - RNA, 70 nt, Homo sapiens
ccgggcagagcccggccgaaaaagaaaacccacccgacccggaagccacagggcacaagacccgagaagc

SEQ ID NO: 14985 - RNA, 91 nt, Homo sapiens
cgaacccgagaccaacgggaggagcggggggaaggccagaagcggacccagaagaggggagcagcaaggaggaagacagccggggccggag

SEQ ID NO: 14986 - RNA, 71 nt, Homo sapiens
aaacggaagacgagacaaagcaaaagccggacagcaggacacaaaccaaaacgagagagagccgccaaccg

SEQ ID NO: 14987 - RNA, 79 nt, Homo sapiens
cccggaaccccgaaaccagaaccccccacggaaaggacgaaagaaagaagcagccccagaaagaaggacgccgcggccg

SEQ ID NO: 14988 - RNA, 72 nt, Homo sapiens
aaagggaagcacgcgaagacggaaacgcaaggggaaagccccaggacgccagaccaaaagggagaagacgca

SEQ ID NO: 14989 - RNA, 85 nt, Homo sapiens
acccagacaggggcgaaggcagaggacacccaggccacagaggaggaaagagaggggaaagaagcagccaagccccaaggaacca

SEQ ID NO: 14990 - RNA, 62 nt, Homo sapiens
cagcccgcccgccgacgcccgcgccggcgccccggaaacgcgaagacgacgagcgcaccaag

SEQ ID NO: 14991 - RNA, 70 nt, Homo sapiens
gagcagaaagaacagaccacccgaaaaagacggacagcacgaaaagccgcggccaggaggaagaggcagc

SEQ ID NO: 14992 - RNA, 58 nt, Homo sapiens
gggaggcagccgacgaccacagagaccgaagagacaccggcgaacaacccagcgggac

SEQ ID NO: 14993 - RNA, 69 nt, Homo sapiens
gggccgaagggggcccgccccgccggccacgggcgggaggccgggggcagaggcacaacaaggccagcc

SEQ ID NO: 14994 - RNA, 70 nt, Homo sapiens
ccagcaccggccccaccacagggacagcaacagaccagcgagagcggaccccagccggccgccggaccca

SEQ ID NO: 14995 - RNA, 70 nt, Homo sapiens
acaaccaaacacggagaggaagggcaaaacgcagaagggaagcaaaaggaacagggggcagaaagacgca

SEQ ID NO: 14996 - RNA, 79 nt, Homo sapiens
gcccccagcggcccgaggcacgagcaacaacggagaaaagaagacgacacaggcagacagacgagaacaaggcaagaaa

SEQ ID NO: 14997 - RNA, 75 nt, Homo sapiens
accaagcggaaaaccgaggacaggacgagacccaggcacaccaaagacaacaggcacgggggaaaagaagaacac

SEQ ID NO: 14998 - RNA, 76 nt, Homo sapiens
caccccaccaaggggggcaggacacacggaacccaaacgcggaccacagaaaacacggacccccggaagcacgaaa

SEQ ID NO: 14999 - RNA, 74 nt, Homo sapiens
ggcgcccggagggcagcgagggggcgaggaagagacaggcgggggagaagaagcagggccaaacgcaggagaaa

SEQ ID NO: 15000 - RNA, 71 nt, Homo sapiens
cgcccagcgccgccccgcgcgcgcccgccacggcgccgagccgcggccgaaggcccgaagcccgaaagaga

SEQ ID NO: 15001 - RNA, 59 nt, Homo sapiens
gccacggagacccacccagcgaccccgaccggagcagcggagccgcggaagagggaaag

SEQ ID NO: 15002 - RNA, 34 nt, Homo sapiens
ccgagcccagcaccggaggcaagcaaccgcccag

SEQ ID NO: 15003 - RNA, 37 nt, Homo sapiens
accgcccggaggccacagggcagacaaaacagaggag

SEQ ID NO: 15004 - RNA, 76 nt, Homo sapiens
ggccgcccgcaggacaccgagggcccagccgcgcaccagcgaccggagcggggggccgagcacgggcagagaaagc

SEQ ID NO: 15005 - RNA, 67 nt, Homo sapiens
agagaccaccggcacagaaagggagggcgagagacgaaaaagagccacgcccccacgagcgcccccc

SEQ ID NO: 15006 - RNA, 73 nt, Homo sapiens
ccgagaggggagaagggcggaccgcgcacgggcagaaagcgaagcagaagccgagaacagcggcgagccggaa

SEQ ID NO: 15007 - RNA, 79 nt, Homo sapiens
cgagccaaacaccgggcgagcgccgaggcggggccagggagcgcaaggccgggccgggccgggagggggcgggcggcgg

SEQ ID NO: 15008 - RNA, 78 nt, Homo sapiens
aggcaacggggaccccggagcccagaagacagagggcgagcaggccaagcagaaaaacccgaaaaaagaaaaaggaac

SEQ ID NO: 15009 - RNA, 106 nt, Homo sapiens
gaaggagcagcagagagccgggccagagccaggggccgggagggcgccaggagcggcgagccgaagcacggaagacagagccgcacagacgggcaggggagccggg

SEQ ID NO: 15010 - RNA, 64 nt, Homo sapiens
aggccaagagagccgaacccaccgagccagggagagcacggacagagggaagggaacgcccaag

SEQ ID NO: 15011 - RNA, 75 nt, Homo sapiens
ccagcccggcgcccgccgccgccccggagcgccggggcggccacacccaagaccggcagacagaacaaaaaaaca

SEQ ID NO: 15012 - RNA, 75 nt, Homo sapiens
aaaaaagcagacaaccagaagaaagaaaaaacaggcgcgccaggccgacgccgagaagaggaagaacacccaaag

SEQ ID NO: 15013 - RNA, 72 nt, Homo sapiens
caccccccaaacgacgcagccacggagagccccaaggcacaaaagaggaggaaagaagagcagcagagagac

SEQ ID NO: 15014 - RNA, 72 nt, Homo sapiens
cgcgagggcgccacaccaaagcacgcagcacaagcccccggagagagacggggcccagagcagcaggacacc

SEQ ID NO: 15015 - RNA, 55 nt, Homo sapiens
cgggcagaggaaggcgaccagaccgccgacccagcggacgccaagaagaaaggcc

SEQ ID NO: 15016 - RNA, 60 nt, Homo sapiens
gcggaggcggcgggcagcgcccgagaaggaacagaacagacaccaccgaaacgcgccaag

SEQ ID NO: 15017 - RNA, 82 nt, Homo sapiens
ccgagaagcgagagaaagagccccgcaccacaaacaaagcagagcccacagacaaggccaaaggcaaagcgcacagaggggc

SEQ ID NO: 15018 - RNA, 80 nt, Homo sapiens
ggcagccgccgccaccccgcggccgcacccccgccccagggcaaggagagccaagcggaccaagaaggcaagagaggaag

SEQ ID NO: 15019 - RNA, 82 nt, Homo sapiens
aggagggaagacaacaaaaacaacgcaggacagcaaagcacaacagcagaccggcaagcgcgacaaaggaaagagaaagccg

SEQ ID NO: 15020 - RNA, 86 nt, Homo sapiens
cgcagcccgggcccaggccccggcagcgccgggacaaggaagccaggagggaagcccagaagacgcacaagagagaccgaccaaac

SEQ ID NO: 15021 - RNA, 105 nt, Homo sapiens
cgaccgaaaacagggaggacagaggaaaagccccagcgcgcgcccggacagacaagcggccggagcgggacggaaggggacacaggcaagaccacacggacgcac

SEQ ID NO: 15022 - RNA, 65 nt, Homo sapiens
ggaagaaaaacaaacacacgcaaaggagaaaggaaccgacaggaaaggaaggcaaagccagcccc

SEQ ID NO: 15023 - RNA, 69 nt, Homo sapiens
cggaaaggaaaaagaagcccggacaccgggagagacaaaggggcaagaccagcaaggaaaaacagaggc

SEQ ID NO: 15024 - RNA, 68 nt, Homo sapiens
aaacaaccagaaggggagaaggcaggcaccacaaaaaggacaggacaaaagccacgaggcacaaagag

SEQ ID NO: 15025 - RNA, 67 nt, Homo sapiens
acaggggaaagcacaccagcagcccggacagccgcaggcaccaagaagaccaacaagcagaagagcc

SEQ ID NO: 15026 - RNA, 118 nt, Homo sapiens
acaacggagaaggaaaagaaccagaagcgagagaaaagcccccaaaagcagcacagggaccaagaaaggcccagggaccaaagcccggacaaggcccgagcaccaggaccgcagaagg

SEQ ID NO: 15027 - RNA, 85 nt, Homo sapiens
ggaggccgcggcccgggccgcaccagagcgcccggcccacgacacaggaagaagacagaccccaagaagaagcggaagaggagcc

SEQ ID NO: 15028 - RNA, 78 nt, Homo sapiens
cgagaggccgcgcacgcgcgccagacaggacccaccggccagccgcaagggccacagggcagagcgggaggaggcgcc

SEQ ID NO: 15029 - RNA, 78 nt, Homo sapiens
gcaaggagaaggacgccagggcggaggaccccaacgaacaaaaccagccaagcagaggagaaaaagacagcaccccag

SEQ ID NO: 15030 - RNA, 77 nt, Homo sapiens
gcaaggaaagccagacaccaacaggagcaaacaaagaaggcgaggacacagagaagaaagagagcccagcaaaaaac

SEQ ID NO: 15031 - RNA, 85 nt, Homo sapiens
gggaacaagcacccgccaggcaggagcagcaggcaaagacccccaacaggcaccaaacgcggagccagcgcccggcaaggagcga

SEQ ID NO: 15032 - RNA, 73 nt, Homo sapiens
cgcagcggcggcggagcagagcgccccagccacgacagcaggaagcggccaaggacacgccagggaggagaac

SEQ ID NO: 15033 - RNA, 64 nt, Homo sapiens
aggaagaggaacccacgaaaaggagggagccaaaggggacaggaagcggaaaagacccaagcgc

SEQ ID NO: 15034 - RNA, 53 nt, Homo sapiens
aagagaaaacgacggggcacacaagggggggagccgcacgacccgaacgccag

SEQ ID NO: 15035 - RNA, 81 nt, Homo sapiens
gaagacggccacacacggggacacgcgggggcggcacccggcaaaggaagggaaccccacccagaagaaagaaaagcggcg

SEQ ID NO: 15036 - RNA, 74 nt, Homo sapiens
aaaagcccaaagcgagccaaagggccggaggaggggaaagcgcgaaaaagggcgcaaggccaagccagagacac

SEQ ID NO: 15037 - RNA, 80 nt, Homo sapiens
cgccggcagggacgggcgccgacgccgacaagaggagagaaggaggccacaacaggcacaaagagagaaggaacacccac

SEQ ID NO: 15038 - RNA, 108 nt, Homo sapiens
cgagcgccccaccagcaggaaccagggcgagccaggagcagcagcccgaagaaaacaccggagcccaagacaccaaaacagacgcaggcaagaggcagaaggacaaag

SEQ ID NO: 15039 - RNA, 82 nt, Homo sapiens
ccggccccggcccacaggggggggcaaacccgagagaacggaccgaggaggagaaggggcggcccggaggccgagaggagcg

SEQ ID NO: 15040 - RNA, 85 nt, Homo sapiens
cgggacgccagacaccaaccagagcaaaccagccagcacgggggcccagccagccagcagcgaggggggacggaggcggcacggg

SEQ ID NO: 15041 - RNA, 75 nt, Homo sapiens
gcccggggggagcggccagcaggagcgccggggccggggcgaacgcggccgggggagccacggaccagggggacg

SEQ ID NO: 15042 - RNA, 50 nt, Homo sapiens
caccacccgccagcaaggaagcaagccagaaagccagggacgcagaacgc

SEQ ID NO: 15043 - RNA, 74 nt, Homo sapiens
gaaggcagcaccaggaagacaggggaacacccccagagagaggccaggaggggaggagggagggccacggcaag

SEQ ID NO: 15044 - RNA, 85 nt, Homo sapiens
cccggcggccgaagacacgcgacccggagacagcccaaaacccggaagagcgccccaggagaaacaaccccagcgggacgaagcg

SEQ ID NO: 15045 - RNA, 69 nt, Homo sapiens
gagacgccacggaacgcaggaaacaagccaaggggcccaccgaggagaaacccaagcagaagcacaacc

SEQ ID NO: 15046 - RNA, 77 nt, Homo sapiens
ccagccaagggaagagacccccagagaagggcggagaacggaaaagcaccaggaagcagagaggaccgcagaaggga

SEQ ID NO: 15047 - RNA, 82 nt, Homo sapiens
accagcccgcgcccaggggccccagagcccaggagagaaaagaaggggagccgccaccaaaagcagacggaaaacccacggg

SEQ ID NO: 15048 - RNA, 58 nt, Homo sapiens
ccaggggcacgcccccccaccaccgcccacgaccaaacacagccacgcaaacaaccac

SEQ ID NO: 15049 - RNA, 80 nt, Homo sapiens
gccagcccggggcgagccgcccgcccgccgagcagccagagccaaggacggcgaagagccaagagcagagaaaagaagac

SEQ ID NO: 15050 - RNA, 73 nt, Homo sapiens
aacgagggcgagcagaggacgacaggccgggagaaagaaaaccgacgcgacaaaaggccgaagcgccgaagcc

SEQ ID NO: 15051 - RNA, 79 nt, Homo sapiens
gggcagagacgaagaccccaccagcacaagaggcccgcccccagccaagccacaaaagacaagacacgagaagggccaa

SEQ ID NO: 15052 - RNA, 76 nt, Homo sapiens
ccacggagggaaagaccaggcagacaacccagaaaagaaaaggccaggggcgccgaaaaacccgggaacaaacagg

SEQ ID NO: 15053 - RNA, 71 nt, Homo sapiens
gagcgaacgcgcaacagggccgcacgcaagggacaccggagaccgaagaacggaagcgcacgaacaaggcg

SEQ ID NO: 15054 - RNA, 82 nt, Homo sapiens
aaacaggaacaggacgacccaggagacgcaggccaaggagaaagcagaacagacaggaaggaggggaaagaaaaagaagaaa

SEQ ID NO: 15055 - RNA, 80 nt, Homo sapiens
gaaccacggacaacccagaggacaacgaaggcgacaagggaggcgaggacggacaaaaggaaacggacgggaggccagcc

SEQ ID NO: 15056 - RNA, 106 nt, Homo sapiens
agagggcagaaaagggagaaccacagacgaggacgaccccccgacgccaaggaaaaagggagagccgcccagagaaagcacaaggacaacaggaaaagagcaacag

SEQ ID NO: 15057 - RNA, 79 nt, Homo sapiens
cgaaggagcacggccgggcgcggaaaccacaagcagaccccgcggcgcgggcaacggaggcccaggacagagcccaggc

SEQ ID NO: 15058 - RNA, 72 nt, Homo sapiens
ccgaggcgcccgcggggcggggaccgccgcccggggcaaagggccaggcgaaaagaggcaagaaggaaagag

SEQ ID NO: 15059 - RNA, 74 nt, Homo sapiens
ccaagacccaacagggccaccacggaacaagcacaaggcgcggggcacaagcgggccagaagcacacccgcccg

SEQ ID NO: 15060 - RNA, 77 nt, Homo sapiens
ccacaacaccgccagcaggcacaggggggggagccgcacgacccgaacgccagagacaaaaccagccagaccaaggg

SEQ ID NO: 15061 - RNA, 73 nt, Homo sapiens
gccagcgaaaacgcccagacaaggcgaccagccagcccgggagacagagggagccagcagacgcgaccgaccg

SEQ ID NO: 15062 - RNA, 80 nt, Homo sapiens
ggcgcggccgcggagcccccgaggacccaaggccagccagccccaggcaccagcggacaggacagggaggacgaaggccc

SEQ ID NO: 15063 - RNA, 78 nt, Homo sapiens
gcccgcccccgccccgcacaaaccccagccacagcggaggacgaggccaacaaggagcaggaacagaggaggagcgag

SEQ ID NO: 15064 - RNA, 60 nt, Homo sapiens
gacagaccgaagcaaaggccccccagccagcgcagggcagaaggcccccccgagagagga

SEQ ID NO: 15065 - RNA, 58 nt, Homo sapiens
ggggggccggcgcagacggccaaaggacgggacaaaggagcacgcccagagcccaccg

SEQ ID NO: 15066 - RNA, 70 nt, Homo sapiens
aaaggggaggaggaggcggccaaaggggccggacgcgagagaaaaggcgccacccgcagcaccagcagcg

SEQ ID NO: 15067 - RNA, 70 nt, Homo sapiens
gcaaagaaagccagaagaggcccggaacccaagaagggaagccgaacaagccgaggagcgggccccagcg

SEQ ID NO: 15068 - RNA, 75 nt, Homo sapiens
caacgaaaacacgaaagagcaaaggacaaaaccgggaagaaaagaaaggagcaaagcaacagaagacaaggcgca

SEQ ID NO: 15069 - RNA, 55 nt, Homo sapiens
acgcccgcaccacggggacccagcagagaacacccagccacccaccagcgacaag

SEQ ID NO: 15070 - RNA, 81 nt, Homo sapiens
cacaacaagcgccggcgcgccagggcccggggccgacacacagaaccacacagcagcaccccgggggcacagcaccaccag

SEQ ID NO: 15071 - RNA, 40 nt, Homo sapiens
gcggagccgcgcccccgggcaagaagaaacacacgcgcgg

SEQ ID NO: 15072 - RNA, 65 nt, Homo sapiens
gcacgcgggggcagccccgcggaaaacagaggcccaaaaaagcaaaacgggagaaccagacaaac

SEQ ID NO: 15073 - RNA, 40 nt, Homo sapiens
gaggccaggaaaaaacagcacgccgcaggcgccaaaagga

SEQ ID NO: 15074 - RNA, 94 nt, Homo sapiens
aaacgcccccaacccagcgcaaaggaagaggaaggaaaaagcaaaagggcccaaggcccgaccaggaacaaagagagaaagacagccaagccag

SEQ ID NO: 15075 - RNA, 56 nt, Homo sapiens
agcaaaccgggccacagaaacagaggcggagaagagcagaccccacaaaacgcacg

SEQ ID NO: 15076 - RNA, 88 nt, Homo sapiens
gagagcgcgaggcgggggccggccccggaggcggcggggcggcagagagcggggcggcggcaggacgggcccagggaacacgggagcc

SEQ ID NO: 15077 - RNA, 75 nt, Homo sapiens
cgccacgaacgcagaccagggggggagcggccacacaacccgcggggccccccgacggggagcgacgggcgcgca

SEQ ID NO: 15078 - RNA, 77 nt, Homo sapiens
agcccccacgacacagaacagagggcagccgcaagaaagacggcacagaaaaacaccgacacaacaacagcccccac

SEQ ID NO: 15079 - RNA, 71 nt, Homo sapiens
gccggcgggcgggggccccgcgccgcggccgagcagcgggggggcaagccgagcggcaacgaaacaggagc

SEQ ID NO: 15080 - RNA, 54 nt, Homo sapiens
gcacccaaccaaaaccaggccaggaacccgcgcccagaagggaaggccacggac

SEQ ID NO: 15081 - RNA, 71 nt, Homo sapiens
gaaacgccgaaaaacccaaggcaggggaggcagaagagagccggaggaccgaagcacggggaggccaaggc

SEQ ID NO: 15082 - RNA, 81 nt, Homo sapiens
agggcaggacaccgacaggaacagggaccacggggggagagaacagcacacagaggcgcaaggggaagagaaaagacagaa

SEQ ID NO: 15083 - RNA, 77 nt, Homo sapiens
aagcgcggccccaggaaccggaagagaacagaagcccaggaaagaagaaaggccccaggacaagaacgagccagcaa

SEQ ID NO: 15084 - RNA, 90 nt, Homo sapiens
gcgggggacacgcagccggagcccgggaggggccgcgccgccaccgcgaacaggagcccgacagaaggaccgggacgagccaagcagaag

SEQ ID NO: 15085 - RNA, 70 nt, Homo sapiens
aaaagcgccgccccccgcggggcaagcccaaagacaacaggcccccccgccccccgcggagccccgccca

SEQ ID NO: 15086 - RNA, 77 nt, Homo sapiens
ggacaccaagacaaggacccaggaggaggagagggcaacaaaacccacaggagaaagacagcaaagaaaaggagaag

SEQ ID NO: 15087 - RNA, 74 nt, Homo sapiens
ccacccgccaggcaacacgacaggcgcaggaccccggacaaacaacaggccaggccgggcaccggggaaccaag

SEQ ID NO: 15088 - RNA, 72 nt, Homo sapiens
accgaagagccgaggcgaggagcagcggggcaagaacacgggaaaggagaagggaaacaaaaaagcacacaa

SEQ ID NO: 15089 - RNA, 72 nt, Homo sapiens
cacagcagcccacaagcagggaggcggcgcacagcacagaaaccaagaacaggcaacacaacaggaggcgca

SEQ ID NO: 15090 - RNA, 60 nt, Homo sapiens
caccgagccagcccaggaaaaggagaggaccaggcccggagacgcgacgggcaccacaga

SEQ ID NO: 15091 - RNA, 70 nt, Homo sapiens
cagcaggacgcggccgaaccaaagagcccaaaagagaaagggcgcaaaaagaaagaaaacaaaagccagc

SEQ ID NO: 15092 - RNA, 75 nt, Homo sapiens
cgacagggcggcggcgccaggcagggcgcaggccgagagaggggcccaggccggggaacgggagccgcacgggga

SEQ ID NO: 15093 - RNA, 68 nt, Homo sapiens
cagccaaacgggaagaaaagaaaacacagcaagaggcacgcccagagcaagaagggcagcaagagcaa

SEQ ID NO: 15094 - RNA, 112 nt, Homo sapiens
gagggaacaggacaacagggacagacagaccccagaaacccagaggagaggcagcagccaccggaagagaaaaccaagaacgacagaggggcaaaaaaaaaagccaacaggc

SEQ ID NO: 15095 - RNA, 78 nt, Homo sapiens
gacccgcagggcgccaaagcgagagagggaagcgcccggccgccaaaacagaagaggcaaagcccagccacagcagca

SEQ ID NO: 15096 - RNA, 84 nt, Homo sapiens
aacgagaagccaccggaagcggaagccaggcgccgaccccgacagaacgggccccgcacccgcggccccggggcagcggaggcc

SEQ ID NO: 15097 - RNA, 75 nt, Homo sapiens
agccggacacgcagacagcaagcggagcggaggcagacacacacggggggagagggagggggggacacggccgcg

SEQ ID NO: 15098 - RNA, 75 nt, Homo sapiens
gccgcacgaacgcccaacgagaccagcgagacggcccagaggggaagaaagagcccaaggcacccaaagcccagg

SEQ ID NO: 15099 - RNA, 66 nt, Homo sapiens
ccggggccggggcgaacgcggccgccaccgcaccagccaagacagacgggccagacaaccaagggg

SEQ ID NO: 15100 - RNA, 70 nt, Homo sapiens
ccggcacacaaagaggaaaggacacaaggcccagaaacacccgggccgcgggcggcacaccagaaaagag

SEQ ID NO: 15101 - RNA, 72 nt, Homo sapiens
gcagaccgcagagagagaaaccccacaagacgaagcagacgggcagaaaaccaggcgaagcaggcccaagag

SEQ ID NO: 15102 - RNA, 55 nt, Homo sapiens
gaagacgaacaaacagcaagaaagaccacaagaccaagaagacccagggccccca

SEQ ID NO: 15103 - RNA, 74 nt, Homo sapiens
ccagcaagacagaaccgccaaagcgcggaggaccacccgggcacccggacaccgcccccgaaagagaaggcgga

SEQ ID NO: 15104 - RNA, 59 nt, Homo sapiens
ccgacggaaaaccgaggaagccaaaggcggaacaaccgacggcgaagaaggcagaacca

SEQ ID NO: 15105 - RNA, 66 nt, Homo sapiens
aagagacccgacagagaagcgaggcagaaaaagaccaaagaagacggggcaccgaaaagagacgga

SEQ ID NO: 15106 - RNA, 88 nt, Homo sapiens
gcggagggcggagagacccgggggcgagcacaaacggggcggggccggggaacacacaggagaacgcgacacacaccaagcgaagccc

SEQ ID NO: 15107 - RNA, 70 nt, Homo sapiens
ccgacacaccggcacgaaaaacccgcagacaccgggaacgacgaggggagagaaggaggagaccgcgacg

SEQ ID NO: 15108 - RNA, 63 nt, Homo sapiens
gggagacgcccaccggccgcgagcgagagagacggaggcagccggggagggacccagacacca

SEQ ID NO: 15109 - RNA, 68 nt, Homo sapiens
ccaggaccagaccccggcgcacacaggacagcagccccccccagacccccagaagaagagagggcgaa

SEQ ID NO: 15110 - RNA, 80 nt, Homo sapiens
gaccgaacggcgcccagccgcgggagcccccggccggaaccaacagaggcaaaacccgacgcaaacgacccagaaggcag

SEQ ID NO: 15111 - RNA, 75 nt, Homo sapiens
cccccgccgccgccgccgcgcgccaaagcgcgccgccccgggcaaaagaaccagaagccgacgaagaccagcgag

SEQ ID NO: 15112 - RNA, 80 nt, Homo sapiens
gcccagaccagagagcaggaccggggacaagcgcgcagacgcagggacacagaagacccgcccacacccaggccagaggg

SEQ ID NO: 15113 - RNA, 79 nt, Homo sapiens
cccaggaaaaagccaagagagaccggagaacgcgacaggcggcgggaacaaggcaccccacccagccagccggagggac

SEQ ID NO: 15114 - RNA, 76 nt, Homo sapiens
aagaaaagaggcaccccaaagagcaacaaaacagagagcaggccccagcaccacacaacgcaggccaccgcgagca

SEQ ID NO: 15115 - RNA, 63 nt, Homo sapiens
caccaggagcccgagagagaaggaagaaacgacggacgggagagcacggacaccacagggacg

SEQ ID NO: 15116 - RNA, 75 nt, Homo sapiens
ggcgaggcggcgcggccaggccaccccggggagccaaccagcgccccggagaagcaacagacccacgagacaaga

SEQ ID NO: 15117 - RNA, 53 nt, Homo sapiens
ccaagcccgaggcccagaggaggagacaagacgcgaccaggaggccggggcca

SEQ ID NO: 15118 - RNA, 90 nt, Homo sapiens
gccccgcagggcgaggacggccgaaccccgcgcccgcaggacgccccagccaggaagcgacagcgggaaaaagaagggcgaaaaaggcca

SEQ ID NO: 15119 - RNA, 78 nt, Homo sapiens
gggcacacggccacgccggcccgcccaccagcaagcgcacccagcaccggccacgaaacagagacacaccgacgaacc

SEQ ID NO: 15120 - RNA, 76 nt, Homo sapiens
ccgcaggcgcgcccaacaccccacagcccacgacgcccccgagaccccgaccgccggccccagcccccagagcgcc

SEQ ID NO: 15121 - RNA, 56 nt, Homo sapiens
ggaacggcaaaccccggccggggagaagccaaaacagggaaagcccacagcgaagc

SEQ ID NO: 15122 - RNA, 93 nt, Homo sapiens
cagcagacgaccccgggcacgccgccccagagcacaacacagaacccaacggccgaccagggcaggccggggacggacaccacgacaaggcga

SEQ ID NO: 15123 - RNA, 72 nt, Homo sapiens
gagagcacgggaaacccggggacgcccggaggggccccggaaacagcacccagacggccgagaccaccaggc

SEQ ID NO: 15124 - RNA, 81 nt, Homo sapiens
ccgacacaaaaaggagacccaaagccaaggagaagccccagcggcagaagccagagaaccagccccaagcacgggaagacc

SEQ ID NO: 15125 - RNA, 78 nt, Homo sapiens
gacagaagcaggggaaccaacagaagggaagacccagaaagacacacagaaaaagcaaaggagaaagagaaaaaaaga

SEQ ID NO: 15126 - RNA, 84 nt, Homo sapiens
cccaagaaacgggcagccaggcccccacagcccgcagggacacgggagccccgcaggacccccgcacacgcccacacagcagca

SEQ ID NO: 15127 - RNA, 99 nt, Homo sapiens
aagacagaccagaccgggcgggggcccggccagcagggagacacaggccaggaaagaacagccaaagccaaagaagacaaaaaagggaaagcccgccag

SEQ ID NO: 15128 - RNA, 90 nt, Homo sapiens
ccggccgcgcgggccgggaggggacggccgccggagccgcgaggccaaccgagccagcaggagggcggacgcagaccgagcaacgaggcc

SEQ ID NO: 15129 - RNA, 79 nt, Homo sapiens
aacggccaaccggcaagaccagacgggaacgggagacaagcgcagcgagcagaaagcgaagcagaagccgagaacagcg

SEQ ID NO: 15130 - RNA, 129 nt, Homo sapiens
ggagccccgaagagaccccagacgccgaggccccagaacaagcggagccaccggcaccacggggcaggacaggaagacagacagagaacggacagggcgagggggggggcgagacaccgccgcgcacca

SEQ ID NO: 15131 - RNA, 86 nt, Homo sapiens
gcgccacaccgagcgcgaggcgcggagagcaacgccgggacagcgcaaggcccagcccccggacacgggcggccggaaggcgaggc

SEQ ID NO: 15132 - RNA, 74 nt, Homo sapiens
ggagaggcgagccgcgagagggccggcaggcccgggaagggagagacagcacggcccaggcggccgaaccgggg

SEQ ID NO: 15133 - RNA, 79 nt, Homo sapiens
gcaggaggagacagaagcggaacaccagacgaaacaggagaaaccccagaggaacccacgagaaaaacagacaaaggag

SEQ ID NO: 15134 - RNA, 75 nt, Homo sapiens
gggaggacaccacccacagaggcgcgaacagggcccacccgccacgacacaggggaagaagaccaccgcacagac

SEQ ID NO: 15135 - RNA, 85 nt, Homo sapiens
gcgacgcgcacggaaagagcaggcggcggcggcggaacgccaggcaggagagacagcgcggagaccacccagccggcgaaacaca

SEQ ID NO: 15136 - RNA, 54 nt, Homo sapiens
cgggaagacagacaaaacaggagaagaggaaaacggccacaggacaaagacaga

SEQ ID NO: 15137 - RNA, 62 nt, Homo sapiens
aaaccggaaagagaaacagagaacaacccggcccagaaaaggcaaagcagaccaggacacgg

SEQ ID NO: 15138 - RNA, 66 nt, Homo sapiens
cacaaggaacaccgccaccccaggagaaaagcggaaaaagcaggacagggggaggaggagcgcaac

SEQ ID NO: 15139 - RNA, 70 nt, Homo sapiens
ccaggagggagggacccagcagagcacgacagaacgccagggaagaaaaaggccgcagacggcaacggcc

SEQ ID NO: 15140 - RNA, 69 nt, Homo sapiens
cagaagagacaagcaacagaagaaagaagggggccaaacaaccagaaaaggccgaagaggggaaagcag

SEQ ID NO: 15141 - RNA, 68 nt, Homo sapiens
gggacagcaacaaacaaagggaaacacaagaagaggcccagcagagggacgaaagccgaaagaacgag

SEQ ID NO: 15142 - RNA, 76 nt, Homo sapiens
cgcagccgcgcagggagaagaggcacccagagaagacggaacaagaaaggaccaggagccccgggcaacagacaga

SEQ ID NO: 15143 - RNA, 61 nt, Homo sapiens
aacaaagaagcaacgcgagcaaaagccacgaccacagcaaggcgggaaaacggcacaaggc

SEQ ID NO: 15144 - RNA, 53 nt, Homo sapiens
cacaacacccgcccccgcaaaacgcaggacagccccgccacccaacgaagcgg

SEQ ID NO: 15145 - RNA, 84 nt, Homo sapiens
cccacgggcggcggcggggccgagcgcggcccgcaggcgagcgccgaaaccgggcgcaggcggaggacagcagcggacggccgg

SEQ ID NO: 15146 - RNA, 77 nt, Homo sapiens
ggagacgacaggcgggaggccccccgcgccgggaaccagccacaaaaagccaggagaaagaccagaagaaacaacag

SEQ ID NO: 15147 - RNA, 56 nt, Homo sapiens
cgcagggcgcccccggagaaggcaaccaaaggcaggacacaaaaacaaccgaaaga

SEQ ID NO: 15148 - RNA, 73 nt, Homo sapiens
gggggccccgcgccgagggacgccaccgcacacgcaaagggcacaagcccccgaagacaagaggccggggaga

SEQ ID NO: 15149 - RNA, 74 nt, Homo sapiens
gcgaaaaccgacgccaaaagcagaaagaggaacaggggacccaggaggcagcggcaggcaagagccgcagacag

SEQ ID NO: 15150 - RNA, 80 nt, Homo sapiens
ggagccccgggaaccagcgcccgccccccagccaagagcgaagccgacgagcccgaacagacgcaccagcgggaggaaga

SEQ ID NO: 15151 - RNA, 81 nt, Homo sapiens
acgaacaacagcaccagacggaaacgaaacacacagcccacccaaacaggccagcccacagaaaagggagccacaggcaag

SEQ ID NO: 15152 - RNA, 83 nt, Homo sapiens
cagaaaagagcaacggagcgaaagccgcagacccgaagagaggccagagacgggccagcagccacccacaagagagaggacga

SEQ ID NO: 15153 - RNA, 68 nt, Homo sapiens
ggaagcggagaaccacaaacaacaccgaggcaagcaaaggcacgccccaagccgccaccaggcccgag

SEQ ID NO: 15154 - RNA, 80 nt, Homo sapiens
cggaccggggcagagaacacaggaccaggccacccaaggccgaaggaacaggaggcccggacccccagcacaagcgcagg

SEQ ID NO: 15155 - RNA, 87 nt, Homo sapiens
cgggcgcccgaggggccgagcgagccgaaaagacgaggcgaggaggcgagacacccaacccaccccaccccggagggccagaccccc

SEQ ID NO: 15156 - RNA, 78 nt, Homo sapiens
ccagaaccaggcccaagccgaaccgggagaagaccccggcgcgggaacgcaccaagccaggagaagggagacgggcaa

SEQ ID NO: 15157 - RNA, 67 nt, Homo sapiens
gaggaagaccaggaccaacccgagaccgcaaaaaagcaccagcacaccagaccccggagggaaacaa

SEQ ID NO: 15158 - RNA, 79 nt, Homo sapiens
caaggagcccgcccgaagggccccaggcacggggagaccgcgccgagcaaagagaaagcgggaacagagaggaagacag

SEQ ID NO: 15159 - RNA, 65 nt, Homo sapiens
ggaccaagccgcaggagaaacgaagacagacaccaaaagcggcggcgcggcaaggacccagacag

SEQ ID NO: 15160 - RNA, 79 nt, Homo sapiens
acggggcaggagaaaagcgaaggagggcccgcccaccggggaggagaggaaggaagaggcaagagcaacgaaccaaagc

SEQ ID NO: 15161 - RNA, 70 nt, Homo sapiens
ccagcaggccaacaccacagaagacaggacacaaagcacgcgacaggaaccaggcagaacagcgaacaac

SEQ ID NO: 15162 - RNA, 73 nt, Homo sapiens
gcaccgcgcgagcacgggcggagcgaacggagagaagagacccacgcgagaaccaggcgcgaacgaagaaagc

SEQ ID NO: 15163 - RNA, 76 nt, Homo sapiens
caccaaaagacccgcgacgaggcacaaccggggaagagaagcgacccaccgaggagacgccgccccgaaacagaca

SEQ ID NO: 15164 - RNA, 63 nt, Homo sapiens
cggaagcgacaccggaggaagacccacacacaagggccgaacaccaacagaggaagaaaggag

SEQ ID NO: 15165 - RNA, 78 nt, Homo sapiens
cgggcgccgaggggcgacgaaacaacagcgagcgcaggagcagcagcacccaaggaagcaggcgcaccaggaggcggc

SEQ ID NO: 15166 - RNA, 72 nt, Homo sapiens
accccaagaagaccacagagggacccggacaaccagaggcagccagcagggggagggcaggcacgagacggg

SEQ ID NO: 15167 - RNA, 88 nt, Homo sapiens
ggcccgcgcggaggccacggaccggagcccaccgggggacggcacggcaggcggacgcccggggccccccggaccacgaggagcaccg

SEQ ID NO: 15168 - RNA, 69 nt, Homo sapiens
cgaaagcaccgaggccagaccacccgagcaagcggccaaccaccagaaaccgcggagcccggcacgggc

SEQ ID NO: 15169 - RNA, 67 nt, Homo sapiens
aaagggccgccgcaagacggggcgacggggagaggcaggcgaggggacgaccggcaccgccgaggcg

SEQ ID NO: 15170 - RNA, 40 nt, Homo sapiens
ggagcccgcaccgggccggcaggggccggcacagcagcaa

SEQ ID NO: 15171 - RNA, 76 nt, Homo sapiens
cgaaacgcggagaaagaaaggaacaagcaggaacgggagagagaaaggagaaagcaaagggacagcaggacgaaag

SEQ ID NO: 15172 - RNA, 72 nt, Homo sapiens
gggaaaaagcgcggaggaagcgacacagaacggggaggggccacccagagcacaacaggacacggacacagc

SEQ ID NO: 15173 - RNA, 75 nt, Homo sapiens
acagacgggacccccagccaaaggcaaagggggaagcagaccaagaagacagaaggggcccgccaccgcaaagca

SEQ ID NO: 15174 - RNA, 74 nt, Homo sapiens
gcccaagccaccagagcggcccccagcaccacagcccgcagccccgccagccacccccagaccagggccggaga

SEQ ID NO: 15175 - RNA, 82 nt, Homo sapiens
gggcgcgggcacgcaacggcacgggcccgggccgccccgggccagcgagggcgcgaaagaaggaggagagacgaggcaccag

SEQ ID NO: 15176 - RNA, 73 nt, Homo sapiens
cgcgcgccgcgggccagcaggccagcagcagcgagcccgccgcaggagcagcagaaagaccaaacaagcagcg

SEQ ID NO: 15177 - RNA, 81 nt, Homo sapiens
gagcaggcgagcgaacgacggaagcgacacagaacggggaggggccacccagagcacaacaggacacggacacagcgggga

SEQ ID NO: 15178 - RNA, 66 nt, Homo sapiens
acacacacacccaacccaaaccaagggccccgggagaaggccagcaaagccccgcaggcagacacc

SEQ ID NO: 15179 - RNA, 54 nt, Homo sapiens
caaggagacccgccaaagccgccgggcaagacaacgaagagaggaaagaagcgg

SEQ ID NO: 15180 - RNA, 55 nt, Homo sapiens
ccccaggggagccggcggaaaaagaagaggcccagcacaagcggaagccccaggg

SEQ ID NO: 15181 - RNA, 74 nt, Homo sapiens
agagcacacaaggacccaaagacaagcaaaagagcaaaggaaccgggaagggaacagggaaccaagcagagaaa

SEQ ID NO: 15182 - RNA, 53 nt, Homo sapiens
acaaaaagacagccgccccccccccgaaaagccaccaaagaacaacaagagcc

SEQ ID NO: 15183 - RNA, 75 nt, Homo sapiens
caacaagcccacccgaaaccacaaggccgagcaccacacccagaccaccaaaacaaagggccaggaagaaagcca

SEQ ID NO: 15184 - RNA, 79 nt, Homo sapiens
ggaccggaggccggaggaagccaggaggccgggaaccgagggagcaacaacaaggagcaagcacagcgcgagccagccc

SEQ ID NO: 15185 - RNA, 75 nt, Homo sapiens
cagaaaaaacagcacaccaggaagcaaggcagggcagaaaagaacagacccagaagaagcgaaaggggagaaaga

SEQ ID NO: 15186 - RNA, 84 nt, Homo sapiens
gccgccccgaaaccaccgcgagcggccagagacgcgcacgaaacgacgaagaggcccgaggacagaggagcaaaggagggacgg

SEQ ID NO: 15187 - RNA, 76 nt, Homo sapiens
gcgcagcagccgggcaggccacgagaggaccagaggcccaaagagggcagcgggcgcccagacccgggagggagac

SEQ ID NO: 15188 - RNA, 65 nt, Homo sapiens
ccggacaaaagggaccccaccgaccccgaccgcaaccggaaacagaacgacagcccgcaccgacg

SEQ ID NO: 15189 - RNA, 77 nt, Homo sapiens
cgacccccgccagcccagagagccgagaccacagaagggggcaaccagaagggacacagagggcccgccccgcggag

SEQ ID NO: 15190 - RNA, 73 nt, Homo sapiens
aggccgggccgcacccccgaccaggccccccccaccgccagcagcagaaagcagcagaggccgaccgcaggag

SEQ ID NO: 15191 - RNA, 78 nt, Homo sapiens
caagcgccaaaaggaacgaaggcggggggaaagggagcagcaccggccacacccacagcacgaccggaacccagcgac

SEQ ID NO: 15192 - RNA, 75 nt, Homo sapiens
gcgaccccacgccgaccagagcgccgaagccaggcaccggcggggaagacagaaggaagcaaagacagagcaaaa

SEQ ID NO: 15193 - RNA, 77 nt, Homo sapiens
aacaagcacccacgcggaaacacgggcagggcccagcgcccaaccccgccggacagcacagcacacgacacccccgg

SEQ ID NO: 15194 - RNA, 81 nt, Homo sapiens
gggcgacacgcgggcgcggcacccggcaaaggaagacgagaaaggagcacagacaaaaaagagccaccaaacccagagcaa

SEQ ID NO: 15195 - RNA, 54 nt, Homo sapiens
aagcggagcggacggaggaggcacccgcaggagagccgggccccgaggaccgag

SEQ ID NO: 15196 - RNA, 50 nt, Homo sapiens
cccgccagggacgggcacgggaagaaccgccgcgcccgggaaaggaggaa

SEQ ID NO: 15197 - RNA, 80 nt, Homo sapiens
gcccacaaagcccagaagaagggcaccagcgaagggaccgggaaaggggaaaggacgcgcagcggagccgcagacgaaca

SEQ ID NO: 15198 - RNA, 77 nt, Homo sapiens
caagccggaacagagcggcaccggccgagcggaggcgacccgcggcgagagcccccccagagcgccagggcccgaga

SEQ ID NO: 15199 - RNA, 57 nt, Homo sapiens
cggaggagccccggaggcagagcggcgccagcgagacgacgggaccgaaggaccccg

SEQ ID NO: 15200 - RNA, 77 nt, Homo sapiens
agagccggaagcaacacgcaagccaaaccaagagaggacgaaacccgccagcccagcacaccaagaacaaggacaca

SEQ ID NO: 15201 - RNA, 62 nt, Homo sapiens
ggggaggaccccagaccacggagccaccaacagagccaggagccaggaagcagcagccacac

SEQ ID NO: 15202 - RNA, 86 nt, Homo sapiens
cggccaagaggcaaaggggaggacgcagcaaaccaccagaagccaccaggagagaacgccgcgccgcgcgacaacggcccggcagg

SEQ ID NO: 15203 - RNA, 70 nt, Homo sapiens
aaaaagggagggacaagagcagcaccaagcgcagaacagcgcgagccacaaggcaaggaagcaggcggca

SEQ ID NO: 15204 - RNA, 83 nt, Homo sapiens
cgcacgcgaggccgaggcggagaaggggcccgagcgcccagacacgacagagcgagcccacagcccgggccccccgagcggac

SEQ ID NO: 15205 - RNA, 72 nt, Homo sapiens
gaaggagacagggggaaggaagacccgagagcgcggcagaagagagacaacaaagaacaggccgaaagaaga

SEQ ID NO: 15206 - RNA, 76 nt, Homo sapiens
ggacagccgggaacacaaagacaaaggccccagaccgccaacgggggcagacgcaaagagccgaggaacagaaaca

SEQ ID NO: 15207 - RNA, 86 nt, Homo sapiens
cagaccgcgacacgagcagcgcagggaagcaagagcaaggccagaagcggacccagaagaggggagcagcaaggaggaagacagcc

SEQ ID NO: 15208 - RNA, 75 nt, Homo sapiens
acacacccccaggaggcccggcagagcaggggcggcagggggaccagccagcaacccgcccccggaccaagcaac

SEQ ID NO: 15209 - RNA, 73 nt, Homo sapiens
cgccccacagagccacgggccaagcgaagaagacccgcaggagacaggcgggcgccccaaagcccaggacccg

SEQ ID NO: 15210 - RNA, 61 nt, Homo sapiens
cgaacaaagaaagggaagagacacaaggcaagggcagcaggaaagacgagaccgggcacgc

SEQ ID NO: 15211 - RNA, 60 nt, Homo sapiens
aacaggcaggccagcaagcacaccaggccacgacagggcaggcagcggaagagaaagacc

SEQ ID NO: 15212 - RNA, 74 nt, Homo sapiens
ggaacagaagcccgacccaagcaacagccaccggcagaggccagccgacaaaagccaggcagagcaagaaagca

SEQ ID NO: 15213 - RNA, 78 nt, Homo sapiens
caagcaggccacacggacacccaagacaaaggcagaagacaaggagagggccgccagacacgagaacacaggagaaca

SEQ ID NO: 15214 - RNA, 83 nt, Homo sapiens
ccgcgcagacacggaccgcgggccagccgccaaagaccccgccggaggaacaggacacccaaccgcgagaccagcaaggacgg

SEQ ID NO: 15215 - RNA, 75 nt, Homo sapiens
aagcaccggcgggggcccgccaggcgggccgcggcggcccggacaggggccccagaggaagagagaaggccacgc

SEQ ID NO: 15216 - RNA, 77 nt, Homo sapiens
aagaggagaaaaccgggcgcagcccccaagacacagccccagcagcccccagacccacagacacacccagggaaaac

SEQ ID NO: 15217 - RNA, 72 nt, Homo sapiens
ggacaaaaccaaaagaaacagcagcccagcgccgccagccaagcaggggagccagagaacccaagaggaaac

SEQ ID NO: 15218 - RNA, 73 nt, Homo sapiens
aggcgcccggagcggccgccccagcaccggccgaggcaagcggccccccaggcacacaaggccgcggaagccg

SEQ ID NO: 15219 - RNA, 56 nt, Homo sapiens
acaacacggggacaaccaagcgagcacacaagaaaagaacagaacagccaggcccc

SEQ ID NO: 15220 - RNA, 75 nt, Homo sapiens
gggaggccgcccagaagcggcgcgcacggacgcggagaggggagccgcaacacacgccaagcaacaccacagaga

SEQ ID NO: 15221 - RNA, 76 nt, Homo sapiens
cgccggcgggagggcgacacgcgggccgcgggccgaaaacgacagaagcacgacaacaacgggcagcaagccacaa

SEQ ID NO: 15222 - RNA, 85 nt, Homo sapiens
gggaccagcaccggaggaaccgcaccggagcagcagccccgagaaggaagaggaggaagcgagggcccgcgagggcgcaggaccg

SEQ ID NO: 15223 - RNA, 74 nt, Homo sapiens
gagcgacccccggccgaagccggagaaaagacccggccgagggcccacggagccagaccacaaaagagcgagga

SEQ ID NO: 15224 - RNA, 67 nt, Homo sapiens
agaacgggcagaacaggaaacagaaagcacaggaaccaaagggaaaggacacagaggagcgggcaca

SEQ ID NO: 15225 - RNA, 76 nt, Homo sapiens
gcggaggcccgcgcgagcccgcgggggccggccgcccacgccagccacagacaaaacagaggagaccagaccagaa

SEQ ID NO: 15226 - RNA, 74 nt, Homo sapiens
gacgcggccacagcccacgagggcaccaaaaacaagaggaccacccgcacccaggggacgcacggcccaacccc

SEQ ID NO: 15227 - RNA, 72 nt, Homo sapiens
caaaaaccccgaacagcgaaacgcagcagagcgaagcgaggaaagaccagaagccagagacagacaaacaca

SEQ ID NO: 15228 - RNA, 105 nt, Homo sapiens
aaaagaccggcgccgccgcccccggaaaagggcaccgcccgggggggcggagcgcgcgggcagaggagacgggacagcagaggccgggcgaaaacgaaaagggaa

SEQ ID NO: 15229 - RNA, 70 nt, Homo sapiens
gaggccagccccggcacagaggcaccgaccgcaccggaggagaaagacggggaccacgaccacagcaaca

SEQ ID NO: 15230 - RNA, 57 nt, Homo sapiens
cgcggcgggcaggcgcacgagggaggggaccgaaaaagggcgagccgcgaacccagg

SEQ ID NO: 15231 - RNA, 83 nt, Homo sapiens
ccggaagcgcccgaggcccgggcccgcgggggcaaccgggcgcagacgagaaccaaaggcagacccagaagagcacaaaacag

SEQ ID NO: 15232 - RNA, 80 nt, Homo sapiens
aggccagcgcagaccgagagccaagagccgagaaccacgaagcgcccgagacgccaccacgcgggggagcagagagcccc

SEQ ID NO: 15233 - RNA, 72 nt, Homo sapiens
aggaagaagcgaagacggaaacgaggaaaccgggaaagccaccgaaaagacggccacaggcgggacccaccg

SEQ ID NO: 15234 - RNA, 77 nt, Homo sapiens
ccacccacccgccagaaccgcgggccccaccaacggccacccaagcacagaggccccgggaccaaggacacgcagac

SEQ ID NO: 15235 - RNA, 71 nt, Homo sapiens
accagacaagccccccggacgccaagaggcgaggaggaggagagaacaaccgcgcacggaagacaggggca

SEQ ID NO: 15236 - RNA, 74 nt, Homo sapiens
gacggggagggaaagggaagacacgaaaaaagagaaagggccaacgaaaggggagcaagaagaaagagcaggga

SEQ ID NO: 15237 - RNA, 71 nt, Homo sapiens
gcccgcccccgccccgcacaaccgggcggggcgcgggaggggcacggccccggcccaaggcaacgccaccc

SEQ ID NO: 15238 - RNA, 99 nt, Homo sapiens
caaagccacacaggaagcggcgagaccggcgccagggccggggggccccccccaccagacccaccccagggcggggcaaaccacccccagggcagccgc

SEQ ID NO: 15239 - RNA, 84 nt, Homo sapiens
ggaaaggcccaggaaaaaggcccagcgcaaccaagagaaagaaaggagaagcgcagggagacaagaaagacagagcagagagca

SEQ ID NO: 15240 - RNA, 50 nt, Homo sapiens
agcagccccaagaagagcaaaggagcaagccccagccaagacccaccagg

SEQ ID NO: 15241 - RNA, 54 nt, Homo sapiens
cgagcccaggagggcggagaacggaaaagcaccaggaagcagagaggaccgcag

SEQ ID NO: 15242 - RNA, 71 nt, Homo sapiens
cccacccccagcagaagccaggcccagcagagagggagaacaccaaacaagagcccaccagaagagcaaag

SEQ ID NO: 15243 - RNA, 113 nt, Homo sapiens
agagggacagcaggagcaggggcgcagcgcggccgcggagacagggagacccggggcggaagaggagaaccaggaccaaagcaccagcacagaagggaagaacgccaaaggag

SEQ ID NO: 15244 - RNA, 60 nt, Homo sapiens
ggaacgcaggcgcacgacggacccagcacgaccccccaagcggggagcagaacaggccaa

SEQ ID NO: 15245 - RNA, 69 nt, Homo sapiens
gggccgccgagcggacccggaccggggggggcgccacagggaaggaccaagacgcagcgaaaggcgggg

SEQ ID NO: 15246 - RNA, 82 nt, Homo sapiens
ggcagggcaccgcgcgaagcggccaaagccgcccagacggccaccggcgggaggaacaaaagaaaccagagacgaccacaag

SEQ ID NO: 15247 - RNA, 74 nt, Homo sapiens
cagccgcccgccaggccgggccgcgggagccgaggcgccgaaggaccgacgcccgggaaaaacgggccgagaaa

SEQ ID NO: 15248 - RNA, 78 nt, Homo sapiens
gggggagcaccaagcggccacaccaagccgcccgccaaggacaaggcggccaacagcgcaggcaccacaacggaggag

SEQ ID NO: 15249 - RNA, 76 nt, Homo sapiens
ccacgcacccccccagggaccagccgacgccgggcacagggagcgccgaccccaagaacggcacaggagcggagag

SEQ ID NO: 15250 - RNA, 84 nt, Homo sapiens
caccgcggcagcacgcggcgcgcgggccaggcacgacaccgcaacgacacagcagcgaagcgccggagaacgcacgggacgagg

SEQ ID NO: 15251 - RNA, 41 nt, Homo sapiens
gccgggccacggcggaggcgcgggcggaggcaagacgcaac

SEQ ID NO: 15252 - RNA, 71 nt, Homo sapiens
gcaaccaaagcaccagaccccaccagcaacgaggcagcgagaagaaaaagaagagagagacacggacaagg

SEQ ID NO: 15253 - RNA, 52 nt, Homo sapiens
gcaggaaaacagggcggcacccaggcgaagacagggaagaagacaccagcag

SEQ ID NO: 15254 - RNA, 67 nt, Homo sapiens
gaagcccagggagagcaaggcgcgcggcgacccgccaagggaagaagcagaagcaagcccagggcaa

SEQ ID NO: 15255 - RNA, 74 nt, Homo sapiens
cccccaaaggcgggacacaggcaggggaggccgagcccagcaccagggagcgaggggaaggagcgagccgggag

SEQ ID NO: 15256 - RNA, 73 nt, Homo sapiens
cagaaagaagaaaagcgccgagcaagaaaaacgaaccagagaaaaccaaggcacgcaaagaacgcccacaagg

SEQ ID NO: 15257 - RNA, 81 nt, Homo sapiens
ggcggaccgcgcgagcagggcgcgccccgcagcaggcacccgaacgcagacaccaagggagaagccaaccaaccaggacca

SEQ ID NO: 15258 - RNA, 73 nt, Homo sapiens
aagaccaaagcaagagagagaaagccagaggaacccaagccagaccgcccgagaaagacaggaagaccgaggc

SEQ ID NO: 15259 - RNA, 56 nt, Homo sapiens
caggagaagggacagacacaacggaccaagcggaggccggcggcaccaggacgccg

SEQ ID NO: 15260 - RNA, 76 nt, Homo sapiens
aaaccaggcacccccaaggccgacggagcagcacccggcagagaaagcaagagacgcaaccgaacgcagagcggag

SEQ ID NO: 15261 - RNA, 77 nt, Homo sapiens
cccccggcggggccgccgcccgccgccaagagccccggagagaccgggacccaagccgcccccccccaaaaagacca

SEQ ID NO: 15262 - RNA, 83 nt, Homo sapiens
cagacggcaacaaaggcgagccagaggagcagccaagaagccccccaggggcccgcagaccaacaacaagccacagcaagaag

SEQ ID NO: 15263 - RNA, 56 nt, Homo sapiens
gggaaggcgccgaagaggacgaaggaccgcgcagacgcgcaggacggagcggggcc

SEQ ID NO: 15264 - RNA, 111 nt, Homo sapiens
caacacagagagaagaaaacaggagccccagcgccaccgccgaccgaagccgcaaaaaacacagacagcaggcaaagcccccgacaggggacaggccgcgcaagccgggaa

SEQ ID NO: 15265 - RNA, 62 nt, Homo sapiens
agccaagaggaggacagcgcacacagcaagcacgagacggcagccggcccgggcgcccccag

SEQ ID NO: 15266 - RNA, 80 nt, Homo sapiens
acggggcgaaccgagcaccagaaaaccggcgcagagccaaaaggaaccgaggaaaagcaggggaaacgacgcagcggaga

SEQ ID NO: 15267 - RNA, 77 nt, Homo sapiens
gaaggaaaaggggacggagcacaaacggaggaaacgacaaaacgggacccaaggcccagggaaagcaccccagagac

SEQ ID NO: 15268 - RNA, 76 nt, Homo sapiens
gacagcaaccccagccccagccaccacggaccccgcgcccccaggcacggcagacacaccgaccagaggaaggcga

SEQ ID NO: 15269 - RNA, 86 nt, Homo sapiens
acgggccgcgcgggagggcccgcacgggcgagggccgacccgcaccggagccacccgcaggagaccaggagggcacagcacgcacc

SEQ ID NO: 15270 - RNA, 77 nt, Homo sapiens
aagagaacagaagcccaggaaagaagaaaggccccagggaacacaccagcgggcacagcacagcagggaggcgagaa

SEQ ID NO: 15271 - RNA, 69 nt, Homo sapiens
ggaagaaaaggcagagaaacaaagagcgcagagacagagaacaaagaagccacagacaaagagggagga

SEQ ID NO: 15272 - RNA, 74 nt, Homo sapiens
cggggcgccaagaccagcagcaccaggagccccccgcccagacaaggagggcaccaggacagaaggcgggagaa

SEQ ID NO: 15273 - RNA, 69 nt, Homo sapiens
ggacccggccacaagaccagcacaaggacagggaaaaggaaaccagaagagggacgaagaaaacagcgc

SEQ ID NO: 15274 - RNA, 86 nt, Homo sapiens
gaaaggacaaagaacagaccgcggcgggacagacagagagcggagaaagcacaaaaacaaggacaaggaaacccggaaaacgccca

SEQ ID NO: 15275 - RNA, 54 nt, Homo sapiens
caaccgccagacaaccggagccacgccccacgaccgccagcagccacccacgca

SEQ ID NO: 15276 - RNA, 76 nt, Homo sapiens
cgaaggacgggagagccacggagaagaagcgcggcccacacacccagccgggacgcaggagggcgcggggcagagc

SEQ ID NO: 15277 - RNA, 52 nt, Homo sapiens
cccgggccagcacaaacccagaaaccagacggacgaaagggggagcagcaac

SEQ ID NO: 15278 - RNA, 79 nt, Homo sapiens
aggggcagaaaaacaggaggaagacccgcagcgggacaagcgggcaagacaaagagcaagaagagcccagccagaagaa

SEQ ID NO: 15279 - RNA, 76 nt, Homo sapiens
ccaccacgcggcgcacaacgcaggaacaccgcacgcgcggaggagacaaagagagaagcggggaagaaagcaaaag

SEQ ID NO: 15280 - RNA, 84 nt, Homo sapiens
cccaccaccaaaccacgaaggccgggacagcagaaaacagccagcagaaaaagccaaaaagcaagcggacaaaagaagaaacaa

SEQ ID NO: 15281 - RNA, 86 nt, Homo sapiens
ggaggcccccgggcaagaggcgcaaacaagccaacccaggaggaaaaacgccaagagaaaccaccaagagccaggaaggcaaaggc

SEQ ID NO: 15282 - RNA, 81 nt, Homo sapiens
cggggcggggccggggaacacacaggccggagcccaacagaaagcccagccccccccaccgccaccaccaccaccaccgcc

SEQ ID NO: 15283 - RNA, 83 nt, Homo sapiens
cgggagacccaggcgggacagagggagccaggcagagaagacgaccccgacgcaggccaggagccgcggacagaagccgagca

SEQ ID NO: 15284 - RNA, 74 nt, Homo sapiens
accaagcagggcccggcaggaacaaccacggaacccggggggagaagaaacagccaaacaagaagaagagaagg

SEQ ID NO: 15285 - RNA, 76 nt, Homo sapiens
ccccccgggagagaaggccagcggaggcccaggggacaagagacgaacccaccacgccaagcaaccgcgcaacccc

SEQ ID NO: 15286 - RNA, 105 nt, Homo sapiens
cgcgcccaccccaggccggggcgcacgcggccccacgcagccagccccgcgacagcgaagaccccccggcagcaccgcagcagaacaagaaaaaagaccgcacag

SEQ ID NO: 15287 - RNA, 80 nt, Homo sapiens
cacagccacgagccagacgacgcgaccccgacgagcgcagcaaagagggccacggaaccaccaggcaaccaagaaaaagc

SEQ ID NO: 15288 - RNA, 75 nt, Homo sapiens
agcgagccagcggagcgcgagcccggagaaggggagcgcgaccgggcggagcgcggagcccgccaggaagaggag

SEQ ID NO: 15289 - RNA, 98 nt, Homo sapiens
acgggccggcgaacaccgagacacggcaagcgggaaacaaagacccgcggaggaagagacaacccgagccagggcgcagcagggccgcccccccacac

SEQ ID NO: 15290 - RNA, 55 nt, Homo sapiens
gcgaggaggaaaggaggacgagcaagaacggcagaaggggaaaagacggacagga

SEQ ID NO: 15291 - RNA, 72 nt, Homo sapiens
ggaagacccccagaaagccaacaacgcaaagaaaccccaaagccagcaagaccacagcagcacgcaccagcc

SEQ ID NO: 15292 - RNA, 77 nt, Homo sapiens
cgacaggcaagaagcagagcgcagaggacaagcagaccggaagaccgacggaagaccacaccccgagggagcccagg

SEQ ID NO: 15293 - RNA, 36 nt, Homo sapiens
agacaaggacaccaaaagcagggaacagacagcgga

SEQ ID NO: 15294 - RNA, 75 nt, Homo sapiens
aaagagaagacgaagagaccgaaggaacaaacacccaaagcagccaggagccagcaaaaagaagagacgacaaaa

SEQ ID NO: 15295 - RNA, 78 nt, Homo sapiens
gcagcaacccaaacagggaccaaccaaagacgccaaggagaaggcagaccgggaacccagcagaagccagccgccacg

SEQ ID NO: 15296 - RNA, 81 nt, Homo sapiens
aggcagcagaagcccacaacccagggggaacaaaagcacccagaggggcgggcacgacaaggaccgagaagaagggaacag

SEQ ID NO: 15297 - RNA, 55 nt, Homo sapiens
acggaagcgcaggaagacccgccacgcagagccccgccaggaagacacgccgggg

SEQ ID NO: 15298 - RNA, 53 nt, Homo sapiens
gcaggaaaggaaccaggagagagcagccagagggaacaacgccggcacaaaca

SEQ ID NO: 15299 - RNA, 65 nt, Homo sapiens
ccggaccaggaaccacgaagaaaagggaaaacaccaaagcgagaaaaagacccaaccagcccaca

SEQ ID NO: 15300 - RNA, 83 nt, Homo sapiens
ggggcaaagaaccgaccccggccgggcgcagcaggcacaacgagacccggaggagacagaccccaggcccggacgagccccgg

SEQ ID NO: 15301 - RNA, 68 nt, Homo sapiens
agacgcccagcgaagaaaaaacaaagaaggaacacggaacccaggaggcacacgcagccagaagcaac

SEQ ID NO: 15302 - RNA, 72 nt, Homo sapiens
aaaccaagggaaccccaaaccaccacacggaaaggaggcggagcaggagcaaaggagcaagaaaccagaccc

SEQ ID NO: 15303 - RNA, 62 nt, Homo sapiens
gccggcaaggaaacccaaccccaggcggggaaaacacacacgccgcgggagcccaaggcggc

SEQ ID NO: 15304 - RNA, 67 nt, Homo sapiens
caaacacgcgccgcagcacacacacacggaaccccagcacccagccaaggggcagagcagacccacg

SEQ ID NO: 15305 - RNA, 79 nt, Homo sapiens
acgcacaaaaaagggcagaagagaagcaggaaggaggcagaggcacaccgaaaggaagagagaaggacgcaagaccagc

SEQ ID NO: 15306 - RNA, 77 nt, Homo sapiens
cgcggggcaaccgccacgagacaccaagaagccccccagccgaggagaacggcaaaaagcgagggagacaacaaggc

SEQ ID NO: 15307 - RNA, 70 nt, Homo sapiens
cgcggccgaccagagaacagagaggcggcagggccggaagccccccccggcccagacggccgaccaggcg

SEQ ID NO: 15308 - RNA, 74 nt, Homo sapiens
ggagcgcggagccaccgggcaccaaagggaccgcagcgccccgccccagcccagagacccgggagccagggacg

SEQ ID NO: 15309 - RNA, 84 nt, Homo sapiens
accgcccggccgccgcagcacagggcaagacccaacgccaaaaggcaaggacccgaggggcgagcgcgccgacacaggaaggcg

SEQ ID NO: 15310 - RNA, 87 nt, Homo sapiens
ccgagccagaggagaccccagacccccccgcagccagagggcggagccgccagagggcgaagagggcgagaaaacggcagccgggag

SEQ ID NO: 15311 - RNA, 67 nt, Homo sapiens
acagcggggccacacgcacagcagagagcggaggagcgaggcaaccagccaccaaacccacggcacc

SEQ ID NO: 15312 - RNA, 63 nt, Homo sapiens
aaacggaaagaaaaggagagcaccacgaaaagcagccccaggagcaagcgccgggagacacaa

SEQ ID NO: 15313 - RNA, 82 nt, Homo sapiens
gcagaggccggagagcagcaagaggcaagcaggccccccccgaagcgggccgaggcgcacgggcacggcgcccgcgccagcg

SEQ ID NO: 15314 - RNA, 101 nt, Homo sapiens
cgcgccgccagccagagggccgagagccgcggggagaaggccacacccaggcagcaagggcaccgcgagcaaggccccccacccggcgccccgggccagcg

SEQ ID NO: 15315 - RNA, 82 nt, Homo sapiens
cgcaggaaagccccagccacccacaaacagagagaaggaaccacccacgcaggcagggacagccccacggcgagaagggagc

SEQ ID NO: 15316 - RNA, 77 nt, Homo sapiens
cagacccacagcgaaagcaacaggaaggcagcaacaaccacccagggagaaaaacaagaggacagacaccagaacac

SEQ ID NO: 15317 - RNA, 77 nt, Homo sapiens
cacccaggcccccgcagcacgggcccgcaggagccaggaccccggccggccaggaacacacccaaaggaaggaggca

SEQ ID NO: 15318 - RNA, 83 nt, Homo sapiens
gcgaagcgggcgagcggggggacgccggcggagacgcgggcgaggccggggggggcacagagccccggaagacagcccccagc

SEQ ID NO: 15319 - RNA, 67 nt, Homo sapiens
ggagagagcacgaaggggacaacaggggagcggcgcccagaggaaagggaagaacaaagggagcagg

SEQ ID NO: 15320 - RNA, 69 nt, Homo sapiens
acgcagagaaacacggaaacaggaagaggaaaaacacgacaaagggcacgcgaaaaaagcccaggaccc

SEQ ID NO: 15321 - RNA, 54 nt, Homo sapiens
aaaaacagcaggcgcggccagccagaacgaaaacaaacggaagagagggcagca

SEQ ID NO: 15322 - RNA, 77 nt, Homo sapiens
aggagggagcagcaaaagccaggcagccccgaggaggcaggcgccaccacagacggaagcgaaagggggcagacaga

SEQ ID NO: 15323 - RNA, 81 nt, Homo sapiens
caagccgggaaagggacaagaagggcaaagccgaaagcgcacggggcggacgcagagacgagaaaaccaagcagcggggag

SEQ ID NO: 15324 - RNA, 78 nt, Homo sapiens
cgggagagaaccgcgacagacaccaagggcgcgcgacacgaacaccgaggaggccaaggcagaccagggccagagcac

SEQ ID NO: 15325 - RNA, 79 nt, Homo sapiens
ggagacggcggacacacggaggcgcgggggcgaaaagccaggagcaaaagacgagcgcgacgccaccagcaacgaaccc

SEQ ID NO: 15326 - RNA, 74 nt, Homo sapiens
ccagccaagagccggcggcagacgaccagaggacaaaacccagccggcacaaaccaggaaaggaagccggagcg

SEQ ID NO: 15327 - RNA, 81 nt, Homo sapiens
ggcccagccgggaacccccacgcggccagcgaaaacgcccaggaccccggaggaaaagcggaagcggcagcggcgaacgcc

SEQ ID NO: 15328 - RNA, 80 nt, Homo sapiens
cggggacgcacggaccaaaaacccgcaacagcccccgcccaaaaacgccgaagggaccaggcagacgggaagaacccaga

SEQ ID NO: 15329 - RNA, 65 nt, Homo sapiens
cgccggcggggggaggccacaggcgcaagcagacacaagcgggacggaagaggcccggcgaccgg

SEQ ID NO: 15330 - RNA, 76 nt, Homo sapiens
cgcgcgcccggcccggcgcacgcggcggacgggggcagcacccaagacacggaccccgccccccccggagcccggc

SEQ ID NO: 15331 - RNA, 81 nt, Homo sapiens
cacggccccagagaaaaacggcagagacagcgccagaaccacggcaaaggaaccgagcaagggggcgagaggggaacgcca

SEQ ID NO: 15332 - RNA, 70 nt, Homo sapiens
cgagacccgagaccagaaacacacagaccaaagcggacggaccacgcagcggagggggacccgcccccgg

SEQ ID NO: 15333 - RNA, 58 nt, Homo sapiens
gggagcaccaggaccgggccggaacgagacgcacgacagaggcacaaaaggagaaagc

SEQ ID NO: 15334 - RNA, 82 nt, Homo sapiens
ccaaacccggcgacggcggaagaaacaggccgagacacccacccggcgcggcaacaggcagcacaaggcagccaggggcccc

SEQ ID NO: 15335 - RNA, 92 nt, Homo sapiens
caggagcgaggccgggaccggagcaccggcagacccggggaccgggaagaccccgagagaaacggcgagaaaaccaaacaggagccgacagc

SEQ ID NO: 15336 - RNA, 84 nt, Homo sapiens
gcgacgacccgcgcagacacggaccgcgggccagccgccaaagaccccgccggaggccccggggaagggaagcaggggcggggc

SEQ ID NO: 15337 - RNA, 76 nt, Homo sapiens
gggaggaagaagccggcacagcccaggagagagccaacggaccacaacagagaaccaaggacgggaagcagaaaaa

SEQ ID NO: 15338 - RNA, 71 nt, Homo sapiens
aaaacacccccaccacccccccgaagaagagaggacccagggcaggcgcgggacaaccaacacaaccaaag

SEQ ID NO: 15339 - RNA, 71 nt, Homo sapiens
gggggccgggacggcgacccacccaaccaagcggagggacagacacacggagaaccacggggaccaagaag

SEQ ID NO: 15340 - RNA, 87 nt, Homo sapiens
gcggcgccaccgccgcccccagaggagaaggcagagcccccccaggcagaagcccgagcgggaaccagcgaagccagggcgcagaca

SEQ ID NO: 15341 - RNA, 73 nt, Homo sapiens
cacaggacccaccaggcaagagccagagaggacaggaccaggaacagggacagaagaagaacagagagcagag

SEQ ID NO: 15342 - RNA, 82 nt, Homo sapiens
ccgccaccggcacaccgaagggccgagaaacagacaacccacagaacaaagcggaccaaggcacccccagagcgagccgcga

SEQ ID NO: 15343 - RNA, 72 nt, Homo sapiens
ggacggggacccgcgacccagccccccacccaacgcgggccgaggcaaacaagggccacgcgcccagggagc

SEQ ID NO: 15344 - RNA, 81 nt, Homo sapiens
ccaaccaagcaaaaccggagagagagcagagcgacacgaaaagacagaccgacaacagcccagaagaagccaggaggacca

SEQ ID NO: 15345 - RNA, 79 nt, Homo sapiens
ccgcccccacacgagacccggagcacgcaagagacaacacgccaccaggaccaccccccgccagacggggcccggagca

SEQ ID NO: 15346 - RNA, 53 nt, Homo sapiens
ccggggacaagccgcaccacgccaaggaaagggcgccagcccccaggaggacc

SEQ ID NO: 15347 - RNA, 82 nt, Homo sapiens
gagcacgcagcgagcgagaagaggaggacaacagcacaaccgggggaagcgggacgaccaggacacaccacgaggaggacag

SEQ ID NO: 15348 - RNA, 69 nt, Homo sapiens
gacgcagcccggcggcagcagggaggcaggcgacaacagaggagaaggcgaagaaaacagccaagcacc

SEQ ID NO: 15349 - RNA, 89 nt, Homo sapiens
ggagcacagaagaagcaacacgagaaccaccccgacacaacaccaccaggagagaacagcacacagaggcgcaaggggaagagaaaaga

SEQ ID NO: 15350 - RNA, 69 nt, Homo sapiens
aagcacagcaacgacgggacacgggcccacaggaaaaaccagaagagaaaaaacaaaggggagaggcac

SEQ ID NO: 15351 - RNA, 74 nt, Homo sapiens
gaacaaacagcaagaaagaccacaagaccaagacgcagccaaacaggaagcaaacagcgagcgccccgaggcca

SEQ ID NO: 15352 - RNA, 79 nt, Homo sapiens
ggggccccggccgggagaggccgcccaacacgccaccacggcaaggaaagacagcaggaaaaaaccaggaacgccccaa

SEQ ID NO: 15353 - RNA, 70 nt, Homo sapiens
gcacgagggcagggcggaagaaaaaggaggcggcaacagggaacgccgcgcagagcccagcccgggaaca

SEQ ID NO: 15354 - RNA, 82 nt, Homo sapiens
gcccacgggagaaaaccgggcgcaagacgacggaggcgccgcacgacgcggggacagaccccagccaaccaccccaccaccc

SEQ ID NO: 15355 - RNA, 89 nt, Homo sapiens
ggcccaggcggcaaacacagccccagagccggggcaccagcagcacagagccccaggcaagagaagccgagccaggccgcggagagccg

SEQ ID NO: 15356 - RNA, 75 nt, Homo sapiens
cgcagcagagccgaggggaagacgaggcacaccgcaagaagagcggcaggcggggcagaagagaccgaagcagcg

SEQ ID NO: 15357 - RNA, 77 nt, Homo sapiens
caaggagcccgccgaggagcgaaggcccagagccgggggagacaagagcccaagagaacgaaagcacagaaaacaac

SEQ ID NO: 15358 - RNA, 104 nt, Homo sapiens
acaagaccccgcgccaccaaagggagggcggccaaccgcacagacgaccagcaagaagggaaagagagccaggagggaaggagcaaaaaaggcccaacggcagg

SEQ ID NO: 15359 - RNA, 77 nt, Homo sapiens
cggccaacgaagcccaaacagaagaagaaggcgcaacacagcagggcaagggcagagcggcgggaaaccaccaacaa

SEQ ID NO: 15360 - RNA, 63 nt, Homo sapiens
ccccaggagaacacacaaccaggagagcaggaggagaccaaacaccagacggaggccggcaca

SEQ ID NO: 15361 - RNA, 74 nt, Homo sapiens
gggagcacagccaaaacggaaggaagaagccccaagaagacggaaaagaccacgggaccggcacacgcccggcg

SEQ ID NO: 15362 - RNA, 83 nt, Homo sapiens
ccgcgccgcgccgccccgccagaagaggagacgacggacggcgggcaccggccgacgaacacaggcagcaccccaacgcagcc

SEQ ID NO: 15363 - RNA, 56 nt, Homo sapiens
gagaggcggagcgcaggaggggaggcgacacccgaagccccgaccgccacagcaga

SEQ ID NO: 15364 - RNA, 68 nt, Homo sapiens
gcgcaccgaaacccgccgacgggaggaaccaaggaaccacacagaaagaggcggagacgccagcgacg

SEQ ID NO: 15365 - RNA, 72 nt, Homo sapiens
agcagcccccgccacgcaggcaggggcagaagaacgcacgaccaaggacacccaggcagaccagacacggca

SEQ ID NO: 15366 - RNA, 66 nt, Homo sapiens
gaccagcgggaggccagaggaaggccgcggaacacccacagcgccacacgagaaccaccaccccgc

SEQ ID NO: 15367 - RNA, 75 nt, Homo sapiens
ggagacacagcagacccggagcagcccacacaccacacggaagcaagaaagggaggcggaccggcggaggaggcg

SEQ ID NO: 15368 - RNA, 73 nt, Homo sapiens
gggcggggaggacagcagcgagcgggacggaaggccaaccgggaccccagacggcggcaccgggaaggcagac

SEQ ID NO: 15369 - RNA, 73 nt, Homo sapiens
cagccccgggccgccggacgcaggagacaaccaacagagggacagacacagaaaggcgaagaaacggcaggaa

SEQ ID NO: 15370 - RNA, 76 nt, Homo sapiens
acacaagggagcccccccaccacccccgaagcagaaacgaggcccagcagagagagaacagcgaggcaccacccac

SEQ ID NO: 15371 - RNA, 83 nt, Homo sapiens
cccagcagccacagccaggggagcgccaagacagaaagccggggccccaccccaccgaagcaggaacgaaggggaccacaaca

SEQ ID NO: 15372 - RNA, 71 nt, Homo sapiens
aggagacagggaagcaaagcgcaacagaaacagagagagcaagagggcagaagaaagaaaggaaagagagg

SEQ ID NO: 15373 - RNA, 81 nt, Homo sapiens
gcagaccgcagaaggccggagacaccagcagaggcaggacgaccagccgacaaccagccgaaccagggccagaggaaggga

SEQ ID NO: 15374 - RNA, 71 nt, Homo sapiens
cgcagccggagacccggagaaagggaaagcgcaaagccgacgaggagagaccccgcagcggacaagacaga

SEQ ID NO: 15375 - RNA, 73 nt, Homo sapiens
aggcgaaacacaaaagaagacgggggacaggagagggacaaggaacaagaagaaaaacaaaagaaagacaaaa

SEQ ID NO: 15376 - RNA, 75 nt, Homo sapiens
ggaacaccgaccggaggcgcccccagaaggaaggaaacacccaaggaaccaaagcaggccagcagaaaaccccgc

SEQ ID NO: 15377 - RNA, 80 nt, Homo sapiens
ggaagagcaaccgcggccgagggggccgacgacgagccccgcgaggagcgcagcggagaggccagaacgcccgccagccc

SEQ ID NO: 15378 - RNA, 51 nt, Homo sapiens
gcgcagcaagacggccgcgcggcccgcagggggccgcaaggccaggcgcgc

SEQ ID NO: 15379 - RNA, 82 nt, Homo sapiens
caggcacgaaaagcagaaagaagacaaggacaaaaaggaccgccgggagagccgcccaccccccacccggacgccgggcgcg

SEQ ID NO: 15380 - RNA, 72 nt, Homo sapiens
cgagcggacccggaccggggaagaccggagacccgaaagaggaagagcgccgcaacccaaaaaccaaacgag

SEQ ID NO: 15381 - RNA, 62 nt, Homo sapiens
cgcaggcagacaaaagggccaaagaagggagagagcccccgggagaggcaggaggcagaccc

SEQ ID NO: 15382 - RNA, 39 nt, Homo sapiens
gggggggcaaacccgagagaacggaaaagagcaccggcc

SEQ ID NO: 15383 - RNA, 62 nt, Homo sapiens
cagaccgaaacaacaacaggacgaagccagccacccagccggacccccacacgaacccccgg

SEQ ID NO: 15384 - RNA, 77 nt, Homo sapiens
gcagacgagagcgccagaggggaaaaaagcagaggccagggcgccggacggccagcagaagcaggcgagccccccga

SEQ ID NO: 15385 - RNA, 81 nt, Homo sapiens
acggcgacgccccaggggaaaacccccgggaccagacgggaacgccaggaaccagcaagagcaggagagagaggaaccagg

SEQ ID NO: 15386 - RNA, 81 nt, Homo sapiens
cggagcaagggaaggaaccgggaggggagagaaagagcacagggcacggcagcacgaggccacgcacccaagagaagagcc

SEQ ID NO: 15387 - RNA, 80 nt, Homo sapiens
cgagggaaccccggagccggcacagccgccaaagcccaaacagcaaagaggccgaaggcccacaagagaccggcagaagc

SEQ ID NO: 15388 - RNA, 71 nt, Homo sapiens
cagacggggggaggacccgaccagacccaacagggcggcgccaccgcaaccaaaacccggcacacccagcc

SEQ ID NO: 15389 - RNA, 81 nt, Homo sapiens
caaagccccccggagacgcaaccaaggagcgccaaaaaagagggggcgaagggaaaagccccgcaggaggccgaagcagca

SEQ ID NO: 15390 - RNA, 78 nt, Homo sapiens
cacccggaggagcagcccgccccgccgggggagacgacccccgccaggagcaggccgggcccgccagggcacgcgccc

SEQ ID NO: 15391 - RNA, 87 nt, Homo sapiens
caggcggggggcgcagaggacacgaggcggcgggcggagacaggaccgcggcgagcaaggacccaaagacaggaccacgcaccagca

SEQ ID NO: 15392 - RNA, 59 nt, Homo sapiens
aaacaccggcccaggaggagggcccgggcccaggacacaaagccgcagaaagaaccgag

SEQ ID NO: 15393 - RNA, 58 nt, Homo sapiens
gggacacgcgcagaggcaagggagacaagggccgaacaccaacagaggaagaaaggag

SEQ ID NO: 15394 - RNA, 61 nt, Homo sapiens
cgccagcagcccaagccccgcaccggaaaagagcgggagagacggcaggacacgagcggga

SEQ ID NO: 15395 - RNA, 64 nt, Homo sapiens
caacccggagggcccagcaaaaggaacggcggaaaaagggagagagaacggggagaagcaacac

SEQ ID NO: 15396 - RNA, 83 nt, Homo sapiens
ggagcgcgaaggccgggacccggccccggcccacaggggggggcaaacccgagagaacggggccagcagaacagagaagaccc

SEQ ID NO: 15397 - RNA, 70 nt, Homo sapiens
ccaccaaagcaaggagcccgaaacaagcgagaaccagccaaaacacacgaacagggaacaagaaacaccg

SEQ ID NO: 15398 - RNA, 74 nt, Homo sapiens
caccagaagacggaccggagcacgcgaggggcacccgaggaggaagagggcagggcccacggaaagaagggaaa

SEQ ID NO: 15399 - RNA, 76 nt, Homo sapiens
acgacggagacgcagagggacgaaagaagcgcagcggaggaaggcgagccagagccagcccggaccggaaccccac

SEQ ID NO: 15400 - RNA, 31 nt, Homo sapiens
ggcaggccccgggccggcaccggaacgcaag

SEQ ID NO: 15401 - RNA, 78 nt, Homo sapiens
acggacggacccagcacgaggaggcgcgaggagagcggacaggcaagacaggccaccacgggcacgcggaagccgggc

SEQ ID NO: 15402 - RNA, 83 nt, Homo sapiens
cgcggacccgccaagaagcgcccacgcagcagccggggcggagagccaggcaccccggaccaacaagcagaacagaagaagaa

SEQ ID NO: 15403 - RNA, 70 nt, Homo sapiens
ccaccagccacacaccgagacagggacacgagaccgcagaagggccagaaaaaggaagcccaccacccac

SEQ ID NO: 15404 - RNA, 82 nt, Homo sapiens
gaggaccgcacacagagcacccgaggcaccggcagggcacaaggaaaacgaaacgggagcaggagaagaagccaggggcaga

SEQ ID NO: 15405 - RNA, 73 nt, Homo sapiens
cggacacaggacgaagcacaggggcaacaacaagaacgacagcgaaacagagaacggaagacaaagagcaaca

SEQ ID NO: 15406 - RNA, 51 nt, Homo sapiens
aacccaaaagccgacaaccccagaaacaggaccggggcgacaggcacggca

SEQ ID NO: 15407 - RNA, 84 nt, Homo sapiens
cgcagccgagacaccagcccgaaacaccaccaagacagcgcacgaaacacacaaagaaccaccaccgggaggaagccagacaac

SEQ ID NO: 15408 - RNA, 61 nt, Homo sapiens
gcggaagcaggaagacacgaacccaccagccccaggaacaaggaaaagcaccaggcaaacc

SEQ ID NO: 15409 - RNA, 56 nt, Homo sapiens
acgcagcggagagcccgccaccaaccccgacaggaggacagcccaccgaggaagac

SEQ ID NO: 15410 - RNA, 82 nt, Homo sapiens
agggcaccgcgcgaagcggccaaagccgcccagacggccaccggcgggaggaacaaaaggccagcaaaggacgcccgaacgg

SEQ ID NO: 15411 - RNA, 56 nt, Homo sapiens
ccgccgcgcagacggagcccaggcggacagaggacgaagaaaacaagccgacagaa

SEQ ID NO: 15412 - RNA, 82 nt, Homo sapiens
caggacgcgccgcgccccaagaaaaaggcacaaacccagcacagagaagacggcgacaagcaaaagacgacgcagaaaggag

SEQ ID NO: 15413 - RNA, 78 nt, Homo sapiens
ggccacacgagggacaagcagggcggagcagcgggagccagacaagcagaccggaagaccgacggaagaccacacccc

SEQ ID NO: 15414 - RNA, 60 nt, Homo sapiens
acaagccccagggaagccacagcaccccagcacccaggaaaaaccagaagagaaaaaaca

SEQ ID NO: 15415 - RNA, 72 nt, Homo sapiens
gaaaggggaggggccgccaaaagcgcgcagcggcccgcgccgcaacaagaaggcggcacccccacaagcggg

SEQ ID NO: 15416 - RNA, 71 nt, Homo sapiens
cggcgacccgcacagccgcaccccaacccccagggcacgagcaaaaaaaagccccgagcaacaaaccaggg

SEQ ID NO: 15417 - RNA, 86 nt, Homo sapiens
ggagcaggagaagccccggggggaagagcgccaccggcggcccgcaagaagaccgagaaggggcaaagagaaccaggagaccccac

SEQ ID NO: 15418 - RNA, 85 nt, Homo sapiens
ggcgcaaacggaggcggaggaggacgccaggggacacgcccaccggacccgaaaagacccagacagcaagaaagcaccagccaag

SEQ ID NO: 15419 - RNA, 73 nt, Homo sapiens
aaaacaaagaagacccagcccaggcagggacaccacgggcacgcaccaccacggagagggcggacggaagagc

SEQ ID NO: 15420 - RNA, 75 nt, Homo sapiens
ccccccggcgccgcgccggcggcgggcagcagaagccagccggccccaagaggaagaagccccacccgccaccgc

SEQ ID NO: 15421 - RNA, 73 nt, Homo sapiens
gaagggaaacccgcgacaccgcgagggacaaagaccgaaagcacgagaagagaagcccagagcaaaacacccc

SEQ ID NO: 15422 - RNA, 57 nt, Homo sapiens
agacgagagcgccagaggggaaaaaagcagaggccagggcgccgcccccccgccccc

SEQ ID NO: 15423 - RNA, 75 nt, Homo sapiens
cgcggggagacgcgggggacggggcaggaccacagggcagaccagaaacgggggcagagccggccaggggcaccg

SEQ ID NO: 15424 - RNA, 76 nt, Homo sapiens
ccaggacaggaggcaaagagccacccagaggcaccccgaggggaggcggaagccacaaacggacggccgacaagaa

SEQ ID NO: 15425 - RNA, 85 nt, Homo sapiens
ggcgccccggcgcgaagaggcggaccggacggccgaggacaaggaagaggggagccaaagaccaagcaccagagaagaggaggaa

SEQ ID NO: 15426 - RNA, 57 nt, Homo sapiens
cccaaaacccggaagagcgccccaggagaaacaagggagcgcaccggaccccaagag

SEQ ID NO: 15427 - RNA, 99 nt, Homo sapiens
cggacgggccggccgcccaccgccagacaagagccccgaggcccccagaagcagggcgggaaaccaacccgcaaggcagaaccagcaagggaagggcga

SEQ ID NO: 15428 - RNA, 75 nt, Homo sapiens
ggcagggaacggcagagccccacagacccaaagacaggaccacgcaccagcagagaaggaaagcaaaccgaagca

SEQ ID NO: 15429 - RNA, 80 nt, Homo sapiens
caaggaaaggggacagcaacagccggcgggcggaagacaagccgagaccaccaggagcagagcggaggcaaccagccaaa

SEQ ID NO: 15430 - RNA, 67 nt, Homo sapiens
gaggacacgagccagggaggaaggcgcaggagcccggccaccacacccagcgggacggggaaggaag

SEQ ID NO: 15431 - RNA, 68 nt, Homo sapiens
aaacgacaaccaaggggcccccacagagagcacacaaacaaagcgaaaccacggaagaaaagggcaaa

SEQ ID NO: 15432 - RNA, 56 nt, Homo sapiens
agccaaaaccagcagagccacaacggagaacagccaccggaagaagccacagaaag

SEQ ID NO: 15433 - RNA, 80 nt, Homo sapiens
gcgcgcccggagagccaccggagacgccgagcccacccccacggcaccacaaaggcagcaccaagcaaaagaggaagccg

SEQ ID NO: 15434 - RNA, 97 nt, Homo sapiens
gcaaaggaaagaaggaccagcagaagaaagaaccagcagcggcaaaggaaagacccccgaagcaccaaagcgggaagccaacaggcgagcgaagcag

SEQ ID NO: 15435 - RNA, 82 nt, Homo sapiens
aaccaagaggcacaaacagcaacaggacaaaagaacaacagacaaggcaaggaccgaacaggaaacccaggcccaacggcag

SEQ ID NO: 15436 - RNA, 81 nt, Homo sapiens
aggcagcgcgggacccagcccaggcggcgcggacggggcgggaaacagcccgaacgcacagaagaaaccagcgcccagcgc

SEQ ID NO: 15437 - RNA, 60 nt, Homo sapiens
gagaggaaaggcgagggaagcgccgggacgaaaagagagacgagacggaaccccgcaaag

SEQ ID NO: 15438 - RNA, 76 nt, Homo sapiens
gcgcgaagcgccgaaagcaagaccaaaagagaggcaccgcggaacacaagagagcccaagagacacaggcagaaga

SEQ ID NO: 15439 - RNA, 38 nt, Homo sapiens
gaccaagaaccagagcgaagaagcaggggagaggccga

SEQ ID NO: 15440 - RNA, 86 nt, Homo sapiens
aagacggccaacgagcaaagggcccgggccaaagcccaggccagcaggacacgccgggacaaggaccaacagacccaaagaggacg

SEQ ID NO: 15441 - RNA, 74 nt, Homo sapiens
cgagaccggaagagaaagagcaggaaaccgaagaaccagccccggggacgaaagagacggcagcgccggccagg

SEQ ID NO: 15442 - RNA, 70 nt, Homo sapiens
gggggaagggcccaaagccagaagggacacacaggaagacgaacacggaacgggcgagaagaaagcagag

SEQ ID NO: 15443 - RNA, 87 nt, Homo sapiens
ccgcgagcaccagagcggcgaacacgccgacagggacgaagaaaagggggacaccgccgcccagccacaggaccgacaccgaaaaag

SEQ ID NO: 15444 - RNA, 85 nt, Homo sapiens
gccggccgaggcggagcgcgaaccgaggaagacagcccgacggacgggcacccggcccgcagagaggaggaagaagagaaaggaa

SEQ ID NO: 15445 - RNA, 52 nt, Homo sapiens
gggacgggcacgggaagaaaacgggaagacccaccgccagcccaccacgccg

SEQ ID NO: 15446 - RNA, 70 nt, Homo sapiens
agccacgcggagaagaggaggaggagacgccgaaagaacagcagcacaggccgccgacccccggcaaagc

SEQ ID NO: 15447 - RNA, 81 nt, Homo sapiens
gaccgcccacaggaggagccaggcagacagccagaagacagcacagcggaaaggagaggcgcagcgccaggccccaaggcc

SEQ ID NO: 15448 - RNA, 70 nt, Homo sapiens
ggccccaccccccaaggaaaagcacagaagagaaggacacgcaaaccaccaaggaggaacagacacagac

SEQ ID NO: 15449 - RNA, 63 nt, Homo sapiens
aggagggcccagaagaaaaagggagcccacaagcccggagggcacgagccacacgccacgccc

SEQ ID NO: 15450 - RNA, 60 nt, Homo sapiens
ggagaggagcaagaccccgaaaccagaagggggaaagccccgaagaagaggccgaccgga

SEQ ID NO: 15451 - RNA, 78 nt, Homo sapiens
cgggcgcccaagcgacagcgcagaggggcaggagccgggagccaccgcgaaggacagacccgagaaaccggacagcag

SEQ ID NO: 15452 - RNA, 54 nt, Homo sapiens
gagagacagcgggagccacggccacacgggagagaaaggaagaagagccccggg

SEQ ID NO: 15453 - RNA, 87 nt, Homo sapiens
cggggaccaggacagcgcgaggcgagggcagagccgcggggcaagacgcgaaggggagcaagggagaaaagcaaagggaaggacgaa

SEQ ID NO: 15454 - RNA, 68 nt, Homo sapiens
acgcggcaccccgcccgccacacgcgcagcccgccacgaggcaggcacccgcaacaccagacggccac

SEQ ID NO: 15455 - RNA, 74 nt, Homo sapiens
gaacccagaaacagagggaggaagacagccagcaagagaaaccgaagaaggcccacacacacaggaaggcagaa

SEQ ID NO: 15456 - RNA, 63 nt, Homo sapiens
cgcggcagcgcgcccgagagaccacagcagacacagagacgggcggacacaggccgacaggac

SEQ ID NO: 15457 - RNA, 83 nt, Homo sapiens
cgaagggggacgccggccggggccggggcgggggagcagcagaccgggaagcaccgggaacaaaccccccacggcccgagcac

SEQ ID NO: 15458 - RNA, 80 nt, Homo sapiens
gaggcggcgcggcggccccgggaccaaggaggacggcaagcccgaggaccccgggaacaaggaaaagagccggacaggaa

SEQ ID NO: 15459 - RNA, 69 nt, Homo sapiens
ggagcccgcagaccgcagaaggccggagacaccagcaggacccacccaggaggcagaaacacgccgcgc

SEQ ID NO: 15460 - RNA, 86 nt, Homo sapiens
ggagccgcgccgcaggagacgagaggacgggaccaggcgaagcggccgagcaggcgagcgaacgacggggggaccaaacccaggga

SEQ ID NO: 15461 - RNA, 75 nt, Homo sapiens
cgagcgcaagcagccaccagcacagacacggcccggccaacgcaacagggagcccacgcaagaggggccggggac

SEQ ID NO: 15462 - RNA, 84 nt, Homo sapiens
cccagcccccgagggcgggacacaggaggaaaaccccccgcagaccaacggacccaccagaaccagacacagggccggccccga

SEQ ID NO: 15463 - RNA, 72 nt, Homo sapiens
gaacagcaaaccacccagacggcaagagagccggccaggacacacaggcagccggcacccgcacaacccagg

SEQ ID NO: 15464 - RNA, 70 nt, Homo sapiens
agacaagacaaggagagaccaaacccgggaaagaaaaacccagcagcacgcagagaaccgagaaagcaac

SEQ ID NO: 15465 - RNA, 73 nt, Homo sapiens
gcaccgccaacgggggccggacaggagcaccaagcaccagaccagcgaagcaaagaagcaacacgaaaaagga

SEQ ID NO: 15466 - RNA, 76 nt, Homo sapiens
cccaccggcccaaaggcccggacccaaaacaggaagccaagaacccaaagcaaggcgagacaaggggccaaccagc

SEQ ID NO: 15467 - RNA, 59 nt, Homo sapiens
ggcagcggaccgagcgcggcgcgggccggcacccgcacaacccagggggccgaacccag

SEQ ID NO: 15468 - RNA, 76 nt, Homo sapiens
gcaccagcggcagcccaccaaggacccggcgcggccccaaccacagcccgcaaggggagaacgaccaggagcggcc

SEQ ID NO: 15469 - RNA, 76 nt, Homo sapiens
agacggagaagggggacgcggaaacaacgggaggagagagcgccaagaaaggagacggagcggaggagagaagaga

SEQ ID NO: 15470 - RNA, 77 nt, Homo sapiens
cagagcacgcaaaggggcagcaggagcggagggcccccgcccaggggaaggacgaggacccgacagagccacagcaa

SEQ ID NO: 15471 - RNA, 83 nt, Homo sapiens
agccgagggagaagaccaccacaacaagagacaacaccgcgcggaccacaaaccgcgccagaaaacgagcacacaagaaaaga

SEQ ID NO: 15472 - RNA, 76 nt, Homo sapiens
aacgccgggccaagaccccgagagaaaaaaagaggcgaccagcccgggggaaaagaagagaacggccgaagacaca

SEQ ID NO: 15473 - RNA, 75 nt, Homo sapiens
aagcggaacagaagagacccgcaaaagaaaagccccgggaaaccgaagccaaggaggccccagaaggcagcagag

SEQ ID NO: 15474 - RNA, 74 nt, Homo sapiens
cggagcacagccgaggcccgcgagggcgaggccgggagagggaagaggcggccacccacgagccgacggcaaac

SEQ ID NO: 15475 - RNA, 70 nt, Homo sapiens
agccccccccacaggaagaaacgaggggagcgcaaccccagaagacgcagagccagaagacgcaaaagcg

SEQ ID NO: 15476 - RNA, 72 nt, Homo sapiens
gaggacaagcgcagacggcaaccaccgaaacgggcgaaaaagaagaacagcaaaacacgaaaggcaaagaga

SEQ ID NO: 15477 - RNA, 90 nt, Homo sapiens
gggaccagaggagaccgccacacaagagaagacccaccgaggaggagcccggaccgacaggaaagaaggagcccacaaagaaaagaacac

SEQ ID NO: 15478 - RNA, 65 nt, Homo sapiens
ccccacgaagggacacacccacaaacgcccagaagccgaaaagcaaggcccccacaagcaacccg

SEQ ID NO: 15479 - RNA, 75 nt, Homo sapiens
gagcagcaacaaccagccaggaacaggcacacgcaaggcgaccacaccaagcgccccaaaagcacgcacgaaacc

SEQ ID NO: 15480 - RNA, 86 nt, Homo sapiens
ggcaacgggcgccaagccgcggagccccagacggagccaggacaaaaccaggcagaaccaacacgaacccaagcacaaacaagaaa

SEQ ID NO: 15481 - RNA, 127 nt, Homo sapiens
gccaccaccacgccagccgcaccagccgcccaagccgcacagccgcggcggcagcagcaggagaggggaacgcccgcggacggcagggcgcgacaagaagcgcccgcccgacgagcggcccgccacc

SEQ ID NO: 15482 - RNA, 79 nt, Homo sapiens
gaccggaggggacgaagaacgggacggggcccacccccgacaggccgaagccaggaaaaaacagagaaaaccaaagagc

SEQ ID NO: 15483 - RNA, 78 nt, Homo sapiens
cccagagcccaagaaggcagcaggcaacagcagcagagaaaacagcagcagaggggccaagagcgcaacacagcagcc

SEQ ID NO: 15484 - RNA, 72 nt, Homo sapiens
cagggaggaagaaggaagaacgagacagggaaacccagacgacaaggaaggccaagggacccacgaccaacc

SEQ ID NO: 15485 - RNA, 73 nt, Homo sapiens
cagccagccacacggcagaaaaagagcgacaccgaaagaaccgagggaaggagagcccacaaggacaggacgg

SEQ ID NO: 15486 - RNA, 51 nt, Homo sapiens
acgagcaaaacgggccgaacgcaaagaaacaggagcgcaagagcgcccaga

SEQ ID NO: 15487 - RNA, 91 nt, Homo sapiens
ccgagggagaccagaaccccgaggaggagagcaccagaggcaaggacagagacggaacagaagacagaaaagaacccaaaaccaacgaaac

SEQ ID NO: 15488 - RNA, 76 nt, Homo sapiens
gaggcggcagaccgcccccccagccgcgcggcccccagaccccggcgcggggcccgagcaggaaagagaaggcgga

SEQ ID NO: 15489 - RNA, 75 nt, Homo sapiens
agcagagcggcgaccaccagaagacaagggcgggaacgcggaagaagaggaacacaagcaccaaaccaccaaacc

SEQ ID NO: 15490 - RNA, 81 nt, Homo sapiens
agcccaagacgcgcggccaagcagaaaggaacagaacgcggccccagccacaccaagcagagggcaaagggaaaagacccg

SEQ ID NO: 15491 - RNA, 78 nt, Homo sapiens
aacaaccgggccacaagagaaagagcacggccaaaaccccgccaagaccaaacagccgcgaaccaaagaagagagcaa

SEQ ID NO: 15492 - RNA, 68 nt, Homo sapiens
gcccaaagaaagagccggaccgagacagagaagaaagggaaccagcaggacagagcaagcaagcagca

SEQ ID NO: 15493 - RNA, 71 nt, Homo sapiens
caaggggcccgcaacaccggaaccgcggcggaagaacagggacagaagccgagaagaaacacacaggacac

SEQ ID NO: 15494 - RNA, 75 nt, Homo sapiens
cggcccccgaagcccaccggccccaacgcacagccagggagccaagcgccgcccggcccagaagcacacccaaca

SEQ ID NO: 15495 - RNA, 60 nt, Homo sapiens
acccagaacaaaaggagcaagcccgccgacccgaaggaaacaaacaaaaggacgaaggaa

SEQ ID NO: 15496 - RNA, 75 nt, Homo sapiens
ggaagaccacggaaaaacagaggcggaagggaaagaacgcacaacacccgaacaaaccacggagggaggggaccc

SEQ ID NO: 15497 - RNA, 75 nt, Homo sapiens
gggagaagagcggaaacggggccacgggcccggagacccgcagcccaaggacacaaaggccggggcagcagaaga

SEQ ID NO: 15498 - RNA, 67 nt, Homo sapiens
ggggaagaggcgccgggacagggggaaccagaagaggccaaccagcacgaacgccagcagcacggca

SEQ ID NO: 15499 - RNA, 78 nt, Homo sapiens
gaggacccacaggagcccaccccggaggaaaaacagaagccaggaagccacagaaaaaaagaagggaagaaacagaca

SEQ ID NO: 15500 - RNA, 71 nt, Homo sapiens
gaccaacgaccgcgaaacagacggcagcaggagagaagagccagcacccaacgaacaacccagaaaagaaa

SEQ ID NO: 15501 - RNA, 72 nt, Homo sapiens
cccagaagaggagggaacagcagccagacccccaaagcggaccagcagagagaagagaccacccagagggcc

SEQ ID NO: 15502 - RNA, 79 nt, Homo sapiens
ccgggaagcacacaagggccgaagcagggcacaaaaccaaggccaagcaagggaagaaaggaaggggcaccacaagaca

SEQ ID NO: 15503 - RNA, 42 nt, Homo sapiens
ccggggaccgagggcgagcgagaaacgaaggaggcccaacca

SEQ ID NO: 15504 - RNA, 71 nt, Homo sapiens
agacgaaagaggcggcccagacggcaagcaggcaagacagacacaggagccagagaccaggagccccagag

SEQ ID NO: 15505 - RNA, 66 nt, Homo sapiens
caaggccacggcggcgaccagcggcggggagccaagaaaaacaaccaccagcgagcaaaaaggcaa

SEQ ID NO: 15506 - RNA, 82 nt, Homo sapiens
gcccaaggccgcgcagaacaacaagcggaaaccaaagaccccacgacgacacagcgagcccgagacacagacaccagaaaga

SEQ ID NO: 15507 - RNA, 76 nt, Homo sapiens
agagaaaggacccacgaaaacaagaagggagagaccagcagccgcgaaaccacccgaaagaacaaaaagaaaagga

SEQ ID NO: 15508 - RNA, 81 nt, Homo sapiens
ggccaggggagagcagaggcaaaccgaaagaccccagaggagggaggcaagggcgaaggggggggccaccgggggaccggg

SEQ ID NO: 15509 - RNA, 64 nt, Homo sapiens
ggcgcgaagaggacggaacacagcacaaaagggagaacgggcgaaaaacgaagaaggaagacgc

SEQ ID NO: 15510 - RNA, 50 nt, Homo sapiens
gggcgccaggaccggccgaacgcagaggggggcccgaacagaagcgccca

SEQ ID NO: 15511 - RNA, 77 nt, Homo sapiens
aggcggcgggcggaggcggcggggccagccaagccgggagggaacgacgcagcaacgacacaagcagaaccccggcg

SEQ ID NO: 15512 - RNA, 76 nt, Homo sapiens
acacaagaaggcagccccgaaccagcaccacagaaggacgaagagcgacagaaccagcaagcaaaggcaaaccccg

SEQ ID NO: 15513 - RNA, 73 nt, Homo sapiens
gaaacaagcagaagaacgcagaaagagacacaccgacgaaaaaaagcagggcgagcgcgagcagccgggaacg

SEQ ID NO: 15514 - RNA, 72 nt, Homo sapiens
gaccggcgcaggccaaggccgccgaaccgacaccggagacaccacaccaacgaaggcagagggggcgaggga

SEQ ID NO: 15515 - RNA, 73 nt, Homo sapiens
caaacgggccaaaggacagagaagacagaggagcaaaacacaacccagacacccacgaccgaccagacgcccc

SEQ ID NO: 15516 - RNA, 53 nt, Homo sapiens
gccaagagagccgaacccaccgagccagggaggaaaagaaggaggccagcggg

SEQ ID NO: 15517 - RNA, 63 nt, Homo sapiens
gaaggcccgggggacggaaagaggacgacgggagagaagcgccggccggaaagaagacgggga

SEQ ID NO: 15518 - RNA, 53 nt, Homo sapiens
caccaacaaggagacccgggaggaccaagccgaaccccaccaacaacgaacgc

SEQ ID NO: 15519 - RNA, 59 nt, Homo sapiens
cccaccagacgagcaccaagaagcgagaagcgcccagaaacaagaaggaggagaagaga

SEQ ID NO: 15520 - RNA, 81 nt, Homo sapiens
agcggcgggggaagacaagcaagcccggagaaggccacacaaggacggccccccagcgagcccaggcccaggcccaaggcc

SEQ ID NO: 15521 - RNA, 95 nt, Homo sapiens
ggcggaggccccagggaagcgcagaaagcaggcgaacccgcggcgcaaaacggccacccagaggagaaggccaccccgccggaggcacaggccag

SEQ ID NO: 15522 - RNA, 85 nt, Homo sapiens
gaacccgagagcgggagcgggcgggccagggccaggccgagggcccgcccggccccaggagaagaaccagccgcagaggaggcgc

SEQ ID NO: 15523 - RNA, 65 nt, Homo sapiens
ccgggcggcggagcggcggaagaaggagaaggcaaccaaaggcaggacacaaaaacaaccgaaag

SEQ ID NO: 15524 - RNA, 79 nt, Homo sapiens
cgaacccaccgcacccggcccaagcaggagcagcaacacgccggcgcccaaacccaaggcgaagaccgccagagcacaa

SEQ ID NO: 15525 - RNA, 74 nt, Homo sapiens
acacgaaaaaacccagaacacgggagaaaaaggaaaacgcggaaaaccgacacaacagccccgggaacagagag

SEQ ID NO: 15526 - RNA, 74 nt, Homo sapiens
gcgcggggacccgcgagcacccgccgacacagccaccaagaaggcacaagcagaacgggaaaaggggcggaaag

SEQ ID NO: 15527 - RNA, 70 nt, Homo sapiens
gcccacaaaccagcgcgccaacacccaggaacacagaccaccaggagccagccggccaccaggaaaaagg

SEQ ID NO: 15528 - RNA, 70 nt, Homo sapiens
gggaagacacgaaaaaagagaaagggccaacgacgcacacgcaaaagggcacagcgggaaaggaacacag

SEQ ID NO: 15529 - RNA, 71 nt, Homo sapiens
agaacaaaagaaaaccaaagcagaccagaaaaaacagcacaccaggaagcaaggaacagagaagcacaccg

SEQ ID NO: 15530 - RNA, 57 nt, Homo sapiens
cgcaacagggccgcacgcaagcccagcccgggacggggcccgcaacagccggagcag

SEQ ID NO: 15531 - RNA, 81 nt, Homo sapiens
ccggcggccgaagacacgcgacccggagacagcccaaaacccggaagagcgccccaggagaaacaagaagaacacagaaga

SEQ ID NO: 15532 - RNA, 62 nt, Homo sapiens
cagccaggaggcgccgagagacgcaagaggcggaacgacagaaccgcccggggaggagcagg

SEQ ID NO: 15533 - RNA, 81 nt, Homo sapiens
cacgcgggacgccacacgaaggccaccacaaaagcaggagaacccagaaccccaaagcgcaggacaaacgagcacaaaaga

SEQ ID NO: 15534 - RNA, 39 nt, Homo sapiens
ggaggacagcccaagaacaccggaaacaggaacaacacc

SEQ ID NO: 15535 - RNA, 53 nt, Homo sapiens
cgacacaggcgagaggcagaggacagccagccccaaagcacggcgcaggaagc

SEQ ID NO: 15536 - RNA, 43 nt, Homo sapiens
gccaacgaacgaggggggaccagaggggagcaacacgaagaaa

SEQ ID NO: 15537 - RNA, 72 nt, Homo sapiens
gcaccggaagagagcacacggcggcccccacacacggccacaacaaccggcgcaggcgacgcaagcagaacc

SEQ ID NO: 15538 - RNA, 62 nt, Homo sapiens
ggagacagccacgggacagccagaacaagcgcagagaagggagcccggacaggaccaacgga

SEQ ID NO: 15539 - RNA, 105 nt, Homo sapiens
ccggggccagcgcagccgcggcggagacgcacaggcccgcaaacggggacagcgccgaccggaacagggaccacggaagcccaggaccagccccgacaagcccaa

SEQ ID NO: 15540 - RNA, 76 nt, Homo sapiens
cagagcgccaggcaagcgcagccgagaaggccaagggacaccggagaccgaagaacggaagcgcacgaacaaggcg

SEQ ID NO: 15541 - RNA, 67 nt, Homo sapiens
cccgaggcgagacggaaagagaaagagcgcgcacgaaagcacacgaaaaggaaggaaaaacgcagcg

SEQ ID NO: 15542 - RNA, 74 nt, Homo sapiens
cggacggccggcccgggccagggcccagaaagccaagacccccaaggggcacccgacaaagaccacgccaccca

SEQ ID NO: 15543 - RNA, 82 nt, Homo sapiens
agacgaggccaccaggaaagccgcagccccgacggccaacacccccaagaacaagcgccaaaagaaccaggagagaaagaac

SEQ ID NO: 15544 - RNA, 70 nt, Homo sapiens
agaggagacccgccggagaagaacaaaccagacccccccaagccacacacccggagagaggacgaagaaa

SEQ ID NO: 15545 - RNA, 53 nt, Homo sapiens
caacaggccaaacgcaggaaggagggggccccagaaccagcgccggggacacc

SEQ ID NO: 15546 - RNA, 64 nt, Homo sapiens
ggccgggcacgggaaaaacaacggacaagcaacgggcaggcgggaaaaccgccacaaagccccc

SEQ ID NO: 15547 - RNA, 76 nt, Homo sapiens
ccccgcaaaaccaggcgccaggggagaggaggcagaaggagaccgcgggacagaaccgcgggcaaaaggggggaaa

SEQ ID NO: 15548 - RNA, 83 nt, Homo sapiens
ggcccagcgacgcaccagcaagacggcaggcgagagccgacccaggccgccggccccacaggaacacaccaccagcaaggagg

SEQ ID NO: 15549 - RNA, 79 nt, Homo sapiens
acacgcaccagagccagggcgcaggagcagcagcacagaagggcccggaggggccgccccacgccggcgagccaggaca

SEQ ID NO: 15550 - RNA, 75 nt, Homo sapiens
cccgagaagcgggacacagaagccgaagcaagacgaccagcagcaacgaccccaccaccccggacacagagacgg

SEQ ID NO: 15551 - RNA, 79 nt, Homo sapiens
accaagaggagcgcagaagacgccagcccaccagcacaagcagccgacgcacaagcaaccaaccgcggccggcccgcgg

SEQ ID NO: 15552 - RNA, 79 nt, Homo sapiens
caaaacaagagagcgcgcaccgaaaaaacagagcggggaaagaccaacaaagcaccgagaaagccaaaagaagaaaagg

SEQ ID NO: 15553 - RNA, 58 nt, Homo sapiens
cgggaccgcgccaccagcagagacacagccagacacccggcgcccgcgcccgccgcac

SEQ ID NO: 15554 - RNA, 70 nt, Homo sapiens
ggccaaaaaaaaaaaaggaagcacaccaagagagccaccaaagaagaccagacaggggaaggagagacag

SEQ ID NO: 15555 - RNA, 81 nt, Homo sapiens
ggggggccggcacaccaggccacagggcggacaaggaagacagaaggacaccccaccgccgaaggagaaagggcgcaagag

SEQ ID NO: 15556 - RNA, 73 nt, Homo sapiens
acaaacggcaaagaacacgacgagaacaccggaagaagacccagcaaaaccaggcaccccgggcccgccagag

SEQ ID NO: 15557 - RNA, 75 nt, Homo sapiens
ccacccggaggagacggggcagacaacggagcccgggcaggggaaagcgcgagcgagcacccggagcagcagagc

SEQ ID NO: 15558 - RNA, 56 nt, Homo sapiens
cgcgcgggcccgcccgacgcggaagcgagacgacgggaccgaaggaccccgccaga

SEQ ID NO: 15559 - RNA, 82 nt, Homo sapiens
cccagcagcagaaaacacccagcccgcacggagaagaagcaaggacagccaggacacgccaaaaggagggacggggcaccag

SEQ ID NO: 15560 - RNA, 85 nt, Homo sapiens
ggcagccgcgaggaggcgcgggagggcgagaacgaccccgagacggaggcagcacggcaggagacgaggagaggacagcaggaca

SEQ ID NO: 15561 - RNA, 76 nt, Homo sapiens
aaagaacaggaagaagacgcgcaggcagggcacaggggggacagaacccggaccacagcccgggcaagagcaaaga

SEQ ID NO: 15562 - RNA, 73 nt, Homo sapiens
ccggccgccaacccagaaggagcaacaaggcacggcaacaagcagacagacaccaaagaccccccaagaagaa

SEQ ID NO: 15563 - RNA, 57 nt, Homo sapiens
caacggagcggggcaggggcgacgagagcgcgcggcacccggaaacaagccacgaag

SEQ ID NO: 15564 - RNA, 86 nt, Homo sapiens
ccgaccaacaaggaccagaaaggagagccaaccggaagcaagaagcagagggaaagaaaaggcaaaaaggagcagaagaaggagca

SEQ ID NO: 15565 - RNA, 75 nt, Homo sapiens
agcacagcaaggaggaaacagcaagggaacaacaacaggacgccacaggcccccggccacgcagggcggcacaaa

SEQ ID NO: 15566 - RNA, 72 nt, Homo sapiens
ccgccgcgcccgcccgacccgccaccgccaggccaggaccaagaacgcccagcccgcgggcaccggcagaaa

SEQ ID NO: 15567 - RNA, 77 nt, Homo sapiens
gagcaggcaaagggacagaggcaccaaaagcgaaggaagcccgccaccaaagccgaagccaaagcgaaggcaaaggc

SEQ ID NO: 15568 - RNA, 71 nt, Homo sapiens
cccgggccaagcgggaggcgccgccgagaggagggagacccaggaccaagaacaaggggcacccgcaagcc

SEQ ID NO: 15569 - RNA, 55 nt, Homo sapiens
gcccgggcagggcccaccccgcgcccgacagggaagaaagcacgggaaaaggccg

SEQ ID NO: 15570 - RNA, 77 nt, Homo sapiens
ggaaaaagccggcccggaagccgggacgagccgcagacaaccgacgggagggaggagcgaggggggagcccgaaaac

SEQ ID NO: 15571 - RNA, 69 nt, Homo sapiens
gcccgaaccgagggaacaggggggggcgcaagccagcgcccagggagggcagccgcagacccacacacc

SEQ ID NO: 15572 - RNA, 83 nt, Homo sapiens
cgagccgccagcaagcggcggagcgcgcccggcccgccccccgcaacgagaaccaagagcaggaaaacaaaaagagaagaaga

SEQ ID NO: 15573 - RNA, 80 nt, Homo sapiens
ccaaagcacagagccaaaagggacaggaagcacagaaccgggcacgaccgaaagggcgcaccgggaagaggggcccgaag

SEQ ID NO: 15574 - RNA, 81 nt, Homo sapiens
ggcccgcggggcggagaaacgaccgcgccgccgcgccccaccgggcaaaccgcggacagccagaaggggggagaacgagga

SEQ ID NO: 15575 - RNA, 80 nt, Homo sapiens
cgaggcggcggccgcggggaggaggagggggcaaccagaggggccaacggacgacaggacgaaggacagagagggacggg

SEQ ID NO: 15576 - RNA, 102 nt, Homo sapiens
cagcaccaccggcaaggaggacacgggcaccgacaccgccggggccaagggaccgacagcaagaaaaggagaaaacaaggccgcgggcacacagcaaccagg

SEQ ID NO: 15577 - RNA, 68 nt, Homo sapiens
cagcggaccagcaaagagcccacccaccgggccgggacacgaggaggcggcggggccacagaggaccc

SEQ ID NO: 15578 - RNA, 76 nt, Homo sapiens
cgccgccaagccgccccgaccaaagagccgccagacccacccggacccccagaaaaggaaacaaggaacaacaaag

SEQ ID NO: 15579 - RNA, 74 nt, Homo sapiens
gcgcgaggaggaaaggaggacgagacaagacgacaagcaagcccaaaaacgaaaacaaacgaaggaagaaaacg

SEQ ID NO: 15580 - RNA, 78 nt, Homo sapiens
aagcaaggaacaaaccgaagaacagcgggaaagaaggcaaaacacgggacagggcaaggcaggacagggacacagaaa

SEQ ID NO: 15581 - RNA, 69 nt, Homo sapiens
aggaagcgcgaacagcagcgcagggaggcaccgccccaacccccccccgcccggagaaccccgcggaac

SEQ ID NO: 15582 - RNA, 83 nt, Homo sapiens
aggcccgaggagcggccacgcgggagagcccacaccaccccaagcggagcacccaacccagcaagacacgaccgaccacacca

SEQ ID NO: 15583 - RNA, 78 nt, Homo sapiens
agcagacggccgcacgcgacccgaagaggagccaagaagaaccggagccaagaacccaaggagggagcaggggccaag

SEQ ID NO: 15584 - RNA, 77 nt, Homo sapiens
ccggggaggaaaaccgacgaagaggacaagccgaggcgggagccgggcaggaggaaggagccccccagggcgggaac

SEQ ID NO: 15585 - RNA, 80 nt, Homo sapiens
gacccgaccagcgggggcgcggcggccgcgcagccacccaagaggcgacacgggaaacgcacccgcacagagcgcagaac

SEQ ID NO: 15586 - RNA, 83 nt, Homo sapiens
caaagggagcagagagagcggagagaacgacggacaggaaccaagagcacagcaaagaaacagcaggacaacggaaaacacag

SEQ ID NO: 15587 - RNA, 61 nt, Homo sapiens
agcacccggcacgccacggcgccccgcaagaagcgccaaggcggggcacccaaaagcacag

SEQ ID NO: 15588 - RNA, 86 nt, Homo sapiens
acacgacagagggcacccccaagccccacagagcaggggccaagcgcggcggcagaagcggggaaaccaacgggacgagggaggac

SEQ ID NO: 15589 - RNA, 71 nt, Homo sapiens
agaggagcagagacgccggacagcgggaaaacggcaaggaaaaacaagaaaaagggaaggggacgaaaaca

SEQ ID NO: 15590 - RNA, 54 nt, Homo sapiens
cagaacccaagccaggcacccaaaaaaacaggaccccagcagacaggcgaaggg

SEQ ID NO: 15591 - RNA, 34 nt, Homo sapiens
gcggggccggggagccacaagaaggagagacgca

SEQ ID NO: 15592 - RNA, 77 nt, Homo sapiens
aaaaaacaaagcaaaaaaaacaggagaaaaagacgaggcccccaagcggggcccagggcccagacacaggaacgggc

SEQ ID NO: 15593 - RNA, 57 nt, Homo sapiens
cgcaagaagaacagagacagcagccaaacccccagaacccagcacaggaaaagaggg

SEQ ID NO: 15594 - RNA, 35 nt, Homo sapiens
caaaccaacgcaaaaacgaaaagccagaggcgggg

SEQ ID NO: 15595 - RNA, 72 nt, Homo sapiens
ccccaccagccaagcaaacaccccccccaccaccccaccagaaagggcgcacaaaagagcacaaaagcacca

SEQ ID NO: 15596 - RNA, 74 nt, Homo sapiens
cggcggagcaggcgcgggcgagccggcgacggacgcggcgcgcgaccgacacgaaggacaaggcacgaggcgcg

SEQ ID NO: 15597 - RNA, 88 nt, Homo sapiens
aggcagccgcgccgaaggacgccgccgggagcgcggagggacacaaagacgcagacggaggcgagcccaggaggcgaggggcagagga

SEQ ID NO: 15598 - RNA, 77 nt, Homo sapiens
gccagcagaggcggagcccgcagaccgcagaaggccggagacaccagcaggccacaaagaaagcaagagaggaaaag

SEQ ID NO: 15599 - RNA, 33 nt, Homo sapiens
agcaaaccgggccacaggcaccggcacggacca

SEQ ID NO: 15600 - RNA, 94 nt, Homo sapiens
gcagccgcgcacccacccagcccaaaaccaaggccaccaaggacagagcagacacaccacccaacaggaaacaaggaggcgggcagcgacaaga

SEQ ID NO: 15601 - RNA, 81 nt, Homo sapiens
cagcagccgcccgccaaccccaggggaccagaggaaccagcccgagcgggcgaacgacgggcccagggaaggagcgcgacg

SEQ ID NO: 15602 - RNA, 80 nt, Homo sapiens
ggggacggggcaggaagcggggaacaaaggaaaacgggagcgccggaacacagggccggaggacgacgaaggacagaagg

SEQ ID NO: 15603 - RNA, 71 nt, Homo sapiens
gccagacacaaacagagaggagaacaaccccgagacagaaaggcccgcacaaggacaccagaccacaccac

SEQ ID NO: 15604 - RNA, 42 nt, Homo sapiens
agcgaccccaacagggagacgcggggcccggccacagccgca

SEQ ID NO: 15605 - RNA, 78 nt, Homo sapiens
aaaaaaagagcccgcaagaagaacagagacagcagccaaacccccagaaaagggggaaggggacaggacgaaaaccgc

SEQ ID NO: 15606 - RNA, 83 nt, Homo sapiens
gacgaaaaggggcggaagaaaaacaaacacacgcaaaggagaaaggaaccgacaggcgggaaaagggacccgccaaaggagca

SEQ ID NO: 15607 - RNA, 56 nt, Homo sapiens
accggcgcacccaaacaacgagccccccaagagaacccagggggagccacgccgga

SEQ ID NO: 15608 - RNA, 71 nt, Homo sapiens
ggaccggggcccagcaaagccaaaggaaggaccagaacgccccacaacgggcagccggcagccacacacgg

SEQ ID NO: 15609 - RNA, 78 nt, Homo sapiens
ccaaccccagccgaccgagcccaggagcgccacgcgcggaaggcagcgcccagcagcgcagaaaacccgaggagagag

SEQ ID NO: 15610 - RNA, 94 nt, Homo sapiens
cgccaccacaccaaggccccagggccccaaagcaggaaggagggagccccaggaacaggagcccaccgaagaacgcccgacagaacagagaccc

SEQ ID NO: 15611 - RNA, 63 nt, Homo sapiens
gccccacgcggaaaagggacccccgggaagaagacacagaaaacagggaagggaagagaagaa

SEQ ID NO: 15612 - RNA, 119 nt, Homo sapiens
caaaaagaggcgaaaggaagcaagcagcagaagagccaaggaaaaacagcaagaacccaaaaggggggagagcaaggaccgcgacgacagcgaagacaagccgcaccggagaaaacaga

SEQ ID NO: 15613 - RNA, 58 nt, Homo sapiens
caagaggccaaaaccgaagaggaggacgaaccggaacagaagacagggaaggacccaa

SEQ ID NO: 15614 - RNA, 77 nt, Homo sapiens
gcagcagcgccagggagccgccacccacaacacgggaagaggcacaagaccagagcgaagcgaacaacaaacgggag

SEQ ID NO: 15615 - RNA, 72 nt, Homo sapiens
gagcgagggggggcgcgccggaaaccggagcgcgcagcagggaagaccaaggaccaagaacccccgcccgga

SEQ ID NO: 15616 - RNA, 63 nt, Homo sapiens
ggaggcaaacaagggaaacaggcgacaacggcaagcagcaaggaggaagcagcacaacccggg

SEQ ID NO: 15617 - RNA, 58 nt, Homo sapiens
cggagaggaagaaaacccaaacgcccacgacagagagcgaggccggacggagacagag

SEQ ID NO: 15618 - RNA, 107 nt, Homo sapiens
gcaagaggagccaggaggagagcccacagggcaaagagagcagacccgaggagcccgcagaagacgaccccgacgcaggccaggagccgcggacagaagccgagcac

SEQ ID NO: 15619 - RNA, 65 nt, Homo sapiens
gagggaacaaagagacaaccgaagaaacaaggaaccgagcggagaaacgcagcagaggcagaacg

SEQ ID NO: 15620 - RNA, 71 nt, Homo sapiens
cgcagagaaccagagggcaacggggacagggaccaaagggcacggaggaaaaggcggaggcaaggcgcgac

SEQ ID NO: 15621 - RNA, 125 nt, Homo sapiens
gccgccacccggcgcgagggggcgcaggaccggccgcaggccaccgacacgagacaaccgggagccgggagaaaagccaggaaagaaaagacaaccagccccaaccaaaacccaggagcaccacc

SEQ ID NO: 15622 - RNA, 76 nt, Homo sapiens
ccaggaagcccagcggcagaaaccggaggaaccgcagagccagaagccccaaccaggccgaaaggaaaggagaaac

SEQ ID NO: 15623 - RNA, 89 nt, Homo sapiens
aggaggaggaggaggaggaggagcccaggaggagacacgccagaaacaaaccgagcagcggaccggcagcggaagaggagaagaacagc

SEQ ID NO: 15624 - RNA, 97 nt, Homo sapiens
cgcgagcgagccgcgaaccgagcgggcggcgggcgcgcgcaccagggggagaaacccgggaccagcccgagcgggaagaagccgcagcaagccgcag

SEQ ID NO: 15625 - RNA, 74 nt, Homo sapiens
ccaaccaggccagcagccaaaagaagaacccggacccgaccgaagcaagaacgcaaaaggcacaagcaccccca

SEQ ID NO: 15626 - RNA, 71 nt, Homo sapiens
caggcgcgaagaggagcgagccagagaaagccaacagacgggccccacaaagggacgaacccaccgcagaa

SEQ ID NO: 15627 - RNA, 69 nt, Homo sapiens
gccaggggcacgcagcagaggagacgcgagaccagaagcagaacaaaaggcagccgccgcaaagggacg

SEQ ID NO: 15628 - RNA, 56 nt, Homo sapiens
ggccgcaaggagcggacccaccggccaccggcggagcgagaaaaacagcccgccgg

SEQ ID NO: 15629 - RNA, 86 nt, Homo sapiens
agcaagcgaagccgaaaaagcgcccgagacgggcccgccgaaagggcccgacccaggcaagcgagcaggcgagcaggagcccacag

SEQ ID NO: 15630 - RNA, 46 nt, Homo sapiens
cgcaccccacaaaaaaacaaaggaaggaaccgaagaaagaaaaaca

SEQ ID NO: 15631 - RNA, 76 nt, Homo sapiens
cgacaggccgggaggccagccccaaaggagccacagggcaagccaggcacagaggagacagggaccagacaaacca

SEQ ID NO: 15632 - RNA, 77 nt, Homo sapiens
cggggcccgaggccccgaccaggccgagcaggagcccgcgggcccagacagaggaccggcaagcagaaggacccgcc

SEQ ID NO: 15633 - RNA, 71 nt, Homo sapiens
aagagagcaaggaaacagcgacagaagccagcacaccaccacaacaggaaaggaaaaggcgaaaccagcag

SEQ ID NO: 15634 - RNA, 91 nt, Homo sapiens
gcggagaaggccacaccacgcagaacgcaacaccaaggcacaccaccccagccagacaacacagggacacaacaaacacaaccgccacaga

SEQ ID NO: 15635 - RNA, 74 nt, Homo sapiens
accccaacgagagccagaggaccaggccaagccgccacaacagaaggggaagcacagcaacccccacacccccc

SEQ ID NO: 15636 - RNA, 74 nt, Homo sapiens
accgggacaacaagccggaggggcgcgggggacagagagagccacgcgggccgaacgaacgaagagagaaggga

SEQ ID NO: 15637 - RNA, 70 nt, Homo sapiens
ccgagcccggccgccagaccacagcacagccgggaaggggagccaccagccccccggcaagcggcagcca

SEQ ID NO: 15638 - RNA, 64 nt, Homo sapiens
cgggaaaccccaggagggaagaaagcaaacccggcgcccagagacccccgggcaacgcggggcg

SEQ ID NO: 15639 - RNA, 66 nt, Homo sapiens
aacagcgaggggacacagaaggacaagagaccaacgaagaaccccccaagaaggaggggggggggg

SEQ ID NO: 15640 - RNA, 68 nt, Homo sapiens
cgaaaacggggagagccggaccccagaacccgacgaaccacaggaaaccccgcaaacacaacacccga

SEQ ID NO: 15641 - RNA, 77 nt, Homo sapiens
ggaggagccccaagaagaggcagccgaaagacccaggcagacaagccggaacacaggaaccggaagcgcacgaaccg

SEQ ID NO: 15642 - RNA, 57 nt, Homo sapiens
cgggccggcgagcgcgcgccaccagaggaggaagcgcccagaaccagggaccgacag

SEQ ID NO: 15643 - RNA, 69 nt, Homo sapiens
agcaaacgcacacgacagcaacaagacacggagcaaggaggaaaacacacgacagggaaaggacccggc

SEQ ID NO: 15644 - RNA, 73 nt, Homo sapiens
aaggagaaggacgccagggcggaggaccccaacgccggacacaagagggcaagaaaggcgcgacgggccgaaa

SEQ ID NO: 15645 - RNA, 75 nt, Homo sapiens
acccgaagccgcgccccgcaggcacccgggcccccgcccgaaacggagcacccaccaacgagagagccgcagggc

SEQ ID NO: 15646 - RNA, 88 nt, Homo sapiens
agcggaagcgggaggacgggccaccgcggcgcgaaccacggaaggagggggcgacacacaagcaggggggaccgacgagcaggcgaga

SEQ ID NO: 15647 - RNA, 69 nt, Homo sapiens
gggagacaaccaaaacggagagcgagcggaagaaacgcagaaaagagggacaaagcccccagaggaacc

SEQ ID NO: 15648 - RNA, 72 nt, Homo sapiens
cagaagccaaagagccgggggagaacagcagcgacaggaagccaaccacccaccaaaaccagcagcgaaaac

SEQ ID NO: 15649 - RNA, 64 nt, Homo sapiens
cgaggggaagcgaaccagcggaagacccgagacggcgcgagacaagagaccccgaaaacaagca

SEQ ID NO: 15650 - RNA, 78 nt, Homo sapiens
accccaccgaacagaaggcaccccacccccagcccaacaacagcagcaggcgcaaaaacgaacccacaaccgaacgac

SEQ ID NO: 15651 - RNA, 80 nt, Homo sapiens
cccaagcaagcggcccgaacacagaacccaagaaggagacgggccaggccacgcgcgcagccggacgcaggaagagaaga

SEQ ID NO: 15652 - RNA, 59 nt, Homo sapiens
ggccaggaacaaggagcgccagaagaaaaggccaaagccccgccacccaacgcccgcac

SEQ ID NO: 15653 - RNA, 87 nt, Homo sapiens
gccgcgagcgcccggccgaacccgcgaggaaaagcccagcggcccgccaggcccggcccagcaacggccacccaaagaacaccacgc

SEQ ID NO: 15654 - RNA, 78 nt, Homo sapiens
gccccagaaaccccccgaagaagaccccccacacgggagacagaacagacagaaaaaacaacaagaaacccacaacca

SEQ ID NO: 15655 - RNA, 60 nt, Homo sapiens
ggacgggggcggcccagaagaggcggaggcggggagagcaaacggaagaacagaaggccc

SEQ ID NO: 15656 - RNA, 86 nt, Homo sapiens
ccgagaccgaaccacacgcgacaaggcagagcgcggggagagcccggcacgaccagcaggacccagggccagacagacgaagagaa

SEQ ID NO: 15657 - RNA, 43 nt, Homo sapiens
gcccagcacggagcggaggaaggcaacgcccccagccccccac

SEQ ID NO: 15658 - RNA, 74 nt, Homo sapiens
cgcgggacagccccagagagaaggacaacaaggcccagggcccccccaggccgcagacccaggagagaacaccg

SEQ ID NO: 15659 - RNA, 77 nt, Homo sapiens
caggcggcgggaaccacacaggacccaccccccggcgccagcacagacagcccaaagaagagaagccagagcccaag

SEQ ID NO: 15660 - RNA, 82 nt, Homo sapiens
aacgccacgcgggccggcgaaagcggccgacgcccgccgcggccggggaacaggccacagccaggagcgcacacaggagccc

SEQ ID NO: 15661 - RNA, 73 nt, Homo sapiens
agccacggcagacacacaacccgacccgacgacagaaaccaacagggaaagagggcccaggggaaagggcagc

SEQ ID NO: 15662 - RNA, 75 nt, Homo sapiens
aggcaggccgaaccagggggagccaccccgcgggcccagcggaagaacgccgcagagagcagagagaggggccag

SEQ ID NO: 15663 - RNA, 80 nt, Homo sapiens
gccgccacccggcgcgaccgcccggcaccgggagaaccaccgccaccgccaccaggacgggcccagggaacacgggagcc

SEQ ID NO: 15664 - RNA, 74 nt, Homo sapiens
gaaggcacaagacaagacacgcaggaggaggaggacccccaccagacacaggaaccaacggacccaaaaaacaa

SEQ ID NO: 15665 - RNA, 66 nt, Homo sapiens
gcagcacacggacaaaaacacacccaggaggacgagagcgacaaacccagccaggggggggagaca

SEQ ID NO: 15666 - RNA, 64 nt, Homo sapiens
aaaagaacaaaagaacaacaagcagcagaaagaaaacgacacaggaagaacaggaacggccgaa

SEQ ID NO: 15667 - RNA, 80 nt, Homo sapiens
gacagggcgggaggggacgaaggaagcaagcgccgaacaaagcaagaagcgccgggggagaccaagggaaaaagcaagac

SEQ ID NO: 15668 - RNA, 84 nt, Homo sapiens
ggagcgcgcgcggcgcggcggccgggccccgagacggggacggccgggcgggggcccgagcaacacgccgggaccagcaacgga

SEQ ID NO: 15669 - RNA, 80 nt, Homo sapiens
gggggggccccacccagaccagcggaccgccgaagcgccgagcaaacggagggcgcccaggacagcggcggccagagggc

SEQ ID NO: 15670 - RNA, 67 nt, Homo sapiens
agagaagaggagaaaagaagaaacgaccgggaaacacacagaacagcagagcagcagaggaaccgcg

SEQ ID NO: 15671 - RNA, 86 nt, Homo sapiens
acaggagcagaaggagacacgcccggcacccagcacaagaagacaagacgacaccagaaggcggccaagcccaagaaggcggccac

SEQ ID NO: 15672 - RNA, 78 nt, Homo sapiens
ggcaggggacccagccacgaggcagcccaaggcgccccccggcaccgcccgccccccgaggagccaagccaacaaggc

SEQ ID NO: 15673 - RNA, 71 nt, Homo sapiens
cgggcccgcgggggcaaccgggcgcagacgaggaaagcaccggggaagaaaacagccgccggaacagcgcg

SEQ ID NO: 15674 - RNA, 72 nt, Homo sapiens
cccccaccggccaggcgagaaaggcaggcaccggcacggaccaccccaacaccgggggagaaccgggcccac

SEQ ID NO: 15675 - RNA, 75 nt, Homo sapiens
gagacaacagcacaccccaggcacaaacaagaggcccggacacagcagggcgacagccaggaagccacagaccca

SEQ ID NO: 15676 - RNA, 71 nt, Homo sapiens
ccagccccgaggcaaggccaggacacacgcagcccacgaaagaacgagacaaccaaaagaggaagcagaag

SEQ ID NO: 15677 - RNA, 78 nt, Homo sapiens
ccaagccacaaaagacacgccacaaccgccaagagggccagcaggaggacacgccaacaagccaggaagaccgcgcac

SEQ ID NO: 15678 - RNA, 69 nt, Homo sapiens
acccagggcacgaaccaggaggagaccccacgccggacccaaggcgaaccgagggcaacgggagggcaa

SEQ ID NO: 15679 - RNA, 75 nt, Homo sapiens
aggcccaggggcaaccaggcagacccgaccccagcggggaaaaaaccggccacagacccgaagaccaccacagga

SEQ ID NO: 15680 - RNA, 69 nt, Homo sapiens
gaagaaagagacaccaccgagaggccagaagcaccgacagaccaggcccaagcgaaaaagcgggaacgc

SEQ ID NO: 15681 - RNA, 73 nt, Homo sapiens
gcaccccgaggaggaagacgaacgaaacacaggcagacaaagagagcgcgggggaagccgagacaacagcaag

SEQ ID NO: 15682 - RNA, 75 nt, Homo sapiens
gaagagggacgggacccaaaggacgacgcagcacagagaggaaacgaggaaacgaccaccggaggggacaaaaaa

SEQ ID NO: 15683 - RNA, 74 nt, Homo sapiens
cgagaaacgcgaaaaggaagcggaaggcgggcacagagagacccagcgacgagcaaaaggccaaggaagcaggg

SEQ ID NO: 15684 - RNA, 70 nt, Homo sapiens
cggggcccgggcccagaaggcgagaccagagacgagaagaagaagagccgaaacgcgcggccaggggaga

SEQ ID NO: 15685 - RNA, 67 nt, Homo sapiens
gaaacagcacacggaaaaagagcgagcggcgagccagaggccaacgcagaggaacggaacagaggaa

SEQ ID NO: 15686 - RNA, 56 nt, Homo sapiens
aaagccggcgagcgcaggagcccgggcacacaagggcccgaagcggaagacaccgc

SEQ ID NO: 15687 - RNA, 83 nt, Homo sapiens
agcgaaaggcggaaggaggacccgggagcgacgccgacagcgaagcgagcgaaaggaaaggcagcaacaggggaagcggaggg

SEQ ID NO: 15688 - RNA, 52 nt, Homo sapiens
agcccgggccaagcgggaggcgccacacgcacgagaacccccagcaacccaa

SEQ ID NO: 15689 - RNA, 70 nt, Homo sapiens
gccggcccaacggccaaaaggcagaaccagagaccacagaagaaggaagggccacccaggacaggggcac

SEQ ID NO: 15690 - RNA, 84 nt, Homo sapiens
cgagggaggaggcgcgcccgggacaccgagcgggcagaaccggccacacccaggaccggaacacccccacagacccgagccagg

SEQ ID NO: 15691 - RNA, 86 nt, Homo sapiens
ggcgggcgcgcccccgaaggaagccgcccgccccccaccgccgcccccccggcggcagcccccggggggacgaagggaacccgccg

SEQ ID NO: 15692 - RNA, 60 nt, Homo sapiens
aagaccgacgcagaagagaagcgagaacagccagagagggaccaagaaaggcccagggac

SEQ ID NO: 15693 - RNA, 80 nt, Homo sapiens
ggccaggcggcgagccgcgaagggcgaaggaggaggacaaagagcccccacgagcccgcaagggaagagcacccgaccac

SEQ ID NO: 15694 - RNA, 68 nt, Homo sapiens
gacacccgggcggggcagagcagcccccagccagccgcgaggagcggcagcccacaagcaggaagacc

SEQ ID NO: 15695 - RNA, 74 nt, Homo sapiens
cagaaaacaagaaaaggggcggacagaaaaggggaccagagacagaggccaagcaacaggcgcacgcggaggag

SEQ ID NO: 15696 - RNA, 79 nt, Homo sapiens
ccggcggcagcagcccagagcgcaaagaggaaagcaacggcgcaagcggcggcggcgggcagaggacacacagagcaaa

SEQ ID NO: 15697 - RNA, 71 nt, Homo sapiens
cggcggagggcgaggggcaccgggcacagggaagcgcgacgccaccccccggaagagaccgaaccagcaca

SEQ ID NO: 15698 - RNA, 76 nt, Homo sapiens
ggccgagaaccaggagccacaaacagcacagcggggccaggaggagggggcaggagacaagagcgccggcccaggc

SEQ ID NO: 15699 - RNA, 56 nt, Homo sapiens
gcaaacggcagagcaggccgcggcgacccagcgaggagagacaagagggcggaaga

SEQ ID NO: 15700 - RNA, 68 nt, Homo sapiens
cccgaccgaacggcaaggcaaaggccccagaagcaacccacaggaaacaaaacccccagaggacgaca

SEQ ID NO: 15701 - RNA, 55 nt, Homo sapiens
accaccccgcgccagcagcacagcacgcgaagaaacaggggagaaaccccgcggg

SEQ ID NO: 15702 - RNA, 71 nt, Homo sapiens
ggaccgaaacagaaacggaacaccaaggggaagcgacgaggaagccaagcaggccggaaggggaaagggag

SEQ ID NO: 15703 - RNA, 69 nt, Homo sapiens
cagccccgcgccgccgaccccccggcgccgcgccggcggcggcccgcgagccccagcccgggagaccgc

SEQ ID NO: 15704 - RNA, 80 nt, Homo sapiens
agccaccgcacagcgaccagagcacaagaagagcacagaggaagaaaaaaagaacccaagcaggccccgagcccaagcaa

SEQ ID NO: 15705 - RNA, 81 nt, Homo sapiens
ccgcagcggaccgaagagaagaaaagaggccagagccgaaggagacccaacaccccggccagacgggccaccaggccggcg

SEQ ID NO: 15706 - RNA, 54 nt, Homo sapiens
ccgccgaacccgaaaggagggcacccacagccagcaggcaggaaaggcaccaaa

SEQ ID NO: 15707 - RNA, 98 nt, Homo sapiens
ccgagagccgcccgggccagcggccgcgcacccccggccggaggcaccagcgcccggcgagcgaccgccgggggaacgcccgagcggagcagcaggag

SEQ ID NO: 15708 - RNA, 80 nt, Homo sapiens
gcagccccccgccccagaaaccccaagcaccggggacgaaaacagcaacgcaaccaccaccgaggccccgaaaagcacgg

SEQ ID NO: 15709 - RNA, 78 nt, Homo sapiens
cgaacaggcaaagcccaaaaggcaaggcacaagccagaccagaacacgcggaagaggaaaccacaggaaacccgagag

SEQ ID NO: 15710 - RNA, 86 nt, Homo sapiens
ggccccgcccgcgccggaagagccacgccgagacaagaggagcagcagcggcaccgcccccacccggagggccgacaaccacaggg

SEQ ID NO: 15711 - RNA, 103 nt, Homo sapiens
gagccacacacgcacaggaaacgaaaaaagccacccagaccacaagggagaacccaggacgagaaaaaacagagcggaacaagcggcccaagagaaagcagcc

SEQ ID NO: 15712 - RNA, 81 nt, Homo sapiens
agagccggagcggggacccaggagccggccagcgcgccggagccgccgagggccggagcgagggagagcaggaacacagag

SEQ ID NO: 15713 - RNA, 42 nt, Homo sapiens
cccccaacccagaacggacaacgaagcgccggcaaccagagg

SEQ ID NO: 15714 - RNA, 78 nt, Homo sapiens
ccaccccaagaacccagcccacaccacaacacagaacgaagagaagaagcgagcaccaggagacaaagccacaaaaac

SEQ ID NO: 15715 - RNA, 69 nt, Homo sapiens
caaagacagcacccgcgaaaagacccagggcggaggccagcggagacaggagaacaggagaacccaggc

SEQ ID NO: 15716 - RNA, 86 nt, Homo sapiens
agggagggagcgccaggcagacagcaggcaggagaggaaaggccaaaaagcagaaaaacaaaccagcccaagaagcgacaaagccc

SEQ ID NO: 15717 - RNA, 72 nt, Homo sapiens
gaacgggacggcgacaggagggagaggggggccccagacacgacgcccccggccggcccgggccgcgccaga

SEQ ID NO: 15718 - RNA, 71 nt, Homo sapiens
accgcccggacccgcggcaccgcgccccacgccgggcgagcgaggacaggccgccgccaccgccagagccc

SEQ ID NO: 15719 - RNA, 80 nt, Homo sapiens
gacaggaaagccggagcgaagccaacccccgagcaggaccccggcagccgcagccacccgcgccggccggaacgggaaaa

SEQ ID NO: 15720 - RNA, 78 nt, Homo sapiens
gcgggcaggagggacccagagcgaacgcaacagaacagagcgagcgcagcagcagcccagcccggagagcaccacaga

SEQ ID NO: 15721 - RNA, 72 nt, Homo sapiens
ccgcgcccgcaagaacggccaagaaagcccgaaaaccaagggggcggggaacaaaaaccgaaccggggaagc

SEQ ID NO: 15722 - RNA, 35 nt, Homo sapiens
cgacagccgcagaacaaagccaaggaagcaaaacc

SEQ ID NO: 15723 - RNA, 74 nt, Homo sapiens
gggcacagaacaacagaagaggagagaggaacccgaagaagaaaggacgacagccagagagccagaggcgcaga

SEQ ID NO: 15724 - RNA, 72 nt, Homo sapiens
cgccaccacagagccacacgaggccgggaacgggaaacgcgcgccgagaagccacccgccgagagggagcgg

SEQ ID NO: 15725 - RNA, 78 nt, Homo sapiens
gagaaacaaacagaccggaagcacggagagggagccggccgaggaggcacaggaaccagcccacgaaggaccaagcca

SEQ ID NO: 15726 - RNA, 69 nt, Homo sapiens
caggaacagggcagacgagcggaggacacccaacccgggcaaagcgaccagaaaagaggcaagcaagcc

SEQ ID NO: 15727 - RNA, 80 nt, Homo sapiens
cgccgcgcgaccaggaggcggcggcgccgccggcgggcgaaccgaccaagaacaacacccagagggccaggagaaggcga

SEQ ID NO: 15728 - RNA, 67 nt, Homo sapiens
cgaacccaccgagccagggaggagcggagcgcaagaagaaggccgggggcacgccgcacgcaagaag

SEQ ID NO: 15729 - RNA, 80 nt, Homo sapiens
aagcaaggccccggaaccaaggagcccgccgaggagcgaaggcccagagccgggggagacaagaggccggcacagaaggg

SEQ ID NO: 15730 - RNA, 36 nt, Homo sapiens
cccaagacccccagccaggaggagccgccggcccag

SEQ ID NO: 15731 - RNA, 71 nt, Homo sapiens
ggcggggaccggcgaggagcgaagaacaaacacccgagcgcgaggccagcaacagaagaaagcaagcaccg

SEQ ID NO: 15732 - RNA, 69 nt, Homo sapiens
cggcgggccccgcccgccgaaggcacccagccaaacccaggcccgagaagaagaggaaaacccaccacc

SEQ ID NO: 15733 - RNA, 63 nt, Homo sapiens
cggggcccgcgcgcgccgcgggcacgaccgacaggccagaagcacaagcaaaaggaaaccaac

SEQ ID NO: 15734 - RNA, 76 nt, Homo sapiens
cagacagcagagagagagcggaacgggagaaagcacgggaggagagaccgagacaggggcccggcaccgcgcccga

SEQ ID NO: 15735 - RNA, 63 nt, Homo sapiens
caagggcaggaaagagaaggcggagaaaagaacagagcaccacgaaagaccccgacaaacacg

SEQ ID NO: 15736 - RNA, 77 nt, Homo sapiens
ggacacaggccagaggagcacacacaaagaggacccgacaggagaaaaaggcagccccggagacgaaaagacaaagc

SEQ ID NO: 15737 - RNA, 77 nt, Homo sapiens
accacccggaacgaagacgaaaagccacgaagaaaaggggaaggaggcgaacaggaagggcaaggggggccacaccg

SEQ ID NO: 15738 - RNA, 61 nt, Homo sapiens
gcaaaaacaagacggggcgccccacagaggggcgacggaccacaccacccggcaagaacgc

SEQ ID NO: 15739 - RNA, 51 nt, Homo sapiens
gacaccgccccgagacgagcaacgaaaggagaacagggaacaaaagggccg

SEQ ID NO: 15740 - RNA, 68 nt, Homo sapiens
aaggcagcgcacgacagcaaaagaacaaaccaggggagggaaacgagaaaaacgacgccagcggcggc

SEQ ID NO: 15741 - RNA, 83 nt, Homo sapiens
gggcccccgcaccgggggagcgcacgagcccagcggagcgccgcagcacagcgccaggacaaacgggaagaaaacgccagaga

SEQ ID NO: 15742 - RNA, 106 nt, Homo sapiens
cagcaagggcgggccacggaagccaccgacaggcccgagggcccgagagcaccgcgccagacaggggaagacagagggggccaccagcgcgccagcgaggcagccg

SEQ ID NO: 15743 - RNA, 84 nt, Homo sapiens
agggacccaggcgcccccccagaggccgggaacaccggaccggaggagcagcgggcgaggaccagaagacaccggagcggaccg

SEQ ID NO: 15744 - RNA, 80 nt, Homo sapiens
caggacagcaccagcgggccggaggagccagagcgcagaaagacaaaccagggccggaggaacgaaagagagagaaaaca

SEQ ID NO: 15745 - RNA, 82 nt, Homo sapiens
gccaccaggcagagccgaggaagcgaagcagaggcccaggaaagccagaagaagaaagacagcccagagaccagcaaacgag

SEQ ID NO: 15746 - RNA, 54 nt, Homo sapiens
ggacgcgggccgcgcgcacaagagggaaacgagaagaagagacagcgaggggaa

SEQ ID NO: 15747 - RNA, 76 nt, Homo sapiens
ggagcccagcaggagcgggaaaaccgagcgcgggagaagggagaccggcgacggccggcgacacccccaccgccac

SEQ ID NO: 15748 - RNA, 69 nt, Homo sapiens
ggggaggacccgaccagaaaagacccagacccgaaggcccgccgccaggcaagcggggccgccaccaga

SEQ ID NO: 15749 - RNA, 73 nt, Homo sapiens
agacagcggaaaaaaaaaaacacgggcggacggaacggacccgacaaacggacagcaggaccagaacaaggag

SEQ ID NO: 15750 - RNA, 63 nt, Homo sapiens
aagaggcgaaagcaggacagggaagcgaccacaaaaacagagaggagccgcaaaccagaggca

SEQ ID NO: 15751 - RNA, 75 nt, Homo sapiens
gccagggaggcgaggcccgcaccggaaggaacgggaagggcacaggaagaaaggaccaaggaaacaggaacccgc

SEQ ID NO: 15752 - RNA, 81 nt, Homo sapiens
ggagagaacacccagcccaggaggagacggcccagcccccgcaaggaggccccaccaggggcacgcacaccccccggcccc

SEQ ID NO: 15753 - RNA, 73 nt, Homo sapiens
gaaggaccaagaaccagccaaggccaccgagccacaagaccacagcaccgacccccgacccggaaggagacga

SEQ ID NO: 15754 - RNA, 75 nt, Homo sapiens
gcggcacagcgggagcaacgaacggaaacaagagcagggaaaaaagcacaaagaccaaccaacagaaccaggggg

SEQ ID NO: 15755 - RNA, 58 nt, Homo sapiens
gcccagccaaccacagggcacaagagacaagccccggcagaggcagcgcgagaagggg

SEQ ID NO: 15756 - RNA, 54 nt, Homo sapiens
cacgccaagaggcacagagcggcgagcgggcggacaccagaacgaggaaaggga

SEQ ID NO: 15757 - RNA, 79 nt, Homo sapiens
caggcgggccccaacacgggccaaccaggcgacaccaccgcaacaagcgcaagaagcagaccccacgagcgaaagggaa

SEQ ID NO: 15758 - RNA, 57 nt, Homo sapiens
gaaacagcagcacagcaaacaggcaagaggcgccaggaacgcagagaacagagcaca

SEQ ID NO: 15759 - RNA, 80 nt, Homo sapiens
ccggcccgggcgggcgcccgccggcacgccgccagccccgggggccacgagcgggccaaaacagaagaggcaaagcccag

SEQ ID NO: 15760 - RNA, 59 nt, Homo sapiens
caccccccgaccgagagcgccaggcacaggccggaagggcaccccacagcaagaccgag

SEQ ID NO: 15761 - RNA, 76 nt, Homo sapiens
cgggggcgaggcgggcgggccggcgagcgcagcgcgaccgggaggcccagggaaagaacgccggacaacagcggcg

SEQ ID NO: 15762 - RNA, 68 nt, Homo sapiens
ggaacccgggacgacggccagagccaagccggagaccgagagacgccccacagacacgggccacaggg

SEQ ID NO: 15763 - RNA, 74 nt, Homo sapiens
acgcccccagggcgggaccacggacagggaagcagcaagccgcaaagaagccccagaaggagccaagagccgca

SEQ ID NO: 15764 - RNA, 59 nt, Homo sapiens
cgcgagcggcccccacaacacggccccccaccagcccaagaaagggccagccaaagaag

SEQ ID NO: 15765 - RNA, 80 nt, Homo sapiens
aacggggcgagccggaggagcacccaaccccgcgaaagccaacaggcagaccagagacagcgccacgcacccggggagca

SEQ ID NO: 15766 - RNA, 74 nt, Homo sapiens
ccgggccgcaacgacgcagcacgcagcacggggaacgagaagccccccagccgaggagaacggcaaaaagcgag

SEQ ID NO: 15767 - RNA, 69 nt, Homo sapiens
gcaggggggaaaaggcgggcacaggccgaccgcgcggggccgcaaggccaggcgcgcagaggcacccaa

SEQ ID NO: 15768 - RNA, 72 nt, Homo sapiens
aagaaaaagagagagaagcccagaaagaaacaaccccccaccagcacccccaaacagggagaaaaagcagca

SEQ ID NO: 15769 - RNA, 73 nt, Homo sapiens
ccagggaaccacggagcacgagaaaacggcgggagcaaacgagacggaagaaaaaaccgacggcccgaaccac

SEQ ID NO: 15770 - RNA, 62 nt, Homo sapiens
ccccaggaggggcgagagggagccgcagcgagcaggcccagcggagaacagaagcaagagca

SEQ ID NO: 15771 - RNA, 90 nt, Homo sapiens
gcacagcacacgggcaagcggcagcaccaccaacaccgcagccgcagcggacggcaggcccgagggcgagagaccgaaggagcagacgag

SEQ ID NO: 15772 - RNA, 72 nt, Homo sapiens
cccaccagccggcaagccaggccaaaggcgccaggaaggaggggaagaacagcagaagggagcagccgcgcc

SEQ ID NO: 15773 - RNA, 84 nt, Homo sapiens
cgggcgccccgcagccccccaacaccgcccgccaggacgacgccaacgagggacggacagcgcgacagggcccgagagcaccac

SEQ ID NO: 15774 - RNA, 58 nt, Homo sapiens
gaaaaagccggagagccgggaggagaaaaccacagagcaggagaccgcacccaaccca

SEQ ID NO: 15775 - RNA, 75 nt, Homo sapiens
ccgcaaggaccccaaagaggcgcaagcaggcggacccaggggaccgggaccgcgccaccccggacgcccgaacag

SEQ ID NO: 15776 - RNA, 80 nt, Homo sapiens
ccgaaaaagagaagacgcacccgaccgggccgaccacgaccgccagcagcagccgaaaacgcacaagaccaacagaccag

SEQ ID NO: 15777 - RNA, 84 nt, Homo sapiens
accaacagcggcgcgggcaagaagcgcgaaggaaaaagaggccccaccgacccaagagaccgggcagggccaaaccagagagcc

SEQ ID NO: 15778 - RNA, 71 nt, Homo sapiens
ccgcaacaggaaagcagcccgaaaaagacgcgagaagccacacgggaaaacagcacagccacgaaaggaag

SEQ ID NO: 15779 - RNA, 74 nt, Homo sapiens
cggggagccggcaccaacggagccaggggcagaacaccagcaccagacacaccagccaaagggcccacagacaa

SEQ ID NO: 15780 - RNA, 73 nt, Homo sapiens
ggaggcagaaaacaccgccaagacacacaaaaagaagcagagagcgggaccagagaagacaccgaaaaggagc

SEQ ID NO: 15781 - RNA, 71 nt, Homo sapiens
gacaacggagccggcaacacaaagccccccacgccaccacagagcaacccgggcggagaacggaaaagcac

SEQ ID NO: 15782 - RNA, 74 nt, Homo sapiens
aggagccgaccaaaacccgggccaacgaacagagcgcagcaaagacgaaaaaaacaggaaacaggacagggcag

SEQ ID NO: 15783 - RNA, 81 nt, Homo sapiens
aacgacagaaacgggcacgcgacccggacaaagaaaaagcccacccagagacccccaccccaaccaggagcagagcgcggg

SEQ ID NO: 15784 - RNA, 88 nt, Homo sapiens
cgagcgcgagcggcgcgagaaaggcaagaggagcagcagcggcggggccaagcgggagagcgagaaggcggaacaggagaggcggcgc

SEQ ID NO: 15785 - RNA, 84 nt, Homo sapiens
gcgcccggccccgccgggccccacacgggccccgaagagcgccgcgacgcccggcccgcagggcaggcgagaacgcggacaagc

SEQ ID NO: 15786 - RNA, 83 nt, Homo sapiens
ccacacagcaacagccaccaagacaccccgaccagcacacacgcaaggagacaggcaagaaagcgcaaggggaacgcacaaca

SEQ ID NO: 15787 - RNA, 57 nt, Homo sapiens
cccccagaacccagagacgggcagagcacagcagacaagacgggagagaaccgcgac

SEQ ID NO: 15788 - RNA, 43 nt, Homo sapiens
ccgggagggagacaccagaggagaaggcagagcccccccaggc

SEQ ID NO: 15789 - RNA, 81 nt, Homo sapiens
ccgggaggagacaacaacaagagggcaccaacaaagcgccagccagcgggcagacgccacggcacgagaaggcaccagacc

SEQ ID NO: 15790 - RNA, 82 nt, Homo sapiens
cagacagcgcccagaagacgagcccgcggccccaaaaagcggcgcaagacggagggcgggagaaggagcggccacgccagga

SEQ ID NO: 15791 - RNA, 62 nt, Homo sapiens
accagcccaaggggaagacgagagagaccgcaaaggcgcagaaaaccaccggaagaacaaca

SEQ ID NO: 15792 - RNA, 70 nt, Homo sapiens
ggcacacgcagcagaagcccggagccccggagacgggggcaggggagcagcagaacaagcagacaccaaa

SEQ ID NO: 15793 - RNA, 77 nt, Homo sapiens
ggagagcgagcggccaaaggagagaagacgagcacagcgaaccaaaaaaaacaccagacagacccgaacccgccccc

SEQ ID NO: 15794 - RNA, 81 nt, Homo sapiens
gcccgaggcaggcccgacccgccccccggcgccgccgggccgacggagaccagcaggacggcccgccacgggccccgcagc

SEQ ID NO: 15795 - RNA, 59 nt, Homo sapiens
gcgccgacccgaggagaaccagcggagaggaccaccacaggcagggaggacgggggcgg

SEQ ID NO: 15796 - RNA, 73 nt, Homo sapiens
gagcgagggggggcgcgccggaaaccggagcgcgcagcagcccaagaggaaaacgaggaggaaaaccagcgac

SEQ ID NO: 15797 - RNA, 34 nt, Homo sapiens
ggacaggcaaagagacagaacagcagacagagac

SEQ ID NO: 15798 - RNA, 69 nt, Homo sapiens
cgaccgggagaggacaagaccacgagccagaccagaggacaacacaaggaccgaggcccaagcgccagg

SEQ ID NO: 15799 - RNA, 76 nt, Homo sapiens
ggaaggagaagcccacaaccgcccccggacaaggggccgacaaccggccaccagcgcggacgaagcacggcaccgg

SEQ ID NO: 15800 - RNA, 71 nt, Homo sapiens
acaggacagagcccccgaggccccagaacaccgccccagaccagcggcgccggagcaccggagcagaagac

SEQ ID NO: 15801 - RNA, 64 nt, Homo sapiens
cggggacccacgggccaaaaagcacagaagaaaagcaccgcaaggcagagggcagacagacaca

SEQ ID NO: 15802 - RNA, 63 nt, Homo sapiens
agggccaaggacaccgacccgacagcaaaccccagggcaccccagcgccccaccagagggcga

SEQ ID NO: 15803 - RNA, 74 nt, Homo sapiens
cggcggaaagccccaagcggggggggaagacaacccggagaacacccaggggacgcccagaccaaacaacaaac

SEQ ID NO: 15804 - RNA, 57 nt, Homo sapiens
gcccggagcacgaccgaggcggggagccgccaccaaaagcagacggaaaacccacgg

SEQ ID NO: 15805 - RNA, 82 nt, Homo sapiens
cgcccacgcccagcgccgcccccccggccagcaacagcgagacaagcagaccggaagaccgacggaagaccacaccccgagg

SEQ ID NO: 15806 - RNA, 70 nt, Homo sapiens
aggacggaggaaccggcaacacggacccggacaggacagggcacgcaggagaacaagcagccagggcggc

SEQ ID NO: 15807 - RNA, 83 nt, Homo sapiens
ccaagcacgcaggaggggacgaggagcgagcaagcgggccgcggacaaccaccccggagcaagccggaccggacaaaggccac

SEQ ID NO: 15808 - RNA, 55 nt, Homo sapiens
aagagcccaacaccacccgagagccccaagagccgagagcgccggaggaccacac

SEQ ID NO: 15809 - RNA, 83 nt, Homo sapiens
gcaggcaaagacggcaaaagcacaaggaccgcggacagagacaacaccgagagagaagcagccgccgcaaagggacgacgaag

SEQ ID NO: 15810 - RNA, 71 nt, Homo sapiens
ccacccggccccgccgagcgcgccggaccggcgcccggacaacccgccagcaggggggaaagaaagaaaaa

SEQ ID NO: 15811 - RNA, 73 nt, Homo sapiens
accggaagccgacccggagccgagcaaccagggggggccgaagaagccagggggaggaaagcagacagaccca

SEQ ID NO: 15812 - RNA, 73 nt, Homo sapiens
cagaagagcccccacaacggggagaacagcccaaaaaagagcccccagagccagaacgccaagcccaccccga

SEQ ID NO: 15813 - RNA, 63 nt, Homo sapiens
acccgggcaaagaagagcaaagggccgacaagaccagcaccggcgccgccagaagcaggcgaa

SEQ ID NO: 15814 - RNA, 69 nt, Homo sapiens
gagaccggaacgcagaacggaggcaggccgacacaaacacaaagcgccaagccaaccacgccggaccgc

SEQ ID NO: 15815 - RNA, 80 nt, Homo sapiens
gaaaaggaacgagcaggaggcgaaaaggagcagaaaaacacgacagccagacagaaccgcgcacacagaagcggaagcga

SEQ ID NO: 15816 - RNA, 78 nt, Homo sapiens
cagaacaacccaagaggacaaacccccaggagaagacagaggagccagaccaagagacagcacaggcgagcgagcaga

SEQ ID NO: 15817 - RNA, 81 nt, Homo sapiens
caaacagcccaagacggcaaccagcagcaaccagaaccccgaccccacccgaagagaggaacaggagccagcacccgccgg

SEQ ID NO: 15818 - RNA, 56 nt, Homo sapiens
gcgcaacccggggagagcccaagccccggaacggaccagccgccggccacccaagg

SEQ ID NO: 15819 - RNA, 84 nt, Homo sapiens
aaccgccccggggggcccagcaaccccaccccagacgcaccacagggcacaacacgccgggaagacgaggagacacaaggagcg

SEQ ID NO: 15820 - RNA, 53 nt, Homo sapiens
cgccgcacggaaaaacaccgcaccacaaaccggaagagagaaggaaaaggcca

SEQ ID NO: 15821 - RNA, 75 nt, Homo sapiens
ccgcgcggggacccgacgcccgcacgaagaagccacacacagaagacccaaagagaacacaggagaggcaagagg

SEQ ID NO: 15822 - RNA, 79 nt, Homo sapiens
agaacccagaacaacccaagaggacaaacccccagcacccgagaccaggcgccagagaaggaagacacagagaagccgg

SEQ ID NO: 15823 - RNA, 66 nt, Homo sapiens
ggccaaagaaggagaaaagggagcagcaggagccccgcgggggaggaggaggagagaggaccaaga

SEQ ID NO: 15824 - RNA, 76 nt, Homo sapiens
ccaagggcaacaacgacaccaaggaaaggcgcaccaaggaacacgacgccccaaccacggagccaggggaaccgcc

SEQ ID NO: 15825 - RNA, 117 nt, Homo sapiens
cgggacggaccgagaccggaccgagagcggaccgagagcgcgaaacgcacgagaaggaggaagaagccagagccacgaggagggagcccaaagaggcgaagagagaacaggacccga

SEQ ID NO: 15826 - RNA, 56 nt, Homo sapiens
aagaaagagaagggacagagggcccaagagccagccagagccagagggacagcgaa

SEQ ID NO: 15827 - RNA, 54 nt, Homo sapiens
aggccggaagcgaccgaaacaccaaacacggcccagccagcaccgcgcacccag

SEQ ID NO: 15828 - RNA, 77 nt, Homo sapiens
ggcccgcgcgcgcgccggcccagccgcgcgacgggaggacgaagccggccgcagggcggaaccaaagaaaaacagaa

SEQ ID NO: 15829 - RNA, 35 nt, Homo sapiens
cacgaggcaacgccccaggagaaccaaacccaagg

SEQ ID NO: 15830 - RNA, 51 nt, Homo sapiens
gagaaggaccaagaaccaggacacaggaacgccacaagaaacaacagcaag

SEQ ID NO: 15831 - RNA, 69 nt, Homo sapiens
ggcggggggagcgggaagccaacaaaggaacgagcagcaacggccaggaaccaggccagggccccagaa

SEQ ID NO: 15832 - RNA, 82 nt, Homo sapiens
accgaacagcgcgagggaagaaaagaggagaacaaagaaaacgcgaggacagagccacggacggagccgcggcgcccaggcg

SEQ ID NO: 15833 - RNA, 78 nt, Homo sapiens
agcccccgagggcggaacacaggccacccaaaaaacgccgggggcgccaggcgagacaagagggcggcgacgacgcgc

SEQ ID NO: 15834 - RNA, 35 nt, Homo sapiens
cgagaccacagacccaggagggcagaacgcagaaa

SEQ ID NO: 15835 - RNA, 61 nt, Homo sapiens
gcaacacaaaacacaaaaaggaggagagccaaaacaccagaacgccgaaggagcacgcaga

SEQ ID NO: 15836 - RNA, 83 nt, Homo sapiens
aggaaaggaagcccagcccccgcagcaaacagggcccaccaggcgaacgcaagcagacggaagaagacgaagaaaacccgaag

SEQ ID NO: 15837 - RNA, 85 nt, Homo sapiens
gagggaggagcggggacggcgacccaggagaggaccacgaaagagggaggcaaagacaaaagcgacagcacaaccgaagacagca

SEQ ID NO: 15838 - RNA, 41 nt, Homo sapiens
gagaagggaaccgaaccaaggagaacgggagccgcagaaag

SEQ ID NO: 15839 - RNA, 56 nt, Homo sapiens
ggccaccaggaggccagggggcgccagggagaaaacgggccggaggaaaagggcgg

SEQ ID NO: 15840 - RNA, 60 nt, Homo sapiens
ggccggccgccggcaggcgcagccgggcccggccccagccgacgcgggcccgaggacgag

SEQ ID NO: 15841 - RNA, 57 nt, Homo sapiens
caagaaaggccagaacggcaggaggaacggaccaaccaagccgagggaccccagcgg

SEQ ID NO: 15842 - RNA, 76 nt, Homo sapiens
gaggcgcccccggagccgccccggaggagaagcagcaagagcaccgcgacccacaaccgcaccaccaagccaagca

SEQ ID NO: 15843 - RNA, 72 nt, Homo sapiens
agacccaacacacaaaaccaccgccagcccagagacgaaagcgaaaagaaacagaaagagacaggacaaacg

SEQ ID NO: 15844 - RNA, 88 nt, Homo sapiens
ccgagccaggcaccgcacccagccccaggcgagacaaggccccaccccacccagcccagcgaagagggccaacacaaggaccccaagg

SEQ ID NO: 15845 - RNA, 80 nt, Homo sapiens
gccgagcgacagaggcagagcggacgcggaggcggcggcggcgaagaaccagacagggggggccccaccggaacgagaca

SEQ ID NO: 15846 - RNA, 91 nt, Homo sapiens
aagagcacaagacggaagagaggagcgaccagacggcaggaggccgagcaacaagaaccagacgagacgacacagcaagcaaaagacaaca

SEQ ID NO: 15847 - RNA, 77 nt, Homo sapiens
aggagaaaccgccgcccagaagacagggagcagagacgcccagccccaccccccagcgcgaacacagcccacgagag

SEQ ID NO: 15848 - RNA, 54 nt, Homo sapiens
ggccacgggagggccgcgcgccggagaccgaaggccacccagggcgcgcaaaga

SEQ ID NO: 15849 - RNA, 77 nt, Homo sapiens
ggccggagcgagaccgggcggccacagccgcagggagaacccgaggcggggcaggagcgccacccagacacgagaac

SEQ ID NO: 15850 - RNA, 83 nt, Homo sapiens
aaggcgccacggcagcgcccccaggcccaggaagcccacccagccccgccacgcagagcccagaaggaaagaaagcccagccg

SEQ ID NO: 15851 - RNA, 94 nt, Homo sapiens
acaagaacaggacaaacagccacacccaggccacggaaacaaaccaggaacagacgaggggacacaaaaaacacgcgaaacggaccagacaccg

SEQ ID NO: 15852 - RNA, 41 nt, Homo sapiens
gccgacccgacgcccccaggagacgcaggagagaaaggcgc

SEQ ID NO: 15853 - RNA, 71 nt, Homo sapiens
aggaaaaagcaggggaggaggggaccggccgggcaccagccagcaaaccagagcgcagaaagcggacgagc

SEQ ID NO: 15854 - RNA, 55 nt, Homo sapiens
ccacggcagaaccaaacccaccgcaagacagggaagcggaaagcacacacgagga

SEQ ID NO: 15855 - RNA, 72 nt, Homo sapiens
aagccagagacaccgccacgcagcgcaagccccggggcagagacacaggacacccacccgccggggacagac

SEQ ID NO: 15856 - RNA, 88 nt, Homo sapiens
cagagcaaagaagaaaccggccagaaacagccagagaaggccgcaagaagccgcagcgcaccgacgaaggcggacgcaccggagccgg

SEQ ID NO: 15857 - RNA, 49 nt, Homo sapiens
gcgaggacacccggcgcagccccacccaggcacgcacaacgaagcaggg

SEQ ID NO: 15858 - RNA, 82 nt, Homo sapiens
ggaaggcaggcgggcaggggaagaaacgagcgagcccgggacagcaagagccaagcgccgggacagccagggccagccaggg

SEQ ID NO: 15859 - RNA, 80 nt, Homo sapiens
ggagcgcccagaggcgagcccggggaggaagagggggacgcggaagagacagcagaacaagagccaggaccggacaggaa

SEQ ID NO: 15860 - RNA, 85 nt, Homo sapiens
ggagagcgaagcaaggcccggcgcaaggccaggcaaaagcagaccggaaaacccaccggcaagaccacacccgaggggagcccag

SEQ ID NO: 15861 - RNA, 72 nt, Homo sapiens
ggaaggcgcgaggaggaaaggaggacgagaaaacgacagaagaaaaagaaaaacacgaggcccagcagacag

SEQ ID NO: 15862 - RNA, 77 nt, Homo sapiens
cagacgcagggcgcccccggagagccaaaggaggcacgacagcagaggaagagaagcagcgaagccgaggcacagac

SEQ ID NO: 15863 - RNA, 77 nt, Homo sapiens
cgacacaaaacagaagaggcgacagcccaggagacccacaggggccagaggaagaagaaaggccagcccaacaagaa

SEQ ID NO: 15864 - RNA, 78 nt, Homo sapiens
aacccccgaaggaccgcggacccgccccgggacagcgaggagcgagggaccccccacacggaacaagcaccgaacaag

SEQ ID NO: 15865 - RNA, 63 nt, Homo sapiens
aaggacagaacaccagcacggcgaagcgccacgcagagccccgccaggaagacacgccgggga

SEQ ID NO: 15866 - RNA, 72 nt, Homo sapiens
cggcgaaggacccggccgaggcgggcgcaagagaaggcaccaagaggcgaagaggagaggaaggcaccaaag

SEQ ID NO: 15867 - RNA, 75 nt, Homo sapiens
ccaaaggggcggcggcagcagcaaaccagcccaaggggaagacgagagagagcccgagaggcccagagaacgaca

SEQ ID NO: 15868 - RNA, 75 nt, Homo sapiens
cggaaccacaagcaccagcacgccggcaaaacgcggaaccccagagaggacagaagccaacgcaaccagccagag

SEQ ID NO: 15869 - RNA, 86 nt, Homo sapiens
cgggagccgcacgcggcgaaggaagaggagggcaagaagggcaagaagggcagacacacaagccacgggacccgacccacagaccg

SEQ ID NO: 15870 - RNA, 53 nt, Homo sapiens
caaaagggccaaagaagggagagagggaacgggcacacgacacaacagaaacg

SEQ ID NO: 15871 - RNA, 69 nt, Homo sapiens
ggacaagcacacgaggaaaaaaggacacggagagaagccgaaggaagccaagcgggagggacaggagaa

SEQ ID NO: 15872 - RNA, 84 nt, Homo sapiens
ggcggcaggggccggagggcccacaacccgcagagaccacggcgcgccccggccggaggagcagaagacagagggaggagggcc

SEQ ID NO: 15873 - RNA, 84 nt, Homo sapiens
aggagcggcagccgcgaggaggcgcgggagggcgagaacgaccccgagacgagaccgaaggagcagacgaggcacgagcgccag

SEQ ID NO: 15874 - RNA, 83 nt, Homo sapiens
cagccagccgccgaacagagcccgcccagggaggaggcggacacgccagccacaggccggcacccgggaagagacaagaagaa

SEQ ID NO: 15875 - RNA, 78 nt, Homo sapiens
cgcggcgccggcggcgcgcgacccccgcgcagggggagaggcaccagcaacagaccaaccgcagcaagcacagagaca

SEQ ID NO: 15876 - RNA, 76 nt, Homo sapiens
gagggcggcgcggcgggcagaagcggagagggcgcagaaccccaaggccccggccacgcaccgacgagcagcacag

SEQ ID NO: 15877 - RNA, 92 nt, Homo sapiens
gaagacaccaaaaagcaaacggaccagaccgaccaccaaaagcagacaaagacagagaagcacaaaagacaagaagggaccgcaaaccgggc

SEQ ID NO: 15878 - RNA, 80 nt, Homo sapiens
gacacgacgaaccaggaagccccacccccaccgccaggcaaggaggcagacagaaaaagaaacgcaaggaacagagcagg

SEQ ID NO: 15879 - RNA, 64 nt, Homo sapiens
cggaccccgaaggagaccacaaaggaccagcagaggcaggcaacacagacagccccccaccacc

SEQ ID NO: 15880 - RNA, 82 nt, Homo sapiens
agagaccacaagaccgaccaggaaaagggacaaaagggcccaaccagcacagcacagaagcaagaaaggaaaagaagcacag

SEQ ID NO: 15881 - RNA, 75 nt, Homo sapiens
gacaccaaacacacgggaccgaaacaggccggggcacagcacagcgccggcgcaagcgaaacagaggaccgcggg

SEQ ID NO: 15882 - RNA, 73 nt, Homo sapiens
aaaaaccacaggcaagcccagccgccacaccccgccgggcaggaacacgaagcaaaggggaacaaaagagaag

SEQ ID NO: 15883 - RNA, 71 nt, Homo sapiens
aggggggaagcagcccgcagggaagcccggacagaacacaaagcccccagcagagccccccccagaggaca

SEQ ID NO: 15884 - RNA, 75 nt, Homo sapiens
gcaagaagcaggaaaggccggacaccaggggaccccagcccaacgccaaacgagccggacccggaggacggaaaa

SEQ ID NO: 15885 - RNA, 61 nt, Homo sapiens
cagcggccagccccccccacgccaccaggagagaacgccgcgccgcgcgacaacggcccgg

SEQ ID NO: 15886 - RNA, 74 nt, Homo sapiens
gcagaccgcagaaggccggagacaccagcagggaccgacacaagaagcagccagaacagacgggaaaagaaacc

SEQ ID NO: 15887 - RNA, 86 nt, Homo sapiens
aaccagccaccaaagaacaaggaccacggcaaggagccgcccgcagcgaggagccggagcgcacagagaagaggggacaagaggac

SEQ ID NO: 15888 - RNA, 65 nt, Homo sapiens
acgaaacgggaaaaaggggggcacacaggaaaagagggaagagcagcaccagcagcggagagaag

SEQ ID NO: 15889 - RNA, 107 nt, Homo sapiens
caggcaagcgcaacaggaggaaaacggccaacccaccgcgccgaaagaagaaagcgaccaaccccggagccccccgagggcgcggggaccggcacaacagccacaga

SEQ ID NO: 15890 - RNA, 88 nt, Homo sapiens
cgcgggagagcgcggcacgcgggccagaggcggaggaagaaggcaccacgacaaaccggagccgaggggagggaggccagccaagacg

SEQ ID NO: 15891 - RNA, 60 nt, Homo sapiens
ccgaagccgcagggaggggaaacgaagcgcacgaaacaccaaggcgagaacgcggacaag

SEQ ID NO: 15892 - RNA, 80 nt, Homo sapiens
gccgcacggccaccaccagcccaaacggcggggaggacggcccgcgaacgcagcccaagggacgcagcggaccagaggcg

SEQ ID NO: 15893 - RNA, 85 nt, Homo sapiens
ggcacaagaccgcgaaaccaccgcaggacgccagggggagaccgaccggaggacaagaacgagggaagaacgcagacacacggga

SEQ ID NO: 15894 - RNA, 78 nt, Homo sapiens
cagcgccgccccagccacagcccccgcgcccgccagcccaacagcccaggaacacagaccaccaggagccagccggcc

SEQ ID NO: 15895 - RNA, 62 nt, Homo sapiens
ccggcgccggggacgaggagaggaccaggaggaggaggcagagggaccaaaccacagcaaaa

SEQ ID NO: 15896 - RNA, 73 nt, Homo sapiens
ccagaccacagcacagccgggaaggggagccaccagcccccgggcggagaacggaaaagcaccaggaagcaga

SEQ ID NO: 15897 - RNA, 89 nt, Homo sapiens
gggacacacaaagacagacgcgcaaggcagcacaaaagaccccacagcgagagagagcaaacgaaacaggcaaacgagacaaaggacca

SEQ ID NO: 15898 - RNA, 61 nt, Homo sapiens
cgagccagaaacccaggaccaggccaagagaacagccgcgaggcgcagccaagggcccccc

SEQ ID NO: 15899 - RNA, 93 nt, Homo sapiens
gggagccggaggagcagcagaggggcgagcaggagcgaccgcgccaaacagggcggcgccagcgcgcgccccccagagaagggcaccccggga

SEQ ID NO: 15900 - RNA, 69 nt, Homo sapiens
gggcgggaccccacagagaaagagccccaagcccgcagccccagaagaaaaacacaggccgccgccaaa

SEQ ID NO: 15901 - RNA, 88 nt, Homo sapiens
ggaggagaaagcggcggggagcggagcgcgggaaacaccacgacagacacaagaagaagaaaaagaaaaaagaagaggaccgaacgga

SEQ ID NO: 15902 - RNA, 70 nt, Homo sapiens
ccccaggagaaacgaggagcgcggccaccccccggaggcacacggcaggccaggaagcaggcaacaacga

SEQ ID NO: 15903 - RNA, 73 nt, Homo sapiens
aacaacagcacgggagaaagcgcccacgcacgaaagcccaggccaaaaagagaaaaaggagggagcgacgaag

SEQ ID NO: 15904 - RNA, 73 nt, Homo sapiens
ggggccccgcaaggccggcgcggaggaggggagcagcgcgcaagaagagaccccaaaagaagaggcggcgcag

SEQ ID NO: 15905 - RNA, 82 nt, Homo sapiens
gacagaagaggccaccaaacccgaggaggaaggcgcgaccgggcacgcacggcgacacagaagaccacagagcacagaagag

SEQ ID NO: 15906 - RNA, 115 nt, Homo sapiens
cacaccccccccgcaaggcacacacagcgaccgggagcacaccacaggcaaggcagacgccagacacacagccccagcaaccaccaaacaggaggagacagaacagcccccagcg

SEQ ID NO: 15907 - RNA, 61 nt, Homo sapiens
gcgcagaccagggccacgcccagcacacgggacgcaccaaaaggaggagagaaagaaccca

SEQ ID NO: 15908 - RNA, 77 nt, Homo sapiens
cggcaaaacgcgccgggacaaaggggcagaccaacaccacccagcaaaaaccccgacgaacgcgccagggagcgcca

SEQ ID NO: 15909 - RNA, 73 nt, Homo sapiens
gcgccaagaaaagcgaggcaggaccaggaggacaagcggccgcaccagcagaccagagggagaagaccaaaga

SEQ ID NO: 15910 - RNA, 79 nt, Homo sapiens
agagcgagggagcaagagggcggaggccacgaacacgccggagccgccagcgaagagagagaaacgaaaaagaggaagg

SEQ ID NO: 15911 - RNA, 79 nt, Homo sapiens
cggagccgcgacggcagcggcaagaagagagaagagagaagccgacagaccacgagccggccggagaaaaccagcgacg

SEQ ID NO: 15912 - RNA, 58 nt, Homo sapiens
gagaaagagcgggcaaaaggccaggagcaaagccaaccaagaaacgaggccgaagagc

SEQ ID NO: 15913 - RNA, 62 nt, Homo sapiens
cggggcaaagaagggcaaacgggaggcgacagcaccacaacacacaggaccggaaccgcggg

SEQ ID NO: 15914 - RNA, 40 nt, Homo sapiens
ccaaagaagggagagagaggagggacacgagcaggagagg

SEQ ID NO: 15915 - RNA, 80 nt, Homo sapiens
cgagaaagacacggcagcgcaggcagaccgcaggcgcaaggccaggcgacccgacgggccaccggaaccgaccacccaga

SEQ ID NO: 15916 - RNA, 72 nt, Homo sapiens
gcgagcagcgaggcccccagaagcgaaggcaggcacggggacacaaggccacgcggcggggaaggcccaagg

SEQ ID NO: 15917 - RNA, 69 nt, Homo sapiens
ggccgggaccaagcagaacgccaaaccacggcgccgggacaacaaaggaagggagccggggaggccggc

SEQ ID NO: 15918 - RNA, 57 nt, Homo sapiens
gagcgacgggcaggaaggagggggcgcacaaacgagccgaaccgcccggaaccggga

SEQ ID NO: 15919 - RNA, 68 nt, Homo sapiens
gagcggagcaggaggagaacccacgggcgaagccgaggaaagccagaccgcgaacacggcgcggggaa

SEQ ID NO: 15920 - RNA, 55 nt, Homo sapiens
cccaacacgcaggagcggaccagcgaagccgcgccagacaccggagaaagagcgg

SEQ ID NO: 15921 - RNA, 44 nt, Homo sapiens
cagcgccccccgcccaggagagagccaccagagggggcggccgc

SEQ ID NO: 15922 - RNA, 65 nt, Homo sapiens
cgcgcggaggggaaaggcgccgaaaacaagccggaaggcagaggaaagggcgcaggcagaggagc

SEQ ID NO: 15923 - RNA, 72 nt, Homo sapiens
aaaaagcacaagaaggcaggccacgaagaaagcagggcagcgagaaaagccgacgcaagagggaaagcggag

SEQ ID NO: 15924 - RNA, 74 nt, Homo sapiens
gggagagccccgcaccccccccagaaacagggcgacacggcacaagcggacacccaaggcgacagcgaaaaaca

SEQ ID NO: 15925 - RNA, 121 nt, Homo sapiens
cggagcgcggcgcccgcggccgggcggcgcggccgcccgggccgggccccaccggacgaggcagaagaggccggaccggcgcacacagacccaggaacagagagcagggagcgcaccacac

SEQ ID NO: 15926 - RNA, 74 nt, Homo sapiens
ggccccgaggaagcaaccagccgacggcccaaccccgcaagacccagagaacgaccgaagaaaagcaacaaacc

SEQ ID NO: 15927 - RNA, 78 nt, Homo sapiens
gaagaggcgccaggacgaaggcccacgggcaagggaaaaaacagcgggccacacaaagccgggagcccacaggacgcg

SEQ ID NO: 15928 - RNA, 44 nt, Homo sapiens
cacccaccgccgccgcccccagggcaccgcgccggcgcagcgcc

SEQ ID NO: 15929 - RNA, 68 nt, Homo sapiens
ccaaagaaggaaaaggcacaccgaggaacgaggaagaagcgcccaaagccggaggcgcgaccagaacc

SEQ ID NO: 15930 - RNA, 69 nt, Homo sapiens
agcaggaaaggccagacgcagcaacgggaaagagagacacgggagagcaaagagcaggggccaaccagc

SEQ ID NO: 15931 - RNA, 77 nt, Homo sapiens
aggcaaaggaagaacgcggaaggcggggccccgccccccagggaaaggagacagaaagcagcccaagagaccccaag

SEQ ID NO: 15932 - RNA, 68 nt, Homo sapiens
cccgggcgggcgagcacaggcacacacacgggacggaaagagagccgcagcgcagaacaagggaaaaa

SEQ ID NO: 15933 - RNA, 73 nt, Homo sapiens
ccgaccgcagccaggccgacccgaccggaccagacaaggagacgaccagaaaaccccaaagagagggaccaag

SEQ ID NO: 15934 - RNA, 110 nt, Homo sapiens
gcaggaggacacgccgaccccggcgccccaggcggccggacaacggcgcggcgacaagaaaggcccgagccaaaagacccagagaaaggagcacgaaggaacaaagccac

SEQ ID NO: 15935 - RNA, 76 nt, Homo sapiens
gccagcgcggccaagacccgccgcaaggcacaagacagcccaacgccaagacagacgggccagggggcccggagca

SEQ ID NO: 15936 - RNA, 55 nt, Homo sapiens
caacaaacgccgaccaagcgccagcccacacaaggaagacccagagagaagacag

SEQ ID NO: 15937 - RNA, 75 nt, Homo sapiens
cagagcagaacagaaacaaacagaggcaccgcccgacagcaaggcggcaaggcgggagaccagagagacccagcg

SEQ ID NO: 15938 - RNA, 79 nt, Homo sapiens
gcaacgaaaagagcccggaaggaagagacaggaggcagcagacggacaccagaacagagaacgaggaagaaaaggaaac

SEQ ID NO: 15939 - RNA, 75 nt, Homo sapiens
aggcggcgaagaccagggacgcgcacacgccagcgagcggaaccacaaacagcagacgcacagcagccaagcagc

SEQ ID NO: 15940 - RNA, 114 nt, Homo sapiens
ccggagagcgcgccccaacgggcacagccacacagcccagaagaacagcgccgagacccgcccgcggcggaagcagaaggggcgggacccagaacacgccggagaagacgacca

SEQ ID NO: 15941 - RNA, 81 nt, Homo sapiens
acgacgccacgcggggcaggaaggccaggagcaaaggagcagcaaaagggggacaagccaaaggaggggagaaaggggaga

SEQ ID NO: 15942 - RNA, 87 nt, Homo sapiens
ccaccaccacgccagccgcaccagccgcccaagccgcacagccgcggcggcagcagcaggagaggaagaaaacaccggagcccaaga

SEQ ID NO: 15943 - RNA, 75 nt, Homo sapiens
aaggcgaagacacagcaacccaaaacacagggacgcaaaagaaagcccagaggaagagaagaccgccaaagggac

SEQ ID NO: 15944 - RNA, 73 nt, Homo sapiens
gcagggcaaacgaggacaacaagaccggagaaaaagagaggcgaccacccccccggaccgcacccgacgccag

SEQ ID NO: 15945 - RNA, 99 nt, Homo sapiens
cggcgcgcgcggcggcggcaggcggcggaggaggaggaggggaccgccgacaccggagagagcacgcacccggcaaagaacgcagccaaccgaaagcca

SEQ ID NO: 15946 - RNA, 55 nt, Homo sapiens
ccgcacagcgcgcccagggagaaagccggagagacgcagcacaaaaggccaaaac

SEQ ID NO: 15947 - RNA, 71 nt, Homo sapiens
gcggggcggggaggcgggaccagacgaggaacagcaaaaagacaaaacagaggagaccagaccagaagccc

SEQ ID NO: 15948 - RNA, 39 nt, Homo sapiens
cgcgggggaaggacacagggacaagcggggcaagcagac

SEQ ID NO: 15949 - RNA, 67 nt, Homo sapiens
gagagagcccagaggcaagaggccggaaaggaacaagagagcaggagcccagcagagccccccgaca

SEQ ID NO: 15950 - RNA, 81 nt, Homo sapiens
ggcgacgggcagaggaaggcgggcaaagcggagccgaggcgggaaacacgggaagccgaaaagacagcagacgaagccaag

SEQ ID NO: 15951 - RNA, 70 nt, Homo sapiens
ccaccgagggaagccaaggcccccagaacacagcccgggggaacccgcgcgaaggaaagccaagaacccc

SEQ ID NO: 15952 - RNA, 76 nt, Homo sapiens
agaaagaaaaaagagcccgaggaccacaggcggaaagccagggacaaagcgagaaaaagcaacggaaaagcacgag

SEQ ID NO: 15953 - RNA, 53 nt, Homo sapiens
caaaaaggagagaagaccacagccccacaaagggaaggccgaagacgcaacca

SEQ ID NO: 15954 - RNA, 54 nt, Homo sapiens
agcggccgcgcgacgccacaccgccggaacagcaaacccaaagagcggaaccgc

SEQ ID NO: 15955 - RNA, 85 nt, Homo sapiens
gcagcgggccccgccaccggcacaccgaaggaaccacgaagcgcccgagacgccaccacgcgggggagcagagagccccacggac

SEQ ID NO: 15956 - RNA, 76 nt, Homo sapiens
gggaccaacgcaccagagccgagaaacgcgaaaaggaagcggaagggggcaacacccccacaaagagcaagccagc

SEQ ID NO: 15957 - RNA, 80 nt, Homo sapiens
agacgggaccacgaggcaacgccccagcacaagcagcaggagacccagaaacagagcagccacaagaaggaccaaagcac

SEQ ID NO: 15958 - RNA, 86 nt, Homo sapiens
acccggagccggaccccggagcaggcagccccgccccccccgacgggcaccacagggggagcgggaagacccggacaacggaccgg

SEQ ID NO: 15959 - RNA, 82 nt, Homo sapiens
aagcgggaggagaccacccaaacgcggcacgggagggcagagcagagaccaaggagccaggaaggagaagaggggaaacaga

SEQ ID NO: 15960 - RNA, 66 nt, Homo sapiens
cggggacccccgacgccaggcagcgcccccaaacggacaacaacaaacagggggcgggagaaggcc

SEQ ID NO: 15961 - RNA, 79 nt, Homo sapiens
ggcaagagaagcaaggagccccgccacacacgcaaacgagaaaagggggagaagagggagacccgaacgaagacgcagc

SEQ ID NO: 15962 - RNA, 71 nt, Homo sapiens
ccgacggggaaaacagcaagagccggaagaaaggaaagaggacacacgaggaaccagagaaggagaaacag

SEQ ID NO: 15963 - RNA, 72 nt, Homo sapiens
gaaacagaaccgaagccggaccggggcccagcaaagccaaaggaaggaccaggcggaggcggggcggacggc

SEQ ID NO: 15964 - RNA, 76 nt, Homo sapiens
cagcccagccaaggagccacagccacaggaccgccagaaggccacaggagagacaggcacagaggacagaggccac

SEQ ID NO: 15965 - RNA, 73 nt, Homo sapiens
aagacaacgcggagcggcgaagagcaaccagcgcgcaagaaacacgcgagcgagcggcaaagaggggccggac

SEQ ID NO: 15966 - RNA, 56 nt, Homo sapiens
ggacgaacagcgggccgcagccaagcgccgccggccgaggccgccggagccccaga

SEQ ID NO: 15967 - RNA, 69 nt, Homo sapiens
aggccacaaccaagagaaacaaccaacgccaggagccagaaccccgaggaaaggggaaaagccgcaacc

SEQ ID NO: 15968 - RNA, 72 nt, Homo sapiens
gggcccagaggcccagggaggcaggggcagaaacagagaaggaacagaccgagagaaagccgcccgcggagc

SEQ ID NO: 15969 - RNA, 72 nt, Homo sapiens
cgagggaggcgggaccggggcgcgggccccccagccccagcgcgcgcgccaggaggcagacgccacgaggaa

SEQ ID NO: 15970 - RNA, 64 nt, Homo sapiens
ggcagccgccccagaacaagggagccccacgcggcacgaagacccgaagaaacacacgggcagg

SEQ ID NO: 15971 - RNA, 75 nt, Homo sapiens
gccggccccagcaccaccaaggaggcagcacggcaggagacgaggagaggacagcaggacacccggaccccaccg

SEQ ID NO: 15972 - RNA, 77 nt, Homo sapiens
ggcaccgcgcgaagcggccaaagccgcccagacggccaccggcgggaggaacaaaaggaaaaccgccgccggggcca

SEQ ID NO: 15973 - RNA, 82 nt, Homo sapiens
ccgcaacgaaaaccggaaaagggaacgcaaggcggggaaaaaaaggcagcacacagacgcagcaacgggcacgcaaccaaga

SEQ ID NO: 15974 - RNA, 79 nt, Homo sapiens
ggaaaaacacagagacagacggcggcaggggggcacgaacaacaagacaagcaaccaagaaagcgacaaggaccagaca

SEQ ID NO: 15975 - RNA, 73 nt, Homo sapiens
gcaacgcggccccagccgcggagacacaacaacagaggcagcaacggaaggaacgcaaagcggagccaaagaa

SEQ ID NO: 15976 - RNA, 72 nt, Homo sapiens
ggagaggcccgccccacagaacagggcagcgcagaagaaagaagaacacagaagagaacccgaacacagcag

SEQ ID NO: 15977 - RNA, 59 nt, Homo sapiens
cgcaccccagagccgacccccaccgcaaggcgcggggcgcacggaacacccacacgacg

SEQ ID NO: 15978 - RNA, 66 nt, Homo sapiens
agagaccgaagaccacagaaccgggaaaggccagccccgcgcacagcgccagcacagcgccgacca

SEQ ID NO: 15979 - RNA, 78 nt, Homo sapiens
ccgaaggcaaaaaagccaaagggcagaaagaaagccagaaaacggaaccgagcaagagccacaagcccgcaccaagcc

SEQ ID NO: 15980 - RNA, 68 nt, Homo sapiens
aaagaagcggcaaggagagaaacagccgacgagccaaaaccaaccaacaacaacgaccggcccgcagc

SEQ ID NO: 15981 - RNA, 75 nt, Homo sapiens
caaacgcaggacacgcacacgaaaagagagcagaaggagggaggaaggccccacagcaaaggagagccagagcga

SEQ ID NO: 15982 - RNA, 67 nt, Homo sapiens
acagcaacaagcaaacgacggggcacaaccaagcgacgggacagcaggcaccagggaagcaaggcga

SEQ ID NO: 15983 - RNA, 79 nt, Homo sapiens
cacggaggggccagcgagccccaccgccgccgagaggaggccagagaacagggaaagggagcagcaccggccacaccca

SEQ ID NO: 15984 - RNA, 61 nt, Homo sapiens
cacaggacaaagcgggacgaacaaaaggccggagcgacagcgggagggacaggagaacagg

SEQ ID NO: 15985 - RNA, 86 nt, Homo sapiens
gaagaacagagacagcagccaaacccccagcacgccagcacgcaggcaggaggaagcgggcaaaggagacccagcaaaggagagac

SEQ ID NO: 15986 - RNA, 54 nt, Homo sapiens
gaaacaagagacgacgggaagcccaaaagacgacggccgcacgcaagaggccgg

SEQ ID NO: 15987 - RNA, 81 nt, Homo sapiens
acacgagggcagaagagaccaacacagagcagcggaaccagacaggcaggaaaagacaggacccagcccccggagaagcca

SEQ ID NO: 15988 - RNA, 70 nt, Homo sapiens
cacgaggagaaacagcagaaacgcaccaggccaaagaaagagaagggcaagacgccaagagaaaaggcga

SEQ ID NO: 15989 - RNA, 73 nt, Homo sapiens
cgggccacccccgcgggcaacggccggacggaacccaccacacggacagacacgcggagccagcgcccggcaa

SEQ ID NO: 15990 - RNA, 85 nt, Homo sapiens
cagggccgagaggggcgccgcaaagaaggccaagccgccagccacaagcggcccccacacagacgcgccggagacacaacagcaa

SEQ ID NO: 15991 - RNA, 84 nt, Homo sapiens
agcgccgaaaccgggcgcaggcggagccaggacaaaaccaggcagaaccaacacgaacccaagcacaaacaagaaaacgagcag

SEQ ID NO: 15992 - RNA, 79 nt, Homo sapiens
ccccggcccgcagcccccgccggccgcccaacaccgaacaccgcaccggcccgaccagccacgacacccacgaaaggac

SEQ ID NO: 15993 - RNA, 73 nt, Homo sapiens
gacgccaaccggccacggacccgcggcccaccccgggagacaaaaccaaaggaggaaggccagcggaagacac

SEQ ID NO: 15994 - RNA, 56 nt, Homo sapiens
gcaggaaaaacacagagacagacggcggcagggcccgacccgaaaagcgcagccaa

SEQ ID NO: 15995 - RNA, 81 nt, Homo sapiens
gcagcaggcgcaaacaagaccaccggagagaaaaccgcacacacaaagcacacaccacgggacacaggggaaaggcgcgca

SEQ ID NO: 15996 - RNA, 78 nt, Homo sapiens
ccaagcgcagcacaggaggggcggcgccacaccggccggcggaggcggcacgagaacccgagggcagcaaggggagca

SEQ ID NO: 15997 - RNA, 71 nt, Homo sapiens
ccagaacaaccggaaacgcaaggcagaaaggacaaaccggcgaccacacacggggacgacggggaagccgg

SEQ ID NO: 15998 - RNA, 74 nt, Homo sapiens
gcagggcgcgcgagggagggagccaaagaagaaggagaggcagcaagacaagcaacgagggcgagaaaggacaa

SEQ ID NO: 15999 - RNA, 57 nt, Homo sapiens
ccgaccgagagcgcagacccgaaagaagacgcacgccaggaaagagagaagaaaacc

SEQ ID NO: 16000 - RNA, 73 nt, Homo sapiens
ccacacgggagaggacaggagaccggaacagggaaccaaagaggggaaagggagagaggagcacagaaccgag

SEQ ID NO: 16001 - RNA, 79 nt, Homo sapiens
aaaggagggagaacagcaaaggaggaccaggcagcacaaccgccagaaggaagacaagcacaagagacggaaaaggaag

SEQ ID NO: 16002 - RNA, 72 nt, Homo sapiens
ccgacggagacggaaagccgggacaggaggaacgggaagggccaggacgacgacaacccacccgacgagcga

SEQ ID NO: 16003 - RNA, 62 nt, Homo sapiens
gcgcgcggcccgggcagcaggaagcaggagacaccaaaggaaaagacaacacaccaagaaac

SEQ ID NO: 16004 - RNA, 101 nt, Homo sapiens
cggccagcaagcacaagcacccgcccgggacaccagcaccagaccacacgggagagagacaggaaaggcccgcgccagcaaacacacgagagcgcagcggg

SEQ ID NO: 16005 - RNA, 84 nt, Homo sapiens
agagacaggccagagggggccgccgcggcagcaagaacagagagagaggggacagacgagagaacgagcgcgccccagaccacc

SEQ ID NO: 16006 - RNA, 50 nt, Homo sapiens
gcggggagcccggggcgcgaggaccccggggaagaaccagccccaagcac

SEQ ID NO: 16007 - RNA, 79 nt, Homo sapiens
gaccagcacagcacaagacacaggagcagggacggggggaaaagcgcacccgggcccgggcgagaaagaagacaccaaa

SEQ ID NO: 16008 - RNA, 76 nt, Homo sapiens
ccggccagccagggccgggccgcgaccggccccggagcacagcggcgcccagcggccacacgccccaagcgccacg

SEQ ID NO: 16009 - RNA, 78 nt, Homo sapiens
accagcaccgggacgcacagagaccggaagaccaagcaggagaaccgaccggcgccccggcaaggccaccgcagaagc

SEQ ID NO: 16010 - RNA, 65 nt, Homo sapiens
agagcaaggagaaggacgccagggcggaggaccccaacgaagccaggggaccagaacgcagccag

SEQ ID NO: 16011 - RNA, 59 nt, Homo sapiens
aggaaaacccgcccgccgaccggacacccccaaccaacggccgcaaaagaggacagaag

SEQ ID NO: 16012 - RNA, 52 nt, Homo sapiens
gcgaaggagggccgcaaggaagggagccagcggaagaaacaagcgcagaagc

SEQ ID NO: 16013 - RNA, 78 nt, Homo sapiens
ccgggacccgggcgcccgcgcccgccccaacccagccacagcgccggccgcccgcaggacaccgagggcccagccgcg

SEQ ID NO: 16014 - RNA, 67 nt, Homo sapiens
gaccaagaaccagcaagaagcaccaggagacccagcccgaaaccccagcaaacccgaaccgaaagac

SEQ ID NO: 16015 - RNA, 73 nt, Homo sapiens
gaagcaagagcacaggggaaaaacgaggccccccgaaaaagccgaggaggagaggagaggccgagggaaccag

SEQ ID NO: 16016 - RNA, 73 nt, Homo sapiens
aggagccccacagaggaaaggccccgagaacgaaagcgaaggaccaaaggaaacacagacaccaccacgacca

SEQ ID NO: 16017 - RNA, 51 nt, Homo sapiens
ccaagacaagccagccgaggcaccaccagggcccgagggaccgccaacaag

SEQ ID NO: 16018 - RNA, 49 nt, Homo sapiens
aagccgacaaccagaagcgacacagaggaagggcccaaaaggcgcccaa

SEQ ID NO: 16019 - RNA, 70 nt, Homo sapiens
aacacccgaaccaaggaagcaggccagaggacacaaaagggcgagaggacagccgacggaccagagcgag

SEQ ID NO: 16020 - RNA, 72 nt, Homo sapiens
gcgaagcagcccacacagagaggaaccaagacccagggaagaggcccggagccagacccacaagaggcaacc

SEQ ID NO: 16021 - RNA, 38 nt, Homo sapiens
cgccaaggggggcagacaacagccccccaccagaaaga

SEQ ID NO: 16022 - RNA, 79 nt, Homo sapiens
gccaacaggaccagcagggcgggcaggcccacacagcaaacggggacagcgccgaccggaacagggaccacggaagccc

SEQ ID NO: 16023 - RNA, 96 nt, Homo sapiens
agaacaacacagcggaacggcaaagcagcacacaaagagggcacccagaccgcagacccggaggaaagcccagagggaagcgcaagaagcaggcca

SEQ ID NO: 16024 - RNA, 81 nt, Homo sapiens
cccgccgcgccgggccagcggcgccgccgaagggaccccgaaaccaagggcccacccacccggggcacagcgaggccgaaa

SEQ ID NO: 16025 - RNA, 80 nt, Homo sapiens
agacacaagaaaaccagccgagaaggaaacccccaaagagaaagaagaagaaaacgagacccaaaagggagaaagaagag

SEQ ID NO: 16026 - RNA, 39 nt, Homo sapiens
ggcagcgggaccggcggccaagggcagaccgagcaacgc

SEQ ID NO: 16027 - RNA, 77 nt, Homo sapiens
gaagcaggccaggaagaaagagaggaaagaagaaaaccaagaaagccccacggcagagacagaccagaagacggcac

SEQ ID NO: 16028 - RNA, 40 nt, Homo sapiens
gagccaggcacaagaaaagaaccagcacacgcccgcccca

SEQ ID NO: 16029 - RNA, 41 nt, Homo sapiens
gcacaggcaggaggcaggccaagagcagagaaggcagccag

SEQ ID NO: 16030 - RNA, 43 nt, Homo sapiens
aaagcgcaacaggacccaaacaggaaaagcaccaaggccaacc

SEQ ID NO: 16031 - RNA, 70 nt, Homo sapiens
agaggggccggacccgacacaaccagacagggaacaaaaaccggaagcaacccccacaggcaacagaaga

SEQ ID NO: 16032 - RNA, 105 nt, Homo sapiens
gcacagacggaagcaaggaacaaaccgaagaacagcgggaaagaaggcaaaacacggggggagaggcaccagcaacagaccaaccgcagcaagcacagagacagg

SEQ ID NO: 16033 - RNA, 84 nt, Homo sapiens
gccccagagggcgggaacagcagggaacagacacgggaagcccgaggagacacacccgagccaaccacagagaagaggacaaaa

SEQ ID NO: 16034 - RNA, 75 nt, Homo sapiens
ccgcacccacgcggcccgcgaaagggcgcaaagggcccaacgcgcaggccacgggccggcggggaaacccaggcg

SEQ ID NO: 16035 - RNA, 74 nt, Homo sapiens
cagcagcccacggaaaaaaagacgaaccagcaggcgaagacgcaggagagcacagacggacccgcacgacccgg

SEQ ID NO: 16036 - RNA, 72 nt, Homo sapiens
caacggcccaagcccgggagccccacaacagggcagaagagcgcgcagggccagccacaaggcaagcacaag

SEQ ID NO: 16037 - RNA, 62 nt, Homo sapiens
gaaacgaccgccccaaaacggagagaagagacgaggaggaggggagaccgcggcaggacacg

SEQ ID NO: 16038 - RNA, 39 nt, Homo sapiens
aggaacaccaggcacaagccacaaaagaagacccaaagc

SEQ ID NO: 16039 - RNA, 76 nt, Homo sapiens
aaggaccgcggacagagacaacaccgagagagaagaagaaaacaggcgaaacaaggcacccccagcgccgaacaca

SEQ ID NO: 16040 - RNA, 83 nt, Homo sapiens
gagaccagacgcggagccaggccgaggggcggacgcggccggagcgccggaccagcgcgagcgccacggcacggccccacccg

SEQ ID NO: 16041 - RNA, 74 nt, Homo sapiens
cccagagccacccacgaccagcggacggagagcagcaaaacccaggaaaagcaaagcgaacagcgaaaaagaga

SEQ ID NO: 16042 - RNA, 65 nt, Homo sapiens
cgaacccgcgcgcagggaacagcggggcaaacacggaagccgcagaaggaccggccagaagcaag

SEQ ID NO: 16043 - RNA, 81 nt, Homo sapiens
ccacaaggccaagcacccccgcaccagccacacaccagaaacgaaggaggcccaaccacaaaaggagccgacggaacccag

SEQ ID NO: 16044 - RNA, 59 nt, Homo sapiens
aaggagcccacaacaaccacagacccaggacccgccgccacaaggagcggccgggcgcc

SEQ ID NO: 16045 - RNA, 76 nt, Homo sapiens
gaaacgaaaccagggcaaaacaccacccccccacaggaaacaggccgggaaaaaacagagaaaacacgaaaacaga

SEQ ID NO: 16046 - RNA, 73 nt, Homo sapiens
accagacggaggaggagccggacgggccagaccgcaacccaccaaggagcacaggacgaagaggaaggaaaaa

SEQ ID NO: 16047 - RNA, 73 nt, Homo sapiens
ggagacacggcaaagggccaccaggagaagacagaggagccagaccaagagacagcacaggcgagcgagcaga

SEQ ID NO: 16048 - RNA, 42 nt, Homo sapiens
gccgggaggcacccagccacagaggacgcccccacaggccca

SEQ ID NO: 16049 - RNA, 80 nt, Homo sapiens
gggcaggaaggagagccccagcgaggaagcacaccaccaaggaacgggcgcagcgagaggagacaggaagcaccggaccc

SEQ ID NO: 16050 - RNA, 81 nt, Homo sapiens
gggaggaacaagacaagaggacacccgacgcacacgacagagggcacccccaaggacaccagaggaccagaacccacgaga

SEQ ID NO: 16051 - RNA, 73 nt, Homo sapiens
gaggccgggaccggagcaccggcagacccggggaccgggaaggcgaagccggggcaggcggagcgaaccagca

SEQ ID NO: 16052 - RNA, 96 nt, Homo sapiens
ggcggcacggccagcggcaccacccccagcaccaccccagccccgcgcccgacccggaggaaagcccagagggaagcgcaagaagcaggccagaaa

SEQ ID NO: 16053 - RNA, 76 nt, Homo sapiens
gaaaagcgcacgaggcccagaagcacgcacaaaaaaacaccgggcgggggggagggaaaccaaagcagaaaggaag

SEQ ID NO: 16054 - RNA, 74 nt, Homo sapiens
ccagggaagccacagaggaaagaacacggcaccacaacaccaaagaaaccgccacccgagaaaacaggaaaaaa

SEQ ID NO: 16055 - RNA, 59 nt, Homo sapiens
cggcccgggcgagcccggagaagaggaagccccgcccccggagagggaacagaagggag

SEQ ID NO: 16056 - RNA, 61 nt, Homo sapiens
aggagggagaccacagcaagacccaggaccccggaagccagaaagcgccaaagaccaagcg

SEQ ID NO: 16057 - RNA, 72 nt, Homo sapiens
cccggcgaggagcccgggcccagcgccccacccacaaccaccaggacagccaagacgggagcacggcccagg

SEQ ID NO: 16058 - RNA, 80 nt, Homo sapiens
cccccaaagaacacaggcccaacagacagaaggaacaacaaaggagagagagaaaacgagccggaggaaaccacagagca

SEQ ID NO: 16059 - RNA, 63 nt, Homo sapiens
ggaacagagccggggggacgaccacaagaccgggcgcgccgggagacgcggggcagacaccag

SEQ ID NO: 16060 - RNA, 76 nt, Homo sapiens
gacggggcgaccgccggcccagggggaaaggacaaccccacagggagaaccggagacaaagcaggaccccacggaa

SEQ ID NO: 16061 - RNA, 80 nt, Homo sapiens
gcggaaggacccaagaaggcgcgaagggcaaggaaagcagcaagagaagagaagccgccgagaaaccgccgaggcacaga

SEQ ID NO: 16062 - RNA, 84 nt, Homo sapiens
gcccaggccccaaggagccacaccggaccagaccccaggaaagcgaaccggagcagcggcacaaacaccaagagaagcgcagca

SEQ ID NO: 16063 - RNA, 62 nt, Homo sapiens
gccaagagacagccacagccacgacaggaccaccaggcacccacccgcgagacccccaagag

SEQ ID NO: 16064 - RNA, 69 nt, Homo sapiens
gagccacggacggagacacacccccaaagggccgcgagggcccggaacaggggcacgcacgaggcggaa

SEQ ID NO: 16065 - RNA, 75 nt, Homo sapiens
caaacggcgacgcacggaaacgcccacgaaagaaaagacaggggcaaggccgaggggaacagcacacagagagga

SEQ ID NO: 16066 - RNA, 78 nt, Homo sapiens
gagcaacagacaaagcccgggccccacacaaggagagcaagcagggagggcccacgaaggacagagaagaaagggcag

SEQ ID NO: 16067 - RNA, 72 nt, Homo sapiens
cccgaaaccaggccacagcgaacccgccaggagcgccaaaccacgaccaccggggaaccggcccggaagcag

SEQ ID NO: 16068 - RNA, 64 nt, Homo sapiens
agacccacgcagcaccaagcccagacgggcaaaggaacagagcacacagaccacaaggcagcag

SEQ ID NO: 16069 - RNA, 51 nt, Homo sapiens
gggccaaagaagggagagagagcaagggagaacaagcagccaacaacccac

SEQ ID NO: 16070 - RNA, 88 nt, Homo sapiens
ccggagaggagaggcaagaggaccgagaggagcggaagcgcgcggacccagcagccccccaccaaagcccaaggagccgagcccaaca

SEQ ID NO: 16071 - RNA, 75 nt, Homo sapiens
gcagaagaagagaggagggagaacacagaaaccggccccaggggaggcaagcaggggggcaaaggaaagaaggca

SEQ ID NO: 16072 - RNA, 51 nt, Homo sapiens
aacagcaggagagcaccaacagggcgcgagccaacgccggcggaccccagc

SEQ ID NO: 16073 - RNA, 76 nt, Homo sapiens
ggccgggggcgccggaggagggcggcccgccggcgagagagaaggacaaaccagggaagaggcaaaacagaaaaag

SEQ ID NO: 16074 - RNA, 108 nt, Homo sapiens
ccaagagaagagcgcaggcgcgaaagcccacaagcggcgcccgacacccgccagggcaggcaacccagccaggcccagggaggcgacgacaccagcacccagccaagg

SEQ ID NO: 16075 - RNA, 73 nt, Homo sapiens
gcgcgagcacccggaagcaccagggacagagcagaagggcgaaagaccgggccgcagaagaggccccaacccg

SEQ ID NO: 16076 - RNA, 89 nt, Homo sapiens
caggcgcagagggggcggcgaccgagaggcgcggagccggggacgcggcagcagaagaagccgaaagacagacgagcgccccaggcacg

SEQ ID NO: 16077 - RNA, 72 nt, Homo sapiens
ccacagacccacccgcaccagacgagaagacagacaacccagaaaggcagcccagccagcgggaacggacac

SEQ ID NO: 16078 - RNA, 81 nt, Homo sapiens
cagacgaccccacccgcgccgcgacccgagagcgggacgggcagaagaaaacccaccaaggggcaacaagcacccacaagg

SEQ ID NO: 16079 - RNA, 74 nt, Homo sapiens
gcacagagagcccccggggcaggggaacagagcaaagaaggagagccgagcacagcagaaagaggaccggaacg

SEQ ID NO: 16080 - RNA, 78 nt, Homo sapiens
gaagggaagacccccagcaaagagcgagcggggcccggccacagccgcaacgccccgcgggccagcagcagcaccccc

SEQ ID NO: 16081 - RNA, 73 nt, Homo sapiens
caaacacacgcaaaggagaaaggaaccgacaggaggagggagacaggggcaaaaaacggcagggaagaggcga

SEQ ID NO: 16082 - RNA, 77 nt, Homo sapiens
acgcggggcgccaggaggggcgggcgaaccggcagcgcggcccgccagcgggaccccccacaacaacccccgaggca

SEQ ID NO: 16083 - RNA, 75 nt, Homo sapiens
ggacagaggaaggaaaggcccgccgaaccccacggggggggaagacaacccggagaacacccaggggacgcccag

SEQ ID NO: 16084 - RNA, 71 nt, Homo sapiens
acgcgagagagggcacacaggggcgagaggccagcgacgacagagacccaggaaaccaaagcaagacaagc

SEQ ID NO: 16085 - RNA, 72 nt, Homo sapiens
gggggcgcagcaacgcccgaacaccaaacacccgccggagaacgaggaaaggcggagcagcggaaagaagga

SEQ ID NO: 16086 - RNA, 75 nt, Homo sapiens
ccaagaagaccacagagggacccggacaaccagaggcagccagcagggggagaaccccagaacccagcccgcaca

SEQ ID NO: 16087 - RNA, 79 nt, Homo sapiens
gaggaagacccggaaacaggggccacggagccacggccacggccgcaagggggggccacgcgaacccagcacgacaggc

SEQ ID NO: 16088 - RNA, 73 nt, Homo sapiens
ggggagcacagagcgagaccaggaaagaagggggcagaagagggggaccgagcagagaaccaacggagaacag

SEQ ID NO: 16089 - RNA, 49 nt, Homo sapiens
gagggcaacaaaacccacaggacagcagaccacagcccggcaggcccaa

SEQ ID NO: 16090 - RNA, 71 nt, Homo sapiens
cccgcgggaggacacacccccgcaaccgggggacagcagaccacagcccggcaggcccaaaaacccaaagg

SEQ ID NO: 16091 - RNA, 76 nt, Homo sapiens
cgaaagcgcacccacaagccaagcaccccacccaacccccgagagcgggagcgggacacgggcaagccaccacacg

SEQ ID NO: 16092 - RNA, 83 nt, Homo sapiens
gggacgcaccaacgagagccgagcggagaccaacccccaggaggcccagagcagaggagggcccaggaccgggaccagagcag

SEQ ID NO: 16093 - RNA, 75 nt, Homo sapiens
aaaagccgacaaccccagaaacagagcggggacgggaaagagggcagaagcagcaagaaaaggccaagagagaag

SEQ ID NO: 16094 - RNA, 74 nt, Homo sapiens
aaaccaaacaaaggcgaccccgaaagccagaacaccaacgccacacacgggaccaccacacgcgaccagggccc

SEQ ID NO: 16095 - RNA, 77 nt, Homo sapiens
ggccaagcgagccccacggagaagaaaacccgcagcccaaagggcagaagaagaagaagacgcaagacggcaggggg

SEQ ID NO: 16096 - RNA, 62 nt, Homo sapiens
ccggacccagccccggcaaaacaaggcgcggacggcccaagaggggcccccagcacagcaga

SEQ ID NO: 16097 - RNA, 69 nt, Homo sapiens
agaaaccggaccagcgaacccacaggaaagaaacagggaaagaaccccgggagcgaagaagcggaacga

SEQ ID NO: 16098 - RNA, 81 nt, Homo sapiens
aaagggaaacgaggggagcccagggcggacggaggcacccgagacgcggagcaggccgaggaccagacccggggacacacc

SEQ ID NO: 16099 - RNA, 83 nt, Homo sapiens
cggaccgagcaacaccgagagaggaggagccagacgacaagcacacacaggcgcgaaacggaaaaaggaagaaaggaaggggc

SEQ ID NO: 16100 - RNA, 76 nt, Homo sapiens
cacacccagagccagggcagaacgccacagacgcacaaccccacgaggcgaaacacacacagcagccaagacacag

SEQ ID NO: 16101 - RNA, 78 nt, Homo sapiens
agccaaccgcgggccgggacacaaccgcaggagagggcggagaacggaaaagcaccaggaagcagagaggaccgcaga

SEQ ID NO: 16102 - RNA, 53 nt, Homo sapiens
gaaggcccggacacagcaaaccgggccacagcgcaccccagcacgaaaaggcc

SEQ ID NO: 16103 - RNA, 79 nt, Homo sapiens
gggaaacccagcgagagaccagcgcccaagcccgcaggagagccgcccgacacccgccccccgacccggccagaaagcc

SEQ ID NO: 16104 - RNA, 76 nt, Homo sapiens
aacggggaaaaggcggccacgaggcaaccagcaagcgaaggaggaccagacaagaaggcaagaacaacagccagac

SEQ ID NO: 16105 - RNA, 67 nt, Homo sapiens
ggagaaagccccgcagaaggcagccaggaggagaggaaacagaagacagccgaaccaagggcgacaa

SEQ ID NO: 16106 - RNA, 74 nt, Homo sapiens
agaggcaggcgccagacaaccaggcaagcggaagaaccgaacacacaaagcggcagcccggaagaagaaggaag

SEQ ID NO: 16107 - RNA, 38 nt, Homo sapiens
gaccgggacagaaggcaagacaccacccaaacgccggc

SEQ ID NO: 16108 - RNA, 73 nt, Homo sapiens
ggagaacgccccgaaccccgcacacgaggaagagacccagcagccagcgaagccccaaggaagccgggacgcc

SEQ ID NO: 16109 - RNA, 85 nt, Homo sapiens
aaggaccaagaaccaggggaccaaaagaacccagccaacccgcagagggaggggaggggcgagcggaggagagcggggcccaaga

SEQ ID NO: 16110 - RNA, 79 nt, Homo sapiens
acagggacaagcaaggcacacaccgccagggagaaaagacgaggaagcccaaaaaccgcaagaaaggcacagaagaagc

SEQ ID NO: 16111 - RNA, 78 nt, Homo sapiens
ggcaagagccgaggcagaggcagcggaccgagcgcggcgcggggggcggccgccggcaggccacccggcaccacggca

SEQ ID NO: 16112 - RNA, 70 nt, Homo sapiens
agaaggaccaagaaccaggccagaggcagaggcagcaggcagcacaacagacccccaccaacagggaaaa

SEQ ID NO: 16113 - RNA, 75 nt, Homo sapiens
cgaccgcaacagaacggacccgaccaaggagaagcagaaggcggaagaaggcaccaaagacccccagagcacacc

SEQ ID NO: 16114 - RNA, 58 nt, Homo sapiens
ccagagcacccgcccacgcggagaggggggcagaaggaaaacaacggagcacgcaaag

SEQ ID NO: 16115 - RNA, 65 nt, Homo sapiens
ggcggaagaaggaaccccgaagagagggaagcagaagcgcacaaaagagcgaggaaaaggaaaca

SEQ ID NO: 16116 - RNA, 77 nt, Homo sapiens
cccacacaggcgaggccaggcaaaggaaccacccaggaaacagcgcaagggcagcgcaagaccccgcacggaagcag

SEQ ID NO: 16117 - RNA, 79 nt, Homo sapiens
cacgacacagaaggggaggggagggaaaggcccaggaaaaaggagaccaaggaccggacagaggaagaaacccggaagg

SEQ ID NO: 16118 - RNA, 78 nt, Homo sapiens
aaaaccacaagcagccgaacaggggcccaagaagcggggcccgagggaaaggacacagaggcgcgagccgggaggcac

SEQ ID NO: 16119 - RNA, 87 nt, Homo sapiens
agcaacggaagcgcagcaacagcaagccccgggcaggggcaaggaggaagagcaggaccgcgggacacggcacagcgacccacagca

SEQ ID NO: 16120 - RNA, 82 nt, Homo sapiens
accacgccaggaccaggacccgggaggaacgccggaggagccaacaaggaccaaacccacgccgagacacgaacggagagca

SEQ ID NO: 16121 - RNA, 71 nt, Homo sapiens
agggaaacagggaaggcaggcagaagggcaaagacgagaggcgaagcaaggacggaagaccaaaagcgaaa

SEQ ID NO: 16122 - RNA, 69 nt, Homo sapiens
accagcccgaaacccgacaggaaggaaggaaccaagcacccagcgaagaaaacgacacgcggcggagcg

SEQ ID NO: 16123 - RNA, 73 nt, Homo sapiens
agaaagcaaaaacaacagcagcacagacaaggaagagaccggcagcaagaaaacacggcaggggaaaccccag

SEQ ID NO: 16124 - RNA, 85 nt, Homo sapiens
agccaacagacacgccaccccaaggagcacgcagggcgagggaacagagagaaacccggcaagaaagcggaggcaaggcgcgacc

SEQ ID NO: 16125 - RNA, 80 nt, Homo sapiens
ccaccccacccccgggaccaagaagaaggaaaggaccaggacaacgggagccaaacggaagccacaggagccgaagcgca

SEQ ID NO: 16126 - RNA, 85 nt, Homo sapiens
caaccacgcagaggccaggcggccagcgaggaaggacaaggagggggcgcccgcggaagaccagaaagcacgaaaagcagacacg

SEQ ID NO: 16127 - RNA, 84 nt, Homo sapiens
gcgcaggcggcgcggcccccggaccgcaaggccgcccccccggagggcgcggaggcggggccagaggcggacaacagagcaccc

SEQ ID NO: 16128 - RNA, 80 nt, Homo sapiens
gccccagccccggcgcagacaggacccccgcgagccaccagaacgagacagcccccaaagacaccacgccacccaagaga

SEQ ID NO: 16129 - RNA, 65 nt, Homo sapiens
aggcagacacaccgacgaaaagaagggaagaaggagaaagggccaaccccgaagaagcaaacaga

SEQ ID NO: 16130 - RNA, 73 nt, Homo sapiens
agcagaaccgcagagccagcacccagaggcagggcagagcagagccaaaagacaaaacgggaccacaaggagg

SEQ ID NO: 16131 - RNA, 61 nt, Homo sapiens
gacggcggcgcccccaggccacggcagagacaacgggaccccaaggcacaggcgaccaccc

SEQ ID NO: 16132 - RNA, 60 nt, Homo sapiens
gcaagcagacggcaaggaccccaacaacaggagagagcaagcgagcagggagaaaggaaa

SEQ ID NO: 16133 - RNA, 93 nt, Homo sapiens
cgcccgcgcgccgccgcccgcgccggacccgcgggcacgggccacgagggaggcgcgccccccagaaaccccaccacgcggcaggggccgccg

SEQ ID NO: 16134 - RNA, 81 nt, Homo sapiens
cagccgccccccaggcagggaacccgggcccaggcagcaagaggagaagccagaaaagaagccgcacaagagaagaaaacg

SEQ ID NO: 16135 - RNA, 91 nt, Homo sapiens
cgagccgggccgcggcgccgagcgaacggggagccgagcggagcgccgcggcgcagccagggcccaggaacccgaagcgggcgagccagag

SEQ ID NO: 16136 - RNA, 86 nt, Homo sapiens
gcaaaagcccacaagcaaaagccggagaggaggagaagacaaggccgcccaaagaccaacagggcagcagacccccccagccccac

SEQ ID NO: 16137 - RNA, 56 nt, Homo sapiens
ccgcaaccccccacgacccggcgagcagcaccagggcccaggaccgggggcccgcg

SEQ ID NO: 16138 - RNA, 83 nt, Homo sapiens
cgcgccggccccaccccggcccgaccccgacccggcccggcaggccccaaccagcagaccagccagccccaagcagccgcacg

SEQ ID NO: 16139 - RNA, 67 nt, Homo sapiens
gaccaacccaagcgaagaagagcggaaaacaaggggacaccccccaggcacagccacaccccagcgg

SEQ ID NO: 16140 - RNA, 75 nt, Homo sapiens
gccccgggagcgggacacaggaacgccccaaagaggacccaaaggaaggacggcacccaaccaaaaccaggccag

SEQ ID NO: 16141 - RNA, 78 nt, Homo sapiens
gcggcggagagccgggagcgcggggcgggggcgcccgccgcgccgccacgaggagaacagaagcggagaacacaaagc

SEQ ID NO: 16142 - RNA, 80 nt, Homo sapiens
gcaacggaagaggcagccagaggagagcagcgcaggggagcggagcaagaaaccaagacaaacaaaagacgcccccgaga

SEQ ID NO: 16143 - RNA, 41 nt, Homo sapiens
ccaccgcaaggacaaagaagaaccaacaagcacggcaggag

SEQ ID NO: 16144 - RNA, 85 nt, Homo sapiens
gcaggagaagccccggggggaagagcgccaccggcggcccgcaagaagaccgagaaggcccaaaaacccagaacagaagacaaag

SEQ ID NO: 16145 - RNA, 82 nt, Homo sapiens
ccggagcccggcgcaccagcagaaccggagagagcgcagcccagccagcagaaagcggggcggagaacacggggcagagacg

SEQ ID NO: 16146 - RNA, 72 nt, Homo sapiens
ccaaaagaggcagccaagggccagcaaaagaagcgagcaacaagaaagcgcaaggcagagggcacaggcacc

SEQ ID NO: 16147 - RNA, 88 nt, Homo sapiens
gcaagacccaagaagaagaaggcgaaggaccccaacggggaggccaacggaagaaaccaggggcgcaagggacccacgaaggagaagc

SEQ ID NO: 16148 - RNA, 60 nt, Homo sapiens
ccgcagcaccgagaaaaccagaaagcgcagagacgcaagcggaagaacagcgcaaggagg

SEQ ID NO: 16149 - RNA, 59 nt, Homo sapiens
ccaaggccgcaagagagaggggaaagggcccgccacaaaaacggcagcagagccaaacc

SEQ ID NO: 16150 - RNA, 85 nt, Homo sapiens
ccgagaaaggaagggcgggaccaacagggagccagaacccagacggacacagggaaaaaccgaccgagccaggaagccaaccagg

SEQ ID NO: 16151 - RNA, 77 nt, Homo sapiens
gaaggcggagcagagcccagccagcagagaggaggggacggccacgagcagaggagacaacgcaccaagaacgggca

SEQ ID NO: 16152 - RNA, 70 nt, Homo sapiens
aaaaccgaaccccgaagacccgcagagccaacagaaggagacccaacaccccggccagacgggccaccag

SEQ ID NO: 16153 - RNA, 75 nt, Homo sapiens
ccgagcgaacgcgcaacagggccgcacgcaagggacgaaaacaagggaggcaaagccaaacaacaacagagcaaa

SEQ ID NO: 16154 - RNA, 94 nt, Homo sapiens
caccacaccgagcccaagcggaaagcacgcgcacagaggagcagcacgcggagagcacgacgggccggacacgcaggcggccacagagacggag

SEQ ID NO: 16155 - RNA, 65 nt, Homo sapiens
caagccaagccacaaggaaccaagacagcgccgcagacgaaaaagcagaccacccaagaagccag

SEQ ID NO: 16156 - RNA, 40 nt, Homo sapiens
ggggggcaaacccgagagaacgggcagaaaggcgcacagg

SEQ ID NO: 16157 - RNA, 77 nt, Homo sapiens
cgaggacggaggacggagaggaccgcaccagcacgcccacccagagaaaaggcgacggcggagacagaagagaggag

SEQ ID NO: 16158 - RNA, 77 nt, Homo sapiens
gggcccgccggcgcggagcacccggccccgcgggcgggacccggcccgcgacgggacagcccagagcaagcacacgg

SEQ ID NO: 16159 - RNA, 95 nt, Homo sapiens
gagagacaagagcaagagggcagaagaacaagaaggagaccgagaagggaaacagagcagcccgacggccaggaggcgaagagacgaggaagccc

SEQ ID NO: 16160 - RNA, 61 nt, Homo sapiens
aaagcagaacaggccaagcagggcgagaaccagcgacggagcacgcgacggaaggacaaaa

SEQ ID NO: 16161 - RNA, 85 nt, Homo sapiens
cgcgcccgcggcgcagcggggcggcagcgaggcggaggcgacgaggaggcggacccccggcgcaggacccagaagaccccagacg

SEQ ID NO: 16162 - RNA, 81 nt, Homo sapiens
cccggcagcagcggcccgccgccgcccgcccgcgcgcagccccccgaagacacaggagaaacggacaaagagcaagcagcc

SEQ ID NO: 16163 - RNA, 73 nt, Homo sapiens
cgccccaggacagcaccagcgggccggaggagccagagcgcagaaaggaccgagaggccaaaggcggcggaga

SEQ ID NO: 16164 - RNA, 79 nt, Homo sapiens
aagggccgaaagcagaagaaaagggacgcaagaaacccaggacgagaacagcaacagacaacagagcaccaacaaaaag

SEQ ID NO: 16165 - RNA, 78 nt, Homo sapiens
accaacagcagcggcagccaaggggggacacagcgagccacgcgccaggaagcccggccaaggagccaaccgcgcgag

SEQ ID NO: 16166 - RNA, 73 nt, Homo sapiens
cccggaaccagcgagagacaccaacagcagcagaggaaaaaagagaccgagagaaagcagcagaaagggggga

SEQ ID NO: 16167 - RNA, 80 nt, Homo sapiens
ccccgacgcagcgccaaacagcaaagccggaagcgacgcgcaccggcaagcacacgggggagaacggaaacggcacgaag

SEQ ID NO: 16168 - RNA, 65 nt, Homo sapiens
gggacagggagaaaaacaaggacaaaccggcgaccacacacggggacgacggggaagccggacag

SEQ ID NO: 16169 - RNA, 73 nt, Homo sapiens
caaaccagaccccggcacccaagagcagccagggcaggggagggccggcccagggagaacgcaaaaccaccac

SEQ ID NO: 16170 - RNA, 73 nt, Homo sapiens
ggccacaagaaggggaaagaggcaaacgaaacccagcaagaccagcagacggcgaagacaaacacccacagag

SEQ ID NO: 16171 - RNA, 72 nt, Homo sapiens
cggggaccccggagcccagaagacagagggcgagaggaagccaccaccgcccgaacgcgcggacgcgggccg

SEQ ID NO: 16172 - RNA, 60 nt, Homo sapiens
cacgcacagacacagaggccaggaagagggacggagagaccggaggaaaccagaagaaaa

SEQ ID NO: 16173 - RNA, 74 nt, Homo sapiens
ggagaacacagaagcaaaagccgaagcaggacggagccaccagcaggcgagaggcagaacccggaaagaaggaa

SEQ ID NO: 16174 - RNA, 80 nt, Homo sapiens
ggggcaggagccgccgcgggccgcgagcccggagcgcggcagccggcggcacggaaagaccacagcaagaccacgccccc

SEQ ID NO: 16175 - RNA, 83 nt, Homo sapiens
gaggagcagcagaggggcgagcaggagcgaccgcgccaaacaggaaaagaaggaggccagcgggacacacaaagaaagacgaa

SEQ ID NO: 16176 - RNA, 79 nt, Homo sapiens
cgggacgggccgagaggacgggggcaaccggacagagaagcccaagagaagcaggaggagcagcgcagcggcagggccg

SEQ ID NO: 16177 - RNA, 81 nt, Homo sapiens
gcccggcacacgaccggaggccgagacccccggagcacccaggaaacccgaacccagcggagagccaaagggagcggacaa

SEQ ID NO: 16178 - RNA, 72 nt, Homo sapiens
ggaagcgaacggagccaccccacagaacacggaggaggagcggagcggaaaagcgcacagaccgcccagccc

SEQ ID NO: 16179 - RNA, 57 nt, Homo sapiens
ccaaagaagggagagaggcgaacacccgcaaacaccacccaagcaaacaggagccgg

SEQ ID NO: 16180 - RNA, 85 nt, Homo sapiens
cgccggcgggacgaggacgacacaccggaaaaagacaagggcagagcagccggggaaaagggccaagaagcagaaaagagcaccc

SEQ ID NO: 16181 - RNA, 54 nt, Homo sapiens
gacgggcgggaaagagaggcccggcccccgacgggagggggaaccaggcagggc

SEQ ID NO: 16182 - RNA, 39 nt, Homo sapiens
agaagggccaacaccacacggcccacaggacgcggcgcc

SEQ ID NO: 16183 - RNA, 68 nt, Homo sapiens
cggggcgcccaggccgcccgacccaaagggaaaacagaaacaggcggggccggggagcccgggccaga

SEQ ID NO: 16184 - RNA, 61 nt, Homo sapiens
ggccaaggcgaaacccgaacaaggggagaacggacagcaggccgaccccaaacgcgaaccg

SEQ ID NO: 16185 - RNA, 62 nt, Homo sapiens
cggcacgcaccacggccacccggccggccgaggccagcaggcggagagagcagagccgcgga

SEQ ID NO: 16186 - RNA, 80 nt, Homo sapiens
agggaggcccaagacccacaacaaaagaacagacaccccgaagaaccccaaagaaacccagagaccaacaaagaaaaaaa

SEQ ID NO: 16187 - RNA, 73 nt, Homo sapiens
aaggagaaagccacaacagggcggcaacaggggcgagaaaggagggggacagccagggaggaggacaggcccc

SEQ ID NO: 16188 - RNA, 103 nt, Homo sapiens
gagaaggagaggggaccgcccggacacaagaaaaagagcgaaaaagacacgccggggaaggccgcggacccccccccccccaccccacaggagaagagacgaa

SEQ ID NO: 16189 - RNA, 64 nt, Homo sapiens
gaagaccgaaaccagcccccgaggaaaaccagccggagcaaacccagcaccggcacaagagagc

SEQ ID NO: 16190 - RNA, 54 nt, Homo sapiens
cagcaccagcgggcgagcgacacaccccacaaaggacggcacagccagacccaa

SEQ ID NO: 16191 - RNA, 71 nt, Homo sapiens
gcaacccagaagagcgaaggacccagcgaggaggggggcggcggccggcgggcaaaggacgccaggaggaa

SEQ ID NO: 16192 - RNA, 79 nt, Homo sapiens
cgagacgaagcgcccggggggcgagcccgccgcacccgggccgcgccggcacgccgcgggagagcgggggcgggaggcg

SEQ ID NO: 16193 - RNA, 77 nt, Homo sapiens
aagacacgacagcaccaagcaaagagcccaacgcccagacaacacaagaggaaggaggacggaagcccaggggggaa

SEQ ID NO: 16194 - RNA, 69 nt, Homo sapiens
ccggaaaacggaaagaaaaggagagcaccacgagggcggggggaaaagaacgcaggcaaacagacacaa

SEQ ID NO: 16195 - RNA, 73 nt, Homo sapiens
gacaaggagaacagaaaagagagccgggaaggagcaaccaaaagccgggccgcccgcggcagagcagcagagc

SEQ ID NO: 16196 - RNA, 53 nt, Homo sapiens
ccaacccagcagccagaaaacagcccagaagcaaccgcggccgcaggaagaga

SEQ ID NO: 16197 - RNA, 65 nt, Homo sapiens
ccgggccggccaacgagagagggacgaccaggacagcgcaaacaaaaaccccagacgcaaaagaa

SEQ ID NO: 16198 - RNA, 37 nt, Homo sapiens
ggccacagacaccgaaggaagggccacagccgccaag

SEQ ID NO: 16199 - RNA, 73 nt, Homo sapiens
aaggaggagccgccagaacgcggaagcgagaaaaaggaggcggcaacagggaacgccgcgcagagcccagccc

SEQ ID NO: 16200 - RNA, 73 nt, Homo sapiens
cgggcaggcggaagcgcgcgggcaaggaaggcgcggaagggagaaaagaagcagcccacgaaccccgacaaca

SEQ ID NO: 16201 - RNA, 42 nt, Homo sapiens
gcagggcccaccgcgaccggcccaaagacaacaggccccccc

SEQ ID NO: 16202 - RNA, 81 nt, Homo sapiens
gagcgaaaggaaagaaagagcaggcgggacaggagccggcgggcaggccgggggacccgcaagaaaccccagcggaccacg

SEQ ID NO: 16203 - RNA, 85 nt, Homo sapiens
cacgaggacgccaaggcacaccgcaggaacaagaaggacgcaacccagcaagacgagaagagacacaagaagcgagagcgcaaac

SEQ ID NO: 16204 - RNA, 57 nt, Homo sapiens
gaaacaaagaaccaagcaacaggccgccaaaggggggaggggcacgacaggcagaag

SEQ ID NO: 16205 - RNA, 90 nt, Homo sapiens
cccaaggcacaggcgaccaccccaaaagcaccggccccgcacagcaaaccagaccaggggcgcaagggacccacgaaggagaagcggggg

SEQ ID NO: 16206 - RNA, 57 nt, Homo sapiens
gccggcggagacagcaggcagagagagcgagccacccccggcgcccgcgggcccgcc

SEQ ID NO: 16207 - RNA, 75 nt, Homo sapiens
acaaagagcgccccacgagagaacggcacacgcgagcgcaggggagcacgccagacacccagaaccaccaccaaa

SEQ ID NO: 16208 - RNA, 78 nt, Homo sapiens
ggcggagggcgagcgcaagaggacaacagccgcgaagccgacgagcccgaacagacgcaccagcgggaggaagaggga

SEQ ID NO: 16209 - RNA, 74 nt, Homo sapiens
accgggagaaggggccggcgcacgacagcccccaagcccagacgcggcagaagcgcgaagagcagcagaaacgg

SEQ ID NO: 16210 - RNA, 71 nt, Homo sapiens
aacaacgaccagcaccagcaaaccaaaccagggaacggagcagcaagaagccaaaagcgagacaagacgaa

SEQ ID NO: 16211 - RNA, 76 nt, Homo sapiens
gccgggacgggcgcaccgcgacagcgggagcacaggcccgggagggagagaaacccagaccccaaaggcgggaacg

SEQ ID NO: 16212 - RNA, 74 nt, Homo sapiens
aggggcccgcaggccgggaaccgcccccaccaagccggagccacccaaagccagcaggacacgggacccaggcc

SEQ ID NO: 16213 - RNA, 83 nt, Homo sapiens
aggccgcacccaaggccgcagacaaggccagccggagagggcccgacggcgggcagacgagggggccccggccgaagacgcga

SEQ ID NO: 16214 - RNA, 77 nt, Homo sapiens
aggaaggggagggccagcccgcgaaccggccggagagaggagccagccacacggaaagaagaaaagaaaagagagag

SEQ ID NO: 16215 - RNA, 40 nt, Homo sapiens
gagcggagcagccccagcgccacggagcgagcgaagaaca

SEQ ID NO: 16216 - RNA, 53 nt, Homo sapiens
agagggagcaagcaacagccacagggggccagggaaccccacccggacgccag

SEQ ID NO: 16217 - RNA, 74 nt, Homo sapiens
aaggaaaacgcggaaaaccgacacaacaggcagaaccagagaccacagaagaaggaagggccacccaggacagg

SEQ ID NO: 16218 - RNA, 76 nt, Homo sapiens
agaccgaccaccaaaaagccagcacgagcaacccggcccccccagcagcgaccaccaaagcccacacacgcagaga

SEQ ID NO: 16219 - RNA, 73 nt, Homo sapiens
cccaaggcgacgaccgacaggggggaaaggaagccacagggaggaggaccagcgggagggccacggaacgcca

SEQ ID NO: 16220 - RNA, 72 nt, Homo sapiens
cgggacaacaaaagagccacccaagccagaagaagccacacccgaaaaaaacgcccaagagcccaagcaagg

SEQ ID NO: 16221 - RNA, 75 nt, Homo sapiens
gaagcagaaagcggcgaggaagaacagcagcggcagaagccaacacaggaacacaagaacaaagccagagagaaa

SEQ ID NO: 16222 - RNA, 89 nt, Homo sapiens
cgccggcccccgaaaagcgcacgagacagagggaaaggccaaccggccggaaagcccgacgcgagccccagcgcgggaagaaaagaccg

SEQ ID NO: 16223 - RNA, 84 nt, Homo sapiens
gaggagaagaggcgccggcagggcagccagcggccaggggggcccgcgggccagccaccgggccggccacggcgcggcacaggc

SEQ ID NO: 16224 - RNA, 65 nt, Homo sapiens
gaacacgaacaggaacccgcaggcccaaagaccgagaccacaggggcaacccaaggacgagacca

SEQ ID NO: 16225 - RNA, 81 nt, Homo sapiens
gccgccgccgccgcccagagacgcgagcccgccgccgccgccaccacccacccggacacagcagccagggagagaagaccg

SEQ ID NO: 16226 - RNA, 70 nt, Homo sapiens
cacgaggaagagacaacaccagagggccccaggggagagaccccagaagaccggaggggcaccccaaaca

SEQ ID NO: 16227 - RNA, 48 nt, Homo sapiens
gagcaagcgggggaccgaacaaggcaaaagggagagggaagggcagga

SEQ ID NO: 16228 - RNA, 75 nt, Homo sapiens
agccaacccaacaagaggggcacaaaaacaccacgccgagaacccaggcgggacccagagagccagcgacaggga

SEQ ID NO: 16229 - RNA, 65 nt, Homo sapiens
gaagggccccgggacccgccgcgagggacccgggagcgagaggcgccgggacgagaggaggcgcg

SEQ ID NO: 16230 - RNA, 73 nt, Homo sapiens
gcaccgcccggaccaccaggggcccgggcagagggaaagcagaggacggaacaacccgggggaccgcgggggc

SEQ ID NO: 16231 - RNA, 79 nt, Homo sapiens
acagggaagaaagaaacagagcggagaaacgcaggaaacagcagcgaggaggggaagagaggcggaggcaaggcgcgac

SEQ ID NO: 16232 - RNA, 85 nt, Homo sapiens
gagggagcccgccgcccgccccggcacacgcgcagccccggccccggcccgccggagaaacaggaaccaagaaagaggaagaaga

SEQ ID NO: 16233 - RNA, 61 nt, Homo sapiens
gagagagaagaggagagagaagagggcgaccaggaaacagaagcgaggccgaaagacaaaa

SEQ ID NO: 16234 - RNA, 63 nt, Homo sapiens
agaccaggacggcgcgggaaccacgccaacggggcgggacacgaagcagaggagccagaccca

SEQ ID NO: 16235 - RNA, 74 nt, Homo sapiens
ggcgacgaggcacagcgcgcaagaagggaggggcgaaagacggaaaggcccagaggacgaccgccgaagccacg

SEQ ID NO: 16236 - RNA, 71 nt, Homo sapiens
cggcggcgagcggccggggcaggaaacgggaagaaggaagccccgcgccccgcagaacccgaagccggcac

SEQ ID NO: 16237 - RNA, 76 nt, Homo sapiens
accccagccgggaggggagcgggaggaggccgccacagcagacaggcagcaaagaaaggaggagaagcccagccgc

SEQ ID NO: 16238 - RNA, 72 nt, Homo sapiens
gccggccccaggagcccagcaacagcacccagagcccacgaggaggaaaagaaggaagcaagaaacacggag

SEQ ID NO: 16239 - RNA, 59 nt, Homo sapiens
gggccgcggcgggcgcgcgggggagccgggacggacgggaacccaggagaaacgagagg

SEQ ID NO: 16240 - RNA, 117 nt, Homo sapiens
acacacaacagggcccagcgaagggcgagaagaagcagaaacacagaccacacaagacacggccaaaagaagacccagacaagaaagaggaagacgaagccagaaaccaaagggaca

SEQ ID NO: 16241 - RNA, 79 nt, Homo sapiens
cgagacccggacagggcaggaaacagagaggacagagacgaggcgggcccaagggcaccaccggcacccacaaagaggc

SEQ ID NO: 16242 - RNA, 78 nt, Homo sapiens
cccccaaaggcggaacaggaaacggagaggcgggcggaccaagaccccccccaggagcaggccccccccccaacaacc

SEQ ID NO: 16243 - RNA, 39 nt, Homo sapiens
gacaacgcggcccgaacgggacggcaggaaacacgagcc

SEQ ID NO: 16244 - RNA, 77 nt, Homo sapiens
gaggaaacagacggggcagggaaaaggggaagagcaggccaccagaaggggaaccacagagcacccggcccaggcgg

SEQ ID NO: 16245 - RNA, 70 nt, Homo sapiens
ccagcggggaccggaaccggaggagaagcccagggagcgcaccccaggaaaccaagagacggggcgccgg

SEQ ID NO: 16246 - RNA, 79 nt, Homo sapiens
agcaagggaaaaagaagggagcggccgaaggagccaccaggccgggaagcccacggcggagggaggcgcccggccaccc

SEQ ID NO: 16247 - RNA, 80 nt, Homo sapiens
agagcccaccggaaggagaaggaagaggagcggccgaccgggccgaggcgaaccagaagagagaagaggaaaccgaagca

SEQ ID NO: 16248 - RNA, 77 nt, Homo sapiens
caggcagcgaaagaagacgccagcacaccccacagaggaggaccccagaggcgcgaacagggcccacccgccacgac

SEQ ID NO: 16249 - RNA, 75 nt, Homo sapiens
caggaccgcccccccccccaagcgcaggccacgcaagcccacaggcacccggaagcaaggcggccagcaaagagg

SEQ ID NO: 16250 - RNA, 81 nt, Homo sapiens
ccagcaagaaacgaagcaaaagacagcgaggagcagcagcagcccagcaggcgcggcccgccagcgccgacgaccaaaaca

SEQ ID NO: 16251 - RNA, 62 nt, Homo sapiens
acacacggcagagcaccgacggacggggcaggacgagagcaagcagcaaagaaaccgcacca

SEQ ID NO: 16252 - RNA, 68 nt, Homo sapiens
gagggaccacggggagccccacgagaaacccgagaggagcaggagcaaccgacaggcgggccggacag

SEQ ID NO: 16253 - RNA, 100 nt, Homo sapiens
gcagcagcgcgggccagagcgcagcgccgagcgcggcccgggcgccacgagccggcggcggacggcagggggggccccagcccggccgaacgggcgcacg

SEQ ID NO: 16254 - RNA, 75 nt, Homo sapiens
cccggaggcgggagccggcagcaggaaagccagcacaaggcggaaaggacgaggcagccacgggggagcgggcac

SEQ ID NO: 16255 - RNA, 59 nt, Homo sapiens
cacagagccacgggaaaaaagccgacaagagacaacccccaaaagcaccgagaccgggc

SEQ ID NO: 16256 - RNA, 83 nt, Homo sapiens
acacggcacaccgaccgacgaaggcggaaaggacgaggcagccacgggggagcgggcaccacagagcggcggagccggaccac

SEQ ID NO: 16257 - RNA, 74 nt, Homo sapiens
aagaacaagaaaaagcacaagagcaccaacgagggcaaaaacaccaagaccagccagaagacagaacggagaca

SEQ ID NO: 16258 - RNA, 77 nt, Homo sapiens
caggaggaacacagcaccagaaggaagaccccacggaagaaccaaacagcgcacaccaggacagggcaccagccaac

SEQ ID NO: 16259 - RNA, 72 nt, Homo sapiens
gaaggaaagaggcaaacaaagagaggcaaggcagcacgacaaagacggcgaagacaaacacccacagagggc

SEQ ID NO: 16260 - RNA, 71 nt, Homo sapiens
ccacccccgacagcacgacacgcccaaccaggaaacgcccagccagagcagcgagccagaaaaaacgcaga

SEQ ID NO: 16261 - RNA, 48 nt, Homo sapiens
acaagaagagaagaacccagggacagcgaaccgaagaccaaaggacaa

SEQ ID NO: 16262 - RNA, 83 nt, Homo sapiens
cggcccggccgcagcagccgccgccgccgcgcaaagcaaagccagggagggaaccgaagccacgggcgggggacgcgacccca

SEQ ID NO: 16263 - RNA, 82 nt, Homo sapiens
caagcaggaaaggaaaaggcggagcacccgagagccaccaaagccacccaggcccaggaccgagcccgacgcccacagacag

SEQ ID NO: 16264 - RNA, 54 nt, Homo sapiens
cgggcgacagcggcaggggccccgaaccagaagccaccgggaggaccggaggag

SEQ ID NO: 16265 - RNA, 52 nt, Homo sapiens
gaaaacaagcacgaagcacgacggacagaaagcaccgcagacaccgggaaga

SEQ ID NO: 16266 - RNA, 72 nt, Homo sapiens
ggaaccaggagagagcagccagaggacaaggggaccgcagccaggggagcggaagcggacgacaaaccaaga

SEQ ID NO: 16267 - RNA, 55 nt, Homo sapiens
gcggcgccgccacccccccccagcaggcacacagagaaaaaaagggaacaaaaca

SEQ ID NO: 16268 - RNA, 76 nt, Homo sapiens
aacgaggccccgagccagccccgacagcgggaaccggcggagaacggaaaagcaccaggaagcagagaggaccgca

SEQ ID NO: 16269 - RNA, 78 nt, Homo sapiens
gagcggagaggagagcacacggcaccgagggagacaagcagaccggaagaccgacggaagaccacaccccgagggagc

SEQ ID NO: 16270 - RNA, 85 nt, Homo sapiens
cccagccgccaaacagacccgagacccagcagccccacggagccgccacccgaggcacaaacaacgcagacagcagacaacgggg

SEQ ID NO: 16271 - RNA, 73 nt, Homo sapiens
aggaagacgggcaggccgaagccgggacaggggaccccagaagagcagccaccacagacagccagggccacgg

SEQ ID NO: 16272 - RNA, 80 nt, Homo sapiens
gacggcgcaccaacccaaacaggaagcagcgcaggaccgagggacagcaccagcaggagcggccagcagcagccagcaag

SEQ ID NO: 16273 - RNA, 67 nt, Homo sapiens
agcagggggggggggaagccgcagcggaaagcaggagcacagcaagggcgaaaacagaaaaaaagag

SEQ ID NO: 16274 - RNA, 74 nt, Homo sapiens
cgggacgcgaagcaacaggcgacaagcaggccacgccgcaagcgaggagaggggaggggacaccgaccccccgc

SEQ ID NO: 16275 - RNA, 71 nt, Homo sapiens
ggccaagcccggaaagagcacagcggacagacgcacgacgaaggcaagaccacaagaaccagaggcagcgg

SEQ ID NO: 16276 - RNA, 71 nt, Homo sapiens
gcggaagaggggaccggcgcggacccagcgagacgacgggaccgaaggaccccgccagagacaaccgagcg

SEQ ID NO: 16277 - RNA, 39 nt, Homo sapiens
gaaagaagacccaacaagaggaggaacaaacaaagcaaa

SEQ ID NO: 16278 - RNA, 74 nt, Homo sapiens
cacgccaccccaccccaaaagggaccgacaagagcacagagagaggccaagcgccggagaaaaagccaggaaag

SEQ ID NO: 16279 - RNA, 42 nt, Homo sapiens
gaggccgcgggcggcgggcccgggcacaaggcacaaagcagg

SEQ ID NO: 16280 - RNA, 68 nt, Homo sapiens
cacacggaagaaagggaaccggagaagagagagaaagaccaaggcgagaacgcggacaagcaaacaaa

SEQ ID NO: 16281 - RNA, 88 nt, Homo sapiens
caccagcccgaaacaccaccaaggaaagagcaaagaggacaggaagggggggagagggcagaaggccccgagcccagggcggaacaca

SEQ ID NO: 16282 - RNA, 69 nt, Homo sapiens
cggaccaccagaaagcaccccacaggggaggccagcaggacgcgggcagaccccagaaggaggaaaaaa

SEQ ID NO: 16283 - RNA, 75 nt, Homo sapiens
ggagcccggccaccacacccagcgggggacggaaaagacaagaaggagccagaagaggaggagccaggaaaaagg

SEQ ID NO: 16284 - RNA, 77 nt, Homo sapiens
ccagccaaggcacagaaggcgcgacacacgccaaacgcaggcaaggaaaaacgcaggaagaacagaagcgggagacc

SEQ ID NO: 16285 - RNA, 76 nt, Homo sapiens
gccagagagagacgacagcggcaaaaccagcacaggcaacgcacaccacaccaaaagaaaaagaggcgaaagcagc

SEQ ID NO: 16286 - RNA, 86 nt, Homo sapiens
gcgcaggacggcagcggaacacccccagacaacgaaggggaacgaaaggcaccaacagaggccaccgcaccaaaagccagcgagga

SEQ ID NO: 16287 - RNA, 73 nt, Homo sapiens
gaagccgcagcggaaagcaggagcacagcaagcaggccaaacgaccgcggggccacgacaaaggggacggcca

SEQ ID NO: 16288 - RNA, 74 nt, Homo sapiens
acacgcccaccggcccgccaagcgcggaaaccgcggccggcacaaaaccggcacacaaaacccgaaagcgcgca

SEQ ID NO: 16289 - RNA, 75 nt, Homo sapiens
aaggcccgggcaggggaccggaccgccgcgccccccaacgaccaggccccaacaacacgcgcaggacagcaggcg

SEQ ID NO: 16290 - RNA, 77 nt, Homo sapiens
cacagacgccgaaggacaaaacgggacggcagaaacaaagaggcgggaccaaagacagagacaagcggggaagaacg

SEQ ID NO: 16291 - RNA, 80 nt, Homo sapiens
ggccacgcgcccccagaggagaagacccgacggaccccagcgccgggcagcgagcaaaagcagaccggaaaacccaccgg

SEQ ID NO: 16292 - RNA, 66 nt, Homo sapiens
ccgaccaccagcaaaaaccgaaaaggcagagcacgaaacaaaccaaccaaaaaggaccggacaaag

SEQ ID NO: 16293 - RNA, 75 nt, Homo sapiens
ggcaccggaaaccgcaacaaaaacagaccgggccaaagcccggcccacaaaggggaagcagcagcggagcgaaac

SEQ ID NO: 16294 - RNA, 82 nt, Homo sapiens
acgagccagccgaccgggcagcggcgaggggacggagccggacaggagccgccgccgccaacagggggcaaggcggcccggc

SEQ ID NO: 16295 - RNA, 57 nt, Homo sapiens
ggcagacacacaacccgacccgacgagcagcagacgacaggacggcagagccccaag

SEQ ID NO: 16296 - RNA, 80 nt, Homo sapiens
cgagaggaccgcacgccgccagccagcaggaaccaaagcggacagagagggcaccggaagaagcgagaagccagacgcac

SEQ ID NO: 16297 - RNA, 80 nt, Homo sapiens
ggaaagggcacagcgaacgccaccccaccccagagaacgagaggagcagcacagagaagaaagacagggcgaagaagaca

SEQ ID NO: 16298 - RNA, 69 nt, Homo sapiens
cccaaggaggcgacgaaggacacgcaacccccagcacagagacgaagagaccgcagaagcgaaaaggag

SEQ ID NO: 16299 - RNA, 75 nt, Homo sapiens
cgaaaagcagcaacgagaagaagccaccaaggagcaggaaaacgggacaagagaaaaaaagggcgggcgaacaaa

SEQ ID NO: 16300 - RNA, 80 nt, Homo sapiens
gcccagccccgagcagcgggaacaggggaacaccgcagcaggagacgcgccgaaaaagcaaagcaaaaaaaaaggaacag

SEQ ID NO: 16301 - RNA, 74 nt, Homo sapiens
ggagggggaaccccacccgaacggagaaaaacgaccaacaggacgaagcagccacacaacagaaccagaagcgg

SEQ ID NO: 16302 - RNA, 79 nt, Homo sapiens
aaagaggagagaacccaacacagggaaaggaaccgcggacaggcccacagagccaagccaaagagacaccaacagaagg

SEQ ID NO: 16303 - RNA, 76 nt, Homo sapiens
caaggagaaccaggggggagcaggcggagccaggggccgggggcaagaggagacaagacgggaaggaaaagaagca

SEQ ID NO: 16304 - RNA, 58 nt, Homo sapiens
gcgcggaggcgagggcggggcccagcaacgcgagcagcaccaggaccagagagcagcc

SEQ ID NO: 16305 - RNA, 67 nt, Homo sapiens
caccccgcgaaaggaggaggcacagaccgaacgacacaaccccaacggggaagaaaagaagagaggc

SEQ ID NO: 16306 - RNA, 76 nt, Homo sapiens
acagacaagaaaaaagcacgagagaccgcaggcgggacaagaaaagaaaaagcaacagaaaaacaaccggaagccg

SEQ ID NO: 16307 - RNA, 80 nt, Homo sapiens
ggagcgggccggcgcccgggggcgcagggaaggagggcgccgagcaacaaccgccgagcgcccaaaggggcaggacaaga

SEQ ID NO: 16308 - RNA, 88 nt, Homo sapiens
gcgcgggagcaacgggaggccggacccagcgagcgggcggcacgcacgcaggaaaccccccaggcaagaggcgcaggaccgggaagac

SEQ ID NO: 16309 - RNA, 65 nt, Homo sapiens
gcagagaaaacacccgagagcaccgccgagcggaccccaagggcagcggcaacagacaacgagaa

SEQ ID NO: 16310 - RNA, 78 nt, Homo sapiens
accgggagcggcccagaccagagcaggaagcccggggcccaggaggcagaggcagcccgacgacgcagggaagaacga

SEQ ID NO: 16311 - RNA, 79 nt, Homo sapiens
gacccccacagcccaggccggggaaccggaaccgaaaggagagcacacagcgggcagcccaccgggacaccgacccaag

SEQ ID NO: 16312 - RNA, 85 nt, Homo sapiens
ggaacggacgggaggaggaaaacacagcagcagcagcaaacaaccagcagggacacagcaggacaagaacgacagaaagagcagg

SEQ ID NO: 16313 - RNA, 81 nt, Homo sapiens
aaagaaaaggaagaagagcagggcagagacccaggagcagaagagcgaaaaccagagacagcaggaaaagaaggaggccag

SEQ ID NO: 16314 - RNA, 77 nt, Homo sapiens
gcagccgagaagagcccgacgccgccgcccaggcccgaagcgcggacgcggacggagcagggccgagagccagggga

SEQ ID NO: 16315 - RNA, 76 nt, Homo sapiens
acgccaggagcccgacccccggaccaagacgacccacgaggcacacccccgcagagcgcccacaaacgggaaccag

SEQ ID NO: 16316 - RNA, 82 nt, Homo sapiens
cgcaaggacggcccgacaccacaaccccgccggccaacgcaaagacgccacccagagcagccgaacgccaaagaaaccagca

SEQ ID NO: 16317 - RNA, 54 nt, Homo sapiens
ccagcagcccacggccagcccaagaggggccagcagaaaccaggcaacccagcc

SEQ ID NO: 16318 - RNA, 78 nt, Homo sapiens
ggcgcggcgcgcggaccccgccgagccagcgccggccgcgcgccgcgcccgcgccacagggaggcggcgccggccccg

SEQ ID NO: 16319 - RNA, 75 nt, Homo sapiens
ccaagagaaaggagccccccaagggcggagaacggaaaagcaccaggaagcagagaggaccgcagaagggaagga

SEQ ID NO: 16320 - RNA, 80 nt, Homo sapiens
gccgggggacgggcccacacagcggccgggcgggcccagcgagagccagccggaggacccagcagcaggccacccaggcc

SEQ ID NO: 16321 - RNA, 73 nt, Homo sapiens
ggacgcaccacgaggggacaacgacggacgggacgaggaacgggcgagaccagcggcagaacgagaagcgcaa

SEQ ID NO: 16322 - RNA, 58 nt, Homo sapiens
agaaggacgacgccggcgcgaacaaaaaaggggaaagaaaaagagcccaccaaaagga

SEQ ID NO: 16323 - RNA, 82 nt, Homo sapiens
ggaaagacaccacacagcgcagcgggaccacgccggagccgaggacacccgcgcacagaggccgggaagaaaacgcagcgga

SEQ ID NO: 16324 - RNA, 71 nt, Homo sapiens
cacagaggaggcgagaagccaaggccaggggcaaacagaaagccccacgaagagagaagcgcggaccaaag

SEQ ID NO: 16325 - RNA, 36 nt, Homo sapiens
gagcacgaccgccagaagcaccaacaagacgcaaaa

SEQ ID NO: 16326 - RNA, 60 nt, Homo sapiens
cgccgccgcccggacaccgcccgcggggcaagaacggaagcacgggcggaggaaagcaca

SEQ ID NO: 16327 - RNA, 83 nt, Homo sapiens
gaagggcaggacgagggcggcgcgggagcagcacccacagccaaggcgggagccacgacgggagagaagcgccggccggaaag

SEQ ID NO: 16328 - RNA, 63 nt, Homo sapiens
gcgcagcggcacgcacgcgaagacagcggcaggcgccacgggacacggaaccaggaggagcgg

SEQ ID NO: 16329 - RNA, 49 nt, Homo sapiens
ccacgaaagcagcaacagcaaaggccagcaccacaaagagcaacgagaa

SEQ ID NO: 16330 - RNA, 83 nt, Homo sapiens
ccgggcccaacggcgggccccggcgaggcagcgcggccgcagcagcccggccaaaaagcagaaaaacaaaccagcccaagaag

SEQ ID NO: 16331 - RNA, 84 nt, Homo sapiens
gacggcaccacgggacacagacgacgccaggacggcaaggcggcacggggaaggaccacaccacggagccaggaggaagccagg

SEQ ID NO: 16332 - RNA, 70 nt, Homo sapiens
cacagaaccgagaaacgggaccacaaaggagacacgaggaaggggacaagacggacagaaacgaacagcg

SEQ ID NO: 16333 - RNA, 73 nt, Homo sapiens
gaggaggagggaacacacaggccgccggaacaagaaaagaaggaggccagcgggacacacaaagaaagacgaa

SEQ ID NO: 16334 - RNA, 51 nt, Homo sapiens
gcaccgccaacccccgagcaagacgggacaggcaggagaacccaacacccc

SEQ ID NO: 16335 - RNA, 80 nt, Homo sapiens
gcgcggacggcgcacgacgagacggcagcgcacgggacaaggagacaaagccgccacccacgcgcagcgaagcaggcgaa

SEQ ID NO: 16336 - RNA, 73 nt, Homo sapiens
gggccaagagcagaccgggcgaagggagaggacagcagggaggcgggacgcggggcaaccgcccgccagcccc

SEQ ID NO: 16337 - RNA, 82 nt, Homo sapiens
ggccccacccgggaggggggagcggcgggaggccaccgccagggaaagggagcagcaccggccacacccacagcacgaccgg

SEQ ID NO: 16338 - RNA, 71 nt, Homo sapiens
gccggaggcggccgcaccgggcgggcggccgagccgggaagccaaccagggcgagacacagcacgccgcag

SEQ ID NO: 16339 - RNA, 62 nt, Homo sapiens
gagacccagcggcgccgcggagggaccccaacaagggaggcgaggacggacaaaaggaaacg

SEQ ID NO: 16340 - RNA, 61 nt, Homo sapiens
gagaacggcacacgcgagcgggaacgcaccccacaaccagcgcaaccagcccggccaccag

SEQ ID NO: 16341 - RNA, 73 nt, Homo sapiens
aacacagggcaaaaaagaaacgcaagcacaaaaggaggaaggacgcgcgcaggcgcagagaagcaaaagaaga

SEQ ID NO: 16342 - RNA, 77 nt, Homo sapiens
cagcagaagagaagaagaagcaggagaacgaaacggagccagagaaggcagaaggccccccccccggaggcagccgg

SEQ ID NO: 16343 - RNA, 74 nt, Homo sapiens
acgacgaccaggaagaacggagcacgacagaaacacagccgcagcgggaacaagccaagacgagggaacaaagc

SEQ ID NO: 16344 - RNA, 51 nt, Homo sapiens
caacagaaggacggaaagggcaaaaaggacagcagaccacagcccggcagg

SEQ ID NO: 16345 - RNA, 82 nt, Homo sapiens
gacccaccaacaagggcccccagggcccggccgaagcaagaacaaggcgccggaccgaaggcgcgaccacgacgagaagcgg

SEQ ID NO: 16346 - RNA, 87 nt, Homo sapiens
gcggcggggagcggcgaagccgcgggcgagaacaccccaccagaccacccagcaagcccacaaaaaaggcacaagcagggacagccc

SEQ ID NO: 16347 - RNA, 77 nt, Homo sapiens
aacggcaacaaagaaaaaccggcccggccacccgggagagccgcggcgcaaggacagacccacgaagcaagcagcgg

SEQ ID NO: 16348 - RNA, 75 nt, Homo sapiens
gccgacagacccagcagaaggaaaacgaaggaaggaggacccgaggagagagaagacggaaaggaaacacggaag

SEQ ID NO: 16349 - RNA, 66 nt, Homo sapiens
aaggcgccccgcgccagagcgagaaccagccaaaacacacgaacagggaacaagaaacaccgaaga

SEQ ID NO: 16350 - RNA, 78 nt, Homo sapiens
aaaaaaaaccggagaggaagagaagagggaccggagggccggaagcgggccgggacaacgggcaggagccggaagggc

SEQ ID NO: 16351 - RNA, 73 nt, Homo sapiens
ggccaaggggcggcaaaaaggcaagcggccgaaaacaggacagaacggagaccccaacggcaaaaggggccaa

SEQ ID NO: 16352 - RNA, 72 nt, Homo sapiens
ccaaacggaaggaacggaggcggcccccacagagagcacacaaacaaagcgaaaccacggaagaaaagggca

SEQ ID NO: 16353 - RNA, 85 nt, Homo sapiens
gccaccccgaagagcacaaccgggcgcccggacgggggcaagcggaagggagcccaagaggaccagacccacagcggggccgggc

SEQ ID NO: 16354 - RNA, 41 nt, Homo sapiens
caccccagcccagaaaaaggaaaccccccaggcaagaggcg

SEQ ID NO: 16355 - RNA, 74 nt, Homo sapiens
ccgggagcggcggggccagggaccgagcgcggacgagccaagcaggcacaaccgagcacagaaggcggccccgg

SEQ ID NO: 16356 - RNA, 67 nt, Homo sapiens
acacccgaagcaagaagaaaggacacaccaagggaaacgaagaaggcgcggaggcggaggccaccca

SEQ ID NO: 16357 - RNA, 50 nt, Homo sapiens
cgcagggcgcccccgaaagcgcgcgcccggcccaggagaggacacccgac

SEQ ID NO: 16358 - RNA, 80 nt, Homo sapiens
gccgcccccggcccgaccgccgcccgacgccacgcccggcccggccgcgcccgcggaaccagaccagacaccgaaaacga

SEQ ID NO: 16359 - RNA, 79 nt, Homo sapiens
gccaagagagaggggaccaccaccaggaaagaccacagcaagaccacgcccccagccgggggaccaggccgaacgaccc

SEQ ID NO: 16360 - RNA, 82 nt, Homo sapiens
agggaaaagaagcccaaagaaaggcaagagcgaaggagaaaggcaacaaggcccgagcggggaacacgagagccacaggcac

SEQ ID NO: 16361 - RNA, 54 nt, Homo sapiens
acagagccgggaagacgccgaagggcgggagggggacagccgcgccgcgcgccc

SEQ ID NO: 16362 - RNA, 79 nt, Homo sapiens
gggcgcagaccaaagccgacgagccccggagcaggcgacagaccaaacggacccggagcaggggcgccaggaaaggagg

SEQ ID NO: 16363 - RNA, 72 nt, Homo sapiens
ggggcgcccggcgccggccgagaaggcagaggcgaggacagcaccacgagagacgagaacgacggggacaca

SEQ ID NO: 16364 - RNA, 82 nt, Homo sapiens
cagaagccccaaggccagcgccagcgcagccccggcgcccaccgcccaccgagccggccacgcgcgcaaaaggacacgggaa

SEQ ID NO: 16365 - RNA, 85 nt, Homo sapiens
cgcccacccgcgccgggaccaggccacgaccagggcccggcggggacgagcaggaagcgcggcgagcggagggagaagaccaaag

SEQ ID NO: 16366 - RNA, 71 nt, Homo sapiens
cgaggacgaaggcgagccaggagagacggcgaaggccagcgaggccccgggggccagcggcaccaaggccc

SEQ ID NO: 16367 - RNA, 71 nt, Homo sapiens
caacccccaaaggaaccgagaagcacaaagaaacagagaagcgagaaagagaagaagaacacaccagcccc

SEQ ID NO: 16368 - RNA, 74 nt, Homo sapiens
aaccacagacacgagggaggacagcaaaaaccagggcccacagaggagaagggcacggcagaacgacgagaccc

SEQ ID NO: 16369 - RNA, 82 nt, Homo sapiens
ggaaccgccccgcagcagccgacccggcacaacaaaaaccccgcagcgccccaccccagagacccggaccaagcacacagga

SEQ ID NO: 16370 - RNA, 78 nt, Homo sapiens
ggacggccgccaccgaggaagggaccacagaccagcacgccggcgccacgaaccgagcgacaggacgggccgagaggc

SEQ ID NO: 16371 - RNA, 79 nt, Homo sapiens
ggccccggggagcagggacccgaaccgggcccaccagccgggccacgaagccccccccagaacgccaggaagaacgagc

SEQ ID NO: 16372 - RNA, 86 nt, Homo sapiens
cgcaaaccgacccacgagccggagagccgcagggaggcggagggcagggccaggaggaacagagacagaggcccggggaaggcgcg

SEQ ID NO: 16373 - RNA, 73 nt, Homo sapiens
ccagacggcacgcaggagaagacagcagaccacagcccggcaggcccaaaaacccaaagggacagaagcaccc

SEQ ID NO: 16374 - RNA, 92 nt, Homo sapiens
gacaacgacaccaccgcagcgacgagcagggcccacgagacgcgaacaaacgccgcgccgccagaagaacagaccgggagaccagccacgca

SEQ ID NO: 16375 - RNA, 84 nt, Homo sapiens
gccgggacggccgccgcgccaacaccaagaccgacccaagcgggggagcgggaggagccagagcacaccgcaccacggccacag

SEQ ID NO: 16376 - RNA, 80 nt, Homo sapiens
cgagacggggccggagccaagccccccaggagaaggggcgggccccggccagggcccaggcagccggggcggaaccccca

SEQ ID NO: 16377 - RNA, 79 nt, Homo sapiens
cgagaagggagacgacgcgcgggccgcgagcggggcgacccgaggcccacgacccggagaagccaccgaagggcgaacg

SEQ ID NO: 16378 - RNA, 76 nt, Homo sapiens
caggaaccgaaaagcccaagcgcccccagaccacaaccacaggacacacagcaacgaagcaggggaggagggaaga

SEQ ID NO: 16379 - RNA, 70 nt, Homo sapiens
acaccaggccaagcacccacagcaaagagagccccaggagaaggggaccggcagacaagcacagaagcca

SEQ ID NO: 16380 - RNA, 75 nt, Homo sapiens
gacggcagcgcggcggggcagacacaaggagagccaagaacccaggaggagggaaagccggagccggcagaaagc

SEQ ID NO: 16381 - RNA, 82 nt, Homo sapiens
caggcagcaaccagagccgcgggggggagacgacgaacaggcagcggcacccaccagccacccacacagaaagccagggccg

SEQ ID NO: 16382 - RNA, 68 nt, Homo sapiens
cgaccgcaacagaacggacccgaacgggccccaagaagacaaagacacacgacacacaaggggcagga

SEQ ID NO: 16383 - RNA, 83 nt, Homo sapiens
ccagagggggccgccgcggcagcaagaacagagagagaggggacagacgagagaacgagacggagcccaacaagcagccagga

SEQ ID NO: 16384 - RNA, 54 nt, Homo sapiens
gcagaagaggagccaggaaggaggcacggcacaaaggcccgacgccggcgaaag

SEQ ID NO: 16385 - RNA, 70 nt, Homo sapiens
gacccagaaaaaccacaggcaggaggcaaaggcaaagccccaaggcagcgaaaccaaagaagaaggcaga

SEQ ID NO: 16386 - RNA, 89 nt, Homo sapiens
ccacggcgcgcccgcgcacagagcaacaaccgggccacaagagaaagagcaccagagcaccaaacaggggggaaggaagacaaacagag

SEQ ID NO: 16387 - RNA, 53 nt, Homo sapiens
gcgcagcccgggcgcgcccgcacgcgacgcccaaggggcccagaacagaacgc

SEQ ID NO: 16388 - RNA, 69 nt, Homo sapiens
cggggacccccgacgccaggcagcgcccccaaacgaaggagcgggccggaggaaaaggaaaaaacagaa

SEQ ID NO: 16389 - RNA, 82 nt, Homo sapiens
cgagaaagaaggaggaggggggaggcgaacagccggcgcccggacgcgaggggggagaggaaagcgaacgcgaaaagaaaag

SEQ ID NO: 16390 - RNA, 58 nt, Homo sapiens
cacaccgcaccaagcgcacgcacacgaccgaagcccggaggcgcccgaaggccaaaag

SEQ ID NO: 16391 - RNA, 72 nt, Homo sapiens
cgacccaaaccggagcaacaaaggaaagcgaaagaggcacgcagacagaccggaagacggggccgcagcgag

SEQ ID NO: 16392 - RNA, 73 nt, Homo sapiens
acacaagggagccggggcccccagcaagaacgggaacaaaaccggcaggcacggggacacaaggccacgcggc

SEQ ID NO: 16393 - RNA, 68 nt, Homo sapiens
gacggggggaggagagaaagggcaacccacgagagaacagagagaggaacaggacggaaaaggcagag

SEQ ID NO: 16394 - RNA, 74 nt, Homo sapiens
acgggcccggagagcccgaacggggcaaaaaggcggcaggccgcggaccaacccccagaccggcagcacaccac

SEQ ID NO: 16395 - RNA, 82 nt, Homo sapiens
ccgcacagaagaccacagaggagaggccacagccacaaccaggacggcacagcacccccgaggaggagagaaagaaagccag

SEQ ID NO: 16396 - RNA, 82 nt, Homo sapiens
ggacccacggagccggcagcccagcacccgaaaaaaccgggaagaccgacggagccccagcagaagaccagaggcgggcccc

SEQ ID NO: 16397 - RNA, 60 nt, Homo sapiens
gacacccgcggaaaagggcaagacacggcaggggagccgaccagaaccgaagcagccgga

SEQ ID NO: 16398 - RNA, 67 nt, Homo sapiens
gcgcagaagaaagccgcggaaccgcgacaccaagagggaagcacaggaagaaccgagcgccagaaca

SEQ ID NO: 16399 - RNA, 78 nt, Homo sapiens
gaagaaaaaagcgggaaaaccacagccgagagaaaaggggacgccacggacaccgggaccgaggcccgggcagcgggg

SEQ ID NO: 16400 - RNA, 68 nt, Homo sapiens
aaggaccaagaaccaggccccaaccagggaaagaaggagaagggacacagccccaaacggaagaagca

SEQ ID NO: 16401 - RNA, 68 nt, Homo sapiens
cgccaggcacaagacacgcggaggcagcagagccagcagcagcgcaggaagccgagacccccgcgagg

SEQ ID NO: 16402 - RNA, 51 nt, Homo sapiens
aaacgccacagcggggcgcgaacaggaaaaaaaagaaaacaagcgcacgaa

SEQ ID NO: 16403 - RNA, 82 nt, Homo sapiens
ccgcgccaccgggcacaccggaccccaaggcaaaaccgcagccaacaagcacaagcccggcggagcccaccaccacggcaag

SEQ ID NO: 16404 - RNA, 68 nt, Homo sapiens
aggcgaaaaagaaaaaagaggaagaagccagcgggcagccagagagaggggacggacgagagcaagaa

SEQ ID NO: 16405 - RNA, 71 nt, Homo sapiens
aaagaacaacaacgaggggcgcaaaacgccccggcgcacccgaccgagggacccgggccaacggccgccac

SEQ ID NO: 16406 - RNA, 77 nt, Homo sapiens
cagacgacacacgaaaccaccagaccaccaccacacgcacacaccaaagcggcggcccgacagagaccgacgaagag

SEQ ID NO: 16407 - RNA, 68 nt, Homo sapiens
acacggaccagcagaacagaaacaagcccggcgaccacaagaacaccaacaagagaaacggagagaag

SEQ ID NO: 16408 - RNA, 63 nt, Homo sapiens
ggcagacaaaagggccaaagaagggagagaggagaggaccggaaagacagaaagaagccaccc

SEQ ID NO: 16409 - RNA, 76 nt, Homo sapiens
gcgcgagcggggacaaagcgagaggagccaagcccaacgggacgggaaaacggccacagccaacgacgcagcagag

SEQ ID NO: 16410 - RNA, 39 nt, Homo sapiens
cacgagaggaccgcgaggaagagcccgaccaagcccaaa

SEQ ID NO: 16411 - RNA, 72 nt, Homo sapiens
agaagaagggaaaagagcagcgcaccagaacagcaaagagaaacaggcgccacccgcagcaccagcagcggg

SEQ ID NO: 16412 - RNA, 61 nt, Homo sapiens
gggaaacggcacaccaggcggcaggggcaaccagacgggccaagcaggcagcaggggaacc

SEQ ID NO: 16413 - RNA, 79 nt, Homo sapiens
ccaggaaggcaccacgaggacacgaaaaccacaggaccccgcgaggcaagacaagaccaggcacacgaccaagaagcag

SEQ ID NO: 16414 - RNA, 73 nt, Homo sapiens
aacaacacggcaagagccggcccggacaggggaaagaggcagagaagccaagacaggcaaaggcagcaggcag

SEQ ID NO: 16415 - RNA, 71 nt, Homo sapiens
agggggcacggggagcaaagaggaccacaccagggcggagaaagaaggcgacggcccagagggggggccaa

SEQ ID NO: 16416 - RNA, 73 nt, Homo sapiens
gagagaaggaggcaggccggggaccccccacagaggcaaaacagggagcggaacgagagcaaagaagcaccga

SEQ ID NO: 16417 - RNA, 53 nt, Homo sapiens
gacagcggggcccgcggaaaacagggaagcagagccccgggccgggaagggga

SEQ ID NO: 16418 - RNA, 80 nt, Homo sapiens
gggaagaggagaaggaggggacccccccagagaggacacccagcaggaagccaagagccgagcgaaggacaccacccacc

SEQ ID NO: 16419 - RNA, 67 nt, Homo sapiens
ccgcgcaccgacccgacgcgccggcccacgcgcggccaagcagagccccgagaggggcgcgcagaaa

SEQ ID NO: 16420 - RNA, 76 nt, Homo sapiens
gccacaggagagaccacggcaaccccccacgccagccaggagccccccacgccggcacgggcccggggaaaaggag

SEQ ID NO: 16421 - RNA, 84 nt, Homo sapiens
ggaccccgacgccgcgggcccggccccggacgcgggagccgggaaaccgaagaaggcagagaaggcaaacaggaggcgcgggac

SEQ ID NO: 16422 - RNA, 83 nt, Homo sapiens
caaaacaaaacgagagcaagaggaaagaaaaagaacagacgaaaggggcggaaaaaccagccgggacccccagaagaacaccg

SEQ ID NO: 16423 - RNA, 81 nt, Homo sapiens
gcaaggcgccaggccggaaccagccgcagcccgacgccaggcagcacaaccagacaggaacagcaagccaaagagcggcgg

SEQ ID NO: 16424 - RNA, 68 nt, Homo sapiens
ccggcagccgggaaggcccgaccaacagcagggcagaagagagaaaacgcggcacagagaagagcagg

SEQ ID NO: 16425 - RNA, 75 nt, Homo sapiens
accacccaaaccacgggccaaaaaagcaggagaacacgagcaaggaaaaaccagaagagaaaaaacaaaggggag

SEQ ID NO: 16426 - RNA, 75 nt, Homo sapiens
agaagaggaagaagaggaaagaaaaggagcagggaggccacacagaacagaaccagaaggggccaaggacaccgg

SEQ ID NO: 16427 - RNA, 62 nt, Homo sapiens
cagaaggagggagaccccaaaaagagagaaacgccgccggcagaggccagaacagagggcgg

SEQ ID NO: 16428 - RNA, 77 nt, Homo sapiens
cccagcgccgggcagaagcggagcggacggaggaggcacccgcaggagaggcaagagggagaagacagcgaccaggg

SEQ ID NO: 16429 - RNA, 81 nt, Homo sapiens
gacgcaaaaccgaaagagggcaagagaagaacagaagaaacaaaaggccaccgaagagaagaacgacagaacacggcaaaa

SEQ ID NO: 16430 - RNA, 41 nt, Homo sapiens
ggccaaggggcggcaaaaagggaaagaggcaaaaccgagaa

SEQ ID NO: 16431 - RNA, 74 nt, Homo sapiens
aaaaacaagaggacagacccaccgccaacagaccccgagaaaacagcacacagaggagggagaaaaagccaggc

SEQ ID NO: 16432 - RNA, 77 nt, Homo sapiens
accgggaccgggcgccacgcgggggcaagacgaagagaacacccccgaagacccaccggcccagaaagaccagcagc

SEQ ID NO: 16433 - RNA, 73 nt, Homo sapiens
aagacacaacagaaagagcagggagggggaagagaaaacgagagaagcaagggaaaaaagggaaaaagaaacc

SEQ ID NO: 16434 - RNA, 70 nt, Homo sapiens
gggggaaggagacaagggcacggacgagaggcacagaacagcaggaagcgaaagggggcagacagaagag

SEQ ID NO: 16435 - RNA, 60 nt, Homo sapiens
cagccagcccagacaggggccagccagggaaaacaagacaaagcaagcagaaagcgggga

SEQ ID NO: 16436 - RNA, 88 nt, Homo sapiens
cgaaaggaggaccagcgaaggacagcacaggccacgggcgcaggcggcacaccgggaaaaccacggccacccccagagcgccgggcgc

SEQ ID NO: 16437 - RNA, 80 nt, Homo sapiens
gaggacacaacaccgcggaggaggacaggaggagaaagcgggaacccacaacgaaggaaggaacagaggcacagcgacgc

SEQ ID NO: 16438 - RNA, 65 nt, Homo sapiens
cgcgccggggccgcgcggccccgcggagccagacccagccccgggccggcggggagacccacaac

SEQ ID NO: 16439 - RNA, 78 nt, Homo sapiens
aaacacggacacccgccgaaggagcccaggaagagcaaagccgagcgcagcacacggcggcggcgaagccaagacacg

SEQ ID NO: 16440 - RNA, 80 nt, Homo sapiens
ccccccacccaacgcgacaagcagaccggaagaccgacggaagaccacaccccgagggagcccaggacaccacgagaagc

SEQ ID NO: 16441 - RNA, 83 nt, Homo sapiens
gcgcgccgcgagcgagcccgcgccgcccgcacgcgcgaccaccgggcgcccgcgcccccggagcgcagccccccgagaagggg

SEQ ID NO: 16442 - RNA, 44 nt, Homo sapiens
cgcgccgcccggagccgcgcacacgcccccaaaacacaagagga

SEQ ID NO: 16443 - RNA, 77 nt, Homo sapiens
aaagagaggaacggggggagagaacccaaccagggggaaacacagaacgcagggacccgggcccgcaaagccacagc

SEQ ID NO: 16444 - RNA, 42 nt, Homo sapiens
cccagccggggcccagcgaacgccagcgccgccccaggcgga

SEQ ID NO: 16445 - RNA, 72 nt, Homo sapiens
aaagagacaggaaagagacccaagaaaaaccgaagacacaaaagcggacgaggagcccaaaagcaaagcagg

SEQ ID NO: 16446 - RNA, 56 nt, Homo sapiens
cgcaccaggaaacggacccagacaggcccacagaagccggcaaaccccgacggcag

SEQ ID NO: 16447 - RNA, 57 nt, Homo sapiens
ggaaaaagccgccacacgccaaaggaggggagagggccggcacagcaagaagagagg

SEQ ID NO: 16448 - RNA, 72 nt, Homo sapiens
caagagcgacaggaggagacaggcgagagaggaggacacgaccgccgaccgccgaagagggccacggggcgg

SEQ ID NO: 16449 - RNA, 85 nt, Homo sapiens
gacgacacgaaggaggaagaagagacgaagagacagcggagaagacgcgcccaggagaaaaacagaagggcagccaggggagcag

SEQ ID NO: 16450 - RNA, 80 nt, Homo sapiens
acagagaggacaggccaaacggaaagacgaaggggccccagagccaaggaggaaggggccggaacggccgcagagaaaac

SEQ ID NO: 16451 - RNA, 84 nt, Homo sapiens
aggcaaaaggcggcagacagaccaaaccggaccacccaaaaagccgaagacccccaagaccacagccagcaagcacacgcgcgc

SEQ ID NO: 16452 - RNA, 75 nt, Homo sapiens
agaaaaagaaaagacagccgccagaaccacaacccacagagggagcggcgacagacacgggaagcaagagaacgg

SEQ ID NO: 16453 - RNA, 66 nt, Homo sapiens
cgaagaagggaaacgaggaaggggagaaaaagagccggaccacaccggaagccacggcccaacgga

SEQ ID NO: 16454 - RNA, 88 nt, Homo sapiens
accacaggcagagagagaaacaggggagcaagggcaagagccacaaagggaccgagaagcgaagacaaggccgagcagggcccggcag

SEQ ID NO: 16455 - RNA, 68 nt, Homo sapiens
agacacagaaccacacgcccaagggcagcaagaaagggaaggaagcagaccccacgagcgaaagggaa

SEQ ID NO: 16456 - RNA, 74 nt, Homo sapiens
gaccacccaggaaggcaagaccgccaccagacgcaaacagcaaagcccagggacaggcccagggagggcacgac

SEQ ID NO: 16457 - RNA, 76 nt, Homo sapiens
gggaacgaagaagcgccccgacaccaggaaaacccagaaagcaagagagcgaaaaccccagcggaaacccagccaa

SEQ ID NO: 16458 - RNA, 69 nt, Homo sapiens
caaccggaggacacagccagggcggacgggaaagcagaaaggccaaccccgcggacgaacaacggggag

SEQ ID NO: 16459 - RNA, 67 nt, Homo sapiens
accccaggcggcagcacacagaagcgacgaagaagaagacagggaaacaagaagagggagaggcaaa

SEQ ID NO: 16460 - RNA, 76 nt, Homo sapiens
aggaccggccgaagacaccccccccccggaccagagaggggcaaggggagaaaccacagaaaggaaacaaaggaca

SEQ ID NO: 16461 - RNA, 34 nt, Homo sapiens
aaacagaagaacagcaaggggagaaaacaagagg

SEQ ID NO: 16462 - RNA, 79 nt, Homo sapiens
gagacccccgaaaacccgacgacaccagaaccacaagggaacaaagagcacccagagcaaaaagcaggacccaagaaga

SEQ ID NO: 16463 - RNA, 84 nt, Homo sapiens
gaaagaaaaaacagaaacagccaaccaagaacacacagcagggagccaggagaaagaggaagagcaacagccaaggcaagaaga

SEQ ID NO: 16464 - RNA, 83 nt, Homo sapiens
ggggaaggagcaggaagaggaccacagggaccccacccggcggaggaacaggagagcagaaacaccagaggccgcagcaagag

SEQ ID NO: 16465 - RNA, 115 nt, Homo sapiens
agaagacggcaggcggccgccgcgccaccaccgggcgccgaggggcgacgaaacaacagagagaaaaggaacagccgaagccaggggcaagcgaaaccacagaagaaaggaggaa

SEQ ID NO: 16466 - RNA, 64 nt, Homo sapiens
cggcacagcagagaaggagcagagaacgaccaagaggaggcccgcggcaggcggggccaggccc

SEQ ID NO: 16467 - RNA, 63 nt, Homo sapiens
gagcgggcccagagacgcggggacgggccggggcccccggaacgagaggaaaggcaagggcag

SEQ ID NO: 16468 - RNA, 79 nt, Homo sapiens
accggagcgcaaggcgccaaccccgaacggggggagacgccacggaacgcagcaccagcagacggaacaacgagagaaa

SEQ ID NO: 16469 - RNA, 68 nt, Homo sapiens
gggcgccgcaaaaggagaacggcaacgaaaagagacacgacgcaaacccccaagagaaacagcacgcg

SEQ ID NO: 16470 - RNA, 65 nt, Homo sapiens
ccccacgcacaggaacagaagaggaccggcagaaaagccacacacagaagagaaccccacccaag

SEQ ID NO: 16471 - RNA, 52 nt, Homo sapiens
accccaggggcagcgccccccaagacaggacacagcaggggccagacaacca

SEQ ID NO: 16472 - RNA, 68 nt, Homo sapiens
gggaccccgcaaaagaaaacgggccgcagccccaccccaaccccggaggaggagaccaaggaccggac

SEQ ID NO: 16473 - RNA, 53 nt, Homo sapiens
aaacggaaaggaaacacaacaccaagcccacaagggggggagccgcacgaccc

SEQ ID NO: 16474 - RNA, 80 nt, Homo sapiens
cccgacgacggaccgcacacggagaaggaagcgcccgggaggagcggggacacgaggaccccccaaaggccccaaccaca

SEQ ID NO: 16475 - RNA, 73 nt, Homo sapiens
cgcaaaccaagaaacagagagcaagcacgcagaagacgagaaggggccaaaagcgaacagagaaacaggaaag

SEQ ID NO: 16476 - RNA, 74 nt, Homo sapiens
gcggagaaacagccaaaggggacacccggaggcggcgcagcagcaccgaggcagagccaccccacccgagggca

SEQ ID NO: 16477 - RNA, 84 nt, Homo sapiens
gaggaggcaggagcccgaggaggagccaaggggcagcagcggaagcggaggaggcagagagggcagcgcccgagggcggagcgc

SEQ ID NO: 16478 - RNA, 74 nt, Homo sapiens
ggaaacacaggggacaacaagcgggaaagagcagagccaacaaccaaacacagagacagaaaaaaagcggcaga

SEQ ID NO: 16479 - RNA, 54 nt, Homo sapiens
acggaacccaccccacagaggaaggggaagacacagaaaacaccagaccgaaag

SEQ ID NO: 16480 - RNA, 90 nt, Homo sapiens
gcgcgccgcgcacccgcgccagcaccacgcccgcgccgcgccgccgccaccagcccaagagaaagaagaagcccaggacccaggaaggag

SEQ ID NO: 16481 - RNA, 75 nt, Homo sapiens
gaaggcgagaccagagacgagaaggacccaaagacaggaccacgcaccagcagagaaggaaagcaaaccgaagca

SEQ ID NO: 16482 - RNA, 75 nt, Homo sapiens
ccagaaggggagaaggcaggcaccacaaaaaggacagcccacaaaccggaggacacccccagacgcagaagggca

SEQ ID NO: 16483 - RNA, 75 nt, Homo sapiens
ggcggccggaggagcggcgcgcgcgcgcgcgcggggccccgcaggcaccacaaggccacaaaggaggggaggccc

SEQ ID NO: 16484 - RNA, 77 nt, Homo sapiens
ccacaaagccggaaagcaggggacgcacaccgagacgaacacagaacagcacgaccagaggggaagccaagcaaacg

SEQ ID NO: 16485 - RNA, 95 nt, Homo sapiens
ggaaccacgcgggggcgaggcgaggcgaggcggccgccggcgcccgggacgcggaccgccagcccagcacggccccacccaagcccaagccgccc

SEQ ID NO: 16486 - RNA, 74 nt, Homo sapiens
agcggaccccgaccccgaggcgagacggaaagaggcgcccgcccaggaggacagcgcgggagcgggagggggcc

SEQ ID NO: 16487 - RNA, 81 nt, Homo sapiens
accgcaggcaaaagaacccgcccacacggccagggcaggagagcagagcggcaagaagcacaccagacaagcaggacacaa

SEQ ID NO: 16488 - RNA, 82 nt, Homo sapiens
cccacgacggagaggagcaaggcggaacggagagaaagccaccaagcgggacggcaccagagggacaccaaggcagccagcg

SEQ ID NO: 16489 - RNA, 77 nt, Homo sapiens
gcgcgcccggccaagaggcaaaggggaggacgcagcaaaccaccagaaggcaaaagcagaccggaaaacccaccggc

SEQ ID NO: 16490 - RNA, 73 nt, Homo sapiens
agggaaccggcagggcaagcggcgacacacgacgggggggaccacacgccaaaggcacggggcaagccacagg

SEQ ID NO: 16491 - RNA, 84 nt, Homo sapiens
gcagccgggggaagaaggcacagaaagcaccagaggaagaagcccaccagaggcgaggggaggaggaagcgagcgaaaagaggc

SEQ ID NO: 16492 - RNA, 68 nt, Homo sapiens
cccagaaccagcaaccccccacgagaaccggaagacggaagacgagcgacacacaaaaggcagaaacg

SEQ ID NO: 16493 - RNA, 76 nt, Homo sapiens
gccgcggggcgcgcggcgccggcggcgcgcgacccccgcgcaggaaacacagacccagaccagaagacgaaacccg

SEQ ID NO: 16494 - RNA, 77 nt, Homo sapiens
cgaaggcaccagaacacagcaggagcagaaacccagaggagccgcggaggggcagccgggaggagggccacgacacc

SEQ ID NO: 16495 - RNA, 77 nt, Homo sapiens
gggggcgggcagccgaggccgggaaccagcgagggagcgaaaacgccacaacagagggggccagggcggggaagaca

SEQ ID NO: 16496 - RNA, 80 nt, Homo sapiens
cacgacggcaggaaaggaggccaggacggagagggagaagcggacaaccagagagcaagcagcccagacagacgagagcg

SEQ ID NO: 16497 - RNA, 75 nt, Homo sapiens
aaaaccggcaaccgcccaccgcacgaccagccagcaaccgcggaaggaccgaggggccccagacacgacgccccc

SEQ ID NO: 16498 - RNA, 74 nt, Homo sapiens
cggacacaaagcacccaggaggccagaacggaagaccaaccagaagacacacaaagcaggggaagagacagagc

SEQ ID NO: 16499 - RNA, 79 nt, Homo sapiens
gcccagagcccgacccgcgcgggccgagagccgccccgaacgggggcccccccgccggacaggaagaagagagggcgaa

SEQ ID NO: 16500 - RNA, 70 nt, Homo sapiens
aaaaagagcccaaaaccggcgcccagagcacggccccaaaggcgccgcgacccaaccgaggaagcaccag

SEQ ID NO: 16501 - RNA, 81 nt, Homo sapiens
cggcagcggagggacggcagccgcgcgagaaggagggggcagagcacggcaggcagaaggggccaacccgggggaacgcac

SEQ ID NO: 16502 - RNA, 75 nt, Homo sapiens
aaaaacaaagacgagcaggacaaacgaacacagaaccagaggaccagaacaaaccagagcccagggccaccaaag

SEQ ID NO: 16503 - RNA, 79 nt, Homo sapiens
ccagcccagcgaccagcagcagccagagcggagccacacaccgagggagagaagaacaaggggagccaagaacaaagca

SEQ ID NO: 16504 - RNA, 80 nt, Homo sapiens
ggcgaccggaagaggagaaggcggaggaggagcggggcagcaggacaggccccccaacgaggaccagacggacagcacga

SEQ ID NO: 16505 - RNA, 82 nt, Homo sapiens
aaaaggcggacgggaaggcgggagacgagaagccgaaaagcgcagcgagcggagccgccggaggcgggacgggagaccggca

SEQ ID NO: 16506 - RNA, 77 nt, Homo sapiens
gagcaagacaccggacaccgagggcccccaaaagccccagcacaagagaaaacagacagcagaacgaaaagcccaga

SEQ ID NO: 16507 - RNA, 58 nt, Homo sapiens
agaacagaaggaacgcagaaacacaggaccccccccaacgaggcacaggagacgagga

SEQ ID NO: 16508 - RNA, 82 nt, Homo sapiens
gcgggcgaagcacgcacaccgggcagggccgagaggacgccagcggcgcgcaggacagaacagagaaggggaagacgaccgc

SEQ ID NO: 16509 - RNA, 79 nt, Homo sapiens
gagagcgaggagacggcgaccgacaacgagacccaaagacaggaccacgcaccagcagagaaggaaagcaaaccgaagc

SEQ ID NO: 16510 - RNA, 80 nt, Homo sapiens
aagacccacccaagcacacccaaggacagcagcccaccaagcacagacaagcaaggaaaagcgggagacaagaacaaaac

SEQ ID NO: 16511 - RNA, 82 nt, Homo sapiens
ccggaggccgccgacgaccgaggccgaagaaggagcacgcccccgcccccggagcgcccagggcgccgcccaaggcaggagc

SEQ ID NO: 16512 - RNA, 58 nt, Homo sapiens
aacaaaaaggaaaggagacaagcagagacgaaccaggcaaaggacccaaagacaggac

SEQ ID NO: 16513 - RNA, 71 nt, Homo sapiens
gggaaacagacgaaaacccggcgccgagccggaggagccaccaacagaagcaggagccaggaaaccaaaac

SEQ ID NO: 16514 - RNA, 76 nt, Homo sapiens
ggagcgggcgagccggaaaaacgcgaagaaggagaagagggaccaccgaacagcaaccagcaaacccaagaggaga

SEQ ID NO: 16515 - RNA, 89 nt, Homo sapiens
gaagcacaaccacagcaagagcaccggcgaccgcaccacaagggacgagaccaaacggaagagacgccagaaggagacacacccgaaga

SEQ ID NO: 16516 - RNA, 72 nt, Homo sapiens
ggccagcaagacagaaccgccaaagcgcggaaaaccagagacccagacacgcgaaggaacgaaaggccaaaa

SEQ ID NO: 16517 - RNA, 68 nt, Homo sapiens
cggcgaagcggagaacgaccaagaggacaccggagaggaagccgaaggcagacacgagggaggcaacc

SEQ ID NO: 16518 - RNA, 76 nt, Homo sapiens
gcagacacgaagccagcaaggcaagaaaaggagcagcgacagggaaaggccaagcagagagaagcgaggaccaacg

SEQ ID NO: 16519 - RNA, 79 nt, Homo sapiens
aggaaaccgacgagaggacccagcccaagaacaccagaagcagccgaaacgaaccaagaaccgaaggaaccaagaggaa

SEQ ID NO: 16520 - RNA, 79 nt, Homo sapiens
ccgaaggcgcaaacgacaccacccgaccggacgaagaaggcgaccgcgaaaaggaagccaacaaggacacgaaagacac

SEQ ID NO: 16521 - RNA, 59 nt, Homo sapiens
gagggagacgaaggagacagcaggggaccccgaaaaagaccaggaagggaaaacccaga

SEQ ID NO: 16522 - RNA, 82 nt, Homo sapiens
ccggcgagcccccacagggagaaaccccacccccaagaaccaacccccaaaggcgggacagaaaaagccgagagaagaacag

SEQ ID NO: 16523 - RNA, 73 nt, Homo sapiens
acgggcggcccagcgggcgagacggaggagaagggggggccacagaacacgcaccgcagacaacaagcagacc

SEQ ID NO: 16524 - RNA, 73 nt, Homo sapiens
gacaacacacgggacgcggccaaaggggagccagggcaagaacgcgcgcgaggagagggaaagccgaagaccc

SEQ ID NO: 16525 - RNA, 68 nt, Homo sapiens
cgggaaagcccccgcagccggcagacaaagacagcgcccaaaaccgccgcccagcagcaagacggcgg

SEQ ID NO: 16526 - RNA, 58 nt, Homo sapiens
gcagcagggaaggaacgcaaaacacgggaaaagagcaggagaaagacagcaaagaaaa

SEQ ID NO: 16527 - RNA, 79 nt, Homo sapiens
ccacaaaagagcagaggaggaacaccaggcacaaggaaacaaagagccccgggaaaagaaaaaaaacgccccaaacggg

SEQ ID NO: 16528 - RNA, 56 nt, Homo sapiens
gaaaagagagagccaaggaacgaccaggcacaggaccagggcccgggccacagcgg

SEQ ID NO: 16529 - RNA, 73 nt, Homo sapiens
cgaacgcgcacgccggcaggagacagggcggcaggcccaggggaggcaggagcagaagccccgaacccaaacc

SEQ ID NO: 16530 - RNA, 70 nt, Homo sapiens
ccagcccccgagggcgggacacagaacgcagacccccaaaggagacagaccccacagagaaacacgagca

SEQ ID NO: 16531 - RNA, 73 nt, Homo sapiens
cacgcggaaaaacccaacagccaaggacagaggaccaaagcggaccagagacagagacgggacaccagggcca

SEQ ID NO: 16532 - RNA, 68 nt, Homo sapiens
ggcgccagacggaaacagcaggagagagcacccaggacgaagcgggggcccagcgcaagggccacacg

SEQ ID NO: 16533 - RNA, 82 nt, Homo sapiens
ccgaaaagaaaacgaacaaagggaaaaggagaagaccggcgaaagagaaaccaagaaaaaagagacaccagaagaagacaaa

SEQ ID NO: 16534 - RNA, 60 nt, Homo sapiens
aagacggcagccggcaggagagcgacaaaccaaggagggagccagggagaacaaggaacg

SEQ ID NO: 16535 - RNA, 79 nt, Homo sapiens
gaaacgcaaggacccacacgggagcggggggggcccggaaccgagccccgacaggcagacgagcaagggcagacggggg

SEQ ID NO: 16536 - RNA, 82 nt, Homo sapiens
cgcgaccgcacgcccccgcccccgaggccaggaacgggccaggaaggaaacgggagaaccggaagcccaggccggccaacaa

SEQ ID NO: 16537 - RNA, 69 nt, Homo sapiens
gagcagcagagcagggagacggaggaggaggagaagaagagagagaacacaaggaacgaaaggaaggga

SEQ ID NO: 16538 - RNA, 76 nt, Homo sapiens
gccaaaacaccagaaccaaccggcagacgagaccggagaaggaaagacaagccgagagagggaggcccgaggaaga

SEQ ID NO: 16539 - RNA, 79 nt, Homo sapiens
gaagccgggccggccgcgcgacgggggacagaacggcaccgacgagacggaggcccagccgcgggggcgcgggagggga

SEQ ID NO: 16540 - RNA, 73 nt, Homo sapiens
caggcagccaccgcgcgcccacagcccacagccccacagcaccaggacaaaagaagggcagcacaaaggaaag

SEQ ID NO: 16541 - RNA, 115 nt, Homo sapiens
caccggcggggaggagaccaggcgacaccgcgacaccccaacaaacaccagcgcgggcggcccacgcccgcgacgagggaaggacagagccgcggacggccgcgggaggccccgg

SEQ ID NO: 16542 - RNA, 73 nt, Homo sapiens
cagggaacccaggacaggccccagacgggaggaacggcgccggggagcgcacgcagggagagcggcccacggg

SEQ ID NO: 16543 - RNA, 63 nt, Homo sapiens
cggacaaggcacccccacccgcgagccggcgccgaaccagcacaggagcaagaggaaaggccg

SEQ ID NO: 16544 - RNA, 83 nt, Homo sapiens
ggaagggcaggcaagacccaccccgggaagaaagcaaacacaccaggacaaaagaagggcagcacaaaggaaagccccaaacc

SEQ ID NO: 16545 - RNA, 80 nt, Homo sapiens
gccgaggggcgcagcagggcggcgccccacgccagcgccgggggggggcccgaaggaaacggggacagaagaacgaagaa

SEQ ID NO: 16546 - RNA, 55 nt, Homo sapiens
acggaaacgaggaaaccgggaaagccaccgaaaagcaccaggaagaagaggcgga

SEQ ID NO: 16547 - RNA, 79 nt, Homo sapiens
caccacaaagcgcgcaacgccaacccaggcgagaggcagccaaacgggccggcaggacaggagacagagcacaccggaa

SEQ ID NO: 16548 - RNA, 99 nt, Homo sapiens
gcggggcagaccgcggggacgcgggcggcgcggccgcgccagacagggccgcaccgacgagaggaagcggccaaggcaacagacaagaggaaaaaaaaa

SEQ ID NO: 16549 - RNA, 97 nt, Homo sapiens
gcggggcggagcggggacagcggccggcaacccgccaggcaggccccccggagcggccccgccgcgacacaaggggggcccccggagagacagaacc

SEQ ID NO: 16550 - RNA, 56 nt, Homo sapiens
cggaaggggaaagccggagccggccagagacaggcacaaaagacccgaagccccac

SEQ ID NO: 16551 - RNA, 85 nt, Homo sapiens
agaagccaccacaaaagcgaaagggcacaccacagcaccgaacgaccggagcgagcacagaggacacaccccacacagcaagagg

SEQ ID NO: 16552 - RNA, 63 nt, Homo sapiens
ggcagaacgaggggaggaaagcagcgcccaaacccaaaagaggagagaagaccaagaaaaaaa

SEQ ID NO: 16553 - RNA, 71 nt, Homo sapiens
caggcagggcagaagaaaaggccggagcgcgaagacgcagggaaagcggcacacgaaaggggcacggcagg

SEQ ID NO: 16554 - RNA, 71 nt, Homo sapiens
cggacaggcacagacaaccagggcagaaccccagagagggaggagaaggaccgagaggacccagaggaaca

SEQ ID NO: 16555 - RNA, 75 nt, Homo sapiens
agaaccaaaggcaggacagccagcagggcccgggggcgaaaaacaccaccagggcaagggaaggggcagggccag

SEQ ID NO: 16556 - RNA, 54 nt, Homo sapiens
cacgacggcgcggggaagccaggagggcagaggccaagggagacgacgccgaaa

SEQ ID NO: 16557 - RNA, 74 nt, Homo sapiens
cgcgcccgcgcggcgcggggaccgcggcccggacaggaccaaagaagaaaccaagaaggacgcagggcaggaaa

SEQ ID NO: 16558 - RNA, 87 nt, Homo sapiens
ccagcagaccggcgcccagaaagagaagacagccaggaagggggaggaacacgaccggaagacaggccaaggagagcagcgcggaca

SEQ ID NO: 16559 - RNA, 72 nt, Homo sapiens
cgcagggcgcccccggcaaggacgcccacagaaaacacagagacacacagagcccaacacgcgcacggagca

SEQ ID NO: 16560 - RNA, 74 nt, Homo sapiens
aaagacagggacaggacagcgagcgaggacgaggaacggcgacggcccgccacgggccccgcagccgcgcccga

SEQ ID NO: 16561 - RNA, 77 nt, Homo sapiens
cgcgggccgggcgcagccgccgccccgccccagaagaagacgaccccgacgcaggccaggagccgcggacagaagcc

SEQ ID NO: 16562 - RNA, 105 nt, Homo sapiens
gccaaccggggcgcagggcaaggcagggagcccgacaacacagggcagcaccaggacaaaagaagggcagcacaaaggaaagccccaaaccccggaacgggaagc

SEQ ID NO: 16563 - RNA, 73 nt, Homo sapiens
acggaaggagcaagagacagggaacaccgcacgaaagcacacaaaccacaagaaagaagggcccccccgcacg

SEQ ID NO: 16564 - RNA, 74 nt, Homo sapiens
ccagccaagaggggccgccgggcgaggcacccagccgccgcccaggaccccgccccgagcggggaggccgcaag

SEQ ID NO: 16565 - RNA, 72 nt, Homo sapiens
acgcgcgagaagagagacgagagagaagaggagagagaagagaaaagaaggaggccagcgggacacacaaag

SEQ ID NO: 16566 - RNA, 81 nt, Homo sapiens
agccggggagcgcaggaaccagacgggggcgagcgagcaccgagcaacacacgcaggaggagcacggcgaaccgcaaacag

SEQ ID NO: 16567 - RNA, 70 nt, Homo sapiens
gcccccaagaagcgggacacagaccgggaacgggcgggcgagacagagaggccacggaaacccacccaga

SEQ ID NO: 16568 - RNA, 83 nt, Homo sapiens
agagaaggcagggcaaaccagaaagacgggaagaagcaagccagaaagaaaccacccaagaggacacaaggaaaaccgaaccc

SEQ ID NO: 16569 - RNA, 80 nt, Homo sapiens
agacaaagcagcgcccgcgccgggcccggaaagcgccgcccagcagccgcagaacccagcggggccgccccacccgaggc

SEQ ID NO: 16570 - RNA, 76 nt, Homo sapiens
acgggcgcgagacaaaagaaggacagaaaccgaagggagaagagccacaaccaggagaaccccgacaaaccgagaa

SEQ ID NO: 16571 - RNA, 53 nt, Homo sapiens
gccaaagaggaagcccaccacaaaaacgaaggcggcgggcgaggagcgagccg

SEQ ID NO: 16572 - RNA, 77 nt, Homo sapiens
ggaaacagcaagcgaagccgaaaaagcgcccgagacgggcccgccgaaaggggagaaaaacaggaaaagaaagacgc

SEQ ID NO: 16573 - RNA, 43 nt, Homo sapiens
cgcccagccgcacgcgacgacaggcagcacaaccgcccaaggg

SEQ ID NO: 16574 - RNA, 78 nt, Homo sapiens
agcagcccagcagcagccagaagcccagcgcaagccggcgccgccagcagccagaacaagccgggagaggaacagcgc

SEQ ID NO: 16575 - RNA, 57 nt, Homo sapiens
cagagagccagacggagaaaacacgagaggcgcccagaaaccagggccgggaagcac

SEQ ID NO: 16576 - RNA, 52 nt, Homo sapiens
ccccacccagccacaaccacacagaacagggcgcaacacccaagagacccag

SEQ ID NO: 16577 - RNA, 72 nt, Homo sapiens
agaaaccagcggaaagccaagagcgcacgggggaaacaagcgaaaaacaggcaaggggaacccagaccaggc

SEQ ID NO: 16578 - RNA, 77 nt, Homo sapiens
ccaccccgacccgcccaggccgcagaggggggaccccagggacagcgccagagaccaaagcccaggagaaacccacc

SEQ ID NO: 16579 - RNA, 87 nt, Homo sapiens
cgcgcccggcccggagcccccagcgcagcggccgcgacaagcagaccggaagaccgacggaagaccacaccccgagggagcccagga

SEQ ID NO: 16580 - RNA, 83 nt, Homo sapiens
agacgagcgaagcgcagaccacaagcaggaggaggacagaagcggaagcagcagcggaccaggggcacagggaccgccagggc

SEQ ID NO: 16581 - RNA, 82 nt, Homo sapiens
gcagacgcagccgagacaccagcccgaaacaccaccaagcaccggacacgcaaggaaacgagaggacggccaaaaccccagg

SEQ ID NO: 16582 - RNA, 62 nt, Homo sapiens
cccggccgccccggagggagacgcgcgccgaggagaacccagcgggaaggagggccccggag

SEQ ID NO: 16583 - RNA, 85 nt, Homo sapiens
ccgggccgagccaacaggaccagcagggcgggcaggcccacacagaccccaagaagaagcggaagaggagccgcggaaccaagac

SEQ ID NO: 16584 - RNA, 74 nt, Homo sapiens
gagaagccggaagggcgcccccaagcccacagcgaagaagggccacccccgacgcccgggcccgagccagcagc

SEQ ID NO: 16585 - RNA, 78 nt, Homo sapiens
gagagcacgaaggacccagcagggcaccagagcacaacgggggccgacacagcaaggaagagcacccccagccaaaga

SEQ ID NO: 16586 - RNA, 78 nt, Homo sapiens
gccccgcgaagagcagcccagcgcagagaaagcccgcacggagcaggagaccggaccgccgcgccccccaacgaccag

SEQ ID NO: 16587 - RNA, 67 nt, Homo sapiens
ccgcgaaagggcgcaaagacaggaagggaaggggcggagacgggcggaacgcaggaggccagaggac

SEQ ID NO: 16588 - RNA, 74 nt, Homo sapiens
cgcgcccgcgcgcaggggaagcgggcagggggcccagagagagggagcccacacgggggccgggaaggaaaagc

SEQ ID NO: 16589 - RNA, 72 nt, Homo sapiens
aacagacaggaccacgcaagagaaaagaaagccagaaggaaggaagcaacgaaccaagaaaaaacggaacag

SEQ ID NO: 16590 - RNA, 65 nt, Homo sapiens
gccgcgccggcagaccgaaggacagccaaggaggaagggacggaaagcacagagagcaggaacaa

SEQ ID NO: 16591 - RNA, 75 nt, Homo sapiens
gggcccagcagcggaacaccagcagaacagacaggcaggggacaccaggcacgggaaacagaagaaagggggaag

SEQ ID NO: 16592 - RNA, 63 nt, Homo sapiens
gccggccccagcccagccccgcagcccaccggaaccggagggacggagggcaaccaggaagaa

SEQ ID NO: 16593 - RNA, 57 nt, Homo sapiens
caggagcaaagggaagaaacccacacagaaggaaacaccagaagagaccaagaccgg

SEQ ID NO: 16594 - RNA, 75 nt, Homo sapiens
aacaacaggagaaacccaaaagaacgggaggagggaagaaaagcgccgaccggaaaacagcaccaggaggcagca

SEQ ID NO: 16595 - RNA, 69 nt, Homo sapiens
cccccacgcgcacacaagggagcccccccaccacccccgaggccaagggcagggagaagggacaacaca

SEQ ID NO: 16596 - RNA, 64 nt, Homo sapiens
ggacagcagagcacagggggaagaccacccccagacagccgaacagcaacagggggcaaagccg

SEQ ID NO: 16597 - RNA, 84 nt, Homo sapiens
agagagagcagggacaggaaaggagggggcgcgcagccacagacccaggagcgccccaccaggcggggaagagccaagacccaa

SEQ ID NO: 16598 - RNA, 75 nt, Homo sapiens
gcaagggaagccacgaccgaccaagccccagcccacgccgcccacaggagccagcaaccacagagcaagcaggaa

SEQ ID NO: 16599 - RNA, 78 nt, Homo sapiens
accagaggccaaggcagccacaaggagggcagccagaggggggaggcaccaaaaagaagcgcgggccaaagaacaaca

SEQ ID NO: 16600 - RNA, 64 nt, Homo sapiens
cagaccacaaccgccgacaaccccgagagggaagagcagaacaggaggcaaagaagcaagagag

SEQ ID NO: 16601 - RNA, 72 nt, Homo sapiens
gcaacagaccacgcgccgcgacggccggccgcgccaccgcaccgccaccggcccgacccagccagagggcca

SEQ ID NO: 16602 - RNA, 81 nt, Homo sapiens
caaacacggggggaccacggaaagaggggcaaaagcagaccggaaaacccaccggcaagaccacacccgaggggagcccag

SEQ ID NO: 16603 - RNA, 125 nt, Homo sapiens
aaaagacagggagaccgagagcccgcaccaaacagagcagcagcagcagagagaaacagcaggggacagggcgagcaggacaccaccggagcacagcggggcgcacaggcaggcagaccagggag

SEQ ID NO: 16604 - RNA, 79 nt, Homo sapiens
gccaaagcccaaaccccaggccaagcaaccaccagcagcccccagagcggaacacaggcggcccccccacgcgacccgg

SEQ ID NO: 16605 - RNA, 74 nt, Homo sapiens
aaggaccaagaaccagagccacgaccaggcggaagcagggcggacccagccacgcaaccccacccccaggcaag

SEQ ID NO: 16606 - RNA, 62 nt, Homo sapiens
gcagaacgaaagccccaccgcgccccagcggccacggagggcccgcgacccagccggaacac

SEQ ID NO: 16607 - RNA, 39 nt, Homo sapiens
cccagaggacaccagcgggggaccggagggccggaagcg

SEQ ID NO: 16608 - RNA, 78 nt, Homo sapiens
cggagcccaagaaacgggcagccaggcccccacagcccgcaggccggagccacgccacagcgcacccccaggcacgga

SEQ ID NO: 16609 - RNA, 88 nt, Homo sapiens
acaaaaaaaggcgcgcagaagacagagaggggaagaggaagaggaagaggagaaggcaaccaaaggcaggacacaaaaacaaccgaaa

SEQ ID NO: 16610 - RNA, 69 nt, Homo sapiens
gcagagacaggccaagggaacacgggacaacaggaaacggacaccggcacaggggacggaggaacagaa

SEQ ID NO: 16611 - RNA, 71 nt, Homo sapiens
cgagaaagaaaagaacccccagggcaaaaacaggcccaaagagccagaacaccaacgccacacacgggacc

SEQ ID NO: 16612 - RNA, 57 nt, Homo sapiens
ccgccccaacaccagggaagagacacacccagggccaggcagggcagcggggagcgg

SEQ ID NO: 16613 - RNA, 77 nt, Homo sapiens
aaaaaacaaagcgaaacagcggggccacccagaacaaaaagggccagaagagcaagaccaggccaggacaaacgcag

SEQ ID NO: 16614 - RNA, 75 nt, Homo sapiens
gaacgggacccggggacggcacccagaggaccaggcggcggaaaagacaggcagggaggcagcggcaagcggacc

SEQ ID NO: 16615 - RNA, 78 nt, Homo sapiens
gcccccgccaccgagccaccagggcggaacagaacgacaggagaacagaccagagcgaagaacaggaccacccaggca

SEQ ID NO: 16616 - RNA, 84 nt, Homo sapiens
caggcgcgcaggaagaaaagagccggagcaaggaagacagaacgaggccaggaagcgagaagacaaagcgaagagagaagcaga

SEQ ID NO: 16617 - RNA, 73 nt, Homo sapiens
gcccagaaacggccaggacacgacggaagccaggcaaagggacgcaacaggccaagcaacaagagcagaccca

SEQ ID NO: 16618 - RNA, 81 nt, Homo sapiens
cacacgccggccagaagaaaagcacagcgccgcggagaagcagaggacacccccacacgagccccaaccccccagaccaaa

SEQ ID NO: 16619 - RNA, 74 nt, Homo sapiens
agacgagccgggaggaacggcccggaaacaggaggacgcacaggaagagggcggcacgcggccagagagcacaa

SEQ ID NO: 16620 - RNA, 69 nt, Homo sapiens
cccccgccacaccggggacccaggccacagacaagccggcacggagggccgcagagagccacggggaaa

SEQ ID NO: 16621 - RNA, 85 nt, Homo sapiens
cgacgaacggaacagaaccggcagagacagggcagggcagcagcacgaccgacccagcagccccggcagacccagggaacggaaa

SEQ ID NO: 16622 - RNA, 77 nt, Homo sapiens
cgccgcacaaggaggccaccgaaaccccacaagacgaagcagacgggcagaaaaccaggcgaagcaggcccaagagc

SEQ ID NO: 16623 - RNA, 70 nt, Homo sapiens
ccaagacgcgcgagcacacaggagaagcaagaggcgcaaagaagcggaccaagcgacgaaagaccaagaa

SEQ ID NO: 16624 - RNA, 69 nt, Homo sapiens
ccgagcaaaggaagaaccaaagaaaacaagagggccagaggaggacagcacacgggacagggagaaaac

SEQ ID NO: 16625 - RNA, 75 nt, Homo sapiens
agaaaagcaagaacgaaaggagaacaggcagagccagaaggagagccaagcgccagagaacaggaggaggcaggc

SEQ ID NO: 16626 - RNA, 77 nt, Homo sapiens
gggcccccaaacccaaaccaacccgaagaaagccagggccaggcagagggaggagcgcggcaagacaaccacgaaaa

SEQ ID NO: 16627 - RNA, 55 nt, Homo sapiens
gacggcccggagcgaggggcgggcgcaggcagacgccacccagagcagccgaacg

SEQ ID NO: 16628 - RNA, 78 nt, Homo sapiens
ccgagacaaaggcaccaggccaccacagaaacaaaagcaacaaagaggagccggagacccacggccgcggagaagagc

SEQ ID NO: 16629 - RNA, 79 nt, Homo sapiens
cgggcggaccccacgcggggggggccaagagacagggcacaccaaacccacggcagcgcacccagacaccggggcccaa

SEQ ID NO: 16630 - RNA, 77 nt, Homo sapiens
ccgcccccccagggccggccgggagggcggccgcagcagccaaaggagagaccaaccgacggggagccgaggagcaa

SEQ ID NO: 16631 - RNA, 57 nt, Homo sapiens
ccaggaaggagccaaagcacaagaagaagacgagcaaagcccagacaagccagggaa

SEQ ID NO: 16632 - RNA, 75 nt, Homo sapiens
gagcggggccggccacagaagaagaagaggacaggcccaggaaagggaagaacaaaggaagagagcaggaaggcc

SEQ ID NO: 16633 - RNA, 77 nt, Homo sapiens
gaggccaaccacaaccacaacgcgagaaagacggggaggacagcgaccccgccccccgaggcgcagcccgaacccag

SEQ ID NO: 16634 - RNA, 71 nt, Homo sapiens
ccgggccccgacccggagagcggcaaccgcgcaccaaaggcaacgagggccaaccgccgcagcagccaggc

SEQ ID NO: 16635 - RNA, 78 nt, Homo sapiens
agccggaacaaacgagggcccgggaggaccgacgcagccaggacacaggaacgccacaagaaacaacagcaaggcgag

SEQ ID NO: 16636 - RNA, 74 nt, Homo sapiens
cgaggccggcgcaccagggcaacggcggagcgcaagaggcgagagccacagaaggaggaggggacagcagcagg

SEQ ID NO: 16637 - RNA, 74 nt, Homo sapiens
caccgacccgaagagccggacccggaacagcaagaacgcaccgaaccagaggcagagcaacagggacacaagca

SEQ ID NO: 16638 - RNA, 75 nt, Homo sapiens
acaaacaaacaacgagaaaccaggagagcacgagagggaaggaaaagacccccacgagaggaagcaacaagacaa

SEQ ID NO: 16639 - RNA, 79 nt, Homo sapiens
gggagaaacacagacacgaccgacacaggcaggcaagaaaagcagccccaaagaaagacacaggaggaggccaagaaga

SEQ ID NO: 16640 - RNA, 71 nt, Homo sapiens
cggagacagcggaagggaggcgcgcggcagcaggggcgacgaggcgggacgcaggaaggccaagcaacagg

SEQ ID NO: 16641 - RNA, 80 nt, Homo sapiens
cgcacgagggcagggcggaagacaagggaggcgaggacggacaaaaggaaacggacgggaggccagccagcagaaggagg

SEQ ID NO: 16642 - RNA, 81 nt, Homo sapiens
caccaacgcggccgacaacagccggcgccgccacgagagcccagaggaccggcggcccgaccaaagaagaaccacagccag

SEQ ID NO: 16643 - RNA, 100 nt, Homo sapiens
ccagaacggcacggcccccaagacccccggaccgggcacgagggcagacgcagggcagcaccaaggaagcgcagacaccaaaacaggggcacacgcaccg

SEQ ID NO: 16644 - RNA, 42 nt, Homo sapiens
gacaagcaccccccagcaacagggaaaccggcaagcagccca

SEQ ID NO: 16645 - RNA, 80 nt, Homo sapiens
cggagcgcccgcgccagccgcgcacaacggggcaccgagccgaaacaagggaagacccgaacagcccagacccggaggcc

SEQ ID NO: 16646 - RNA, 95 nt, Homo sapiens
cgagacaaaggcaccaggccaccacagaaacaaaagcaacaaagaggaaacccgagaggagcaggagcaaccgacaggcgggccggacagcgcgc

SEQ ID NO: 16647 - RNA, 44 nt, Homo sapiens
gcagcggcggccccgcggacgccagcgccacacgggcacagccc

SEQ ID NO: 16648 - RNA, 40 nt, Homo sapiens
gccagggacgggcacgggaaggacgagccgggaggggaga

SEQ ID NO: 16649 - RNA, 40 nt, Homo sapiens
agggaaccccgagcacccccagcacccagaaagcagagga

SEQ ID NO: 16650 - RNA, 79 nt, Homo sapiens
cagcgagagacgcagcaggcggcgcacgcccacgggcaggggacggaggggggcggagaacggaaaagcaccaggaagc

SEQ ID NO: 16651 - RNA, 80 nt, Homo sapiens
ggcaaaggcaccacggcaaagcaagcgggccaccgagaggcggccgagggccccaggggcgccacagccgaggcagcccg

SEQ ID NO: 16652 - RNA, 54 nt, Homo sapiens
ccaaggcgggaagacagagcaaagcaaccgagcaccgcacagcaaccgggacaa

SEQ ID NO: 16653 - RNA, 81 nt, Homo sapiens
gaagaccccgggcagagaccagagggaagaggccagaccggcccgggccgggccaggaggacacgcgcagggcccacgacg

SEQ ID NO: 16654 - RNA, 39 nt, Homo sapiens
cgcggacgcacgaaaaaggcagagaaagagcgagaggga

SEQ ID NO: 16655 - RNA, 61 nt, Homo sapiens
gacacgaccgccgcccgcgggccgagacgcaccagagccggaccggggacgcgaagcaggc

SEQ ID NO: 16656 - RNA, 71 nt, Homo sapiens
agagaaagggagcgaccggccaggcaagaacggaagcacgggcggaggaaagcacaagcagagcccccgca

SEQ ID NO: 16657 - RNA, 66 nt, Homo sapiens
ccgccgaaaaaaccgcccgcaggagcggaaaccacaaggcaagcacgaggagcggcaggacgagca

SEQ ID NO: 16658 - RNA, 47 nt, Homo sapiens
gaaaaagaggcaacggaaaaggcagggaaaacacgccgaagccaacc

SEQ ID NO: 16659 - RNA, 72 nt, Homo sapiens
cagcgccggaaaccaacaacaacccaaaaggaagcagaaaaccaacaaaacagggacacacagaaaacgagg

SEQ ID NO: 16660 - RNA, 76 nt, Homo sapiens
aacgaaagacaaaacaggcaagcaccgggcacaggcggacacagcggggagaacagagaagcacaaagacgggagc

SEQ ID NO: 16661 - RNA, 77 nt, Homo sapiens
aaagcaaacaaacgggggacaacccaagagaagaagcgcgagggaaagcccgaaaaggaccagcgaagcaagcacag

SEQ ID NO: 16662 - RNA, 93 nt, Homo sapiens
agaaccgaaggagaaaagaaccccggaacggcgccagcacgggacgagagaggcacagaagcagaaccgaccggggagccacaacaagagaaa

SEQ ID NO: 16663 - RNA, 77 nt, Homo sapiens
ggcggaggccccagggaagcgcagaaagcaggcgaacccgcggcgcaaaacggggaccaaaacaaaacgagagcaag

SEQ ID NO: 16664 - RNA, 53 nt, Homo sapiens
cgcaaaggagaagcgggaaacaagagcaaagaagacgagggaagaaaggagga

SEQ ID NO: 16665 - RNA, 74 nt, Homo sapiens
gcgcaaggagaacaaccagcccacgcaccgcaagaaccacaacagcacaagccagacaagcaaaaggggcacaa

SEQ ID NO: 16666 - RNA, 60 nt, Homo sapiens
aagaaggagcggaaaaccaggaacggccaggggacaagaacccaagaaacaggaaaaaac

SEQ ID NO: 16667 - RNA, 74 nt, Homo sapiens
cagcacaccaagcaaggggaaaagcaggacagaacggccacccaggaggagggacacacggacccgaacaaaga

SEQ ID NO: 16668 - RNA, 78 nt, Homo sapiens
acccggccccaggccgcagagcagaccagcagagcagcagggcgaaggcgccaccggcgagaagacgcggggacacac

SEQ ID NO: 16669 - RNA, 92 nt, Homo sapiens
ggcgagcgcgagcggcgcgagaaacgccgaaaagcgaaaagaaacaagccgcggcaacagcgaccccaagccagacacaccggggcagggaa

SEQ ID NO: 16670 - RNA, 62 nt, Homo sapiens
gaaaagaagcaggaggagagggcgaagcggccaggcccgggcggacgcagagccagagcgcc

SEQ ID NO: 16671 - RNA, 71 nt, Homo sapiens
ccaccagcccccagagcgagacacaggcaggacgaaggaacgagccgcacacagagacgcaagcacaaaca

SEQ ID NO: 16672 - RNA, 66 nt, Homo sapiens
aacccgggccggcccaagagagagacacggagcaacacaagcgagggagaagccaagagcacagac

SEQ ID NO: 16673 - RNA, 108 nt, Homo sapiens
agcgggcggagcggcggcgcaccaaccgcgcgcaccgccgacccggaagaccgccgccggggagaggaacccgagcagcccagacaggaagacagcagagaccaaacc

SEQ ID NO: 16674 - RNA, 51 nt, Homo sapiens
caccccgccaggcaaaagacagccaagcccccggcccccacccagcacacc

SEQ ID NO: 16675 - RNA, 73 nt, Homo sapiens
cccaccccccacgcaccgcacaacaagaggccggcggggcgacagcgccccagaaacggcgagcaaacagacc

SEQ ID NO: 16676 - RNA, 88 nt, Homo sapiens
agagacggagacccagggaggaggagccaagagagaacagacaggaaacagcagccagaacggggcagccggcagcccagcaacagcg

SEQ ID NO: 16677 - RNA, 76 nt, Homo sapiens
gagcgagcccccgacgaggagcgcggcgagacacggccaggccccgggggcgccgagggcacaagggcaacgacag

SEQ ID NO: 16678 - RNA, 62 nt, Homo sapiens
agcacacaagcccagccagccagacacaggcagagcaagcgcacaggaaaacgaacacaggc

SEQ ID NO: 16679 - RNA, 84 nt, Homo sapiens
agacccaagaaggaagaaagagaaagaaggaagaaccaggcgcaggagacacagcaggaaaggggaggagggacacccaccaga

SEQ ID NO: 16680 - RNA, 87 nt, Homo sapiens
ccggcggagaggggcaacaaaggagccaagggagaccggcgcaagggccccggggaagacaggcccgggggccgcaggcccagcagg

SEQ ID NO: 16681 - RNA, 80 nt, Homo sapiens
agaaggagcaaaaggcggacaggcaggcccggcggccgacccagccaagcgagccccaccagacggcaccagcgcccgcg

SEQ ID NO: 16682 - RNA, 65 nt, Homo sapiens
caagcaggaccacccaccagccaccagagaggagcaagcaagggagcgacaggagacaagggaaa

SEQ ID NO: 16683 - RNA, 69 nt, Homo sapiens
ggacgcgagaggaggaggggcggcgcgcggccacccggcagggaggcaccgcgcggaaaccccaaacac

SEQ ID NO: 16684 - RNA, 71 nt, Homo sapiens
gaaccgagaacaggcaccacagacggaaaggcacgcacagcgccaccagcaagaacagacgacacaggaaa

SEQ ID NO: 16685 - RNA, 78 nt, Homo sapiens
ccgggggcgcggccgcgcgccgccggcgaaggaggaggcggccggacaagaacgagccagcaaacccgaggagccaga

SEQ ID NO: 16686 - RNA, 74 nt, Homo sapiens
aaggaaccccggccaccaggagaccccagccgaaccccaggacaccaggggagacacacaacacaacccaagca

SEQ ID NO: 16687 - RNA, 85 nt, Homo sapiens
gaggcggacgaggagaagcgccgcccggcgggagaagcgcagagccgcagccaggggcggccacgggggaaggcgaacacccccc

SEQ ID NO: 16688 - RNA, 86 nt, Homo sapiens
gcacagccagaaggggaggaggagccgagcggaaaacccagcggacaaagaggccacacaagacacgacggcccgcaaagagggca

SEQ ID NO: 16689 - RNA, 72 nt, Homo sapiens
cagaaagcagaacaggccaccgggccaacgaaaagacagaagacagcccacgacacaggcccagaccagccc

SEQ ID NO: 16690 - RNA, 81 nt, Homo sapiens
cggccgggacggaggacgcgcagacggccaagggaacgggaggccaaagggggccaccggaggcgggacacccagcacccc

SEQ ID NO: 16691 - RNA, 72 nt, Homo sapiens
aagaagaaacaccgcaaagccagaccaggagaagagcagggggccgaaagggaaggggaagcaggccaaccc

SEQ ID NO: 16692 - RNA, 59 nt, Homo sapiens
gacccagagggagcggagggcaggacagagcgggagccaccagcgccaaagggaagcca

SEQ ID NO: 16693 - RNA, 72 nt, Homo sapiens
aaggaccaagaaccaggcacagccaaacacagggcgacagccacacccagcacaagggcgcagaccaagcca

SEQ ID NO: 16694 - RNA, 75 nt, Homo sapiens
ccaagcagagaacacagggccagaaagaccacaagaggaaccagagaacaacagggcagaaggagaacaaggaga

SEQ ID NO: 16695 - RNA, 78 nt, Homo sapiens
ggagaggcaggcggggaggccggccgcaccaggaaggaggacccgggaaaacagaccacggagcccgccaggggaggg

SEQ ID NO: 16696 - RNA, 81 nt, Homo sapiens
cgcaccccagaggaccgagccacacaacaagaaaaagaaggaccgggaggacccccacccccagccggggcccgagccagg

SEQ ID NO: 16697 - RNA, 83 nt, Homo sapiens
ccagccaaacaaaaaggaaaggagacaagcagagacgaaccaggcaaagccgacaaagccagacccacccaaaaagaaggaag

SEQ ID NO: 16698 - RNA, 80 nt, Homo sapiens
aaaagcgcccgacaaagacaaaagaaaagcaagaacgaggagcaccaggagacgcaaccacggggcgaaccgaccaagaa

SEQ ID NO: 16699 - RNA, 36 nt, Homo sapiens
aggggaaggaggggcagcggagacgcccagccaccg

SEQ ID NO: 16700 - RNA, 37 nt, Homo sapiens
ccacagagacaagagagagcgccgggccagccggacc

SEQ ID NO: 16701 - RNA, 74 nt, Homo sapiens
cgaccagcaggaacgggaccaaaccacagcaaaaacaccaggaaagacaacgaaacacacaacaaaaagcgcgc

SEQ ID NO: 16702 - RNA, 62 nt, Homo sapiens
cagaacgcgggcggcgagagaagaagaaggaggccgcggccagaaacccaagaaaaagcgaa

SEQ ID NO: 16703 - RNA, 72 nt, Homo sapiens
aacagccaggggaaacgggaccagaggggcaccgggaaaccaccaagcaggggcgcggagccccagccagga

SEQ ID NO: 16704 - RNA, 78 nt, Homo sapiens
aaccaccacaaacgacaaacagcaggaagaggacaccagcccgggagaagaggcaacacccgagcggggcccgaaaac

SEQ ID NO: 16705 - RNA, 86 nt, Homo sapiens
cgcccgccagcaggccaccaccgccaccgcacccgcaccgacgacaccagcccgaggagcggcaagcccaacgcagccaggcaaga

SEQ ID NO: 16706 - RNA, 88 nt, Homo sapiens
cgcggaaagcggccaagaaagacaaagacccaggaacaaaccgggggcaaggccaaaaagaagacaacaggcacaaagagagaaggaa

SEQ ID NO: 16707 - RNA, 68 nt, Homo sapiens
gcacgcacaggccacaaaggcacgcacccaaccagccaggagcaggaacccacacacgcaccaggacg

SEQ ID NO: 16708 - RNA, 39 nt, Homo sapiens
gccgcccaggggccggcgccagacaaagcacaggccaga

SEQ ID NO: 16709 - RNA, 81 nt, Homo sapiens
gaggcacgcgcggggcggggcgcgcgcaggccggggagcgccagacagcacaaggggggggccgggcgggccggaccggac

SEQ ID NO: 16710 - RNA, 60 nt, Homo sapiens
ggcgcccgcggccacgcagccacgcagaagcgcggcaggcgccagcagaaccggcgggga

SEQ ID NO: 16711 - RNA, 84 nt, Homo sapiens
cgagcagcaagcagggagcaagcggaagagccgagcccacaaagaagaagaacaagagaggagagagagacagcaccgaagaag

SEQ ID NO: 16712 - RNA, 95 nt, Homo sapiens
gccaggagggagcgggcagaagccaaaacaggaaagacgaaagaccaaaaagagccaagcgagaagagagaaccacaaagggcagagcaaagacc

SEQ ID NO: 16713 - RNA, 68 nt, Homo sapiens
ggacagcagaaaccaagcagacaacgcagagggcgacgccaacaaggacgccgccagccaccggcgcg

SEQ ID NO: 16714 - RNA, 68 nt, Homo sapiens
ggggggccagagagcacgccccggcggacaacgcacagcgccggcccgcaggccccacaccacccccg

SEQ ID NO: 16715 - RNA, 36 nt, Homo sapiens
gacacgggccaggcaacagcagcgcgaaacgacgaa

SEQ ID NO: 16716 - RNA, 81 nt, Homo sapiens
cagcaccggcgcgggggcaggcgcgcgccgcaacgccgagcgcaccgacacgccgccaaaggccggaaaacaaccagaggg

SEQ ID NO: 16717 - RNA, 77 nt, Homo sapiens
ccgcccgggaacggaaccaagaccaaaaggacagaaccaggcggaagaggagaaggccagggagggcagccccccag

SEQ ID NO: 16718 - RNA, 77 nt, Homo sapiens
cgagcacaagaccaaacgggggaagaagggaagccagcagagccacagcccacaccagccagcaaggagaccggcgg

SEQ ID NO: 16719 - RNA, 115 nt, Homo sapiens
agagcccagcgagccaggaggagcccggggacgcaacggcaggacgggagagaggcgaaaaaagagcgcaagcagaacaaggggagagcccgacgcagaacagcggagcccccgg

SEQ ID NO: 16720 - RNA, 72 nt, Homo sapiens
agggaaggggagcagaagcacacgagcgggacaaagaaggacaagaacacacggagaagaggaaaggaaagg

SEQ ID NO: 16721 - RNA, 71 nt, Homo sapiens
cacgaggagaaacagcagaaacgcaccaggccaaagaaagagaaccgccaccaggacccgcccacccgccc

SEQ ID NO: 16722 - RNA, 77 nt, Homo sapiens
aaccaagacaagcagcggacggccaggagaacaaggcacacagagacagacaaagcagccccggagagggggaagcc

SEQ ID NO: 16723 - RNA, 75 nt, Homo sapiens
gaccgcggagaagggagacacaaggacagcagcgacggggcccgcaccccagcaaagcgcgacagacaagcaaga

SEQ ID NO: 16724 - RNA, 80 nt, Homo sapiens
ccaggggcagcgcgcagcgggcacggaggccggggccagaacggcaacaaacaacaggcagacgaaagaacggccaggcc

SEQ ID NO: 16725 - RNA, 83 nt, Homo sapiens
ccggccacccgagaagggagacgacgcgcgggccgcgagcggggcgacccgaggaccgaaaagacgcggccccaaaggaaaca

SEQ ID NO: 16726 - RNA, 76 nt, Homo sapiens
agaaaaagcaggacacgaaggaagaagacaaacagagagaagagcgcaaaggcaccaggcaagcggcacgaagcag

SEQ ID NO: 16727 - RNA, 73 nt, Homo sapiens
gcgcacacagcaagcacgaggccaaagagcacagggacagaaaaacagcgcagacgagccgcaaggacaagac

SEQ ID NO: 16728 - RNA, 83 nt, Homo sapiens
cagcgccgcagcgcaccccgaggccacgcaccaagcccagcccgcgcagaacgcaaggggccagagaggaagcaggcagggaa

SEQ ID NO: 16729 - RNA, 38 nt, Homo sapiens
aagaaggagaacaaaaggcccccgaggagggaacaagc

SEQ ID NO: 16730 - RNA, 74 nt, Homo sapiens
agaccgagaggcgccggcgacaagcgagggcagaaagggcccagccggcagagggaccggagaacgccgcaggg

SEQ ID NO: 16731 - RNA, 73 nt, Homo sapiens
cgggggaccgagcgccggcggcgggagcgggaacaccagcacgccaacaggccaccccccggagaacccccca

SEQ ID NO: 16732 - RNA, 72 nt, Homo sapiens
cagaacccaagagcagggacccaggccccacgagcggggccagagagggacaagagaaaaaaagggcgggcg

SEQ ID NO: 16733 - RNA, 79 nt, Homo sapiens
gaaaaggagaagacaaccggaagcggcagagagggaaacagacaacacaccaaaggagacacaggcccggacagcaaaa

SEQ ID NO: 16734 - RNA, 70 nt, Homo sapiens
gacgaacccagagcgcacaagaccaaagaggggaaagaaccagacgacaggaaggcacagaacgaagccg

SEQ ID NO: 16735 - RNA, 77 nt, Homo sapiens
cagaagaggaccgcaggcaggaacacacgaagccagcccagccccccaggagcaaccaccagacggcaggaagcaaa

SEQ ID NO: 16736 - RNA, 74 nt, Homo sapiens
gggaggcgaggacgacggggcgagaccccgcccggaccgcaggagaaggaagccaacaccggagccagaaagcc

SEQ ID NO: 16737 - RNA, 82 nt, Homo sapiens
caagggcggggcccaaaggggaccaagacgggacagaacgcaccacaggggaggagcggaacgcacgccacaaggaccggag

SEQ ID NO: 16738 - RNA, 81 nt, Homo sapiens
gaggagacgcggcagcagacaagaccgagccagaggacggagagagggagccagggaagccccaggaaaccccaaagagcc

SEQ ID NO: 16739 - RNA, 79 nt, Homo sapiens
agcccagagcaacagccagcaacacagaaacaggaagcgccaaaagaggagaggaagacaccccccccaccgaaagaac

SEQ ID NO: 16740 - RNA, 73 nt, Homo sapiens
gccaaagggggggcacaaacagaccaaacacggaacagggcacgcggaacaggagaggaggaaacagaccgag

SEQ ID NO: 16741 - RNA, 78 nt, Homo sapiens
gaaaaggaagccagaaacagaaaaacagggagggcagcccagggacccgaagccccaaggcacaaaagaggaggaaag

SEQ ID NO: 16742 - RNA, 60 nt, Homo sapiens
cgaggccacagaaggcgcgacgccggggaagaaggaaggcacagaaccgacacggccaac

SEQ ID NO: 16743 - RNA, 80 nt, Homo sapiens
gagacaaaaggaccacccgaggaggcacacccccacacagcagccaaaacaaccaccggccagaaaggccaagagcacca

SEQ ID NO: 16744 - RNA, 66 nt, Homo sapiens
gagcagcaggagggaaaagaagaaggaacgaccgaagaaggacaccacagacaaacgaaaaaggag

SEQ ID NO: 16745 - RNA, 75 nt, Homo sapiens
gcggccacgcacaggaagggaggcggggagcaggagcgcaggggccaggacggggaaagaccgaggcaccgagag

SEQ ID NO: 16746 - RNA, 80 nt, Homo sapiens
aggccagcccgcagcaagggcaagccaggaccaaaggcaccggaaaccggacaagcagaagaacagaggagcgagcaagg

SEQ ID NO: 16747 - RNA, 85 nt, Homo sapiens
gggaagcccgcgccgccggcaccagaggaaacaggaacacgaaagaggaaaaacgcacaagaaaccgaagccaaggaggagagga

SEQ ID NO: 16748 - RNA, 53 nt, Homo sapiens
aggccacaggagccaggggcggcaggcagacccaggaagaggcgcccccgccc

SEQ ID NO: 16749 - RNA, 81 nt, Homo sapiens
ggcgcagcaaaaccaagggagaagagcccaagggcagaaaagcccacgagggaacagcggaggcgggaagccaagacaagg

SEQ ID NO: 16750 - RNA, 72 nt, Homo sapiens
gcccccagcgcacaagaccaaaggaacgggcacaaccacggggcaggcaaaccaacacagccaaccacccgg

SEQ ID NO: 16751 - RNA, 82 nt, Homo sapiens
acagacaaaaacccaaagcacgcgccccagaccaccggcagggaacagccgagcagaccgaggaggcccaccagcagacgcc

SEQ ID NO: 16752 - RNA, 78 nt, Homo sapiens
aaaaaggaaagcgggggcccacagaaagacacacggagacaaaccgcgccaaggacccagagagggaccagggccaaa

SEQ ID NO: 16753 - RNA, 75 nt, Homo sapiens
acagccagggagaaagccggagccaagacgaaaaggggaaaggagaaagaagggagaagaaacagagaaccccaa

SEQ ID NO: 16754 - RNA, 53 nt, Homo sapiens
ggcggaccagaaaccccagagcgcgaccgcagagaaaggcaggccaggcacgg

SEQ ID NO: 16755 - RNA, 68 nt, Homo sapiens
gcacgggacgccggggagaagggcggagaggccaagcagcagacacacacgagcaggacgaagggacc

SEQ ID NO: 16756 - RNA, 75 nt, Homo sapiens
gaaaccccagagaaaaagcgggacaaaccagaacaagcgcaggaggaaagagagcccagagaaaaaaaaagaaag

SEQ ID NO: 16757 - RNA, 106 nt, Homo sapiens
ggcgaaaccggaccgggcccggaggagcgaacaaggcgacaacacagggcagcgcaagaccccgcacggaagcagcaagcacaggcagcgcagagccagagaccac

SEQ ID NO: 16758 - RNA, 79 nt, Homo sapiens
ggagacaacgcacccggggcagcgcggggagcccccacggacacggcagaaacagagacagaccaagcccgggagcgcc

SEQ ID NO: 16759 - RNA, 75 nt, Homo sapiens
cccgggcgggagagacccacggccacggccagaggaccccaagcaaagaaaggcagagccaacccaaacacgcag

SEQ ID NO: 16760 - RNA, 52 nt, Homo sapiens
gccgcgacgcggggcagccgagcacagcacggcaccaggaagaagaggcgga

SEQ ID NO: 16761 - RNA, 68 nt, Homo sapiens
ggccgcacccccgccccagacagcccacaccggcaggccaacaaccaagacgaacgaacgcccagaca

SEQ ID NO: 16762 - RNA, 76 nt, Homo sapiens
aaagagaagggaagcaagaacgcgggaggagacaaacggggcagccgacgccagcgaggccccggaggggcgggca

SEQ ID NO: 16763 - RNA, 94 nt, Homo sapiens
ggggagcgggaggggcaggaggaaggcaggaccggagaggcgcccaccgccagcaggcgggggcgaaaaagcgaagaaagaaagagcgaaagcc

SEQ ID NO: 16764 - RNA, 64 nt, Homo sapiens
aagacccgaccagccaccccggacgagagcaaggagaggcaggagcccgaaacggagagggcag

SEQ ID NO: 16765 - RNA, 59 nt, Homo sapiens
cacccagagaaccggggacaaaccgcacaggggacacaggcaaaacggacaaagaccgc

SEQ ID NO: 16766 - RNA, 78 nt, Homo sapiens
ccggacaccccaccacggccccagccccgacaagggaccgggcgggccccgcaggaaacccccaccggcccacacaga

SEQ ID NO: 16767 - RNA, 39 nt, Homo sapiens
agagcggcaggagccaggcccaagggagaagccacgggg

SEQ ID NO: 16768 - RNA, 69 nt, Homo sapiens
ggaaaggccaggcaggaaggacacgggaagcggaaccaggcagcccagcacgccaggaaagagagaaga

SEQ ID NO: 16769 - RNA, 58 nt, Homo sapiens
aaagagcaacagcagggcaacaggagaaccggggcaagagacggcagacaaacacagc

SEQ ID NO: 16770 - RNA, 79 nt, Homo sapiens
ccacggccccggcggccaaacaccgggcaagcagcccggccagggacagcgcacagcagggaaccacgaacgcgagaca

SEQ ID NO: 16771 - RNA, 73 nt, Homo sapiens
ggcccaagggacccccgccagcccccaaagcagggcacagacgccagaaggagacacacccgaagagagagaa

SEQ ID NO: 16772 - RNA, 76 nt, Homo sapiens
aacacccggaccggacacgccgagcgggccaaagcagagaaccagcagcagcccaagaaagagcgaaaagagaccg

SEQ ID NO: 16773 - RNA, 75 nt, Homo sapiens
cgaagcagaaaggcggggcacggggacgcgaggagaccaacaaaggaagggggaaagcagaggacgcacaccgcc

SEQ ID NO: 16774 - RNA, 81 nt, Homo sapiens
gaggcgcggagagcaacgccgggacagcgcaagggaaagggagcagcaccggccacacccacagcacgaccggaacccagc

SEQ ID NO: 16775 - RNA, 75 nt, Homo sapiens
ggaacacgaaaggaccaagaacacagccacaagagccgaaggccagggcaaacaaaaaacgcaaggcgcaccaaa

SEQ ID NO: 16776 - RNA, 77 nt, Homo sapiens
gacggacaagacacgggacagagcgacagagccacccacgagacaccacgacgcccgagagaccaccccaagcacag

SEQ ID NO: 16777 - RNA, 68 nt, Homo sapiens
accgacacacgaccagagaccacggcggggcaggagaagacagaggagccagaccaagagacagcaca

SEQ ID NO: 16778 - RNA, 77 nt, Homo sapiens
ccgccagagcgcggccgccaagaagggcagacagagcacaagcgcggggaaacagcccgaacacacccaagcagagc

SEQ ID NO: 16779 - RNA, 108 nt, Homo sapiens
agacaagaggcgacgccgggggcaccgagcgggaacgcacggggcgcgccgggcggagcagggacagagcgaagaaccccccaagaagacgaaacccccgggccacaa

SEQ ID NO: 16780 - RNA, 74 nt, Homo sapiens
gcgcggacgaacaccaacaagggaggaacaggagcaccacgagagaggcaggaagacaaacagagagcgcacgc

SEQ ID NO: 16781 - RNA, 48 nt, Homo sapiens
acccacagccagcaacaccgagcggaggagggaagaacaggggccagg

SEQ ID NO: 16782 - RNA, 92 nt, Homo sapiens
gacaagccgcgcggggacccgacgcccgcacggggccagacccacgagaagcgccgaacaaggcaacggaaaaggaaggaaaaaagaaggag

SEQ ID NO: 16783 - RNA, 78 nt, Homo sapiens
agaccgcgcagaagacacgcccggaagaccagccaacagagcaaacagaacaaaaacaagaaaagcgacagaggggag

SEQ ID NO: 16784 - RNA, 74 nt, Homo sapiens
ccgaggaggcagcgcggggcagcgcgagccgggaagcaacccaaggagacggcgcgggggcggagagggaaaga

SEQ ID NO: 16785 - RNA, 76 nt, Homo sapiens
gaggcgggggcaggcggagaaggagacaccggaggacgaagagggggagaaagagccgcagacgcacagcaaccac

SEQ ID NO: 16786 - RNA, 33 nt, Homo sapiens
gacaagcgaggaagcaagaacacgaagcaaagg

SEQ ID NO: 16787 - RNA, 74 nt, Homo sapiens
cgggaaaagggagaagggaaagaagcagagcaggaacacagggacgccacgaaccgagaccaagcgaccaagca

SEQ ID NO: 16788 - RNA, 56 nt, Homo sapiens
gacggggcgccccacagaggggcgacggagaagaagcagagaggccagaaggaaac

SEQ ID NO: 16789 - RNA, 77 nt, Homo sapiens
caacccgcagagaccacggcgcgccccggccggagagaccaccgcacggaaaccagaccacggcagccacgacccac

SEQ ID NO: 16790 - RNA, 71 nt, Homo sapiens
aaaggagcccggaggaagaaggagcaagacgagaacaacgacaaaagaaggggcggggcaggaggcggggc

SEQ ID NO: 16791 - RNA, 80 nt, Homo sapiens
gccggcgcccgaagccaggggcacccgagggcgaggcacaggagggcgcaagggagagagagggagcggccggaacaccc

SEQ ID NO: 16792 - RNA, 88 nt, Homo sapiens
gaggacccacaggagaggcacaggaccagaccaagacacacaaccaaacaggagaaaaagagccagccccgggcaacaaagggaaagg

SEQ ID NO: 16793 - RNA, 53 nt, Homo sapiens
aaaacccgcgagcaggaaccccaggaaacggccaggcagcagacgacaggacg

SEQ ID NO: 16794 - RNA, 74 nt, Homo sapiens
cggggccggggcgaacgcggccgcacggagcgggaacccccggcacccagccaaccagcaggggccagcggaaa

SEQ ID NO: 16795 - RNA, 80 nt, Homo sapiens
caccccacagcccagggaaggcaccaaaagggggggcaggaaaggcaggaaaaggaagagcaaaaacaaaaacccagcag

SEQ ID NO: 16796 - RNA, 81 nt, Homo sapiens
cccggcccggcccccgcaggagcagcagccacccacgcacccgcggccaaaacacgacaggggccaggacaacagagaggg

SEQ ID NO: 16797 - RNA, 73 nt, Homo sapiens
ccgagagccgcccgggccagcggccgcgcacccccggccggaggcaccagcgaaaacaaagagggaaaacgga

SEQ ID NO: 16798 - RNA, 72 nt, Homo sapiens
acaaacagcaacacccccccgaccggggccagccacggagagaaccagaccaggaggcgggcgagcaggagc

SEQ ID NO: 16799 - RNA, 73 nt, Homo sapiens
aaaaaaacggagccagccgccagggagcgggaaacgcacaacagagaacagaaaagacccgcagacaacgggc

SEQ ID NO: 16800 - RNA, 105 nt, Homo sapiens
cccacaccagggaccccaagaacagacgccgagcaagccacgagcggccacagcccagggccgagagggagaaacaaaacgaggggggcacgaaagaagccggga

SEQ ID NO: 16801 - RNA, 78 nt, Homo sapiens
cgaagggcaccagcgccgcggcggcgggcaagggcccacacagcccaggggaaaagcacagaaagagacacagaccgg

SEQ ID NO: 16802 - RNA, 56 nt, Homo sapiens
gggaacaggaagaagccagcagaggaacccgcagggaagcaaagagcacccgagcc

SEQ ID NO: 16803 - RNA, 72 nt, Homo sapiens
ggagcgcaccagggcggccggcgcacagagacggggaccgaaaagcccgccgggaccgagagaccagcccga

SEQ ID NO: 16804 - RNA, 82 nt, Homo sapiens
gaacaggggccacaggggccccgaagaaccccacaagccacaggaggaggcagcagggccagcgagacagaccgaaacccaa

SEQ ID NO: 16805 - RNA, 86 nt, Homo sapiens
gaagagacaggaggcagagccaaacacccagaaaggcagacccggcaccacagggaaaacggggcaagcccagaaacaccccacca

SEQ ID NO: 16806 - RNA, 58 nt, Homo sapiens
aagagccaggacaccccgaaagccggaaaacgccagcaggacaggcacacccgggcag

SEQ ID NO: 16807 - RNA, 72 nt, Homo sapiens
cgcaggaagaagcgaagaggcgagaaacagggagaagaaggacagaaggcagcacaagcaaaggcgagagca

SEQ ID NO: 16808 - RNA, 69 nt, Homo sapiens
aaagaaaccagcagacagaagcagagccaaagcagacccccaagcgagcggagcggaaggagcgcgccc

SEQ ID NO: 16809 - RNA, 79 nt, Homo sapiens
cggacagcgcgggagggcgccgcggggcagccgccgcccccggggccggagagacacagggccgccagaagcgacagcc

SEQ ID NO: 16810 - RNA, 56 nt, Homo sapiens
acgccaacgaacgaggggggaccaggaacacgaggacccaaagaacaaacccggag

SEQ ID NO: 16811 - RNA, 83 nt, Homo sapiens
cccggagcacccaaaacgcggggccaagcagcgaggccacggagccccagaaagcaaaaaccgcagaggggaaggcacaccga

SEQ ID NO: 16812 - RNA, 74 nt, Homo sapiens
aggagcaggggaggcaagcggagcccagagacagacgacagccccagaacaagcggcgagggacaccaccggag

SEQ ID NO: 16813 - RNA, 46 nt, Homo sapiens
gggagagggaccgcgccaccggccggaagcagagccccgggccggg

SEQ ID NO: 16814 - RNA, 72 nt, Homo sapiens
gaggagaaccggggccaccacaacacgcagcagacaacagacaaacgaaggaaacgcgaggggggaagccag

SEQ ID NO: 16815 - RNA, 75 nt, Homo sapiens
aaggccacagcccggagcgacgccacccagcgccggcaagaagccaacggagaaccaaggccaagaccagaacca

SEQ ID NO: 16816 - RNA, 88 nt, Homo sapiens
acccagaagagagaccgcaacgagaacaaagggccgggagcgaggcgggcgcggacggcaggggcgccggggaacccgcgggaagaag

SEQ ID NO: 16817 - RNA, 78 nt, Homo sapiens
ggcaaggcgccagaccaagaagcaaaccagccccagaaaagaaaagaagcaggcccgcgagagacgcaaaaacaaaaa

SEQ ID NO: 16818 - RNA, 76 nt, Homo sapiens
agcccgcgcacagcgcccccgcccgcccccacccgcggcagcgcccaccaccacggaggccaccagacgaggggga

SEQ ID NO: 16819 - RNA, 82 nt, Homo sapiens
aagaaccggcagcgaacaaggagaaagccacaacagggcggcaacaggggcgagaaaggggaacacgcagaagagaacaaga

SEQ ID NO: 16820 - RNA, 58 nt, Homo sapiens
gaccaaaagcgacggaagacgacccaagggcaaggcaaagggaaagacgagacccccc

SEQ ID NO: 16821 - RNA, 77 nt, Homo sapiens
gggccaagcggacccacacccagagcgccccggacgaccaggcaccgcgcgggcaggccccgagcgaggacacagcc

SEQ ID NO: 16822 - RNA, 55 nt, Homo sapiens
cagcgaccggggaccggagcgacgccagaaacggaggcgggggcagcccgcccgc

SEQ ID NO: 16823 - RNA, 74 nt, Homo sapiens
cgcgagcccgggggggaggccggggcacccacaagcgcacgaccaccaaggggaagcgacgaggaagccaagca

SEQ ID NO: 16824 - RNA, 78 nt, Homo sapiens
gcggagcccggcccggaagcagcaggaggcaaagggaccccaagaaaccaaagggcaagagccgcagcccggcagaca

SEQ ID NO: 16825 - RNA, 73 nt, Homo sapiens
gaagaaacggccccccggggcacggaaagaaacacaaggccggagccggcccaccccagaacacaagacacag

SEQ ID NO: 16826 - RNA, 83 nt, Homo sapiens
aagaagccaccaaggagcaggaaaacggagggcccccggacccgggagcggacccggggcgggaagcccgaggcggcaacggc

SEQ ID NO: 16827 - RNA, 58 nt, Homo sapiens
gcgggcccgccaggggcgaagggagcagaaagacgagagacaagcagcagcacacgcc

SEQ ID NO: 16828 - RNA, 80 nt, Homo sapiens
ccaccacccacggacagagcgcagagaacggcgagaccaggcagacggagagaagccaaaaggaaaccaggcaggaaaaa

SEQ ID NO: 16829 - RNA, 58 nt, Homo sapiens
ccgcccgaaccgagggaacagcaaagcagacaaaggagagacagcacaaccaggggcg

SEQ ID NO: 16830 - RNA, 72 nt, Homo sapiens
ccaacaccaaaaaggccacaaacgaacagcgaaacggagaacggaagaaagccccagcaccccggcgaagag

SEQ ID NO: 16831 - RNA, 78 nt, Homo sapiens
agacagagaggagccaaacccccagaaggacaggagaaacaggggccaaaaaaccaaaggagaagaaaaccacagaag

SEQ ID NO: 16832 - RNA, 73 nt, Homo sapiens
cgcagcagagcgaaaaacgcaggcacggagaagagccgcgagcgcagccagggacggcggacgaccgccgcgc

SEQ ID NO: 16833 - RNA, 74 nt, Homo sapiens
gagaaccgggcaaagacgacgcggagaggaccagcgagcagcaggggccagaaaaacacaaagacaccacaaac

SEQ ID NO: 16834 - RNA, 74 nt, Homo sapiens
acccccagacacacacacccaacccaaaccaagaaccaaaggcaagaaccggagcaggagaaaagccggaaaga

SEQ ID NO: 16835 - RNA, 76 nt, Homo sapiens
ccgggacggcccaaggccagcccgcaggcggagggcggcggccccaccccgggcgggacaggaggaagccggcaga

SEQ ID NO: 16836 - RNA, 50 nt, Homo sapiens
cgccccccgcaacaacccacaaggaacgacgaagcgggacgggggcggcc

SEQ ID NO: 16837 - RNA, 74 nt, Homo sapiens
aaaaccacaggcacaaagagagcggggacgggaaagagggcagaagcagcaagaaaaggccaagagagaaggag

SEQ ID NO: 16838 - RNA, 79 nt, Homo sapiens
gaaaaccccgagggaaacaagaaaacacaaagaggcagcaaaggcaaccggaaaagcgaacaggccaacgaacgaggag

SEQ ID NO: 16839 - RNA, 73 nt, Homo sapiens
cagcccagcccccacgggaacgcgcagaagcaccgcagcccgcagcccagcacgagccagggagccgccggga

SEQ ID NO: 16840 - RNA, 80 nt, Homo sapiens
ccaaacaccccagcccacagagagcaaaacacaagagagcagggaggaggaaaccaccacggacccaaggcggaggccca

SEQ ID NO: 16841 - RNA, 74 nt, Homo sapiens
gaaaacacgagggaaaagagaagaacaagaggcaaaaacagccacgaacacagagccccgccagagcaggggcc

SEQ ID NO: 16842 - RNA, 76 nt, Homo sapiens
cggacccgagcaacccccccgggccccagcagcccccagcacccgccgccagccccaggaggagagaaagaaccca

SEQ ID NO: 16843 - RNA, 58 nt, Homo sapiens
ggaggaagccacccgacgaggaagcaaaaaagggagggagaagaacccagaaaaaaaa

SEQ ID NO: 16844 - RNA, 80 nt, Homo sapiens
cccccacggcgcagccgggacacaacggaagcagcgggacaacagaagccacgaccggggaaagggaggcacgccaccca

SEQ ID NO: 16845 - RNA, 71 nt, Homo sapiens
gggcagccagaagaaggaccggaagcacacaacaggaaaacaaaagaggagaaaggagagagacgagcacg

SEQ ID NO: 16846 - RNA, 86 nt, Homo sapiens
ccggcgcgcccgagacgaagaccgacgggaccccgaacaaccagcgagcgagacccgcagagcgcggacgccccaagccaaggaga

SEQ ID NO: 16847 - RNA, 79 nt, Homo sapiens
gggacgcgcacccccgcgccgcacggggacgagacaagcagaccggaagaccgacggaagaccacaccccgagggagcc

SEQ ID NO: 16848 - RNA, 69 nt, Homo sapiens
gaggggccagcgagccccaccgccgccgagaggaggccagagaacaggaaagcgcagaccaggccggaa

SEQ ID NO: 16849 - RNA, 73 nt, Homo sapiens
aacacgaggcagggggccacacgcaaggggaacagaaaaggaagaagcacaagagcaccaggagagaaccggg

SEQ ID NO: 16850 - RNA, 55 nt, Homo sapiens
ccgagccagggaggagagagagcggagacaaggccacagcaggccacggcggggg

SEQ ID NO: 16851 - RNA, 77 nt, Homo sapiens
gaaccaacccacaccagaaaggacacacaggagccggaagggcgaaacggacgaggagaccggggcagagcagaccc

SEQ ID NO: 16852 - RNA, 79 nt, Homo sapiens
gccgaaacgggccggccagcagcaccagggcccagacagaccgaaggggaacagaggccgccccgggacagcagacaga

SEQ ID NO: 16853 - RNA, 56 nt, Homo sapiens
agccggaaagcccagaacagcacgagccccgggaaacaacagaacaaagagccgag

SEQ ID NO: 16854 - RNA, 86 nt, Homo sapiens
cagcgaagaagacgaaaaaaacccagggaccccaagaccagaagccagaggggagcagaagaggagaaggaggagagcccacggag

SEQ ID NO: 16855 - RNA, 78 nt, Homo sapiens
aacacaagacaaccagggggacacggaacccaaggagacgaagcgaagcaggagaaggaggggaaaaaaccggcccca

SEQ ID NO: 16856 - RNA, 77 nt, Homo sapiens
aggcacacaagggaggaggcaaagccagcgacacacagacagccccacccggccgcagcagagacagaccaacaccc

SEQ ID NO: 16857 - RNA, 85 nt, Homo sapiens
agcagggagaagagccagggcccgaccgcagggagcagaggggacagaggcaccaaggaccccaagacaggaccgcggcaagcgg

SEQ ID NO: 16858 - RNA, 72 nt, Homo sapiens
gagaaagcccgagggacacacaaaggaaaacccgagacaagaaaaagcggggaaaacaaaaaaaagaaggag

SEQ ID NO: 16859 - RNA, 40 nt, Homo sapiens
ccgccgcgagggacccggggccacagaccccagcgaaacc

SEQ ID NO: 16860 - RNA, 72 nt, Homo sapiens
aacaagagaaagacccaggaagcagaagaagcgaggagaagaagagggaccaggcagacgaccaaggagcag

SEQ ID NO: 16861 - RNA, 74 nt, Homo sapiens
accgcgacgaagaaaaaaagagcgacgaggcaagggaggaagacaaggaacgcccccacgcagcgacaaaacga

SEQ ID NO: 16862 - RNA, 76 nt, Homo sapiens
acgcacaagcgggcaccagggccgaccgccgcagggcggagaacggaaaagcaccaggaagcagagaggaccgcag

SEQ ID NO: 16863 - RNA, 89 nt, Homo sapiens
cggcggagcaagaggcggacaccccggacgaaccacaggaagcgcggggcggcggcgaaaggacgcaccgcaggcagcagaagaccgga

SEQ ID NO: 16864 - RNA, 70 nt, Homo sapiens
cagaagcacggagcccaagaggcgccaccacaaggacagcacaaagagaagaaaaaaaagaagacagaaa

SEQ ID NO: 16865 - RNA, 81 nt, Homo sapiens
aaaacagagcgggggagaagcaaagaagccacgaacagacgcacgagggaagagggacaagcaaggggccaaggagccaag

SEQ ID NO: 16866 - RNA, 79 nt, Homo sapiens
gcaaagccgaaagggagaggcaacgggacgaccgaaaacccagccagacaaaagagaagcagaggagcgaagaaagaga

SEQ ID NO: 16867 - RNA, 83 nt, Homo sapiens
ccggaagaccagccaacaggaacccacccagcggggacccagaagaggcccgcagccagaacccagaaaagcaaaaggccccg

SEQ ID NO: 16868 - RNA, 68 nt, Homo sapiens
agcccccccagagaagcaaaaacaagcaccccgccagaagcacaccgacccccaacgggccccagggg

SEQ ID NO: 16869 - RNA, 81 nt, Homo sapiens
gggaccccgccaggccagcccaaacacgccacacgaaacaagaagaaagcagcccagagccccccacggcaaccgcagccc

SEQ ID NO: 16870 - RNA, 67 nt, Homo sapiens
caagaagcacaggaacccagagcgagagaacgcaccgggggcagacaccaccaaggaccccaggcac

SEQ ID NO: 16871 - RNA, 75 nt, Homo sapiens
accccaacccgggcaacgaagccagacccgggccagccaggcccagagcacacccccacggggagcggacaggca

SEQ ID NO: 16872 - RNA, 79 nt, Homo sapiens
cgccggagccgcgaggccaagccccgggggcgccgagggcacaagggcaacgacagaagggcgaagccaacgccagagg

SEQ ID NO: 16873 - RNA, 65 nt, Homo sapiens
agcagggcaaggagccaggaaggaggaggaaaaaaggagcaaaaggaacacaccgaagaaaagga

SEQ ID NO: 16874 - RNA, 54 nt, Homo sapiens
caccaggagcagcacgaagaggaagacggggcccaaagaggaagggggaaagga

SEQ ID NO: 16875 - RNA, 75 nt, Homo sapiens
cccgcagcaggacaacccgaacaagcgaggcgaccacagcacacaagccgcgaccacgagcgccagaagaagaag

SEQ ID NO: 16876 - RNA, 66 nt, Homo sapiens
cacaggcccaggcagaccgcagcaaagagaaagacagcaaagaaaaggagaagaaaggaaaaaaac

SEQ ID NO: 16877 - RNA, 98 nt, Homo sapiens
gaaaggaaggagccaagggagccaccacaaaacagaaccggcccaccccccaggaaaagccccgcagggaggagggaaccaaccggggggaaacaaac

SEQ ID NO: 16878 - RNA, 61 nt, Homo sapiens
gcccaggacaggagggaagacggggagagcgaaaggggaccagacggggaagccaaaaccc

SEQ ID NO: 16879 - RNA, 38 nt, Homo sapiens
acagaccgaaagacgcccaggcccccaaaaaaccaaag

SEQ ID NO: 16880 - RNA, 71 nt, Homo sapiens
caaaggcgggaacagacaggcaaccaacacaaggacagagacggaaagggcaaagaagcgcccccacagag

SEQ ID NO: 16881 - RNA, 79 nt, Homo sapiens
cggcgccccacccgcccccgcgggcgccgggccaggacggggaacgaagcccaaaaggcagagacggaccgagacagga

SEQ ID NO: 16882 - RNA, 75 nt, Homo sapiens
aaaacaaaaggagaagacaaaagagagaaaagaaaggagagcaagaaccaaggcccgcaccccacggcccaggca

SEQ ID NO: 16883 - RNA, 76 nt, Homo sapiens
cgacggcgcaagagaaacgcacgagcaggggaaggagacgggcaggagcgagccacccggaacaagcgggcggcgc

SEQ ID NO: 16884 - RNA, 62 nt, Homo sapiens
acagcgggaaagaaggcaaaacacgggggcaaccaaaagccagaccaaaaggaaggacgcag

SEQ ID NO: 16885 - RNA, 87 nt, Homo sapiens
ggggaccacgaaaggagcaagagcaagacaccggacaccgagggcccccaaaaggagccggcggcacaccggcccccccagccagaa

SEQ ID NO: 16886 - RNA, 70 nt, Homo sapiens
cgcgagagccgagcggaccagcgagacgacgggaccgaaggaccccgccagagacaaccgagcgccagga

SEQ ID NO: 16887 - RNA, 74 nt, Homo sapiens
aaaaccacagggccagaaaaaccacaaagggaggcccaccacaggcgaagggaggaggcagcgaaaacacacca

SEQ ID NO: 16888 - RNA, 76 nt, Homo sapiens
ccaagcaaacgcagaaggacgcccacgagcaaccaagagagacagacccagcacggaccccccccccagccgggcg

SEQ ID NO: 16889 - RNA, 51 nt, Homo sapiens
cccggcccgggagcacgacccggaaaacagaacggagacagaaccgaggac

SEQ ID NO: 16890 - RNA, 73 nt, Homo sapiens
caaagaaggaaacagggaaaccccagaagagaaccggaaacacccgagcagaagaaccaacgaaagcagagca

SEQ ID NO: 16891 - RNA, 82 nt, Homo sapiens
ccagcgcgcggcgggcgagggaagcacaagccagcagacgacaacaggcgcaggagacacagcaaagacgcaagaacggaac

SEQ ID NO: 16892 - RNA, 123 nt, Homo sapiens
gccagccgggcaggccccgagaggaacccagccgacacgacgccgccggcaggcccgcgcaccaggggaacgcccgcggacggcagggcgcgacaagaagcgcccgcccgacgagcggcccgc

SEQ ID NO: 16893 - RNA, 73 nt, Homo sapiens
cggaaccgcccagccccggagacgaaggagaccggcgaggaccaaagggagaggaggagcccggaagggagaa

SEQ ID NO: 16894 - RNA, 83 nt, Homo sapiens
gcccgcggaagcacaacgggcgagccggccacaaagccgacaaggcacgacacacggcagggaaccccaccccggaaggcggg

SEQ ID NO: 16895 - RNA, 80 nt, Homo sapiens
agccaagaaccgcgcagacgccggagaggagccggccaacccgcaggacaagaagaccaaggccgagccacagagccaga

SEQ ID NO: 16896 - RNA, 82 nt, Homo sapiens
aggagagccacggggcaccaccgggaaaccagccggacaccaagcggcagaaggccacccaagaggaacacggggaagaccg

SEQ ID NO: 16897 - RNA, 78 nt, Homo sapiens
acgacccagagcacgggcccccggacgcgagcccgcccccgagcgccacccacagcagacaaggagaggaggcagcgg

SEQ ID NO: 16898 - RNA, 81 nt, Homo sapiens
gcggcaccgcgcgacccggaaccgccgggccgaacagcagacgccgcggagaacacacaaccaccaggaaacccggaccgc

SEQ ID NO: 16899 - RNA, 72 nt, Homo sapiens
gcggacccggaccggggagcgggaacagcccacggcgaccagggccaggccaaggagggcgcccaagaccaa

SEQ ID NO: 16900 - RNA, 78 nt, Homo sapiens
cccaaccgggcaggcgagacgcagaggaacggcaaggggaaaccagaagcgggggggcggggcaggcaaaagaaagac

SEQ ID NO: 16901 - RNA, 52 nt, Homo sapiens
ggacccagcgaggaggcagaagaaggaagcaagagaagaaccagccggggag

SEQ ID NO: 16902 - RNA, 81 nt, Homo sapiens
agcaggaggccggagagggcgggaagccagagaccacgccacaccagcggagcccggagcccagagccgaggagaaggcga

SEQ ID NO: 16903 - RNA, 76 nt, Homo sapiens
aaggggacgggcccagaggcccagggaggcaggggcagaaacagagaaggaacagacccagccgggaggagagcga

SEQ ID NO: 16904 - RNA, 77 nt, Homo sapiens
gcagcaacgcgcaccccccgcaggcaaggccgacccgcagggaaagcgccgcagcgggaaccgcaagagcggggagg

SEQ ID NO: 16905 - RNA, 69 nt, Homo sapiens
ggagcgcaacagcagcaccagggagggccagagaaaaacccaagacgacacgcgcgcagaaaccaagcc

SEQ ID NO: 16906 - RNA, 103 nt, Homo sapiens
ccgagacaaaggcaccaggccaccacagaaacaaaagcaacaaagaggggcagcgacacccagacccaccggaccaggcccacccagaagcaacagcccaaca

SEQ ID NO: 16907 - RNA, 79 nt, Homo sapiens
agccgggcacagcccacccacaccccagaacaccccgcagaaaggccggcacagggagacgcagcagaccaaaaaaccg

SEQ ID NO: 16908 - RNA, 50 nt, Homo sapiens
caagaaggacggagcaccgccccgggacaggagaaaaagcccgagagaaa

SEQ ID NO: 16909 - RNA, 74 nt, Homo sapiens
cgcagcgcgacggcgccggcagggaggcaagcgccccgacccgcaggccagggaaagaagccccgggaggagga

SEQ ID NO: 16910 - RNA, 78 nt, Homo sapiens
gacggaaacaaggcaacagaaagagcaacagcagggcaacagggagggagcagaggcgagcagaccaggaccgagaaa

SEQ ID NO: 16911 - RNA, 85 nt, Homo sapiens
cgagcgaggaggcggcgggcgaagagcggcagggcccaccgcgaccggccgcaggagggaaggagcgggagcacagcaagaaagg

SEQ ID NO: 16912 - RNA, 77 nt, Homo sapiens
ggggcaccaaaagggcaagcgaagaagaagggggcagcggagcaaccacccccccgcgacccaccacagccaagggc

SEQ ID NO: 16913 - RNA, 59 nt, Homo sapiens
caaaacgcccccaacccagcgcaaaggaagaggaagaggaccacccgcacccaggggac

SEQ ID NO: 16914 - RNA, 94 nt, Homo sapiens
cgagcagcggcgcaccgggcgggccccggacccggagacaccccgcagcacagccgcgaccaagaaacgaggccgaagagcgaagacacggccc

SEQ ID NO: 16915 - RNA, 81 nt, Homo sapiens
cgacagaggaagaggacagcgggaagcgaaagaacgcagaggcccacagcaagaaggggcagaccaacaccacccagcaaa

SEQ ID NO: 16916 - RNA, 74 nt, Homo sapiens
gggcgaggcggcggcggcggccggagccccagccggagcgaacgcacggaaacaagagggagcgcccggcggcg

SEQ ID NO: 16917 - RNA, 74 nt, Homo sapiens
ccaggccgcacggacgggggggggggaggagaagcccaggaggagagggaggagcagcgcacggaaacgcagcg

SEQ ID NO: 16918 - RNA, 81 nt, Homo sapiens
ccccgagggaagagaacgggacgcggaacgggacccggggacggcacccagaggaccaggcggcggccggggggggcacag

SEQ ID NO: 16919 - RNA, 90 nt, Homo sapiens
cggccggggcgccgcgcgccagcccaggaaaggcgccgaagagaacggccgcagagaaaaccgcacacaaagggaaagaaaaagacaaag

SEQ ID NO: 16920 - RNA, 86 nt, Homo sapiens
gccaggagagcgcgccggcgagaagcggccgagccagcagcaggcacgagacagcggaaagaagaaaaacaacagcagaacaacgg

SEQ ID NO: 16921 - RNA, 68 nt, Homo sapiens
acaggccccggaagccccacagccgaaagaaaaccgggccagacgacaagcaaacaaaagagaggaca

SEQ ID NO: 16922 - RNA, 67 nt, Homo sapiens
acgaggggcgaaccacggaaaggaggaagaagacaccggggacagacaggggaccggcacccccgcc

SEQ ID NO: 16923 - RNA, 70 nt, Homo sapiens
gccggccgccgagcccgagggcacgaaccgggaaagagggaccaaccaagaagaaacaacgaccaccacc

SEQ ID NO: 16924 - RNA, 113 nt, Homo sapiens
acgagggaggcaagagcggcccaccaaggaaaggggacagcaacagccggcgggcggaagaaaccacggagccccggaacagccgcccagagggaaggggggacaggccgagg

SEQ ID NO: 16925 - RNA, 81 nt, Homo sapiens
gaagaaacagaacgccccacgaggcggcgccgcgaaagcccacagggcccggacccaagaccagcaccaaggccccccagg

SEQ ID NO: 16926 - RNA, 57 nt, Homo sapiens
cgggagcccgccgcgagagcgcaggggggcagcggcacgcaagggcaaggcgaccaa

SEQ ID NO: 16927 - RNA, 76 nt, Homo sapiens
gaacagacgcaggaaggagacgcggccacgccagaacagccacagccagcaaagagaagggaagaagacgagcaac

SEQ ID NO: 16928 - RNA, 35 nt, Homo sapiens
aagcaccggccacaagcgggccgcgacgaaccggc

SEQ ID NO: 16929 - RNA, 62 nt, Homo sapiens
ccaagccacggaccagagacacgccaagcagccagcccaggagagggccaacagggcaaaca

SEQ ID NO: 16930 - RNA, 73 nt, Homo sapiens
gaaagaagaacgagacagacacaggagaggagccaagcccaacgggacgggaaaacggccacagccaacgacg

SEQ ID NO: 16931 - RNA, 68 nt, Homo sapiens
ggagggcacaaaagagcagaccgaagaagcgcgcgacgggaccacaggcgaccgggaccacgcggcga

SEQ ID NO: 16932 - RNA, 79 nt, Homo sapiens
gaagcagagaagaaagggcaggggccagccggccgacaaaggcgggccacagcgggaggcgccaacagaaacaaggccg

SEQ ID NO: 16933 - RNA, 85 nt, Homo sapiens
cgacggcgccacaccgagcgcgaggcgcggagagcaacgccgggacagcgcaagaagacgaccccgacgcaggccaggagccgcg

SEQ ID NO: 16934 - RNA, 66 nt, Homo sapiens
agcggagcggaaaggcaaagaaaaaccgggggaccaacagcaggcagaaagccagagcagccagac

SEQ ID NO: 16935 - RNA, 65 nt, Homo sapiens
aggagcggcccgccgagggggcgcgccccccgggaaaagagcaaagaccaggggacgaaggccgc

SEQ ID NO: 16936 - RNA, 98 nt, Homo sapiens
accgccccagagaccccggaaaaaaccaaaacagccacgagaacaccccaggccaggacgaggggaagaagacagcaggcgggggcacacggcggggg

SEQ ID NO: 16937 - RNA, 81 nt, Homo sapiens
ggaggaggaaaccaagaacggaaagcggcgccccggaggggagcaaggccacagaccccaagaaggacaacccgaggcgag

SEQ ID NO: 16938 - RNA, 82 nt, Homo sapiens
aaacaggcgggcaaaacacaacgaacacagaaaacgcacaaccaccgcgcaccaaggagcacggcgaacgcacagagcaaga

SEQ ID NO: 16939 - RNA, 36 nt, Homo sapiens
ccgggggccgggaccccggccagaaccgcccaaacg

SEQ ID NO: 16940 - RNA, 78 nt, Homo sapiens
agaaaccaggaggagaagcgggagcagaaggcaagcaccgggcagcagaaggaagaccgcaggaaagcaggaaggcaa

SEQ ID NO: 16941 - RNA, 77 nt, Homo sapiens
caccaggaaacgcgcaagacgcccaagagaagagggcaaaggaggagcccaacaccgggggagggagcagccccagc

SEQ ID NO: 16942 - RNA, 78 nt, Homo sapiens
gcggcacgcgacgccaaaacgcgggcagccacggccgggggcgccagagcaacggcgcggagacccaacaagcccaag

SEQ ID NO: 16943 - RNA, 72 nt, Homo sapiens
ccggcggcaagccaggggggaacaagcacggcgagagagcccaaaacagacggaagcaagaagaccggagcg

SEQ ID NO: 16944 - RNA, 64 nt, Homo sapiens
cgagcggcgcggacggcgcgcggacaccaggaaaccccccaggcaagaggcgcaggaccgggaa

SEQ ID NO: 16945 - RNA, 70 nt, Homo sapiens
aaaagccaagccaagaaggcggagaggcaaagacagaggaacgaacgaagacaaagcaaaaccacaggag

SEQ ID NO: 16946 - RNA, 78 nt, Homo sapiens
ggagccaaaccccacccacagcgaagccaaagaggaaacgacacggccggcacagagcaacaagcaggccccagccag

SEQ ID NO: 16947 - RNA, 50 nt, Homo sapiens
accacaagaggcaaaacgagagggaagcaaggaaacgaaacaggaagagg

SEQ ID NO: 16948 - RNA, 69 nt, Homo sapiens
gcgcacgaccccgacacccccaagagggcagcggcggacggcagagccccgggccagcccaccccgggg

SEQ ID NO: 16949 - RNA, 72 nt, Homo sapiens
ccagggcccacacaacgcaaggaaagagaaaaggcacacacacccgcaggagagcgccggagaaaggaagaa

SEQ ID NO: 16950 - RNA, 80 nt, Homo sapiens
gcgccgcgacaagacgggccgagcccgaggggacaagggaggcgaggacggacaaaaggaaacggacgggaggccagcca

SEQ ID NO: 16951 - RNA, 80 nt, Homo sapiens
gagcagagggaaagggaaggagaaggagggacgcaggcgcaggccagaacaggcaagggccaagacaagcccagagggcc

SEQ ID NO: 16952 - RNA, 77 nt, Homo sapiens
caagggagaacgaaacggagaggacaagacgggggagagacgaagcgcacggggcaacagccacacccggagcaccc

SEQ ID NO: 16953 - RNA, 83 nt, Homo sapiens
gcgacggggcccgcaccccagagcgggagcaccgcggccccgggaccaccgcagagcggaggcaagcagccggacaggcagcc

SEQ ID NO: 16954 - RNA, 75 nt, Homo sapiens
cgccgggaccaacaggggcaagacaagccagaacgagaagcgcaccacaggaagggccccacaccaaaccgccac

SEQ ID NO: 16955 - RNA, 71 nt, Homo sapiens
cacagcccggccaccccccggcccgaagccccacgccagagcggaaaaggaggagaaagccgcagccgaac

SEQ ID NO: 16956 - RNA, 73 nt, Homo sapiens
ccgacagccggaccgcaacaccgcaacccacgcaggcaaggaaaaccgaggcgccccggcgaccgggcacccg

SEQ ID NO: 16957 - RNA, 77 nt, Homo sapiens
cgccgcccagcgaagcagagcaaggaagcaggcgcccccggcgaaaacacggggaagagaaagccaaaaagaagcca

SEQ ID NO: 16958 - RNA, 79 nt, Homo sapiens
aaacccaggaaacgagaccagaccccagagaggaggcacagaagggaacaagaaggggcccaggccggggacgaaccca

SEQ ID NO: 16959 - RNA, 78 nt, Homo sapiens
aggacgggcaccgggcagcccgggcgggcccagcccagacggaagccgcagaaggaccggccagaagcaagccggaga

SEQ ID NO: 16960 - RNA, 84 nt, Homo sapiens
gcggacgcgcagcaggcggggaggacgaggggcccgggcccagagcggaagacaagacgaacaccagcaggaaaaaagagcggc

SEQ ID NO: 16961 - RNA, 92 nt, Homo sapiens
cggcacccaccgccgggaggaggaggaggagccgagaggagcgagcgagcgcggaagacaaaaagccggcaccacgggaggaagaaggcagg

SEQ ID NO: 16962 - RNA, 84 nt, Homo sapiens
gcggccggaagcgcggagggagccgcgggaggaccgcaggcagggggcagggcgaccacggagccccccagacacagaccgacc

SEQ ID NO: 16963 - RNA, 68 nt, Homo sapiens
ccgcacaaacaacaaccaaggaaagagcaacgacgcccgggagcagagccaacagcaggggggagcaa

SEQ ID NO: 16964 - RNA, 88 nt, Homo sapiens
cgggcgcgccagcaagcggggccggggcgcccggcggagaccccgcgccggacccgaggcagcgacccacaccgggggcacgggccac

SEQ ID NO: 16965 - RNA, 73 nt, Homo sapiens
ggcggaacaggcaccaagccggcggggcgggcccgccagcaagaggaaaagcagagacacccggcacccagga

SEQ ID NO: 16966 - RNA, 64 nt, Homo sapiens
cgagaggaagacgagccgggaggaacggcccggaaacaggaggaccacaacccccggcccagag

SEQ ID NO: 16967 - RNA, 82 nt, Homo sapiens
cgcccgggcccgaggaggcagccaagccaggccgccacgcggcgggcggccgagcccgggggaggccccggagcgcagccgg

SEQ ID NO: 16968 - RNA, 62 nt, Homo sapiens
gaaggcacggaaagagagaggaaggaggaacaccacgcgggaaggagggagcgcccaaaaaa

SEQ ID NO: 16969 - RNA, 60 nt, Homo sapiens
cacaagccaggaaggagacacggccccccaaggaaaacaggcacagggcgggcagcccca

SEQ ID NO: 16970 - RNA, 79 nt, Homo sapiens
agcgagcgcagcaaagcgcccagccgccgcccgcgcccgcggccggggccggcacagccacaccgagaagaccggccca

SEQ ID NO: 16971 - RNA, 71 nt, Homo sapiens
gaagagaaaggcccggagacgcaacaccaacagcggcagagaagaaaccgaaacacaaagaaggaaaaaga

SEQ ID NO: 16972 - RNA, 37 nt, Homo sapiens
ccagcacgaccagcacagacagacagagcgacggccc

SEQ ID NO: 16973 - RNA, 35 nt, Homo sapiens
agagggacccacccggcggggacccgggagacaca

SEQ ID NO: 16974 - RNA, 53 nt, Homo sapiens
gcccgcaagaggccagcgaaaaccgaagacgccaggaagccggacgcgcaggg

SEQ ID NO: 16975 - RNA, 82 nt, Homo sapiens
ccccggccgggccggccagcgccggaaaccaacaaacggccaaaaccacacgccaaaaaacaacagcagccacaccagagcc

SEQ ID NO: 16976 - RNA, 58 nt, Homo sapiens
gacagcgcgagccaggacccggccgcgccagaagggaagaaaggcggaacggcgggcc

SEQ ID NO: 16977 - RNA, 79 nt, Homo sapiens
cggaagccggaggaacgggcccgcaagcgcaccgacaggaagggaccacagaccagcacgccggcgccacgaaccgagc

SEQ ID NO: 16978 - RNA, 63 nt, Homo sapiens
agaaacggaggacaagaagccggacacaaggcgccacggcagcggcggcgcccagcggccaca

SEQ ID NO: 16979 - RNA, 65 nt, Homo sapiens
ccgcgaagcggaagacagaaccaggaagacagagagagaaaagagagggcagaggcacgaggcag

SEQ ID NO: 16980 - RNA, 36 nt, Homo sapiens
gacccggacagcgaccgcaagaagagggcgcaggcc

SEQ ID NO: 16981 - RNA, 42 nt, Homo sapiens
aaacgaggcacaaagaagcaaacgagaaggagacccaaccag

SEQ ID NO: 16982 - RNA, 78 nt, Homo sapiens
cggagggggacgggggcggcccagaagaggcggaggcggggaaacaagggacgaacaaaacaccgaggaaggacacac

SEQ ID NO: 16983 - RNA, 69 nt, Homo sapiens
agccgcaagacagccccccgcccccccccccacgcaaccccagaccaacacacaggaagggagccagcg

SEQ ID NO: 16984 - RNA, 73 nt, Homo sapiens
cgacgcgggaagaaaagcagggcaggcacggggacgaaagaaagagaaagacagcaaagaaaaggagaagaaa

SEQ ID NO: 16985 - RNA, 59 nt, Homo sapiens
agccggaaaccccgacgggcggcccagaaagaaggaaccacaaggggacaacaccacag

SEQ ID NO: 16986 - RNA, 64 nt, Homo sapiens
cgaccgcggcgcgagcaccaggacggccggagcagcagaacaagagcggagaccaagggagccc

SEQ ID NO: 16987 - RNA, 74 nt, Homo sapiens
ggacaaaaggagacgaaaacaccggaacaaaaggacggcaacaagcgcagaaaggccagacagggaccgaacga

SEQ ID NO: 16988 - RNA, 85 nt, Homo sapiens
aagcccgagaagacggaggaggaccagaggagcaggccgaaacagaagcccgcgaagccgggaagaccaggagcagaaaaaccgc

SEQ ID NO: 16989 - RNA, 37 nt, Homo sapiens
aggagcacgaagaagcaggggcaggaaccacagagaa

SEQ ID NO: 16990 - RNA, 82 nt, Homo sapiens
cacacacgagcgcgaccccaaggcaaaagcagaccggaaaacccaccggcaagaccacacccgaggggagcccaggacacca

SEQ ID NO: 16991 - RNA, 81 nt, Homo sapiens
ccgggaggaacgggggaagccagaagcagaggacaacagaacgccagggggacacggaaagcacaaggagaaaaaaggcca

SEQ ID NO: 16992 - RNA, 36 nt, Homo sapiens
ccagacccacagcgggggcgcaggcgggaaaacggc

SEQ ID NO: 16993 - RNA, 77 nt, Homo sapiens
gagacgccgccgccgccgccccaggggggcgcccgccgggacgccgaccgccgggacgaggaaacggcaaaaggcgc

SEQ ID NO: 16994 - RNA, 85 nt, Homo sapiens
gggcgccagcagggcaggaccgagacaccgcagggagacaggacccagaccagccaaagagaagaagaaaggaagcaaaacaaag

SEQ ID NO: 16995 - RNA, 57 nt, Homo sapiens
gacaagaagggcaaagccgaagccgaagggaagaaacgcgaaggaggaggcaggcga

SEQ ID NO: 16996 - RNA, 72 nt, Homo sapiens
agaggagcgggaaacgggagggaaccagcaacaagccggaaaccgccagaagcgcggcgagaaaacagacgc

SEQ ID NO: 16997 - RNA, 54 nt, Homo sapiens
aacaaacagaggcagcaaaagaggcaagaacgccccggcaaggacggaggcagg

SEQ ID NO: 16998 - RNA, 78 nt, Homo sapiens
cacacggcaaaaaaacgccccagagcaaaacgaagcacggacaaggcaccaccccaggcaaaagaacaacgccagcag

SEQ ID NO: 16999 - RNA, 51 nt, Homo sapiens
gcagcaccgagaaacaaggcaaacaacggacagagggggggaagaaagaag

SEQ ID NO: 17000 - RNA, 51 nt, Homo sapiens
ccaccgaaacgccaaaaagaagacggacagcacgaaaagccgcggccagga

SEQ ID NO: 17001 - RNA, 70 nt, Homo sapiens
agaccggagcgagagaccggaaagaggagcgagggagaagccagagagcgaccaccaaccgaggaagaaa

SEQ ID NO: 17002 - RNA, 71 nt, Homo sapiens
gcccaaagccgaaggccagagcacgccacgcagaagaaaaccgagacccgaagaagccgcaagagaagggc

SEQ ID NO: 17003 - RNA, 74 nt, Homo sapiens
gaacgagacagaacaggaaaaagggaggagagaaagaacccacgcaggacgacagaagaggccggacaagagaa

SEQ ID NO: 17004 - RNA, 42 nt, Homo sapiens
acggggaggccaacggaagaaaacggcggccaaagcgccaga

SEQ ID NO: 17005 - RNA, 80 nt, Homo sapiens
aaccgccccagacccaacccgcagggcaccgaagccaaagcacgccagccggagaagggaaggagcgggggaaagcgcag

SEQ ID NO: 17006 - RNA, 76 nt, Homo sapiens
agccccgacgcagccgggaagggaagcaggggacgcagcccgaagaagcagaagcgagggcagagagcgacggaag

SEQ ID NO: 17007 - RNA, 83 nt, Homo sapiens
ggcggagcccgcagaccgcagaaggccggagacaccagcagcaaccggagcagaagccgcaccaaagcaaggaccacaaggac

SEQ ID NO: 17008 - RNA, 76 nt, Homo sapiens
accccggcggcgcgcggaccagggggcggcgccaggacagagccaccaaagaacaacaagagccgcagaaggcagc

SEQ ID NO: 17009 - RNA, 85 nt, Homo sapiens
ccggagacagccaacgagagacccaagagcgcagggcccccagacccgcacgggaacagcgaccagaaggcgcgcggccgcgcag

SEQ ID NO: 17010 - RNA, 75 nt, Homo sapiens
agaaagcagccagggaagagaaaccgagcaacagacaaagcccgggaaccgagaaaccaagacccgaaaccagcc

SEQ ID NO: 17011 - RNA, 84 nt, Homo sapiens
cccccaccagggaccaccggggaaacagcagcaccaaaacgaggacaggccaaggggcagagcacaagaacagccggggcgggg

SEQ ID NO: 17012 - RNA, 74 nt, Homo sapiens
ccggcagcacaccggcgccccagacgcgcgccggacaacggagcacagaccaacagaaaacagacgacgggcac

SEQ ID NO: 17013 - RNA, 61 nt, Homo sapiens
cgccgaggcccgcccgccgcgcacccgccaggcaaggaccacccagcaaagcagggaagag

SEQ ID NO: 17014 - RNA, 80 nt, Homo sapiens
cgaagaccccaaggaggacggcgagagcacggacagaccaggggaagggccaggccaggaacgggaaccagggaacaagc

SEQ ID NO: 17015 - RNA, 81 nt, Homo sapiens
acacccacagagaacccagacaacaggacgccgccaagggcagacacacaagccacgggacccgacccacagaccggggcc

SEQ ID NO: 17016 - RNA, 36 nt, Homo sapiens
gacggagaaggcagaaggacccagccgagcccacgg

SEQ ID NO: 17017 - RNA, 85 nt, Homo sapiens
ccagcagcaagaccaagagaggcccgggacccaacggaagccaccgccccaccaacggggccaaccaaaaggagcaggccagcaa

SEQ ID NO: 17018 - RNA, 78 nt, Homo sapiens
caccaggcgggcaagagcaccgggacccacgcgaccccggggccacccaagcaccaggaagaagaggcggaagaaaca

SEQ ID NO: 17019 - RNA, 60 nt, Homo sapiens
cggcggcgcggaggcggcgagggcgagccggggccagagaacaagcccagacagcaagac

SEQ ID NO: 17020 - RNA, 102 nt, Homo sapiens
gcggaaagaggaggagaggggaggaggcgaaggcccaccagaagagccgacaagccggcagaaggcagacacaaacaaaagggcagccacacgagggccaag

SEQ ID NO: 17021 - RNA, 79 nt, Homo sapiens
cagggcccggccccacgccgaacaagaaaacaagcaaccacccagacagacgcaaacaacagcgacccagagacacagg

SEQ ID NO: 17022 - RNA, 63 nt, Homo sapiens
acacgcccagacggggcagaaagaagagaaaagcagcaaaaagaagagccgggcagacccgaa

SEQ ID NO: 17023 - RNA, 78 nt, Homo sapiens
ggcgaccacaagcaaacaggaaaaaccagaagagaaaaaacaaaggggagaggcaccccgcgggacgaccggacagag

SEQ ID NO: 17024 - RNA, 79 nt, Homo sapiens
cggcaggacggaaggggaagaggcccacccggagaaccccacggagaaccagagggagagcccgaccagagaaaaggcg

SEQ ID NO: 17025 - RNA, 79 nt, Homo sapiens
gaaacagacgaaaccgaacgaaaggagaaacggaaaagacccccagacgaacaaggcaggaccggaaggaacaacacca

SEQ ID NO: 17026 - RNA, 64 nt, Homo sapiens
gccccgcagcagcagcccaaaggaagggaaagcccaacgacaggaagacaacacaaagcgagga

SEQ ID NO: 17027 - RNA, 70 nt, Homo sapiens
ggagagagacaccaccccaagaggagaagcagcaagaggaagcggcgcgggcccccccacccccaagaac

SEQ ID NO: 17028 - RNA, 69 nt, Homo sapiens
ccggacgggagcaagcgacccggccggacccaccgaccagaccggaccaaaccagagacaaaaggcaca

SEQ ID NO: 17029 - RNA, 67 nt, Homo sapiens
cgcagaggccgggccaacggagaaggaggaccgcgccaggcagaaggagaaagaggacacggccgac

SEQ ID NO: 17030 - RNA, 65 nt, Homo sapiens
cggaagccgaaccaacggagcaagcacccaaaccgaggccccaaacaccgaggcaccccagcacg

SEQ ID NO: 17031 - RNA, 73 nt, Homo sapiens
acgcccagggccgcgccccccaggcccacaaccagcccagcagcagcaagcagggcggagaacggaaaagcac

SEQ ID NO: 17032 - RNA, 76 nt, Homo sapiens
aaacagaacggaagagggaaggcacgaggaagagacaacaccagagggccccagcaacaggggaagaacacaggcg

SEQ ID NO: 17033 - RNA, 69 nt, Homo sapiens
gcggaacagcacaccaggagagaagcgacagccgcaggacgcccaaaacagacacagggccaaaaaccc

SEQ ID NO: 17034 - RNA, 66 nt, Homo sapiens
gaacaaggaaaggaaagaagacacaaggaaaagagagaacgcagaagaaagccagagaacagagca

SEQ ID NO: 17035 - RNA, 38 nt, Homo sapiens
gaaaacaaaaggggacaggagaagagaggcagcaaagg

SEQ ID NO: 17036 - RNA, 74 nt, Homo sapiens
gcccccagcagcagaccggaagaggaacccgcgcccagaagggaaggccacggacggggaaacgcaaggcaacc

SEQ ID NO: 17037 - RNA, 72 nt, Homo sapiens
gagccgcaggggcggcgcgccgcggggcagggccaaggagaccgggagagagacgaaggacgcgcaggggca

SEQ ID NO: 17038 - RNA, 76 nt, Homo sapiens
gacgggcaccgagagggacacggggcaccgcgccgcagcggcaaaagcagaccggaaaacccaccggcaagaccac

SEQ ID NO: 17039 - RNA, 70 nt, Homo sapiens
aaacgaacgccagcgacgcgcacaaaacaaacagagagagaagggccagaacaccgagagaaaaaaaacc

SEQ ID NO: 17040 - RNA, 76 nt, Homo sapiens
gcaagccagacacgcgagaaaagaagcgggcagccggcaagaagccaacggagaaccaaggccaagaccagaacca

SEQ ID NO: 17041 - RNA, 77 nt, Homo sapiens
gggcccggggaggcaccgacgaggagccccccgcaagaggaagcaggagccagcccagccagagaccgcaggcaacg

SEQ ID NO: 17042 - RNA, 69 nt, Homo sapiens
aagcaacggaccaagaaccaaacgaccgacaccgcaagaccccgaagcccagaaaacgcgaggacacca

SEQ ID NO: 17043 - RNA, 86 nt, Homo sapiens
gccaccgccgcagcggcgcagcccacgccagacgaccccacccgcgccgcgacccgaccgccgaccaggcacgcccaaccccgcga

SEQ ID NO: 17044 - RNA, 48 nt, Homo sapiens
agcagaaaaccaccagaagacaccaccgcgggacgggagaaaggggag

SEQ ID NO: 17045 - RNA, 69 nt, Homo sapiens
ggacaacagcagagccagacagggcagaccgccagcagcacagcaagccacagagagggccggcagggc

SEQ ID NO: 17046 - RNA, 71 nt, Homo sapiens
gggaaagccaaggaaaaacggagagccacaaaaaaggaagcgaaaaaggaggcccagaggaaaaagacacg

SEQ ID NO: 17047 - RNA, 79 nt, Homo sapiens
ggagaacggggcgaggagcagacccagcccggagccaggcgccaagcagccacccgaggaacaggacaggccaccacgg

SEQ ID NO: 17048 - RNA, 74 nt, Homo sapiens
cccaccgaggacagccccgccccaggcagcgaaggcgagagcggagcaccaggcccggaaagagcaggcacccg

SEQ ID NO: 17049 - RNA, 87 nt, Homo sapiens
aaagcgaagcgggaacccaggagagagagcagcgccacaaagcccggcgcagaccacaagacgggaaaccacggaagaccgaggaac

SEQ ID NO: 17050 - RNA, 60 nt, Homo sapiens
ggggcagaaacagagaaggaacaggggaggaacccaggacaccaggggaaagcaccgcag

SEQ ID NO: 17051 - RNA, 71 nt, Homo sapiens
ggaggcaccagcgccgcagaggacgccgccggcaaaaaggcaaaaagagcgcgaagagacggagcagaagg

SEQ ID NO: 17052 - RNA, 84 nt, Homo sapiens
gaaggagccaagagaccaaccaaggaaacccccacccagcggagaaacccagccaacaccaccgagagaccgacccagaagccg

SEQ ID NO: 17053 - RNA, 79 nt, Homo sapiens
acaaagaacgagaggagagagggaccacacgcgccaacacagaaaagacagagccagaggaccccggacaaacacagcg

SEQ ID NO: 17054 - RNA, 40 nt, Homo sapiens
caccggaacggacagcccccccagacaccccccgccggac

SEQ ID NO: 17055 - RNA, 76 nt, Homo sapiens
aggggcggaggcggaggcagaggggaggcgcgaaagggaaagaacaaaagcggagcagcgcgacccgccgagaaaa

SEQ ID NO: 17056 - RNA, 82 nt, Homo sapiens
aggagacgccgagcagccgagccggaaagaccacagcaagaccacgcccccagccgggggaccaggccgaacgacccggaca

SEQ ID NO: 17057 - RNA, 80 nt, Homo sapiens
aaaaagaagaccacccgaagagaggcaggccgacggaggaggagggcgcaaacaaaaaggccccgagaagcagaggaaag

SEQ ID NO: 17058 - RNA, 74 nt, Homo sapiens
cgcgcacgggaaccgaagagagccgggcagaccccaagaagcaggcagacacaggcccaccaggacgagagagc

SEQ ID NO: 17059 - RNA, 76 nt, Homo sapiens
agcccaccagacggagcgaaccaccgaagcacgagagacaaggaggggcgcgccgcccacccccaaagccacacgc

SEQ ID NO: 17060 - RNA, 75 nt, Homo sapiens
ccggaaaccggaccggaacaaggggaggagccagccagagggcaaagcggcgaccaggggaagaggaacaaacgc

SEQ ID NO: 17061 - RNA, 76 nt, Homo sapiens
ccgccccgccgaggcgacccgaccccgcgcccacccaacaaggcaggcgaaacagcaggagagggaagaggaaaaa

SEQ ID NO: 17062 - RNA, 82 nt, Homo sapiens
ccccaggcccaggggggccagacacaccagcagcagaaggagcgcagcagcgcggcgcacgcggcaagaggcgagggcccgg

SEQ ID NO: 17063 - RNA, 71 nt, Homo sapiens
ccgccacgggccccgcacagggaagagggagaaccgcacgcggaaagggaacaaggcggagaaggaggaaa

SEQ ID NO: 17064 - RNA, 85 nt, Homo sapiens
gaacaccccggggcgcgccggaggccgaccgggagcacgcaggaggaagcccgaaggagcagacacgggccaggcccagcccgac

SEQ ID NO: 17065 - RNA, 108 nt, Homo sapiens
aaaaagggcaccaggggaacaaggcaagggggggcacaaaagcaacacgggccagaacccgggagcacagaacgggaagagagcgagccccagagccccggaagagaa

SEQ ID NO: 17066 - RNA, 77 nt, Homo sapiens
gaccaaacggaaagccgacagagaagagagaccacaacacagaagaaacccacagggcaggcccagcagggcagggg

SEQ ID NO: 17067 - RNA, 67 nt, Homo sapiens
agggcaagacaagaaaaacacaaccagagcgccaagaagcaccacaaagaaagagggcccagaggag

SEQ ID NO: 17068 - RNA, 74 nt, Homo sapiens
agcaaggaaagcagaaggcgggaaaaagaggcagggcagaagagcaggcaggggacgcagggagagacacagag

SEQ ID NO: 17069 - RNA, 55 nt, Homo sapiens
gaagacgccaaggcagacaaggacaaccagagcgaccaggcgggcacaaaacgca

SEQ ID NO: 17070 - RNA, 72 nt, Homo sapiens
agccccaggacacagagacacaaaaacagaacagggacaccaggcgggcagacacccagagggcaggggggc

SEQ ID NO: 17071 - RNA, 68 nt, Homo sapiens
ggggcgacaaggaaaaaaaccgggcagaacggcggaaaggacaacggcaagcggagaagagcaaggcc

SEQ ID NO: 17072 - RNA, 74 nt, Homo sapiens
ccgagcaaaaagaaccagcagcggggaggcgagccccgcagacccccgaggaccgaagagccgggcccaagggc

SEQ ID NO: 17073 - RNA, 63 nt, Homo sapiens
acgcggcaggcgagaccccaggcacagagaccccaccacaaggaccgggggacacccgacagc

SEQ ID NO: 17074 - RNA, 75 nt, Homo sapiens
gggcggccgggacggaggacgcgcagcgagaaccagaagccacaggccaaccaagcaaagcaaacaaagccagaa

SEQ ID NO: 17075 - RNA, 71 nt, Homo sapiens
ggacaccagcgagggccacacaggagcccggacggcacagggaaacggcgaggaaagagaggagccccgga

SEQ ID NO: 17076 - RNA, 88 nt, Homo sapiens
gcacagaaaccggcgaaaagaagaggaagcaaagcgggcacggagagaagaaccagcccaaaccaaaggcggacaaccggccggaggc

SEQ ID NO: 17077 - RNA, 73 nt, Homo sapiens
aacgcccaccaaagaggaaagcgaggaggagcgagcgcgagagggacaaggagggcaagaccccagaagaggg

SEQ ID NO: 17078 - RNA, 69 nt, Homo sapiens
cccccggacccgcagggcgccaaagcgagagagggaagcgcccggccaaaacgggacgccccacccaga

SEQ ID NO: 17079 - RNA, 68 nt, Homo sapiens
cagaccggcgccaacgaccgaaacccaacgagaagagaacaacagaacgcggaggacacagaagggaa

SEQ ID NO: 17080 - RNA, 88 nt, Homo sapiens
accggaccggaggggggcagcgagcaagcggcaaggcccgagaagcgaggaaaagccacagccccggaagcgccgcggaaagcacaga

SEQ ID NO: 17081 - RNA, 67 nt, Homo sapiens
ggaggccccagggaagcgcagaaagcaggcgaacccgcggcgcaaaacgacagacgcgaagcaaagc

SEQ ID NO: 17082 - RNA, 112 nt, Homo sapiens
ggcccggccgaccccggaagcgagcgcggacgccacccgggggcacagcaaggccaccaaccaaggcaaccagcgagcgaacaaccacagaaacgcgacagggccacagagc

SEQ ID NO: 17083 - RNA, 81 nt, Homo sapiens
ggcaacacggacacccacagcggggcggcggcggcggcggcgcggcccaaaagaaaaaagaccaccacggagaacagaagc

SEQ ID NO: 17084 - RNA, 71 nt, Homo sapiens
gcaaagacgcaaccaacgaaggggccggccacgggaacccgacaaaaggagccagaagaccacagcggaac

SEQ ID NO: 17085 - RNA, 74 nt, Homo sapiens
cgagccgcgcggcgcggggccccgcggcggagggcggcgcagccgaaggaaagcacgaaggaacgaccgccaaa

SEQ ID NO: 17086 - RNA, 76 nt, Homo sapiens
ccgaaccccgggacagagccaagccaggaccgccagaagcagcgcgacggagagccaagcccggggaagaagcaca

SEQ ID NO: 17087 - RNA, 81 nt, Homo sapiens
cccccagcagacacacggggccggcccaccaagaagcgcagcagcaggccaggggaggagcggcaagcggaggacagagcc

SEQ ID NO: 17088 - RNA, 75 nt, Homo sapiens
ggcaagagagaaccgaccaagcgggagccgccccacccggcagagcagagccggcccagcgcccgagccgaccag

SEQ ID NO: 17089 - RNA, 77 nt, Homo sapiens
ggaccaggcgaagcggccgagcaggcgagcgaacgacgagaggaaaacccaagacaaggaagggcaaagcccacagc

SEQ ID NO: 17090 - RNA, 78 nt, Homo sapiens
gcaaaacaaccagaaggggagaaggcaggcaccacaaaaaggacagccagaacggaagaccaaccagaagacacacaa

SEQ ID NO: 17091 - RNA, 75 nt, Homo sapiens
ccgcagaagcacgaaaaccccgggccgcggacgcagcacagacaacaggcacaaagagagaaggaacacccacag

SEQ ID NO: 17092 - RNA, 59 nt, Homo sapiens
accaagcccgggagcagccaacagcagaagaggagaaggcagagcccccccaggcagaa

SEQ ID NO: 17093 - RNA, 76 nt, Homo sapiens
gggcggcccggaggcaagccacacaggggagaccagcgagagccagagagaagaagcgagagaaaaggaacggaag

SEQ ID NO: 17094 - RNA, 59 nt, Homo sapiens
aacaagaaggccaaaaaaacccagcggaaagcaacaaaaggggaaaagaaacaaacaac

SEQ ID NO: 17095 - RNA, 68 nt, Homo sapiens
cgggaaccggcccggagcgagaacgcgcggcaccagccggggaaaggagcgcagcgcccgggcggagg

SEQ ID NO: 17096 - RNA, 75 nt, Homo sapiens
agaagcaagacgaaaccaagggcacacaaacagccaaggcaggaaaggaaagagacaaagaaaggccgacagagc

SEQ ID NO: 17097 - RNA, 66 nt, Homo sapiens
gcaccacacacagagggaaacggaaagggggcccacagagcgaaaagaggagccggaacccgggac

SEQ ID NO: 17098 - RNA, 40 nt, Homo sapiens
gcccaggcagaccgcagcaaagaccccagaaccgagcgag

SEQ ID NO: 17099 - RNA, 76 nt, Homo sapiens
aacgcccccaccaccgcaaacacgcaccgaaaagaccggaggcaaaagaggaaccgacccaacacaacagcggcga

SEQ ID NO: 17100 - RNA, 77 nt, Homo sapiens
ggcgcgagccgcagccggcccgccggaaagaccacagcaagaccacgcccccagccgggggaccaggccgaacgacc

SEQ ID NO: 17101 - RNA, 70 nt, Homo sapiens
caacagcgaagcgccgggaagagagaccaacgcggggagaacacggaagggccagcaaaaacaaccagaa

SEQ ID NO: 17102 - RNA, 78 nt, Homo sapiens
ggagaaaagaagccaaagggacacggaagccggaagacgggaaaggaaacgagaacgggcagcgcagacgcaaagaaa

SEQ ID NO: 17103 - RNA, 73 nt, Homo sapiens
ggaaacacagaagcaagggagacaagacccagcagagagaaaacggcacaaggaagacacagcccaaggccca

SEQ ID NO: 17104 - RNA, 76 nt, Homo sapiens
cggcagcaaaacacaagcagagagacagaaaggcccagcccgaacgaccagcacagcaggaccaggagcgcaacac

SEQ ID NO: 17105 - RNA, 79 nt, Homo sapiens
gcagaccggagggggaacacccacacaaagaaaagccacgaccaaggacaaccaaacccaccacaagaggaaaaaagag

SEQ ID NO: 17106 - RNA, 71 nt, Homo sapiens
gagcccggggcgacaggaaccgggaccagaaaaggaaaggcaggagagcgaaagagagcggaaaaacgacc

SEQ ID NO: 17107 - RNA, 74 nt, Homo sapiens
gaagagaaaaggaacaaggcccccgcccccccgggcaggaagacaaaaacaggccaaaacagaagaggcaaagc

SEQ ID NO: 17108 - RNA, 74 nt, Homo sapiens
ccccagcagcagaccggaagaggcaggaagagacgaagagaaaaaaagggaacggagcaaagcgaagagaccag

SEQ ID NO: 17109 - RNA, 81 nt, Homo sapiens
ggagacacggccccccaaggaaaacaggaagcagcgcaggaggaaacgccaccggggccaacgaagcgcccccgcccgaaa

SEQ ID NO: 17110 - RNA, 87 nt, Homo sapiens
gaccgccacacaccagcagaggaggcgggggcagccgcgagacggcacaaggcagaaggagaagacagccgaagaagagcagcgagg

SEQ ID NO: 17111 - RNA, 69 nt, Homo sapiens
gggcgaaacagcaacccagaaccgggacaacccagcaaacaggccagacccgacaggagcgacaaacac

SEQ ID NO: 17112 - RNA, 77 nt, Homo sapiens
gaaagcgcagagcgaagcagaagacgaggacacgcagccggccgaggaccccccagggaacagagcaacagcaaagc

SEQ ID NO: 17113 - RNA, 60 nt, Homo sapiens
agggaagggccacgggcacggagcaggaggcaacggcagcagcagcggagggccgcggga

SEQ ID NO: 17114 - RNA, 60 nt, Homo sapiens
agagcaaaacggcggagggggcacagcaaagaacgggagagggaaagcggagaggggaag

SEQ ID NO: 17115 - RNA, 77 nt, Homo sapiens
agcaacaaccgggccacaagagaaagagcacacaagccgagaccaccaggagcagagcggaggcaaccagccaaaac

SEQ ID NO: 17116 - RNA, 76 nt, Homo sapiens
ccggcaaccgccccgcgagaagcacccagcagggcaccccaggggggaccgcccgccgcagaaacggggacccccg

SEQ ID NO: 17117 - RNA, 65 nt, Homo sapiens
gaggaaacgacaaaacggaagcaaacaggggcaggaaaacccaaaacgaaaaacaaagccagggc

SEQ ID NO: 17118 - RNA, 44 nt, Homo sapiens
ccccgagcagcgggaacaggagaccggaaagaagggagaccgcg

SEQ ID NO: 17119 - RNA, 81 nt, Homo sapiens
gcgggagccgaggcgccgaaggaccgacgcccgggcaaccagccagagggcaccggcaacccacaggccggcgcaacagaa

SEQ ID NO: 17120 - RNA, 95 nt, Homo sapiens
gggcagaggaagcgccgccaggcccgcaggaccgccggagacagggcaagagggagcaacaacaaggagcaagcacagcgcgagccagcccgaaa

SEQ ID NO: 17121 - RNA, 52 nt, Homo sapiens
ccgcccccacgcggcgcggggcaaggcgggcaacacaacaaggcgcggacac

SEQ ID NO: 17122 - RNA, 74 nt, Homo sapiens
cacgaggaccacaagccaaacagcaaccgagggagcgaagcaacaagcacccaaaccccacagcaccaccagcc

SEQ ID NO: 17123 - RNA, 70 nt, Homo sapiens
gaaccccaggaaacggccagacgccaggaagccggacgcgcagggaaaacgagaggacccagccacgggg

SEQ ID NO: 17124 - RNA, 67 nt, Homo sapiens
gaggagaggcgccagcgcagaggagacgggacgcgccagcccacaagacaccacgaaacagacaccc

SEQ ID NO: 17125 - RNA, 73 nt, Homo sapiens
gaggccccagcagccggcacccagcccgccggcgcaccagcgggagggcccccaaggaagacagcacgaggga

SEQ ID NO: 17126 - RNA, 61 nt, Homo sapiens
gcaggacaccgacaggaacagggaccacggggggcccaaaggaccagccaaaacccaccca

SEQ ID NO: 17127 - RNA, 89 nt, Homo sapiens
gagcgggcagccgccgccaccccgcggccgcacccccgccccagaacggccgagcgaccaggagaggagcccccgcccgaagaccgggg

SEQ ID NO: 17128 - RNA, 65 nt, Homo sapiens
agcggagaccaggaaaaggagaccagcggccaacaaggcccggccaacgcaacagggagcccacg

SEQ ID NO: 17129 - RNA, 69 nt, Homo sapiens
caccgaaagacaacaaggcaccggcacggaccaccccaacaccgggggagaaccgggcccaccagggac

SEQ ID NO: 17130 - RNA, 82 nt, Homo sapiens
aaaaaaccacgagcaccagcagcccccccaccacacacagggggaaacaaacaaagaaaggacacaggaacaaagaggccca

SEQ ID NO: 17131 - RNA, 82 nt, Homo sapiens
gaggcccaggccgaccggcgcgcggagcgaaaccacagaaacaaccgaaccagagacagcgaaagccgcagcaaggaagccc

SEQ ID NO: 17132 - RNA, 84 nt, Homo sapiens
gaccaggcgcaacaaggagaagagccaggaaacaggaggaagaacccaagccaaagcccagaaagagacaaccaaccgggcaag

SEQ ID NO: 17133 - RNA, 60 nt, Homo sapiens
acagaaggaacgcagaaacacaggaccccccccaacgagaccagcaccagacagcgaaaa

SEQ ID NO: 17134 - RNA, 64 nt, Homo sapiens
gggagcagcagaaaccggaaaacacacccagcagcacgcaagcggaccggacagcacccaaccc

SEQ ID NO: 17135 - RNA, 67 nt, Homo sapiens
aaagcccagaaagagacgaccgcaagcagaccaaagcaacggggcggcacacaaggagcgaagggca

SEQ ID NO: 17136 - RNA, 87 nt, Homo sapiens
ccgagaccgcggccgggaccgagggcccccccaggagcaaggcgcagcccccccggcgagccgccgggcccccacgggacccagccc

SEQ ID NO: 17137 - RNA, 71 nt, Homo sapiens
ccgccaggacgccccacccagccggacacagacgaacgcaggacacgacagccgaaggaacgcaccacaga

SEQ ID NO: 17138 - RNA, 50 nt, Homo sapiens
gaccgaccaccaaaagagccgcagcccaaagcaagaagagcgaggccccg

SEQ ID NO: 17139 - RNA, 77 nt, Homo sapiens
agccacgaaaacaacacacggagagacaagagcaacaacaggagggccgccccccgccagaggaagccgaggccccc

SEQ ID NO: 17140 - RNA, 55 nt, Homo sapiens
ccgacgaagcccacgccgggacccagcgcagccggccacaccaagagggacaacc

SEQ ID NO: 17141 - RNA, 63 nt, Homo sapiens
aagaggagaaaaccgggcgcagccgcagcacaccgcgcccacaggacgaaaccgggcggggaa

SEQ ID NO: 17142 - RNA, 78 nt, Homo sapiens
gcacacagcccagggccagccagcgagcaggcccagggaaagaaacagacgcgcgagccggcggggcacaggaaccgc

SEQ ID NO: 17143 - RNA, 77 nt, Homo sapiens
ggcgagaaggcggcgaggaagcgcgcccggcgcacgggggagaggcaccagcaacagaccaaccgcagcaagcacag

SEQ ID NO: 17144 - RNA, 83 nt, Homo sapiens
gccgagcccgacccggaccgcccgcccagcccccaaaggcgggaaaggcggagccaccggccgagagacgaggcaccggagcc

SEQ ID NO: 17145 - RNA, 87 nt, Homo sapiens
cagaacaagaagaagaggagaggaaaaaggaagagagcacgcagccaggaaaccacgagccaggcggcgaagagagcaggccgccca

SEQ ID NO: 17146 - RNA, 55 nt, Homo sapiens
gggaacaaggggaacaaacgagacggagggaacggaagacaagggcaagagaaac

SEQ ID NO: 17147 - RNA, 78 nt, Homo sapiens
gccgggccacgcaccccacagcgggccagaagcgcgagcaaggaaccccgggccccgccacccacgcgaccagcccac

SEQ ID NO: 17148 - RNA, 68 nt, Homo sapiens
gcggacccgccacagccccaccagcacgaagccaccccaagcaagcaagaagcggagaacagggggcg

SEQ ID NO: 17149 - RNA, 78 nt, Homo sapiens
ggaggccgcaccggaccccgccaggggagccccaccgaagaccagagaggggagggacaggggaagcccaggagaagc

SEQ ID NO: 17150 - RNA, 76 nt, Homo sapiens
gccgcgcggcgggaagcggcgaccgccaccgggagggggaagagccgggagaaagaagagaaagcaaccacaaaca

SEQ ID NO: 17151 - RNA, 55 nt, Homo sapiens
caagaacacgcagcacggcagaacaagaagggcaaccaggggggaaggagggagc

SEQ ID NO: 17152 - RNA, 78 nt, Homo sapiens
cgggaaaggggccagcagaggcgggccgggagaggaggaaccgggccgggcagagcgagagaggcagccaggggagcc

SEQ ID NO: 17153 - RNA, 76 nt, Homo sapiens
ccgagggccaagggagccgcgcaaaggccccggcaagaagacgaaaagaccccgcacacccccgagcagaggcaga

SEQ ID NO: 17154 - RNA, 74 nt, Homo sapiens
gcgaccgcggggaccggccgacagagacccgaaggcagccagcacacccacagaggcagaccgaaaacacccag

SEQ ID NO: 17155 - RNA, 74 nt, Homo sapiens
ccacgggagaaacaaagaccacaccagggacacgagacgagaacagacccgcccgcaagccggggaagccgcag

SEQ ID NO: 17156 - RNA, 64 nt, Homo sapiens
gggacgaggagcgccgccgccccgagcccgacacggccgagaccccgacgcccgacggccacac

SEQ ID NO: 17157 - RNA, 73 nt, Homo sapiens
gggacccgcggggcaagccgacggaacagagacggagcccgcgaccaggaaccgacccagccaaacgggaaag

SEQ ID NO: 17158 - RNA, 69 nt, Homo sapiens
cggcagcggcgacaaggcgagagcgagacaaaacagggcaaggcgcccagaagcggcgacgcaaccccc

SEQ ID NO: 17159 - RNA, 83 nt, Homo sapiens
cacagacagcagcgcagaccaccccagagaacccagcacccgccggggcacacgagagacgagggccagggggccgaaaggcc

SEQ ID NO: 17160 - RNA, 68 nt, Homo sapiens
cggcccccaaaggcggaacagaagaagagaggccaaaaaaacacggccggagcggggagaaacgccag

SEQ ID NO: 17161 - RNA, 65 nt, Homo sapiens
ggagaaacagaagcgggacaccggggagaagcagaccgcaccaggcgggaccccgaaaaagccca

SEQ ID NO: 17162 - RNA, 78 nt, Homo sapiens
ccaagacaccccgaccagcacacacgcaaggagacagggaaaaagcgcaagaagcgagcagacccaccacgccccaac

SEQ ID NO: 17163 - RNA, 84 nt, Homo sapiens
aagacccaagaagaccagaccggacaaggacaaaggccagacgagcaggcacgcaggagcccgacccacagcagcgagccaccc

SEQ ID NO: 17164 - RNA, 75 nt, Homo sapiens
aacggggagaccaaagaacccccagggaagaaaacgccagagaagcagagcagcccggagcgaggggagaccggg

SEQ ID NO: 17165 - RNA, 70 nt, Homo sapiens
agacccagccccgagcaccgcgacacacaccccggcgaaaagccaggagcaaaagacgagcgcgacgcca

SEQ ID NO: 17166 - RNA, 31 nt, Homo sapiens
gcggacccagccggaacccacaggagggcca

SEQ ID NO: 17167 - RNA, 68 nt, Homo sapiens
ggggaagccgcagcggaaagcaggagcacaggcaagcaggaacgaagaaaggaaagagacacaaacgg

SEQ ID NO: 17168 - RNA, 72 nt, Homo sapiens
gaccccccaccggggacagacaccccgccgaaccgacgaccgaagggaaagccacagcagagagcccaccga

SEQ ID NO: 17169 - RNA, 44 nt, Homo sapiens
gcccaaccgggaacagagaagaagacaaagaaacggcggacaga

SEQ ID NO: 17170 - RNA, 53 nt, Homo sapiens
aaaaaaagcaaaaacaccgaaagacaacaagccgagccccaaacacccacaca

SEQ ID NO: 17171 - RNA, 78 nt, Homo sapiens
acaacccgaaagaacaccgaaccagggaaagaacaggagagcgcaaaggaacagggggcccccagcgaaaaagaacac

SEQ ID NO: 17172 - RNA, 85 nt, Homo sapiens
aaagacaaggccaaagagacgcagagccacacaaagaagcccgcccccacgacccagagagggagaccccagacgacccacacgc

SEQ ID NO: 17173 - RNA, 51 nt, Homo sapiens
gaaggccggaggacaagggcggggcgcgggccaggcggggggcccggaagc

SEQ ID NO: 17174 - RNA, 67 nt, Homo sapiens
gggggaaaaggcagacggacagacccacaacaccaggcgccaggcagccagacagcaagagcggcaa

SEQ ID NO: 17175 - RNA, 75 nt, Homo sapiens
cacggagacggccagaacaccacagcccacaaagggaaaagccgggccacagaagcaccaccacaagccacacca

SEQ ID NO: 17176 - RNA, 86 nt, Homo sapiens
cggcggccagcgggcccacagcccaggcagcacaacggcagaaacgccagaagggcccacggccacacccaaggcggcggcacagc

SEQ ID NO: 17177 - RNA, 76 nt, Homo sapiens
cagaacccaggggagggcccagccacgcgcgaaaaaccccagaaagaccagaaggaacgacaaacaggaccgccaa

SEQ ID NO: 17178 - RNA, 76 nt, Homo sapiens
aggcgcgcaggagccaagggcaccccaccagcacgaaggagcaccgcgcacggcaacagaccagcaggacaccccg

SEQ ID NO: 17179 - RNA, 58 nt, Homo sapiens
ccggccgcgcaccagcagcaaacccaagaggcgggacagcaagggaggcagcagacgg

SEQ ID NO: 17180 - RNA, 50 nt, Homo sapiens
cggagcggcgcgaggccggcagcgggcgcggaaaacgcaaaaccagaagc

SEQ ID NO: 17181 - RNA, 52 nt, Homo sapiens
cacaacacaacacgccccgaaggagggcaccggcgcacccgggacgaacgcc

SEQ ID NO: 17182 - RNA, 66 nt, Homo sapiens
ccgcaggggacagaacggcgcaacacgagcccgcacggggccggacaaggacgacagcaggggagc

SEQ ID NO: 17183 - RNA, 77 nt, Homo sapiens
gcacccgccggccccagaggagggacggaacggaggaccaagagcagggagcaacggggcggcacacaaggagcgaa

SEQ ID NO: 17184 - RNA, 54 nt, Homo sapiens
ggaggccagccacccgaacccccaggcgcgcggcccgagcccaagcgcacgaca

SEQ ID NO: 17185 - RNA, 78 nt, Homo sapiens
aaggccccagcacaccagagacaggggaaccaagagcccaggacaaagagaaagagcgccaaaaagaacaaacaccgc

SEQ ID NO: 17186 - RNA, 54 nt, Homo sapiens
aaagagcagacaagagaacccaacccggagccggggacggcacacgggcggggg

SEQ ID NO: 17187 - RNA, 81 nt, Homo sapiens
gacagcacacccaaagcacgagcaggcgcaggggacccaagaaagccgccagaccggcccagggcaagaagccacacccag

SEQ ID NO: 17188 - RNA, 76 nt, Homo sapiens
gaggcacccaggccacagacgacccccgggcacaaccagccggaaggagagagagcggagacaaggccacagcagg

SEQ ID NO: 17189 - RNA, 78 nt, Homo sapiens
gcggaggaggacgcacgccacggccacacaacacaacgccagacgagcagcccaaacccacgggaaagccaggaaaac

SEQ ID NO: 17190 - RNA, 81 nt, Homo sapiens
caccagaacgagacagcccccaaagggcggcacccaccccccgagcccgcccgccggccccagcccccaccagcagccccg

SEQ ID NO: 17191 - RNA, 58 nt, Homo sapiens
acgggcggcccgcaggaccggaccgggggagaccacccaacacacaacggcccagcca

SEQ ID NO: 17192 - RNA, 87 nt, Homo sapiens
gaggcgcgcggaggcgggagcgcggaaacggaaccgggaggcgacgcacacgagcggaggcgaagggacccgagcgaccagaaagcc

SEQ ID NO: 17193 - RNA, 81 nt, Homo sapiens
gcacggaggagcagacagacgccgagaagcagaggccccgagacaccggacaaggacggacaacccacagaaggagacaaa

SEQ ID NO: 17194 - RNA, 70 nt, Homo sapiens
ccacaccacaacacagaacgaagagaagaagcgagcccaaaggcaggcccggcaccgaggccgaaaccca

SEQ ID NO: 17195 - RNA, 89 nt, Homo sapiens
cgaaaacggaagcgcagggagaaggaagaggggaaaagaacccaagaaggcagaagccagccccgcaggccgccacccgcccccgggcc

SEQ ID NO: 17196 - RNA, 76 nt, Homo sapiens
cccagcccccccagccgaaacaaggaggcccagaggaaaaagacacgcgagaagacgaggacccgggaaaagagcc

SEQ ID NO: 17197 - RNA, 57 nt, Homo sapiens
gcggcggcgaaagacaagggagcaggaagaagagagccaagcgaacgccgaggaaca

SEQ ID NO: 17198 - RNA, 87 nt, Homo sapiens
cagccgcgccgccgccgcgggagccgcgcccgaaccccggcccgaacccaggcaaaagcagaccggaaaacccaccggcaagaccac

SEQ ID NO: 17199 - RNA, 77 nt, Homo sapiens
gaaggggccagcggagacagcaagacgccacacacagaacgacaccacagcgacaaccggcgaaccacaggagaaag

SEQ ID NO: 17200 - RNA, 78 nt, Homo sapiens
cccgccgccccgcgggggagggcggagcggcgcggccccagcccccgggggggcccgaggcccgcaggagcaaaacaa

SEQ ID NO: 17201 - RNA, 82 nt, Homo sapiens
ggggcacgaggaacagggaagggcgcgagcggggacaaagcgagagaagagacgaggaggaggggagaccgcggcaggacac

SEQ ID NO: 17202 - RNA, 74 nt, Homo sapiens
ccccaccagccccaaaaggcggcaacagcgaggcaaccccagaaccaaccagccgagccgccaagagcgaagcc

SEQ ID NO: 17203 - RNA, 70 nt, Homo sapiens
cggcagcaagcccgcaaacgggacaaaaaggagcccaagaagaggccgaaaccgagaccagccagggaag

SEQ ID NO: 17204 - RNA, 114 nt, Homo sapiens
cacgcggacgccgaaggggcgagggcagaccaacgggccaaagaccacacagacacaccaaggaccagcccaacggggacccagcaggaccaagccagcccaccccccaacaga

SEQ ID NO: 17205 - RNA, 70 nt, Homo sapiens
gcccccgaaggcccacaggacaggagagaaagacggagcagggcgacggacagaaagaggaaaacaccca

SEQ ID NO: 17206 - RNA, 94 nt, Homo sapiens
gaagagagaggagacgaccacgagaccacccacaagaggcaaacggccaagggagagccaaccaggaggacccagaagggacaagccccccaaa

SEQ ID NO: 17207 - RNA, 73 nt, Homo sapiens
ggcggcagggggaggggaggggagggggcgcggggaacgggagcggagaggagagaacagaaagaccaagcag

SEQ ID NO: 17208 - RNA, 85 nt, Homo sapiens
gacaacggcaaaaacaccaacaccagaggggagagggagcaccgcacagaagcaacggccggaccagccaggaaagaccgggcaa

SEQ ID NO: 17209 - RNA, 73 nt, Homo sapiens
acaccccaaaaaccgccgaaaaagagaagacgcacccgaccgggccgaccacgccccgggggcgccgagggca

SEQ ID NO: 17210 - RNA, 53 nt, Homo sapiens
agaaggagaaaagggagcagcaggagccccgcggggaagagagaaggccacgc

SEQ ID NO: 17211 - RNA, 116 nt, Homo sapiens
caccccggacgacaggcaagggaccagcggagggagcgaaacagcgcacacgaccgcagaagaccgccgggcgaagggggggcagagccgggccccagccaggggggacaagcacg

SEQ ID NO: 17212 - RNA, 74 nt, Homo sapiens
gcaaagaacaaacccagccgggagggccggacaagggaagcacaagcacaggggggaccaggcgcagcagcgac

SEQ ID NO: 17213 - RNA, 55 nt, Homo sapiens
cggaccgcgggggagaacgccggacagcagacaggacaaagagggaagacaggga

SEQ ID NO: 17214 - RNA, 57 nt, Homo sapiens
cagagagggaaaccagaagcccaggacgacaggggcaaaagcagcgagagcaagcag

SEQ ID NO: 17215 - RNA, 83 nt, Homo sapiens
gaaaagggaaacggcagaagaaacgccaagaagcggcgggcaagaaccccgcacacccgccacacaggggagcagcggagcac

SEQ ID NO: 17216 - RNA, 64 nt, Homo sapiens
gaggaagaacaggcaacagacaaaaacagccgaacagcccaagcccgaggcacggaaggaacag

SEQ ID NO: 17217 - RNA, 75 nt, Homo sapiens
ggagaccccaccgccggcgcgggaaacgggcgaagcgacgagccgcgaggaggcacaggccgcgagacgacgacc

SEQ ID NO: 17218 - RNA, 79 nt, Homo sapiens
cccagccgcgcccgggagagcaagaccaaaagccccaacagcggcaagaccagcacacagaggccagagcacccagcgc

SEQ ID NO: 17219 - RNA, 60 nt, Homo sapiens
cgggaggcgcgagcggcgacggggaaggaacaaagcagagaaaccaaaaggccagacgaa

SEQ ID NO: 17220 - RNA, 70 nt, Homo sapiens
aggaaggagacacggccccccaaggaaaacaggcggggagcaggcacccccagaaaaaaaccaccgagaa

SEQ ID NO: 17221 - RNA, 69 nt, Homo sapiens
gcagaccacacccacagaaggagagcaaaggagacagaaccgcacggccaagcccacacagaggaaacc

SEQ ID NO: 17222 - RNA, 68 nt, Homo sapiens
caggcccgggccaaaacagcaacccaaacacagaaggacggacggacaaagccaagcaaaccagaggc

SEQ ID NO: 17223 - RNA, 70 nt, Homo sapiens
agcccaccagaaaggaagagaggaagaccaggcccaccgccaacgcgggaaggccaccccggcagaaggg

SEQ ID NO: 17224 - RNA, 75 nt, Homo sapiens
gaaagaagagaaagaacgggaggcagacaacgagaagacgggggcccacgcggaggacgcagaacacggcgggcg

SEQ ID NO: 17225 - RNA, 84 nt, Homo sapiens
aagcgagagggcgggcgcggcggcggccacgcaggggggacaggccccacccggacacaggcggggcgcagcgcgggggacaga

SEQ ID NO: 17226 - RNA, 80 nt, Homo sapiens
aaaagagggacgccaaacacccaaaggaagcgaggagaaagaggagacagaccaagccaaagcaccgcaacagaaacagg

SEQ ID NO: 17227 - RNA, 55 nt, Homo sapiens
gggagcgcagcgaccacaccgaaggggcgggagcagggaagacgcaccccaaccg

SEQ ID NO: 17228 - RNA, 61 nt, Homo sapiens
gccccgagccagaacaacgccgcccagccaccaggaccaagaacggaagcaaggcgagagc

SEQ ID NO: 17229 - RNA, 60 nt, Homo sapiens
gaggacaaagaagccacgaagcaaaaagacccccaaggcagaagaccgaaggagaaggcg

SEQ ID NO: 17230 - RNA, 73 nt, Homo sapiens
agaacaaaccggaccggaacaggaaaccaacagcacacagacaacaggagccgcagcccaaagcaagaagagc

SEQ ID NO: 17231 - RNA, 59 nt, Homo sapiens
accagaaccagcccgggaaagagccgccggccgacgagacacgccggaggaaacagacg

SEQ ID NO: 17232 - RNA, 76 nt, Homo sapiens
acaaacccacaaggggaagaaaccaggacccgagaagcacaggacagcccagcacagagcgcagacgacccagaca

SEQ ID NO: 17233 - RNA, 62 nt, Homo sapiens
gcgggaacggacgccgggcgccccgaggcgccgggagggagcgggcaccgcgcgccgcgccc

SEQ ID NO: 17234 - RNA, 58 nt, Homo sapiens
gccgagaaaggaagggcgggaccaacagggagccagggaggcaggcaggggagagcgg

SEQ ID NO: 17235 - RNA, 76 nt, Homo sapiens
ggaagaaaacgagccaggaacaaagagcaaggacacggaaaaagagcggacaggaaggaaaccgaggcggcagcca

SEQ ID NO: 17236 - RNA, 78 nt, Homo sapiens
gcgcaggccaagcgcccacgccggaccgggcagacacgggggaccgcggcgggagcggggcaaacaccgggcaccaac

SEQ ID NO: 17237 - RNA, 88 nt, Homo sapiens
ccgaagccaccgcggccacggagaagggcgagaagaagaaggagagcgcacagcgaggaggggggcgcgcagcccggggaccccccgc

SEQ ID NO: 17238 - RNA, 78 nt, Homo sapiens
gaggggaccgacgccggcagaacacgcgcgggaccccgggcacggcgcgcgggagggccagcccgccagaggcccacc

SEQ ID NO: 17239 - RNA, 85 nt, Homo sapiens
gacccccagaggcggcagcaggcggggagcaggccacagaacgcaggaccacggccaccgcgcggaagaggcgagagggagagcg

SEQ ID NO: 17240 - RNA, 79 nt, Homo sapiens
gcggcgggcgggggggaaggacgggcgggccggcgccggagacgagccgaaggagcgaaaagacagcaaagagagaaga

SEQ ID NO: 17241 - RNA, 74 nt, Homo sapiens
ggcgccaggcggaagcagaggagcaggggccgagcagaagaagaagggaacgccgagagagcggcaggcagcag

SEQ ID NO: 17242 - RNA, 76 nt, Homo sapiens
agagcaacgaaaggagcgggccagcggaagccgcagaaggaccggccagaagcaagccggagaacagaaagacaag

SEQ ID NO: 17243 - RNA, 82 nt, Homo sapiens
cggggagccccggcggcacgggcacgacgggacacccagcaacaccagcccgggcgcgccaggcacagccaagagcggaccg

SEQ ID NO: 17244 - RNA, 74 nt, Homo sapiens
gggccggggaggcaccagggacaagacccccgagcaggggcgccagccccgaaagggaagaagaaggcaagaag

SEQ ID NO: 17245 - RNA, 70 nt, Homo sapiens
agagcacaacaaaccgacggcaggcaagggaggagagaaagaacccacgcaggacgacagaagaggccgg

SEQ ID NO: 17246 - RNA, 79 nt, Homo sapiens
gacacccggacggaaaaccacacccggcggacacagaaagagaacaccacccgaaggcccaaaccccgccagagccgac

SEQ ID NO: 17247 - RNA, 71 nt, Homo sapiens
agcgaggacacaccacgaaggaaccaggagccgacaacaacccgacgcaaggcagccacaccacccaccac

SEQ ID NO: 17248 - RNA, 78 nt, Homo sapiens
cccagagcgcacgggccccacgcgagcgcgcgggcgggcaaggggggcaggcaagacaccccaacgagagacacagac

SEQ ID NO: 17249 - RNA, 75 nt, Homo sapiens
cagggcacaaccagggcagcaggggagccggagacggggcccaaggaacccagaacgaaaaagagccaaagccag

SEQ ID NO: 17250 - RNA, 60 nt, Homo sapiens
cggacccaaggcccggaccagggagcgcaggggcacgacgccccgccaggggagaaagac

SEQ ID NO: 17251 - RNA, 90 nt, Homo sapiens
cggcgcaacccccggcggccagacagccaaaacagagggagacgagaaaagggccgagcacaagccaagaaggcgccccaaagcagcgac

SEQ ID NO: 17252 - RNA, 78 nt, Homo sapiens
cggaccaccacacagaacgggagagagcgagaacggaaagggaagaagaggacggcaaaccagaaagaagaaaggagc

SEQ ID NO: 17253 - RNA, 70 nt, Homo sapiens
gaaggcagagcggggcacccacccaaggggcagcggagcagaaaaggaaacgaggcgcagaaaaggaagc

SEQ ID NO: 17254 - RNA, 79 nt, Homo sapiens
cgcacccgggcagcagcggcagccgagaccacggcaagcaaggcgaagagggcccggggcagaaacagcagacaagaca

SEQ ID NO: 17255 - RNA, 43 nt, Homo sapiens
gccgaggcaaacagagaaacaacaggacgccagaggcaggcga

SEQ ID NO: 17256 - RNA, 58 nt, Homo sapiens
acgcccgcaggcccgcgggcgcaccggcgacgaacaccagaaccgcaccgccgcacca

SEQ ID NO: 17257 - RNA, 63 nt, Homo sapiens
caccacgcagccagacccaacggacacgcagagagggagcaacaacaaggagcaagcacagcg

SEQ ID NO: 17258 - RNA, 53 nt, Homo sapiens
agagccggcagcaaagagggaacagggcaccagccggggaaaggagcgcagcg

SEQ ID NO: 17259 - RNA, 60 nt, Homo sapiens
ggaagaagcggaccagccgccaagaaaaagcggaggggccgcgccccaaggcggcgcgaa

SEQ ID NO: 17260 - RNA, 75 nt, Homo sapiens
acagagcaacgagaaggacacccaaagagagcaaccaccgaaacgggcgaaaaagaagaacagcaaaacacgaaa

SEQ ID NO: 17261 - RNA, 73 nt, Homo sapiens
gaggccaagagcccaacaccacccgagagccccaaggcaaaaggcaaggagacgccaaaaaaacaaccaagcc

SEQ ID NO: 17262 - RNA, 62 nt, Homo sapiens
aagggcaaaacgaaaaagccaagcccagaaacagacaccagagaagccagagacaagcaggg

SEQ ID NO: 17263 - RNA, 80 nt, Homo sapiens
cgaccaccgaggcggagggggagaacacccaggagacgacacgagaaagcggacaggaacggcaagaaaaggagcggaag

SEQ ID NO: 17264 - RNA, 86 nt, Homo sapiens
gccggggcgccagccgggccacggagaggagcagcccccggagacagcggcacagagggccgccagacgaaggcgaagacccaaca

SEQ ID NO: 17265 - RNA, 77 nt, Homo sapiens
caagaacaccggagggcggcggaggacgcaaaacaccgagaggacacagcggggagaacagagaagcacaaagacgg

SEQ ID NO: 17266 - RNA, 78 nt, Homo sapiens
ccgaccgcacacacaaaacgcccggggggaagaggaacagccaggggcccacggagggagagggacccaaccgagcgg

SEQ ID NO: 17267 - RNA, 75 nt, Homo sapiens
ggccgggagcggagaaggccagaagggggagagaaaaccgagaagacacgacagagccaagggaccacgcggagg

SEQ ID NO: 17268 - RNA, 77 nt, Homo sapiens
ggggcggagaaacgaccgcgccgccgcgccccaccgggcaaaccgcggacaacaccggcagagagagagacacacca

SEQ ID NO: 17269 - RNA, 73 nt, Homo sapiens
ccgggccagccccacaaagccggcaacagaagaagagggacggcccgagaaaccggacccgagcagccagaag

SEQ ID NO: 17270 - RNA, 68 nt, Homo sapiens
ggccgaaacagaaaacaagagaccacagaaggaccaggagagagccccgcaccagccacacagcacag

SEQ ID NO: 17271 - RNA, 79 nt, Homo sapiens
ccgaccgggacggccggcaggccgccgccgagcggggaggggcgaccccggggcccggccagcacgaccgaggaggggc

SEQ ID NO: 17272 - RNA, 53 nt, Homo sapiens
ccggggcagcacccagagcggcagggggagacacgagagcccccccgaaggaa

SEQ ID NO: 17273 - RNA, 53 nt, Homo sapiens
aaagggccaaagaagggagaaacgaaaacaaacggaagagagggcagcaagaa

SEQ ID NO: 17274 - RNA, 71 nt, Homo sapiens
gacacacagggcaccagaccgacaagggaaacaaccagacgccgcagaagaacaaaagcggaaaaaggacg

SEQ ID NO: 17275 - RNA, 68 nt, Homo sapiens
caacgagccaccacacggcggacgaggcagaccacaacaagaaaggggcccccgaaggaaagaccacc

SEQ ID NO: 17276 - RNA, 83 nt, Homo sapiens
gaaacggacgcgggggaagggacggcgcgagcaccgaggaagccgacaggaccgggggcacggaggggaagcacccagaaccc

SEQ ID NO: 17277 - RNA, 71 nt, Homo sapiens
cagacggaagcacagaagcgcaggaagaccgaggcacccagaaggacagaaaccacgacaaagcggacgga

SEQ ID NO: 17278 - RNA, 65 nt, Homo sapiens
gaagcggccccacaccacccgcagggccggcacggccaaggagagcacccaccaaggcccggagg

SEQ ID NO: 17279 - RNA, 72 nt, Homo sapiens
cggaaggaaggcagaccccccgcgcggcgccgccaacgcgcccccgagaaggaggcagcggccacaaaagcc

SEQ ID NO: 17280 - RNA, 47 nt, Homo sapiens
gaagccacacaggccagaacgagggagcccgagcaggaagacagaag

SEQ ID NO: 17281 - RNA, 54 nt, Homo sapiens
cagggaggggaaaagagaaacagcccaaccgggagaaaacgaaaggcagagaga

SEQ ID NO: 17282 - RNA, 79 nt, Homo sapiens
cccaggcgagacaacaaagccccaacaagaccgacgaagaaaacagggagaaaggcacggacagagagcaacaaccaca

SEQ ID NO: 17283 - RNA, 52 nt, Homo sapiens
ggaaccagacaggcaggaaaagacagggaagacagccgccaccaggcgcccc

SEQ ID NO: 17284 - RNA, 83 nt, Homo sapiens
gagcgccagagccaccaccggggccacgggaggacgagggcaccccaacccgcggggcacgagaaagacacggcaccggcggc

SEQ ID NO: 17285 - RNA, 67 nt, Homo sapiens
agccagacagcagccaaggaagaacgaagcgcgcagaaaacacagaaggcaaaagcgcaaaaacaaa

SEQ ID NO: 17286 - RNA, 81 nt, Homo sapiens
cggaggaggaccgcggagggaacaccggagaccccacgcagggcagagcgcggcggcagcagagggccgaggcccgggaag

SEQ ID NO: 17287 - RNA, 68 nt, Homo sapiens
acacaagaagcacccgcgcaggccgcaccacgggaaagcccgccagcggcgccacaccaccagggacc

SEQ ID NO: 17288 - RNA, 69 nt, Homo sapiens
ccacaaaaaaggaagcgaaagagagccacagaaacagggcaccaacacccgaaaagggagcagcaccca

SEQ ID NO: 17289 - RNA, 79 nt, Homo sapiens
gcgaagaagacagcaagcccacgagcggccccccgagacggaggagagggccggacacgagaaagcccgcccccgcaag

SEQ ID NO: 17290 - RNA, 91 nt, Homo sapiens
cggaccggcacccggacaggaggagccagggcccggcccgaaaggagagccccgcaagggcgggcagagaggcaagccacgaacacaaaaa

SEQ ID NO: 17291 - RNA, 74 nt, Homo sapiens
agcagaggcggaggaaccgagcgggccgaccaccgacaggaccacagacccgaccgcggcaacggaaggagaga

SEQ ID NO: 17292 - RNA, 77 nt, Homo sapiens
cagaacggcaccgacgagacggaggggcccaccgaggagcgcagacaccgaccacggacacagagaggacccggagc

SEQ ID NO: 17293 - RNA, 85 nt, Homo sapiens
gggccagccgcgcggcgggaagcggcggcggcggcccagcgccaagagaaaaacaaccaccagcgagcaaaaaggcaaagaccaa

SEQ ID NO: 17294 - RNA, 80 nt, Homo sapiens
cggcgcgcggaccccgccgagccagcgccggccgcgcgccgcgcccgcgccacaggaagaagagagggcgaaggaggcca

SEQ ID NO: 17295 - RNA, 75 nt, Homo sapiens
acaacgacccagcaaaccagaagaaccggaaagagcaccagacacacacgccaccagagcagaagaaggcaccag

SEQ ID NO: 17296 - RNA, 78 nt, Homo sapiens
ccacccccggcgggcccgaggcggcgagagaggcaggcggagccgaccgggccagggcggagaacggaaaagcaccag

SEQ ID NO: 17297 - RNA, 77 nt, Homo sapiens
cggacaaacagaaccagagcaaaaggacccaagaacacgggagacacacacaaacggcaaaaacgaaccaagggaag

SEQ ID NO: 17298 - RNA, 66 nt, Homo sapiens
gaagcagcccacaaaccaaacaaagagaagaaaccaaggacacgcaagagacaggcgaagaaacaa

SEQ ID NO: 17299 - RNA, 70 nt, Homo sapiens
gccgggcaacagggaacccccaccacaaaaaagccaggaagagcaaaaacgcaagacacaacgcagccaa

SEQ ID NO: 17300 - RNA, 72 nt, Homo sapiens
cagggcccgcgcaacgaagaaaaccaagccaacaccaacaaggaaggaggaagccaaaagacgaaaaacagc

SEQ ID NO: 17301 - RNA, 77 nt, Homo sapiens
caccacccaggccacacagccccaccaaagccaccaagccaagaccagcagccaaaggaagaaggacagcgcccagg

SEQ ID NO: 17302 - RNA, 71 nt, Homo sapiens
agacgcagggcgcccccggccaggagcgcccaggaaacaaggccgacggcgagaccccacgggccaccaac

SEQ ID NO: 17303 - RNA, 77 nt, Homo sapiens
accaggagggccggggccgcgccggacccgcacacaggccgaagacaagcaaccaacccgaacggacacagaagagg

SEQ ID NO: 17304 - RNA, 34 nt, Homo sapiens
acagagagcaccagccggagacaaggagcaagcc

SEQ ID NO: 17305 - RNA, 64 nt, Homo sapiens
gagacaagggagacaagcgcccagaggacaggaccagagacaagaagccccagaggagacaagc

SEQ ID NO: 17306 - RNA, 81 nt, Homo sapiens
gggggcgcaggaccggccgcaggccaccgacacgagacaaccgggagccggacaagccgagaccaccaggagcagagcgga

SEQ ID NO: 17307 - RNA, 93 nt, Homo sapiens
agggcaggagagcccagaagcaggcccccagccgcagccacaacaccggcaggaaccaccaggacagagaccaaccaagaagcgaagaaaaga

SEQ ID NO: 17308 - RNA, 89 nt, Homo sapiens
ggccgggacagcggcgagacgcgcggggagcgcgccggaccaagcgggcccagaagcggaccagacaaagggagcaccagccagaccgg

SEQ ID NO: 17309 - RNA, 58 nt, Homo sapiens
ccaccagacggcgccccaagaccacaggggcccagcccacagaacccagcaccccagc

SEQ ID NO: 17310 - RNA, 96 nt, Homo sapiens
ggagcggaaggacaggaaccagaacccaggcccacggaggaagagccgggcagcccggagcgggccagggaaagaggcgggaacacagcaaaggag

SEQ ID NO: 17311 - RNA, 77 nt, Homo sapiens
gcggaagcgcagaagcaaccaaaaggaagacgggaacccggcgcaaggcgcagaaccggccgaaaagcacaaacagc

SEQ ID NO: 17312 - RNA, 75 nt, Homo sapiens
accgggacacaggaaagcaggcgagaaaggggcgccaaccagaggaggcaccaaaacccccacccagcgcgagcc

SEQ ID NO: 17313 - RNA, 80 nt, Homo sapiens
cgcggaaagaggccaaaaaggcgcgcaggcaggcacaaggcccaggcacaggccccaggaggcccaaaagggcaggacca

SEQ ID NO: 17314 - RNA, 39 nt, Homo sapiens
aagcggccagggagcacagaagggaaagagggaccagcg

SEQ ID NO: 17315 - RNA, 74 nt, Homo sapiens
cagcaaggcggcgcgcccaggaggacagaacccaccagacaacacacgggaagagcaagaccagaggaaagaac

SEQ ID NO: 17316 - RNA, 47 nt, Homo sapiens
gcccacgcccagcagcagcagcaacagaccagcccgccgcacccagg

SEQ ID NO: 17317 - RNA, 59 nt, Homo sapiens
cggccccccaaggaaaacagggaaaggccccccgggcaagccagcaccgagaaacccca

SEQ ID NO: 17318 - RNA, 103 nt, Homo sapiens
gggccccgagcagaaggccggagagagggggggggcggcaggacccggagagacaccacaagaaggccgcgggcgggccccacccgcggacccaccgcgcagg

SEQ ID NO: 17319 - RNA, 79 nt, Homo sapiens
gcgcaagccccggccgggcgaccaagcggaggcgcgcggaacagcgccgaggcgacccgcccagacggagcgccgcccc

SEQ ID NO: 17320 - RNA, 82 nt, Homo sapiens
ccacacaagacacacccacccgaaaagagggggaggcggaggacccccacgggaagccaaccacaaccagaggaccccgcga

SEQ ID NO: 17321 - RNA, 67 nt, Homo sapiens
ccaccgaagcgcccgagaaacaaaaacacagggaccgccccagggggggggggacccaggcggcccc

SEQ ID NO: 17322 - RNA, 83 nt, Homo sapiens
gcaggagccggccggcaaccgagggacccgcgccagagggagcccaggcggcaggagagcaaggggcaacgaaggagacacac

SEQ ID NO: 17323 - RNA, 86 nt, Homo sapiens
cgcacgcaccacgacggcgccacaccgagcgcgaggcgcggagagcaacgccgggacagcgcaagggcgcccgcgccggcagagga

SEQ ID NO: 17324 - RNA, 79 nt, Homo sapiens
aagagcgacccacgcagaggcgaagacggggagccacgagggaggaacacggccaaccacaaagaacaacacagaagcg

SEQ ID NO: 17325 - RNA, 68 nt, Homo sapiens
gaaggaccaagaaccagagcaggcgccggggcggagagaggggaagcaagggaaagggacccgggcca

SEQ ID NO: 17326 - RNA, 62 nt, Homo sapiens
cacacgcacaagaaaaaggacacaggaaccgcagcacaaaagcaagaagaaaccgacggccg

SEQ ID NO: 17327 - RNA, 74 nt, Homo sapiens
gcgcggcccgcccccccgggccccagcggccccggggcgcgcgaggcaccggcacggaccaccccaacaccggg

SEQ ID NO: 17328 - RNA, 50 nt, Homo sapiens
ggcagacacacccggagaccgaagaggcccacacaccccgcgacaacccg

SEQ ID NO: 17329 - RNA, 73 nt, Homo sapiens
accccccgcgacagacaaacggaagagaccagaaccggcgcaacaccccagccaaagccaacaagaccaagcc

SEQ ID NO: 17330 - RNA, 74 nt, Homo sapiens
acccacagaaggacaagggagagacaagaaggaggacaagcggaaccgcagcacaggagggacacgggaagggg

SEQ ID NO: 17331 - RNA, 72 nt, Homo sapiens
acggagccaaccgcccaggaaggacaaagcggaacgcagggcgcaccaccagagacccaacacacagaagac

SEQ ID NO: 17332 - RNA, 71 nt, Homo sapiens
agcagaaacaaagcggagagaacagcaagccaaagagcggcgggccacccaagaagcaggaggaccagcac

SEQ ID NO: 17333 - RNA, 55 nt, Homo sapiens
cggccaaacaacggcggaaagcagggccagaggagacgaagaaacaaaaaaccac

SEQ ID NO: 17334 - RNA, 74 nt, Homo sapiens
gccgccccgaagcccagagccgagggaggagaagaagaaacccaagcaagagagacagagagggaaaaaccaag

SEQ ID NO: 17335 - RNA, 56 nt, Homo sapiens
agccacccacaaacagagagaaggaaccacccacgcaggcagacagcgaacccacc

SEQ ID NO: 17336 - RNA, 43 nt, Homo sapiens
aggccacagcaagacccgacaccgaacagcgagcacacggcag

SEQ ID NO: 17337 - RNA, 77 nt, Homo sapiens
cgggcaagagacaggccacggccgcgagcagcaagacaagagcccgggagcccccccgaaggcgcgggccgcccccc

SEQ ID NO: 17338 - RNA, 68 nt, Homo sapiens
aaagaacacaggaaggaggcgccgacaccaacacgaaccacaagacagaacccaccagacaacacacg

SEQ ID NO: 17339 - RNA, 57 nt, Homo sapiens
caaccccccggaggcagcacccaggaaagccaccgccggggacccagcaacagcacg

SEQ ID NO: 17340 - RNA, 82 nt, Homo sapiens
agcccgggcacaggaagcaccgaagagagagagaagcaaaaggagaacgaaagcggaccagcgggaaggcaaagaagaagcg

SEQ ID NO: 17341 - RNA, 85 nt, Homo sapiens
aggagaagacaagaacagccaaagccccacagcaagacccaggaagccgcgggcaaaccagaccgaagagacggggcgccagggc

SEQ ID NO: 17342 - RNA, 57 nt, Homo sapiens
ggaaagcaccgaggcacaacagcgaccggacagaagacagaccgacagacgccaaac

SEQ ID NO: 17343 - RNA, 76 nt, Homo sapiens
gcgccgcggggcgcagcggcgggaggaccccaaaggacaagaaagcagagaggcagccagaagccagcgaagaagc

SEQ ID NO: 17344 - RNA, 85 nt, Homo sapiens
gaagcggacccagcgacccacgccgaaaaggggccgaagacaccaggaggagcgggggaaggggcacggcgacgccaggcccccc

SEQ ID NO: 17345 - RNA, 79 nt, Homo sapiens
agagaagcacgaaagcgggagagggaccggaacggcggcgacaaggggcccgaacagagggagcggaccacaccagaaa

SEQ ID NO: 17346 - RNA, 87 nt, Homo sapiens
caagacccgacagagggaaaagggacgaggaagaagggcaggaccgggcggaggccgccaagacgcagccaagaagagggaaagaag

SEQ ID NO: 17347 - RNA, 68 nt, Homo sapiens
ggagggcaaagcggggcgagcaggccaggcagagcagcccaccagggaggggagggggggaggcgcac

SEQ ID NO: 17348 - RNA, 77 nt, Homo sapiens
gccaaaagaaaacgacccaacagcaaaggacccccacccacccgagaacagccagggcagcagagcacggagggcag

SEQ ID NO: 17349 - RNA, 84 nt, Homo sapiens
cggaccagggacccgcgaaagcggggcacaggcgggcacgcgcccaggaggaggaagggaggacggcgaccacgcagggccccc

SEQ ID NO: 17350 - RNA, 76 nt, Homo sapiens
ccacacgcgacccccgagcggaaaaacgccggggaacccagcccggagcagggccacgcggggccggccggcccgg

SEQ ID NO: 17351 - RNA, 68 nt, Homo sapiens
gaggagaaacagcagaaacgcaccaggccaaagaaagagaagagccgaccgcgagaggagagggcaga

SEQ ID NO: 17352 - RNA, 78 nt, Homo sapiens
gccggacagcgccacggcgggccgcgggaggacaccacccacagcgaccacagggccgagaagcgcgcggcgcagcgg

SEQ ID NO: 17353 - RNA, 77 nt, Homo sapiens
gagcagccgggagccgccccgcgccgccgcagagccgcccacaggccagcgagcgccgacacccaacaagaccagcc

SEQ ID NO: 17354 - RNA, 65 nt, Homo sapiens
cggcggagcagaggaaccacacgcgacagcccacgagagaagcgagaaaggaaagaaggggaccg

SEQ ID NO: 17355 - RNA, 58 nt, Homo sapiens
cggaagccaacaagaaaacaggcagaacaagaagggcaaccaggggggaaggagggag

SEQ ID NO: 17356 - RNA, 65 nt, Homo sapiens
ggccaaagcccccggcaacaaggaggggggaagcacaagagggaaacaacaacagccaaaggacc

SEQ ID NO: 17357 - RNA, 62 nt, Homo sapiens
gcagagaagagacgggaacgccgaagcaaacagcacgcaaccagaacaaagaggaaacggaa

SEQ ID NO: 17358 - RNA, 78 nt, Homo sapiens
caagccgagggaagagcaggccagaaagcagacccagggaggaagcacagccggcacacgggaaggcacggccgccca

SEQ ID NO: 17359 - RNA, 93 nt, Homo sapiens
gggcccaaggccgcgccgaccgcacgcgcacggaacagcagcaaccccaggacgacagggccaagaacggaagcacgcaacagaaacccacca

SEQ ID NO: 17360 - RNA, 84 nt, Homo sapiens
ccaaaggacccagaaaggcaccacgcccagacggaaagggccacgagaggagcaaaccaaggaccagcggcaggacagaaccaa

SEQ ID NO: 17361 - RNA, 79 nt, Homo sapiens
aggagacgaccggccggaaaaccgcaagaccacagcaggacggcggacgaacccaaccccagagacagacccacccacc

SEQ ID NO: 17362 - RNA, 56 nt, Homo sapiens
cagagacccgcacagcaacaaagcccacaggaacaggcggaggcaaggcagaccgg

SEQ ID NO: 17363 - RNA, 86 nt, Homo sapiens
aaaggacccagaaaggcaccacgcccagacggaaagggccacgcagaagggaaggaggagaaggcggggaggaaagcggaccacac

SEQ ID NO: 17364 - RNA, 71 nt, Homo sapiens
caccccgagaggcacaggagaaagcaaccaaaacacagcccaacaggcaccacagcgccgccaccagcccc

SEQ ID NO: 17365 - RNA, 74 nt, Homo sapiens
ccaggaccacaccagaggccggcacgggaccggggcagcagagaggccgaggaagggcccagcagggcgcgcca

SEQ ID NO: 17366 - RNA, 83 nt, Homo sapiens
ggcgcagcgcccacccgcgccagagaccagaaaacggaggcacccaccacgggccaggcgggccagaggcaagccgcgggagc

SEQ ID NO: 17367 - RNA, 65 nt, Homo sapiens
ggaaaaccccccccggccagaaaggaggcccacagccgaccgagcggggcaggacacggaagaac

SEQ ID NO: 17368 - RNA, 78 nt, Homo sapiens
cgacggggaaccgcgaccgagacggcaggcggcggaagcgcagggagaagaggggaaagcggcaaggaaacacaagaa

SEQ ID NO: 17369 - RNA, 71 nt, Homo sapiens
agagaagcagaacgcaggaggagaacgacagggcagacacaaggaacagccagccaggagaaaaacgaacc

SEQ ID NO: 17370 - RNA, 70 nt, Homo sapiens
ggaaacaggaacaccaaggaagcaaaagccccagaacagggaaaagaggacgaggcgcgaaaaggcaaag

SEQ ID NO: 17371 - RNA, 72 nt, Homo sapiens
ccgccccaaagcccccacgcaacaaaaaacgcacccaagaagacccccccgcaagggaaaagcagggcacag

SEQ ID NO: 17372 - RNA, 77 nt, Homo sapiens
gacggcgcgcgggacggccgaggaaggaacggcccccccccagcccgccccaaaagagagaaaccacacggcagccc

SEQ ID NO: 17373 - RNA, 79 nt, Homo sapiens
gaagaggaacaagggggggaaacccaccgggaaaaggcacgaaggggaaaagccaacaaggaccgggaaggcgcgacgg

SEQ ID NO: 17374 - RNA, 89 nt, Homo sapiens
accgccgccgcgccgccacaggacaccagccgggcagccacaagcggccaggacacaaccaaggccagaacagcaggaccagcaacccc

SEQ ID NO: 17375 - RNA, 69 nt, Homo sapiens
aaagaaagaagcaccgaagggagagcacaacaggaaccagagaaacaaggagccaggcgcagagaaggg

SEQ ID NO: 17376 - RNA, 77 nt, Homo sapiens
aaaaccaaccagaagacgaacaaacagcaagaaagaccacaagaccaaggagaacacagcaacagaagagaccaacc

SEQ ID NO: 17377 - RNA, 43 nt, Homo sapiens
gaaaacacaggaaacagggaggacaggacaggagacaaggggc

SEQ ID NO: 17378 - RNA, 75 nt, Homo sapiens
aaggaaaacacaaggggaagcgggcggagaacggaaaagcaccaggaagcagagaggaccgcagaagggaaggag

SEQ ID NO: 17379 - RNA, 72 nt, Homo sapiens
ccaccaggcaccaagccagagagaggaagaaaagacaaacggcgcggcagcagaacggcaaggggaaaccag

SEQ ID NO: 17380 - RNA, 77 nt, Homo sapiens
agcacgcgcagagcagggacagcaaacgcgaaagagccagagcgcggcccccccccgaggcacccagggcggaagcc

SEQ ID NO: 17381 - RNA, 69 nt, Homo sapiens
ccccgaagcgagggaagggcggacacaccaaggacagcaaaaagacacccccgaggaaccaggggagca

SEQ ID NO: 17382 - RNA, 71 nt, Homo sapiens
cacaggagagggcaccaggaacacagccaacaggagagcagaggagaacaggacacagaacagagaagaag

SEQ ID NO: 17383 - RNA, 88 nt, Homo sapiens
gcggagagcacgccagaaggcccgggcacggggaggagaagacaagcagacccaccgaagaccgcgcaggagcagcaaagacacaaga

SEQ ID NO: 17384 - RNA, 82 nt, Homo sapiens
aaacaggagcccgggcaggaacacccaaccacaggaccccaaaccagcaaagaagaagaacaagaagaggggaagaggaagg

SEQ ID NO: 17385 - RNA, 70 nt, Homo sapiens
gggccagagcccccacgcaacggagcaacaccccgcaccgggaaccgcggaacccgcaggccacgcacca

SEQ ID NO: 17386 - RNA, 80 nt, Homo sapiens
gacaggcgccgcgccgccgcacgggaccgccgagccacaccggggagaagcccaccacgcaacgggacggcgcggcggaa

SEQ ID NO: 17387 - RNA, 71 nt, Homo sapiens
gaggaggcagcgcggggcagcgcgagccgggaagggacaagagaaaaaaagggcgggcgaacaaaaagagc

SEQ ID NO: 17388 - RNA, 53 nt, Homo sapiens
cccgcccgcccgggacccgcggccccgccgcgaaagaaagccaagcacacacg

SEQ ID NO: 17389 - RNA, 76 nt, Homo sapiens
aacgcgccaccccgcgcaggcgcgcggccgcaggacccaaagacaggaccacgcaccagcagagaaggaaagcaaa

SEQ ID NO: 17390 - RNA, 73 nt, Homo sapiens
acgagagcaagaagcagcccgagagccagcaacaacccgacagagcagggagacaagaacaccgagagagaag

SEQ ID NO: 17391 - RNA, 61 nt, Homo sapiens
gcaggccaagcccgccggagggggcaagccggccaccgccccggccaaagccaggcggaga

SEQ ID NO: 17392 - RNA, 77 nt, Homo sapiens
caaggaagacccagaggagcaagagagccaccccaaccccccgaacccccagcagggcagaaaagaacagacccaga

SEQ ID NO: 17393 - RNA, 75 nt, Homo sapiens
gaaaacaaaacagaagaaagaaagcagaccgggcagaagcaggaggcgccaggcggcgagccagacgggcccaag

SEQ ID NO: 17394 - RNA, 85 nt, Homo sapiens
aagcggccaacgggaaccggaacacagagagggagcggcaaacaacagcacccaagaaaacccaggccgcgaaggagaagaccgg

SEQ ID NO: 17395 - RNA, 64 nt, Homo sapiens
ggcgcaagcgaaaacagaccgcgagcccagaggccccccaggccacccaggaccagcggcacac

SEQ ID NO: 17396 - RNA, 75 nt, Homo sapiens
gaaacaaagagaaagccaagaagaaggaaaccagccacgcgccaaacgagggaccacggcggggcagaggaacac

SEQ ID NO: 17397 - RNA, 38 nt, Homo sapiens
gcaggccagcgaccagaaggaacaggagacagcggaga

SEQ ID NO: 17398 - RNA, 62 nt, Homo sapiens
agaacgggaagaaagccaaacagacaggagacaaagggccgccgcagagcagacaagggccc

SEQ ID NO: 17399 - RNA, 71 nt, Homo sapiens
cgcgccggcccgcggaaaggccaaagcccagccccaggcacagaccccagcgagaaaacacggcgacggga

SEQ ID NO: 17400 - RNA, 65 nt, Homo sapiens
caagaacgcgcccccgccgcgcccgggcgggaaaccccccaggcaagaggcgcaggaccgggaag

SEQ ID NO: 17401 - RNA, 115 nt, Homo sapiens
cacaacacaggagggccgccgcaggcccgcgcgacaggacggacgcgcaaagccgacacggcacagccaacaagcggagggacaacagcaaaagacaagaccaagagaaccacag

SEQ ID NO: 17402 - RNA, 73 nt, Homo sapiens
gagacccaggcaaacgcgcccgagaaggcagcaggaaggagggccacacaccaaagagacggcagccccacag

SEQ ID NO: 17403 - RNA, 71 nt, Homo sapiens
aggcaaggcgaccgaaacagaccacgaacacggacggggaggcgggaaggggaagacaggacaaagccgaa

SEQ ID NO: 17404 - RNA, 71 nt, Homo sapiens
ccagcacgaaggcgaagcaaaggccaagggacaagaaaggaccagccaggcgcaggagccaaagaagaacc

SEQ ID NO: 17405 - RNA, 79 nt, Homo sapiens
gcagaggcgaggagaaggacgaaggggaccggagaaggcccgggcccgccggcccgcggccaccaccgggaccgccgcc

SEQ ID NO: 17406 - RNA, 54 nt, Homo sapiens
accccagccaagagaccccagcccagcccccgaggggcacagggaaaagagaac

SEQ ID NO: 17407 - RNA, 82 nt, Homo sapiens
ccagccgaccgagcccaggagcgccacgcgcggaaggcagcgcccagcagcgcagacaaaacagaggagaccagaccagaag

SEQ ID NO: 17408 - RNA, 81 nt, Homo sapiens
gcccgccccgccgggggagacgacccccgccaggagccaaggacgcccgaacggcacagagcaggagcagacgcgcaggga

SEQ ID NO: 17409 - RNA, 69 nt, Homo sapiens
cccggagaaaacggagccaggccaggacaggaggccagggcacgggaaggcagcacgaggcaaaacaag

SEQ ID NO: 17410 - RNA, 56 nt, Homo sapiens
aagcgccggagcaaggaagaaaacaggacaggagaagaacacccccaagagcaacc

SEQ ID NO: 17411 - RNA, 71 nt, Homo sapiens
aaaagacgagcgcagaccaccaaacccaggaggagacccccggaaaaccccccccggcaagcggcacgaaa

SEQ ID NO: 17412 - RNA, 43 nt, Homo sapiens
cagcgccgcgacgccagaggagaacgagggcccgccgagaggg

SEQ ID NO: 17413 - RNA, 50 nt, Homo sapiens
cggaggacacagccagggcggacgggaaagcagacaccaggacaaaagaa

SEQ ID NO: 17414 - RNA, 64 nt, Homo sapiens
aaagagcccgccacacggaagacaggcagaacaagaagggcaaccaggggggaaggagggagcg

SEQ ID NO: 17415 - RNA, 115 nt, Homo sapiens
ccagcccaaaagcagcaaagaacaccaagacggcgaccacaggaaggacacaggcagccaaaggaaaggcacaacccagggcacaagaccacaaagggaagaaacacagaaaaac

SEQ ID NO: 17416 - RNA, 127 nt, Homo sapiens
ccgggacccccagcgaccacgcagccgcggacgaggccgggacggccgagcggaccaaaaggggaaaagcagcccggagacgaagaggaagacaaaccacagcgcccaaaccagagggaaaaggaac

SEQ ID NO: 17417 - RNA, 83 nt, Homo sapiens
agaagagcgaaagggacgcaaggaacaaaaggaaacccaccaaggagcagacccaaaaacaagacaaaacagacgaaaagagc

SEQ ID NO: 17418 - RNA, 75 nt, Homo sapiens
caggacacccaggagcccgggccaccagccagggagaaaagggccagaggagcggaaacgcaggaggagagagac

SEQ ID NO: 17419 - RNA, 35 nt, Homo sapiens
gcgagggaggggaccgccgcgagaagggcgcaaaa

SEQ ID NO: 17420 - RNA, 85 nt, Homo sapiens
ccaggcccagcgagcgacggcaaaagcagaaaagggacacagacgccaggcagccggggcagaggaagagaagcccggccgcgcg

SEQ ID NO: 17421 - RNA, 62 nt, Homo sapiens
aggaaaggggccgcggcgccgccagacagcgagcgaggcggaggccaggcagcgcgaccaaa

SEQ ID NO: 17422 - RNA, 66 nt, Homo sapiens
ggaaaggcaagagaaagcagacgagacaacggcaagcggagaagagcaaggccgaaccgagaggaa

SEQ ID NO: 17423 - RNA, 76 nt, Homo sapiens
gaagcaacccagaagagcgaaggacccagcgaggaggagaaaggaaagggcggcaggaagacaggaaaagagaaac

SEQ ID NO: 17424 - RNA, 74 nt, Homo sapiens
gagaaaggagacccgacgcaacgcggagcgcaaggcgagggacgagaacgagagacgacgccccagagagcaca

SEQ ID NO: 17425 - RNA, 66 nt, Homo sapiens
cccaaagccccaccccacaaacacaaaccgacccagcagaccacgggaggggaaaaagagaccacg

SEQ ID NO: 17426 - RNA, 83 nt, Homo sapiens
accggcccgcgaccccagcagggccagacccgggccacgcgccccgcagcccggcagcggcgccaggaacggaggggcagccg

SEQ ID NO: 17427 - RNA, 72 nt, Homo sapiens
cccacccccgggggccacggacccggcgacaacacccggccccgagacagaagccgggaacagcacgacgac

SEQ ID NO: 17428 - RNA, 71 nt, Homo sapiens
ccaacccggagagcggcgagacagcccacaccggcaggccaacaaccaagacgaacgaacgcccagacaag

SEQ ID NO: 17429 - RNA, 79 nt, Homo sapiens
gaaaacagacagaggagacaggcaagaaacagaacgacagcccgcaccgacgccggcggccagccagagagcacgccgg

SEQ ID NO: 17430 - RNA, 85 nt, Homo sapiens
agcgcgcgaggaccacccgccgccaggagcccagccgcaggaagggcgcccaggagcgccgcaagaagccaagcgggaccagaga

SEQ ID NO: 17431 - RNA, 91 nt, Homo sapiens
cccaccacacaagacggaaaaagcgacggagcccccccccgggaggccgcgggggagcgacgaccagccccgaccagcgacggagcggcag

SEQ ID NO: 17432 - RNA, 74 nt, Homo sapiens
cgcggccgcgacgggccgccgggacccggacggccgggcgaggaaaacgcaaggggccaggacgggccccccgc

SEQ ID NO: 17433 - RNA, 76 nt, Homo sapiens
gaggacgaggcaagggaacagaaggagcaggaaaaggagcgaacaggggccacagcggaagaagcaggggagcgag

SEQ ID NO: 17434 - RNA, 74 nt, Homo sapiens
accagggccccaccaagagaaaggcagacacaagacgagcacccccgagaaaagaaagagacaggaagagaacc

SEQ ID NO: 17435 - RNA, 53 nt, Homo sapiens
cgccgagcggcagcaggacacccgaccggaaaaagggcacaacaaagaaaggc

SEQ ID NO: 17436 - RNA, 71 nt, Homo sapiens
gagcagcgcagaccccccggccagaacacacagaaaagggccaaaggaagaagaagggagcgacaaaacag

SEQ ID NO: 17437 - RNA, 74 nt, Homo sapiens
caggagggaaaagagaaccggagaaaagggcggacaacacaaagagccaggaagcgccgccccggccgaggaag

SEQ ID NO: 17438 - RNA, 71 nt, Homo sapiens
aagaacccacagaggggggcgaagaaaaagagaagaagaaggaggccgcggccagaaacccaagaaaaagc

SEQ ID NO: 17439 - RNA, 46 nt, Homo sapiens
caggaccggaccgcaacaggaggaaaggcccggagagagcgaggcg

SEQ ID NO: 17440 - RNA, 73 nt, Homo sapiens
aagcaaggccgcggggggagaccccaccaccggacagaacgacacaaaagggaagggagccggcagaagggac

SEQ ID NO: 17441 - RNA, 34 nt, Homo sapiens
ggcgggcgaaacagacaagaaagcgcgcacaaga

SEQ ID NO: 17442 - RNA, 72 nt, Homo sapiens
cggacaaggaagggcgaggaaagaccacagcaagaccacgcccccagccgggggaccaggccgaacgacccg

SEQ ID NO: 17443 - RNA, 77 nt, Homo sapiens
cagccgccggaacagaccgcccagggcgaaggaagcccagaagacacaagacaaccgcacaagcccggagcccagcg

SEQ ID NO: 17444 - RNA, 79 nt, Homo sapiens
ccaacgacccccaggaagacggagagaggaacaagcccacaccagaccagaaagaggggacgaagccccaaggcacccc

SEQ ID NO: 17445 - RNA, 75 nt, Homo sapiens
ggaccgcagaagggagaccacagcaagacgccgggaccccggaaaccagaaagagacggaacagagaagcaaccc

SEQ ID NO: 17446 - RNA, 85 nt, Homo sapiens
ccccgccccaagccggccaccccagacaccaaaaagggccccgcggaagggcagcgaaggacccagagcagccaacccgcagccg

SEQ ID NO: 17447 - RNA, 66 nt, Homo sapiens
cagccagaccagggacaaagagcaaacagacagggccgcaggcgagggaggcggccggagccaaac

SEQ ID NO: 17448 - RNA, 73 nt, Homo sapiens
acaaagccgggagaaggccacaagcccgcgccagaccaacaagcggcagacccacaccggacacagcccccgc

SEQ ID NO: 17449 - RNA, 72 nt, Homo sapiens
agagagaaggcagggcaaaccagaaagacgaagcagggcgccgcagggacgcaccaggccccgagggagagc

SEQ ID NO: 17450 - RNA, 80 nt, Homo sapiens
agccagggccggccagggccgcggggccccggggccgccaggggaagaacgagaagaaacggcgaccgaccaagccagca

SEQ ID NO: 17451 - RNA, 80 nt, Homo sapiens
aagaagacagcaagcccacgagcggccccccgagacggaggagagggccgaggaaggggaggagggccaagagccacgga

SEQ ID NO: 17452 - RNA, 80 nt, Homo sapiens
gcccacgccagacggggggcgggcgcgggacccaagcgcggaaacacaaggacgaagagagaaccagggggaaggccccg

SEQ ID NO: 17453 - RNA, 76 nt, Homo sapiens
gacaggagaaagcaggggaccggcccacaacccccgaccccggccgcacgcggcaccccggccgcggaccacgggc

SEQ ID NO: 17454 - RNA, 79 nt, Homo sapiens
caaagaaacccaggcgacgagccgaccccagaggacaggcgggccagcgaaagcagaagccacggagaaaaacggccaa

SEQ ID NO: 17455 - RNA, 38 nt, Homo sapiens
ggcccggcccccccggaaggggagcccaaaagcacgaa

SEQ ID NO: 17456 - RNA, 75 nt, Homo sapiens
ggcagaccaaacggcaagaagagcccggaacgccagagcggaaaggaagagaacgccggaagcgcaacaccaaga

SEQ ID NO: 17457 - RNA, 76 nt, Homo sapiens
ccccaagaggcggcgacggcggcggaggcgggaccgggcgagccgaggaaggcgcaaaaccccaccagagcccagg

SEQ ID NO: 17458 - RNA, 91 nt, Homo sapiens
agagggcagacggacaagagcgcggaacaggacgccccgagacccaaagacaggaccacgcaccagcagagaaggaaagcaaaccgaagca

SEQ ID NO: 17459 - RNA, 72 nt, Homo sapiens
agccaaaggaaaagggccggggcagggccacgcagaaccagcaagggaggccaagaggagcgccgcgcccag

SEQ ID NO: 17460 - RNA, 112 nt, Homo sapiens
gggcggcaggaaaggacagcagaaaaacccagaagcagaacgaaggaaaccacagcccacacagcgaccaggacgggaaggaggacaggaccacaaccgaagaaggagggaa

SEQ ID NO: 17461 - RNA, 42 nt, Homo sapiens
cgacccaggccgccggccccacaggccagccagccggcaggg

SEQ ID NO: 17462 - RNA, 80 nt, Homo sapiens
ccgggcagggcccccgcggaggcacgcgccggacaccaaaggcgccacaaaagaagggagaaaagccagccagcacgccc

SEQ ID NO: 17463 - RNA, 78 nt, Homo sapiens
aaccacaaagaggagcggcagaggccgcgcgaggaacaacgaagagcaggacccagaaagcacacaagagaaagcaag

SEQ ID NO: 17464 - RNA, 73 nt, Homo sapiens
cgccgcgagcccaccgccagcgccagagcgagcgccccgcccaggcacacagagaaaaaaagggaacaaaaca

SEQ ID NO: 17465 - RNA, 77 nt, Homo sapiens
cgcgcgcccggccaagaggcaaaggggaggacgcagcaaaccaccagaagggacaagagaaaaaaagggcgggcgaa

SEQ ID NO: 17466 - RNA, 78 nt, Homo sapiens
ccgcccgcgccccgccgcggggcgcgcggcgccggcggcgcgcggcccccgcgcaggcaggagcccagaggaggaggc

SEQ ID NO: 17467 - RNA, 65 nt, Homo sapiens
gccaaccggaccgcccccaacaaccaacaacggcaagcggagaagagcaaggccgaaccgagagg

SEQ ID NO: 17468 - RNA, 59 nt, Homo sapiens
acccaccaggacccggcaaggcagagaggcggaccccgcgggcgcgcggcccgaaccca

SEQ ID NO: 17469 - RNA, 99 nt, Homo sapiens
gagaaggaaagcaccagacgccaccacgggcacccgcgccgggcaccgaggaccagccaagacaggcgggcgcaaagacaccgccagaagaccagagga

SEQ ID NO: 17470 - RNA, 79 nt, Homo sapiens
ggcggagcccgcacgcggcgggcagacagaaacagcccgccagcaagaaaccccaaaagagccaggaaagaagagaaga

SEQ ID NO: 17471 - RNA, 80 nt, Homo sapiens
ccgagcccccggagccgaccgcacgcgggcgcgagaacggccgcccgccgcagcggaggggcgggaggaacagagcgaca

SEQ ID NO: 17472 - RNA, 37 nt, Homo sapiens
ggagaacgccccaaggagcaagagaacaggaacaacc

SEQ ID NO: 17473 - RNA, 62 nt, Homo sapiens
cgcccacagcacggcggggccgcccagcgcaagagaaaggaaccccccaaacccaggccggg

SEQ ID NO: 17474 - RNA, 77 nt, Homo sapiens
ggaagaagcaaacgaagggcaagaacaaaaaaacaaccaccgacaccaagcaaccacgagagaaggccaggagaaca

SEQ ID NO: 17475 - RNA, 81 nt, Homo sapiens
ccggggcacccgcacgggaagcaggcccgccacagggaaagagacagacaagaagaagaagcgacagcagcgcacggaacc

SEQ ID NO: 17476 - RNA, 77 nt, Homo sapiens
gaggacccaccgggggcagggcgcaccacgaaaacaacacagcagggaagcagaaggcggacacagacaggcaggag

SEQ ID NO: 17477 - RNA, 67 nt, Homo sapiens
ggcaagaaccgagcgcggagggcgacgccgggacgaccacgagagggccggccggacgcaaacgccc

SEQ ID NO: 17478 - RNA, 56 nt, Homo sapiens
cccaagggaaaagcagcggccgcaaggaaggagggccccggagcagccacaccacc

SEQ ID NO: 17479 - RNA, 76 nt, Homo sapiens
aacccccgaaacaagaaagcagaaccagcagcaaaaggggcaaggggaaaagacagggaccaagaaaggcccaggg

SEQ ID NO: 17480 - RNA, 81 nt, Homo sapiens
gagaccaggcggcaaaacacagaggaggagaggacacggcgacaacaaaggagaggacaagcgggccaacacaagggagag

SEQ ID NO: 17481 - RNA, 58 nt, Homo sapiens
ggcggcgccagccccagcccggagaaaccagcccggggaagagacgagagggaagagc

SEQ ID NO: 17482 - RNA, 117 nt, Homo sapiens
cagccagccgggcagcgagccagcccccacggccccaacagcaccgagccagccaagaagagaaaagcagcacgaagcaaaaacccacacaaaaaaagagggagcgaagcaagaaag

SEQ ID NO: 17483 - RNA, 70 nt, Homo sapiens
aacaggccgcgagaggacaagcccagaccaaaacagcaaagaaccccccgccaaggcccaacccagcccg

SEQ ID NO: 17484 - RNA, 76 nt, Homo sapiens
agacaggccagcccaaggcagcagccacgacacccaagccgcacaggcaaccaacccagggaaaaggacagaccac

SEQ ID NO: 17485 - RNA, 53 nt, Homo sapiens
caggcagcgaaaaaaccagcccaagagagccgagaaggacagagggccagccc

SEQ ID NO: 17486 - RNA, 69 nt, Homo sapiens
agaagcggggccgacaagcacaggaaagacggagaacggaagaaggagcagcagaacggagagaaacag

SEQ ID NO: 17487 - RNA, 78 nt, Homo sapiens
aggagagccgcagagcgcgcagaccccgggccagccgcccaccccagccggaagagagagagagacgaggggcgcccg

SEQ ID NO: 17488 - RNA, 50 nt, Homo sapiens
gaaccaaccaccacaggaccaaagacagagacaagcggggaagaacggcg

SEQ ID NO: 17489 - RNA, 75 nt, Homo sapiens
cagcacgggacaccggggccgcggcgcgcgccagcgcgcccacaggaaaacaaagagggaaaacggagaaaagcc

SEQ ID NO: 17490 - RNA, 75 nt, Homo sapiens
acgcagcggagcgagggaccgacaagagaaaaccaggcagaacaagcagaacagacgacaaacggaaggagcaaa

SEQ ID NO: 17491 - RNA, 88 nt, Homo sapiens
ggagcggcgcggaaacgcaagacgggccgagaagcagcgcgagagggacgaagcagcagaacccaaggccgaaaagcacggcaccgcg

SEQ ID NO: 17492 - RNA, 75 nt, Homo sapiens
ggagcagggaagacgccgcgccaccgagccggaccggagacggggccaacagggggggaagaaagaaggagaagg

SEQ ID NO: 17493 - RNA, 72 nt, Homo sapiens
acggaccagaccgaccaccaaaagcaagaacaacccaagaaggacagcgcgacagaaggacagcagccgggg

SEQ ID NO: 17494 - RNA, 72 nt, Homo sapiens
caaaagaaaaggcaagacaaccacaggcagagagggggacacagccagggcgcaggcagcgcccaacaacac

SEQ ID NO: 17495 - RNA, 76 nt, Homo sapiens
aaagacacagaagaaaaaggggacgaagacacgaagcagagacgaaggaaaaggaacaaagcaaggacaaacaccc

SEQ ID NO: 17496 - RNA, 57 nt, Homo sapiens
gcaccgaagcgacagcagcccgacccgacaccaaggaagcccagaaaccacgggaaa

SEQ ID NO: 17497 - RNA, 74 nt, Homo sapiens
ggcagagaggagagagaggccccggcccggcccccgggaccggcaaaaacgggaaaaggcagcggcgcgggccg

SEQ ID NO: 17498 - RNA, 50 nt, Homo sapiens
ccggacagaaagccaaaaaggagaaagaacacacgaaggccagcggcggg

SEQ ID NO: 17499 - RNA, 76 nt, Homo sapiens
aggacaaggcccgagagcagcgcgccggccagaacaggagcaaacaaagaaggcgaggacacagagaagaaagaga

SEQ ID NO: 17500 - RNA, 71 nt, Homo sapiens
acgaaggggaaccagggaacgcccaccgaaaagaacaacaaccaaggacaccggacagggcagaccgccag

SEQ ID NO: 17501 - RNA, 62 nt, Homo sapiens
gaacagaaagaacacacacgaggcacacccagaagccacaggagaagcaagaggcggccccc

SEQ ID NO: 17502 - RNA, 87 nt, Homo sapiens
agaggcgcgacacgaaaaggacccagaaaaagacagaccaagagaagggacaaagcagaccagaaaaagagcaaaggccaacccaaa

SEQ ID NO: 17503 - RNA, 71 nt, Homo sapiens
aacaggcaaccagaaggaccaccagagaggaaacccgacaacgccaccgacgcggcaccaaacgggaccgg

SEQ ID NO: 17504 - RNA, 70 nt, Homo sapiens
cccaagagcgggaacagacaacgaagagaggaaagaagcggaaaggagggagcacacaacaaggagcaaa

SEQ ID NO: 17505 - RNA, 74 nt, Homo sapiens
ccccgccccaaaccgggcccagcagaagaggaacccgaaaaccccagaagcgaagcggacggagggggcacaaa

SEQ ID NO: 17506 - RNA, 41 nt, Homo sapiens
ggaaaggaacacgaacacaaaaaaggcacggacaggacgag

SEQ ID NO: 17507 - RNA, 60 nt, Homo sapiens
ggcaccgcagaacgccacaaccagcagacggagggccgccgagcaagacaccgagacagg

SEQ ID NO: 17508 - RNA, 88 nt, Homo sapiens
ccaagacgccggcccagcgcgccggcgcaggaggccgcccagggggccccaccgcgcgcggcaaggcccgaacgagcgcaaggccgag

SEQ ID NO: 17509 - RNA, 75 nt, Homo sapiens
ccccaggccccaaacgcagaaggcccacagaaaagacgaaagcgaaaagaaacagaaagagacaggacaaacgaa

SEQ ID NO: 17510 - RNA, 78 nt, Homo sapiens
cgaccgcagcgacaagaacgcaggacggccgcggcaccgaaccacaaggaggacgagccggcacaaaccgagccggca

SEQ ID NO: 17511 - RNA, 72 nt, Homo sapiens
acacggcaaaccccaaaaacagaaggggaaaagcaccaaggcgagacaaagaggcacccccacggcggacca

SEQ ID NO: 17512 - RNA, 81 nt, Homo sapiens
ccagggaagcgcagaaagcaggcgaacccgcggcgcaaaacggagccgcagaagccgccgcgggaagcaacgggaaacgga

SEQ ID NO: 17513 - RNA, 84 nt, Homo sapiens
ggagggcaacgcagcgccgcgccgggcggacaacacggagaacgacccaaccaggggggagaggaaaggggccccgagcagccg

SEQ ID NO: 17514 - RNA, 74 nt, Homo sapiens
ccccaacccggcagcagggccggaaagaacacaggcacgaccaagaggggcggagcagaaaccagagacagcac

SEQ ID NO: 17515 - RNA, 55 nt, Homo sapiens
cgcagccgagcggggccggccacaggcagcccgaagcagcccaggaacaaggccc

SEQ ID NO: 17516 - RNA, 91 nt, Homo sapiens
agggacgagcgacaaccgggcaagcagagcccccaccagagaggaaggagacccaacaccccggccagacgggccaccaggccggcgcccc

SEQ ID NO: 17517 - RNA, 68 nt, Homo sapiens
cggagaaaaggccaagaaggcagggcgaacgggccaggcccaggacaggccacacgggacagagagag

SEQ ID NO: 17518 - RNA, 79 nt, Homo sapiens
agaggaggaggaaggagaagagaaacgacgggggggccacacgggggagcccggcgaccacacgaccaccggccccacg

SEQ ID NO: 17519 - RNA, 75 nt, Homo sapiens
gcaacgcggagcggcggggaggccacagaccagcacacgcccagccggggccagcaccgaccacgacaccccggg

SEQ ID NO: 17520 - RNA, 57 nt, Homo sapiens
cacgcaggggaaacgaacacgcagaagcaacccaggcacccccaacaggcacccacc

SEQ ID NO: 17521 - RNA, 85 nt, Homo sapiens
cgggaaccaccgcaggggcgggacaggagaaacaggccgccaggccgaggccccagccagagagacggggcacggagccaggagg

SEQ ID NO: 17522 - RNA, 71 nt, Homo sapiens
gaaaggacgggaagggcgacagcgcaaggagacgaaggaagggaccacagaccagcacgccggcgccacga

SEQ ID NO: 17523 - RNA, 77 nt, Homo sapiens
cagaacaggaggggagagggcaggaaccaccgcccaaagcccacagcgcggcaccgaccccggggggcgcggggggc

SEQ ID NO: 17524 - RNA, 75 nt, Homo sapiens
cgaaaggcggagggaccccaaaaaaaacaagaaccacggcacgaaaggagcaacggacccaaaaggcagcaagca

SEQ ID NO: 17525 - RNA, 78 nt, Homo sapiens
ccagcagggccaggcacaccagagaggcacggagaagccccccaccgcagcgagaccagacccagcggaccagagaac

SEQ ID NO: 17526 - RNA, 75 nt, Homo sapiens
acacgggcgagcgacagcggcggaaggccaccagaggcgcaaaggcaagaacaagcccccgccgacaaacacaaa

SEQ ID NO: 17527 - RNA, 76 nt, Homo sapiens
ggaccccccaccgccgggaacaaagcagaacgacagagcgggagccaccagcgccaaagggaagccaggagcccgg

SEQ ID NO: 17528 - RNA, 79 nt, Homo sapiens
acacagaagaagcccagagagcaccccagcgaggcccacagaaaagccacaacccaggaccgccagcagcagccgaaaa

SEQ ID NO: 17529 - RNA, 64 nt, Homo sapiens
gccgaccgagacgggcggagaggagaagaaagcaggagcccggaaaggagaaggaaaagacggc

SEQ ID NO: 17530 - RNA, 67 nt, Homo sapiens
ggagaagaacgcgcaggacgaaacagaggagccgagacgcccaaagcacccaccacagcagacaggg

SEQ ID NO: 17531 - RNA, 71 nt, Homo sapiens
aacagaaaacgaaagaaagaaaacaaagaaaaacaacccagaaccaaagaacagaaccccgagggagggaa

SEQ ID NO: 17532 - RNA, 68 nt, Homo sapiens
aaaaggaagacgagaccagggaggcaggcgacaacagaggagaaggcgaagaaaacagccaagcacca

SEQ ID NO: 17533 - RNA, 58 nt, Homo sapiens
ggccgccccggagggagacgcgcgccgaggagaacccagcgggagggcaggagaaagg

SEQ ID NO: 17534 - RNA, 78 nt, Homo sapiens
caagcggagcagcaagggagaaacggagcggagcccagaaggggaacggcggaccacaaagagagaaccgcagcgaga

SEQ ID NO: 17535 - RNA, 55 nt, Homo sapiens
gggggccagcaaaccggagaacgagggcacccaagagggagagacccccagagaa

SEQ ID NO: 17536 - RNA, 80 nt, Homo sapiens
cgcccccaggaccccagggagagcgggcagccccaggggacaggaaaagaaggaggccagcgggacacacaaagaaagac

SEQ ID NO: 17537 - RNA, 86 nt, Homo sapiens
gcaagcgaagggggccgccacaaagccgccggccagggcaagcgcccgaaggcagagggaagaaggagaaagggccaaccccgaag

SEQ ID NO: 17538 - RNA, 54 nt, Homo sapiens
ggagcacgcaccccgcggcggggaaaggccgcaaccaagccagaaaaggaaccc

SEQ ID NO: 17539 - RNA, 76 nt, Homo sapiens
gagcggggacccaggagccggccagcgcgccggagccgccgaggagggaagcggacacacaggacgagaaacccga

SEQ ID NO: 17540 - RNA, 68 nt, Homo sapiens
cggcacgggccccgggccccacgccaggacacgagaggagaggaccacacgaagaaaaaagacagagg

SEQ ID NO: 17541 - RNA, 79 nt, Homo sapiens
agccccacccccccgccagcccagccaggcgggagagggaaagcggagaggggaagagcacacaccagagcggcgcggg

SEQ ID NO: 17542 - RNA, 78 nt, Homo sapiens
agaggccgcggcggccaggccccagacacagacgagcaggggaagaccagggccggagaaagaagaaaagaagaaaga

SEQ ID NO: 17543 - RNA, 77 nt, Homo sapiens
aacagccccaaccgcgaacggacaaaagacaggaggaagacccagacaggggaccacacgaagaggggcacaaacgg

SEQ ID NO: 17544 - RNA, 70 nt, Homo sapiens
aaagccggccacgccgggccggagccggaaccgcggaaggaggaacaagcaacaggaaggcgaaaaaaac

SEQ ID NO: 17545 - RNA, 65 nt, Homo sapiens
cagccgaacggaacggagagcagccaagcagcggcccccaaagacaaaccaagggagacacagca

SEQ ID NO: 17546 - RNA, 113 nt, Homo sapiens
gaccgcggccgagcagccgggcggccgcgcgagccggcggcccggagggggcggcgggaaacccaccagagaaggcgcggccacccaggacccgggggaggcagcgaagaaaa

SEQ ID NO: 17547 - RNA, 63 nt, Homo sapiens
gccaagggcaaggagacagcagaccaagaaccccaccagcgcgggcagccgaccagggaggcg

SEQ ID NO: 17548 - RNA, 86 nt, Homo sapiens
agacgccacccacggaccagcagcgccgagggaaacccggagaccaaaccggaacaagcagaaagcacgaacaacgagaacaagac

SEQ ID NO: 17549 - RNA, 74 nt, Homo sapiens
ggagcaaggaacaccgacaaaccgaccgaccaggagccacagcggagcggagcgcccaaacacacacgcggggg

SEQ ID NO: 17550 - RNA, 76 nt, Homo sapiens
gagagcagcgccaggaagaagagaggaagagaccggaacagaagcgaaacagggaaggagcccgcaccaacaaccc

SEQ ID NO: 17551 - RNA, 67 nt, Homo sapiens
cggagcccaagaaacgggcagccaggcccccacagcccgcagcaggaggcaaagggaccccaagaaa

SEQ ID NO: 17552 - RNA, 78 nt, Homo sapiens
ccgggcccagggaaaggacagacccggccaggaacaccacgggaggccaaccggaccagaggccgaggagggcggacc

SEQ ID NO: 17553 - RNA, 82 nt, Homo sapiens
cgcgccaccgcagacagcggcaagacaagcacggaaccgcccgagacagaaggagggggcagagcacggcaggcagaagggg

SEQ ID NO: 17554 - RNA, 81 nt, Homo sapiens
ccgaccggccgcgacagcgaacagcgcggccgcagcggacaaggcaaaaccagcaagcggacccagacaaaaggcgaaccc

SEQ ID NO: 17555 - RNA, 69 nt, Homo sapiens
cgcggaccgaggaaggggaagcgcggaagcacagacccgccacaccacgccacccaagagagagcaaaa

SEQ ID NO: 17556 - RNA, 82 nt, Homo sapiens
gaagaaccgccggggacgaaacaaaaagaccggaagcgagaccgcagcaaagaccagaaccgcccggaagcagaggagaaca

SEQ ID NO: 17557 - RNA, 76 nt, Homo sapiens
cggcaccacagggggcaccggaggccgcaaagccccaagaggaccaccagggagacagcacgcccgaagagaccgg

SEQ ID NO: 17558 - RNA, 72 nt, Homo sapiens
cggacacgaggagaaacagcagaaacgcaccaggccaaagaaagagaagccggaaaccccccggaaggggag

SEQ ID NO: 17559 - RNA, 81 nt, Homo sapiens
cccaacaccagcaccgcagaggcaaggggccaccaggaggccagggggcgccaggcccaagaaacagaacaagaaaaagaa

SEQ ID NO: 17560 - RNA, 79 nt, Homo sapiens
agcgaaagcaagcaaaggagaagacagcgagcggcagaaccacgcgaccgcgcggaaggaggaagaggaccgccccacc

SEQ ID NO: 17561 - RNA, 76 nt, Homo sapiens
gaagcagagggcagggggcaaacaagccgaccggaaaaaggaccgcaaaaggaaagacgcgaaaaagacaccagac

SEQ ID NO: 17562 - RNA, 76 nt, Homo sapiens
ccaacccgcccaggacaagccgcgcggggacccgacgcccgcacggccaaaacagaagaggcaaagcccagccaca

SEQ ID NO: 17563 - RNA, 82 nt, Homo sapiens
cgaggagcgggccagccgcgcggcgggaagcggcggcggcggcccagcgccaagagcggcaagccacgcggacacaaacccc

SEQ ID NO: 17564 - RNA, 51 nt, Homo sapiens
gaagccaacacagacagccaagggaagagcgccgcaaaagcgaccaagcca

SEQ ID NO: 17565 - RNA, 85 nt, Homo sapiens
gcggcggagaccgagagccgcccgaaaagcggggccggacgcaggaggcaaagggaccccaagaaaccaaagggcaagagccgca

SEQ ID NO: 17566 - RNA, 80 nt, Homo sapiens
ccagaacacccgacacgagagaccgccggcagccaccagacaccacccacggcacgcaggcaccgcacagagaaagaggc

SEQ ID NO: 17567 - RNA, 63 nt, Homo sapiens
gcgacgcaagaggcagccaccacgggccggaggggagcccaaaagcacgaagcgccagaggac

SEQ ID NO: 17568 - RNA, 73 nt, Homo sapiens
agccgagcccaaggcaagacccaaggcgacgaccgacaggggggaaagaggcaacagacagccaccgaggaag

SEQ ID NO: 17569 - RNA, 53 nt, Homo sapiens
acccccgggcgccaggggggacacaaccggacccccaccaacccagggcagcc

SEQ ID NO: 17570 - RNA, 63 nt, Homo sapiens
agaccgcggccgggaccgaggggagagcgggacggccccaaggccacagaaaaggagaccagc

SEQ ID NO: 17571 - RNA, 76 nt, Homo sapiens
cgagcaaacacaacagaagggaacccccacaaagaacagaagcaaggaagcgggcaaaacggccgagcgaccagga

SEQ ID NO: 17572 - RNA, 75 nt, Homo sapiens
gaaccccccgaaaggaccccccagggcagcggaggaccgaagagacgccgaagaccaggacggacaggagaggca

SEQ ID NO: 17573 - RNA, 77 nt, Homo sapiens
gcgacaggggaacagacagaaggagcaggaaccaaaggggggcaggagaaacggcaaaacagagagccgcagagcaa

SEQ ID NO: 17574 - RNA, 84 nt, Homo sapiens
gagcaccccgcaggggcacccgggggcccaaccacccaggagaaaaggccagaccaagcgcaaggcaggcaggcaagaagagca

SEQ ID NO: 17575 - RNA, 86 nt, Homo sapiens
caggaggcggccgccgcagcccaggcgcgggggcgacgacagaacccaggagaaacgagagggacagcaaggaagacgccagagag

SEQ ID NO: 17576 - RNA, 73 nt, Homo sapiens
ggccagacagacgaccagcggaggcagcagaagaaaggaaccaggcaagggacagaacccgggcccaaggaag

SEQ ID NO: 17577 - RNA, 80 nt, Homo sapiens
cgccccacggccccggaacagcaggcgcgcacgcggggaaacaccaaggaagaagagacgaccgagaccaggggaaagca

SEQ ID NO: 17578 - RNA, 79 nt, Homo sapiens
aacaagagaacgggcccacacaacccaggcaaccaacagccagaaccagagaacagcagaggcccaggaaacagccacc

SEQ ID NO: 17579 - RNA, 76 nt, Homo sapiens
cagcggcgcagcccacgccagacgaccccacccgcgccgcgacccgagcacgcagccccgaaggcggcccggcccc

SEQ ID NO: 17580 - RNA, 77 nt, Homo sapiens
cgccgcccggggcagaccaggcagaaagaagccaaggaagcggaggcacgggcaacggcccccagagcacagcagaa

SEQ ID NO: 17581 - RNA, 53 nt, Homo sapiens
acgcagggcgcccccgcgccacgcagagccccgccaggaagacacgccgggga

SEQ ID NO: 17582 - RNA, 85 nt, Homo sapiens
gagcgcgcgaggacgggcgccccgagcgcccccgcaggcccacggccggcgagacgaaggggcgagacgggaccggaaccagcca

SEQ ID NO: 17583 - RNA, 76 nt, Homo sapiens
aacagaaaaccacaagaaaacacaaacaaccccacccagacaaaacccacaggaccgcgaacaaggaggccacaaa

SEQ ID NO: 17584 - RNA, 82 nt, Homo sapiens
agagcgagcgacccagcccgcgagcgagaaccgagggcaccggagggaagcgggccaccgcccggcccccaagacggccccc

SEQ ID NO: 17585 - RNA, 64 nt, Homo sapiens
cagaccgcacaaccgacaccagccaggagacgccgcaagaacaccggaaacgccaggccacaag

SEQ ID NO: 17586 - RNA, 77 nt, Homo sapiens
aaccggacccagacccagaggcagagccgccccagcagcaggggcgccaggaaagcgaacgcgaaaagaaaagccga

SEQ ID NO: 17587 - RNA, 80 nt, Homo sapiens
ggagggagacgccgcggaagacccgagggggcgggaggaacagaacaccgcagaggccgcccacaggaaggcggggccca

SEQ ID NO: 17588 - RNA, 68 nt, Homo sapiens
cccgcgccgccggcacgcgggcggagaacggaaaagcaccaggaagcagagaggaccgcagaagggaa

SEQ ID NO: 17589 - RNA, 83 nt, Homo sapiens
ggccgcgcaagcggcaggagcgcacagcgaggaggggggcgcgcagcccggggaccccccgccccagcaggcacccagacgga

SEQ ID NO: 17590 - RNA, 62 nt, Homo sapiens
cgaaaacagaccgcgagcccagagggaaagggagcagcaccggccacacccacagcacgacc

SEQ ID NO: 17591 - RNA, 74 nt, Homo sapiens
cccagcccccaaggagcgaggaccacagaacagccagcaaagacaagagcagaccagcagccgcagcgcgacag

SEQ ID NO: 17592 - RNA, 67 nt, Homo sapiens
ccgggaacccgaggcggaccgggcgacgagcacccgacagcacaaaggcaagaaagaaaaagcccca

SEQ ID NO: 17593 - RNA, 75 nt, Homo sapiens
cgaacgaggcaagcagcgccgagcccaggcaagagcccgcgagaagaagggccagagaggggaagaggaaaccgg

SEQ ID NO: 17594 - RNA, 73 nt, Homo sapiens
cgcacacaggagagccaggacagccacaccccaagaggaagacgcaaacacaaggaaggaaccaaccgaggca

SEQ ID NO: 17595 - RNA, 81 nt, Homo sapiens
aggggccaaggagcacggacggacccagcacgaggaggcgcgaggagaggaaccagcgagagcgacacagaccggcccgac

SEQ ID NO: 17596 - RNA, 75 nt, Homo sapiens
cacgacagaaagaaaggccaaagcagcaggggaggggcgaccccggggcccggccagcacgaccgaggaggggcg

SEQ ID NO: 17597 - RNA, 80 nt, Homo sapiens
caagaagcgcccacgcagcagccgggcccaaagcacaagcgaccgccgaaggagcccccgaacggcaacgcccccccccc

SEQ ID NO: 17598 - RNA, 82 nt, Homo sapiens
cccgacagagacggcggagaccccgaaggcgcaaacgacaccacccgaccgaggagaaagccggacagacacacagagagag

SEQ ID NO: 17599 - RNA, 76 nt, Homo sapiens
gaaaaaccggacgagcgagcaagagcaagaagcccgaacgccaacccggccagaacacgaagcgacgcaaaaccaa

SEQ ID NO: 17600 - RNA, 77 nt, Homo sapiens
agacgcagggcgcccccgacagcgaggacagacagcgcaggacagccagaccagcccgacgcgcgcacaccgaagga

SEQ ID NO: 17601 - RNA, 85 nt, Homo sapiens
gcacggaccacacagcgcgggagccacgcagaggacgccggaacacccggaagccgagaaaggggagaccaccaggaaaagaacc

SEQ ID NO: 17602 - RNA, 76 nt, Homo sapiens
ggagcggagaggccccccagcgcgccgcccgggcgcggcccgcccgcccagaggcagaagcgcagaaagaaaaggg

SEQ ID NO: 17603 - RNA, 81 nt, Homo sapiens
caagagaagagcgagccgcagccgacaaaggccagcggaagccagaaagccacgcaggacccagagggccacagagggccc

SEQ ID NO: 17604 - RNA, 72 nt, Homo sapiens
gccgacaaggggcggaggaagggaggagacccgaccccagaaggaaaagcacacgccggacggaaacccaca

SEQ ID NO: 17605 - RNA, 77 nt, Homo sapiens
gacggaggcaacggggacagacgagggcaggggcgggagcggcaacgaccgcggggcgcaggaccgccagaagcagc

SEQ ID NO: 17606 - RNA, 76 nt, Homo sapiens
aaccagccagcaccaagggcacacccaccacaaaccaaacgagcaagaaggagcgaggcagagccacaggagaagc

SEQ ID NO: 17607 - RNA, 63 nt, Homo sapiens
aacgccacgaggcacaccccagcaagggaaccgaaccaccaggccaaaaagcgccggcagccc

SEQ ID NO: 17608 - RNA, 78 nt, Homo sapiens
cacaccagagcgccaccaggccgacccagaagcaccccccaggcaggcggcagagagcaggccggaagcgggaaagcg

SEQ ID NO: 17609 - RNA, 77 nt, Homo sapiens
acacccccaggcgggccaggaccccaccagcgcccagcccccaggcgaggagaaggggagacacaaggagggcggga

SEQ ID NO: 17610 - RNA, 66 nt, Homo sapiens
gcggagccgcgcccgccgcgccgccgggcgggcccggggccgggaccaggaggagaagcaaccaga

SEQ ID NO: 17611 - RNA, 60 nt, Homo sapiens
acaaccggccaccagcgccaaccaaaagcccaaaggaggcacagaaagaaaggcacagag

SEQ ID NO: 17612 - RNA, 82 nt, Homo sapiens
gagcggagaaccgaagagcaaaggcaagaaggcaacgacgccacgggaaggaccaccaaccagaccaagacacaaaagagaa

SEQ ID NO: 17613 - RNA, 82 nt, Homo sapiens
ggcgcccaagcgacagcgcagaggggcaggagccgggagccaccgcgaaggccccggagccagcgggggccaagacaacaag

SEQ ID NO: 17614 - RNA, 84 nt, Homo sapiens
cgcagccgcggacgaggccgggacggccgagcggaccaaaaggggaaaagggcggagaacggaaaagcaccaggaagcagagag

SEQ ID NO: 17615 - RNA, 77 nt, Homo sapiens
gcggacaaccacccggcaacaaacaccggcccaggaggagggcccggggcggagacagcagccaacgcacgcaaggg

SEQ ID NO: 17616 - RNA, 72 nt, Homo sapiens
cgcacacgcccccgccaaggagcagccagccccccaggccagagaaggggcaccacgcaagaggacagacaa

SEQ ID NO: 17617 - RNA, 82 nt, Homo sapiens
gcccggaccaccaggccaagaaccgcagggacagaaacagggggagaagggcacacaccaacgaaagcagagaaaagaacac

SEQ ID NO: 17618 - RNA, 77 nt, Homo sapiens
ggcgggagcgcgaacgagcgacggcggaacccggggccgggacgcagcccggcggcagcagccaagagaaaccacca

SEQ ID NO: 17619 - RNA, 85 nt, Homo sapiens
gcggagcaaggaagaaaaccgaccagaagagaaagagagaagccaaaccccagggccagagcagaggcggagaggggcagaccca

SEQ ID NO: 17620 - RNA, 81 nt, Homo sapiens
aagagcagacaggcgcgccggagcaagggagacccccgaagaacaggcgaaaaaggcccacaaccacggggagggggccag

SEQ ID NO: 17621 - RNA, 59 nt, Homo sapiens
ggaaacgcgaaggccaccaggagggagccacaccaaagccggacccccccagccggacc

SEQ ID NO: 17622 - RNA, 39 nt, Homo sapiens
ccgcagcccgcgcgcagagggaggcagggagcccagaaa

SEQ ID NO: 17623 - RNA, 81 nt, Homo sapiens
ggacgggcaaaggaaagccgcggagaaccgaaccaacagccagccaaagccaggcagcacagcacaggaaaacaaacgaga

SEQ ID NO: 17624 - RNA, 78 nt, Homo sapiens
caaaggccgccaggccgcagacgcgaaggaacggcaaagagagcacgcaaacaaggagcagaaccacgcggacaacag

SEQ ID NO: 17625 - RNA, 70 nt, Homo sapiens
cggagcccgagggacggggacggagagaacacgagcccacagcgaaccccaagcccgacggggacccacc

SEQ ID NO: 17626 - RNA, 67 nt, Homo sapiens
ccccagagacgcgcccccagggaagcagaggggaagcaggccggagccgacaacccggccagcgcgc

SEQ ID NO: 17627 - RNA, 81 nt, Homo sapiens
aacggcggagcggaggcacccgaagcgcccggggagggaccgcaggggcggcgaccacaacaacacagccgagaaaggcgg

SEQ ID NO: 17628 - RNA, 67 nt, Homo sapiens
acagggacgaagaaaaggggggacaaagccagaagacaccgcaggggacagaacggcgcaacacgag

SEQ ID NO: 17629 - RNA, 72 nt, Homo sapiens
cggcgcccggccaggcggcccagaaaggaagcacgcgcgcggacaagaccagaaagaaaagaaccaaggagc

SEQ ID NO: 17630 - RNA, 67 nt, Homo sapiens
caacgacaacaccagggacaacgcaccgaaggaccaaggaggacccgagcgccggaagaaggaggag

SEQ ID NO: 17631 - RNA, 93 nt, Homo sapiens
ggagcaccacggaccccaaggaagccacggcagacacacaacccgacccgacgaggagaagaaaaagcagaaaggaacagaaaacaaaagaac

SEQ ID NO: 17632 - RNA, 97 nt, Homo sapiens
cacacccggaggagcgcagcaacagaagagaggccagccgggaggacacacaagcggcagcacggaaggaacaaccgcgagcagccccgaaaacgaa

SEQ ID NO: 17633 - RNA, 76 nt, Homo sapiens
ccgcggggcgagcccggaaaaccagaccagaaacggaggagcccgccgaagcagggcggagaacggaaaagcacca

SEQ ID NO: 17634 - RNA, 88 nt, Homo sapiens
ccaaagaaaggaaaagaaagagaagaaaaacagcccgcaacccagccgggagcccgacgaaagccaagcacacgcaaggaagagggcc

SEQ ID NO: 17635 - RNA, 54 nt, Homo sapiens
gaagggggcaaaggcacaaacaaggacccaggcagcaaaagaagcaggacccgc

SEQ ID NO: 17636 - RNA, 38 nt, Homo sapiens
ccgacagccgcagaacagaaagaaagaccgccggaacg

SEQ ID NO: 17637 - RNA, 41 nt, Homo sapiens
ccagggaagagacacacccagaacccggaggcagccgagag

SEQ ID NO: 17638 - RNA, 40 nt, Homo sapiens
gagacggcacgggccgaggaaggggcagaccaacaccacc

SEQ ID NO: 17639 - RNA, 59 nt, Homo sapiens
cgcaagccagaaagaaacagaaagaagggagaaggcgacaaagagcgaaagggcccaag

SEQ ID NO: 17640 - RNA, 82 nt, Homo sapiens
aagaagacacacgaggccgacagaggagagcagagacagacacaagcgggccaacaaaagaaaagcagccgaagaacgagaa

SEQ ID NO: 17641 - RNA, 73 nt, Homo sapiens
gacggccccacaagagagggcggcagaccagaaggcgccagcacaacccaaacgccaacggaaccagacgaag

SEQ ID NO: 17642 - RNA, 57 nt, Homo sapiens
aacccagagacgggcgccaaaggaccgaacgggacgaagggacggaggaagacaaca

SEQ ID NO: 17643 - RNA, 73 nt, Homo sapiens
ccaagcggagggacagacaaagaccagggaaaaggaagaacaacaggaacaccagccagaacagaagaaagca

SEQ ID NO: 17644 - RNA, 73 nt, Homo sapiens
gaggacgacagcacccacaaaacggacagaaaaccccaccagggaaaggaaaagccacggcgaggaaagccgc

SEQ ID NO: 17645 - RNA, 58 nt, Homo sapiens
gaggccaaaaagagaggaggaagaagacaaagacccgggccagccgccggaacccgaa

SEQ ID NO: 17646 - RNA, 77 nt, Homo sapiens
gaaggaccaagaaccagacacccaagcggcgaaggaagaaaccaggaacgggaacggcgaggacaggaaggagcaca

SEQ ID NO: 17647 - RNA, 92 nt, Homo sapiens
cagcagcgcgggccagagcgcagcgccgagcgcggcccgggcgccacgagccggcggcggacggcaggacaggaagagcacccaagcgcaag

SEQ ID NO: 17648 - RNA, 54 nt, Homo sapiens
gaacgagccccagccagggccacagagagcggcacaagcccagaacccagcagc

SEQ ID NO: 17649 - RNA, 87 nt, Homo sapiens
agccggaagcaagccgccgggagaaggaagaacggcgagacgggcccgggacacccagacagagagagcgcacgaagaagggcggag

SEQ ID NO: 17650 - RNA, 71 nt, Homo sapiens
gcagaccagaccaacaccgaggccccaaaagcgccgcagcgaaccaagagagaaaaaagccaacggcgcga

SEQ ID NO: 17651 - RNA, 82 nt, Homo sapiens
gcgcaccgggcgggccccggacccggagacaccccgcagcacagccgcgaccaagcggcccgaaggacccgcaacaggcacg

SEQ ID NO: 17652 - RNA, 85 nt, Homo sapiens
gcgaccgcacagaggacccccccggccaaggccgagcaggagcccgcgggcccagacagaggaccggcaagcagaaggacccgcc

SEQ ID NO: 17653 - RNA, 80 nt, Homo sapiens
agcggaggccggcacgcccgcccgaggcgacggccgcggcgcacagcaggaggcaaagggaccccaagaaaccaaagggc

SEQ ID NO: 17654 - RNA, 78 nt, Homo sapiens
aaacagaccacccccaaacggaaagggcaggaagaccagcccaggaccgacagcagaggagcgcaagaacggagaaca

SEQ ID NO: 17655 - RNA, 63 nt, Homo sapiens
cccccaggacccgccggcgcgagaacacaagcccgggggaaaggcagcgcgcagcagcggcac

SEQ ID NO: 17656 - RNA, 61 nt, Homo sapiens
gcgccaggaggcccaccccgccggaagaagcccaggacccaggaaggagacacaggaaaac

SEQ ID NO: 17657 - RNA, 67 nt, Homo sapiens
cgaaacgccgaaaaacccaagcacaagcccgggggaaaggcagcgcgcagcagcggcacacaagcca

SEQ ID NO: 17658 - RNA, 67 nt, Homo sapiens
aggaagggaagcaggaagcaccacacacagcaccacaagaagccaaaccgacaaaaagagaccgaca

SEQ ID NO: 17659 - RNA, 82 nt, Homo sapiens
gagagggcgggagcagcagcagaaacaggcagaaaaacgcacggcagagccacagaaaggacgcagaaacggccagcagacg

SEQ ID NO: 17660 - RNA, 74 nt, Homo sapiens
aacacgggagaaaaaggaaaacgcggaaaaccgacacaacagccaggcccagacagccgccgaagaaaagccca

SEQ ID NO: 17661 - RNA, 67 nt, Homo sapiens
gacgcccgcgccccgagggcccagaggagacaggggaaccaggaggaggacagccagacaggaccca

SEQ ID NO: 17662 - RNA, 73 nt, Homo sapiens
cggcggaccgcacaagcagaaaaacgcaagggaaaagagaaaaagaaagcgacggaaaaaaacaaaagaacac

SEQ ID NO: 17663 - RNA, 70 nt, Homo sapiens
gcagcggggacgcggacgcacgggacgaacagcggggacgccccagcagaccgcccaggagaggaaagca

SEQ ID NO: 17664 - RNA, 80 nt, Homo sapiens
cagacgcccacagaacacggggcaaagaccggaacgaacgcccagaaaaccgcacgcaggcaagaaaaaaaggacaagcg

SEQ ID NO: 17665 - RNA, 76 nt, Homo sapiens
gcaaaaaaagagcccgcaagaagaacagagacagcagccaaacccccagacgccaagccagcacaaaggggaccac

SEQ ID NO: 17666 - RNA, 69 nt, Homo sapiens
acaggaaccaaccccagcggggaccagcgaccgacacacacgcagggcggcggagggaaaaaacaagga

SEQ ID NO: 17667 - RNA, 81 nt, Homo sapiens
accagaaccagacagaaacgcggcagaacaccggacaaaggcaccagcgagccccaaggggaccccggccacagggacacc

SEQ ID NO: 17668 - RNA, 63 nt, Homo sapiens
gaacgcacgagggcagggcggaaggggccaacaacacaccgaaaaggagccagccacagcgcc

SEQ ID NO: 17669 - RNA, 79 nt, Homo sapiens
ggaccaaaccgcaccccggccggggggggcgcaaccgggagcccaggaagcgcagacacaggcgcacagggacgaagaa

SEQ ID NO: 17670 - RNA, 82 nt, Homo sapiens
gcagagcaccgcgcccagggccggcggacagcaacacgaccaccaagaaggaaggcagagcccacaaacccaagcagcaaag

SEQ ID NO: 17671 - RNA, 73 nt, Homo sapiens
gagacaagcagaggccaggaccagcacaaggcaaaccaggcgagacagcaggagcaccaaaccccaccaaaac

SEQ ID NO: 17672 - RNA, 75 nt, Homo sapiens
cggccccagccccaacccccagcaccgagaaagagccacgggcgacaagaagagcgaggaaacaggccacaaagg

SEQ ID NO: 17673 - RNA, 84 nt, Homo sapiens
agcagccaagagggaagcagacgagagcaagaaacgaaggaggcccaaccacaaaaggagccgacggaacccagacggagaaca

SEQ ID NO: 17674 - RNA, 64 nt, Homo sapiens
caccccgaagaggcgaggagcaacccaggcgcgccagaggacaccagacccaaggcgcaagaaa

SEQ ID NO: 17675 - RNA, 81 nt, Homo sapiens
gcggcccgaggaccgaccggcagagagcaagaccgcgaccccaagggaacccaaccgcgggcgggagcgcgagggagccac

SEQ ID NO: 17676 - RNA, 78 nt, Homo sapiens
agccgccacccggacagagggagcgacacgccccagcacaaaggggaggacaccagagccccgcaagagccgacgcgc

SEQ ID NO: 17677 - RNA, 66 nt, Homo sapiens
caaagcacgacgccagcgacaagggaagaggagcgaaaaggcagggagaaaacaaagaaaggaaaa

SEQ ID NO: 17678 - RNA, 62 nt, Homo sapiens
cggaaagaggagagccacaacgcaggaaagcaccccacgaacaaccacaggaagagacacac

SEQ ID NO: 17679 - RNA, 88 nt, Homo sapiens
ccgccaccagcccaagagaaagagccgaggaaacccagacccaagaccaaccgaggaggaggaggagggagacgcgcccaggcagaaa

SEQ ID NO: 17680 - RNA, 87 nt, Homo sapiens
cggccgccccgagcggagccggagcgggcgacgcacgaggcacacaggaaggaggggagcagggacgcgcggcggcggggccgggag

SEQ ID NO: 17681 - RNA, 83 nt, Homo sapiens
cgaaaagcggagcacggaacagccaggggaaaggccacagaagaggacagaaacccaaagaaccaaagccgagagggaaaaga

SEQ ID NO: 17682 - RNA, 79 nt, Homo sapiens
ccgggacgcggcccggagccgggaccgagccagaccaagaagaaccgccccagcccgcaaccgaggcccccgcccagcc

SEQ ID NO: 17683 - RNA, 56 nt, Homo sapiens
acagagccacccaagaggaaacaccaaggaagagcaaacccgagaagccggagaac

SEQ ID NO: 17684 - RNA, 73 nt, Homo sapiens
cggaccagcagggagaagcaaaagaaccgaaaagggaagaaggagaaagacaaagccccgagaaagaccagca

SEQ ID NO: 17685 - RNA, 81 nt, Homo sapiens
gagacagcaaagagggagagcccagcagcgccaagccggacacaggagaaggaaggcagcaccgaaggcaccggcagacca

SEQ ID NO: 17686 - RNA, 46 nt, Homo sapiens
ggccaaccaccagaaaccacaagagcgagcaagccgccgcagcaag

SEQ ID NO: 17687 - RNA, 73 nt, Homo sapiens
acgggcgggccggcgccggagacgagccggccaagagacggagcagcagagcacccagaagcacgaaggacac

SEQ ID NO: 17688 - RNA, 73 nt, Homo sapiens
gccaccggcgggaggaacaaaagggcaccacagaacagccgaagcaggccaccagccgagaacgaggaacacg

SEQ ID NO: 17689 - RNA, 84 nt, Homo sapiens
cccggccccggcggcacaggcgcggcggcccacgcagggacgcgacgagcgcaggaggacgacccccgggggaaacgaggcagc

SEQ ID NO: 17690 - RNA, 71 nt, Homo sapiens
acgcgcagcgagcggaccagcgaaaggacacgagaagcacgaacacccaggcaagaaaccccgaaccaaac

SEQ ID NO: 17691 - RNA, 61 nt, Homo sapiens
gccgcgcccgggagacgccccgccgcccacccaggccgagacgcaccagagccggaccggg

SEQ ID NO: 17692 - RNA, 60 nt, Homo sapiens
acccccgaccgggcggcgcggcggccagaggaaccccgagcacacaaaagagggacaaca

SEQ ID NO: 17693 - RNA, 69 nt, Homo sapiens
gccacgcggcgcggggaaacaggcaccgaccccggggacacagcaggggccagacaaccagacccggga

SEQ ID NO: 17694 - RNA, 83 nt, Homo sapiens
aggagcccggggccggaaccagacgagagacagaggcgaccgcgcggcaggggcggggccccagacccacgaaaaaggaacac

SEQ ID NO: 17695 - RNA, 72 nt, Homo sapiens
cccgagcgcccgagcacggagagggggaccgggcgcacaggcggcgccgacagggacaagaccccccccagg

SEQ ID NO: 17696 - RNA, 72 nt, Homo sapiens
caggaggcgccacgggagcagcggaaggggcccagcagacgcaaagacgcaaaacaccggaagaacagacac

SEQ ID NO: 17697 - RNA, 76 nt, Homo sapiens
caaaaccacaggcacaaagaggcagacgcggccagccaccagacacaccgcaagggaccgacgaacagacgggaga

SEQ ID NO: 17698 - RNA, 36 nt, Homo sapiens
gcagcgcacgacagcaaaagacaggaaaagcagagg

SEQ ID NO: 17699 - RNA, 77 nt, Homo sapiens
cccacccaccacacaacaaaggccggggggggcacagagccccggaagacagcccccagcgaccagacccagggcca

SEQ ID NO: 17700 - RNA, 77 nt, Homo sapiens
cccggcccggaggccagcggccgggaagccccggcggagcccgcagccccgccggacagggcaggacgacacacaga

SEQ ID NO: 17701 - RNA, 79 nt, Homo sapiens
gaggcagccgcagaacggagagccagcaccgccgaccgccagcgccagaagccagagagggcggacagaggaagaggcc

SEQ ID NO: 17702 - RNA, 53 nt, Homo sapiens
ccccaacacagagccaagcgccaagaagagagacagagagcccagcgagaaag

SEQ ID NO: 17703 - RNA, 69 nt, Homo sapiens
aaccaagcaagagcacaaaacagggaaagacgacggaacggaaaaacggagggcccaaacccgagcccg

SEQ ID NO: 17704 - RNA, 79 nt, Homo sapiens
gggacacgcagccggagcccgggaggggccgcgccgccaccgcgaacaggagcccgacagaagaccagcagggaaagac

SEQ ID NO: 17705 - RNA, 77 nt, Homo sapiens
ccgccccgcccgaaaggaccccaacgcccgccgccggagcggcgagccgaagcacggaagacagagccgcacagacg

SEQ ID NO: 17706 - RNA, 105 nt, Homo sapiens
ggccggccaggaggcgaggggccggcgagcagagagaccgcaccacccggaccagcaccagacagcgaaaaagaggacccaaaaaagagagaaaaggccaaagag

SEQ ID NO: 17707 - RNA, 75 nt, Homo sapiens
caaacccacccggcccaaccacgacagggaagaagccaaaacagaaggggcaagagaacacggcgaaaccgagaa

SEQ ID NO: 17708 - RNA, 76 nt, Homo sapiens
cggcggggacacccggacacggcaagggaggacacgaggcccagggcaggagagaagggagggcgacaaggaccag

SEQ ID NO: 17709 - RNA, 80 nt, Homo sapiens
cggacgccaggggccagacccacgacacgggccccggagccccccaggcaagagccagaaggcggcaaaagggagccggg

SEQ ID NO: 17710 - RNA, 76 nt, Homo sapiens
agagggcacgagcaaacaagcccacaaacagaggcagggagacgccgcacccaggcggaggcagggggaccggcgc

SEQ ID NO: 17711 - RNA, 46 nt, Homo sapiens
agacccaacagggacccggagcagcaagcggcaagagccacagaga

SEQ ID NO: 17712 - RNA, 89 nt, Homo sapiens
cacagacacacacaaaccagagacgccaggcaagccaaggacgagccggcgcagaagggggccccccagagagggcccgggggaagacc

SEQ ID NO: 17713 - RNA, 73 nt, Homo sapiens
gaaggcgcggccgccgacgagccaccaagagaaaaaggaagcgccgggacggcaaccgacggcaaaaaaaacc

SEQ ID NO: 17714 - RNA, 55 nt, Homo sapiens
gacagccacaagaggacaaaggggcagggaaaaaaagacacaagacacccaagaa

SEQ ID NO: 17715 - RNA, 69 nt, Homo sapiens
ccagcaccgaaaagcagaaacccagcgggagacccgcgacgagagagacgagcacgaacgaacacggag

SEQ ID NO: 17716 - RNA, 65 nt, Homo sapiens
aaacgccaagggaccacaacggcagagaagccaaccgaaaaaaagcaccccaaaggacgacaccc

SEQ ID NO: 17717 - RNA, 57 nt, Homo sapiens
gggaacgaaacaccaagggcaaacagccaaaaaggggcgccacaccacaagcccagc

SEQ ID NO: 17718 - RNA, 69 nt, Homo sapiens
cccgaaagaacagcaaggaggacggacacgggaggccgcgggcggaccagaaggcacggaaaccgccaa

SEQ ID NO: 17719 - RNA, 78 nt, Homo sapiens
gacacggcccccggcgccgcgcgagccgccgcccgcaccccgacggcggagggggggcaccagacagagcgccgcgcc

SEQ ID NO: 17720 - RNA, 74 nt, Homo sapiens
aaagggaaggacaggcagagcaaacaagggcacaaaaagaagcgagagcagagaaagggaaccgagacgaggag

SEQ ID NO: 17721 - RNA, 77 nt, Homo sapiens
aggagaggacacaggcaggaagcagaaaccaagaggagacggacagcaaaaccccagcggcagaacgcacagaggga

SEQ ID NO: 17722 - RNA, 79 nt, Homo sapiens
gagaccaggcggcggaagagagccgggcccgccgggcgaagccgaacaggaaacaagggacacccaagccccagccagc

SEQ ID NO: 17723 - RNA, 52 nt, Homo sapiens
ggaggagaggagaaaccaagcagacccagggacccgggcgacacaggggacc

SEQ ID NO: 17724 - RNA, 68 nt, Homo sapiens
gaaggaccaagaaccagacccaggaacagggaaggaggagccaccagaagaggccaacagaaaccgaa

SEQ ID NO: 17725 - RNA, 82 nt, Homo sapiens
cgaaggcgcgagggacaagagcagagaacagagacgccaagcccgggcccggaggcacgagacaccagaagaaagggaccaa

SEQ ID NO: 17726 - RNA, 78 nt, Homo sapiens
cagaagaaaacacaaggccagagaaagaccaggagaccgcggccgcgggccgaccgcaggagagacccagccagccgc

SEQ ID NO: 17727 - RNA, 75 nt, Homo sapiens
cagccagcgcagcgacggggcgcgccggcccaggcgcacacggaagggaagcagagaaaagacagacaaaaagag

SEQ ID NO: 17728 - RNA, 73 nt, Homo sapiens
cccgcggagcaagaggcagagcggggcggggagcagacccccaaggcggacccagggcggacgcagcccccaa

SEQ ID NO: 17729 - RNA, 80 nt, Homo sapiens
ggaaaaggaacaccaacaaccagcggccgaaccgaagcacaacaagcggacaggacgaccaggagcaccaaagcagaaga

SEQ ID NO: 17730 - RNA, 72 nt, Homo sapiens
gaaccccacacagacagaaccgggaagaaaaaaacaaacacaccagccccaagagacccaacagaccagagc

SEQ ID NO: 17731 - RNA, 83 nt, Homo sapiens
ccaaagccacagccaagagcccacggacaccacccaacggacaaacaacagaccaaggggcggaaaacccgaagccaggaaca

SEQ ID NO: 17732 - RNA, 73 nt, Homo sapiens
ggcggaccccggacaaagaaaaagcgccccgggaggagccaccacgacaggaagaagacggccaccagaaaaa

SEQ ID NO: 17733 - RNA, 67 nt, Homo sapiens
gaaaacagacagaggagacaggcaagcaaagcagaagacgcaagggcacgcgaccgacgggaacaag

SEQ ID NO: 17734 - RNA, 72 nt, Homo sapiens
aaagaaaccacgcgcggaagaagacccggagaggagagcacacagaaccgacccagaccagcaagccgaaac

SEQ ID NO: 17735 - RNA, 63 nt, Homo sapiens
aaaagacagcccgcagcacgaccagcaggaacgacaccgaaaacgagaaacgaaagagacacg

SEQ ID NO: 17736 - RNA, 83 nt, Homo sapiens
cagggacagcacccaccccggagggggaccacaagacccacgacagcccaggccccggacacgagagaaacgccgagcaaggg

SEQ ID NO: 17737 - RNA, 76 nt, Homo sapiens
gaaagcacagggacgagacagaacaacgagagagagcaaaaacaccagacaagaggaccggaaccccccggacgac

SEQ ID NO: 17738 - RNA, 80 nt, Homo sapiens
gcccgccgacccgcgcccgccccccagcaccgggcggacggacggaagcacgggaaaccagcaaccccgaccaccaaggc

SEQ ID NO: 17739 - RNA, 89 nt, Homo sapiens
gaacagcagagcccagagaaccggcaccagccccccagcacaaacgcggggaagacccgaaccggggagaccacgacgcgccccgggcg

SEQ ID NO: 17740 - RNA, 83 nt, Homo sapiens
ccccacccagcagccgacgccagcagaagagaagcagcagcagcccaccagggagcccgcagggccgagcaccacagacagcg

SEQ ID NO: 17741 - RNA, 74 nt, Homo sapiens
ccaaccgaggagcagccccgacacaccaaccgacgggagacgacggcgagaaacacgcggaagccgcagaagga

SEQ ID NO: 17742 - RNA, 73 nt, Homo sapiens
gcgaaaggacacgggagaaagggagccgagcgagaccacgcaccacgggcgacaaagcggccagaagaaaaga

SEQ ID NO: 17743 - RNA, 74 nt, Homo sapiens
caaaggcggccgggagacagccggaagcaaggcagaagaggccagggaaaagagcagaaacagggaaaggacaa

SEQ ID NO: 17744 - RNA, 47 nt, Homo sapiens
gggacggaccacgggaccaagcagacaaaccaaggcgagagagaggc

SEQ ID NO: 17745 - RNA, 79 nt, Homo sapiens
gcagacgcgaggggcggccagagcgccggcaagagccgggcggagaaccggggccgcgcgccgcgcgccgggagaggcc

SEQ ID NO: 17746 - RNA, 72 nt, Homo sapiens
cacgaaagaacggagcagaaggaagcaaggcaggccacaaaagccgcaggggagccgaaggaaccccagccg

SEQ ID NO: 17747 - RNA, 67 nt, Homo sapiens
gaaaaagagcgggcgaggagcaaaaaacagaagcagggccagaagggggcaaggcaaccgccgccaa

SEQ ID NO: 17748 - RNA, 84 nt, Homo sapiens
ggaaggaccggagcagcgccgagccagccccaccaccaggaccgcccgacacacaacaggcaaacaaaggggacagaaaaaccg

SEQ ID NO: 17749 - RNA, 75 nt, Homo sapiens
cccagccgacagccagggcggaagcccgccccagagcagaggaccaacgggaaaaagaagcaacacagcaaacca

SEQ ID NO: 17750 - RNA, 77 nt, Homo sapiens
gagaaagccccaagcgacaggggagggacccaggcacggcagacacaccgaccagaggaaggcgaacccgccacgca

SEQ ID NO: 17751 - RNA, 58 nt, Homo sapiens
ccccgaagagaaacacacggacaacaaacgccagaggagaccgaagaagacggagacc

SEQ ID NO: 17752 - RNA, 60 nt, Homo sapiens
cccgaaccgaacagagcaagggaacaaagcccgcgacacagggagaccagggaaaagaca

SEQ ID NO: 17753 - RNA, 55 nt, Homo sapiens
accccaagagaaaggagccccccaaggaaaagcccggaaaagcagccaagcggaa

SEQ ID NO: 17754 - RNA, 85 nt, Homo sapiens
agagcccgaggccggggaccaggacagcgcgaggcgagggcagagccgcggggcaagacgagggcagagagcgcggacacaggga

SEQ ID NO: 17755 - RNA, 41 nt, Homo sapiens
gccggaaacggacaaacagaaaggagaaaagaggcgcggac

SEQ ID NO: 17756 - RNA, 80 nt, Homo sapiens
agcccgaagaccagggaccgcggacacgagggcgaacaccagcgaaacagaaggggacaaggaccccaacaggaaccccc

SEQ ID NO: 17757 - RNA, 70 nt, Homo sapiens
ggcgcgcgcaacggacaaaaacagaaaggcaacaacaacagaaccgaacaaagggagccaaggacaggcc

SEQ ID NO: 17758 - RNA, 75 nt, Homo sapiens
gaacccccgggaccccgccgccgcacaacccgaggaccagcccggcacagcagccggaggccaaagcaggcaagg

SEQ ID NO: 17759 - RNA, 76 nt, Homo sapiens
ccacaaagccccccggagacgcaaccaaggaccggacagccagagccccaaagcaacccccgaaagagccggggcc

SEQ ID NO: 17760 - RNA, 65 nt, Homo sapiens
gccaaaggggcacaccaagaagacgccaggaaagaaggaccgccgcaaaaaagagggaaagcgac

SEQ ID NO: 17761 - RNA, 97 nt, Homo sapiens
gaacaaagcgccaaacccgcggaaccagcagaagaacagccccacgacggcaggcgcacggaacagcgaggccagcaggagacggagccacggagca

SEQ ID NO: 17762 - RNA, 55 nt, Homo sapiens
ggcaaggagagacgcgcgaggggcgccgaagcgagggagcagcagcagagaaacg

SEQ ID NO: 17763 - RNA, 83 nt, Homo sapiens
gaaggacagcgaaaaggcacagagagcccgcacgcgcgggccaggggcagaacaccaggaaaccgaagaagaacccgagccaa

SEQ ID NO: 17764 - RNA, 75 nt, Homo sapiens
gagccgaggcgagccaacagcacgagaaaacccccgaaacagagaaaccagccagagggaccagaccaaagaaca

SEQ ID NO: 17765 - RNA, 78 nt, Homo sapiens
acgaacagagccgggagcaagaagaacacccagaggaaagagaagggagggcgacgagagccgaagcagaggccaaga

SEQ ID NO: 17766 - RNA, 79 nt, Homo sapiens
ggagccccggggaacccgcagcacaccagggggcaggcccgaccccagacccgcagagaccgcgcgcaaacgaaggacc

SEQ ID NO: 17767 - RNA, 83 nt, Homo sapiens
caccggaggccgcccgcacagggcacaccacggaggccgaccacaccaagcgaagcaagcgcaggggacgagggcggaaaggg

SEQ ID NO: 17768 - RNA, 92 nt, Homo sapiens
ggggagccgcaagggcccgcgggacgcgcgcaaaaccgggggggggggaggggagaacacacacagcaaggcagagaaacaagagcggacgc

SEQ ID NO: 17769 - RNA, 70 nt, Homo sapiens
gaaggaaaagagacgcagccagagcaagacccacgaagggcacacaaaggacccaccgggaaaggacaga

SEQ ID NO: 17770 - RNA, 83 nt, Homo sapiens
agcgcgccgcccggcgccggcccgcccccgcagcagcgccaggcaaccgccgcgggccgagcccgcccgccaggaccaggaca

SEQ ID NO: 17771 - RNA, 78 nt, Homo sapiens
gcacccccggccggaggcaccagcggacccggcaaagagagaggcacacgccgccgaaggccaggagcagaggccaac

SEQ ID NO: 17772 - RNA, 58 nt, Homo sapiens
gcgggccgacaaggggccaaaggaagcagcacaaggagcaggacagcagaaggcacag

SEQ ID NO: 17773 - RNA, 78 nt, Homo sapiens
ggcaccgcggacggggccgcccagaaaacccgaggagagagcccaaaagagccaaagccagcgcaaacagccgaagca

SEQ ID NO: 17774 - RNA, 75 nt, Homo sapiens
ggccagcagccgaaccagggccacgaggggccaaggcgaccacaaagcgaagaaaaggaggaggccccgaaaccg

SEQ ID NO: 17775 - RNA, 62 nt, Homo sapiens
acgggccgaaagcacaacaccgaagaaaaccaccaggaagaaagcagagaacgggaagggcc

SEQ ID NO: 17776 - RNA, 69 nt, Homo sapiens
aagaaggagaaaagggagcagcaggagccccgcggggaaaggcccgagccaaaagacccagagaaagga

SEQ ID NO: 17777 - RNA, 74 nt, Homo sapiens
cccgagaggaaacacccccagaagaggccccgacggcccagaccccaacaggcaagcaccacaggcagagagcc

SEQ ID NO: 17778 - RNA, 83 nt, Homo sapiens
cggccagccgggggcccggagcccggcccagggaagccggccgaggaacaggaggccacgcaaggcgggaacaggggagccac

SEQ ID NO: 17779 - RNA, 74 nt, Homo sapiens
cacaccacaaagaaaccgagcacccagagaaagcaaaccaggaggaggacacccggaaggaggcgaagacgcag

SEQ ID NO: 17780 - RNA, 87 nt, Homo sapiens
gcgccaaggacccgggacagggaccagcgggaaggcagacagcgagggcgacgaaaacggcgaggaaagagaggagccccggaaaga

SEQ ID NO: 17781 - RNA, 69 nt, Homo sapiens
aagcgagggcccagcccaaggacccgacagaacagggccggacccacacccccagacccagagacacac

SEQ ID NO: 17782 - RNA, 68 nt, Homo sapiens
agacagccgccggccaaagaggcacacacaccggaccaagggccccccaccaggggccgcggcagggc

SEQ ID NO: 17783 - RNA, 56 nt, Homo sapiens
ccgggagcagacaagaggaaaagcccagaaacagagaagggaagggacaaggccca

SEQ ID NO: 17784 - RNA, 75 nt, Homo sapiens
acaacgggcccggagagcccgaacggggcaaaaaggcggccaagaggcaaaggagaaccagaagagagaaaggga

SEQ ID NO: 17785 - RNA, 59 nt, Homo sapiens
ccgacccacagcgaaagagaagaaagagggacccaccccgcaccagggggcgcaacacg

SEQ ID NO: 17786 - RNA, 75 nt, Homo sapiens
cggcccgcaggagaggaaaaggagcgagcagacgacaagccgggagcgggcggccaaccaggccaacaaggaggg

SEQ ID NO: 17787 - RNA, 59 nt, Homo sapiens
gcaagaacggcgcacgacaaggaaaccagagaaacccaggccagcaaagacacacccac

SEQ ID NO: 17788 - RNA, 74 nt, Homo sapiens
caacacggacacccacagcggggcggcggcggcggcggcgcggcccaaaagcggaggcggagaacaaccaggcg

SEQ ID NO: 17789 - RNA, 68 nt, Homo sapiens
ggacacacccaagcacggaccaaagaaacgaaaagagacagcagggcaaaacgggccacacacagggc

SEQ ID NO: 17790 - RNA, 56 nt, Homo sapiens
gaaccggacaccgagggcaacggcaggggaagccagaacaagcccaaccaaaccaa

SEQ ID NO: 17791 - RNA, 96 nt, Homo sapiens
gaaaaaacacggagaagccagaccgacaggagcaaagaacggacaggacgaccaccgcaacagcagagccgccaccccaacagacaccaggcccga

SEQ ID NO: 17792 - RNA, 71 nt, Homo sapiens
aggggggcaagaaggcgggagggaagccacgagagggacccgcccgagaaccagcagcccaaaggagagcg

SEQ ID NO: 17793 - RNA, 71 nt, Homo sapiens
accgcaggcagacaaaagggccaaagaagggagagagaacaaggaccaacaccaaggaccagccaccgaac

SEQ ID NO: 17794 - RNA, 84 nt, Homo sapiens
cgccggcccgccagaacgggcagcaaggagccgacgaagaggcagagaccccggagcaacgaccccgcaaagcccgccagccca

SEQ ID NO: 17795 - RNA, 99 nt, Homo sapiens
gggcaggagcggcggccaggccagacccgaaggccaggagacccgaccccaagaagaggcggccacccacgagccgacggcaaacgccagggagccacc

SEQ ID NO: 17796 - RNA, 82 nt, Homo sapiens
caggcggagccgaccgggccagccaccccccacggaaggcccagaagcagcccagaacaaccaggggaggaagcacagaaac

SEQ ID NO: 17797 - RNA, 86 nt, Homo sapiens
cccgccccgccgaccccccgaggcggcaccaagaggcccgggcgcgggcgcgaagaagagggcgccggaccgaaggcgcgaccacg

SEQ ID NO: 17798 - RNA, 77 nt, Homo sapiens
gaagaaagaggagacacgagagaaaaggggaaaaaaccaagggagcgaggcaaagaaggagcggaggagcggggcag

SEQ ID NO: 17799 - RNA, 81 nt, Homo sapiens
accgcggcccacgggacccccaggagggacccgcaggccacaaagccagagccacagaaagacgacaagggaaaagcaacg

SEQ ID NO: 17800 - RNA, 77 nt, Homo sapiens
cggcgcgcccaaccggcgacggaaccaagggaaagacaaggagccgggccgagaaaccgaaccagagaccagagaag

SEQ ID NO: 17801 - RNA, 76 nt, Homo sapiens
accgcccaccgagccggacgcgggagcggaccggagcagaagacaaaagaacacccaagacccgaggcagcaaggc

SEQ ID NO: 17802 - RNA, 61 nt, Homo sapiens
cccaccaccaggagcccacgcccagagcacacaaaaccacgggcccagacgcagacaaacg

SEQ ID NO: 17803 - RNA, 101 nt, Homo sapiens
aaaggccgcgggggcaacggagaaaacccggaaccgcgacggcggcaggagagcagccagcgggacagaaggaggaagagggagcaccacggaccccaagg

SEQ ID NO: 17804 - RNA, 60 nt, Homo sapiens
ccagggccgcggggaccgaaaggacagaacaggaccggaaagcggagaccaggccaaaag

SEQ ID NO: 17805 - RNA, 78 nt, Homo sapiens
aggagcgggagaaaagaaccgacccacaccaagagcagcccgacggccaggaggcgaagagacgaggaagcccaggag

SEQ ID NO: 17806 - RNA, 36 nt, Homo sapiens
ggggggcaaacccgagagaacggcccgaagggcacg

SEQ ID NO: 17807 - RNA, 74 nt, Homo sapiens
cgcaaccagaggacacagacagcgacacggaagggaagaaaacgccagagaagcagagcagcccggagcgaggg

SEQ ID NO: 17808 - RNA, 76 nt, Homo sapiens
caaaaacccaaaccccccaccagcgccaagaggacccaaaaaagaggacagcggaccacccgggcgcgccacacag

SEQ ID NO: 17809 - RNA, 72 nt, Homo sapiens
accgagcgggccagaagaccagcggaaaagcgaagccgagcccaaacaaaggacccaaaggccggcgacaga

SEQ ID NO: 17810 - RNA, 70 nt, Homo sapiens
acaggaccgcccccagggcccggcgccaccagccaggccacaaggcgggacaagggcgcaccggggcgca

SEQ ID NO: 17811 - RNA, 57 nt, Homo sapiens
acacaaccgcgggcccgggacagacacaggggaggcaagcaggggggcaaaggaaag

SEQ ID NO: 17812 - RNA, 75 nt, Homo sapiens
aaggcggagacggccccaccggcaccgagaaagacaaacgcgagggccacaagacaagaccggacaaccagcaca

SEQ ID NO: 17813 - RNA, 74 nt, Homo sapiens
caaaggacggcccgccaggggcggaggagaacaagggacaaaccaaagaccaaccaagaggccagagagcaaca

SEQ ID NO: 17814 - RNA, 69 nt, Homo sapiens
gaagcaaagaaaggccgcccgcaaagcaaaggaggagggcgcagaagcaggcgccagggcgcgcaagaa

SEQ ID NO: 17815 - RNA, 53 nt, Homo sapiens
agagaggaagaagaacgacccgcccggggcagcagcaaggaaaaacagaggcc

SEQ ID NO: 17816 - RNA, 78 nt, Homo sapiens
agcccccaaagcacgggaacaggcacgccggacagggaggcgcacccacaagccccacagaaggcagcccgccccagc

SEQ ID NO: 17817 - RNA, 62 nt, Homo sapiens
gcccaggagcgccggccccaggcaagaacagaagaccggggaccagaagggagaagaagcaa

SEQ ID NO: 17818 - RNA, 81 nt, Homo sapiens
cgaggcccccagaagaccccagacagcaaaagccacacacgaggaggggcacggaagcaaaagccacgcccagaacccagg

SEQ ID NO: 17819 - RNA, 81 nt, Homo sapiens
gagcgggggggggaccgccggcacgcgacccccccgggcccaaaccccggcacaaagcagaccgccccacgggcgcgcccg

SEQ ID NO: 17820 - RNA, 73 nt, Homo sapiens
cgcccacggggacggagggccgagaagcggggcaccacgaaggaccgaagagggacgaggaaacaccaacacc

SEQ ID NO: 17821 - RNA, 37 nt, Homo sapiens
cacgacccggaggcgcagcagccagaaagacccagag

SEQ ID NO: 17822 - RNA, 79 nt, Homo sapiens
cgacagaagacaaacagcaaggggcaaagcggaggagcgaagacaggcggcggaggaaacaacaggagcgacaaccaag

SEQ ID NO: 17823 - RNA, 58 nt, Homo sapiens
cgaccaagagggagaagcacgcaggacggcccggggcgccggcacgggggcccccaga

SEQ ID NO: 17824 - RNA, 80 nt, Homo sapiens
gaggaggccgccagcagaggcggagcccgcagaccgcagaaggccggagacaccagcaggacgggccaggccccggccac

SEQ ID NO: 17825 - RNA, 71 nt, Homo sapiens
gaaaagaaagagacggcacaggaagaaagcgcagggcagcaaaaaggagcagacgcagaggggccaagaaa

SEQ ID NO: 17826 - RNA, 76 nt, Homo sapiens
gccggacaccgggaacggagaggcagcaaagaccagaaccgcccggaagcagaggagaacacagacaccggagaaa

SEQ ID NO: 17827 - RNA, 76 nt, Homo sapiens
cggagccaaagacgccgggaccagaaaaaagggaacccccgcagaccccggaccaggccccaagcagcggacacag

SEQ ID NO: 17828 - RNA, 82 nt, Homo sapiens
ggagggcccgccgacccgggcgccgcgccgcacgagcaccagccagagccaggcgggagagcagcagaaagcggaccacagg

SEQ ID NO: 17829 - RNA, 72 nt, Homo sapiens
gccccggaccgccaagaaaggaaaagggaaacagcccaggccagacaaccgggaggcggggaacacccaaga

SEQ ID NO: 17830 - RNA, 71 nt, Homo sapiens
gggacacgccccgacgccgagggcccgcaaggccacagcacggggagcgcgcagccagcaccggcccagga

SEQ ID NO: 17831 - RNA, 83 nt, Homo sapiens
gcggcggggaggaggaagaggcggccggcaagagcggcggagcgcaggggagaaccggaagagggaaaaacagaggagacaac

SEQ ID NO: 17832 - RNA, 50 nt, Homo sapiens
caaaggagcaagaaacacagaaggcgccaaaagcagggcccgacacgcaa

SEQ ID NO: 17833 - RNA, 80 nt, Homo sapiens
cagaaggccggagacaccagcaggagaagacagcacggggagcccacaggccaccacccggcagaggagaccacaacccc

SEQ ID NO: 17834 - RNA, 76 nt, Homo sapiens
caaaaaaaagaagaccacgcagagggaaggcgaaccccaaagaagaaagcaccgggaggaaagagagccacacgaa

SEQ ID NO: 17835 - RNA, 93 nt, Homo sapiens
gaaacaggcgaggcggcggcgcccggagggcagcgagggcaacagggcagcggccaaccgggcgggccaggccccgcggcccggggaagcacg

SEQ ID NO: 17836 - RNA, 70 nt, Homo sapiens
ccgcagcgcagcagaccacaaaggcagacacaaccccagcgaaaggcacgcaaggcagggccaaagacag

SEQ ID NO: 17837 - RNA, 77 nt, Homo sapiens
agccaggccagacggaggacccccagagagcccagccaagccagaaccaggggcaacagacacagccaccacaagga

SEQ ID NO: 17838 - RNA, 78 nt, Homo sapiens
gcccaagaaacaccaccaacaaaccgggacccagagacccaggcagcaggggacacagagcacgggccagagccccca

SEQ ID NO: 17839 - RNA, 77 nt, Homo sapiens
acccggggggaaagagaccacaaggaagcagcccccaggagcacgcaagacagcagccgggcgagaacagagagaca

SEQ ID NO: 17840 - RNA, 79 nt, Homo sapiens
gggggacagggcgacgggccaggcggccggaggcagcgggccccccagcaccggcggcaccagacccgcgcggagcggg

SEQ ID NO: 17841 - RNA, 73 nt, Homo sapiens
cgggcccaggccaaaccaaacggagcgggcagcaggaagggacggcgcgcggccccccaccagaaagagcaga

SEQ ID NO: 17842 - RNA, 66 nt, Homo sapiens
cggcgccggcgccgcggccccggcgcggacccgccaccggaggagggcaaggggaaggccaaggac

SEQ ID NO: 17843 - RNA, 76 nt, Homo sapiens
cgggaaggggagccaccagccccccgaagagaccgacccaaacccacccaagggcaggacgggaagcaggcggcgg

SEQ ID NO: 17844 - RNA, 76 nt, Homo sapiens
gaggcagaaaccagcgccggacagagaagcccccaaggagcgcaggggagcacaaaaggacagaggagacaaagcc

SEQ ID NO: 17845 - RNA, 75 nt, Homo sapiens
cacgaaacaacagagaccaccagggggaagcgacaccgaacagcgagcacacggcagacacaagaggcaaagcag

SEQ ID NO: 17846 - RNA, 71 nt, Homo sapiens
ccagaagaggagagagagcaagagaggaagaagaacgacccgcccggggcagcaggaaacagcccaggggc

SEQ ID NO: 17847 - RNA, 64 nt, Homo sapiens
ggaaaagggcacgaggccggaaccgcccagccccggcaccagccggcaaacaccaggcgccaca

SEQ ID NO: 17848 - RNA, 84 nt, Homo sapiens
caggaggagcgggccccaacccaccaaaagcacagcaccgccggccaggaggagagcgcaccaccaaaaaggcaaacacaccag

SEQ ID NO: 17849 - RNA, 80 nt, Homo sapiens
ccagccagaccagcgccggggagcgcggagcccgggccgaagcgcacgcgccgccggagcgcggcccacgggaccgacga

SEQ ID NO: 17850 - RNA, 75 nt, Homo sapiens
acaagaggagaaagccaaggaaaagagaaacagggaaaaaaacccacaaaaccgaggccccaaagccggggaaga

SEQ ID NO: 17851 - RNA, 71 nt, Homo sapiens
gaccacccgccagcgaaggaccagaggaaggcggggaggcggaagaccaggagaaagcacgacccacaaaa

SEQ ID NO: 17852 - RNA, 74 nt, Homo sapiens
gggaggccgaaaagacagagaggggaaaccccgaaaggggggcagggagagaagacgcaaggcaaaaaacacag

SEQ ID NO: 17853 - RNA, 68 nt, Homo sapiens
gccagggggcagcaccacagaacgggagaacgcccagaagaagagagaccaaaagaacaaacgccaaa

SEQ ID NO: 17854 - RNA, 82 nt, Homo sapiens
cggaggccaacgaccccagccaccgaaaggagggaaggaagccagcgaagcaccgggacacgagacggccacacacggacac

SEQ ID NO: 17855 - RNA, 62 nt, Homo sapiens
gaccaggagagacagggccacgaacccgggaaagcaacgcaaagaaaaagccagccgaggac

SEQ ID NO: 17856 - RNA, 71 nt, Homo sapiens
cgaaagagaacaccagggccgaaaaagcaacgaagcaaaccagacagaccagaggacaacacaaggaccga

SEQ ID NO: 17857 - RNA, 74 nt, Homo sapiens
cgcacgcaaggaaaccgcgacagaccaaagccgcgcccagcaggcgcccagcagcacacaaagcaacaaccacc

SEQ ID NO: 17858 - RNA, 75 nt, Homo sapiens
gagaggagaaccaggaagaccagcccgcccgaacggagaaaagaaacgggagacccacaagagcggccaaaagaa

SEQ ID NO: 17859 - RNA, 67 nt, Homo sapiens
aacgcagcaaagaaaacgaggagcagcacggaagaaaaggggcggaaggagaaaagcccggaggcga

SEQ ID NO: 17860 - RNA, 63 nt, Homo sapiens
agaagcaaaacacgagccccacacacaaacgagggacaacgggaaacccgaacacagcaagac

SEQ ID NO: 17861 - RNA, 80 nt, Homo sapiens
cggggagccccgccaccgcaagagccgcagcagcgccccgcagaccaagaacggaggaccggggaagcgaggagagcagg

SEQ ID NO: 17862 - RNA, 79 nt, Homo sapiens
aacgaagaacaacagccggagcaggagaggacgggacgccaagagacagagaaggacaagggacagcaagcggaccggg

SEQ ID NO: 17863 - RNA, 87 nt, Homo sapiens
gggaaccaggcacgcccgaacaagacgacgacacagagaggccccccaacccagacgaagaggaaccaaggccaggccaccggccac

SEQ ID NO: 17864 - RNA, 73 nt, Homo sapiens
ccacccgccgggccggccgaccacccagaaagcacacgacagacccccaaccgaccaggcacagccaaccaca

SEQ ID NO: 17865 - RNA, 88 nt, Homo sapiens
ggcgccgacaagacgagggggccaccggaaccaaaaagaagccccagagccggggccaggagccccaagcgccccagcagcaaacaca

SEQ ID NO: 17866 - RNA, 78 nt, Homo sapiens
gccgagaagaggcacacagggcagagcggcgggaaaccaccaacaacacccccaaaccaaaacagccggaagcgggca

SEQ ID NO: 17867 - RNA, 84 nt, Homo sapiens
gccccgggaccacgcccaccaggcgggcccagcagcgcgggccgagagaaggccgggacagcagaaaacagccagcagaaaaag

SEQ ID NO: 17868 - RNA, 131 nt, Homo sapiens
ccgccacgccgagcgccccggcggcccgagcgcgccccaagcccgggcgccaccgcgccaccccgcgagacaagcagaccggaagaccgacggaagaccacaccccgagggagcccaggacaccacgagaa

SEQ ID NO: 17869 - RNA, 75 nt, Homo sapiens
gggcccccggacgcgagcccgcccccgagaacagcacaccgagcaagaaacagaaggaaggacggaacaaggaac

SEQ ID NO: 17870 - RNA, 86 nt, Homo sapiens
cacgccagccgcaccagccgcccaagccgcacagccgcggcggcagcagcaggagagggccccggggcggcggccgcgggcggagc

SEQ ID NO: 17871 - RNA, 76 nt, Homo sapiens
cggccgaaggcgaacgccgcggccaaggagccgccaaagccagacgcaccagaccagcgaagcaaagaagcaacac

SEQ ID NO: 17872 - RNA, 70 nt, Homo sapiens
aagagaaggacaaacccggcaggcggacaagaaggaggacaaaagcagaaggacaaaaagcgagcccgag

SEQ ID NO: 17873 - RNA, 91 nt, Homo sapiens
accagaaggccagggaggacacaggagacccgaaagacacgggagaacaacgacagaacggacacgagaaacaagaacaccggaaggaaga

SEQ ID NO: 17874 - RNA, 63 nt, Homo sapiens
ccacccacagaccagccggaacaagagacccgaagcaccgcaccgggcccggacgacgagcgc

SEQ ID NO: 17875 - RNA, 74 nt, Homo sapiens
gaagaaaaacaggccaacaacagagagggccgaggcagacaagggaaaggccgcgcaggggaccaccccagacg

SEQ ID NO: 17876 - RNA, 52 nt, Homo sapiens
ccccgggggagacgggcaaggacagggaggccacacggacggagccgaggcg

SEQ ID NO: 17877 - RNA, 75 nt, Homo sapiens
caggagccaggcccggcccgagggcggcccccaaccagagggccccgcccacggcaccgagaaggccgccgacca

SEQ ID NO: 17878 - RNA, 73 nt, Homo sapiens
gaacgagagaaaaacagaaacagccagcagaagaaccacaaggcgcaaggaacaggaagagcagacagaagga

SEQ ID NO: 17879 - RNA, 99 nt, Homo sapiens
ggccccaagggagaccccgggccggacgaaaggagaaaaggccagggagcggagaagggaggcgggacgcaccacccggggaaagcagagggccccgga

SEQ ID NO: 17880 - RNA, 74 nt, Homo sapiens
ggaggaaggcacgccgcggcgcaagaaacaggacagaggcaaaaaagcccaacaacacggaagaaaaagggaga

SEQ ID NO: 17881 - RNA, 74 nt, Homo sapiens
ggaccaagacaacgcgagcaagaacagcaggagacgggaaacagaagacagccgaaccaagggcgacaaccaga

SEQ ID NO: 17882 - RNA, 75 nt, Homo sapiens
agaggcgaggaaggccggggcaccgggacaggcgcagaccacaagacgggaaaccacggaagaccgaggaacaaa

SEQ ID NO: 17883 - RNA, 65 nt, Homo sapiens
gaccaaagcggaccagagacaggacagaagacaaggagacgcagagaaacggcagaggccagggg

SEQ ID NO: 17884 - RNA, 89 nt, Homo sapiens
ccgcgcccggccccgcggggccgcccggcccgcccgagggaacccacccaccacccagggcacaacaccacagccggaccgcacccgca

SEQ ID NO: 17885 - RNA, 73 nt, Homo sapiens
caccgccgaccgaagccgcaaaaacgagccaacggaggcagccggcggaaacgaagaaaaaacagaacaaagc

SEQ ID NO: 17886 - RNA, 71 nt, Homo sapiens
aggggaccggccgggcaccagccagcaaaccagaggcagcagacgacaggacggcagagccccaagaaagc

SEQ ID NO: 17887 - RNA, 72 nt, Homo sapiens
ggagagaagggagcgaacacagcgccaacccaaacgagcgagacacacagaaaggaaaagggaacagcggca

SEQ ID NO: 17888 - RNA, 53 nt, Homo sapiens
gcgcgcaaagaagacaggagggaaacgaacaaccgccaaacagcaagaggacg

SEQ ID NO: 17889 - RNA, 60 nt, Homo sapiens
cgcgcagggcagcggcccccgcccgcagaacacacagcaggacgaaagagacaaaagcca

SEQ ID NO: 17890 - RNA, 76 nt, Homo sapiens
gcgacaccggcgcagggaccgaaagaaccgcacagagcaggcccaccggcaacacaaagcacgcagcacggcccac

SEQ ID NO: 17891 - RNA, 79 nt, Homo sapiens
cccccagagacggacagcgaaggcagagagcagcgcaggaaggagaagaccaaaaccacgacggcccccgagcagaaga

SEQ ID NO: 17892 - RNA, 61 nt, Homo sapiens
cgcaccaccgccgacggccagggcacgagagagcgcacggcagcagcaggaggaccaggac

SEQ ID NO: 17893 - RNA, 69 nt, Homo sapiens
cagccgaccgagcccaggagcgccacgcgcggaaggcagcgcccagcagcgcagcaaggaagccccaca

SEQ ID NO: 17894 - RNA, 81 nt, Homo sapiens
gcgggcggggcggcggcgcgacaggaagccgagccacggagcacccaaagagaccacccgcagcgagcagcggaaagaggc

SEQ ID NO: 17895 - RNA, 78 nt, Homo sapiens
caagggaacacagcacgagaccccccgcgagagcgcaaacacccccagacaaagggaccggagggccggaagcgggcc

SEQ ID NO: 17896 - RNA, 80 nt, Homo sapiens
gggacgccagccaggaggacccccggggaaaggcaaaagacgaccaggagacacaacaggccaaagccaagagaagaaaa

SEQ ID NO: 17897 - RNA, 79 nt, Homo sapiens
aaaagcagaggagcgcaggaaggaccacccacacagaggaagcacacagacaccacacagcacgaacgacgggggaggc

SEQ ID NO: 17898 - RNA, 79 nt, Homo sapiens
cgggaggccgggcggcacacgaggccgccacgcaggaaagaccacagcaagaccacgcccccagccgggggaccaggcc

SEQ ID NO: 17899 - RNA, 79 nt, Homo sapiens
gcgagcgccgcccgggcagcgaagccgcccccccggcacgagccagggagccgccgggaccggcccgggagacgacaac

SEQ ID NO: 17900 - RNA, 80 nt, Homo sapiens
cgggaacaggaccggcgggccggaagacggcagcggccccggagacacaccgggaaagacaaggagccgggccgagaaac

SEQ ID NO: 17901 - RNA, 78 nt, Homo sapiens
ccgacaccagaggagaagacgagcagaaggaaagaagcagcgaacgagccaacgaaagaagagagaaaaaaccaggga

SEQ ID NO: 17902 - RNA, 98 nt, Homo sapiens
cgacaccgcacgcgcacggacggcacagcccgccgaacccgaaaggagcgagacgacgggaccgaaggaccccgccagagacaaccgagcgccaggag

SEQ ID NO: 17903 - RNA, 80 nt, Homo sapiens
ggaccgaccagcacagccgggggagcacgcggcggcagaccacgcaccacgccacgccaccaccgcaccaccaacagacg

SEQ ID NO: 17904 - RNA, 70 nt, Homo sapiens
caaccagaaaacaaagacaaaaggagacgagaagaagacaagaggaacacaacagcgagcaacagcacag

SEQ ID NO: 17905 - RNA, 85 nt, Homo sapiens
cagccagccgccgcggcagaggcccaggagcggagccagcaggggggcccggcgcccagcaacccagaacgccaggaggaccaga

SEQ ID NO: 17906 - RNA, 71 nt, Homo sapiens
cccaccaagcacagacaagcaggccgcaggaaggaaagccccaaagggagaggaacaaagaaaaaaacgga

SEQ ID NO: 17907 - RNA, 106 nt, Homo sapiens
acaaccgcccaccacgccagccaccacgcggcgcacaacgcaggaacaccgcacgcgcggaggaggggccggggaggcacaagaggcgaaacagaagaacaagaac

SEQ ID NO: 17908 - RNA, 68 nt, Homo sapiens
aaacacgacggagaaaaacggagggagaaaaagcaagaggaaagcagcacccggaaacaagccacgaa

SEQ ID NO: 17909 - RNA, 81 nt, Homo sapiens
gcggagggcggcaaccggaacaacgacacagaagagacgcaggccgggggcagcgccacaccgccccggagccacagcaaa

SEQ ID NO: 17910 - RNA, 62 nt, Homo sapiens
cacagcagagaccaaaggcagggcaaggaaacggccacaaaaaacacgaaccccggaaggaa

SEQ ID NO: 17911 - RNA, 72 nt, Homo sapiens
gagaaggaccaagaaccagggaaacccagacgacaaggaaggccaagggacccacgaccaaccaagaaaaca

SEQ ID NO: 17912 - RNA, 76 nt, Homo sapiens
cacgcaaccccacccccaggaagcagcccgccgagccccggaacaggcgcaagacaaccacccgaacccaccgcca

SEQ ID NO: 17913 - RNA, 74 nt, Homo sapiens
gcacaccagcacagccgagagaagaccacaagcgagagcgaaacagagaaaggaaagggcggcaggaagacagg

SEQ ID NO: 17914 - RNA, 53 nt, Homo sapiens
acggggaccccggagcccagaagacagagggcgagagaagcaggagaaagcag

SEQ ID NO: 17915 - RNA, 72 nt, Homo sapiens
cggaggcggccccacgaggcagcaagccgaagagaaaaggcacacacacccgcaggagagcgccggagaaag

SEQ ID NO: 17916 - RNA, 63 nt, Homo sapiens
aaggagcaccaaaaagaagaaccgcgccaagaacggggagagggaagaaacaagcccgaaacg

SEQ ID NO: 17917 - RNA, 72 nt, Homo sapiens
cccgcgggggcaaccgggcgcagacgaggcagacagagacggagaccgccggccaggccaacccaccacccc

SEQ ID NO: 17918 - RNA, 78 nt, Homo sapiens
agagagggagcagagggaaagggaaggagaaggagggacgcaggcgcaggccaggaaacgaaaagcagcaagcaaaca

SEQ ID NO: 17919 - RNA, 86 nt, Homo sapiens
ccacccgcgcgcgggacggggcgccgcccggggcgaggcagggccagcagcaggcgggagacaacgggacgaccccacggggaacc

SEQ ID NO: 17920 - RNA, 74 nt, Homo sapiens
gcggcgaaaggagcggcaggcgcaggcagccgacgaagaggggaaaaacgaggcaaagaggaacgggaaaacag

SEQ ID NO: 17921 - RNA, 89 nt, Homo sapiens
gacgcgcccggcccggagcccccagcgcagcggccgcgagcggggcccgagggaaaggacacagaggcgcgagccgggaggcacggaca

SEQ ID NO: 17922 - RNA, 86 nt, Homo sapiens
ccccgcggagcagcaggcggcgggaagacccgaaccccaaggccgagggggcccaggaccgccagagaggcccaaacgggcgccag

SEQ ID NO: 17923 - RNA, 67 nt, Homo sapiens
ccggcacacgaaaaggacaaggccagagagacgagggcggaagggccccgaccccccccgcgaagac

SEQ ID NO: 17924 - RNA, 73 nt, Homo sapiens
gccggaccagcaaggggaaccacggaagacgcccaccaacgggggacaaacaccaggaccagggagagggcac

SEQ ID NO: 17925 - RNA, 69 nt, Homo sapiens
agagccacggggacaggagaaccaggcaaaaggcacaaaaaacaagcaaaacccggcccaaagacacga

SEQ ID NO: 17926 - RNA, 83 nt, Homo sapiens
agagagcgcacgaagaagggcggaggacaaggagaaggaggccgggggacccgagaccaggcgagccaagcggccggcaccga

SEQ ID NO: 17927 - RNA, 58 nt, Homo sapiens
cgagcgcgccggaccggcgcccggacaacccgggaacacgcagaagagaacaagaacc

SEQ ID NO: 17928 - RNA, 56 nt, Homo sapiens
agggagagggaagccacaacaagccaaagaagaagggcggcgcgcacaaggccgag

SEQ ID NO: 17929 - RNA, 85 nt, Homo sapiens
ggcgcgcggaggcgggagcgcggaaacggaaccgggaggcgacgcacacgagcggaggcgaagagggagacgcggcggcagcgga

SEQ ID NO: 17930 - RNA, 53 nt, Homo sapiens
gaccgagagcggaccgagagcgcgaaacgcacgagaagcgaggcagaagcacg

SEQ ID NO: 17931 - RNA, 74 nt, Homo sapiens
ccagagcccacacgccaggaacaccccaaaagcaagcccagggaaccaaggggagggccacgcaggaacacccc

SEQ ID NO: 17932 - RNA, 65 nt, Homo sapiens
agaagaggagggcccagaagaaaaagacaagccaccccacaaaccggcaggaccccagcgacaca

SEQ ID NO: 17933 - RNA, 56 nt, Homo sapiens
aaccccagaggccaccaaccaccagcgccacccaggagaaggccggaacaacgaag

SEQ ID NO: 17934 - RNA, 46 nt, Homo sapiens
ggccggaccgcgcgcgcaggagcaggccccgggaccaaggacacgc

SEQ ID NO: 17935 - RNA, 82 nt, Homo sapiens
gcgcaagccgggagacaagaccgacacgagagcgcgaggagaccgggcgcaaagcagaacgcgaagaaggaagacggaaagc

SEQ ID NO: 17936 - RNA, 87 nt, Homo sapiens
ccgagggaaggcgccgcgccaggccggggggcggccaggcagagcagcccaccagggaggggagggggggaggcgcaccccgcgccc

SEQ ID NO: 17937 - RNA, 42 nt, Homo sapiens
cacggccgcacgcgccgcagagccgaggaaggcaccaggaga

SEQ ID NO: 17938 - RNA, 69 nt, Homo sapiens
agaaaacagaggaggaaccggaccagagagcggcagagggaagaaaagacaagaagaccagaagagcag

SEQ ID NO: 17939 - RNA, 73 nt, Homo sapiens
cccggcgcccacaccccccgaagcacaagaccaccaaagggcagggcggaggcgcacggaggccgagagagga

SEQ ID NO: 17940 - RNA, 80 nt, Homo sapiens
aaccccgcccacagcacgaggcaacagcagaggaacaaaaaaaaacaacaaggaaccccacagggccagcggagaagaag

SEQ ID NO: 17941 - RNA, 35 nt, Homo sapiens
ccccaaaggcggaaacagaccagagagcccacaag

SEQ ID NO: 17942 - RNA, 74 nt, Homo sapiens
agagcaggagaagcgagcccggacagaccaaccgcaggcgcaaccgccccagccaccaccccaggggccagagc

SEQ ID NO: 17943 - RNA, 77 nt, Homo sapiens
cgggacacaccccaggaaaaagacagcccgcagcacgaccagcaggaacgaggccgaaaaagagggaccgaacaagc

SEQ ID NO: 17944 - RNA, 58 nt, Homo sapiens
aaaaggaccagacaaacaaaagggggcacaagcgcacgagcggaggggagcccagcca

SEQ ID NO: 17945 - RNA, 66 nt, Homo sapiens
gacggggcgcagcacacaagaagggcagggaacacacacaaaaggagggaggggggcgccaaacca

SEQ ID NO: 17946 - RNA, 61 nt, Homo sapiens
cagaggaacccagcgagcgagagcggaccagaggacggaagggaacaaaagaggccagaga

SEQ ID NO: 17947 - RNA, 79 nt, Homo sapiens
ccacggcacaacacacccgcaagaaaaccagaaggcaccgacaggaaaggaaaaggagaaccaggcacccgggggcaag

SEQ ID NO: 17948 - RNA, 75 nt, Homo sapiens
agaccggaagaacccggcccagagccaaaggagccccacaaaagggccccagaaggggaccagagagggaagaac

SEQ ID NO: 17949 - RNA, 68 nt, Homo sapiens
aaacgggaccacaaaggagacacgaggaagggggccggaagcccccggccgcccaccgccaggaggag

SEQ ID NO: 17950 - RNA, 71 nt, Homo sapiens
agacggcgggcagggcaagggaacaccacggccaaggcaaccaccgcggcaggaggagagcaagaaccaaa

SEQ ID NO: 17951 - RNA, 78 nt, Homo sapiens
accaaaaacccgcaacagcccccgcccaaggcgcccgcgccggcagaggaggcgagcacccgccagggagaggaaccc

SEQ ID NO: 17952 - RNA, 57 nt, Homo sapiens
cgggaccaggcgaagcggccgagcaggcgagcgaacgacgaaaacagaacggcagcc

SEQ ID NO: 17953 - RNA, 74 nt, Homo sapiens
gggaccaacagggagccagacagacaccccaaacaaagcaggcccagcggggcgagggagaacaggggaccagc

SEQ ID NO: 17954 - RNA, 72 nt, Homo sapiens
aaagaaccacagcaacacagacagcacgaccaacgcaaaacgcaagggcgagcaacggcccaaccaaccccc

SEQ ID NO: 17955 - RNA, 56 nt, Homo sapiens
ccacgccacggggacaagccgaggccacagcagcccacccagggacagaaccgaga

SEQ ID NO: 17956 - RNA, 77 nt, Homo sapiens
gggacccggccccggcccacaggggggggcaaacccgagagaacggcagggaaaacaggcgagccggccgagaggac

SEQ ID NO: 17957 - RNA, 63 nt, Homo sapiens
ggaacgaaagcaggacggaggagcgaccaccgaaagaccacacagggaaacgaccagggagag

SEQ ID NO: 17958 - RNA, 74 nt, Homo sapiens
caaccacaaggcagggagaccgcacgcgcccaagcacacgggggggcccacgaccgagcggccacaagggcgcc

SEQ ID NO: 17959 - RNA, 72 nt, Homo sapiens
aggaagcgagacgaggagcacaggaaccgaaggaggagaggaccaaaacagaaggagaagaaaagcagcaag

SEQ ID NO: 17960 - RNA, 75 nt, Homo sapiens
cagcagcggagggggaggacgcaggacgcacaggagagcaaggcaccagcagcggagggcgcagccaggagggga

SEQ ID NO: 17961 - RNA, 76 nt, Homo sapiens
cacacgacgaaaacggacaaaaccccaccaccggcagcaccgaacaaccggcgcgagaagaagcagaagaaacgag

SEQ ID NO: 17962 - RNA, 71 nt, Homo sapiens
ccgccgcacaacgcaggaaagagaaaggagaccacaagaccccgcgccaccaaagggagggcggccaaccg

SEQ ID NO: 17963 - RNA, 88 nt, Homo sapiens
acggaagggaaagcacagcccacgggcagggcgccaccacggccccgcacccccaagccgccgacaccacgccgaccaaagccaagcg

SEQ ID NO: 17964 - RNA, 82 nt, Homo sapiens
cgaggaggggaccagacacaggccaacccacagacacgcaccagcccccgcaagggacgaaagaccgcgggcaacaccagga

SEQ ID NO: 17965 - RNA, 58 nt, Homo sapiens
ccggaaaccggagcgcgcagcaggagcgaaggcccccaaaaggccagcccccagaagc

SEQ ID NO: 17966 - RNA, 77 nt, Homo sapiens
gccgcaccgacaaaggggaaaccgcccagacggcgcgcacgggacgccggggagaaggagcggagaaagcggggcgg

SEQ ID NO: 17967 - RNA, 58 nt, Homo sapiens
ggaacaagcaacggcagaaaagggcagggaaccgagaaaacacagaccaaacagacaa

SEQ ID NO: 17968 - RNA, 78 nt, Homo sapiens
agccaaacgccggggaccccggcagccacccaccgccgccgcccccagggcagccggacaacagaccgcaccggcgcc

SEQ ID NO: 17969 - RNA, 70 nt, Homo sapiens
ggacagaaccaggcgggcagcgaaaaagaaagcccaggaaagagacacgcaaagaagaaaaaaaacgagg

SEQ ID NO: 17970 - RNA, 107 nt, Homo sapiens
acgagagcccaagaggaggcccacaaggccccgcaccgccggaggggcaccaagacgccaccccgccccaccgaggccggcgggccacagcaggcgccccgccggag

SEQ ID NO: 17971 - RNA, 54 nt, Homo sapiens
gacgggagggggggccccgcgcaaagggaaaaggcaccagaagaaagcacgaaa

SEQ ID NO: 17972 - RNA, 57 nt, Homo sapiens
ccgggacacggcaggccaggcggcgaagaccaaagcagagagccaaaacaaagaaac

SEQ ID NO: 17973 - RNA, 72 nt, Homo sapiens
gcccggggcggcccggcgcggcacagcgccgccagcagggccgaccaggcggcgagccagggagcgcgagaa

SEQ ID NO: 17974 - RNA, 87 nt, Homo sapiens
aaacaaaggacggaaacgccgaggaacccggcgaggcggcagggagaccaaagaggaaggggaccaacacagagggagaaagcagaa

SEQ ID NO: 17975 - RNA, 53 nt, Homo sapiens
agcaagaaagaccacaagaccagaccaacgagacgacaggaagaaaggaacac

SEQ ID NO: 17976 - RNA, 76 nt, Homo sapiens
gaccgccaggccacgccccaaggaaggcgacaagcccacaggacaggaaccccggaagagcccggggggggacgca

SEQ ID NO: 17977 - RNA, 84 nt, Homo sapiens
caagagccggggccgacagcccgccgggacgccggccgacgggacaccaagagaaccaggaggaacacggaggacccaaaccga

SEQ ID NO: 17978 - RNA, 75 nt, Homo sapiens
ggaggagacgcacagcacaggaccagagggcgacaagaagagcgaggaaacaggccacaaaggaccagaggaaag

SEQ ID NO: 17979 - RNA, 82 nt, Homo sapiens
accccgcccccgggcaagcggggccaagggaacgaggccaacagcggcggcgcgcggcccacgcggcaccagcgcggggcaa

SEQ ID NO: 17980 - RNA, 61 nt, Homo sapiens
gcagcacgggacgcgaccggaaggcagagcggcgggaggggaaggagcagccacccgggca

SEQ ID NO: 17981 - RNA, 74 nt, Homo sapiens
agacgaagggaacgaacacaagagggccgccgaggaggaggcagagagcagagaagcaggggaagaaacgcggc

SEQ ID NO: 17982 - RNA, 74 nt, Homo sapiens
acaccaggccccgggcaggccggcccaccggggcccagagcgcgcggggcacaggcgggcaggggcacggccag

SEQ ID NO: 17983 - RNA, 73 nt, Homo sapiens
gagagcccaggaccaggccccagcacgccaccgccaagggaaagcaacagccagcgccaggaacggaggggca

SEQ ID NO: 17984 - RNA, 69 nt, Homo sapiens
ggaacgcagcaggggggccgggaagcaggccggggacgaaaaaggagccgaaagggacccagaggacgg

SEQ ID NO: 17985 - RNA, 80 nt, Homo sapiens
gcggcggcggcgcccgcgggcagaacaacaaagcaggcggcgagccaagagcaggacaaaagagaccggcagcagacagg

SEQ ID NO: 17986 - RNA, 88 nt, Homo sapiens
cgcggaccgagccgacggagccggaggcgggagccgcggcggccgggggcacaacaaagaaaggccaagccaaacggaaagaaaaacc

SEQ ID NO: 17987 - RNA, 38 nt, Homo sapiens
cagcagcgcggcagagcaggggaagaggcaaagaagag

SEQ ID NO: 17988 - RNA, 77 nt, Homo sapiens
aagacgcagaaagaaccggaagacagaggcggaggaaggggaggacggagcggagggaggcaggggccaaacaccag

SEQ ID NO: 17989 - RNA, 82 nt, Homo sapiens
cgcggccgcacccccgccccaggcgaagggagggccgccccaaccgacgcaccagccggaggaggagggacagggccaggaa

SEQ ID NO: 17990 - RNA, 60 nt, Homo sapiens
ccaaaccgaagcaacccgcaaggccaggacacagaaccgaggagccagccgccgcgccaa

SEQ ID NO: 17991 - RNA, 76 nt, Homo sapiens
cacccaaaagagacagcagagacgaagagaccgcagaagcgaaaaggagggaaagaaaggaggggaggagagacca

SEQ ID NO: 17992 - RNA, 78 nt, Homo sapiens
ggcagcagcgaggccacaccagcccgggccagccgcgcgcggcaccaccaagaacggccgagcgaccaggagaggagc

SEQ ID NO: 17993 - RNA, 74 nt, Homo sapiens
agaacccaggcagcagacagcggacgggaaaaggaagaagacggcacgggacccccagcacaggcagcaggccg

SEQ ID NO: 17994 - RNA, 72 nt, Homo sapiens
gaaaaaaacgggagggaacaaagcgcgggcgggagaacgggcgcaccggccagacgagcagccgccgcggcc

SEQ ID NO: 17995 - RNA, 70 nt, Homo sapiens
caaccccacgccacagcaaagcagcccgaggaggcacgcaaaacaacagggggcaaacaagaccagggga

SEQ ID NO: 17996 - RNA, 52 nt, Homo sapiens
ggcgcggagaaaacccagcgcacagggcggagaacggaaaagcaccaggaag

SEQ ID NO: 17997 - RNA, 92 nt, Homo sapiens
ggcaagggcaaccgcggggcaagcgggccacgcacccgcaccaaggccaagaccacaccaccccagagccaaggcaccgaggccggccaagc

SEQ ID NO: 17998 - RNA, 79 nt, Homo sapiens
cagcacaagccagaaccgaccgcgcacagcaggcacccacccaaacgaccgacaacaaagaaggggaagagcggcagga

SEQ ID NO: 17999 - RNA, 38 nt, Homo sapiens
gcagcagccccgcgggcgggagcacccacgggagaccg

SEQ ID NO: 18000 - RNA, 77 nt, Homo sapiens
caaaacaccagccagaggccacccagagaacagaaccgagagcacccaccgcaaccgccaccagcggccggagcagc

SEQ ID NO: 18001 - RNA, 66 nt, Homo sapiens
aacacacacaaagagccgcagagaacgggaggagggaagaaaagcgccgaccggaaaacagcacca

SEQ ID NO: 18002 - RNA, 78 nt, Homo sapiens
agacccggggacccccgacgccaggcagcgcccccaaacgggggagagacaaccagagcggaaagggagaaaagcccc

SEQ ID NO: 18003 - RNA, 83 nt, Homo sapiens
cgaacagcgcgacacaggaggaaccgcgggcgcacaccagaacaccgcagccaagaagacccccgcggcaccaaagaggccac

SEQ ID NO: 18004 - RNA, 68 nt, Homo sapiens
ggaagcagacacgagcaaagccaggagacacaagacaggaccgcgcagacgcgcaggacggagcgggg

SEQ ID NO: 18005 - RNA, 80 nt, Homo sapiens
cgccagcccgcaccagacgaggcaaaacagcaggaccgagacgcaacagccagacgaggacagccggcgcgccccgcggc

SEQ ID NO: 18006 - RNA, 75 nt, Homo sapiens
ccgcccagcacaaggccaaggccacaaacgaacagcgaaacggagaacggaagaaagccccagcaccccggcgaa

SEQ ID NO: 18007 - RNA, 78 nt, Homo sapiens
ggccccccgcgggcccccgggaccacccggggacccgacagcccgccgccaggaggagccggaccggagggcacggcc

SEQ ID NO: 18008 - RNA, 79 nt, Homo sapiens
ggaaacgggaagcgggccgggaccaggagcacagggccccccaacgggcgaccagggcccgacccgcgacggcgggcgc

SEQ ID NO: 18009 - RNA, 73 nt, Homo sapiens
cagagaacgcaggcggccagaccacgcaaaaagaagcgacacaaacccgccgggcgggcaaccaagaacacaa

SEQ ID NO: 18010 - RNA, 69 nt, Homo sapiens
cgagcagaccaaaagagaaaggaccagcaaacagaaaagaagccgcaaggcgaaaagggaaagaaaaga

SEQ ID NO: 18011 - RNA, 61 nt, Homo sapiens
cggcggacaaggagaagaaacgcaaaagaccaagaccagggcacaacagcaacgccagaaa

SEQ ID NO: 18012 - RNA, 81 nt, Homo sapiens
ggcggccacaaggccgcccagccgcacgcgacgacaggaacgggccacacgcgaggagacggcgggcggaggcacaggaag

SEQ ID NO: 18013 - RNA, 81 nt, Homo sapiens
ggagcgagcggacccgcgagggcaaaagcagaccggaaaacccaccggcaagaccacacccgaggggagcccaggacacca

SEQ ID NO: 18014 - RNA, 66 nt, Homo sapiens
cgcccagcacgaccagccagcaggcgacaggcgagagacgaagaggcagacccccgaaggacaagc

SEQ ID NO: 18015 - RNA, 75 nt, Homo sapiens
gaaaaacgccacgcaccggagagagcacagagccgcggcgcccaagcgaagacagggcggacccggccacgccaa

SEQ ID NO: 18016 - RNA, 65 nt, Homo sapiens
gcccacaccgggccaggaccaaccaccgcgcaaagaaggccgccgacccccggcaaagcaccaga

SEQ ID NO: 18017 - RNA, 58 nt, Homo sapiens
caccggaggagcgagcgcaacaccagcacacaggacagcaacgccagcgcacgagcac

SEQ ID NO: 18018 - RNA, 62 nt, Homo sapiens
aggcacgacaagcggacaccccgagagggaagcccacgccaaaaagggaaaaaagagagcca

SEQ ID NO: 18019 - RNA, 53 nt, Homo sapiens
accaccccccccgcgcgcgcaccggagggggccaaaggcgcgaggggggcggg

SEQ ID NO: 18020 - RNA, 54 nt, Homo sapiens
accacacaaagagcacagagaccgaaaaggaaacccaacagcgagggaacgcac

SEQ ID NO: 18021 - RNA, 91 nt, Homo sapiens
gaccaaacacgaagagacaaaagagggacacgcaggcggaaagggagaacgggagaggagcggaaacgcccgaggggacccaccagaaaga

SEQ ID NO: 18022 - RNA, 72 nt, Homo sapiens
cccgaagagaaggcaacgaagcacagacaccacaaaggcagaagaagaacccagccggaaaacggaaaggag

SEQ ID NO: 18023 - RNA, 74 nt, Homo sapiens
caagcaccgggacccaggacgaccagcagaagagacacgggagcaccagggcggcagaaggaggagacgggcag

SEQ ID NO: 18024 - RNA, 77 nt, Homo sapiens
caccggcgggaggaacaaaaggcaaaagagaaaggagaaggaggaggcaaaaagcaaaaaagcaacacgccgggaaa

SEQ ID NO: 18025 - RNA, 73 nt, Homo sapiens
gcgagacgagaagccagcaaccagcagcagaaccagggcacccaccccaagaccccggccaggagggccgccc

SEQ ID NO: 18026 - RNA, 72 nt, Homo sapiens
gagagaccccggacgagcaaggaaacaggaaaagcaaccacgccaaccagccgaaggcaccacaacggagga

SEQ ID NO: 18027 - RNA, 78 nt, Homo sapiens
cgcaacccagacacaccgccgccagaagaacgggggcaggagcacaagaaaggcacggagaaagccacgaacaggaga

SEQ ID NO: 18028 - RNA, 62 nt, Homo sapiens
aaagagaccggacgcagccgccaccgagacgaggccccgagccccggccccaaagacccaaa

SEQ ID NO: 18029 - RNA, 85 nt, Homo sapiens
cggaaaagagcggggccagggaagaccacagcgagccccagcaccagcaccccagggaagagacagcgagcagagaccaggagaa

SEQ ID NO: 18030 - RNA, 74 nt, Homo sapiens
caaaggacagggaacaccaccgcacccaaaagggaaggcccacaagaaaacaaaaacacaaaaaagaaaacggg

SEQ ID NO: 18031 - RNA, 78 nt, Homo sapiens
aaagaagacacagacagagaaggggaccccacaccacaaaccgaggaaagaagggacagcagaaaacgcagagggagc

SEQ ID NO: 18032 - RNA, 78 nt, Homo sapiens
gcgagggggggcgcgccggaaaccggagcgcgcagcagggcgcggaggcgcggggcgccccgaggagcggggaggccg

SEQ ID NO: 18033 - RNA, 50 nt, Homo sapiens
ccaagcgggaggcgccacaccaagggaacccaaggggaagcgagcgggcc

SEQ ID NO: 18034 - RNA, 74 nt, Homo sapiens
cgcccagccccaaagagcgagacacagacggcaaacagaagggcgcaggaaaaggcgcacagagaacgacaacc

SEQ ID NO: 18035 - RNA, 72 nt, Homo sapiens
cccccgaggacgcgcaggcaccaacagagcacgaccgcacaggcaaaggaaggcgaacacaaagagaaggac

SEQ ID NO: 18036 - RNA, 36 nt, Homo sapiens
aggaaagcagaagacaaaccggccaaggagcaaggc

SEQ ID NO: 18037 - RNA, 84 nt, Homo sapiens
acgaccaggaggcggccgccgcagcccaggcgcgggggcgacgacaggggagccgcgcagcaccacccccagacgggcaaagac

SEQ ID NO: 18038 - RNA, 71 nt, Homo sapiens
gcaacagggcagaaaaccagccccaggaggggacaaaaccccgaaaaaggcgggccagagaacaagcccag

SEQ ID NO: 18039 - RNA, 60 nt, Homo sapiens
aggaccaagaaccagcaaacggggacagcgccgaccggaacagggaccacggaagcccag

SEQ ID NO: 18040 - RNA, 58 nt, Homo sapiens
cagggacggcagcccacgccgcaacccgccccagagccgggaggggcggccacggcaa

SEQ ID NO: 18041 - RNA, 76 nt, Homo sapiens
gagcgcggggaaccgacgaccggcgccaaacagaacacaggaggggcagcaagcgagacgacgggaccgaaggacc

SEQ ID NO: 18042 - RNA, 79 nt, Homo sapiens
cggaaccgggagacaccgagaaaccagaggaaggaccccagagaagacaggacaaacacaaggcgccgcaaaaaaaaac

SEQ ID NO: 18043 - RNA, 83 nt, Homo sapiens
acaaccagagggaagaaaagcaaacgaaaccgggaaacaggcagaacgcaccccaaaaagaagacaaacagggcaaccagcca

SEQ ID NO: 18044 - RNA, 78 nt, Homo sapiens
accgacaggaacagggaccacggggaaagcgccgcgcaaagaggggaaagaccacagcagagggaagcagccacaaac

SEQ ID NO: 18045 - RNA, 69 nt, Homo sapiens
cggagcccaaagccacgagacgaagcaaagaagagcgcggaacgaggcagaacaaagggcaccaccacg

SEQ ID NO: 18046 - RNA, 56 nt, Homo sapiens
cgcaagaaggaaacccgacccgggagcagaggcaccagcccaggcagaagaacacc

SEQ ID NO: 18047 - RNA, 59 nt, Homo sapiens
cgggagccagcgaggaggagacagagccgccgcgccgcgccaggacggcagccagacga

SEQ ID NO: 18048 - RNA, 56 nt, Homo sapiens
cgaggggcgcaggagggccggcgcggggggaaggggccgcaaggccaggcgcgcag

SEQ ID NO: 18049 - RNA, 62 nt, Homo sapiens
gagaaaacacccgagagcaccgccgagcggaccccaagggcagcggagcagaaaaggaaacg

SEQ ID NO: 18050 - RNA, 84 nt, Homo sapiens
gggggccgcggcgagcggacggggcgagcaggcgcgcgcgagggcgaccagacgaggggagacggacgggggagagaggccaaa

SEQ ID NO: 18051 - RNA, 75 nt, Homo sapiens
ggagacgagcccgagcggagagccaggcgagagaggcccgggccccggaccagggggggaagcgcgggaccgcac

SEQ ID NO: 18052 - RNA, 70 nt, Homo sapiens
ggaagggaaacagcagacagcgcaagcggcagcacaaagaggcaggagagaaccgcagccagaagcaaag

SEQ ID NO: 18053 - RNA, 80 nt, Homo sapiens
agggaaccggagaagagagagaaagaccaaggaagaagaccagcacaaggaaaaccgaaaaacaccgaaccccaagcgga

SEQ ID NO: 18054 - RNA, 77 nt, Homo sapiens
agggagggccccgcggaccaccgccggggacaccaccagaggggggagaagggaccaggaagacacgggggcaggca

SEQ ID NO: 18055 - RNA, 82 nt, Homo sapiens
ccgcacggaccacacagcgcgggagccacgcagaggacgccggaacacccggaagccgagaaagggacggaaaaggcgcaca

SEQ ID NO: 18056 - RNA, 85 nt, Homo sapiens
cgaaagggagccgccagcgcgggcggaccgacggagacggaaagccgggacaggaggaagagcaaggagcaaaccaagacggcca

SEQ ID NO: 18057 - RNA, 49 nt, Homo sapiens
caaggaggccccagcggaccgaacaggaccgaaaagacgcggccccaaa

SEQ ID NO: 18058 - RNA, 77 nt, Homo sapiens
cacccgggcaaggagcaaagaaggacacagcacacacacacaccgcaagccccacccggcacagccgcgcagaacgc

SEQ ID NO: 18059 - RNA, 74 nt, Homo sapiens
ccaggagggggaagggcgacaggcgcagcggggcacgggcggcaggaaacgccgaaacagaggcaccagagaaa

SEQ ID NO: 18060 - RNA, 44 nt, Homo sapiens
agaaaggacccggccccccacgacaggcaggaagaagaccagcg

SEQ ID NO: 18061 - RNA, 68 nt, Homo sapiens
agacaaaagggccaaagaagggagagaggcgaggaccgcgggaagcacaaaggccagcgaacaacggg

SEQ ID NO: 18062 - RNA, 70 nt, Homo sapiens
gggccgggcgcgcccgccgcaggacaggagagacaacggaggcaagaaagacggagaagcgagaagagac

SEQ ID NO: 18063 - RNA, 80 nt, Homo sapiens
aaaggagaagaaaccagaccagagagaggaggagaagaagagacaccaggaaccagacgccgcaggcccacgcagcggag

SEQ ID NO: 18064 - RNA, 57 nt, Homo sapiens
gcgacaggcaaggggaccagacaccaacaagaaaagcacacagcaagcaccccccgc

SEQ ID NO: 18065 - RNA, 62 nt, Homo sapiens
gacgagagagaagaggagagagaagagagaaagacagcaaagaaaaggagaagaaaggaaaa

SEQ ID NO: 18066 - RNA, 86 nt, Homo sapiens
aacgccgcaccaggcgagcagcgcccccggaaagcggagggaaaggccacccaccacgagcgccccccgagaccgaccagcccccg

SEQ ID NO: 18067 - RNA, 74 nt, Homo sapiens
agcaagcgcccgcaagcgaaggagggaagcccaccagcagacaggcagcaaagaaaggaggagaagcccagccg

SEQ ID NO: 18068 - RNA, 64 nt, Homo sapiens
aaaaaaaaaagaaagagcgaagagcaggccaggaaggcagccaaacgggccggcaggacaggag

SEQ ID NO: 18069 - RNA, 78 nt, Homo sapiens
gcaggccaaggcagaaaagcagaaaaccaaaggcagggcaagaacccgccacacaaggcgaacagagggcagcaggag

SEQ ID NO: 18070 - RNA, 54 nt, Homo sapiens
aggaccggccaccgcccccgcaccgacggccagccgcgggccgcagaggcaaca

SEQ ID NO: 18071 - RNA, 78 nt, Homo sapiens
agacccaagccaacccaccccacaaagaccaaaccaggaagaggcagaaggacgcaaggaaacgcaaaagagccacac

SEQ ID NO: 18072 - RNA, 62 nt, Homo sapiens
agcgagaccgcggcgaggaccgcacccaggccacagaggaggaaagagaggggaaagaagca

SEQ ID NO: 18073 - RNA, 81 nt, Homo sapiens
cccggggagacggacgcgggcaacagcgagggcaaagagcggggcccagggaaaacgccccggagaagcaacagacccacg

SEQ ID NO: 18074 - RNA, 72 nt, Homo sapiens
ggcagggacgcgggagccacaaaaaacacgacaccaccagggaaaacaggggggcagaagcagcggacagcc

SEQ ID NO: 18075 - RNA, 76 nt, Homo sapiens
gcccacggaccaggccaggccaccgcagagcagaaagaacaagggaccccagagaaagcagcagggaaggacggcc

SEQ ID NO: 18076 - RNA, 55 nt, Homo sapiens
caggaggagcagccaacaaagaggcgccacaggagccgcagaagcaaaggcaccg

SEQ ID NO: 18077 - RNA, 74 nt, Homo sapiens
gaacgaaaccaagcaagggacaaaaaggacggcagcgcacgcgaagagacacgcaggccacaaaaagaaaggcg

SEQ ID NO: 18078 - RNA, 75 nt, Homo sapiens
gagcagccggcgccggcgcacggcccgagcgggggcagccgcagaggcgcgaaaaaggaagcccaccacccaccc

SEQ ID NO: 18079 - RNA, 103 nt, Homo sapiens
ggagcgggcggagacgccgggcagccgaacggagggcgacggagggaggccgaaagaagaaaacccgagcagagaaaacaacaaagcgcccagcacacagccc

SEQ ID NO: 18080 - RNA, 76 nt, Homo sapiens
gcgggcgagcggcggggagcggcgaagccgcgggcgaggagcaacgcacgaaaacgcacgaggagcacagaaacgc

SEQ ID NO: 18081 - RNA, 77 nt, Homo sapiens
caacccccaccaaaagccccaagaaccaccggaaccacaagaaggcaacagagacccgagcggaagagaagccaagg

SEQ ID NO: 18082 - RNA, 74 nt, Homo sapiens
cggagggccacgcgaggcccaaaagagcccagaggcccggaaggcgcaaaagggggagaacaacaccaccaaac

SEQ ID NO: 18083 - RNA, 67 nt, Homo sapiens
ccaccacacgcaggccgcaagcccagggaaccacaggaagcagaagagacggggcgccagggccagg

SEQ ID NO: 18084 - RNA, 80 nt, Homo sapiens
gaaaccgaaacaggccaaggcccaagagcgaggagggggcggcaccacgccccccccgccccgaggcccggaagccaggc

SEQ ID NO: 18085 - RNA, 60 nt, Homo sapiens
cgacgcgcagcgcaggcgagaagcagaaggccaggagggacggacagaccacgggggaca

SEQ ID NO: 18086 - RNA, 66 nt, Homo sapiens
ccggaccccagcacacagaagccgagacgaaacccaaggaccgcaagccaacgccgcgcagacaca

SEQ ID NO: 18087 - RNA, 74 nt, Homo sapiens
gcgccgcccgccagcacggggacagccgcgccgaggaggccggaaagggccccccacacggggccccacacgcg

SEQ ID NO: 18088 - RNA, 68 nt, Homo sapiens
aaaaacagaggaaggaaaggcgcaacaacacaaaaaaagcagcaaggggcaagacggagagaaacagc

SEQ ID NO: 18089 - RNA, 70 nt, Homo sapiens
ccggaggaggccagcgggacaagcggacccgagacagaaggccaaagagacagcagccagggcaacagag

SEQ ID NO: 18090 - RNA, 73 nt, Homo sapiens
aagcagcccgaaaaagacgcgagaagccacacggggccaagcaaacgaaggaaaaacgacgcacagaagaggg

SEQ ID NO: 18091 - RNA, 62 nt, Homo sapiens
gcagaacagccggcagcgagccggggccccgccggcccagccaagaacgacaggcaaaccag

SEQ ID NO: 18092 - RNA, 56 nt, Homo sapiens
acgccgggacccagcgcagggaccaccacacgaaaccaaggaaaaaccgggaacag

SEQ ID NO: 18093 - RNA, 84 nt, Homo sapiens
ggcgaccgaggggagagggaacgcagcgaaagcggaacggcgccagggcaccacacccgggaagcaagagagaaaggagacgag

SEQ ID NO: 18094 - RNA, 78 nt, Homo sapiens
gacccgcccagcccccgagagcgggaacaggcacgcgccaccaccccagaagaagacgaaagcaggcaccagcaagag

SEQ ID NO: 18095 - RNA, 85 nt, Homo sapiens
ggaccggaagagcccacggacacacaggaacgggggccacgcacggagaaggcgaccagacgaggggagacggacgggggagaga

SEQ ID NO: 18096 - RNA, 82 nt, Homo sapiens
agcaacccacagagagagaggaaacgaagggagcgacacacacccaagcgaagaaacaggggagaaaccccgcggggaagcc

SEQ ID NO: 18097 - RNA, 60 nt, Homo sapiens
gggaacgaaagcagcaggggcagggagcaggaagaagagagccaagcgaacgccgaggaa

SEQ ID NO: 18098 - RNA, 73 nt, Homo sapiens
aagacaaagaagcgaaaaacacaggcggacggaagacccggagcagggcaacgagcacagacagaaagcaacc

SEQ ID NO: 18099 - RNA, 53 nt, Homo sapiens
gcaaaaggcacaacacgaaagagggccaacagaagagccacaagcccgcacca

SEQ ID NO: 18100 - RNA, 77 nt, Homo sapiens
acagacgcagggcgcccccgagcaacggacccaaaaggcagcaagcagaaccaaccaaagcccggagagaggcaagc

SEQ ID NO: 18101 - RNA, 72 nt, Homo sapiens
caggaacagcgggacccaggcacggagcgcggacgcccaggagcgggcgccggcggagcgccgcccccaggg

SEQ ID NO: 18102 - RNA, 70 nt, Homo sapiens
gaaaccaaagggaacgggggagagaagccacaaagcaagcaggggacaggacgagggacgcaccgcaaaa

SEQ ID NO: 18103 - RNA, 68 nt, Homo sapiens
aggaggaccaccaaaccacaaaagagggcaacggagacagaaaccaggaggccaagcaagggaaaaag

SEQ ID NO: 18104 - RNA, 88 nt, Homo sapiens
cggccccgccggcggcaggagaagacacccggaccaaggaggaggcccggagcgacaacggggaggagccccagccccgcgacgagga

SEQ ID NO: 18105 - RNA, 75 nt, Homo sapiens
gcccagggaaggaaccaaggcacacgcccccagcaaggacgcacaggaggagcgccccgaggccggggagcaccc

SEQ ID NO: 18106 - RNA, 88 nt, Homo sapiens
caggcaccgagagaccagcagcggggccaaaaccacaccaaaaccaagggacagaaacagccaagcccgaaagggcacagaaagcacg

SEQ ID NO: 18107 - RNA, 55 nt, Homo sapiens
cgcaagggcaccaccccgagagaggacgaagaacaaggggccgcaaggccaggcg

SEQ ID NO: 18108 - RNA, 81 nt, Homo sapiens
ggacaggcggaggccccagggaagcgcagaaagcaggcgaacccgcggcgcaaaacgggcgggaccaggagaagcgcgcga

SEQ ID NO: 18109 - RNA, 60 nt, Homo sapiens
cgggacccagcccaggcggcgcggacggggcggcagagcaacacaccaggaagcagagcg

SEQ ID NO: 18110 - RNA, 56 nt, Homo sapiens
ggcagccccggccaggaaaaacacaggagcagacaagggcccacaccaaagccacc

SEQ ID NO: 18111 - RNA, 71 nt, Homo sapiens
aggagccaccaaagccccagaagcacaccgacccccaacgggccccaggggaagcagggagaccacagggc

SEQ ID NO: 18112 - RNA, 81 nt, Homo sapiens
cgagcaccgggccccgcgaccggggcccggggaaggcccgcgcccgccccaggcaccagacacgaaagagcagaaggcaaa

SEQ ID NO: 18113 - RNA, 64 nt, Homo sapiens
gcaaaccgggccacaggaaaggcccgagccaaaagacccagagaaaggagcacgaaggaacaaa

SEQ ID NO: 18114 - RNA, 76 nt, Homo sapiens
caagggcaacaacgacaccaaggaaaggcgcaccaaggaacacgacaagaaacacggccaggagagaaagccaaag

SEQ ID NO: 18115 - RNA, 64 nt, Homo sapiens
gaacagggccgggcggcccaagggaaaagcagcggccgcaagaaggaagccggaaggaaacaac

SEQ ID NO: 18116 - RNA, 78 nt, Homo sapiens
gcagaggcgaagggcacgcgccagaaaagccggcagagaagcggcagggggaggcaagcccaggaaagagagaaacgg

SEQ ID NO: 18117 - RNA, 67 nt, Homo sapiens
acacaaaacccgagcacagaaaagaaaaggaccggagggcccgccgagaggggcccccgggaggaga

SEQ ID NO: 18118 - RNA, 79 nt, Homo sapiens
gaggcccgggaccaaaggcaagggaagaaggaagagaagacgaagggacagggcacaggagcgcaaggacgaaggcaac

SEQ ID NO: 18119 - RNA, 69 nt, Homo sapiens
ggagcccgcgcccgccgcgggagagaggacccccccccccccccaaggggaagaggacgaaggaggaag

SEQ ID NO: 18120 - RNA, 82 nt, Homo sapiens
acccgggggacgcggggacaccacaagcacggagagcggagcacagccgggggagaggcggcccagggggcagcggaggggc

SEQ ID NO: 18121 - RNA, 75 nt, Homo sapiens
accccaagcgcacgggagggcacggaggcccaagccagccaggcacgcacccggagagcagacgcagaaacagga

SEQ ID NO: 18122 - RNA, 58 nt, Homo sapiens
aagcccgaggcagcagacagccgggccccaagaagagggaaggcaccaggagaaggca

SEQ ID NO: 18123 - RNA, 123 nt, Homo sapiens
ggggccggcgggagcgcgaacgagcgacggcggaacccggggccgggacgcagcccggcggcagcagaaacgaaggaggcccaaccacaaaaggagccgacggaacccagacggagaacaaaa

SEQ ID NO: 18124 - RNA, 71 nt, Homo sapiens
gggccgaagcgggagagcccgccaggagggagggacccagcagagaaaaaaaccggggaaacgcgccgaga

SEQ ID NO: 18125 - RNA, 73 nt, Homo sapiens
ggcgccaaacaagaaaaacaaagccaaggaaaccccaacacagagccaagcgccaagaggaaaccaaacagag

SEQ ID NO: 18126 - RNA, 66 nt, Homo sapiens
gaaggaccaagaaccaggaaacaagagaagagcaacgacaagacgcaggagaaaccacaaaaagga

SEQ ID NO: 18127 - RNA, 74 nt, Homo sapiens
caggacggaagccgcgaacccccgaccgggagcccacggacgccgcgagcggcacaaggacaagcggagcgaca

SEQ ID NO: 18128 - RNA, 78 nt, Homo sapiens
gcccggaggcgggacccagggcccaggagaggggcgggagccgagagaagccaacccggggagacaaccaaaccaaca

SEQ ID NO: 18129 - RNA, 87 nt, Homo sapiens
acaaaggggaggaggacgccagacgcacggaaagcagcgcaggagccaagaccacagcagcacccagaaccaacacaacccgacaac

SEQ ID NO: 18130 - RNA, 79 nt, Homo sapiens
cagaggcggagcccgcagaccgcagaaggccggagacaccagcagacagcgcgggagccaggaaacgcagaccccccac

SEQ ID NO: 18131 - RNA, 70 nt, Homo sapiens
cgaaccgcggggcagaagagacaagcaacagaagaaagaagacgcgaccggaaaggagagagagacagaa

SEQ ID NO: 18132 - RNA, 71 nt, Homo sapiens
aagaacgacgaaacggagggagcggcaggggaggcgaagaagagcccggacagaaagacgacaaaaaaacc

SEQ ID NO: 18133 - RNA, 57 nt, Homo sapiens
agcgcggccagaccgcggggcacacaccggaccacaagaacaggaggagccggccga

SEQ ID NO: 18134 - RNA, 78 nt, Homo sapiens
gaggagagggcggggggaagacaaggaggaagaggccagacaggacaaggcacggggccaaaaaggcacgagggaacg

SEQ ID NO: 18135 - RNA, 70 nt, Homo sapiens
cgcacaggcgcgagaaaggaaagaaacaaggcccagcggaacgcggcagaacggaggcaggcagcacgag

SEQ ID NO: 18136 - RNA, 77 nt, Homo sapiens
gcccgggggaaacagagaaagaaggcggccaggccaaccgaaggagacagaacagacagaaaaaacaacaagaaacc

SEQ ID NO: 18137 - RNA, 71 nt, Homo sapiens
cgaaaagagccagcgcaccaaggggaacacgaagaggggcaacccaaccaagccgccggacaacgagccgc

SEQ ID NO: 18138 - RNA, 76 nt, Homo sapiens
cccgcgccagccccgccccgggcaaagcccacggccgccgagcagggcggagaacggaaaagcaccaggaagcaga

SEQ ID NO: 18139 - RNA, 78 nt, Homo sapiens
aagccaagcccaagacaaaaacgcaacaggacaacgcgggcaccaccgagcaggccagcggcagaaagccgggagcag

SEQ ID NO: 18140 - RNA, 82 nt, Homo sapiens
cacagcgagccaaaaagggaccaagaaaggcccagggaccaaagcccggacaaggcccgagcaccaggaccgcagaaggccc

SEQ ID NO: 18141 - RNA, 82 nt, Homo sapiens
gggaagccaaaacgcagcgcgggcggacacacacggccacgggcaccgcaaagggaaacacggcaccgggggcggaaaagca

SEQ ID NO: 18142 - RNA, 80 nt, Homo sapiens
aaccagcaccaggagacagaggggaggggcgaccccggggcccggccagcacgaccgaggaggggcggacagcggaggag

SEQ ID NO: 18143 - RNA, 75 nt, Homo sapiens
cccaccgaggggcgggagggaccagagccacaaccaaaagaagcacaccgaggcaaagaaacgggcaaccacacc

SEQ ID NO: 18144 - RNA, 59 nt, Homo sapiens
caggagccaagaccacagcagcacccagaacaccgaagacggaaggaggaaccaaagca

SEQ ID NO: 18145 - RNA, 76 nt, Homo sapiens
ggagcacaaaacgggcaagcccaagaggaaacaagagacgcagacacagaaacaccagggcccgccggaaaagaag

SEQ ID NO: 18146 - RNA, 80 nt, Homo sapiens
cagcgaggcgccccagagcccagggcaggacaccgacaggaacagggaccacggggacaacccagaaaagaaaaggccag

SEQ ID NO: 18147 - RNA, 78 nt, Homo sapiens
gcagggccacaaggaaaacaaggcgcagcgacacaaaagccaggaagacaagagcagaagaaacagaccgaaagacaa

SEQ ID NO: 18148 - RNA, 77 nt, Homo sapiens
ccgcaaagcgcgagacccgggcgggggcaccgagggcaccacgcgcgggacaggagagacaacggaggcaagaaaga

SEQ ID NO: 18149 - RNA, 76 nt, Homo sapiens
gggcagggcgcggggaagcagggaaggcaagcagaagggcaaacaaggcaagagggagaagacagcgaccagggag

SEQ ID NO: 18150 - RNA, 42 nt, Homo sapiens
aaccagaaaccggaagggaggggggaggcaaagaaagaagcc

SEQ ID NO: 18151 - RNA, 88 nt, Homo sapiens
ccgccggcaggcccgcgcaccagcaacaggcgacaaggccaagccgccaaagcgccaacaggacgccccccaagccccgggggacccc

SEQ ID NO: 18152 - RNA, 76 nt, Homo sapiens
ggcgacaggaagagagaagaggagagggggcacgacgagaccaagggaacggaagccccagcccgcgcgagccagg

SEQ ID NO: 18153 - RNA, 40 nt, Homo sapiens
gccaagggggcaacgagggagacgcggcggcagcggagac

SEQ ID NO: 18154 - RNA, 78 nt, Homo sapiens
aaaccaaagacagcacgagcacagaaagcagaagaagacgaaacggaaagaacgaggacagggagaaccagcggacag

SEQ ID NO: 18155 - RNA, 71 nt, Homo sapiens
gaggcggcaacagggaacgccgcgcagagcccagcccgggaacagcgaaggggcagaccaacaccacccag

SEQ ID NO: 18156 - RNA, 67 nt, Homo sapiens
cccccccccccccaaggcgggcaacacaacaaggcgcggacacccagacaagcgcgccaccggcccc

SEQ ID NO: 18157 - RNA, 78 nt, Homo sapiens
agagcaaggaggccccagcggaccgaacagcaaacacaacagaggagacaggaggaaagaagcgccggaccgaagagg

SEQ ID NO: 18158 - RNA, 88 nt, Homo sapiens
cggagacccagcgcacgggagcagccagagacgggccaaaaggaagcccacgacaagagaccaggcaagaggggagaagcgcgaagac

SEQ ID NO: 18159 - RNA, 88 nt, Homo sapiens
cgagccccagccaggacgagaggagcggagcccgcagaaccccacagcaagaggacggccgcggaagaccagcgggagcccacgccgc

SEQ ID NO: 18160 - RNA, 62 nt, Homo sapiens
cgagacaggccgaccgggaaagcccagaacccaagaaggcagaagccagccccgcaggccgc

SEQ ID NO: 18161 - RNA, 55 nt, Homo sapiens
gacaccgaacaagacagcgccgcccggcggggcgcaaggggagacagggcgcggg

SEQ ID NO: 18162 - RNA, 74 nt, Homo sapiens
cgacccacagcgaaagagaagaaagaggagcgacgccgacaaaggaggaaaagaagagaccagcgcagcagaca

SEQ ID NO: 18163 - RNA, 59 nt, Homo sapiens
ccccgaggcgggaacagcaagccaggcggcagacaaacggaaccaaccaaagcaaaaca

SEQ ID NO: 18164 - RNA, 95 nt, Homo sapiens
gggcgcccgccggcacgccgccagccccgggggccacgagcggggcggagaacggaaaagcaccaggaagcagagaggaccgcagaagggaagga

SEQ ID NO: 18165 - RNA, 76 nt, Homo sapiens
ccagggacgaggaccagacggacaacgaccacgcccaaaagagcgcaccaacccccacacagccagcaggggcaga

SEQ ID NO: 18166 - RNA, 57 nt, Homo sapiens
aaccgaccagcaccaccggagacacgccggccaggagaccgaggacaggccggacac

SEQ ID NO: 18167 - RNA, 70 nt, Homo sapiens
caccggaagccggaacaacagccagaccccaggcaggagcacacacaagaaaacccaaccagcaggaagg

SEQ ID NO: 18168 - RNA, 79 nt, Homo sapiens
agggggaccacaagacccacgacagagcacaggggaggggaagcaacagggcggggggaaccgccaccaagggaaacag

SEQ ID NO: 18169 - RNA, 73 nt, Homo sapiens
ggaacaacacaaagcacaccgccaaacccaggccagagcacagcccaacaaagaaaggacagcaagaagacag

SEQ ID NO: 18170 - RNA, 75 nt, Homo sapiens
gcagaagcaccaaagcagcggcgccggccgccccaccggcggaacccagcaaggacaaccagagggaaaaaacaa

SEQ ID NO: 18171 - RNA, 63 nt, Homo sapiens
gacgacgccccccggccgaacccaaagacaacccaaacgaagaagagaaagacggaccgagac

SEQ ID NO: 18172 - RNA, 78 nt, Homo sapiens
ggcgcacccaggagaaggagcagacaagaccccaacaacaaggcccccaagacaagagccgaggaaacccagacccaa

SEQ ID NO: 18173 - RNA, 86 nt, Homo sapiens
agcgccccggggccccgcgggaccgcggccacggacggaacccggagggcggaccacaagagcccgggccagcgcagcagcaagag

SEQ ID NO: 18174 - RNA, 71 nt, Homo sapiens
ggagagaagacgacgcaccgcaggcagacaaaagggccaaagaagggagagagaaagccaacaggcagacc

SEQ ID NO: 18175 - RNA, 74 nt, Homo sapiens
cgcccacgaggagcacagccgggccgcgcgaagaacaggacagagccacgaccaggggacacccccgcccccaa

SEQ ID NO: 18176 - RNA, 74 nt, Homo sapiens
caggcacaaaggggcgagccaagacaagcaaacccaggaacacccggccggcccggcgccccggggcccgaggc

SEQ ID NO: 18177 - RNA, 67 nt, Homo sapiens
gagacacaccacgccaaggagagaacacaagaagaaagacagcacgggccgagccgcgcaacgcccc

SEQ ID NO: 18178 - RNA, 69 nt, Homo sapiens
ggagccgcgcagccccggagcacgaaagcggagagggccgccggacaagaccacaggcggaccccaagc

SEQ ID NO: 18179 - RNA, 70 nt, Homo sapiens
gaaccagagaagagaagagaaggaggaaaaaagaaaacacgaggagggaacaacggacgaaggccgccca

SEQ ID NO: 18180 - RNA, 86 nt, Homo sapiens
cggacaccgagggcccccaaaaggggaagaaacgagcgagcccgggacagcaagagccaagcgccgggacagccagggccagccag

SEQ ID NO: 18181 - RNA, 74 nt, Homo sapiens
aagaaaggagaaccggggacagccggcaggggaccccggcgaaagacaaaaacccacagaggccccaggacaag

SEQ ID NO: 18182 - RNA, 72 nt, Homo sapiens
agacaaccaccgggggccaggacagagacaccacgggcagaccacggagggaaagacaaggagccgggccga

SEQ ID NO: 18183 - RNA, 80 nt, Homo sapiens
agcgccgcagacgcaggaccgggagaagacggaagccaggacaaaggggggccaccgaagcaccacacccggggccagcg

SEQ ID NO: 18184 - RNA, 55 nt, Homo sapiens
caccgaagccagaagacggaaaaaacagcgccgaaaagcgaaaagaaacaagccg

SEQ ID NO: 18185 - RNA, 84 nt, Homo sapiens
aacaagaaggcgagccagcccagaggaccgaaagccacaggaacgcaaggcggggaaaaaaaggcagcacacagacgcagcaac

SEQ ID NO: 18186 - RNA, 58 nt, Homo sapiens
ccggccaggcacaagggcaccacaaagccacagcgaaacggccgcggggcaccagaac

SEQ ID NO: 18187 - RNA, 62 nt, Homo sapiens
gggcccgggcaccacggaagggaggcacaacaagaagcagagcccaaagagcccgaacagcg

SEQ ID NO: 18188 - RNA, 82 nt, Homo sapiens
aagccccaaggagccacaggaggaccggccccaaaaggaaccggagaggaggacaggacaacaggcaacccccacgacgcag

SEQ ID NO: 18189 - RNA, 73 nt, Homo sapiens
acaccagaacaggaaggggagaacaccgaagcccccacaagggaagaaccacaggccagaacgaagcacaaca

SEQ ID NO: 18190 - RNA, 83 nt, Homo sapiens
caaagagcagacacgagcggagcgaaggaggcgaaggggagcaagggagaaaagcaaagggaaggacgaagaagcaccccaag

SEQ ID NO: 18191 - RNA, 77 nt, Homo sapiens
ggaggccccagggaagcgcagaaagcaggcgaacccgcggcgcaaaacggaccacggcagcggcgacgacacgcggg

SEQ ID NO: 18192 - RNA, 74 nt, Homo sapiens
gccgaaccgccggcagccggcgacgaggacgaggccggcacgggccggaccacagaaggcccaacaccaaccgc

SEQ ID NO: 18193 - RNA, 75 nt, Homo sapiens
cgggcagagccaggaccaaggaggcaaaagcagggcacaaccaggggaccccacaccacaaaccgaggaaagaag

SEQ ID NO: 18194 - RNA, 68 nt, Homo sapiens
agagcccccaccaagccagcaagaagacgagcaggcgcacaacaggcacaaagagagaaggaacaccc

SEQ ID NO: 18195 - RNA, 63 nt, Homo sapiens
cgaggagcagggccgacgcgcagccaggccacggagcgcaagaagagggcccggccgcgcggc

SEQ ID NO: 18196 - RNA, 77 nt, Homo sapiens
gaggcgaacgccaccagcgcggcacggagaaaggcagacccggcaccacagggaaaacggggcaagcccagaaacac

SEQ ID NO: 18197 - RNA, 79 nt, Homo sapiens
cagggagagccgggaaacaagccaaaccgaaaggaagcagacagagccaaggccaggccagcgacagagccggacacag

SEQ ID NO: 18198 - RNA, 75 nt, Homo sapiens
cggcccgcgccagccacaccacgggcgcggcccagcgagagccgcgagcaccacggaagagaccgagaccaggaa

SEQ ID NO: 18199 - RNA, 70 nt, Homo sapiens
aaacagagagaaaagagacggagcaagagaacgcaagagacgagccagagcagccagaccaaggcacgaa

SEQ ID NO: 18200 - RNA, 69 nt, Homo sapiens
ggaggccagcggaccaggcaccccccgcccgcgccacacaccaagaccgcacaggagggagcaggaaaa

SEQ ID NO: 18201 - RNA, 82 nt, Homo sapiens
agaccgacccgagagcccacccccaacgcgacggaaaggcacgaaagccagggccacgagacaagacagccggagggaggaa

SEQ ID NO: 18202 - RNA, 74 nt, Homo sapiens
gggcaaaagagaaaaaggaagacgaaaggcaaggccaaaaggagagccaggacaagcccaagacggacagggag

SEQ ID NO: 18203 - RNA, 76 nt, Homo sapiens
gaccccagcaggacaccgccgaccagcggcgaccgacaagcccacaaggacacccagcaggccaagagacgaagcc

SEQ ID NO: 18204 - RNA, 63 nt, Homo sapiens
cccgggacggcccaaggccagcccgcaggaaaaccagagacccagacacgcgaaggaacgaaa

SEQ ID NO: 18205 - RNA, 72 nt, Homo sapiens
cagccccgaaagcgggaacaggagcgcacgccacgaggagcagggggggcgccgcgcgaagcaccgcacgcc

SEQ ID NO: 18206 - RNA, 88 nt, Homo sapiens
accagggcagagacacgcccgggcggggagggcagccgggcccgcccaggccgacgggacgacgagaacggcaggagcccagcggacg

SEQ ID NO: 18207 - RNA, 73 nt, Homo sapiens
agccagagcaaaaccagcccagagaacaagagggccgaggccaagccaggacggagggccagcaggcacgccc

SEQ ID NO: 18208 - RNA, 88 nt, Homo sapiens
aagacggccgccgccccggacccgcggcgccggcccggagcggagccgcgacggcagcggcaagaagagcaaacaggaggaagaaaaa

SEQ ID NO: 18209 - RNA, 91 nt, Homo sapiens
ggagagaaaaaacccagcgagaccgggccggaacgaaagcaggacggaggagcgaccaccggcgagaaaagaggaagagcaaccagaacca

SEQ ID NO: 18210 - RNA, 76 nt, Homo sapiens
caacacagacccaccagcagagagaagacacccgggcgggaaaaaggagcaaagaaaggggaaagagaagaaaaaa

SEQ ID NO: 18211 - RNA, 63 nt, Homo sapiens
gaggacaaaagagcggaggagcggcgaggggaagaaggagaaagggccaaccccgaagaagca

SEQ ID NO: 18212 - RNA, 87 nt, Homo sapiens
gggggccggagccccaggaaagccaagcggcggccaccgcaggggcccccacacggccgggaagcccggggagaaccgcccgccgca

SEQ ID NO: 18213 - RNA, 75 nt, Homo sapiens
caggggaagaaagcacgccacgccacggccccgcacggggcgcacagaggaggcggggaaggaaaacagcaacac

SEQ ID NO: 18214 - RNA, 74 nt, Homo sapiens
caacaccgaagaacgcccggaaacagaaaacagggagcgacacaacccaggccacaaaggcaggccccggggca

SEQ ID NO: 18215 - RNA, 61 nt, Homo sapiens
ggggacagacaccccacccggcgcaagaggagccaggagcacggggggaacaagaccgccg

SEQ ID NO: 18216 - RNA, 78 nt, Homo sapiens
ccaggcacaccgcaaggacccaaaggggagggccagcaggcgaaagagaagcaaaggaagaagcgaagcaacggagag

SEQ ID NO: 18217 - RNA, 80 nt, Homo sapiens
acgggcacagcagagaccaaaggcagggcaaggaaacggccacaagacagagccagaggaccccggacaaacacagcgga

SEQ ID NO: 18218 - RNA, 72 nt, Homo sapiens
agcggcaaccaaagaacaaaacgcgcacccaagcaaaccgacaaaggggcagagcagcaaagaccaaaaggc

SEQ ID NO: 18219 - RNA, 37 nt, Homo sapiens
aagaccgcagagccaagccccaacgcggcagaacgga

SEQ ID NO: 18220 - RNA, 73 nt, Homo sapiens
ggagccccggggacacccggcacgcagcggagagcccgccaccaaccccgacaggagggaacaagccgcaaga

SEQ ID NO: 18221 - RNA, 75 nt, Homo sapiens
agaacagagaggccacgacaaggaagagcagaagcgcccagacaccagaaacagaacggaggccggaagcgaccg

SEQ ID NO: 18222 - RNA, 70 nt, Homo sapiens
gaacgcgcacgggaaccgaagagagccgggcaaaggcccggaggcgcccgcgggccagcgcgccgacggg

SEQ ID NO: 18223 - RNA, 79 nt, Homo sapiens
cggggggccagaaggggaaggccaagagcacagcagccccccagcaaacaaagccacagggaggcggacagcaaccaag

SEQ ID NO: 18224 - RNA, 64 nt, Homo sapiens
agaacgaaagaaaacgaaaaaagaagcaggcgaggcaggcacaacaacaggcgaccgcaggccg

SEQ ID NO: 18225 - RNA, 74 nt, Homo sapiens
ccgcgaggagggaggaggagggaaagacaaggagccgggccgagaaaccgaaccagagaccagagaagaaacgc

SEQ ID NO: 18226 - RNA, 65 nt, Homo sapiens
ccccaagccgcagacgcgggcgaaacagggggccgggaaaccaagcaccccaccagcgcaccacc

SEQ ID NO: 18227 - RNA, 83 nt, Homo sapiens
acccaagaagaagaaggcgaaggaccccaacggggaggccaacggaagaagccggagcgcgaagacgcagggaaagcggcaca

SEQ ID NO: 18228 - RNA, 78 nt, Homo sapiens
caaagaaacaagccgggaaagggacaagaagggcaaagccgaagcagggcaagaacccgccacacaaggcgaacagag

SEQ ID NO: 18229 - RNA, 73 nt, Homo sapiens
gggcaaggagccgcccggcgccggcggggccccgcgaggacgagccacacaggcacagagcgccggcccaggc

SEQ ID NO: 18230 - RNA, 58 nt, Homo sapiens
gcccacaggcgccggcacgaaggccagaaaacagccaaaacggacaagccaaggcacg

SEQ ID NO: 18231 - RNA, 79 nt, Homo sapiens
cgcagcgggcgagggcgggggagagccccgccggagaggcgggcggcgccgggacagagcgcgacagagggagagcacc

SEQ ID NO: 18232 - RNA, 85 nt, Homo sapiens
gggaccagacagacaaagccacaaccagggcaacaggaccggcacaccgaagaggcaaggcagcgagggaccagaccggagacgc

SEQ ID NO: 18233 - RNA, 75 nt, Homo sapiens
ggcagccagggaaacgcaacccaagggcacagacggaagaccaggaaaggccaagacaaagaacggacagcaagg

SEQ ID NO: 18234 - RNA, 75 nt, Homo sapiens
ggaacgccaaacaaggaaaccccgggggggaccgaaaaccaggaagcagaacggaaaaagcaaaagcgagaagaa

SEQ ID NO: 18235 - RNA, 76 nt, Homo sapiens
ccgcaaagcaccccccgcggggaggcaaggggggaccagacaggcggcaaaaggccggcccacagcccaaaaagaa

SEQ ID NO: 18236 - RNA, 53 nt, Homo sapiens
gaccagaaaggaacggcaagacaacaagcaggaagaggagaggcggacgcagg

SEQ ID NO: 18237 - RNA, 80 nt, Homo sapiens
caaggcaacaagaaccgaaggcaaagggcaaaaacaaggacaagacagcaaagcagcgaagcaaagaagaacgaaggaaa

SEQ ID NO: 18238 - RNA, 76 nt, Homo sapiens
acagaggagaaggcggcccaccccagagcaccggcaaaaacccaaagacagcgccgaacgcaggaagcagccggaa

SEQ ID NO: 18239 - RNA, 74 nt, Homo sapiens
caccccggcggaggcacccaacaacccaggagacagggaagaagaccgcaacacagcaacccagaccacaaaaa

SEQ ID NO: 18240 - RNA, 57 nt, Homo sapiens
ggcgcaaaacgccccggcgcacccgaccgagggacccgggcaaggccagagaaggcg

SEQ ID NO: 18241 - RNA, 77 nt, Homo sapiens
ccagcagaagaccaacacaccagcgcgggaggcagaccggacgcaagccaagagccggccgaggagggccaaccgca

SEQ ID NO: 18242 - RNA, 65 nt, Homo sapiens
aaaacccccaccaacccgccgagccagggagcccgcccgaccggagacaccacccgcacagccaa

SEQ ID NO: 18243 - RNA, 70 nt, Homo sapiens
gcccaacaaaggaacgaacgggaccagagggggacagcgaaaacaaggaggagcccaaaggcgaaagggg

SEQ ID NO: 18244 - RNA, 85 nt, Homo sapiens
ccacgcccggcccggccgcgcccgcggaaccagaccaggggcaacacccccacaaagagcaagccagccggacgcaccacggggg

SEQ ID NO: 18245 - RNA, 40 nt, Homo sapiens
caccaacccggcccaccaaaccccagagacggggcgccag

SEQ ID NO: 18246 - RNA, 82 nt, Homo sapiens
cacccaggaaggaaaaggcgcccgagagccgcgcagggagggagagaaggcagcaaaggccacgcagcacacaggaaaaaga

SEQ ID NO: 18247 - RNA, 79 nt, Homo sapiens
cgcaggcgaggacggcggaccccgcggcgggaggagccgccccgaggaacgagccccgccgggagaggacaaagaagcg

SEQ ID NO: 18248 - RNA, 72 nt, Homo sapiens
agacagcgaggacagaaggaagcaggcccgaccacgaagaagaggacaggggacgcgcggaaaacgccacac

SEQ ID NO: 18249 - RNA, 72 nt, Homo sapiens
accagccaggcaggcgacaagcaggagcacagacgagagcccgagggaaaagacaggcaacaggaaagcaag

SEQ ID NO: 18250 - RNA, 90 nt, Homo sapiens
ggagccagggagccgagagcaggaccaagaagggccaagagaaggccaggccgagcaagcgggaggagcagaaccgaaggaccgcgcggg

SEQ ID NO: 18251 - RNA, 87 nt, Homo sapiens
gccggcaccagggggccccgggcacagccacacgccgggcaggagccacggagaaagacagcaaagaaaaggagaagaaaggaaaaa

SEQ ID NO: 18252 - RNA, 75 nt, Homo sapiens
cagaggaggcccccagacacggaaccgccacggccggggacccagacagaggggcggccccaagagcaacaaagc

SEQ ID NO: 18253 - RNA, 52 nt, Homo sapiens
gaagcgaccgcaggcgggcccccgaccgccaagagaaaccaccaagagccag

SEQ ID NO: 18254 - RNA, 78 nt, Homo sapiens
gcagggagggaaaccagcgcgggggaccaggagcaggggggaggggaacagcagcggagaacacggcagagacaaaac

SEQ ID NO: 18255 - RNA, 56 nt, Homo sapiens
agggcgggggcaaagcggagaccggggagccgccaccaaaagcagacggaaaaccc

SEQ ID NO: 18256 - RNA, 77 nt, Homo sapiens
gacgagcagcccagggagcgggagacaggaacgagcagagcgacagcgaagcgcagcaacacaagccccaggcagcc

SEQ ID NO: 18257 - RNA, 80 nt, Homo sapiens
ggagcccagaacagagcggccacacgcaggacagggaagccacggagaccgcccagcaggaagcggagcgccgggggccc

SEQ ID NO: 18258 - RNA, 74 nt, Homo sapiens
cgagaccgagccgcacccagggaggccccaccacacggcaagcggcaccagaggggacgccgcgggaaccagcc

SEQ ID NO: 18259 - RNA, 84 nt, Homo sapiens
ggaagagggagcaccacggaccccaaggaagccacggcagacacacaacccgacccgacgaagccccagcccccagcagccgac

SEQ ID NO: 18260 - RNA, 51 nt, Homo sapiens
agaaagccagcgcggaaacgcccgaacggaagggccgcccagcggcaccca

SEQ ID NO: 18261 - RNA, 80 nt, Homo sapiens
gcgagggacaaaaggcgaagacgccaagaccacgaaggaaacccaccagagaaggcgcggccacccaggacccgggggag

SEQ ID NO: 18262 - RNA, 78 nt, Homo sapiens
caggggagcgggcgagggcgccaggagcggcagcccacaagcaggaagaccagccccaggagggaaacagagcaccca

SEQ ID NO: 18263 - RNA, 70 nt, Homo sapiens
gcagggcagccacaaagaggagcacgaggcaaccagacacacaaccaccagaaggagagaagaacagaag

SEQ ID NO: 18264 - RNA, 81 nt, Homo sapiens
caggcccacacaaagagggggcggaagagacagccaggcacagaagggaccaggccaggggggagaggaaggcagccgcca

SEQ ID NO: 18265 - RNA, 78 nt, Homo sapiens
ggaagagggccgggggcgcggccgcgcgccgccggcgaaggaggaggcggccgggagaaaacgggaaacggaaaaaga

SEQ ID NO: 18266 - RNA, 58 nt, Homo sapiens
cagaggcgagcccggggaggaagagcgcaagccccggggcagagacacaggacaccca

SEQ ID NO: 18267 - RNA, 78 nt, Homo sapiens
cgagcggcccgcacaaggccggcaggaaacaggaacacgaaagaggaaaaacgcacaagaaaccgaagccaaggagga

SEQ ID NO: 18268 - RNA, 74 nt, Homo sapiens
cacccaacaggacggcccaaaaccagccgacaaagagggggcccaagaaggcgggcaagcagccaagcccagcc

SEQ ID NO: 18269 - RNA, 71 nt, Homo sapiens
cgcgcgccaaagcgcgccgccccgggcaaaagaaaccacacggagccgcagacacccacaacggaaaacca

SEQ ID NO: 18270 - RNA, 79 nt, Homo sapiens
cgagagccggcgcagcagcaagcccacggaggacccccgcccgaaccgagggaacagggaccccgacggagagacaaag

SEQ ID NO: 18271 - RNA, 75 nt, Homo sapiens
acacacaagcgcaggaaaaagcacaaggacagaccagaagaaacagcacccaggaggggagagaacaaaacaaag

SEQ ID NO: 18272 - RNA, 79 nt, Homo sapiens
aaagacgcaaggcgcgcaagacacccgggcaggagggcaccagaacccagcgggcccaggggcgccgacccaggacagc

SEQ ID NO: 18273 - RNA, 55 nt, Homo sapiens
aagcgccaaaaggcggagcagaaaacaaggaacagcgggggcagaagagacggga

SEQ ID NO: 18274 - RNA, 54 nt, Homo sapiens
cgaacaaagcagccccaaccacacccagaaaaaagcaagagagcccaacaaaga

SEQ ID NO: 18275 - RNA, 65 nt, Homo sapiens
gcgcggggccgcgccgcgaccccacggccgggcaccgaaagaaacccacagccgcgcgcgccggc

SEQ ID NO: 18276 - RNA, 83 nt, Homo sapiens
cggaggagcgcacaaggcggaggacagccccggccgccgaagaggccgccgccaaggcgaccggcccgaggaccgccgcacga

SEQ ID NO: 18277 - RNA, 80 nt, Homo sapiens
cccaaggagacggggcgacgccgagcacgccggacaaggagaggaggggcgccagccggacccggggcgggaacccaggg

SEQ ID NO: 18278 - RNA, 67 nt, Homo sapiens
gagaacaggagccaagcagggagagggaaccagcccagggacaggccccaagagcaagaaagaccag

SEQ ID NO: 18279 - RNA, 94 nt, Homo sapiens
gacaagggcagcccaaggacacaaggaaagacacagacaagggaggcgaggacggacaaaaggaaacggacgggaggccagccagcagaaggag

SEQ ID NO: 18280 - RNA, 54 nt, Homo sapiens
cagagaacggaagacgggagcaacgccaaaaccacagaccaagggaaaaaggcg

SEQ ID NO: 18281 - RNA, 90 nt, Homo sapiens
cggcgcggcagcggagggacggcagccgcgcggagaaacgaggaggaagagaaggaccgaacacagaagaaggaacgcagagaaaccaag

SEQ ID NO: 18282 - RNA, 72 nt, Homo sapiens
gcagccgaggcagggaagcgggacaaggcaacccggaggggggggccaggaggagccccagcacagcagaga

SEQ ID NO: 18283 - RNA, 59 nt, Homo sapiens
aagagagcgagaacaccgcaagcgcagacccaggggagcccaccagccagcaacaggcc

SEQ ID NO: 18284 - RNA, 84 nt, Homo sapiens
gcgcgccgcgcaagcccccaaagggagaggagggggcccaagcacgccacagggagaccgcgccaaggaacgaagcaccccaac

SEQ ID NO: 18285 - RNA, 66 nt, Homo sapiens
gcccccgcccgacgcccggcgcacggggcgcacaccacggcccggggaaacacaaagaagacacca

SEQ ID NO: 18286 - RNA, 74 nt, Homo sapiens
cagcggccacgcgccgggggacggaaaccccacgggggggggcacggagaacaagcagaggaaagacacgccag

SEQ ID NO: 18287 - RNA, 84 nt, Homo sapiens
ggacaccggcgagccccagcagggccccgggccccggaaggccaagagacgcaaggcccacgcggcgccggacgccggggaccc

SEQ ID NO: 18288 - RNA, 79 nt, Homo sapiens
ggaagcgcccggggccggccgccgcgggaccgaggaaaagccgcaccagcagggccggaaagagggcgggcccgcacgg

SEQ ID NO: 18289 - RNA, 64 nt, Homo sapiens
caggcagacaaaagggccaaagaagggagagagcccacagaacaagcccaaccagcggacggaa

SEQ ID NO: 18290 - RNA, 70 nt, Homo sapiens
gcccacagaggccaaggcaagccagagaacacccgccgcgcaaaagggccagagagggacaaggaaagca

SEQ ID NO: 18291 - RNA, 68 nt, Homo sapiens
cgagggaggaacaaagccccaccaaagcagcaggcgcaaaaacgaacccacaaccgaacgacggacgg

SEQ ID NO: 18292 - RNA, 79 nt, Homo sapiens
cgaggagagccggagcggggacccaggagccggccagcgcgccggagccgccgaggaccccagagcaggccccgagaga

SEQ ID NO: 18293 - RNA, 56 nt, Homo sapiens
cgaaggagcaggagcgagaccaacgggagccccaaggccacgaacgacgcacggag

SEQ ID NO: 18294 - RNA, 87 nt, Homo sapiens
cgggcggggcggcggcgacgcggaccgcggacagcgaacccggaggcccgaggaaacacacaccagaagaagaggaagacccccgcg

SEQ ID NO: 18295 - RNA, 49 nt, Homo sapiens
acacacagccccaaagacacaagacgggaaggagggccgccagaaggag

SEQ ID NO: 18296 - RNA, 85 nt, Homo sapiens
ccaggagcggcggccggccgcgggggccccccgccccgccccccggagccgcgagcacccaagacaggacccagaccagccaaag

SEQ ID NO: 18297 - RNA, 75 nt, Homo sapiens
gccccgcaggcccaaccgccgccagcaccaggccagcaccaccggacccacccaggaggcagaaacacgccgcgc

SEQ ID NO: 18298 - RNA, 79 nt, Homo sapiens
gccgcggcccgcgcagcgccccaggccagaaggagcgcccccaggaggaaacaaaggacagcacacgcacgaagcaaaa

SEQ ID NO: 18299 - RNA, 69 nt, Homo sapiens
acgaaaagaagcaagaaggagaagaccacggagacgaaaagcacaggggaacaaagacagcaggacacc

SEQ ID NO: 18300 - RNA, 78 nt, Homo sapiens
gaaaccacaggacgagagccgcggaaagaaccggcccggaaccacgccagcaaagagcgaggcccgggagcgcagccc

SEQ ID NO: 18301 - RNA, 69 nt, Homo sapiens
ggaaacgacgcccagaaaaaggaggaccggacagaagcgaaggaacgggaaaacagcaggaagagcggg

SEQ ID NO: 18302 - RNA, 72 nt, Homo sapiens
cggcaccacaaaagcaccgaacacacccagcggcgacaagcaacaggagggcgaagacaggacggcccaggc

SEQ ID NO: 18303 - RNA, 76 nt, Homo sapiens
agcccaaaccagagcaagggacgaggcacgaggcggggacggacagccaggaccgcgaggcgggcggccgccaggg

SEQ ID NO: 18304 - RNA, 32 nt, Homo sapiens
ccccgccgccccaggaagaaggaagcgaggac

SEQ ID NO: 18305 - RNA, 104 nt, Homo sapiens
acagaaacaggaaacaaagccccggaagcagaccagggaggaacagcggggaccaacagagaaaagccagaggagaagaggaggaggaggaggaagagagagag

SEQ ID NO: 18306 - RNA, 74 nt, Homo sapiens
cgaaccgagaaggaaccagcaaacagcaggccgcagaccaacaaaggggcgcaggccggccaagaaccaggaca

SEQ ID NO: 18307 - RNA, 77 nt, Homo sapiens
gaaggaaagacaaaacaggaagagaagaccgccaaagggacagagcgacaggaccggggaagaaaggacagagcaga

SEQ ID NO: 18308 - RNA, 81 nt, Homo sapiens
cgaggaggcggaggacgagaggaggaaacagcgcggagaccccagacccccagcgcggcacagggcgaagacaggacggcc

SEQ ID NO: 18309 - RNA, 75 nt, Homo sapiens
gcgcccgcgccagcacacgacaccgagccgccgccgaccgagacaacaggcacaaagagagaaggaacacccaca

SEQ ID NO: 18310 - RNA, 80 nt, Homo sapiens
agagaccgacggcggagcaccgccccggcagaagcggcagcaaagcgggcaaaacgccgagcccgagaacgaccccagaa

SEQ ID NO: 18311 - RNA, 78 nt, Homo sapiens
agcacagaagagaagacaagccaaagcaacagaccaaaaacaggcccggcgagccccgcagaaccgagggcaccggag

SEQ ID NO: 18312 - RNA, 59 nt, Homo sapiens
cagaagagcgaaagcgaagcaggaagaggacggggcaaaacggagaggcccggccaaag

SEQ ID NO: 18313 - RNA, 85 nt, Homo sapiens
ccccggggcgggcgcagcaagccgcaccggagaagcgacccgggcacacgcgcaccaggaaggggcccggacccgaagaagcgca

SEQ ID NO: 18314 - RNA, 50 nt, Homo sapiens
ccaagaaaacaggaacgaggaaccagaggaggggaggaaccaccacagaa

SEQ ID NO: 18315 - RNA, 77 nt, Homo sapiens
gagccgacgcggggcagcgccgcaccgaggcagcccgcggcaccgggggacagaaacggacaggcaggggacccaca

SEQ ID NO: 18316 - RNA, 54 nt, Homo sapiens
cacgcggacgcccgggcaacacccccgggaacgagagagcgaagggaaagaaga

SEQ ID NO: 18317 - RNA, 80 nt, Homo sapiens
ccgacccgacgcgccggcccacgcgcggccaaggggacaccgcgcagggggcccccggccccgaagcaggccagcagcgg

SEQ ID NO: 18318 - RNA, 80 nt, Homo sapiens
gacagagaggcaagcgcagggggacggggaccagcagcgcgccgccgcccagggaagaagagggcgggcgggccggccag

SEQ ID NO: 18319 - RNA, 85 nt, Homo sapiens
cagcaacaccagcaaacagggaagagcgaagagagaccgaaaaaagaaagaaaaagaccgagcagggccaggccacagcagagcg

SEQ ID NO: 18320 - RNA, 81 nt, Homo sapiens
ccggaagaagaagaaggaacgcgaacaagagcagacaggcgcgccggagcaagggagagaaacacagcccaaagaaacaca

SEQ ID NO: 18321 - RNA, 53 nt, Homo sapiens
gaagcaaagacggcaagggcagccccaacaggaaggccgggggcagcacaccg

SEQ ID NO: 18322 - RNA, 81 nt, Homo sapiens
gacgaaacaaaaacacacccagggaggcaagcagagcgcggccaagaacagaggaagggaaaaagccgagagaagaacagg

SEQ ID NO: 18323 - RNA, 54 nt, Homo sapiens
cgacggcgacgagcagcaccggcacaggaaggacacagacaaaagaccaggaga

SEQ ID NO: 18324 - RNA, 71 nt, Homo sapiens
acgcccgaggacccgggagcagccaagccagaagaaagagagaagaagcaaaccgggaccggaagcaccaa

SEQ ID NO: 18325 - RNA, 85 nt, Homo sapiens
acaccggaccccggacgcgggaaaggagacgaccccagcaaagcgaccggaagggggccaacccccaacaaggcccacggagccg

SEQ ID NO: 18326 - RNA, 75 nt, Homo sapiens
agacgccgagaccccagagaagagacgcagaccaccaagggcagggcgggcacggcgggagagcagcagaaagcg

SEQ ID NO: 18327 - RNA, 72 nt, Homo sapiens
ccacagcggccaccgccggcgggcaacagggaaccgagaccagagcacaacgaagccagacccggaagcaaa

SEQ ID NO: 18328 - RNA, 71 nt, Homo sapiens
cgcgcgcccgccacggcgccgagccgcggccgagagaaaccagaggcaagcgacgggaaggaccaccaaac

SEQ ID NO: 18329 - RNA, 57 nt, Homo sapiens
gcgccaggaggggggcgacaagggaccaacacgagcggacaaaaacgcggaggggac

SEQ ID NO: 18330 - RNA, 94 nt, Homo sapiens
ggacccaaccgccgggcgcgcagagggcaggacaacacggcccgcacccagccgaagacccagaaaccaccgccgagacaaaagaggaacagag

SEQ ID NO: 18331 - RNA, 61 nt, Homo sapiens
gccacaggggcggcgacggcgcaggcgaagcgaaacaggccacaccaacaagacaagaacc

SEQ ID NO: 18332 - RNA, 76 nt, Homo sapiens
cacaaccgagcaaagccaaacaacccagaaaagaaaaggccaggggcgccgaaaaacccgggaacaaacagggggg

SEQ ID NO: 18333 - RNA, 85 nt, Homo sapiens
ccggggccgccaggcccgggcgcagccgcgcgacgccgagcgcgccgcgagaccccgccccccaggaccacacgggccacagcag

SEQ ID NO: 18334 - RNA, 80 nt, Homo sapiens
caaggccgcccgggaacgcgacgcgagagaaggacccacggcgcgcgaagggaagaacccacgagcaaccgagccagaga

SEQ ID NO: 18335 - RNA, 89 nt, Homo sapiens
cgcggacagagacaacaccgagagagaagggagccacgaagcccccacccacaggcgacagaggcaccgcaccagagggccaacaccgg

SEQ ID NO: 18336 - RNA, 72 nt, Homo sapiens
aggaaccagaacgaaaagcgccagaaagacgccaggcggacggcgccccgccggggcccggcccccgggcgg

SEQ ID NO: 18337 - RNA, 71 nt, Homo sapiens
ggcacagaagccaaaaagcagcggacgaaggaccaccaaccaaagacagaacaagcgagggaggcggcggg

SEQ ID NO: 18338 - RNA, 54 nt, Homo sapiens
gagccccccccgagaaacgagacagagcaaaaggcagcaggcgcaaaaacgaac

SEQ ID NO: 18339 - RNA, 70 nt, Homo sapiens
aggcagggcaaaccagaaagacgcgagacgacgggaccgaaggaccccgccagagacaaccgagcgccag

SEQ ID NO: 18340 - RNA, 61 nt, Homo sapiens
gaaggcccgcgccgggcgcgggcccagccaaggagaccgggagagagacgaaggacgcgca

SEQ ID NO: 18341 - RNA, 71 nt, Homo sapiens
gaagacacaaacagcagggagaagagacaacaagacaggcgcgcacagagcacaccccgggagcccacccc

SEQ ID NO: 18342 - RNA, 84 nt, Homo sapiens
gcgcccagcgccgccccgcgcgcgcccgccacggcgccgagccgcggccgaaagagccagaagcagcaggaccggcggaggagc

SEQ ID NO: 18343 - RNA, 79 nt, Homo sapiens
gggccgaccgggcgcaccgaccaggccccaaagccccaaggcgacaagaccggaccgaccccgcgccggcagccccccg

SEQ ID NO: 18344 - RNA, 82 nt, Homo sapiens
gcaagaccaggaccccccaagggccgcagggggcaccaccacgaggcgaggggccaaccaaggaggcgaggggccccccgac

SEQ ID NO: 18345 - RNA, 75 nt, Homo sapiens
ggcagcgggccagacccaggaccgcgacacggccacccccaaccaggaccaaagacgaccaccaaagccagcccc

SEQ ID NO: 18346 - RNA, 72 nt, Homo sapiens
gacaaagaagggacaacacaacggcacccccggaagacgcaaacacaaggaaggaaccaaccgaggcagaaa

SEQ ID NO: 18347 - RNA, 79 nt, Homo sapiens
gaacgcaggacccaaagcggcgaaaaacgggggagcgaagacggggaaaccgggcgcccccggaacccggagcacggca

SEQ ID NO: 18348 - RNA, 41 nt, Homo sapiens
cgcaaacacccccagacaaagccgccgccagcgcgcacgca

SEQ ID NO: 18349 - RNA, 39 nt, Homo sapiens
caaaaccgcccaaacaggaaaggaacagacgaggcacaa

SEQ ID NO: 18350 - RNA, 78 nt, Homo sapiens
ggaacccggcccccagggccacggcagcgggcgcgaggcacggaggccggaaacgggccaccgaggcccaaggagccc

SEQ ID NO: 18351 - RNA, 74 nt, Homo sapiens
ccccaaacacccaaagaaccacaagcccacagaccaaaaacgcaagaacccagacggagggaagcgagaacgca

SEQ ID NO: 18352 - RNA, 75 nt, Homo sapiens
ccaaagcccaaaccccaggccaagcaaccaccagcagcccccagagcggaacacaggaaaggaaacagacagcgc

SEQ ID NO: 18353 - RNA, 87 nt, Homo sapiens
gcgaggacagggcagccgcggcgcgcccaccccccgcgccgaaacaaagacagagggagaggaacaaaagaagagaggcagccgcac

SEQ ID NO: 18354 - RNA, 73 nt, Homo sapiens
gaggcggccccagcggccgaaaggagagaaggcggagcaggcaggccgaaaggccccgaggggaagagcagcg

SEQ ID NO: 18355 - RNA, 52 nt, Homo sapiens
aaacagcaagagaggaaggcagggaggaaaagagaaaagacggaggcggagc

SEQ ID NO: 18356 - RNA, 69 nt, Homo sapiens
gggcaaggacaagaaaaagcaacaggaagggcgacgaaagccaaggagcggaaacccaggagcgaaaaa

SEQ ID NO: 18357 - RNA, 80 nt, Homo sapiens
ccagagagcggcagagggaagaaaagacaaggggacggcgaagagagcggagaggaaccagaggaccagagcaggcccgc

SEQ ID NO: 18358 - RNA, 81 nt, Homo sapiens
ggagcgcggggaccccaagaaacagaagccacaggcgaagaaggccaccccaggaaaacaaacaaacgaaaacaggcaaaa

SEQ ID NO: 18359 - RNA, 81 nt, Homo sapiens
acaagcccagagacggcaacagacgaacagaggcaaaggcccagagggaggcacaacagcgaggacaccaccgagccccca

SEQ ID NO: 18360 - RNA, 75 nt, Homo sapiens
ccaggacacccaggagacccccaagaacagaagacgaccaccagacacccggaggacagagcgggagccaccagc

SEQ ID NO: 18361 - RNA, 87 nt, Homo sapiens
agggggccggccgggacgcggcccggagccgggaccgggccagaagcccccaggaggagaacgagcaacggaagccagaagaagcac

SEQ ID NO: 18362 - RNA, 80 nt, Homo sapiens
acgcgccagaaacaggaccagggggggcaggaaacgcaaccggacagaagaggaggcaaggaaagcccaaaacccagaga

SEQ ID NO: 18363 - RNA, 75 nt, Homo sapiens
ccacagaaaaggccacgacccaccccgaagagcaacggaaccagcgccgagcgaagacaacagagcgccaaggcg

SEQ ID NO: 18364 - RNA, 104 nt, Homo sapiens
gcggggaagggcaaaggaacagacacggaaggcgaaggcaggaaaaacaagacacaacaaccgaccagcagagaaagaagagaacaagacgacagaaaggacgg

SEQ ID NO: 18365 - RNA, 69 nt, Homo sapiens
aagccagcgacagaagccaggaggccaggagcacagaaacacccaccaggagccaagcagaagagaaaa

SEQ ID NO: 18366 - RNA, 84 nt, Homo sapiens
ggagaggagcagaaggagcaaaaggcggacaggcagaaaagcagcacgaagcaaaaacccacacaaaaaaagagggagcgaagc

SEQ ID NO: 18367 - RNA, 76 nt, Homo sapiens
cgggcggaagacaggccacccagcggggagcacggcgagcagccaggccaggagagggaaacacaaagaagacacc

SEQ ID NO: 18368 - RNA, 84 nt, Homo sapiens
accccggacacgggaggcgcacgccaggaccgacgggaaggaagagagaagggcacagaccaagacaacgaaccccggccagga

SEQ ID NO: 18369 - RNA, 84 nt, Homo sapiens
gccgccgccagggcgcagggccgggccgccgcgcaccgcagcgccggggcacgacacaaaaacaggacccagacagacggcacg

SEQ ID NO: 18370 - RNA, 111 nt, Homo sapiens
gacggaacggagaaaccggcagggaagggcagaaggagggccacaaagggcaaagagggggagaccaccgagcagaaaaaccccagaaaagacggggaaagaacccaggac

SEQ ID NO: 18371 - RNA, 55 nt, Homo sapiens
caggacgggggcaacgccagcggacccggaggaacgcaggaagcgaacggacggg

SEQ ID NO: 18372 - RNA, 69 nt, Homo sapiens
agcgggcagcagaggagagacggcggaaaagcggacagccaagcaccacagaaggagcacaacaggcag

SEQ ID NO: 18373 - RNA, 37 nt, Homo sapiens
ggaagggccgaggaagcgaaccaacggcccgggacca

SEQ ID NO: 18374 - RNA, 81 nt, Homo sapiens
ggcgccaggagaagagcaggagacgcggggcggagcggagaacgagggggacgcaggcccccgcgcaccagacagagaagg

SEQ ID NO: 18375 - RNA, 79 nt, Homo sapiens
ggaaacccagcggcccagccggggcggaaaacaccccaaaagccaaaagggaaaggaaaagaccaacaacagcgcagga

SEQ ID NO: 18376 - RNA, 72 nt, Homo sapiens
agcgggaagggacaaaacagaggcaacaagcccggaccgacaggaaagaaggagcccacaaagaaaagaaca

SEQ ID NO: 18377 - RNA, 77 nt, Homo sapiens
cgcccggacagggaggcacaagaccagaggacaagacaaagggagcaagacaagccaaagaggaaaagcaaagccca

SEQ ID NO: 18378 - RNA, 65 nt, Homo sapiens
ggggaaggaagagaggccgaaacccaagcggccgcgcaggccaggcagagcagcccaccagggag

SEQ ID NO: 18379 - RNA, 65 nt, Homo sapiens
agaagggaggccaccggaaagcaccccacgaacaaccacaggaagagacacacaagaaacaaaac

SEQ ID NO: 18380 - RNA, 75 nt, Homo sapiens
gccaacgcggagcaacagccgggcgcgcgggagccgagcggggcgaacgaccccggccccccaccacccaacccc

SEQ ID NO: 18381 - RNA, 73 nt, Homo sapiens
aggagagaagagccagcagacagggagcgcagaaccagcccagccgaaagagaccaaaccagagagaaaggga

SEQ ID NO: 18382 - RNA, 80 nt, Homo sapiens
caggcagaagcagacccggccggccagcgcaccaggcaaggcgagaacgggaagcgcacaaggaaacccacaccacccag

SEQ ID NO: 18383 - RNA, 88 nt, Homo sapiens
agacggccgcggcaaggcaagagcggcggcgccaagggaagaaccccacagacgaaaccggagggcagagagcgaggccccggggccc

SEQ ID NO: 18384 - RNA, 59 nt, Homo sapiens
agggccaaagaagggagagagaccggaccgcacaagcagcagcagcggcaccaagcgcg

SEQ ID NO: 18385 - RNA, 73 nt, Homo sapiens
aaacaagaacaggaccccaagccgaaagcagacacaggaaaggagaacagaacgcagacacgaagcaacgcag

SEQ ID NO: 18386 - RNA, 64 nt, Homo sapiens
agcggaacgggagcaagggggaaacagcagcacagacagacaagaggcagccaggcagaccaca

SEQ ID NO: 18387 - RNA, 59 nt, Homo sapiens
aagcaggcaagcgaaaacgcgagagaaggaaacaagaaagggacgcggggccaagacag

SEQ ID NO: 18388 - RNA, 72 nt, Homo sapiens
agagagggaaccacaaccccaccagcaggcaacaggaagaagaacccacaggggccaacagaggaaggaaca

SEQ ID NO: 18389 - RNA, 72 nt, Homo sapiens
gagcgaacggccggacggagcaccagaccgcaacaggagcagacggagaaagagaccacgagcccgaacagg

SEQ ID NO: 18390 - RNA, 65 nt, Homo sapiens
aacccggagaccagaagaaccacaaagccaagacgcaagcgcggagagagcacaggaacagagcc

SEQ ID NO: 18391 - RNA, 63 nt, Homo sapiens
ggaacccggcaccgccccagaacagccaggccgcagacagcacccaccgcccagcaggcgacc

SEQ ID NO: 18392 - RNA, 63 nt, Homo sapiens
caacaacccagagccggaacgggcccagaagaccccaaacagacaagcgggaacccaaccgaa

SEQ ID NO: 18393 - RNA, 78 nt, Homo sapiens
gagggccgcgggacggcggggggcacccgaggaggaagagggcagggcccacggaaagaagggaaacccggggagaaa

SEQ ID NO: 18394 - RNA, 78 nt, Homo sapiens
cacaccaacgcgcaaaaacaacagacagcccagcgcaggaaagcaggccgggaacgccacacaacagggccccgggag

SEQ ID NO: 18395 - RNA, 74 nt, Homo sapiens
ccgaaaaaggaaaaacagacaccgaaagccccaaaaaacaaccaggggaggcaagcaggggggcaaaggaaaga

SEQ ID NO: 18396 - RNA, 95 nt, Homo sapiens
gaccaaacaggacacaccaccaagagaggacgagagaacggaacaccagaggcaccaccgccaaaggggaaagaaaaaaacagaaaccagggaac

SEQ ID NO: 18397 - RNA, 71 nt, Homo sapiens
gacaacccggcggaccaagccgcgggaggccggcccggccacccccgggcccgcgccccaggcgagagccc

SEQ ID NO: 18398 - RNA, 55 nt, Homo sapiens
cgacccggcgcccccggcggggcaagcacggaacaggaaaaccagagacccagac

SEQ ID NO: 18399 - RNA, 66 nt, Homo sapiens
cgacaagagaggggcccggcaacgaaaagacagcaaggggacggaagcacagagagaaggaaagcc

SEQ ID NO: 18400 - RNA, 78 nt, Homo sapiens
aacccggggacccagcccccccagcagccaaagaagagcagaggacggccggacacccaacagcacgcagacaaggca

SEQ ID NO: 18401 - RNA, 79 nt, Homo sapiens
ggccgaccgcggccgccacgcgggccgcgggcccgcgcacgccgcggccgaaaccggaccccgagcggcggcgacggcg

SEQ ID NO: 18402 - RNA, 80 nt, Homo sapiens
gaagaaaccagccgaaccagggccaccgcgcaagaaccggggagaccacgacgcgccccgggcgccagagccgcagccca

SEQ ID NO: 18403 - RNA, 68 nt, Homo sapiens
gagcggaaagaggaggagaggggaggaggcgaaggcccaggcccaggcccaaggccaaggagagagcc

SEQ ID NO: 18404 - RNA, 71 nt, Homo sapiens
aagagcacaccaaaacccagacagcaccggacccagagaaagacacgaggaccaaaacagggaaggaagaa

SEQ ID NO: 18405 - RNA, 94 nt, Homo sapiens
ggagaccgagaagcgagcacaaaaagaaagaagagaaccagagagagagaacccgagcgccgcagcggagaaagaaggaacgagcaagcaaccc

SEQ ID NO: 18406 - RNA, 71 nt, Homo sapiens
gacccccggcagccaggcgcaccagagccgaagacacaaagcgcaagaggcagcagaccggaagaaaaaaa

SEQ ID NO: 18407 - RNA, 70 nt, Homo sapiens
gaagagccagcgccaaggcggaaaagcccaagaaacaaacagcgacgcaccagaaacggaccgaggacag

SEQ ID NO: 18408 - RNA, 81 nt, Homo sapiens
aaagaagcgcagcggaggaaggcgagggagacccagggagaaacaccaggaagacaggaagaaaccccagccacaaaagac

SEQ ID NO: 18409 - RNA, 76 nt, Homo sapiens
ccccggaacgggagcgcaggaaggcagcaagaaacagaccgaagagcaagaaacacgagaacagcacccacaaaac

SEQ ID NO: 18410 - RNA, 85 nt, Homo sapiens
cagcgcgagccgggaaggggcgggccccggccagggcccaggcagccggggcggaacccccagacagcacgcgacaaagaacacg

SEQ ID NO: 18411 - RNA, 80 nt, Homo sapiens
gaacgcagccgagccccgggggagacggagggcagccggaagaccacagcagccaagggcaaggagcagaagcgaaacca

SEQ ID NO: 18412 - RNA, 77 nt, Homo sapiens
ccgggcgcgccgcaccccagcagcacccaagcaggcgaaccacgggaacaaaggcgaggacaaggagggcaggggac

SEQ ID NO: 18413 - RNA, 84 nt, Homo sapiens
gcgcggcggaggacgaggaagaggggcgaggcagaccgccccgggccgcggccgccgaggccccgggggccgcggcccggcccc

SEQ ID NO: 18414 - RNA, 83 nt, Homo sapiens
gaaccggagcccgagccgcgcaggaagaggacaccagcccgggagaagaggcaacacccgagcggggcccgaaaacgcagaga

SEQ ID NO: 18415 - RNA, 98 nt, Homo sapiens
ggggcccgcaacccccagcagcacggggaaggaccggacccggcccgggagcaaaggaagacaaaaaggaccaagagccgaggcaagagaaaaacgca

SEQ ID NO: 18416 - RNA, 65 nt, Homo sapiens
cccggaggccgggaagacggcaccaggacaagcgagggagacacgggcggaagccgagaagagcc

SEQ ID NO: 18417 - RNA, 67 nt, Homo sapiens
aaagaaaaagacccggcaacggaggcaaggcgaaaaacaacgccgcaggcaaagcaagagccacaac

SEQ ID NO: 18418 - RNA, 68 nt, Homo sapiens
gcacgacggagagccgacccgacacgagccaagaaaagccccagaccagcggcgccggagcaccggag

SEQ ID NO: 18419 - RNA, 69 nt, Homo sapiens
ggaggggccgggaaggaaaaccaggcagaggaaagaccccaaagcccccacccaggaaggaacaacccc

SEQ ID NO: 18420 - RNA, 59 nt, Homo sapiens
aggagcagcccgggcaccacagaaaagagaaagacagcacaggaagggaccgccacaaa

SEQ ID NO: 18421 - RNA, 72 nt, Homo sapiens
ggcaaaaaagaaacgcaagcacaaaaggaggaaggacgcgcgcaggaggaacggaaggaggcaaacagccag

SEQ ID NO: 18422 - RNA, 80 nt, Homo sapiens
gaggaggaacggacaagaagacagaaaccgggggaaggaacaaagcagagaaaccaaaaggccagacgaacacgagaggg

SEQ ID NO: 18423 - RNA, 56 nt, Homo sapiens
caaacgggcagggccaggaaacaagacgaagccaaaaaaagcagggaggagaagcg

SEQ ID NO: 18424 - RNA, 106 nt, Homo sapiens
ccagcgccaccaccacgccagccgcaccagccgcccaagccgcacagccgcggcggcagcagcaggagagcgcagacgggacacggccggccaggagcggccgcac

SEQ ID NO: 18425 - RNA, 79 nt, Homo sapiens
aggacagcaagcccacccgggaacgcgcaagagaccagagaggaggcgaggaccgccgcaccccaccgggcagcaaggg

SEQ ID NO: 18426 - RNA, 68 nt, Homo sapiens
ggccagaccaagagaacagagaagagccaaacaaccaagaggccaacccaacagaagcgccacacacc

SEQ ID NO: 18427 - RNA, 79 nt, Homo sapiens
ccaccagaggcagcaagggacccccggagaggagacccggaagacaacaagaagacgaccccgacgcaggccaggagcc

SEQ ID NO: 18428 - RNA, 72 nt, Homo sapiens
cggagcagggcgaccaagaacggaagagaggaggagaacaccggacacagggggccagaagccaagccgagc

SEQ ID NO: 18429 - RNA, 68 nt, Homo sapiens
ggaagcagcccgccgagccccggaacaggacccaggagcgacaccgaacccacgacccacggaccagg

SEQ ID NO: 18430 - RNA, 55 nt, Homo sapiens
gccacaacagggcggcaacaggggcgagaaagggccccccgggccgggcacgggc

SEQ ID NO: 18431 - RNA, 81 nt, Homo sapiens
ccaccgaggaccggccccagcagcacaagaccagaagagggggaaccgacacgcagcaacaaggagacgggaagcacagcg

SEQ ID NO: 18432 - RNA, 79 nt, Homo sapiens
gacacccaagagggccaagccagaaaacagaaacgaaacagaacagagagaagcccaaccagaggacaacacaaggacc

SEQ ID NO: 18433 - RNA, 82 nt, Homo sapiens
cgcccgcccgccggccgcggccgggaaggcgcagccggagagccggagaggaggaaggagaagcccgggagcgcgcgggccg

SEQ ID NO: 18434 - RNA, 76 nt, Homo sapiens
caagccaacgcagaacaacgagacgaacagagaagaacgaaacagaagaacggcagggcggaacgaaaggagcgac

SEQ ID NO: 18435 - RNA, 74 nt, Homo sapiens
gagcagccccaaggaagaacgaaacccaaacggcccacggaagcaggaggcaaggaagacaccggccaaccaag

SEQ ID NO: 18436 - RNA, 33 nt, Homo sapiens
gcagaccagcccaggaagggccgaaccccaccg

SEQ ID NO: 18437 - RNA, 82 nt, Homo sapiens
cgcacccagggcacagcgcgggagccgcacgggccaaggggcaacgaggaacaggccaagaaacaacacagccaaggccagc

SEQ ID NO: 18438 - RNA, 73 nt, Homo sapiens
gccgcccgggccagcggccgcgcacccccggccggaggcaccagcggaaagggagcagcaccggccacaccca

SEQ ID NO: 18439 - RNA, 76 nt, Homo sapiens
agcgcccagccgccgcccgcgcccgcggccggggggagggagcaacgcgagccaagcagcaggccccaaaaaggag

SEQ ID NO: 18440 - RNA, 55 nt, Homo sapiens
gccgcggcccaaaagaggaaacggggacagccagacagaagagaagcaaggaggg

SEQ ID NO: 18441 - RNA, 78 nt, Homo sapiens
cagaccgaaggaaggacaccgccacaggccccgagaggcaaaaaaccggcgccaggagagaagagccagcagacaggg

SEQ ID NO: 18442 - RNA, 86 nt, Homo sapiens
caaaaaagcaggccaacaagacccaggcggaaccaagccccagccggagaaggagcccacaacaaccacagaaacgaaaagcacca

SEQ ID NO: 18443 - RNA, 72 nt, Homo sapiens
ccgcgacaaagcaggcagacgcaaggcagaaaagcccggccccagcaccaacagcccggggaggccacagcc

SEQ ID NO: 18444 - RNA, 68 nt, Homo sapiens
cagccccgccccacgccggcagccccacgagggacaagagaaaaaaagggcgggcgaacaaaaagagc

SEQ ID NO: 18445 - RNA, 77 nt, Homo sapiens
ggcagggagcacacaagcaaagacgggccaccagacccaccaggcccaggcgagagcgggaagagcacccacaagca

SEQ ID NO: 18446 - RNA, 71 nt, Homo sapiens
ggaacaccggcgagcccgggcggggccggcagcaccgcggccgcagcaccccagaaggcccgcaaagaaca

SEQ ID NO: 18447 - RNA, 75 nt, Homo sapiens
cgccgcggccgggcaacgcggagaagacagaggagccagaccaagagacagcacaggcgagcgagcagagacacc

SEQ ID NO: 18448 - RNA, 97 nt, Homo sapiens
ggcagggcagcagaagcgcaccccgacgccgaggaacgagagcgcgaagcaaggccacagacaagagagccccaggccaaccacggacgcaggaccc

SEQ ID NO: 18449 - RNA, 75 nt, Homo sapiens
gccgccagccccgaggcagaacccaggaacaacccagggcccggccaggccccaccgccacaagcaggggaacac

SEQ ID NO: 18450 - RNA, 73 nt, Homo sapiens
cccaaccccccacaaagaagggacagcccccgaagaaaggaaacaggggcgccccaccagagacgaggaggaa

SEQ ID NO: 18451 - RNA, 79 nt, Homo sapiens
aggacgacagaaaaagacagcacaggcggacacggcggccaacacagcaagaccaaagagagggggccacggcacccag

SEQ ID NO: 18452 - RNA, 78 nt, Homo sapiens
aggcaccgcggagcaaggagccacgccgagcccaccgacaagcagaccggaagaccgacggaagaccacaccccgagg

SEQ ID NO: 18453 - RNA, 65 nt, Homo sapiens
acagaagcaggcccggaccccgcgcgcaaaagaacaggcccccacagagagcacacaaacaaagc

SEQ ID NO: 18454 - RNA, 87 nt, Homo sapiens
aggacgagaacagcaacagggcgaggaggcccgaggaggcagaggaggaggagggaccacaagccacaaggaaagaagacgaaggaa

SEQ ID NO: 18455 - RNA, 60 nt, Homo sapiens
gaagacgccgcccccagagggcaagaacacagaaacgccccgggccagccgccaaggccg

SEQ ID NO: 18456 - RNA, 67 nt, Homo sapiens
gaagcccagcacgcgcagggagaccagcaaccagacaccaagacagagagaagaagagcccccaagc

SEQ ID NO: 18457 - RNA, 75 nt, Homo sapiens
gcgaaacgaaagaaagacggaccaaaaacaggaggaagcccagggaacggcgagacgagagggacaggagcgagc

SEQ ID NO: 18458 - RNA, 75 nt, Homo sapiens
agaagggaggacggggcccacagcagacccggacccccacaccggagcagggccacgccgcagcgcagggagcaa

SEQ ID NO: 18459 - RNA, 79 nt, Homo sapiens
caccgggcgggcgaaacgacccggcgcggccgcccgagggcccgagaccacgagcggaggcggaccagcacagccaggg

SEQ ID NO: 18460 - RNA, 105 nt, Homo sapiens
ggaccagcgacaaggagcgcagcagcagaaagcaggacagccccagggagcgcccacgcggaccaggcggcaagcagcacccagccaacgcccccagcgccaccg

SEQ ID NO: 18461 - RNA, 78 nt, Homo sapiens
cggaggcaggagaagagacgggacgaggaggcgaaggaccgccccgccaggaaccgaaggggaaaacgagacaacgaa

SEQ ID NO: 18462 - RNA, 69 nt, Homo sapiens
aggcagccgccagggcgaagacaccaaaccaccagaacagaaaggcaccaaaccaccagccagagccac

SEQ ID NO: 18463 - RNA, 76 nt, Homo sapiens
cccacgccacgacggaccaaaagggaaggcccacaagaaaacaaaaacacaaaaaagaaaacggggaagaaacgaa

SEQ ID NO: 18464 - RNA, 74 nt, Homo sapiens
cgggagggcgggcgcaggcggagaaggccccggccccagagggcaccaaacgcgaacaagaggcgccagcgggc

SEQ ID NO: 18465 - RNA, 83 nt, Homo sapiens
ccccccgaggcggcaccaagaggcccgggcgcgggcgcgaagaagaggcgcagggcccccagacccgcacgggaacagcgacc

SEQ ID NO: 18466 - RNA, 72 nt, Homo sapiens
ccggaagagggccggagacccagagccgggaccccaaaggaaacgagagagagaccacgggggcccgacgag

SEQ ID NO: 18467 - RNA, 64 nt, Homo sapiens
acacaggaagcgccgaggggaacgaagggagagcccgcggggcacacgccccgcccaccaacac

SEQ ID NO: 18468 - RNA, 76 nt, Homo sapiens
gaaaaagaacagacaccacagcagaaggaagacaacagaagccggccaaagacgagccaacgagagaagcagagaa

SEQ ID NO: 18469 - RNA, 73 nt, Homo sapiens
agaccacaggcagaacggagggcacaagccaaaaagcacaaagaagggaaaaagcccacaaaggcaaggaaag

SEQ ID NO: 18470 - RNA, 55 nt, Homo sapiens
ccggccgcgcaccgcccagcgagccgggcagagaaagcaagagacgcaaccgaac

SEQ ID NO: 18471 - RNA, 76 nt, Homo sapiens
acacaccaccagacgaagaccgagcggccagcacagcccaaccagaaccacaaccagacaggcgccaccccagagc

SEQ ID NO: 18472 - RNA, 64 nt, Homo sapiens
ccgcgcgggcggggggacaacaagccacaaccgcccaccaccgaaggggacacgcgcccaccag

SEQ ID NO: 18473 - RNA, 74 nt, Homo sapiens
gaccaagcccagagaagagaagcacgggccagcccaagccccacggcccgcccaaaagaaaaccggcaccgaaa

SEQ ID NO: 18474 - RNA, 82 nt, Homo sapiens
gagcgcaaggcgccaaccccgaacggggggagacgccacggaacgcagaaaacaacagacgaggaagaagcaccaaaagcac

SEQ ID NO: 18475 - RNA, 86 nt, Homo sapiens
ggccaaccgccacgacagcccaccaggccaccacgcggcgggccggacaacacaaagagggaggccagccccggcacagaggcacc

SEQ ID NO: 18476 - RNA, 76 nt, Homo sapiens
ccagaaagacaggagcgaaaacccacgcaggaggaggcgcaaacgggcgcaaggcgccaaaacaagagaccgcaga

SEQ ID NO: 18477 - RNA, 117 nt, Homo sapiens
aagcagcagaaggaccaaacaaggccaaacggaggaaacccgagcaacccaggccagccacacacagaccacccccacgccggccccgcgagccccggccgggacacagcgggcgga

SEQ ID NO: 18478 - RNA, 63 nt, Homo sapiens
caagccacacacggcggggccccggaggacgagaggggacgccagaccgagagaaacaggcca

SEQ ID NO: 18479 - RNA, 48 nt, Homo sapiens
caacgacgaagaagagacacagaggacccaagaagaccagccgaagcc

SEQ ID NO: 18480 - RNA, 57 nt, Homo sapiens
cggacaggacagaaacacgggaccaacagaggaaccgggccgggcagagcgagagag

SEQ ID NO: 18481 - RNA, 66 nt, Homo sapiens
cccggggacccccgacgccaggcagcgcccccaaacgagacagcagggaggaaacaacaaggacca

SEQ ID NO: 18482 - RNA, 77 nt, Homo sapiens
gcccgaacccggaggaggcgaccgcggcgcagcgacccccgccaggcaaaaggaagcacaccccggagaacgaccgc

SEQ ID NO: 18483 - RNA, 64 nt, Homo sapiens
aggcgagcgcgggcgaaggggaccacgggagaggaggaagagacccacagaagaagcagagcgg

SEQ ID NO: 18484 - RNA, 81 nt, Homo sapiens
cgagggccgggagcccgcaccgggccggcagaccaaaaagggcagccgcagaagccaaaggaagccccacaaaggcccagc

SEQ ID NO: 18485 - RNA, 80 nt, Homo sapiens
gcagccccgcgccggaggcgccagcgcccacaccagccgcagaagccgccccggggcggcagccacgcagcccggaggag

SEQ ID NO: 18486 - RNA, 32 nt, Homo sapiens
gaacgcggaggacacagaagagccgcgcaaga

SEQ ID NO: 18487 - RNA, 73 nt, Homo sapiens
gcaggccgggcggggagagagaagaaacagcaaaacacaaaggcaagaaaagcaagcgcaaaaaagagaggac

SEQ ID NO: 18488 - RNA, 79 nt, Homo sapiens
acgccccgagccacgacacaacacggagcaggaggcagcagggaggagagcagaaggccaggaaggggcaaggggcggg

SEQ ID NO: 18489 - RNA, 79 nt, Homo sapiens
cgccggagcaccgcggccgacgcgccgagcgcacgcccgaacgcgaggccaacagccccgacaccgcacccgaagagcc

SEQ ID NO: 18490 - RNA, 72 nt, Homo sapiens
acgccaaggaagaagaaagacacgaggcgacgggacggaggaaaccgcgggacaaaagagagagaaaagaga

SEQ ID NO: 18491 - RNA, 76 nt, Homo sapiens
gcagcaagaggcgcggcaagacacacgacgcaaacgccaggggcagagcggccccaaaaaaggacagagaaggcgg

SEQ ID NO: 18492 - RNA, 52 nt, Homo sapiens
acccaaaaagcaaaaaacgcccacaccagagggaccaagaaaggcccaggga

SEQ ID NO: 18493 - RNA, 71 nt, Homo sapiens
ccgacgaacacggggacaccaacaggacccgaaaaaaacagaggcgggaaacacggcaaacccccaagaaa

SEQ ID NO: 18494 - RNA, 60 nt, Homo sapiens
caagagcggccgggaacacgcccagagagcacaggaaaggagcacagcaagcgggagcag

SEQ ID NO: 18495 - RNA, 87 nt, Homo sapiens
ggaaacggagccagcggcgaggaggggccccagcagcccccgaaggcccacaggacaggagagaaagacgcaacgcaaccagaggac

SEQ ID NO: 18496 - RNA, 72 nt, Homo sapiens
cggacaacaaccggccgcggaggcgccaggagggcggcgggcgaggaggccgcggacgaaagaagaacaaca

SEQ ID NO: 18497 - RNA, 79 nt, Homo sapiens
ggccaccggcggcaagccagaacccaacaaggaggccagggcggccagggccaggccgagggcccgcccggccccagga

SEQ ID NO: 18498 - RNA, 70 nt, Homo sapiens
ccccaacggcggccgccgcacacgcacacgagacagaggacagagggaagaaagagccaaacaggcgaga

SEQ ID NO: 18499 - RNA, 72 nt, Homo sapiens
aacgggggcggccgggacggaggacgcgcagaggaagacggggcccaaagaggaagggggaaaggaccaaaa

SEQ ID NO: 18500 - RNA, 76 nt, Homo sapiens
ccggggcacagacaaggagccaggaccccggaccagcaggggcagcggcgccgcaagcacgcgagcggccagacgc

SEQ ID NO: 18501 - RNA, 83 nt, Homo sapiens
gcgagcgggccggaggaaaagaaagggagaagagcaaccggacacagaaggggaaggaaaccccaagcagcagaggggcagcg

SEQ ID NO: 18502 - RNA, 78 nt, Homo sapiens
ggagagacgaaccgaagcgggcgggcccccccacccagagaaaccaggcgagcggaagaagcaacgaccaagaggagg

SEQ ID NO: 18503 - RNA, 74 nt, Homo sapiens
cacccggccccaacggaacagacccgggaagccagggagaagaggagccacgagaggacacaaaccaccgagcc

SEQ ID NO: 18504 - RNA, 71 nt, Homo sapiens
acggcacaagcaacgggagagcgggaaggcgcgacgaaacgaagaaaccagcaaccaaccagaacacccga

SEQ ID NO: 18505 - RNA, 102 nt, Homo sapiens
gcaacaaagagaaaccaaggagagcaaacaggaaaccaggccgagagaagaaaaagacccaagaaagcaacgaaaggaacgcaagaacagaagaagaaagca

SEQ ID NO: 18506 - RNA, 116 nt, Homo sapiens
accggacccggaagcggcagcgaggagacccggcgccgccaggccgacgaaaagcccaaggccgcaggagggaagcgcacggaaaccgccccgggaggcacagagcaggagacgcc

SEQ ID NO: 18507 - RNA, 84 nt, Homo sapiens
cggaaacggcaaggccacaaaccaaacagacagaggagccaggcgggaaagaggagagccgacaaagaacccgagaggacggag

SEQ ID NO: 18508 - RNA, 81 nt, Homo sapiens
gaggagcgccgcccggccgccccgcgagaaggaggagaccccgccggcaaccaccccgcgaaaaagccgacccagaggaac

SEQ ID NO: 18509 - RNA, 73 nt, Homo sapiens
acccgacaccccgcgacgggccgccaccacgcggccacaccccacgcaggagaagcacagaacaaaagaagca

SEQ ID NO: 18510 - RNA, 66 nt, Homo sapiens
ggccaaagagcggaaaggcaaaaggacaggaagcgacccggaaccgggaaaccaggcaagaagcaa

SEQ ID NO: 18511 - RNA, 85 nt, Homo sapiens
agggagaaaaggccacagaaaaagaaaaggggacaagcgaggcccagccccaggagagcagcagaggcggccaacaccgccagcc

SEQ ID NO: 18512 - RNA, 104 nt, Homo sapiens
ccggaggacacggcagaagcccaagcagacgaagagccccccacagagaccccgggaggcggagcaccccccagcgaggacccacggacgcgggcagcgcgcag

SEQ ID NO: 18513 - RNA, 73 nt, Homo sapiens
aaacgcaaaaggaggccaggaaggaaacagccagggagagaacagcacacagaggcgcaaggggaagagaaaa

SEQ ID NO: 18514 - RNA, 76 nt, Homo sapiens
cgcgacgacagagcagccacacaacacgaaccagaggaccacggggccaaagggacgaggcagcccgggcagcaca

SEQ ID NO: 18515 - RNA, 60 nt, Homo sapiens
aacgggggaaagagaagcacggcccgacacccaaggacaaacacccccgggccggggccg

SEQ ID NO: 18516 - RNA, 86 nt, Homo sapiens
aaagcagaagaacggggaagacgacagagaggaggggggaggagagaaccagaggccggaaaccaggacggacaaccaccgaccgg

SEQ ID NO: 18517 - RNA, 77 nt, Homo sapiens
caggcagaccagacggccaaaacaacccgcagccagagaaccaggagcggcagaccgccgccaggaggaggcacgca

SEQ ID NO: 18518 - RNA, 69 nt, Homo sapiens
cgcagccccaggcagggacaaaggaaaaagaggaggaaaacagcagggacgaacaaaagcgagaggcgg

SEQ ID NO: 18519 - RNA, 71 nt, Homo sapiens
cacggccacgccccccgcaacaacccacaagacccggaccaagggagacaagaagggagcagccacacggc

SEQ ID NO: 18520 - RNA, 81 nt, Homo sapiens
cgcggacggagaggaaagcggaggaacccgaaaaaggacacaccccaaccaaagagcacagggaggagcgcagaaccgacc

SEQ ID NO: 18521 - RNA, 72 nt, Homo sapiens
cagggccagcgcagaaaacagggaagaaagccaaaggaagccaggccacgaaagccgggccagagcaaaggc

SEQ ID NO: 18522 - RNA, 66 nt, Homo sapiens
aacccgcgggaccagaagccgcacgcacgcaacccccaggcgaaagaaaccagaggagaaggagag

SEQ ID NO: 18523 - RNA, 38 nt, Homo sapiens
cccaacgggcccgcaggccgccgaccgaagcggagcag

SEQ ID NO: 18524 - RNA, 78 nt, Homo sapiens
accggggaagcccacaaaacaccagagcgaccaagaaggagagcgacagcccaagcaccaggggcacaccaagaaaac

SEQ ID NO: 18525 - RNA, 74 nt, Homo sapiens
agaacgcgggaggagacaggagaccgcccccccacccgccaaaggaagcccgaggccccaccagaagcagagcc

SEQ ID NO: 18526 - RNA, 82 nt, Homo sapiens
cgagaaggaggcccagcagcccaggggaaaggaacacccccagcggccagcgccacgcagagccccgccaggaagacacgcc

SEQ ID NO: 18527 - RNA, 73 nt, Homo sapiens
aagcccccccggcacgacaccgccccaacccacgagaggacagcccagacaccaaaagcaccaggaaaaacag

SEQ ID NO: 18528 - RNA, 78 nt, Homo sapiens
gaaacaagaaacccaaccaaacagcaaaaggccgcaccagggagggaagaggggaaaggagcagccaaagacgggcag

SEQ ID NO: 18529 - RNA, 65 nt, Homo sapiens
agaaggaccaagaaccaggaccgagcaccgagacagaagacacccaagagacggacagagcacag

SEQ ID NO: 18530 - RNA, 85 nt, Homo sapiens
agagaagcaggaaggaggcagaggcacaccgaaaggcccccacgagacagcccaggcaaaaaagaaaaacaagcacacaagcaaa

SEQ ID NO: 18531 - RNA, 73 nt, Homo sapiens
cgaggcgcccggcccaccaaggggaggcaggcgcaagggaaagacaaggagccgggccgagaaaccgaaccag

SEQ ID NO: 18532 - RNA, 78 nt, Homo sapiens
ggggagacgaagaaggcagaaggagccacggcagcgccaacgaaacaaacgcgaaaaccaccccgggcgggcagaacg

SEQ ID NO: 18533 - RNA, 63 nt, Homo sapiens
ccggaggccacaccaccaggaacccaaagcccaggaaagagggaaggaaggcaagaacaaggg

SEQ ID NO: 18534 - RNA, 37 nt, Homo sapiens
cagccacgggaccggcgcaggcggacaacggggaccg

SEQ ID NO: 18535 - RNA, 47 nt, Homo sapiens
ggggcgggggcaagggcgcccgcgggaccaagaaaaggagaaaagac

SEQ ID NO: 18536 - RNA, 80 nt, Homo sapiens
ccagaaccgaccacaccgggcaagaggacccagaacccgaggacgaaaacgagagaagaaccccgcgcaacaacaccaaa

SEQ ID NO: 18537 - RNA, 73 nt, Homo sapiens
cgcccgcggcggcggaggcgcaggcggggcgagggcgcgagaagaagcacccaaggagcagcagaagggcccc

SEQ ID NO: 18538 - RNA, 98 nt, Homo sapiens
ggaagacggacacacggcgggcgacacgcgggcgcggcacccggcaaaggaagacgagcaggagcacgaaggggagaaaagggaaggccccaagccaa

SEQ ID NO: 18539 - RNA, 76 nt, Homo sapiens
cggaagcaacggacggcaaaaccccgcgacaggagcacggcagcagggggcaagcgcgagaagagcggcgcccaca

SEQ ID NO: 18540 - RNA, 73 nt, Homo sapiens
caccggcaccagagcagggagccggcgccggaacccagggaacccggacaaaggcggggagaccgggcccgga

SEQ ID NO: 18541 - RNA, 68 nt, Homo sapiens
cgacggcgacgagggcgccacacgggccagggcagggccacccaggggagggacgcgcacaagagaga

SEQ ID NO: 18542 - RNA, 82 nt, Homo sapiens
agcgcgcacccgcacccgcaggccgagggacggccaagaagcgcaagaacggccgagcgaccaggagaggagcccccgcccg

SEQ ID NO: 18543 - RNA, 67 nt, Homo sapiens
cgaacgaggccggcacagccaaggggggcacacagaaagaggaacaaaccaggggagggaaacgaga

SEQ ID NO: 18544 - RNA, 71 nt, Homo sapiens
cccacagagaggaccggaggaccgccacaccaccaagcacaggagggccaggagcagacccgacccagaag

SEQ ID NO: 18545 - RNA, 75 nt, Homo sapiens
aaccagcccagggcggcggaggaacacgaggacccaaagaacaaacccggagagaagaaaaccccagcagggcgc

SEQ ID NO: 18546 - RNA, 52 nt, Homo sapiens
caagagcgccccaagcaaggaagcgacagagccaaagcagacccccaagcga

SEQ ID NO: 18547 - RNA, 71 nt, Homo sapiens
cgccgaaacggaaagcccaagaggagacgaccacaggcacggccaagagagcgaggccaccaggacacccc

SEQ ID NO: 18548 - RNA, 77 nt, Homo sapiens
ggggcggcggcaacgagggaaagggacgaacgcacggacaacacggaaaccaggacacagagaccccaaggccggcc

SEQ ID NO: 18549 - RNA, 77 nt, Homo sapiens
ggggagcaccgccgagcggccgcgcggcaccgcggcggcccccgggaagacggcgccgcgcccggggagacagaaac

SEQ ID NO: 18550 - RNA, 64 nt, Homo sapiens
gaggagaagaaggacacaagaacacaggcgggagaggaagacgagccagagaggcaccaacaca

SEQ ID NO: 18551 - RNA, 45 nt, Homo sapiens
gaacacagaggaaaccgcaccgcccggagaaaccccaaacacggc

SEQ ID NO: 18552 - RNA, 78 nt, Homo sapiens
agccgccacccagagcgcacggcgacgccccaggggaaaacccccgggaccagacgagccaaaccaggcgaccgagca

SEQ ID NO: 18553 - RNA, 68 nt, Homo sapiens
cgacggcggacccgcaggcccgggaaggaccgggaagccagggaaggaggagaaagccggcggagaac

SEQ ID NO: 18554 - RNA, 64 nt, Homo sapiens
ccaaggagccgccaaagccagacgaagccccgaaggacaggaccgcaggggggaaaaacaccag

SEQ ID NO: 18555 - RNA, 72 nt, Homo sapiens
accggagccagccccagaaaccagaaccgagaagcagcccgggaggagaaaccaacagaccccaccagaaac

SEQ ID NO: 18556 - RNA, 83 nt, Homo sapiens
gcagacgcgaccaagcaggacaccagcgaaggccagcagcgggcgcaggaaggccaccgacaggaaggaggcagcacggcagg

SEQ ID NO: 18557 - RNA, 81 nt, Homo sapiens
cagaagcagggcgaaccagagaaaacggcaaggaagcgagagagagagggagggagccagcccgacggcagggcgcaggaa

SEQ ID NO: 18558 - RNA, 70 nt, Homo sapiens
gaaagacgacccgccggcccaccaagaacccagagacgggccaccagagaacccaggagccgcagacgac

SEQ ID NO: 18559 - RNA, 73 nt, Homo sapiens
aagaggccaagagccaagaggcagagacccgcaccgccagaacacaaagcaggcaggaccaaccgcaaagagc

SEQ ID NO: 18560 - RNA, 76 nt, Homo sapiens
cacccaggccaggaggaagcgaagaaagagccaaaagaaagcaaagcgcagaaagggagaaccgcaacagaaggag

SEQ ID NO: 18561 - RNA, 58 nt, Homo sapiens
accccaacgggccaaaggaacaacaggaaaacaaccggcaggacaacaacagcagcca

SEQ ID NO: 18562 - RNA, 66 nt, Homo sapiens
ggagcggaaaaagggaaaggaagaaccagaagacaacaaaggaaccaaaagcaacgacgggagccc

SEQ ID NO: 18563 - RNA, 67 nt, Homo sapiens
cgcgcgaggggacagaagcagcggaaccggaagagaccgacccaaacccacccaagggcaggacggg

SEQ ID NO: 18564 - RNA, 86 nt, Homo sapiens
agcaaacccagaagaaagcgaaaacaaccgcgaccagcagagggagagagcgagacagcagacagaagcaacccaacgagagcaaa

SEQ ID NO: 18565 - RNA, 61 nt, Homo sapiens
cgccaccgggaggggacggcccagccccagcgcggcccagagggagcccaggcggcaggag

SEQ ID NO: 18566 - RNA, 82 nt, Homo sapiens
agaaacagaaaagaggagaaaagcaggaccccagacacaccaagaaggccacgaggcccagggaacccggaccacagaacca

SEQ ID NO: 18567 - RNA, 56 nt, Homo sapiens
ggccagccagcaacgcaaaacaagaaggcgccaacacaagaagagccaaaaccagc

SEQ ID NO: 18568 - RNA, 79 nt, Homo sapiens
agcgcggccagaccgcggggcacacaccggcccagagggaggcacaacagcgaggacaccaccgagcccccaccgcggc

SEQ ID NO: 18569 - RNA, 67 nt, Homo sapiens
cggaaaagagcaccggccgcaggcagaagacagccacacaggcacccacccaggccaacgaggagga

SEQ ID NO: 18570 - RNA, 84 nt, Homo sapiens
ccagccaggcgcacgacaaccacagccaccacgagagagagcggagacaaggccacagcaggccacggcgggggcagccagcca

SEQ ID NO: 18571 - RNA, 67 nt, Homo sapiens
aggcagaaggacaaggaaacagagacccaggcgacagacagccacaagggcaaaagagacggacaag

SEQ ID NO: 18572 - RNA, 67 nt, Homo sapiens
gccggccaccagggccagcccaagcgcagcgcgcggaaggggagacccgcgcagcaaccaggagagg

SEQ ID NO: 18573 - RNA, 61 nt, Homo sapiens
aaggacggcagggaaggaaccagacggccccccgagcccgacacccacgccagcagcccac

SEQ ID NO: 18574 - RNA, 76 nt, Homo sapiens
cccacaaagcaaaaggaaggaaaagaaagaaggaccccaaggaaagaacgagcccgacccaggacaggacccagcg

SEQ ID NO: 18575 - RNA, 103 nt, Homo sapiens
ggagggcggcccggaccgggagacacggccagacgcccccaagagaagaagaaggaggccgcggccagaaacccaagaaaaagcgaaggaacgcagagcgaag

SEQ ID NO: 18576 - RNA, 68 nt, Homo sapiens
ggaaggcggcagcacgcggccaacagaagagaccgccgacaaaggacagagaccagggacagaagggg

SEQ ID NO: 18577 - RNA, 76 nt, Homo sapiens
gccgacgccaggccgagcaccagccgggacgcggggaccggaacagacgagaagaggcgaacggaagcaacacccg

SEQ ID NO: 18578 - RNA, 70 nt, Homo sapiens
gggacggccgggaccaccagagggaaagcggggcggcaggggaggcagaagagagccggaggaccgaagc

SEQ ID NO: 18579 - RNA, 81 nt, Homo sapiens
ggacgcggggacgccgcggccccaacgcgccccgggacgcacacggcaccaaacagccaaggagcaccaggaagaggcaac

SEQ ID NO: 18580 - RNA, 77 nt, Homo sapiens
caggagcgacgcgggcgcacgggagcccaacacgcggcacgagggccggcccgcgggcagaggacccagaaggaaac

SEQ ID NO: 18581 - RNA, 79 nt, Homo sapiens
cggccagcgaaaacgcccaggagagcgacgcaggggaggacagggaacggcgaggagccaccgggacggccggccccca

SEQ ID NO: 18582 - RNA, 128 nt, Homo sapiens
ggggaagcaccaagagggccccacaaccaaccgccaggagcggcccgaaaacagggcggaaaaggggcccacagcgggcaggagcagggcaaccagcccccaacaaccccagggcccacagggacgag

SEQ ID NO: 18583 - RNA, 55 nt, Homo sapiens
cccccgagcaggggcgccagccccgaaagaccccaaaggaaacgagagagagacc

SEQ ID NO: 18584 - RNA, 69 nt, Homo sapiens
gggaagacaagacaaacacacaaaagggaacagcgcagggaccccaggaagaggaggcaacagccgcca

SEQ ID NO: 18585 - RNA, 70 nt, Homo sapiens
caccgacaaaacaagcgagaggccagaggcccggggcagaaacagcagacaagacaacaggccgacagag

SEQ ID NO: 18586 - RNA, 83 nt, Homo sapiens
caggcggaggcgaggcgagacggaggccaagcccggcagcagcacggacaggagcacaacaggaccaacccacagaggaccag

SEQ ID NO: 18587 - RNA, 50 nt, Homo sapiens
gaaagaaaccgggaccacagaaccgggcgaagcgaggaacaaggcccaaa

SEQ ID NO: 18588 - RNA, 66 nt, Homo sapiens
aaaaccagcgggcggccgcgcccccaggacacaagaaagcaggagcccggaaaggagaaggaaaag

SEQ ID NO: 18589 - RNA, 63 nt, Homo sapiens
cccaagacgaacgccccgcagggagaaacgcaaagaaaggaccaggaacaccagaaggccaaa

SEQ ID NO: 18590 - RNA, 74 nt, Homo sapiens
aaagaggaacagcccagaaccaccgaagaaagcaagcagggaaaggaggcccagaaagagaaacacgccccagc

SEQ ID NO: 18591 - RNA, 62 nt, Homo sapiens
agcgcaccgcgcgggacaagcgccggcggcgcccgacggagcagggaccggggaaaagcggg

SEQ ID NO: 18592 - RNA, 76 nt, Homo sapiens
gagcgcccggggccgggaaaaccagagacccagacacgcgaaggaacgaaaggccaaaaggcaaaagacgacggaa

SEQ ID NO: 18593 - RNA, 80 nt, Homo sapiens
cgggcgggaggaagcccggaaaacacgcgccaggaccagcgggccgcaggggaccagcggggacaaggggacggcgaagg

SEQ ID NO: 18594 - RNA, 64 nt, Homo sapiens
aagaagaagccacggacccgcggcagaaggagagcaggggccaggagggccgaagcccacagcg

SEQ ID NO: 18595 - RNA, 74 nt, Homo sapiens
ggcaaaaggcggaccgcccccgccaacgaagaccgagaccaggaacaggaggcccggacccccagcacaagcgc

SEQ ID NO: 18596 - RNA, 77 nt, Homo sapiens
accgagaccgcggccgggaccgaggggcacaggcagaagcaagaagagacagaagggaggcacagaagaggaacagg

SEQ ID NO: 18597 - RNA, 75 nt, Homo sapiens
gacggagcggccggggccggggcgccgccgggcggccgggcgcggcgagcccagggaagcccagaggcacggggc

SEQ ID NO: 18598 - RNA, 32 nt, Homo sapiens
agaccagcaagacacacgaggagcgccgagcc

SEQ ID NO: 18599 - RNA, 69 nt, Homo sapiens
acagacgcagggcgcccccgacccgggaagaggcccgcgcagccccaccaggggagggggaggggggga

SEQ ID NO: 18600 - RNA, 73 nt, Homo sapiens
gaagaggcaccaggccagaggagcaagaggggggggcccccccgaagaaaggaaccggggagcggcgaaaaaa

SEQ ID NO: 18601 - RNA, 83 nt, Homo sapiens
ccgccccgggagcggacaagagcaacagccccccaccaggccggcggcccaaagcacagcaggaacgagcaaggcagacaaaa

SEQ ID NO: 18602 - RNA, 77 nt, Homo sapiens
cggagcgccaagcccggccaaaaagagggaaaaccccgaccaaaagaagcaggacacaggagaagcgagaacaacac

SEQ ID NO: 18603 - RNA, 82 nt, Homo sapiens
gagcgcccgcgacagaggagggaggaaaacaaccgagggcagaacccagcgggaggaagaagaggccgccagcagcagagca

SEQ ID NO: 18604 - RNA, 61 nt, Homo sapiens
aagcccaacaaagccccacagcagccagaaggaaaggagcagacgccccgccagaccgaag

SEQ ID NO: 18605 - RNA, 57 nt, Homo sapiens
caaaaaaggccagaggaggacagcacgagagcccccagacaggccaacaagggcccc

SEQ ID NO: 18606 - RNA, 55 nt, Homo sapiens
cagcccaaggacacaaggaaagacacaggggcgcggggggccaccaacacccccg

SEQ ID NO: 18607 - RNA, 81 nt, Homo sapiens
gaggacggagaagggggcggcgagggccggaaccgagggggagaggcaccagcaacagaccaaccgcagcaagcacagaga

SEQ ID NO: 18608 - RNA, 52 nt, Homo sapiens
acacgcccacgaaacccagccagccaaggccgcgccaacccgacgacccgcc

SEQ ID NO: 18609 - RNA, 66 nt, Homo sapiens
gaccgcgcagcgcgggaggcaggccgcacgccaggaccggccaggcaggcagcacagggaacaaga

SEQ ID NO: 18610 - RNA, 73 nt, Homo sapiens
aagcaaggccggaagaagagcgcagagcgaagaagaaagaagaacagaacggagccccacaccaaaagaaaaa

SEQ ID NO: 18611 - RNA, 73 nt, Homo sapiens
cggcagccccgacgcagccgggaaggccacgagcggcacaggacagaaccgcaaacaacggagccagaaacgg

SEQ ID NO: 18612 - RNA, 94 nt, Homo sapiens
gcgcggggcggcgcgccccccccaggcccgccgcccccgccaagagcggcgggaggggaaggagcagccacccgggcagaaaggccgggcgaag

SEQ ID NO: 18613 - RNA, 36 nt, Homo sapiens
acgagaagagagcaaagaccaggaaaagaaggcgag

SEQ ID NO: 18614 - RNA, 67 nt, Homo sapiens
gagccaacgccaggcgccgcccacagggacaagagaaaaaaagggcgggcgaacaaaaagagcagag

SEQ ID NO: 18615 - RNA, 79 nt, Homo sapiens
gcacagaaaacaaagacacaggaaaacggaagaggaagcagaaaggcaaggagagagacaccacacaaaaaggaaggag

SEQ ID NO: 18616 - RNA, 75 nt, Homo sapiens
aagccaaacgaccaaagaaaacgcaggagcaacaagaggcccaggagggcggggcagagcaggggccggaagcac

SEQ ID NO: 18617 - RNA, 77 nt, Homo sapiens
ggcccgggagacacacagcaggggagaggggaaagaaccagacgacaggaaggcacagaacgaagccgcagaagcca

SEQ ID NO: 18618 - RNA, 69 nt, Homo sapiens
ccggcagcaggggcccaaggggagggacagcaacagaccagcgagagcggaccccagccggccgccgga

SEQ ID NO: 18619 - RNA, 73 nt, Homo sapiens
aagacggcaaagccccccagaagaccaggaagagagaaggccacgcccgaccccaagcaacaacggggcaggg

SEQ ID NO: 18620 - RNA, 70 nt, Homo sapiens
cgggacccgcagggcaaaggggggaagaacaaggcgaagagacgacgcgggggggaacccccacagcccc

SEQ ID NO: 18621 - RNA, 62 nt, Homo sapiens
aacgcgacggaaaggcacgaaagccagaacccgagcaaccccgagaagagaagaaccccaag

SEQ ID NO: 18622 - RNA, 67 nt, Homo sapiens
gcaagggggccgaagcaaccagccgggccgggggccccaagaagcgaccacgcccgcagcggaagcc

SEQ ID NO: 18623 - RNA, 61 nt, Homo sapiens
cagaacccaacccggaccagccccagaacgggaagggcaaaccggcggccagaaccgaagc

SEQ ID NO: 18624 - RNA, 74 nt, Homo sapiens
agccgggggccacgaccagcacgggccagcccgacacagaccaccaaaagccagggccaggacacacggacgaa

SEQ ID NO: 18625 - RNA, 89 nt, Homo sapiens
agccaccggagggcgaggcgggagggcccgcagaaccggagaacgggaaggacaagcggagcgcgcgaccccccccaagacacacggac

SEQ ID NO: 18626 - RNA, 81 nt, Homo sapiens
cccggacaccgacgcgccacgcggagcccggcagggccgcgcgaagcggcccccgaggccggaaaggagcgcagcgcgggc

SEQ ID NO: 18627 - RNA, 79 nt, Homo sapiens
ggagcagccgaaggcgaccaagacgcggcccaagggcccggcggcgcgagcaggaaggcaccagacacgaaagagcaga

SEQ ID NO: 18628 - RNA, 80 nt, Homo sapiens
aaagaagagggcacgacgagaacgggaaccgacagaagccaggaccccagagagggccaagcccaagaacaaaaaccgaa

SEQ ID NO: 18629 - RNA, 88 nt, Homo sapiens
cgacacggcgggcaggaaaccaccccgcgcaccgccgcaggcagaagccccagaggagcccgaaacccccaggcgggcaggaaggaga

SEQ ID NO: 18630 - RNA, 40 nt, Homo sapiens
gaggaggaggaagagcagaaggcaccaccacagcgcccac

SEQ ID NO: 18631 - RNA, 72 nt, Homo sapiens
ggaagagcagcaccggaccagcggagcggccggagcccagaccgagaaccgggggaacgcgggcgccggaac

SEQ ID NO: 18632 - RNA, 38 nt, Homo sapiens
cgcggggagcgggacacgaacggagaggggcgcaggcc

SEQ ID NO: 18633 - RNA, 32 nt, Homo sapiens
aacccgggccccgccagcggacgggccccgaa

SEQ ID NO: 18634 - RNA, 66 nt, Homo sapiens
ccgagcaaaaaagcggcacccaagagaaaaggagaacggagacaggccaaaacaaaggggagggag

SEQ ID NO: 18635 - RNA, 78 nt, Homo sapiens
cagcgcgagccaggacccgggcacgcagacgcagcaggagggaagcgcgcagacgggcaggcgcgcggggggcgaccg

SEQ ID NO: 18636 - RNA, 55 nt, Homo sapiens
ccggggcgggacgcacccccgcggcccccaacccagggacacggagcgccgagca

SEQ ID NO: 18637 - RNA, 53 nt, Homo sapiens
ggagaacgggaggcgggaacacaagagaagcgaggggaccagaagaaggagaa

SEQ ID NO: 18638 - RNA, 78 nt, Homo sapiens
gccgcccaaaggaaaaagggcggaaaagcggggaaaggaccagagagaacccacagagggaagaggcccaggcgggaa

SEQ ID NO: 18639 - RNA, 60 nt, Homo sapiens
gcggggaggcggcgcccgaccccgccaggagagaaggaaccggacgacgaacacaggccc

SEQ ID NO: 18640 - RNA, 73 nt, Homo sapiens
gaccaagaaccagaagcccgagcccaggccccacgccggcacacaacccaacgggagacccaacccggagcag

SEQ ID NO: 18641 - RNA, 58 nt, Homo sapiens
ccaccggacaacaccgccccagcccaccagacaagcgagaccggaaagaagggagacc

SEQ ID NO: 18642 - RNA, 77 nt, Homo sapiens
agaagcagcgcggcggccacacccggagaggacggaaggccagcgccgccaccaagggaccgcgagcacaacgcagc

SEQ ID NO: 18643 - RNA, 48 nt, Homo sapiens
agcccaccacagacacaacagcccggaagacgaaagagggcagggaca

SEQ ID NO: 18644 - RNA, 81 nt, Homo sapiens
caagaagacggacagcggggacgaggcggacgacgaccggccaacaagggcaagaaggaacagacaaaaacggccggaagg

SEQ ID NO: 18645 - RNA, 80 nt, Homo sapiens
acgccgcaacaaaagaaacccgggccgcggaaggcccgaagaaccccgagagccccgcccacaaaagccgaggacggggc

SEQ ID NO: 18646 - RNA, 58 nt, Homo sapiens
agcagaacaaacggccaagaagggccaccccacagacgagcccggagagggaaagaag

SEQ ID NO: 18647 - RNA, 71 nt, Homo sapiens
gcacgaagcaggaaagaacgacgccagggagcacagcccgggagaggaaagcgcgcaggaagaacgagaaa

SEQ ID NO: 18648 - RNA, 77 nt, Homo sapiens
ccggaccaacgcggcccggacaaaacaccacgcgcagccacaccccggccgcgggcgcaaacaaagaaaccccaccc

SEQ ID NO: 18649 - RNA, 62 nt, Homo sapiens
aaccagcagcccccaggcaacggcgaagcaagacgaggaaaacgccccggagggcagagaca

SEQ ID NO: 18650 - RNA, 83 nt, Homo sapiens
accacaacgccgcggacgaccgcacgggcaggcagcggaggaggagaaagagaggacccccggaccggcccgagggccgcggc

SEQ ID NO: 18651 - RNA, 72 nt, Homo sapiens
aggcaaggggcgcaggaagggccccaggagggaagcgcaagccaagaaggacagcaggagcacaaaacaaaa

SEQ ID NO: 18652 - RNA, 74 nt, Homo sapiens
gcacacagacagccgacaaacacaaagcaaccaccaaaagaagcggagcagcacagaaccccaaagccaagccc

SEQ ID NO: 18653 - RNA, 51 nt, Homo sapiens
aaggaaagaggggaaaggagggagaaaacgggaaacggaaaaagagcgcag

SEQ ID NO: 18654 - RNA, 63 nt, Homo sapiens
aagaaggggaacccgcgcccaccaggcagcaagagagggaaaggaaaggcaaaccgacagaag

SEQ ID NO: 18655 - RNA, 52 nt, Homo sapiens
cacacgaggagccgaaaaggaaaacccgacaaagggaaccgacagaacggag

SEQ ID NO: 18656 - RNA, 61 nt, Homo sapiens
ccccaagagcgggaccacaggacacccacagggaaggacaagaggaggcagaggcgaggaa

SEQ ID NO: 18657 - RNA, 73 nt, Homo sapiens
ccagcgaagcggagcagggcagacgggaccaggcacagcacacaacaaccccacaggaccagcaccaaaaaac

SEQ ID NO: 18658 - RNA, 36 nt, Homo sapiens
gcagagggcggagcggcaggcacaacaaaaccaaga

SEQ ID NO: 18659 - RNA, 90 nt, Homo sapiens
gcccgggagcagcgcgaaggcaggagggcggcgccgccgaggcccagagcgccagccccaaggaaggaagcccagacgccgggaggcagg

SEQ ID NO: 18660 - RNA, 61 nt, Homo sapiens
ggagaaggcgcaacgcggcgcggaccaagaaaggcccagggaccaaagcccggacaaggcc

SEQ ID NO: 18661 - RNA, 72 nt, Homo sapiens
cgccgaacccaccacaacacaccagaagaagccgacggcaaccgaaccgccaggaaaggcaaaaagcaaaga

SEQ ID NO: 18662 - RNA, 74 nt, Homo sapiens
cgcgcgcggaacagggccgccaggggcccccccaggccgcccgcacagggggcacgaagaaagcaggacgagca

SEQ ID NO: 18663 - RNA, 37 nt, Homo sapiens
ggaacagccaggggcccacggagaaggcgggggcgca

SEQ ID NO: 18664 - RNA, 104 nt, Homo sapiens
gcgaagaagcgggacccgggaggaagcagagagagcgggagacgagacaacagggaaagccaaaaacgacacgaaaacacagccggcccgacagaaaacaagca

SEQ ID NO: 18665 - RNA, 78 nt, Homo sapiens
caaacggaggcaaggggcacaagccaacaaaccccacgcggccagaagacgaggagcgccccacaaaaccaagcgagg

SEQ ID NO: 18666 - RNA, 44 nt, Homo sapiens
aagcaacccaaggcagaggggacgccgccagccaccggcgcgaa

SEQ ID NO: 18667 - RNA, 81 nt, Homo sapiens
caggagcgaggccgggaccggagcaccggcagacccggggaccgggaaggcacaccacagcaggagggcacccacagaccg

SEQ ID NO: 18668 - RNA, 73 nt, Homo sapiens
gaagacaggaagaggccaccgcacccgcagaaaccaaaacaagggacagcacccaagaaaacccaggccgcga

SEQ ID NO: 18669 - RNA, 57 nt, Homo sapiens
cggacagcagcgcaggcaaaaaacaggcaaagcgaaggcggagcaggagaaagcggc

SEQ ID NO: 18670 - RNA, 67 nt, Homo sapiens
cagcaaccaaaaggaccaaggagccggaggacaaggaaaaagaggaaagcagaaagaaacccgcgga

SEQ ID NO: 18671 - RNA, 78 nt, Homo sapiens
gacccaaaaggcgcagggcgaagcggagaagcacggagcacccggaagcagagcaggagcggcgccaagcccaggcgg

SEQ ID NO: 18672 - RNA, 77 nt, Homo sapiens
ccaagagagagggcccaaggaagaggaggggaggcaacacgaccccgagagaaacggcgagaaaaccaaacaggagc

SEQ ID NO: 18673 - RNA, 57 nt, Homo sapiens
caggggggggcaaacccgagagaacggaaaagcgccaggcaggcaggaaagcgccgg

SEQ ID NO: 18674 - RNA, 63 nt, Homo sapiens
gaccgagagcccggaccagcagagggccgacgaccagagaggacaaccaaaagcaccgaaccg

SEQ ID NO: 18675 - RNA, 80 nt, Homo sapiens
caccggccaggccaacggaggacccgccgcccgggggcgccccccccaccccaggggccacacagcgcccagacgggagc

SEQ ID NO: 18676 - RNA, 72 nt, Homo sapiens
aagcagcaagaggacaaggagaaggacggggggcagacaggagcccaagccaggacacggccaaggccggcg

SEQ ID NO: 18677 - RNA, 60 nt, Homo sapiens
caaaaagaacgaagcacacacagcaaaccagccggcgggcgccacaacggacgacgaaaa

SEQ ID NO: 18678 - RNA, 61 nt, Homo sapiens
cgcacaccaagcccccagaccagaacagaaagaccggaaacaaccgaaacacggaacaaag

SEQ ID NO: 18679 - RNA, 73 nt, Homo sapiens
ggggccacgagacgcggaaggcggaccccggcagcaagcaacagagcgccaagcccccgcaccaagggggcag

SEQ ID NO: 18680 - RNA, 106 nt, Homo sapiens
gcaccgacccagccggcagagccacgcgacgcacaacccgagacccgggaggcagccggcacccgcacaacccagggggccgaacccagaccaacaaaaggacccc

SEQ ID NO: 18681 - RNA, 82 nt, Homo sapiens
gggaccccaagaaggagggcaggaggacaagacacccggaccgaagggcggcacggacaacaccgaccgaggacaagacgcg

SEQ ID NO: 18682 - RNA, 75 nt, Homo sapiens
gcccaggagcgccacgcgcggaaggcagcgcccagcagcgcagggacagaggacgcgaaaggccaaaaaccgcag

SEQ ID NO: 18683 - RNA, 71 nt, Homo sapiens
caccagcgaagcagaaggagaggagaacggacacagccaaggagcccaaaaagaagcagcagaagccggcc

SEQ ID NO: 18684 - RNA, 80 nt, Homo sapiens
agcgagggcccgcccccgcaggaccagaaggcacacaccggagaaagacagcaaagaaaaggagaagaaaggaaaaaaac

SEQ ID NO: 18685 - RNA, 75 nt, Homo sapiens
gagcgagggggggcgcgccggaaaccggagcgcgcagcagggaaagggagcagcaccggccacacccacagcacg

SEQ ID NO: 18686 - RNA, 56 nt, Homo sapiens
ccggacggggcggggggaacggacgcccaaaacagacacagggccaaaaacccccc

SEQ ID NO: 18687 - RNA, 56 nt, Homo sapiens
aagacaccccagaccaacccgagaagaacgaggaaccccagagaggacagaagcca

SEQ ID NO: 18688 - RNA, 83 nt, Homo sapiens
ccacgcaagaacgcagcagcaggcagcaaccggcccaaggagagaagagacgaggaggaggggagaccgcggcaggacacgag

SEQ ID NO: 18689 - RNA, 56 nt, Homo sapiens
cccaaacagcggcgcacggggcacaacagggaagagaccgggagccggcaagagcc

SEQ ID NO: 18690 - RNA, 74 nt, Homo sapiens
ccgggcgccgccccagcggagggcagccccgagccaggcccgccgccgagcgaggcagaagacggggcaaaccc

SEQ ID NO: 18691 - RNA, 64 nt, Homo sapiens
agcgggaccacccgggcacagcaggcacggaggaagcccggggcggcgacggagcacgacccaa

SEQ ID NO: 18692 - RNA, 65 nt, Homo sapiens
caggaggaggacagaagcggaagcagcagcggaccagaacaggagacagcggagaaagagcccgg

SEQ ID NO: 18693 - RNA, 58 nt, Homo sapiens
gggaaaggcagaagggggaagaccaaaagacagcgaacccacccaacacggcaaaaca

SEQ ID NO: 18694 - RNA, 85 nt, Homo sapiens
cgccagccgccgcgcccacagccagcagcgggaccgacgagggcgaggacaccagacaggagccggagcgacacacggggagagg

SEQ ID NO: 18695 - RNA, 79 nt, Homo sapiens
agggcgggggcaaagcggagaccggaggaggcccggggaccagaagaggaggggcgaggaacaccggcacaggccgcga

SEQ ID NO: 18696 - RNA, 79 nt, Homo sapiens
gcgaagaggagggggcgccccagaccaggcacacggaagggcccggggcgggaagcgacccagcaaaaagccagcccgg

SEQ ID NO: 18697 - RNA, 75 nt, Homo sapiens
gccaaacaacggcggaaagcagggccagagaaccccaacaagcacaccccagacagagggacaccgggcccagac

SEQ ID NO: 18698 - RNA, 77 nt, Homo sapiens
gcagcgagggcccggcgaggagaaccaacggcccgaaagaggaacaacggggaagcgagagaccgaaacggagccga

SEQ ID NO: 18699 - RNA, 91 nt, Homo sapiens
aacggagcaacgcaaggcaggcaacaagcaaagcccagacaagccagggaacgaagggcccaccccaggaggaagcggggacagagaagcc

SEQ ID NO: 18700 - RNA, 74 nt, Homo sapiens
agcggacaccagaaagacggaaccaggaagagagacgacgggcaacagacagcgaccaagaacccaaagaaaaa

SEQ ID NO: 18701 - RNA, 82 nt, Homo sapiens
ccaccacaggcacagaagaacgcagcccaggcaggagggaaggaaacgaaaaggccaaggaacgaacgacaaagccacaaga

SEQ ID NO: 18702 - RNA, 76 nt, Homo sapiens
aggcaggacgacagcagcagcagcgcaccccaggggccgccgcacgccaacaggggaagcgaagaggaggcacccg

SEQ ID NO: 18703 - RNA, 81 nt, Homo sapiens
cgcaaaccaccaaaaacaacacccagaaagagggaaagagcaccgaaaccaggcggaaacacggcaggcaacccacgcggc

SEQ ID NO: 18704 - RNA, 76 nt, Homo sapiens
gaccccggccgcggggccaggaagcggaggagccccggaggcagagcggcgccaggaaaaggaagggaaaacaaga

SEQ ID NO: 18705 - RNA, 84 nt, Homo sapiens
acgaggacaggacagagcccccgaggccccagaacaccgaacaccgcccagccaagggggagggcagcgccaaacagcgcaaag

SEQ ID NO: 18706 - RNA, 81 nt, Homo sapiens
aagggcgagggcacaaaaaaccacaccccccaccgaggaagagcgggagaaaggaaagcaccgggaggaaagagagccaca

SEQ ID NO: 18707 - RNA, 65 nt, Homo sapiens
aagcggcccggagaccggaggaaagaccgaaaacacggagaaggggcaacgcccccagcccccca

SEQ ID NO: 18708 - RNA, 59 nt, Homo sapiens
cccagcacagagggggacgccccaggaagcaggccacaggacaccgcagcccaaggcac

SEQ ID NO: 18709 - RNA, 73 nt, Homo sapiens
gcgccggcgcaaagaagcccaagccaggacggaccccaagcaagccgggcgccaacccccaacccacgcgggc

SEQ ID NO: 18710 - RNA, 78 nt, Homo sapiens
agacgcggcgagacagcacaaccggcagccagaaaagacaggaccccggaggaaaagcggaagcggcagcggcgaacg

SEQ ID NO: 18711 - RNA, 74 nt, Homo sapiens
agagacaagacaaaagacaagagcgcaccggccgaggagacagccagcacaacaaccaagacaggaccccggcc

SEQ ID NO: 18712 - RNA, 86 nt, Homo sapiens
cgaccggaagagacagagagagccaaacccccaggcacaggaaacccagcagcgccggacccgggaagaacgggagccaagggaca

SEQ ID NO: 18713 - RNA, 66 nt, Homo sapiens
gccaaaaaggaaaaccgccaaggaccgaccccaaacgcagcacagaagcagggaacagcggccggg

SEQ ID NO: 18714 - RNA, 77 nt, Homo sapiens
gccaaccccaaacaagaacagaaaacgggaagagagggaacacgcaggagggagagcaccacgaggaccgccccgag

SEQ ID NO: 18715 - RNA, 70 nt, Homo sapiens
ccccgcaaggggcagaaccgggagcggccgccgggacaaaggcaaggacgggccacgaggcaccggccgc

SEQ ID NO: 18716 - RNA, 32 nt, Homo sapiens
cgcaggagggccacaggcagaacaagcagaac

SEQ ID NO: 18717 - RNA, 59 nt, Homo sapiens
gaggacgggaggaccaagagagggggaggagcgggcagcacagcccagcgcaagccaag

SEQ ID NO: 18718 - RNA, 69 nt, Homo sapiens
ggcgagaaaggaaaagaaaagcacagggagcgacgcacccccaaggccaaccaagcagaaccggaggca

SEQ ID NO: 18719 - RNA, 78 nt, Homo sapiens
aaacggaacaccaaggcccgcagagggcagaggacgaaagcacgccccgcaggcaaaaaaaaagccggagaagcaaaa

SEQ ID NO: 18720 - RNA, 77 nt, Homo sapiens
aagaccaccaggcagaggcaacagaggagcaacaaggagggcacacagaggcacgagaacggggaacagaacagccc

SEQ ID NO: 18721 - RNA, 75 nt, Homo sapiens
gacagcgcaggcagcagaccaagacacccaggagaaagacagcggggaaaagaaaaaggagggggcaaaaggggg

SEQ ID NO: 18722 - RNA, 73 nt, Homo sapiens
aggaacgccggcccgagaaagcccgccagcagccagaacggaagaccaaccagaagacacacaaagcagggga

SEQ ID NO: 18723 - RNA, 70 nt, Homo sapiens
cgggaagagcccagggcgagccccacagcggaacacacaacacacaggggcacgcccgcccgggagaaag

SEQ ID NO: 18724 - RNA, 80 nt, Homo sapiens
acgcgcggaaggcagcgcccagcagcgcaggaaacgaaggcagcaaaaagaagagcagaaacgaaggaaaaggcgggaag

SEQ ID NO: 18725 - RNA, 55 nt, Homo sapiens
ccgacgagcagccccgagaccccagagagggagcagaggaacagccagcaaagac

SEQ ID NO: 18726 - RNA, 67 nt, Homo sapiens
ccgcccccacacgggagaagacagaggagccagaccaagagacagcacaggcgagcgagcagagaca

SEQ ID NO: 18727 - RNA, 52 nt, Homo sapiens
gcgacgcaggcgcacggagacccgccggcagcccgagggaggacggaacagc

SEQ ID NO: 18728 - RNA, 80 nt, Homo sapiens
agagggccgggacgggagagaaaagccgagcacgcacaggcagaacaggagggaaaacgacggaacgagaagaggaagag

SEQ ID NO: 18729 - RNA, 56 nt, Homo sapiens
cgacaggaggagacaggcgagagaggaggacacgaccggcagaaaaaaccagcagg

SEQ ID NO: 18730 - RNA, 48 nt, Homo sapiens
cagaaaacaaccacccccaggaccaacgaagcggcccggagaaacaag

SEQ ID NO: 18731 - RNA, 68 nt, Homo sapiens
caaccggggaggaaaaccgacgaaggagccgggaacgacggccccagcagcggcccggacccggcgcc

SEQ ID NO: 18732 - RNA, 73 nt, Homo sapiens
gaacggaaacaaggagcaaaggacagaggcgggcaagaaagacccgcacagagggagcacaacaaaaaggcgg

SEQ ID NO: 18733 - RNA, 82 nt, Homo sapiens
cagggagcagcgcagcgcgcgcagagcgcgccagggaccggagggccggaagcgggccgggacaacgggcaggagccggaag

SEQ ID NO: 18734 - RNA, 37 nt, Homo sapiens
gaaaaccaagaaccaacaaagagaggacaagcgcaag

SEQ ID NO: 18735 - RNA, 67 nt, Homo sapiens
gaagcgggaggagaccacccaaacgcggcacgggagggaagggagcccaaaacaggagcgcagcaag

SEQ ID NO: 18736 - RNA, 86 nt, Homo sapiens
cagccacgcgggcgagcggcggggagcggcgaagccgcgggcgaggacggcgagacacaagaagaaacgggacaaggagaccgagg

SEQ ID NO: 18737 - RNA, 85 nt, Homo sapiens
gggagagcagaggcaaaccgaaagaccccagaggagggagcggagaagcggaggagaccaaggaggccaccaccacagaaggagc

SEQ ID NO: 18738 - RNA, 79 nt, Homo sapiens
cgggccggggccccgcagcgacaacaggaggccggaagacccaaagcgaggaggcagaaaggaaaaggacagcacaagc

SEQ ID NO: 18739 - RNA, 68 nt, Homo sapiens
gggcaccaggggcccgagaagaaggagccgggagcggggaaaagcaggaaacagaaccgaagccggac

SEQ ID NO: 18740 - RNA, 70 nt, Homo sapiens
aacggaaagaagcaccggagagacagcacagcacccacaaagcaacggaaacacccaaggaaccaaagca

SEQ ID NO: 18741 - RNA, 74 nt, Homo sapiens
cggaagaaggagaagcagcgacaccagcccccccgagaacgccaaggggagaccggagcgccagcgccacgggg

SEQ ID NO: 18742 - RNA, 84 nt, Homo sapiens
gcaagcgagggaccgggacgccacagccagggaacgccgcagaaagaagaaggggcaagaacagccacagcagagacaaaaaac

SEQ ID NO: 18743 - RNA, 84 nt, Homo sapiens
gggacggcggcccagcgagggcggcccggggcacccgcacgggaagcaggcccgccacaggggcgacagcaagaaggagccagc

SEQ ID NO: 18744 - RNA, 96 nt, Homo sapiens
gccacaccacgcagaacgcaacaccaaggcacaccaccccaggccacgagcggcacaggacagaaccgcaaacaacggagccagaaacggcaacgg

SEQ ID NO: 18745 - RNA, 78 nt, Homo sapiens
aggcgcgagcggggaccacgccgcgcccgcaagaacggccaagaaagcccgaaaaccaagaccagcggaggagagcgc

SEQ ID NO: 18746 - RNA, 73 nt, Homo sapiens
cagacgcagggcgcccccgggcagagcggcgggaaaccaccaacaacacccccaaaccaaaacagccggaagc

SEQ ID NO: 18747 - RNA, 71 nt, Homo sapiens
ggagacccggccacagccagaacgccccccacaaggacgggcgaaccgaccaagaacaacacccagagggc

SEQ ID NO: 18748 - RNA, 75 nt, Homo sapiens
caggcaggagaaagggagcgcaccccaggacggggcggccgcacccaggcggaggcagggcacgaaggccagcag

SEQ ID NO: 18749 - RNA, 68 nt, Homo sapiens
gccggcgcgccgggcgccccgggaacaagggggcgcaacagcccaggcagcacggcagcacaagacgc

SEQ ID NO: 18750 - RNA, 81 nt, Homo sapiens
gccgcgcgcccgcggcagaagagggcggcgcgcggcgcaggggggcagccgagagcccaagcccccaggagccgcggcaaa

SEQ ID NO: 18751 - RNA, 85 nt, Homo sapiens
cagccccgagcagcgggacacagagaaccaggagcggcagaccgccgccaggaggaggcacgcagcccgagaaggagccacgcca

SEQ ID NO: 18752 - RNA, 52 nt, Homo sapiens
cccaccacaaaggcccacaaccggaacaccccagccccgacgcaaaacagac

SEQ ID NO: 18753 - RNA, 78 nt, Homo sapiens
ccaggcacgcaggcaccccggcaggacgagagcaggcaggacgagaaccaggagccgaggagggcgcgcggcccggcg

SEQ ID NO: 18754 - RNA, 67 nt, Homo sapiens
aagcccagcagcgagaagaagcccaaggagaggcagagacccacgcggacccaaagacaggaccacg

SEQ ID NO: 18755 - RNA, 77 nt, Homo sapiens
cgccgcggagcagcccccccgcgcccccgcccgcccgggacccgcggccccgccgcggcccgaacaaccgacgcacc

SEQ ID NO: 18756 - RNA, 81 nt, Homo sapiens
gcagggacagccaagaaccaaaaaggaccacgaagaaccaaaggacgcagacacaccaaggaaagcaagaagccggacagg

SEQ ID NO: 18757 - RNA, 84 nt, Homo sapiens
gcccggggccggcggccaggggcgcgaccccccggcaaagcaaagagaaggagaaggaaaaccagaaaagaaacaaacgcagaa

SEQ ID NO: 18758 - RNA, 83 nt, Homo sapiens
cacgcagaccaaagccaagaggcaggaggagaaggaggaaggaccaggacacaaggaaaacagaccgaaaagagccagaaccc

SEQ ID NO: 18759 - RNA, 73 nt, Homo sapiens
agggccacggcccaccacccgggcagcccaaggaccaagggagaagagacccaggaggcagggcagaacccca

SEQ ID NO: 18760 - RNA, 80 nt, Homo sapiens
ccccaggagaaacgaggagcgcggccaccccccggaggacagcacgggccgagcggaccgagagagagcaggagcgggac

SEQ ID NO: 18761 - RNA, 35 nt, Homo sapiens
gaacagagaaaagaaaggagagagcgaagcaccgc

SEQ ID NO: 18762 - RNA, 90 nt, Homo sapiens
gaggagccggcgcggcgcagcccacggcgcaggcccacggagcgcagccgccgagcaccaagaaggcggagaggaaagagagggaccacc

SEQ ID NO: 18763 - RNA, 55 nt, Homo sapiens
ccgggaacccccacgcggccagcgaaaacgcccagaggagcaagaggggggggcc

SEQ ID NO: 18764 - RNA, 66 nt, Homo sapiens
aaacggcgaagaaacgcccccacaaagaaccagaagcgaacaaaaaaaacggccagaggggcacgc

SEQ ID NO: 18765 - RNA, 76 nt, Homo sapiens
ggacaaaaccaaaaaaggaaccgacaggggcgacaggaccacggccggggagaggaagaaaaagagagagaagccc

SEQ ID NO: 18766 - RNA, 74 nt, Homo sapiens
gaaggaacgaggcaaggagcaaagcagcggcgcagcccgggaagccgagaaacaagccacccccgaaagaggga

SEQ ID NO: 18767 - RNA, 76 nt, Homo sapiens
aagccgggagacgcacagcaagagcccggacaccggaagcgggaaagacaccgggaagggcacgacaggaaaagac

SEQ ID NO: 18768 - RNA, 77 nt, Homo sapiens
aaagcacaaacacagccagcgacgaaaagagagagacagagaagacaagaaagcagaagaaaaggaagcacacggca

SEQ ID NO: 18769 - RNA, 74 nt, Homo sapiens
cagccccgcgacggcccacgagccaagcccagaaggaaaagaacgcgcgagaaggggaagcaggagagacggca

SEQ ID NO: 18770 - RNA, 79 nt, Homo sapiens
cgacgcgcaccgacacacacaaggagaacccaaagacgggccccgaggccggacagcgcgccgccccagcacccaccac

SEQ ID NO: 18771 - RNA, 79 nt, Homo sapiens
ggaacccaacagagacccgcccacgcagaacgaagagaaagggccagaaggaagacccagaaagagagcgaaaccccag

SEQ ID NO: 18772 - RNA, 79 nt, Homo sapiens
cagcccgcagaggccaagagaaagcccgaagcagaagggcacaccggaagcagaagagagacaacccgagccagggcgc

SEQ ID NO: 18773 - RNA, 80 nt, Homo sapiens
ccgccccgaggaggaggccgccccaacagcaccggggcgcgcagacaggacccaaagcggccccgaccggcgcaagcagg

SEQ ID NO: 18774 - RNA, 77 nt, Homo sapiens
accacccacagaccagccggaacaagagacccggaccggcaaagaacgcaacgcaggccagcgaagaagggcccccg

SEQ ID NO: 18775 - RNA, 81 nt, Homo sapiens
aaccgacagcaggaggacggccacgggaggcccagaagggcggacaggggcccgacgcagagacggaagaccaccgggaca

SEQ ID NO: 18776 - RNA, 74 nt, Homo sapiens
aaagaaggcaaaacacggacagaagcgagacagcagggcaccaccacccgaacacaacacaaaggaagaaacac

SEQ ID NO: 18777 - RNA, 114 nt, Homo sapiens
caaacaaagaggccgcggaggagaagccggaggaggacaacgacaccaccgcagcgacgagcagggggcacccgaggaggaagagggcagggcccacggaaagaagggaaaccc

SEQ ID NO: 18778 - RNA, 74 nt, Homo sapiens
gagaagacaggagagagcgccaaggaccggcaaggggccgaagaacaaaccgcgaccgggagacagaggagaaa

SEQ ID NO: 18779 - RNA, 71 nt, Homo sapiens
cacacgcagagaccagccacagcaaggaagggcgaagggaccgcagaaaaaccccaagcacccgaaggaga

SEQ ID NO: 18780 - RNA, 83 nt, Homo sapiens
gcccggggccggccgccgcgggaccgaggaaaagccgcaccagggcgggcccggcgggcccgcgacacccagaaggaccgagc

SEQ ID NO: 18781 - RNA, 72 nt, Homo sapiens
acggagaaggacaacggacacacgggacccgcaagcgagggcccggcaaaggagacagcaacgcgggaaagg

SEQ ID NO: 18782 - RNA, 58 nt, Homo sapiens
gcaacagccccggggcagcaagcacggaggcacagggaacaccagaggcgggaccacg

SEQ ID NO: 18783 - RNA, 80 nt, Homo sapiens
caacgccgcccagcccagagcgcccacagagaggacccaagagcacagagccacccgacccagagccagaagagcagagc

SEQ ID NO: 18784 - RNA, 80 nt, Homo sapiens
aaacacgaagagggagcccaagaagccgcgccccgacagagaggcccccaggaacacagaaacgccccgggccagccgcc

SEQ ID NO: 18785 - RNA, 74 nt, Homo sapiens
cgaccgacggacaccacccgggcgggaccacgaagagaaaccaccacgcccaaccggagcccaagccccgacga

SEQ ID NO: 18786 - RNA, 75 nt, Homo sapiens
cgggcaaaagaccaaagaaggcaaggagagaagagaagaacagcacaggacaggcaagagggagaagacagcgac

SEQ ID NO: 18787 - RNA, 68 nt, Homo sapiens
agaaacaacagagaggagcggagaacaaagaacaggcagaggggacccacagcccggcgaccacgggg

SEQ ID NO: 18788 - RNA, 81 nt, Homo sapiens
cccgcgcgcgccgcgcaccgcgcgcggacgcgggagacgccagcgagcgggaggagcccgcggagaaaccccgcacacgaa

SEQ ID NO: 18789 - RNA, 88 nt, Homo sapiens
gagcgccggggccaggagagcgcgccggcgagaagcggccgagccagcagcagaagcaggccaacagaccagcagcagcgcgaaaagc

SEQ ID NO: 18790 - RNA, 75 nt, Homo sapiens
cggaaccggcaccagaaacagagccccagcgaggaagaggcgaccaacagaagcaagagacggccaggaggccca

SEQ ID NO: 18791 - RNA, 72 nt, Homo sapiens
gcaacaaccaaaggccagggcacaaaaaaggggccgggacacaaccagcggcaagaaaacgcgacacaaacc

SEQ ID NO: 18792 - RNA, 73 nt, Homo sapiens
gcacacgagcggaggcgaagcccagcgacaccaagagcaccacagaaaaccccaccacagggaccaggccagc

SEQ ID NO: 18793 - RNA, 84 nt, Homo sapiens
ccggacgggacccggcccaggggaggcccccacccccccagcgggcccagagaccagaacccacccgagaacagcggagccagg

SEQ ID NO: 18794 - RNA, 70 nt, Homo sapiens
ggaacccaggccgccaccgaccagaacccgccccaccccacaggagacagacccagcacggacccccccc

SEQ ID NO: 18795 - RNA, 69 nt, Homo sapiens
aaaggcagaaagccaacagaggaacacgacaaaaaaaagaaaggcaagccaagcccaaaggggcaggac

SEQ ID NO: 18796 - RNA, 78 nt, Homo sapiens
cgaggcaggagagagcaaggacggaggagggaaaaaacggcgcaagcaagcgccaggcaaacacacaaaaagcaccag

SEQ ID NO: 18797 - RNA, 74 nt, Homo sapiens
cggcccccgggacggcccaaggccagcccgcaggacaagcagggaccaggcggggacagaggccaggccaacaa

SEQ ID NO: 18798 - RNA, 41 nt, Homo sapiens
cccgccagcaccagaggaggcccgggggaacgcaggagcag

SEQ ID NO: 18799 - RNA, 84 nt, Homo sapiens
gccgcgccgcccgagcacgccgcgcagcccggccgccggcccccaacagcgccggcgacacaacagggaagaccgggagaccag

SEQ ID NO: 18800 - RNA, 77 nt, Homo sapiens
ccgccgggagcggaaacagcggcagccagagggagaagaagacggagccgccgggggggcacaccccagcccgagga

SEQ ID NO: 18801 - RNA, 75 nt, Homo sapiens
gaagaaggcagaaggaacccaggcagccggcgcccagaccgcaccaccgacaccaggcaccagacacgaaagagc

SEQ ID NO: 18802 - RNA, 67 nt, Homo sapiens
ccagcccagcggcgcgaagcgaaaccggggccaagaacaagcgggaaacggagccaccaacaagcgg

SEQ ID NO: 18803 - RNA, 74 nt, Homo sapiens
ccacaaggaaaaccaagaaccagaacggccacagaacacagccgagaaacagacaacccacagaacaaagcgga

SEQ ID NO: 18804 - RNA, 56 nt, Homo sapiens
gaaaagaaagcaacgcgagcccgcacaaccaaacccgggaaagaaaaacccagcag

SEQ ID NO: 18805 - RNA, 83 nt, Homo sapiens
gaagcaaaggcgcgaacgcagcaccagcacccaagagagaacacaggaggcccagacccacacaaccaccaaacaacacgggg

SEQ ID NO: 18806 - RNA, 78 nt, Homo sapiens
ggaagcagaaaaaaaaaacagagaagaccaggagaaacgaaaacgaaaaggaagaccagagagagagcacaggaagga

SEQ ID NO: 18807 - RNA, 65 nt, Homo sapiens
acaaagcaccccggagaccagaacaagacagcgaacgcagggccacagaacaccgccggccacac

SEQ ID NO: 18808 - RNA, 80 nt, Homo sapiens
gacgccgccgggagcgcggagacaggccgacggcgcaaggccacggcaagcaccgggagcagcagcgaagccagccaccg

SEQ ID NO: 18809 - RNA, 79 nt, Homo sapiens
gcacaaagcgcaggaacggaccaagcggccgaagcaccgacaaggcaagaacacaagagcgcacagccggggaagccca

SEQ ID NO: 18810 - RNA, 78 nt, Homo sapiens
ggacgagaacccgccgggaacgcggccggcacaaaggccaaggagaaggcgaaggaaagcggaccagacaaaggaaag

SEQ ID NO: 18811 - RNA, 77 nt, Homo sapiens
agagcgcgaagcccaccgaaaggaacaagcagaaagcacgaacaacgagaacaagacacgagcaaaccccaccgagg

SEQ ID NO: 18812 - RNA, 66 nt, Homo sapiens
gagacccgacagaggcgcacgcaccgcaagaaggagggcgccacgggaccggagaaggaggagccc

SEQ ID NO: 18813 - RNA, 70 nt, Homo sapiens
agaccacaacaggacacaaaaaggagagaagaccacaggagccaagaggacaccagaaaccagaagggac

SEQ ID NO: 18814 - RNA, 72 nt, Homo sapiens
agggaggaaaagggcagggacagcgcaggcagcaggaccagcccaggagaggaaccgagaacacgacacccg

SEQ ID NO: 18815 - RNA, 77 nt, Homo sapiens
cggcgcgggaaacgggcgaagcgacgagccgcgaggaggaaggcacagcagaagaacgggcggacagaaggcggagc

SEQ ID NO: 18816 - RNA, 72 nt, Homo sapiens
agagcagggggagaccaggacaacaaccgacagcccccccacaaaggcaagacagagcaacggagacgcgga

SEQ ID NO: 18817 - RNA, 80 nt, Homo sapiens
aacggaggcgggcggccaggaacagacgacccagaacacagaacccacgcaacaagaacccggaagagaagacggcagaa

SEQ ID NO: 18818 - RNA, 72 nt, Homo sapiens
ggcggcgcggcggccccaccacccagggggaccagcggccacccaggacgaggcggggggaacccgcacaac

SEQ ID NO: 18819 - RNA, 77 nt, Homo sapiens
cggagcaggaaagccgccagaacaagaaaagaggcgaccaccagagcaaagcaaagcgccagagcaccggcccaggc

SEQ ID NO: 18820 - RNA, 78 nt, Homo sapiens
ggcacagccagcaaagaacagacacacaaaaacaccgcagaccgaaaagggcggaaaaggaccaaggcccgcaaaagg

SEQ ID NO: 18821 - RNA, 60 nt, Homo sapiens
ccagaggaggccccccagccacggaaacacacgcagaccccaccaagaggcggagcgacc

SEQ ID NO: 18822 - RNA, 74 nt, Homo sapiens
acaaggaagcaaaagcccagaagcagaaccaacaggaccggcccacaggaacgagaaagggaggcccaagagga

SEQ ID NO: 18823 - RNA, 74 nt, Homo sapiens
ggaagagccagaacagagcagaaacaaagaagagagcaggaagaaggaagaaaaggaccgcaaaagccacagga

SEQ ID NO: 18824 - RNA, 83 nt, Homo sapiens
caggcccaaccccccaacccaaggccccccggagggagagagaggaggaggacacagaacaagcagaagcacccaaaagagag

SEQ ID NO: 18825 - RNA, 46 nt, Homo sapiens
gcccgaggcaccacccaagcggggccccggcgcggagcggcgccca

SEQ ID NO: 18826 - RNA, 69 nt, Homo sapiens
agacagaagaagaggaagccgggaagcacacaaacggagaacgcagcgcaagaagcacgcaaagccgcc

SEQ ID NO: 18827 - RNA, 56 nt, Homo sapiens
ggaagcgagaggcgagagggcgggcgcacggcgaaccagaggccgaaaggcgccag

SEQ ID NO: 18828 - RNA, 108 nt, Homo sapiens
gcagacgcagccgagacaccagcccgaaacaccaccaaggaagcaggccggggaccaaggggacgcggagcggacggcggaagggcccaccacgcggccgagacgcgg

SEQ ID NO: 18829 - RNA, 76 nt, Homo sapiens
ggggagggggcacggccccggccagcccaggacaagaacaaagggcgacaagagaagcggaagcaaaaacagggaa

SEQ ID NO: 18830 - RNA, 77 nt, Homo sapiens
gcgagcacacaggaccccaagcccaagacaagaggacggcggcaaaagagccagccgccgcgccaagaaacgcgcgg

SEQ ID NO: 18831 - RNA, 84 nt, Homo sapiens
gaggcagaggcgggcccagaaacaaagagccgcaggcggcggaggccagaaggaaaaccaacggcccggaggaccacagcccag

SEQ ID NO: 18832 - RNA, 77 nt, Homo sapiens
ccaaaagcagacggaaaacccacggggaagaccacaccccgagggaaccgcaacaacagacaagaagggaagcagag

SEQ ID NO: 18833 - RNA, 81 nt, Homo sapiens
gcaagccaaaaaagcccaggaagaagacgaggagcgagcgaggaaggggggacagccgaagcaaggagcgcaggcagcggc

SEQ ID NO: 18834 - RNA, 72 nt, Homo sapiens
ggcggcccccaggccccgccagaggcaaacgcaaggagagcccacacgacagggaaagcgagcccgagccgc

SEQ ID NO: 18835 - RNA, 56 nt, Homo sapiens
gcccccggcaggggaaaaccaaggggcaaaccaggcacggaaagcaggggaagaca

SEQ ID NO: 18836 - RNA, 76 nt, Homo sapiens
ccacggccgcacacacgggaccggacaacaacagggagaacacgagacccgcacaaaaccccgccccccaggccac

SEQ ID NO: 18837 - RNA, 70 nt, Homo sapiens
aaagcaggggaaagaacccgaagacaaaaacccaacaggcccgggcaccagcaggcgagcgaacccaggc

SEQ ID NO: 18838 - RNA, 82 nt, Homo sapiens
ggagaccccaccgccggcgcgggaaacgggcgaagcgacgagccgcgaggaggaaaccccccaggcaagaggcgcaggaccg

SEQ ID NO: 18839 - RNA, 76 nt, Homo sapiens
ccccaacgcccaccaaagaggaaagcgaggaggagcgagcgcgagaggcggcaggagggaaagcaaggaaacgccc

SEQ ID NO: 18840 - RNA, 77 nt, Homo sapiens
cccagacacggagcccgcccgagcccgcccaggaaggaaaggaggagcagaacggaaagacccaccgacagagagcc

SEQ ID NO: 18841 - RNA, 38 nt, Homo sapiens
agagacacgggacaaggaggaacaaggaaagggcaaag

SEQ ID NO: 18842 - RNA, 78 nt, Homo sapiens
aaagcggccccccccccacaaaggaaaggggaaaagccagcgaaagcaaagcgagcgaacccgggaccaaagcgagac

SEQ ID NO: 18843 - RNA, 68 nt, Homo sapiens
gaaggaccaagaaccagacacgcgcagagcccagaagcaaggagcagcagaacggaaaacagccccgg

SEQ ID NO: 18844 - RNA, 92 nt, Homo sapiens
cggcagccacaggaggcgcggaggacgccccaccgccgacgcccccagccaccagcccggccccgggcccgcacggcccaccaccgagcggc

SEQ ID NO: 18845 - RNA, 58 nt, Homo sapiens
ggccgaggagcgggaagaggcggggagaagacagaggagccagaccaagagacagcac

SEQ ID NO: 18846 - RNA, 80 nt, Homo sapiens
ggcagcgacagcagcggccagcgaccggagagacgagcagggggaggaacaaagcgaggaagggaagggaaggcgacagg

SEQ ID NO: 18847 - RNA, 64 nt, Homo sapiens
caccgcccacagcgccagaaggcccaaaaaggacagcccaaacccgcaccggggggaaggagaa

SEQ ID NO: 18848 - RNA, 73 nt, Homo sapiens
cgccaccacagagccacacgaggagcgaaggcccccaaaaggccagcccccagaagccagacggagcgacgag

SEQ ID NO: 18849 - RNA, 76 nt, Homo sapiens
gacagaggccagaccccaggcccgaacgcggacggcacgcagacgccagggcaagcgggccccaagggaagaacaa

SEQ ID NO: 18850 - RNA, 77 nt, Homo sapiens
gacggcacgggacccccagcacaggcagcaggccgggagagaagccccccaggccacccaggaccagcggcacaccc

SEQ ID NO: 18851 - RNA, 77 nt, Homo sapiens
ggaggacagaagaaccgccagggcaccagacagccacgcagacacagccaggggacccccaaaagacaagggcaaaa

SEQ ID NO: 18852 - RNA, 65 nt, Homo sapiens
gagaggaagaggcagaagggagccgagacgggccccaagaaggcaaaccggacggcagggaagcg

SEQ ID NO: 18853 - RNA, 55 nt, Homo sapiens
caaagcgaaagcacaccaagaccggccggacagaaacggaacacaaccgcaggcg

SEQ ID NO: 18854 - RNA, 60 nt, Homo sapiens
ggccacccaagcaccagcgaggaaacagaacgacagcccgcaccgacgccggcggccagc

SEQ ID NO: 18855 - RNA, 78 nt, Homo sapiens
aaagaggaacacgcgaaccagacaacagcaaagaaacccgacggggaagccgcacaccagcaggcaacaagaagagcc

SEQ ID NO: 18856 - RNA, 82 nt, Homo sapiens
cccgcgagacaaagcgggcgaccggccgccaagagaagggcacccgcacggccggcccggacaaggcgcccgcgaagagccc

SEQ ID NO: 18857 - RNA, 69 nt, Homo sapiens
aaagcagcaccaaagcacgcccaaaggccagagcacagcgccaaagcagggagaaggaacgcccagagg

SEQ ID NO: 18858 - RNA, 71 nt, Homo sapiens
aacgccccgggaccggagcagaacccccgcagagaaaggcgaggggcccgcgagcaacccaacccaaacag

SEQ ID NO: 18859 - RNA, 64 nt, Homo sapiens
caagaagagaaggaaaacgagcccagcacaaaagccagccacggagaccgcagggaaaacagcc

SEQ ID NO: 18860 - RNA, 72 nt, Homo sapiens
ccaggacaccaacgggaccagaaggaggcagcacggcaggagacgaggagaggacagcaggacacccggacc

SEQ ID NO: 18861 - RNA, 85 nt, Homo sapiens
gacagaaggagcaggaaccaaagggaaccaaggagcaggaacagcagcacacagagggaagccggcacagggcggaacggaaggg

SEQ ID NO: 18862 - RNA, 77 nt, Homo sapiens
ccagacaccagcagcccccgggccaccgccccagcgccaccaaagaccgcgacgccagggccaacgggccaacgccg

SEQ ID NO: 18863 - RNA, 57 nt, Homo sapiens
gcacaggaagaacaaagggcggcagaggagaaagagcacaaaagaggcgggaacccg

SEQ ID NO: 18864 - RNA, 79 nt, Homo sapiens
gcgacacaccaagcggaggggacgccacgcaacgccggagagcacccgggcagagaaggccccgcccagagacagggcg

SEQ ID NO: 18865 - RNA, 75 nt, Homo sapiens
ccccccccgaccaagggaaagcaccccggggggaaagggagcagcaccggccacacccacagcacgaccggaacc

SEQ ID NO: 18866 - RNA, 79 nt, Homo sapiens
caaagaaggagagccagggagggaaagaaagaagaggccgaaagcagcgaaacaacgaaggccgagaaaggcccagaaa

SEQ ID NO: 18867 - RNA, 78 nt, Homo sapiens
acacgcgaaggcaagaagacaggaacgggacacacaaaccccaaccagggacaagacgagccaacggaggcagccggc

SEQ ID NO: 18868 - RNA, 76 nt, Homo sapiens
acacgagaagcaagcaccgggccaagacagcaaaaggaaaccaccgcggacgccaggcagaacacaccgccggccc

SEQ ID NO: 18869 - RNA, 84 nt, Homo sapiens
cgcggcccacgggacccccaggagggacccgcagacggagaaaagaaacgggagacccacaagagcggccaaaagaaaaccacg

SEQ ID NO: 18870 - RNA, 85 nt, Homo sapiens
ccggagccccggagggaagcgcccggggccggccgccgcgggaccgaggaaaagccgcaccagggggccaaacgggacaacagag

SEQ ID NO: 18871 - RNA, 95 nt, Homo sapiens
ggccgggagacaacgccaacccaaggaaggaccaaacggagaaccaggagaaaagaaagccagaaggaaggaagcaacgaaccaagaaaaaacgg

SEQ ID NO: 18872 - RNA, 77 nt, Homo sapiens
gaggggaccacgaggacagcggaagaaaaggcgagggagggagggacccggggccaacagaagacccaaccaccacg

SEQ ID NO: 18873 - RNA, 77 nt, Homo sapiens
ggccacgcaccgcgcgaagacggaagacgcgcccgcgccgagcacagacaaacgaaggacagagagaacaccgaaag

SEQ ID NO: 18874 - RNA, 60 nt, Homo sapiens
gggcaggacaaaacaccagacgaggagaaggggaacgcgggccgagagccgcgcagccag

SEQ ID NO: 18875 - RNA, 36 nt, Homo sapiens
cggaagcaccagcgaggaagaggcgagaggcccggg

SEQ ID NO: 18876 - RNA, 52 nt, Homo sapiens
acgcaggaaagaagaagaccgacagggcccggcagcgccaggagccgagccg

SEQ ID NO: 18877 - RNA, 40 nt, Homo sapiens
agagaacacggaccagaaagagcagagcagaggacaacga

SEQ ID NO: 18878 - RNA, 75 nt, Homo sapiens
accgaggaggcagcgcggggcagcgcgagccgggaaggaagaagacggcacgggacccccagcacaggcagcagg

SEQ ID NO: 18879 - RNA, 80 nt, Homo sapiens
cacccagagggacaaacaacacaaaccccaagccccgccaggcccaaccacaccaggcaaggaaaaggccagaggaacca

SEQ ID NO: 18880 - RNA, 46 nt, Homo sapiens
gcaggacgccaaaaacagagggaagcgaagaccaacgcagcagcga

SEQ ID NO: 18881 - RNA, 73 nt, Homo sapiens
gcaacggagcccgcgcaggggcggcccagccgagacagcagggaaaagccgggccacagaagcaccaccacaa

SEQ ID NO: 18882 - RNA, 71 nt, Homo sapiens
gaacagcgggggacacggcgggccacgccgcaggacacagccgacagggccagcaacaccgggcaccgaac

SEQ ID NO: 18883 - RNA, 69 nt, Homo sapiens
aaacagacccgggcagcaccagaacacaaaaggcccgggacggccccgagcaacaaggaaggaacgaag

SEQ ID NO: 18884 - RNA, 72 nt, Homo sapiens
accaggaagacaggggaacacccccagagagagcggccacggcggaggaagaagcgcccaggcacgagaccg

SEQ ID NO: 18885 - RNA, 77 nt, Homo sapiens
aaaagcagggagagcaccggaaaaccacaaaggacagacgggcagagggggagacgcccggacgagcaggggggagg

SEQ ID NO: 18886 - RNA, 83 nt, Homo sapiens
aaaggcaaggaacaacgccaaggcaaagcgcagaaaccacagggagaggaggacgggaaagacccaaaggccacgaccagcgg

SEQ ID NO: 18887 - RNA, 77 nt, Homo sapiens
agacggggaagacaggccagcgcggccaagacccaccgcaaggaaaaaccagaagagaaaaaacaaaggggagaggc

SEQ ID NO: 18888 - RNA, 72 nt, Homo sapiens
ccccgccggaccccacagcaacaagagacgaaacggacaagccgggaccacgagggcacgaaacggcagacc

SEQ ID NO: 18889 - RNA, 82 nt, Homo sapiens
ccagggagcggcagacccggcacgcagggggggccggcggggccgggccagccccacccggagacacgcccgagccaaccca

SEQ ID NO: 18890 - RNA, 77 nt, Homo sapiens
aaacaggacagcacaggcacagaaggccaaaaaggcaaccacagagagagagagggaggggcagaaagacacaaagg

SEQ ID NO: 18891 - RNA, 71 nt, Homo sapiens
acagcgcagcaaagaacacagagcgggaacaacacacggcagggcacacccaggaccgcagcggagcagcc

SEQ ID NO: 18892 - RNA, 74 nt, Homo sapiens
gggagaaagacacagcccacacccagaaaaggaagcacggagaaaaggaggcccagaaaacccacgaagaaaaa

SEQ ID NO: 18893 - RNA, 88 nt, Homo sapiens
gccccaaggaaaccaggaggagcacgcaagcgagcaccagcaggccacaggcacagacggccggacaaccccccagcgggcaggccaa

SEQ ID NO: 18894 - RNA, 31 nt, Homo sapiens
aacagcgaaccagcaggcgagcagaacaagg

SEQ ID NO: 18895 - RNA, 73 nt, Homo sapiens
gagcggagccagaggccaggcccgccagacgcccacgagggcagaggccaacccccccgcgaggagccaggag

SEQ ID NO: 18896 - RNA, 48 nt, Homo sapiens
cggacagacaaacccgcaggccagagcaaagcagggacagcaagacca

SEQ ID NO: 18897 - RNA, 70 nt, Homo sapiens
gcgccgcggccacggccccccgccagaagccagagaagcacagagggaaggagaaggagacacagaagga

SEQ ID NO: 18898 - RNA, 81 nt, Homo sapiens
gggaaaagcgccgggcggaccagcagagaggaggcagagagccccgcgacgagagagacagagagaccacgccgagcgaga

SEQ ID NO: 18899 - RNA, 65 nt, Homo sapiens
gacaaaccgaaggcgacagagacagccgagcacaccacaggccaaacggaggaaggcaccacggc

SEQ ID NO: 18900 - RNA, 72 nt, Homo sapiens
cacgcggacaggaggaggcacgacacccaggcaggcaacacaggcagaagcacaaacaaccgaaaaaaagcc

SEQ ID NO: 18901 - RNA, 67 nt, Homo sapiens
cacccagggaaaggagacaaggaccgaaacagaaacggaacaccaagggacagcaaacgggcaacgg

SEQ ID NO: 18902 - RNA, 78 nt, Homo sapiens
ggcccaagcgcggacgaccgcggcgccgaggagcccaccggagcagggagaggaacaaagagcgcagaacagcagaag

SEQ ID NO: 18903 - RNA, 99 nt, Homo sapiens
aaaggcccacacaggacagcgccggccacccaaagcacgggggcaacagaggaaaacaaggaccacaaacgggcaaacaaggcgccacccccccacaga

SEQ ID NO: 18904 - RNA, 55 nt, Homo sapiens
gaccaagaaccagggggcacggacaccagcaccccggaaacggacaagaagccag

SEQ ID NO: 18905 - RNA, 89 nt, Homo sapiens
accgagaaccagccaccgaccccagaagaccgaagaagcagccgaacacggagcagaaacgagcgcgaacgggacccaacagaggacga

SEQ ID NO: 18906 - RNA, 71 nt, Homo sapiens
ccgggaagggaacagagcagacccggacggaacaggcaaaagagcacgggagcgcggggaccgagacaaaa

SEQ ID NO: 18907 - RNA, 79 nt, Homo sapiens
ccgggcggcggagcggcggaagaagagccgaggaaggcaccaggagaggaggaggggagacgcccaggcagaaagccca

SEQ ID NO: 18908 - RNA, 76 nt, Homo sapiens
gggagagacgccgaacgacgccccgcacaccggagcgcccagcgcgaggagccgagcagcccaggccgccgggggc

SEQ ID NO: 18909 - RNA, 76 nt, Homo sapiens
gccacccagccacgggcggccacacgacccacccaagcccacgaggcggcgagagcgagacaaaacagggcaaggc

SEQ ID NO: 18910 - RNA, 53 nt, Homo sapiens
aggcaaaggccgagacccgccggaagggacaaaggaaacccagacgacaagga

SEQ ID NO: 18911 - RNA, 72 nt, Homo sapiens
gccaaaggcgaggccagacaccaggcccgacggcagaccggacgccaaggcccgggaggcacaaaccaccag

SEQ ID NO: 18912 - RNA, 114 nt, Homo sapiens
agcacaaaaagaaacgcgaaacgagggaggagggagaacggccaaggaagcagagcagcaggaccggagcagggaagggcaaacagagcgggacggcaaggccccagaaaggga

SEQ ID NO: 18913 - RNA, 70 nt, Homo sapiens
agaacagcacgcccaagcaggccacgggaggagaccggcaccccagaccgagcgaaggcgggaaaaaggc

SEQ ID NO: 18914 - RNA, 79 nt, Homo sapiens
gcagggccccccacggacccagaaaggaagcacgcgcgcggacaagaccagaaagaaaagaaccaaggagcggagagca

SEQ ID NO: 18915 - RNA, 71 nt, Homo sapiens
aaacacgcacagcggaaacaagaagaaacccagaaaacgccaaaccgaccaggagaaaaacagaagcaagg

SEQ ID NO: 18916 - RNA, 71 nt, Homo sapiens
gcaagccagacacgcgagaaaagaagcgggcaggaaaggaaccggaccagacaccgagacaagaagccacc

SEQ ID NO: 18917 - RNA, 74 nt, Homo sapiens
agggagcagggagaggagcgggaaacgggagggaaccagcaacaagccgggcagagcggcgggaaaccaccaac

SEQ ID NO: 18918 - RNA, 82 nt, Homo sapiens
aagcgcacaggaagccggaaacggcaaaagcagaccggaaaacccaccggcaagaccacacccgaggggagcccaggacacc

SEQ ID NO: 18919 - RNA, 76 nt, Homo sapiens
aggacgaggaagggacgaacaggaagcggacgcgcagcggaacagcggccaagagcgcagaaacggagggcagcag

SEQ ID NO: 18920 - RNA, 84 nt, Homo sapiens
caggaggcggcaggacggccaagaccagcgcgagggcccgggcaaggcccgacaggggccagcacgaaagcagccaggagaaga

SEQ ID NO: 18921 - RNA, 76 nt, Homo sapiens
cagaaagcaaaccagcaggcaccaaggaaagcagaagacaagcgaacccaggcacccagagacggagcggaaacca

SEQ ID NO: 18922 - RNA, 69 nt, Homo sapiens
ggcagcccgaaacacgggcagcggccacgaggaagggaacaaaaaccagaccaagcggagcagccagcg

SEQ ID NO: 18923 - RNA, 77 nt, Homo sapiens
ggacagggccccggccacagcaacccacggcaccggagacgcgggcagaaaaaggaaaggaaggcggcgggggagca

SEQ ID NO: 18924 - RNA, 63 nt, Homo sapiens
cacccaccagagcgggaaaacacgcacagcggaaacaagagcgacacgggcggaccacaaacc

SEQ ID NO: 18925 - RNA, 83 nt, Homo sapiens
cggaacagcaggcccgagcccaccgcgccgggccccggacgccgcgcggaaaaggcagcacaccgcgcccacaggacgaaacc

SEQ ID NO: 18926 - RNA, 74 nt, Homo sapiens
gaagagagaaagacacagccacaacccgcagaaggacaaccaggaaaccagaaagcagccgcgacgcagaagag

SEQ ID NO: 18927 - RNA, 82 nt, Homo sapiens
agagaaaaggaaagcagaagacaagcaggaaacccgggcgaggcaaaaagcaagcaaggaagggaagaagaacgaaggacag

SEQ ID NO: 18928 - RNA, 84 nt, Homo sapiens
gccgagaggaagacgagccgggaggaacggcccggaaacaggaggacacagaagcccgggggagcggaggaagagaggacgaga

SEQ ID NO: 18929 - RNA, 67 nt, Homo sapiens
cacgaaaccccacaaaggcaagccacgaaggacgacgcagcacagagaggaaacgaggaaacgacca

SEQ ID NO: 18930 - RNA, 80 nt, Homo sapiens
agacaaccaccaaaggggaaacagaaacaaggagacaccaaaggaggcaagcaaagaccaaccaacgaagcaggcacaca

SEQ ID NO: 18931 - RNA, 75 nt, Homo sapiens
cccaaaccccaggccaagcaaccaccagcagcccccagagcggaacacagaggggggcccacaggaccccgcgag

SEQ ID NO: 18932 - RNA, 81 nt, Homo sapiens
aggccggacccgaaaaacgagacgggcggcgaacggcggaggcagacaaagaggcagcgaacgccaaaaacagagagaagc

SEQ ID NO: 18933 - RNA, 78 nt, Homo sapiens
aacagaagaagcgagggagccggcagcagagcaaaacagagcggaacgaacaaggggagaccggaaaccgagagaaac

SEQ ID NO: 18934 - RNA, 77 nt, Homo sapiens
gaggccgcagccgacagaggaccgacagggaggagggagaacacagccaccgaccacgggggaacagaggcgaaggc

SEQ ID NO: 18935 - RNA, 56 nt, Homo sapiens
caggagaagggcccggagaacagcccaccgaggaagaccaaaggaccaaccaacaa

SEQ ID NO: 18936 - RNA, 77 nt, Homo sapiens
ggagcagcccgcgaggaccgcaccacccgccagcgggcaacacaacaaggcgcggacacccagacaagcgcgccacc

SEQ ID NO: 18937 - RNA, 55 nt, Homo sapiens
aagagggaagcagacgagagcaagggcccgaggccaggagccaaagagcccgaac

SEQ ID NO: 18938 - RNA, 59 nt, Homo sapiens
cgacgaggacacgacagcacaacccccggccggcagcagcacccaagaacggccgacgc

SEQ ID NO: 18939 - RNA, 39 nt, Homo sapiens
gaaccagccaccgacccggcgcccacccgccacaggaag

SEQ ID NO: 18940 - RNA, 55 nt, Homo sapiens
caagaacagaggaaggggaccaggggcacaaggcggaggcaagggcgaccggcca

SEQ ID NO: 18941 - RNA, 66 nt, Homo sapiens
acggaacgacgaacggcagacggaaaccacagcgacgaacacacacaccagaccggagaagcacag

SEQ ID NO: 18942 - RNA, 79 nt, Homo sapiens
accagaggacgggaggagcagcaacaggagagagaacgaaacccaaccaagacccagcacacgggaaagggccgaacag

SEQ ID NO: 18943 - RNA, 82 nt, Homo sapiens
accccgccccagagaagcgagcagccgcagcagaacacccccgacagcagcacaccccaaaagcgagaagcagaaagccaaa

SEQ ID NO: 18944 - RNA, 77 nt, Homo sapiens
caagcgaaagaagcccaaccgcggagaaaaggggacagagaggacagagacgaggcgggcccaagggcaccaccggc

SEQ ID NO: 18945 - RNA, 39 nt, Homo sapiens
cccagcccaccccaaccaagcagagaacgaagagcagcc

SEQ ID NO: 18946 - RNA, 65 nt, Homo sapiens
caggcccagccagcccgcccaaaacgaaaaaggcaaaaaaagaagcgagaagcacgcccgaaggc

SEQ ID NO: 18947 - RNA, 73 nt, Homo sapiens
gcgacagcacaaagagcgaaagacaacgaggcaaaggccccagaacaggagaggagcgccgcccccaggcgga

SEQ ID NO: 18948 - RNA, 77 nt, Homo sapiens
ccccccagccgaccggaagagaccggggccccccagccccgccaacccaggaaaaaaagacgggaacggcccgaccg

SEQ ID NO: 18949 - RNA, 68 nt, Homo sapiens
gcaggaccggagccaccaggccaagccaaccagccagcaggccgggcggggaagccagagcggaaagc

SEQ ID NO: 18950 - RNA, 79 nt, Homo sapiens
agagaaaccaaggaccaagaaccacggacaagaccgagacacccaccacagcagcagcgaagcagagaaggagcggagc

SEQ ID NO: 18951 - RNA, 80 nt, Homo sapiens
gaggacggcagcaaccgcagcagcagcccagaaacacaggggaaacacgagagagcaacagccgacagagcggcaccgac

SEQ ID NO: 18952 - RNA, 78 nt, Homo sapiens
ggggaacaaggacagccggaagcgacagacacagcaccggccccggcagcgggacgcaggacggcagccgggcccagg

SEQ ID NO: 18953 - RNA, 63 nt, Homo sapiens
aggaacagaagccaccgcaaaaacccaacagccgggaaggggaaaagaacagagaagagagaa

SEQ ID NO: 18954 - RNA, 80 nt, Homo sapiens
gaagaagaggaagaacgaccagagcgacccgagcagcgcagaccccggcccccaccaccggagccagagaaggggcacac

SEQ ID NO: 18955 - RNA, 75 nt, Homo sapiens
gggaggaggaggcggccaaaggggccggacgcgagagaaaagggacaaaacacgacagccccaagccccccagaa

SEQ ID NO: 18956 - RNA, 49 nt, Homo sapiens
ggaggaaccccgagccggagaccagcaagacacacgaggagcgccgcgc

SEQ ID NO: 18957 - RNA, 66 nt, Homo sapiens
agagcagggaaaggaccaaaagagaagcaccaaggaccagccaaagaaccaagagggagacaaggg

SEQ ID NO: 18958 - RNA, 91 nt, Homo sapiens
gggaccaggcgaagcggccgagcaggcgagcgaacgacggcaagagcaacgaaccaaagcaaaggaggccgggggaagacggaaaagagag

SEQ ID NO: 18959 - RNA, 67 nt, Homo sapiens
gagccggggccacgaggaaaggaagacgggcggagcgccacagccaggagacacgagccacagcgac

SEQ ID NO: 18960 - RNA, 62 nt, Homo sapiens
cgagcaaggaaagacccagccaggggagagcaaggaccaacccaggccagacccaagaccag

SEQ ID NO: 18961 - RNA, 57 nt, Homo sapiens
aaccgcggacacggagaggaagggaggcaaggaggccacggggccgaagacaccaac

SEQ ID NO: 18962 - RNA, 78 nt, Homo sapiens
aggaacacgcacaaaaaagggcagaagagaagcaggaaggaggcagaggcacaccgaaaggccgaggggaagagcggg

SEQ ID NO: 18963 - RNA, 75 nt, Homo sapiens
ggacacggaagagggaagaaagaagcagcgccaggagaagacagaggagccagaccaagagacagcacaggcgag

SEQ ID NO: 18964 - RNA, 76 nt, Homo sapiens
gccaggcaagcacaaaaggggccacaggagaaggaccaaaaggaacgagacggaagagggagcgcggccagcagag

SEQ ID NO: 18965 - RNA, 76 nt, Homo sapiens
cccgaaaaagacaacagaccaaagggaacaaagagcagaggccagcagccaccgacagcccgcggcgaggaaaagc

SEQ ID NO: 18966 - RNA, 70 nt, Homo sapiens
acagccgagagccaggaggccgaggcaaaaccaacggcagcggcccgccccggagagccggagaggggac

SEQ ID NO: 18967 - RNA, 80 nt, Homo sapiens
acggcgcaggaggagaccggcggcagggcaagcggcgacggaccccaagggcggcgccagcgcgcgccccccagagaagg

SEQ ID NO: 18968 - RNA, 60 nt, Homo sapiens
gacaccgcggaaggggagaaaacaccgaaccaggccaaggcaggaacaggagcagcacgc

SEQ ID NO: 18969 - RNA, 84 nt, Homo sapiens
gaggggcccgccgaggggagagagcccaggggaggggagcgggcggagcgcagacaacccagaaaagaaaaggccaggggcgcc

SEQ ID NO: 18970 - RNA, 56 nt, Homo sapiens
ccagaggggaggcagagcaagggaggggcgaccccggggcccggccagcacgaccg

SEQ ID NO: 18971 - RNA, 80 nt, Homo sapiens
gcggaagccgcaaagaaacccccccaaggacagacagcacagagggccaagccagaacaggggaaagccaaggcgagcag

SEQ ID NO: 18972 - RNA, 84 nt, Homo sapiens
cggcaaccacccgcacggaggcacagaggggaagaacgcacccacaccgaaccaagagagaagccggagccaggaagcaccagg

SEQ ID NO: 18973 - RNA, 68 nt, Homo sapiens
ggaccagacccacagaagcccacacgggcacaggggccccgccagcaagggagaaaagccaaggacag

SEQ ID NO: 18974 - RNA, 78 nt, Homo sapiens
ggaaaccaagacagcccaaacgccccacgaccagcacacggacccgacaccggcgccagcgcaagaaacgagcagaag

SEQ ID NO: 18975 - RNA, 52 nt, Homo sapiens
ggcccaggccccccgccccgcgcagcagaacggccgagcgaccaggagagga

SEQ ID NO: 18976 - RNA, 75 nt, Homo sapiens
gagcgaaacaaaacacaccaggccaaagacgaacaggaggcagaaccaacagaacgacggggcccccagagaacc

SEQ ID NO: 18977 - RNA, 88 nt, Homo sapiens
aaaccagaagaggagggcccagaagaaaaagaccaagaggagcggggaaaagagggccgagaagcgggagcagggcaggggagggaac

SEQ ID NO: 18978 - RNA, 69 nt, Homo sapiens
gccacggacaggggggcacgacccccccagaggcgggcacgcacggcggacacagcagaacccccggac

SEQ ID NO: 18979 - RNA, 70 nt, Homo sapiens
gaaccgccccgagaggaaacacccccagaagaggaccacagcccagcaagaacacccgaaaaccagcagc

SEQ ID NO: 18980 - RNA, 75 nt, Homo sapiens
acaaacccagcgagcccccaaccgggggggccacaaaggaaccaggccgccggcggagagaacaggggagaacca

SEQ ID NO: 18981 - RNA, 72 nt, Homo sapiens
agacaggaagaagcaaagaagccagaaaaacacaacagcggagagagcgcaggaacagagaacaacaaccag

SEQ ID NO: 18982 - RNA, 68 nt, Homo sapiens
ccgagacccaccgcagcccccagcccgccaggaaagggggggcacaccgcgcacacagggagacagga

SEQ ID NO: 18983 - RNA, 48 nt, Homo sapiens
aggagccggaaacggacaaacagggcacacaggcccgagcacaaacac

SEQ ID NO: 18984 - RNA, 67 nt, Homo sapiens
gacacccagcagaaaacgaggaggagcgcgaagaagaccacagcccaggagcggagaccacggggcc

SEQ ID NO: 18985 - RNA, 69 nt, Homo sapiens
ggaagccagaacagaacggaaaggaaccccgagacacaaccaaagcccaccagaggacagacagaaagc

SEQ ID NO: 18986 - RNA, 77 nt, Homo sapiens
gcgagaccgggaagggccaccagaacacaagcggaagccgcagaaggaccggccagaagcaagccggagaacagaaa

SEQ ID NO: 18987 - RNA, 61 nt, Homo sapiens
ccccacgaaggcggcaccaagccagggcacccccgagaggacaacaggcacggaaggcccc

SEQ ID NO: 18988 - RNA, 71 nt, Homo sapiens
caccaccaacggaaaacaacacaggcagacgggagcgggccgagaaaaaccacagagacacacgcaagccg

SEQ ID NO: 18989 - RNA, 72 nt, Homo sapiens
aaggaaaaccgccaaggaccgaccccaaacgcgcaaaacgggcgggggcaaagaaccacaagaacaaaaggc

SEQ ID NO: 18990 - RNA, 78 nt, Homo sapiens
agagcgccacaaggcaaacgagggaaacaaccaaggcccagcaggcagggaagaggaggggccgagccaggacgagag

SEQ ID NO: 18991 - RNA, 75 nt, Homo sapiens
ggccggaccggccagccgccgcccagggcaccggccggcggcccgcagcggcaaggcagaccacccaggcacccg

SEQ ID NO: 18992 - RNA, 56 nt, Homo sapiens
gaggccaccgaggcgaggagaggagagccagccccggcacaaagcagaccgcccca

SEQ ID NO: 18993 - RNA, 70 nt, Homo sapiens
caagcagaaggagcgaagaagagagcggggaggagacaaaggagacgaaaaaaaggccaacacccggaaa

SEQ ID NO: 18994 - RNA, 78 nt, Homo sapiens
cacgggggaaaaaccaggagacacaaacagaaaaggaagaaagggacaaagagaggagcagcggaagaagaaagacgg

SEQ ID NO: 18995 - RNA, 78 nt, Homo sapiens
aaccaaaacagccacgagaacaccccagccccaagcaggagggagggagaagacaccgccccgacaacgaggaaggga

SEQ ID NO: 18996 - RNA, 78 nt, Homo sapiens
gcagccccgacggcaccgcaccgaggcgccgcgcacagcaagaagagcaaacgagacggaagaaaaaaccgacggccc

SEQ ID NO: 18997 - RNA, 54 nt, Homo sapiens
ccgcccgggacccgcggccccgccgcgacgccagcaacccagagggggaaagac

SEQ ID NO: 18998 - RNA, 77 nt, Homo sapiens
gagcaaagcacccaccagaaagaggcacagccccaaaagaaaggcagagccagccgagcgcccaggccacacaccca

SEQ ID NO: 18999 - RNA, 78 nt, Homo sapiens
accgcccggaccacaaaaaccaggagaaggcggggagaaggacggcagaaaacgagacgccggcggcgaaaaaagggg

SEQ ID NO: 19000 - RNA, 69 nt, Homo sapiens
gaacaaccgccgaagagccccagcacaagagacggaacaggcgggagggacaagaagaaaggggaccga

SEQ ID NO: 19001 - RNA, 54 nt, Homo sapiens
gaaacgaccccaccagccccaaaaggcggcaacagaaacccgacaggacagaag

SEQ ID NO: 19002 - RNA, 52 nt, Homo sapiens
ccaaggaccgcggccgagacccgcagggaggaaccgaaaggaaaccgaggac

SEQ ID NO: 19003 - RNA, 77 nt, Homo sapiens
agaaaagccagcccagagcgcggaggagccaaaaaaggaccagaaaacccaacacccggggccggagcggccccaac

SEQ ID NO: 19004 - RNA, 78 nt, Homo sapiens
agaggaagccggacaaacggccccaaggacccgggaagcagacccccggagaaagccaggagacgaggcaagggagcg

SEQ ID NO: 19005 - RNA, 86 nt, Homo sapiens
cggccgccagcgcccccacaccacagacccgcgccgccgacgacccagcagccgccaggccgcccgaggagaggccaggagccgcc

SEQ ID NO: 19006 - RNA, 83 nt, Homo sapiens
aacgccccacagacgggccgagagcgagcacggagacagcgacacccaccgagaagagacgccacgcagagccccgccaggaa

SEQ ID NO: 19007 - RNA, 98 nt, Homo sapiens
caacacaacaggaggcggaggcgaaagcggaacgaggcaaaagcagaccggaaaacccaccggcaagaccacacccgaggggagcccaggacaccacg

SEQ ID NO: 19008 - RNA, 84 nt, Homo sapiens
agcgcggaccggagcggagaagagagcccgccgcccgcagccaaccgccgggacgacggcggggacgccggcggagcaagcgga

SEQ ID NO: 19009 - RNA, 62 nt, Homo sapiens
caccgaggacccggccagcgcagccagcccagcaccaggcacgggggccacaggcgaccagc

SEQ ID NO: 19010 - RNA, 72 nt, Homo sapiens
aaagcaacccagaccaaggaagaggcgaacaaggaaccgaaggaagaagagaacagagagaaaagaacaacc

SEQ ID NO: 19011 - RNA, 73 nt, Homo sapiens
aaaaacagcgcccgggaagcggccgccgggagcgagccaggcagaggccagagggaagcaaagcagccaacac

SEQ ID NO: 19012 - RNA, 75 nt, Homo sapiens
cccgcgcggaagaagcggcggccagggaccaaggccgcgcacaaagacaccaaacgcgcacaccagaccagaaag

SEQ ID NO: 19013 - RNA, 86 nt, Homo sapiens
cagagccccgcgcagcccagggaagacgccgcaccaggcgcaggccagccccaagcacacccggagcccggaccggaaaagaggaa

SEQ ID NO: 19014 - RNA, 84 nt, Homo sapiens
aaagcggagcgggagcccggccggagcgggcggagacgccgggcagccgaacggagggcgacggagggagcaccaggacccggg

SEQ ID NO: 19015 - RNA, 73 nt, Homo sapiens
acacaggcacaccagcaggggggaacgcaggacaggcagagcccgcgggcaagggaaaaaaccaggaggcgac

SEQ ID NO: 19016 - RNA, 82 nt, Homo sapiens
gccggccggggccgaggacaccgcggccgcccgggccgcgggaagcgaggagcccgggaagggaaacccagacgacaaggaa

SEQ ID NO: 19017 - RNA, 80 nt, Homo sapiens
ggccccagcgcaggaaggggagccgcacggccgacgagagcgccgccacacccccagagacgggcggaggcccagcccag

SEQ ID NO: 19018 - RNA, 71 nt, Homo sapiens
ggagacggggcgacgccgagcacgccggacaaggagaggaggggaggcaagcaggggggcaaaggaaagaa

SEQ ID NO: 19019 - RNA, 74 nt, Homo sapiens
acagagcgagggaccccaagcccgagcagacgaaaggaaacaaaacgccggaaggaaagaccacagcaagacca

SEQ ID NO: 19020 - RNA, 80 nt, Homo sapiens
gcgggaccagcccacacccaaggagagaaggacgaagggagaacgagaaaacaaaagacagaaaacagcacagaaacagg

SEQ ID NO: 19021 - RNA, 76 nt, Homo sapiens
ccggacgacggggcgggaccggcgccaccgcagaccgaaacaaggaccccccgggagaagaaaagcgggacgagga

SEQ ID NO: 19022 - RNA, 71 nt, Homo sapiens
acgcccaggaaggagcaaacggaaagagcacagcccggggggaaagaggagccagcccccacagagcggga

SEQ ID NO: 19023 - RNA, 72 nt, Homo sapiens
gccccaagaaacagaccacagaaggagcaaaacccagaaaccagacgccgccacagagaaggaagacaagag

SEQ ID NO: 19024 - RNA, 38 nt, Homo sapiens
aggaggagggggacccagcaaagggaccaggcagacga

SEQ ID NO: 19025 - RNA, 75 nt, Homo sapiens
aagggggaccagacggggaggggcaaaaagcagagaaaaaacaacggagaagcaaaaccaacccaagaaagcaca

SEQ ID NO: 19026 - RNA, 39 nt, Homo sapiens
gccccgccagcaagccgagggccccagccccagccaaac

SEQ ID NO: 19027 - RNA, 79 nt, Homo sapiens
ccgccgaggcccagaagcaagcaagagccccagagcggaaggaaggaagaccgggaggaacagagaaaagaaccagaag

SEQ ID NO: 19028 - RNA, 57 nt, Homo sapiens
gacgcaaggaacaaaaggaaacccaccaaggacaaagacgagccgacagccccaccg

SEQ ID NO: 19029 - RNA, 86 nt, Homo sapiens
accccgacacaacaccaccagagagagaagcccagaaacagcggagaagcaaacgagaagcacaaaaaacgacagcagcccaaaga

SEQ ID NO: 19030 - RNA, 118 nt, Homo sapiens
gaagccacgccggccccggcccggaccgccgccgggagcggaaacagcggcagccagaggacccccggacaagcacccaagcaccaggcggacacacgggaaacaggcgaccaccggg

SEQ ID NO: 19031 - RNA, 70 nt, Homo sapiens
acaacggacaggaaggaagaaccacagcagcagagggcccgggacgagcggcccagcgacgagcgaagag

SEQ ID NO: 19032 - RNA, 76 nt, Homo sapiens
ccgcgccaggcccgccgcccggccgcacaagaccaacgcagaagacccagagcaggacggacaccgaaccggcggc

SEQ ID NO: 19033 - RNA, 73 nt, Homo sapiens
ggaggaccccaagaaccagaacagcagagcagaaaccgggggcccacaacagggacaaaaaggcaagaacgag

SEQ ID NO: 19034 - RNA, 77 nt, Homo sapiens
accggaccggagaacaccgcgcgggaagaaggccaagcccaagaaccaagagaccacggcccaaagagccccccgag

SEQ ID NO: 19035 - RNA, 74 nt, Homo sapiens
ggcaaaagcggcaaagggaaaaaggcgccgccagggagaaaagacgaggaagcccaaaaaccgcaagaaaggca

SEQ ID NO: 19036 - RNA, 52 nt, Homo sapiens
ggaacacaaccagggagcggggacgcgcgaacaaaaagaagggcgaggaacg

SEQ ID NO: 19037 - RNA, 74 nt, Homo sapiens
gacagagggaaccggcagggcaagcggcgacacacgacgggcagaagccccagaggagcccgaaacccccaggc

SEQ ID NO: 19038 - RNA, 87 nt, Homo sapiens
acaaacagcacagcggggccaggaggagggggcaggagacaaggaccagcaagcaagcccgcgcggccgcgcggaccagggcaggga

SEQ ID NO: 19039 - RNA, 75 nt, Homo sapiens
gcccgcaagggaggaaaggggacgggagacgcacggagagcagcccgacggccaggaggcgaagagacgaggaag

SEQ ID NO: 19040 - RNA, 83 nt, Homo sapiens
gccgcgagggaccgcggggagccacgcggcgcccaggcgccgagagccacccgcgagcggcccgcacgccacgcccggccggc

SEQ ID NO: 19041 - RNA, 77 nt, Homo sapiens
ccaaccgccaacgacaagcccgcgccgcccccaggagcacaaaagggagggagccgggggaccggccaggaagaaac

SEQ ID NO: 19042 - RNA, 53 nt, Homo sapiens
ccgcggcggaagagcggcgccaggagcgaagaagagagggcgaaggaggccac

SEQ ID NO: 19043 - RNA, 62 nt, Homo sapiens
agcaaacaaaagcaagcggccgggaaaaaaagggggagccgccagaccagcaggccagaaga

SEQ ID NO: 19044 - RNA, 88 nt, Homo sapiens
cccgccagcagccgccggagccagccaacgagcgaccgcgaccgcacaagcagccgccagcggaaccaagcggcgcggcacacgagac

SEQ ID NO: 19045 - RNA, 70 nt, Homo sapiens
ggacgacggcagacacagcgcggaaaagccccagcaagggcagcaaggcgaaccccacccaccacggagc

SEQ ID NO: 19046 - RNA, 81 nt, Homo sapiens
gcaccaccggccccggaaggacgggcaggacgagggccggacagggcccagaccccagccagcagccccccacgggggccc

SEQ ID NO: 19047 - RNA, 78 nt, Homo sapiens
aacgacagcaccagcggaaagggaacccgacaagaccaagacacccaagccgcacaaacacgcagaggcaagaagaga

SEQ ID NO: 19048 - RNA, 78 nt, Homo sapiens
agaccgaacagaaggaacgacgcggaccagaagccagagcgaggacgccggcagaggaaagagcaaccaaagcccaga

SEQ ID NO: 19049 - RNA, 75 nt, Homo sapiens
ggaacgacaagcacggagagagggacaccagcaccaggcgcgaacccgggccaagcgacgccgcccagcccccaa

SEQ ID NO: 19050 - RNA, 48 nt, Homo sapiens
aaaggacgaaccccagaaaacagcaagcaccgagaagaacaccaaaca

SEQ ID NO: 19051 - RNA, 78 nt, Homo sapiens
ggaaccgcccaacaggcccggagggagcaggaagaagagagccaagcgaacgccgaggaacagggacaacggacccgg

SEQ ID NO: 19052 - RNA, 80 nt, Homo sapiens
aacaagcgacgcggacaagcggacgaaagggaagcgggcgagagacagggcgggaccaccaggagcagagcggaggccac

SEQ ID NO: 19053 - RNA, 78 nt, Homo sapiens
gcaaccccccaggccacaacccggcccgaagggcaccacaggggggcagaggagaaggggaccagccccggacacggc

SEQ ID NO: 19054 - RNA, 80 nt, Homo sapiens
aaagaggccaaaggacagggccacaccgcacccagcacgccaaggagaagaaggaaggggaagaggcagaaaaggaagag

SEQ ID NO: 19055 - RNA, 77 nt, Homo sapiens
gccagcagaggcggagcccgcagaccgcagaaggccggagacaccagcagcacaggagggagcaggaaaaaggcgga

SEQ ID NO: 19056 - RNA, 74 nt, Homo sapiens
cggcacgggccgcagaagacagggcggcgggccggacgacaagcagggagaccccaaggcaaaaccaccacacg

SEQ ID NO: 19057 - RNA, 56 nt, Homo sapiens
agagagccgcgcacgcacagacaaggaccagggaacgggacacacagacggaggaa

SEQ ID NO: 19058 - RNA, 78 nt, Homo sapiens
gcccgggcgcggcgggcgcgcccgccagcgcccggagaacgacaagcagaccggaagaccgacggaagaccacacccc

SEQ ID NO: 19059 - RNA, 76 nt, Homo sapiens
agccgccccggagggcccccgcgacgcaccgggggaagcgcagggaagaacccacgagcaaccgagccagagaaga

SEQ ID NO: 19060 - RNA, 76 nt, Homo sapiens
ggccggggccgggacgccagccaggaggacccccggggaaaggaacaccccaccagaccacccagcaagcccacaa

SEQ ID NO: 19061 - RNA, 87 nt, Homo sapiens
gcagagccgcaagcggggaagcgcggcgccgcgggccaccgcgccgaacgcccggcccggaaaaccagcgaaggcggaagacagccg

SEQ ID NO: 19062 - RNA, 78 nt, Homo sapiens
ccagagcggacacacgcccaccagggccgccccaaccccgacacaccacacaaaaagccagaggacaaaacccagccg

SEQ ID NO: 19063 - RNA, 80 nt, Homo sapiens
gaagcgacgaaagagggcgacaacagaaacaagaggcgggggcggaagccaccagggcaggaacaaggacaacagcccag

SEQ ID NO: 19064 - RNA, 69 nt, Homo sapiens
gcgaaaccacaaaagggaccaggcaaaagaaagagacaccacaaggagaacgagaacaagaaaagaggc

SEQ ID NO: 19065 - RNA, 71 nt, Homo sapiens
acagcagagggaccaggagccccgcggcggggaggcacgagagaagaaaacagaaacgccggagaggaaaa

SEQ ID NO: 19066 - RNA, 71 nt, Homo sapiens
agcccacagcagcagcagcggcgccgcccgcagcccacagcccggccagcggggacccccccaacaggcca

SEQ ID NO: 19067 - RNA, 77 nt, Homo sapiens
acaacacccccagcggccgccggccccccacgagggaggccaacagacccaacccagaaggcaccaaacggaggggg

SEQ ID NO: 19068 - RNA, 73 nt, Homo sapiens
caggcggcccacggcagcgagggagaacggcagaaccaagggaccaaagcgggacggcaggccacgaccaccg

SEQ ID NO: 19069 - RNA, 71 nt, Homo sapiens
agcgcaaacccagcgccggagaggaacaagcgcccgaccagaagggacccaccgaaggcaagagccagcac

SEQ ID NO: 19070 - RNA, 40 nt, Homo sapiens
cccgggcacagcaggcacggaggggggaaggaggagacga

SEQ ID NO: 19071 - RNA, 85 nt, Homo sapiens
gcccggccccggaggagcgagcaccaggggccccccagggggcgcccccgaaggaaaacagaaaggagggaagaagccagaacca

SEQ ID NO: 19072 - RNA, 74 nt, Homo sapiens
gggcagagggggaacggagaagcggcgggcgcacacggggcaagggcaggaagggccaaagccccaagaaccca

SEQ ID NO: 19073 - RNA, 83 nt, Homo sapiens
ccaaggggggagcgggaacacccaaaagcgagcgcaaggaggcaggagacgacaccaagaggaaaaaccaggcaaggaagcac

SEQ ID NO: 19074 - RNA, 56 nt, Homo sapiens
aaaaccggcccccaacgacaaaaggacccggaaccccacaggccgaggcacgaacc

SEQ ID NO: 19075 - RNA, 72 nt, Homo sapiens
gcggaggcggaggcagaggggaggcgcgaaagggacagccagagaccacaaccacagaagcacagggcccaa

SEQ ID NO: 19076 - RNA, 76 nt, Homo sapiens
caaccccgaacggggggagacgccacggaacgcaggagccagagcggaagcacgaccagcagagaaaagaaaaccg

SEQ ID NO: 19077 - RNA, 78 nt, Homo sapiens
gagaaggagcagacaagaccccaacaacaaggcccccaagacaaggcgacggaggcagacagggccccgcgcccggcg

SEQ ID NO: 19078 - RNA, 44 nt, Homo sapiens
gccgcaccccgaccaccggggacagaggaccaccccggcaggcc

SEQ ID NO: 19079 - RNA, 69 nt, Homo sapiens
caggaacccccaaaaggccacagaggggaccaaccagacggcccacaacacagccagaaagggccccag

SEQ ID NO: 19080 - RNA, 84 nt, Homo sapiens
gggcgggcagcgcagcgccgagcggggcccgcgggcccagaggaggccggggaccagggcccaggacaaccccagaccagcggc

SEQ ID NO: 19081 - RNA, 72 nt, Homo sapiens
cccaagccaggacggaccccaagcaagccgcacaaacacacgaagaacaaacaaggcaaacgccggaagcaa

SEQ ID NO: 19082 - RNA, 86 nt, Homo sapiens
ggcaggacacggccgacgggaaagagggcgccgcgaaaagaaaacgaacccagaccaaagaaggagggcaggccccgggacgagcc

SEQ ID NO: 19083 - RNA, 59 nt, Homo sapiens
caaggagacgcccggcacgcaggaagcagccgacacgagcggcaaaaacagcgaaagga

SEQ ID NO: 19084 - RNA, 73 nt, Homo sapiens
gaagacggcagcggggggagcagcaaaggcagaggggcgggcaaaggagaggcacaggaagcagaggcaagaa

SEQ ID NO: 19085 - RNA, 82 nt, Homo sapiens
cgggaggagccgggcgcagaaccagaccgggagcacgcacgccacgaagggcgaaagacacacagaagccaggaaaggaaca

SEQ ID NO: 19086 - RNA, 82 nt, Homo sapiens
aaagaaaggaacagaaacaagagaggaacggagcaagaagcgacacaaggagaaaagggcggaccagggacgagcgcccccg

SEQ ID NO: 19087 - RNA, 69 nt, Homo sapiens
gaaccgggggaaaaggacaccgaaccggaacagcaaagagcaaggaagaagcaccacgaccaaagccga

SEQ ID NO: 19088 - RNA, 80 nt, Homo sapiens
caagcgaagaagccccggcggacaccccgggaaggcgggcaagcgggagacacgagaaagaaggggcagaccaacaccac

SEQ ID NO: 19089 - RNA, 75 nt, Homo sapiens
agcgcaggacaggcagaaccccggcgcggcccggcacagagcacaggaaggagcccggcagcgccgggaaacacc

SEQ ID NO: 19090 - RNA, 79 nt, Homo sapiens
ggagccccgccgccgccggcgcaggaaaagcccaggcggggcaggcccagcacgagcccagaaaccagcagccggggcc

SEQ ID NO: 19091 - RNA, 69 nt, Homo sapiens
caccgaggcggccagacagagaaggggaggagacgaggccaggagaaggaaagcaggaacagaaccaga

SEQ ID NO: 19092 - RNA, 54 nt, Homo sapiens
caaacaaacgcaaacgggaacggcaaggcggaggcaggaccacccaaaaccaga

SEQ ID NO: 19093 - RNA, 66 nt, Homo sapiens
cggggcagcaacaccgcacagccacaacaaggacccaacacacccaccacacgcgaaacagaacaa

SEQ ID NO: 19094 - RNA, 83 nt, Homo sapiens
gagaagccgcccaaagaacggcggcaaagaaaaaaaggaaaaagacaccgcaaggaagaagcgagagggaagacgcaaaaaac

SEQ ID NO: 19095 - RNA, 82 nt, Homo sapiens
cagaaccagaccgggagcacgcacgccacgaagccaacacacgcgcaggaagcgggaggaccggacgaaagccaggagaaaa

SEQ ID NO: 19096 - RNA, 70 nt, Homo sapiens
gaccaccgaaaaaagaccaggcaagaccagaaaaacggggcacacagcaaaaaagcggacacagcccagc

SEQ ID NO: 19097 - RNA, 77 nt, Homo sapiens
aggcccgggggaaagaggccaccgggggggaggaagaaggcaaaggacaggcccaaccagaaaccagaggaaaccgc

SEQ ID NO: 19098 - RNA, 80 nt, Homo sapiens
gagagacgacgaggcgaagagccccggaagggccagcgcaagcgggcgccaggacggggaggacgacgaggagaggagga

SEQ ID NO: 19099 - RNA, 77 nt, Homo sapiens
ccgcaaaagggaagcgaagccgaaaaaggcagcagcgaagaccccaggccagacaaacaagagcagcacaaagggaa

SEQ ID NO: 19100 - RNA, 81 nt, Homo sapiens
gccccagaccggcaccaggacgcccccggcggagcccggcgccgggcacagggaaagggagcagcaccggccacacccaca

SEQ ID NO: 19101 - RNA, 81 nt, Homo sapiens
caaacagagagaaggaaccacccacgcaggcagaaacggcgaggaaagagaggagccccggaaagaaaaggacagacccgg

SEQ ID NO: 19102 - RNA, 44 nt, Homo sapiens
cagaccgaccaccccccagcaacgccgcccacgcgcgccaccaa

SEQ ID NO: 19103 - RNA, 78 nt, Homo sapiens
ggaaggcgcgaggaggaaaggaggacgagaggacaagaacaaggaaaacaagagaaccgaaaaagaacagaagggcac

SEQ ID NO: 19104 - RNA, 122 nt, Homo sapiens
gagcggcggcagcgcgaggccggagaaacaggcgccgcgggcccgcgcccggccggacccgggcccgaggccaagacaaggggcgcagagcggggggacaggcgcaagaccggagaagcagg

SEQ ID NO: 19105 - RNA, 63 nt, Homo sapiens
aaagagaaacccaaaaagcgggcgacgggacaaacacaggaaggaacacccggaccaaacaag

SEQ ID NO: 19106 - RNA, 84 nt, Homo sapiens
gggaccgaacccccgccgcagccaggagccgaggccgaaaggacaccaggggggaaaaaccacacaggcaaagaacgcgcaaaa

SEQ ID NO: 19107 - RNA, 75 nt, Homo sapiens
cccgcgccgccgaccccccggcgccgcgccggcggcggcaccgggaaaacgcagaggaacgagggggagccacga

SEQ ID NO: 19108 - RNA, 78 nt, Homo sapiens
ggaaagaagaaaaccaagaaagccccacgagaaccccacgacgccccccagcccaaggcccgaacccaggaagagggc

SEQ ID NO: 19109 - RNA, 64 nt, Homo sapiens
gcgggccgccggggcacagccaaaaaagcagggcgagcgcgagcagccgggaacgaggccaaca

SEQ ID NO: 19110 - RNA, 68 nt, Homo sapiens
aggagccacgcccgagagcccgagccacgcagacaaaggaaagggcgccaacaaaggagagaagaaaa

SEQ ID NO: 19111 - RNA, 59 nt, Homo sapiens
agagcacaaacccaaggacacaacagcagcagccgcccaaaacacaaaccaaagaagaa

SEQ ID NO: 19112 - RNA, 75 nt, Homo sapiens
aagaaagcaagagaggaaaaggccgaagaaaccaaggaggacaggccacggaggagcagccaaaccaggcgcaga

SEQ ID NO: 19113 - RNA, 35 nt, Homo sapiens
aaccgcgaaggaaaaacccccacgcaaacggaagc

SEQ ID NO: 19114 - RNA, 84 nt, Homo sapiens
accaagccgcagggagaacacccaacgggagaggcgggccaggccagcgggccggggagcgccagccgagaggagcgcggagcg

SEQ ID NO: 19115 - RNA, 78 nt, Homo sapiens
gcggcagcgcgccaagcgccggcagaacaaccgcggggcaagagccacaccagacaaacggcgaggaaagagaggagc

SEQ ID NO: 19116 - RNA, 80 nt, Homo sapiens
cccagaagagaacgcgagcacagccaccggaggaggggagagggccggcacccgagagggagcaggggggcagacgagca

SEQ ID NO: 19117 - RNA, 76 nt, Homo sapiens
ggaagaagaccccgagagcagcgagcagccgagagcagaggaaggcaggaccaggaccagcaaggacaaaacacgg

SEQ ID NO: 19118 - RNA, 63 nt, Homo sapiens
ggaagcaggcccaggcgaaggggaccaacagggcggaacagccacagcgcaagccggcacaca

SEQ ID NO: 19119 - RNA, 74 nt, Homo sapiens
caaaaggcgaagacgccccaccaggccccgagggaggcccaagccaccacagccacccagcaggcaggaaaagc

SEQ ID NO: 19120 - RNA, 74 nt, Homo sapiens
cccgacccacaggccagagagacaagccgagaccaccaggagcagagcggaggcaaccagccaaaacaacggaa

SEQ ID NO: 19121 - RNA, 72 nt, Homo sapiens
ccacaacaccggcaggaaccaccaggacagaagggaagagaacaaccccaaccaggcaccaaaccagaaccg

SEQ ID NO: 19122 - RNA, 73 nt, Homo sapiens
cccccgcgcacccgagaaaacgaggccccgagccagccccgacagcgggaaccggaaaagggcagaaggggac

SEQ ID NO: 19123 - RNA, 81 nt, Homo sapiens
gcaaagccagagaggcccacagaaagcacagacccaggaacaggagagccaggaaccccaagacggaggacacacacgcac

SEQ ID NO: 19124 - RNA, 78 nt, Homo sapiens
aacgcaaaacggaagaacccaccgcccccgacacggggcgacacagcggccgagagaccgagcagcgagcagcgacag

SEQ ID NO: 19125 - RNA, 71 nt, Homo sapiens
gcaccggacgaggaagggcaggcggcgggcaagccagcgacgagacaccagaggaacacacagcgagagga

SEQ ID NO: 19126 - RNA, 83 nt, Homo sapiens
cgcgccagcgcaggaagggggaggggccgaggcgccggcaggcgcccgagcacgccaaccccaaccccacggacagcgccccc

SEQ ID NO: 19127 - RNA, 82 nt, Homo sapiens
cacagggccagccccacgcgccacaccggcgccacgacaccacaagaaccaacaagcacggcaggaggcagagccgaaagag

SEQ ID NO: 19128 - RNA, 79 nt, Homo sapiens
acgacgacggccccagcccagccaccagagcaccaagcagacacgcagagggacgacagaaccaccacggcaagcagaa

SEQ ID NO: 19129 - RNA, 79 nt, Homo sapiens
gaacaggcggcgcgcgcggcgcgggacgcgcgcgggcacccacggagccccggggcgacgcgccaggagagaggggcgg

SEQ ID NO: 19130 - RNA, 81 nt, Homo sapiens
cgagggccgggagcccgcaccgggccggcagaagagacaacagccacaagggacaaaaggaagacaagggagaagcacaca

SEQ ID NO: 19131 - RNA, 70 nt, Homo sapiens
gagaagcacgaaaaaggacacggacccggaaaagcagaagcagaggacaaggaaccgacagacaggcgca

SEQ ID NO: 19132 - RNA, 72 nt, Homo sapiens
ggagcgaagaggaccggacccgccaggcccgagccaagaagaggcccgccgccccggggcacgccaggcaac

SEQ ID NO: 19133 - RNA, 82 nt, Homo sapiens
agccacccgagaccgggggcagccacgacaagcgccgcaggaggcgagagcagagcaacggcagaacaagaacagcagcacg

SEQ ID NO: 19134 - RNA, 85 nt, Homo sapiens
cagaccaggaagaggcagaagaggaggacggcaaagagggaagcagacaagagaaagagcacgcaaaagaggcgagaaggagagg

SEQ ID NO: 19135 - RNA, 65 nt, Homo sapiens
gacgacgagaaacaaagggcacgagacacaaaccaaccaacggaaaacgggagaagaaccaacaa

SEQ ID NO: 19136 - RNA, 73 nt, Homo sapiens
ggcggaagagagccgggcccgccgggcgaagccgaacaggaagaccgggagcacagaagaaaagaacaaggcc

SEQ ID NO: 19137 - RNA, 79 nt, Homo sapiens
caacgcgggcagaggagcggagcggagaagccaagacgggaagcccgaagccagagagggcacccgccggcgcacgaga

SEQ ID NO: 19138 - RNA, 50 nt, Homo sapiens
agcaccgccgagcggaccccaagggggcgaggcgaaggagggccgaaagc

SEQ ID NO: 19139 - RNA, 75 nt, Homo sapiens
cggacggcgcgcgcccgaggcgaggaggagcgcggcggaaggacacagacaaaagaccaggagagagcagcaaag

SEQ ID NO: 19140 - RNA, 76 nt, Homo sapiens
gaacacaaggaagcaaaagcccagaaacacacgggggaacaccggacaaccgaagaagcgcggcgacgacagaacc

SEQ ID NO: 19141 - RNA, 69 nt, Homo sapiens
agaaaccagccacgggccggaggcaaaaaacccgagaaaagcacagcacccgcaggccaacacaggacc

SEQ ID NO: 19142 - RNA, 69 nt, Homo sapiens
ggagagaagccagagcggagagcaagggaaaccgcgggcacagcaggccagaaaaacccacagacccca

SEQ ID NO: 19143 - RNA, 54 nt, Homo sapiens
gacggaaacaagcagacccgcggcagagaaagcaagagacgcaaccgaacgcag

SEQ ID NO: 19144 - RNA, 46 nt, Homo sapiens
cgacgccaggcagcgcccccaaacgagcccaaaaggcagagcgagg

SEQ ID NO: 19145 - RNA, 86 nt, Homo sapiens
ccggagaaaaggccaagaaggcaggagcagggacggggggaaaagcgcacccgggcccgggcgagaaagaagacaccaaaggcaaa

SEQ ID NO: 19146 - RNA, 75 nt, Homo sapiens
gggacggaaccgggacccgggcgcccgcgcccgccccaacccagccacagaaaagaggaggcgagcgggaacaag

SEQ ID NO: 19147 - RNA, 73 nt, Homo sapiens
cgcggaagaggggggccgcccggccgggcgcgccgcaccccagcagcacccaagcagcaaaggagcgcccgaa

SEQ ID NO: 19148 - RNA, 57 nt, Homo sapiens
gagaaccggcccaggcgccccaaaaaccagaccaggcccggaagaaccagccggcag

SEQ ID NO: 19149 - RNA, 76 nt, Homo sapiens
ccgccgcgcccgcccgacccgccaccgccaggccagaaaggggccaggggcaagccgcaggccgcgcccgagggcc

SEQ ID NO: 19150 - RNA, 55 nt, Homo sapiens
gcacaagaagaagacgagacaacgaagagaggaaagaagcggaaaggagggagca

SEQ ID NO: 19151 - RNA, 82 nt, Homo sapiens
gccaagcacagccagccccaggggaaccaccccaagggaacggggaagagaagagaggccgacaaggacgagcccgacccga

SEQ ID NO: 19152 - RNA, 70 nt, Homo sapiens
cccacccagcccagaaacagaaagagaggaccgcggcaaggacagcaagagccacccaggcggagaaagg

SEQ ID NO: 19153 - RNA, 74 nt, Homo sapiens
gcaaccgggagcccaggaagcgcagacacagaaaacgggcacaccagcagacacagggcacacgcacacacaaa

SEQ ID NO: 19154 - RNA, 79 nt, Homo sapiens
gcacaaacggggcggggccggggaacacacagcaccgggcagagaacaccagcccgcgcccccgcagaccggaaagccc

SEQ ID NO: 19155 - RNA, 92 nt, Homo sapiens
ccgccccggggccgcacccggccgcccggcgccccggggacgccgccccccggggcggagaacggaaaagcaccaggaagcagagaggaccg

SEQ ID NO: 19156 - RNA, 79 nt, Homo sapiens
agagggcggggcgcgagagagacgccaggccacgcgagcccgggcgccaccagccgggacagcccagcaacgcaggcca

SEQ ID NO: 19157 - RNA, 78 nt, Homo sapiens
cgaaagaagaaaacaagcggacacgggaaaaccgaagccgaagaggccaagacccacagacacccggaagcaggcgaa

SEQ ID NO: 19158 - RNA, 80 nt, Homo sapiens
cggcagagccagggaccaacaacgcccgccggggaacgaggagcagcccgaagcagcagcagcagcaccagggcagcagc

SEQ ID NO: 19159 - RNA, 63 nt, Homo sapiens
gaggagcccagcagaaaagaggaacgccggcaacacgaagccgaagcgcacgaacagaccacc

SEQ ID NO: 19160 - RNA, 85 nt, Homo sapiens
cgccaccaccacgccagccgcaccagccgcccaagccgcacagccgcggcggcagcagcaggagaggacccccagaggaccccaa

SEQ ID NO: 19161 - RNA, 82 nt, Homo sapiens
ccaaccggagcgcaaggcgccaaccccgaacggggggagacgccacggaacgcagcccggagcgagagcgagagaagggacc

SEQ ID NO: 19162 - RNA, 78 nt, Homo sapiens
gaaaaccaaccagaagacgaacaaacagcaagaaagaccacaagaccacagagccacaagagaacaaaaaaagagaaa

SEQ ID NO: 19163 - RNA, 36 nt, Homo sapiens
ggccgcccccggcaagacggaagacggcagcggggg

SEQ ID NO: 19164 - RNA, 76 nt, Homo sapiens
ccgcagaggcgcggagcgggcagccgccgccaccccgcggccgcacccccgccccaggggacgaagggaacccgcc

SEQ ID NO: 19165 - RNA, 52 nt, Homo sapiens
aaaaaacaggcgcgccaggccgacgccgagaacccggaccaagagacgagga

SEQ ID NO: 19166 - RNA, 38 nt, Homo sapiens
gcaggcggagccgaccgggccagcccacaagcagcgac

SEQ ID NO: 19167 - RNA, 61 nt, Homo sapiens
gggggccccgcccggacaagaaggagaagcagagcaccaagagccgacacgggcggaggcc

SEQ ID NO: 19168 - RNA, 79 nt, Homo sapiens
aaagaaggcccgagcaccgaggaggagcccagcccaaccacacggcagaccaggagacggccagcaagcgccgggagcg

SEQ ID NO: 19169 - RNA, 55 nt, Homo sapiens
gcgggaaaccccccccaccccaccaggaggacaccccgaacacaaagaacgggag

SEQ ID NO: 19170 - RNA, 80 nt, Homo sapiens
agaacggcgagggacagaagaagggagcacggaacagacaagccaggcccccgcggggaggcagagcccgcgggcccgcc

SEQ ID NO: 19171 - RNA, 75 nt, Homo sapiens
gaaagccaggccagaaaacaggagcggagggcacaggcccaaacaagaaacaccaagcagggcagacccccaaag

SEQ ID NO: 19172 - RNA, 84 nt, Homo sapiens
ggcggacgaggagaagcgccgcccggcgggagaagcgcagagccgcagccagaaccaacagaaacggcccacccagagaaagaa

SEQ ID NO: 19173 - RNA, 78 nt, Homo sapiens
gaaaggcgagggaagcgccggggcggggccccgagcagacagcaggaaagaagaagccccggacacccagggccaggc

SEQ ID NO: 19174 - RNA, 65 nt, Homo sapiens
aagaagagccgagagggaggaaagggaggcaagaaggaagcagagccagacgagggaggagagcg

SEQ ID NO: 19175 - RNA, 50 nt, Homo sapiens
aacacacacaaggcagaacaaaagcaaggggaaaacaggggcggaggcgg

SEQ ID NO: 19176 - RNA, 83 nt, Homo sapiens
ggcccccaagccagagcagacaagagagagaacgacaggcaaaaccccaagacaacagcagaggccccggccaaaaccacagc

SEQ ID NO: 19177 - RNA, 82 nt, Homo sapiens
gcccgaggcaggcccgacccgccccccggcgccgccgggccgacggagaccagcaggggcggagaacggaaaagcaccagga

SEQ ID NO: 19178 - RNA, 75 nt, Homo sapiens
ggcggagcgcgggacagccgcgacacacaggaacacaaggcccgaggagaggagcaccaacgggggaagaccgcc

SEQ ID NO: 19179 - RNA, 65 nt, Homo sapiens
gacgaggcccccaagcggggagcaaggcagacacaagcagaaaacaccgaccggagccaggccgg

SEQ ID NO: 19180 - RNA, 70 nt, Homo sapiens
cggaagcacaagaccgcccggggaacagggcagcaagcgacagcacagacagggacccgagacaggggca

SEQ ID NO: 19181 - RNA, 79 nt, Homo sapiens
cgaccggccggcggcagacggggccccgccgaacaggggcagcccagcagcggggacccagcccggccaggagacaacc

SEQ ID NO: 19182 - RNA, 86 nt, Homo sapiens
aggaggacacgcaggcggcccaggaccaggaggagagaagaccgaacgagaccaaaccaaggaggaaaggaacacagaggagacag

SEQ ID NO: 19183 - RNA, 73 nt, Homo sapiens
gcccggagcccgcacccagccacaccggaaccgcgggagccgaaggaccgggccaaggggggggaagaagcgg

SEQ ID NO: 19184 - RNA, 71 nt, Homo sapiens
gccgaggaggcccgcggggcaaccgccacgagacaccaagacaaacggacagcccagaaaagaagggacca

SEQ ID NO: 19185 - RNA, 102 nt, Homo sapiens
ccggagcaaggagcccccaagaaccgaacagcgccccagcagccaaggaaagacaaggagccgggccgagaaaccgaaccagagaccagagaagaaacgcaa

SEQ ID NO: 19186 - RNA, 48 nt, Homo sapiens
gcagcaccggaccagcggagcggccggagcgcaacggcgacagagaga

SEQ ID NO: 19187 - RNA, 76 nt, Homo sapiens
acaaggaagggagcacacacacaccacagccagagaaggcagccaagcccgggaggaggcccggggaccagaagag

SEQ ID NO: 19188 - RNA, 84 nt, Homo sapiens
acaacggagaccagaccacgcagccacgcgggcgagcggcggggagcggcgaagccgcgggcgagacggaaaggagagcggacc

SEQ ID NO: 19189 - RNA, 76 nt, Homo sapiens
ggaaagggccagagacagcggaaacgaaggaccaaaccacagaccagggaccagaccccacaagaaaacacacaac

SEQ ID NO: 19190 - RNA, 78 nt, Homo sapiens
aaacgcagagcgggggacgggcgcccggaggacgcagcacggcagggagcgcgacccagcgaccagccacacgcccac

SEQ ID NO: 19191 - RNA, 82 nt, Homo sapiens
agccaggaggagagcccacagggcaaagagagcagacccgaggagcccgcagacagaagcgaaggggacagggggagaaccg

SEQ ID NO: 19192 - RNA, 58 nt, Homo sapiens
accggccgcgcccccgccgggcccagaacccgcccaaccggaagagccgaagacccag

SEQ ID NO: 19193 - RNA, 71 nt, Homo sapiens
cgcgggcggaaggacagcgcggacaaccgggccccagcccagaccagccagcacccgaaagagcgaaagcc

SEQ ID NO: 19194 - RNA, 76 nt, Homo sapiens
gaaccacggaaaggaggaagaagacaccggggacagacaggacagaaccccaccaaacaccagaaaacagagagac

SEQ ID NO: 19195 - RNA, 79 nt, Homo sapiens
gggagcaaggccgcggaaacagcggcccagcacgggaccgcccggagaccagggcagcaccaccccccccaacaccaac

SEQ ID NO: 19196 - RNA, 56 nt, Homo sapiens
cgcgacccaccgaaggccgggggcaaaggggccagggggcagcaaggcccaggggg

SEQ ID NO: 19197 - RNA, 74 nt, Homo sapiens
ggcagcagacgacagaaaaggcccaaagggggggccacccagaccacgaagccaagagcagcagcccccagccc

SEQ ID NO: 19198 - RNA, 72 nt, Homo sapiens
ccgacccggcgaccggcagacccaggggcaagacagaccggggagggaagcccagaggcacggggcagaaca

SEQ ID NO: 19199 - RNA, 82 nt, Homo sapiens
gccagaggaggaggccggggaaggccgcgggggcagcaagcagcagggacgcgaggcagccgaccgccgccaacacacagca

SEQ ID NO: 19200 - RNA, 81 nt, Homo sapiens
cccagcacgggaagccaaggcgcccgggggggaaggcagccgccccccgaaggggcccccacgggggaggggagccggaaa

SEQ ID NO: 19201 - RNA, 79 nt, Homo sapiens
gcggcagcccgagaccgcagcagcacagggcccaggccggaggcagggcggaccggccgcacaaccaccaccccagcag

SEQ ID NO: 19202 - RNA, 78 nt, Homo sapiens
caacagcacagccggcgacggcgcgggccgccccccgggcgaggcagagacgccaggggcaaagcgcgggaagcgggg

SEQ ID NO: 19203 - RNA, 38 nt, Homo sapiens
ggcggggggcgagcaacaccggggcagggcgaggaaag

SEQ ID NO: 19204 - RNA, 69 nt, Homo sapiens
gccaggagcggcccaccccaccagaggaagcccccagacaggacacagaagaacacgaggaggcgacgg

SEQ ID NO: 19205 - RNA, 75 nt, Homo sapiens
gcaaagacgaacaagaaaggagcaaccaaccacaggaggacaagagacgcgccaaggcgcagagaacaccgagcg

SEQ ID NO: 19206 - RNA, 77 nt, Homo sapiens
agccgggagacgacggagcccggaagcgcagaagcggacccaaagacaggaccacgcaccagcagagaaggaaagca

SEQ ID NO: 19207 - RNA, 49 nt, Homo sapiens
accagccaaaaagcaaggaaaccccccaggcaagaggcgcaggaccggg

SEQ ID NO: 19208 - RNA, 40 nt, Homo sapiens
cagaagagccaccagaagaaagaaccccgaaacacaagga

SEQ ID NO: 19209 - RNA, 81 nt, Homo sapiens
ccggaggcaagcccggcccggcccacacgacagcaggaccgccggacaaaggccgggccagcaagaggggcgggaggcccg

SEQ ID NO: 19210 - RNA, 81 nt, Homo sapiens
cagcacccacacggacggaccaccagaaccaaacgaaaaggcccaaagcagcaccgaagacccaaggccaccccacagcac

SEQ ID NO: 19211 - RNA, 74 nt, Homo sapiens
caaagacaaagcagaagaggccgacgaagcacgagcggcgcgaagaagcacagagaggcaaggaacgcccaccg

SEQ ID NO: 19212 - RNA, 69 nt, Homo sapiens
agcggggggacccgggagaagggcccgggacaccaggccagggcccacgagggcagcgaaacccaagca

SEQ ID NO: 19213 - RNA, 36 nt, Homo sapiens
cccacgcagcagggagaccaagccacccaccaacac

SEQ ID NO: 19214 - RNA, 78 nt, Homo sapiens
gggcgcccccacgcgggccgggggcgccggccacagcgaggcgaccacagagaagcccacccggaaacaaacgccagg

SEQ ID NO: 19215 - RNA, 73 nt, Homo sapiens
acagggaagaaaccagaaccagacggagacagaagagagcggaaagaagcgacccaggaggcccaccagcagg

SEQ ID NO: 19216 - RNA, 72 nt, Homo sapiens
cgggaacccccagggaagaagaaacccaagcccacccgggaagaagagagggcgaaggaggccacacagaag

SEQ ID NO: 19217 - RNA, 70 nt, Homo sapiens
aggagggagggacccagcagaggaaggccgccaacaaagaccgaaagaaccagccaaaacagaagagggg

SEQ ID NO: 19218 - RNA, 83 nt, Homo sapiens
ccgccccgcgggacagcggcaagccccccccggcagagaaaggcagacccggcaccacagggaaaacggggcaagcccagaaa

SEQ ID NO: 19219 - RNA, 72 nt, Homo sapiens
gccggcaacccacacaagcgaaggcgcgcaccggaagcaccagcgaggaagaccccaaaggccacgaaccgc

SEQ ID NO: 19220 - RNA, 65 nt, Homo sapiens
agcaggaagcacggcgggcgaaacagggcaaagaagacgagaccaacgcgcgggagcgccaaaag

SEQ ID NO: 19221 - RNA, 79 nt, Homo sapiens
cccggaagcgcgcgccaagggccgacacaacaccgagacaacgaggggaggacaaaaccaacaacaagccacccacacg

SEQ ID NO: 19222 - RNA, 86 nt, Homo sapiens
caacgaccggcggggggcgcggcgccgggacgcaccgcaccgagggcgagcccaggccgggcccccacgcccccgaccagacgagg

SEQ ID NO: 19223 - RNA, 89 nt, Homo sapiens
aagaacagaaggcgacaaggccaagaccgccagcaaaggaagacgaggagccaaaacacaccggaagaccccaccacccccgagagaag

SEQ ID NO: 19224 - RNA, 72 nt, Homo sapiens
gcccgggaccaccggcgacagcagaaagaaaagggagacccagcagcacgcccacacagcacacccaaccac

SEQ ID NO: 19225 - RNA, 81 nt, Homo sapiens
agcgcaagagcaacaccccaccccaagccaaaagaaacccccaaaaccggaagaaagagaaggaacagaggacacgcacac

SEQ ID NO: 19226 - RNA, 74 nt, Homo sapiens
gagaagaaggggaggggacagacggggccacccccacacgcccccagccaaacagcacccgacaagaaagcccc

SEQ ID NO: 19227 - RNA, 84 nt, Homo sapiens
caagaaggcagcgcgggcccgagggaggcagaggaagggccacccgcgaagggccagcagcacaaccggcgccggcagaggcag

SEQ ID NO: 19228 - RNA, 82 nt, Homo sapiens
ggaaaaccagagaaacaagaggaggagggcagcagccgcccaaaacacaaaccaaagaagaaacccgaaggaccacagagaa

SEQ ID NO: 19229 - RNA, 74 nt, Homo sapiens
gcgcggacgccacccgggggcacagcaaggacaagaccaggaagaggaaggacaacgggggaccaccgcaccag

SEQ ID NO: 19230 - RNA, 70 nt, Homo sapiens
caaacccaacccgagaacacgggagaagccgaagacgcacaaccaagaaggagaccagaaagcgggcaac

SEQ ID NO: 19231 - RNA, 81 nt, Homo sapiens
acaaaaccaagccagaagaacaccgaggccgaggggacgcggacgcaacagggaaaggagaccccaacaagccgcggggca

SEQ ID NO: 19232 - RNA, 81 nt, Homo sapiens
gaagcgggccccaagacccaccggagagaagaagagaccagagggacaggaggggcaggaagagaacacagaagaagagga

SEQ ID NO: 19233 - RNA, 55 nt, Homo sapiens
ggcgcgaagagaagaggcgggcgaacgccaccagacgggagacaacaacaagccg

SEQ ID NO: 19234 - RNA, 68 nt, Homo sapiens
ccaaaagaaccagaggagaaaacccacaaagaagcacagaacaacgcagggagagcaggaggagacca

SEQ ID NO: 19235 - RNA, 82 nt, Homo sapiens
gcggacaccccggacgaaccacaggaagcgcggggcggcggcgaaaggacgggacagagcgaagaaccccccaagaagacga

SEQ ID NO: 19236 - RNA, 66 nt, Homo sapiens
gaacgggacaacaaaagagccacccaaggaagcaaagaggcaagcccaaagagcaaacacagcaag

SEQ ID NO: 19237 - RNA, 59 nt, Homo sapiens
agaaaacggcaaggaagcacccagcaggcgaagaagcagcagcccaagagcagacaggc

SEQ ID NO: 19238 - RNA, 67 nt, Homo sapiens
gaaggggccaacccgcgggaccagaagccgcacgcacgcaacccccagggcggagaacggaaaagca

SEQ ID NO: 19239 - RNA, 71 nt, Homo sapiens
ggaggccgcgcgcggaacagacaagcagagccggcaccacaggaagccgagcagggaagagcgaaagagag

SEQ ID NO: 19240 - RNA, 56 nt, Homo sapiens
acacaacccgacccgacgaggggggacgaaacgccccagaggcagaagcgcaagcc

SEQ ID NO: 19241 - RNA, 76 nt, Homo sapiens
agagaagaggacgcggagacaagagcgaacggaggaaccacgcacagaggagcggcgacacgggccggcggggcgg

SEQ ID NO: 19242 - RNA, 91 nt, Homo sapiens
cggaggagaagggacagcccgggcccggggaaggggaagggaccgcagggcccggcaaagggccccggacaaagaggagaaccggacccag

SEQ ID NO: 19243 - RNA, 69 nt, Homo sapiens
aggccccagaacaccggcgcgggacaaccaacacaaccaaagagaagaaaacgcaaagaacagaacaag

SEQ ID NO: 19244 - RNA, 55 nt, Homo sapiens
gcccccgagggcgggaacaggggcacagaccagcgcgaagacaaggagcagggag

SEQ ID NO: 19245 - RNA, 79 nt, Homo sapiens
acggcagagagaagaaagaaagggggaacaggaggggcagaacagagagcggaacggaaggaccacaacacaggcagga

SEQ ID NO: 19246 - RNA, 77 nt, Homo sapiens
aggcagagccgggccagccaaacaggaagagggagcccgccgacagcccacaccaacccacagagagagaggaaacg

SEQ ID NO: 19247 - RNA, 55 nt, Homo sapiens
gccaaaaaggaccaaaggagagccggagcgagcaggcagcaggagaaacgagaag

SEQ ID NO: 19248 - RNA, 71 nt, Homo sapiens
ggaagaaccccccgggagccagaccggcaccgaagaccgcaccagggacccgggaacgaccccgaagcccg

SEQ ID NO: 19249 - RNA, 78 nt, Homo sapiens
ggagcagggagccggaaagaagagaagaccagcaaaaggagaccccccgaaaccaaagagccaggcgacccccgcgcc

SEQ ID NO: 19250 - RNA, 77 nt, Homo sapiens
ggccgcgccaagaagaggacaagagggcagaagaagaacgcgggaggagcacaaacgcccaccacacagcagaaacg

SEQ ID NO: 19251 - RNA, 52 nt, Homo sapiens
acaaagagccgccacgggcaagagacgaaaccagcaacacagggagaacgga

SEQ ID NO: 19252 - RNA, 76 nt, Homo sapiens
ggacggaggaccccagaaagcagccgaagcaggacacaaagaaaagacgaaggaagcaacacaaggaagcggaggg

SEQ ID NO: 19253 - RNA, 72 nt, Homo sapiens
aaaaaagacgaaaaaaaggcaacgcgaaaaaaagagagaaaacaacccacaccgagccaccggaggggaaga

SEQ ID NO: 19254 - RNA, 82 nt, Homo sapiens
aaaaaacccaaggcgcaaagacaagcagaccggaagaccgacggaagaccacaccccgagggagcccaggacaccacgagaa

SEQ ID NO: 19255 - RNA, 75 nt, Homo sapiens
gggcgcggccggaccgcagccgcaaggccggggggggcacagagccccggaagacagcccccagcgaccagaccc

SEQ ID NO: 19256 - RNA, 70 nt, Homo sapiens
caacacggggcccagcaggaagaggcaaaagcgggagggcaaaagacggagcaggcagacaacagaacag

SEQ ID NO: 19257 - RNA, 42 nt, Homo sapiens
gcaaaggcgcagaggaaagggcagcggccggcggggagcccg

SEQ ID NO: 19258 - RNA, 72 nt, Homo sapiens
ccagagcgccagagaacccaccaccccgagccgcccggggagaggaaccaaccaccaaaccccaggaaccac

SEQ ID NO: 19259 - RNA, 74 nt, Homo sapiens
gcgagaccccagacacccgccgacgggcagcacacccaccgagccgagagggaccaccccacacagaccgcgcc

SEQ ID NO: 19260 - RNA, 67 nt, Homo sapiens
ggccacgagcaccgcgccggcccagcaccccgagaaccgcaggagccagaggcagcaacacgcaacc

SEQ ID NO: 19261 - RNA, 75 nt, Homo sapiens
acaagacagcgcaaggcagagccacagaagcgaaggccaccagggagaaccagcccgaaggcccacaccccgaga

SEQ ID NO: 19262 - RNA, 52 nt, Homo sapiens
gaccaagaaccagaaaaggcgggggggagaagcacgcgcccgcggagacaca

SEQ ID NO: 19263 - RNA, 87 nt, Homo sapiens
ggggcgcagcggcgccgcgcccaggagggagggacacagccccaaacaggacgaaggcggcgaagacagaagcgaaggggacagggg

SEQ ID NO: 19264 - RNA, 39 nt, Homo sapiens
ggcggcggcggcggacggcggcacgggcccagacgcaga

SEQ ID NO: 19265 - RNA, 60 nt, Homo sapiens
gggacgaaacaaaaagaccggaagcgagaccgcccaggggacccagcccccaaccaggga

SEQ ID NO: 19266 - RNA, 77 nt, Homo sapiens
cgccacaagaaagagcaggacaagagaaaggaacgggaggagaaagcacaggaggcacaacaaggcaagccacgagg

SEQ ID NO: 19267 - RNA, 77 nt, Homo sapiens
gggaccccccaagggcggaaggacgacagaaggccaagagaggccaacagaggaacaaggcccgcagaacccaagag

SEQ ID NO: 19268 - RNA, 72 nt, Homo sapiens
gacggggcgagaccccgcccggaccgcaggaggcacggcacaaaggcccgacgccggcgaaagacggaaacg

SEQ ID NO: 19269 - RNA, 82 nt, Homo sapiens
aagagaagagaaaggcccggagacgaggagacagcaaggaagaagaaaagagagccaaggcggcaaaacccaaaaccagggc

SEQ ID NO: 19270 - RNA, 82 nt, Homo sapiens
ccaccaccaccacccacacccaccaacaacaccacaaaaccacagccaagagcggccgcgaacaccgagccaaccccaccac

SEQ ID NO: 19271 - RNA, 78 nt, Homo sapiens
ggcggaagaccccaaagaagggagccgaagcgaggcggaaaacgaagacagcaaaaggaaaagccgaaggaggccaag

SEQ ID NO: 19272 - RNA, 58 nt, Homo sapiens
accacaacccccagacgcaagccaaggaaccgggaaaacagaagcacaaaaaaacaga

SEQ ID NO: 19273 - RNA, 59 nt, Homo sapiens
cacggcccagccccagaaaaggaacacaagagcggaccgcgaagagagacacgcaggaa

SEQ ID NO: 19274 - RNA, 74 nt, Homo sapiens
gacagacaacggcagccgcaaggacacccagcaggcaaaggccgacagacagagaacccagggggagaaagacc

SEQ ID NO: 19275 - RNA, 78 nt, Homo sapiens
cggcggcggcagcggggccgggccggagcgccacaagaggagccagccacacggaaagaagaaaagaaaagagagagc

SEQ ID NO: 19276 - RNA, 92 nt, Homo sapiens
ccgggacgcacgccagcgaggaggacccccaaagggagcagcagccccgagaaggaagaggaggaagcgagggcccgcgagggcgcaggacc

SEQ ID NO: 19277 - RNA, 68 nt, Homo sapiens
cgcaccgcaggcagacaaaagggccaaagaagggagagaggcacgcagaaaagaagagcgaaacggga

SEQ ID NO: 19278 - RNA, 48 nt, Homo sapiens
cacaggcgcggaaccaagaggggccggccaagggcgacggaacccacc

SEQ ID NO: 19279 - RNA, 68 nt, Homo sapiens
gaagacaccggggacagacaggggacaagacggacagaaacgaacagcgggcgagccaggggagccag

SEQ ID NO: 19280 - RNA, 72 nt, Homo sapiens
gccgaaagcccgaaaaagcaaagagagagagagaaagaggagcccaaaagaaacagggcgcaggaaaagacg

SEQ ID NO: 19281 - RNA, 91 nt, Homo sapiens
gggagcagaggggacagaggcaccaaggaccccaagacaggccagcacccgcccgaggacagagaggcgagcgcccggaggggagagagcg

SEQ ID NO: 19282 - RNA, 72 nt, Homo sapiens
ccgcaagccagggcaggaaaaaccaaggaacaccaaaaaagcgggccgaagacaacccagaggcacagaggg

SEQ ID NO: 19283 - RNA, 61 nt, Homo sapiens
cggggcaaaggaccgcgaggcggcgacgaggggcaagcaagaaagaacagagaccgggggg

SEQ ID NO: 19284 - RNA, 57 nt, Homo sapiens
gagccgaacccaccgagccagggaggaaaggaagccgggggaccaacaacaaagcac

SEQ ID NO: 19285 - RNA, 99 nt, Homo sapiens
aagagcaacacagcgagcagcaccgggcacacgcagaagcacggaggacaagacacgggaaaagaacagaggagccacagagaacagaagaaagaggcg

SEQ ID NO: 19286 - RNA, 64 nt, Homo sapiens
acaagaagggcaaagccgaaccccaggcgccccccggggccaagcaacagaccccacaagacag

SEQ ID NO: 19287 - RNA, 76 nt, Homo sapiens
ggccaccccagcagggccggagcggcgggggagggccccaaggcagggcccaggccacagccgaagaggcgggaga

SEQ ID NO: 19288 - RNA, 77 nt, Homo sapiens
gacagcgaaagcgaacaacagcgaagcgaaaaaccaaaagaacagagaggagacacagccgcgagggaagcaaaagc

SEQ ID NO: 19289 - RNA, 92 nt, Homo sapiens
ggagcaagaggaggagacgcgcgagagccgggcggggccccgagcagacagcaggaaagaagaagccccggacacccagggccaggcgccaa

SEQ ID NO: 19290 - RNA, 75 nt, Homo sapiens
ccagccggcagcccggaggcccaggccgggcccccagccggggcgcgagccgggagccagaccaacggacagcag

SEQ ID NO: 19291 - RNA, 82 nt, Homo sapiens
gccccagcgacgccgcaacaaaggaagccaaaggcagagaagcgacccggcgaccgacagagggcaggggcaagcaccaccg

SEQ ID NO: 19292 - RNA, 74 nt, Homo sapiens
ccccccccccaggcgcgcccgagccgcagccacccgccgacaacccggaccccagccgccgcgcgccggggaag

SEQ ID NO: 19293 - RNA, 86 nt, Homo sapiens
cgaaggggaggaaggccaaagccaagaccgaggggagaagaagagaaccccaaggaccaaaggaacgcgaaggaaagaagggcgcg

SEQ ID NO: 19294 - RNA, 72 nt, Homo sapiens
gagaacagcccgaccacgggaaaaagacccgagaagcgcagacccaccagggaaagcaaaggcagggccaaa

SEQ ID NO: 19295 - RNA, 78 nt, Homo sapiens
gacgacagagacgaaaaaccgaggcgagacccaaagggggagagacaaccagagcggaaagggagaaaagcccccaga

SEQ ID NO: 19296 - RNA, 74 nt, Homo sapiens
cgaagaacaagaaaaagcacaagagcaccaacgaggcaccaagccaggagaagggagacgggcaagaccacgcc

SEQ ID NO: 19297 - RNA, 70 nt, Homo sapiens
cacaaagccaaggccgccgaggagaaaaccggaagagaaaggccgggaagcaggaaagaaaaaaacaaca

SEQ ID NO: 19298 - RNA, 84 nt, Homo sapiens
ccgcccaccaaagagacccccggagaaccgggcccagcagcacgggggcggccggccggacggaccacacgacgcgcagacgga

SEQ ID NO: 19299 - RNA, 54 nt, Homo sapiens
ggacagcagaaaggagaaggaacaagaggacaagcaccgaggccgcggccacgg

SEQ ID NO: 19300 - RNA, 68 nt, Homo sapiens
agagaagacaagcacaacgggcaagaaaagacaaacgcacaagcgaagaagaacgagggaaccagaag

SEQ ID NO: 19301 - RNA, 79 nt, Homo sapiens
gccgggggaggcggggagaccgccccggacgggaggaccgcggacgacggccgcagagggggaagaacacacgagagaa

SEQ ID NO: 19302 - RNA, 69 nt, Homo sapiens
ggacgccccaccgccgacgcccccagccaccagggacggaaaaggcgcacacgacccggagaaccccac

SEQ ID NO: 19303 - RNA, 59 nt, Homo sapiens
ccccacggcacccccaccagaagagccaaaaggagaagcgaacaaaaaaaaccccaaag

SEQ ID NO: 19304 - RNA, 83 nt, Homo sapiens
ccccgcacgagcagccccgccgggagaggcagcagaaaaggccaaagcagcagccggggaggccaaaggaaaaagcagcgggg

SEQ ID NO: 19305 - RNA, 94 nt, Homo sapiens
gcgacacaagcggacagaacagacgggacccccagccaaaggcaaagagggaagagcaagggacaacagacaccaaacagccagaggaaggcac

SEQ ID NO: 19306 - RNA, 70 nt, Homo sapiens
ggagagggcggcccagggggccacgcgagagacggcaacggaaagcccgggcagagacaagaccaggcga

SEQ ID NO: 19307 - RNA, 84 nt, Homo sapiens
cccagcaggcaaacagaccggagaccgcgcagaagacacgcccggaagaccagccaacagacgcagccgagacaccagcccgaa

SEQ ID NO: 19308 - RNA, 62 nt, Homo sapiens
acagagaaagaaggcggccaggccaaccgaaggaggagaggagagacccagagccgacagaa

SEQ ID NO: 19309 - RNA, 104 nt, Homo sapiens
gaacacgccggagccgccaggaacagcgacaccaccagaaaagacagcgcaagcaagccaggacaggagaagagcgagaagaagaggaagaagagcagacagga

SEQ ID NO: 19310 - RNA, 36 nt, Homo sapiens
gcggaggaggaggaagagcagccgagagagcccccc

SEQ ID NO: 19311 - RNA, 83 nt, Homo sapiens
gcagcggaccggagaggaggagggcgggacaacacgaggacacaagaagaacccaagaaggcagaagccagccccgcaggccg

SEQ ID NO: 19312 - RNA, 67 nt, Homo sapiens
ggccacgacccagcggacggaaccagcagggaaggagaggaggaccagaaaaacaagacacacgggg

SEQ ID NO: 19313 - RNA, 77 nt, Homo sapiens
cagaaaaagagaaaaaaaagaagaggacaagacaggaaacgggaagaaggaagccccgcgccccgcagaacccgaag

SEQ ID NO: 19314 - RNA, 76 nt, Homo sapiens
gaaggccccccaacacccccaaagggacagaggcagggcgaagagagaacacgcacggaaggaaggagaccacgag

SEQ ID NO: 19315 - RNA, 74 nt, Homo sapiens
gggcccggacgcagagaccggagagggacacagcgaagccgggcgggggaggcgagacacgggaggcacacaca

SEQ ID NO: 19316 - RNA, 72 nt, Homo sapiens
aagccacagaaccaaaaaacgagagacagaagccaaagaaaggaaaaaagcagagagaacacaagccaagcc

SEQ ID NO: 19317 - RNA, 71 nt, Homo sapiens
gaagaagaccaccgggagagagggaaaaaacaaccccgccgggggaaaagccagccagaacacagaacaga

SEQ ID NO: 19318 - RNA, 91 nt, Homo sapiens
ggcggcccaggcgcacaccgcggaccgaaggagaagaaggagaaggggaggagaaggcaagccggaaagagcgaaagaaagaagggggagg

SEQ ID NO: 19319 - RNA, 85 nt, Homo sapiens
ggagaggaggggccaggccagcgacggggccaggaagcaacggaagcgcagcaacagcaagccccgggcagagccgccggccgac

SEQ ID NO: 19320 - RNA, 77 nt, Homo sapiens
gcgggcgcgcgcgcgccggagccgccgccgccgccgcggccccgccaggacccaaagacaggaccacgcaccagcag

SEQ ID NO: 19321 - RNA, 76 nt, Homo sapiens
aaggcccaaagagcagaacagagagacagccagcccagaccagcagcggaggaggagaaagagaggacccccggac

SEQ ID NO: 19322 - RNA, 84 nt, Homo sapiens
gcagcacaggccaggcccagcagcaggccggcaggaagagaacgcaaccccaggagccagcaagggcgcaagcccggaccccag

SEQ ID NO: 19323 - RNA, 84 nt, Homo sapiens
ccaaccccgcacacgggccgcggcacccagcaggccaacccgggcccaacagcaacaggccaaaaaaagcggggaaggggggca

SEQ ID NO: 19324 - RNA, 81 nt, Homo sapiens
cgcaagaaaccgaaggggacccagcccggggacacaagcccccaaggccccagccaacccgaaaaccccccagcggccaca

SEQ ID NO: 19325 - RNA, 83 nt, Homo sapiens
gcaacaagaagcagcagcacagacaacaaacccagaagaagagccaccgagaagccaaggacacaaccagagggaagcacgcc

SEQ ID NO: 19326 - RNA, 73 nt, Homo sapiens
cccagcacgaggaggcgcgaggagagggcggagaacggaaaagcaccaggaagcagagaggaccgcagaaggg

SEQ ID NO: 19327 - RNA, 79 nt, Homo sapiens
aaaaccccaagagcacacgcagacacggaggcacacgagcaggagagagcgaagcaccgcgcagaccgaaaggcacacg

SEQ ID NO: 19328 - RNA, 45 nt, Homo sapiens
ggagaaaaaagccaccacggcacgaggaaaccccgcagagcagac

SEQ ID NO: 19329 - RNA, 56 nt, Homo sapiens
gagcacgagagccaacggcacgggaccaccgcagaacagcacagaaaaaaaaagac

SEQ ID NO: 19330 - RNA, 55 nt, Homo sapiens
cagcgcgggagccgcacgggccaagggggagagagacgcgggaaccgccagcaaa

SEQ ID NO: 19331 - RNA, 74 nt, Homo sapiens
caaaaagggcacaccagcagacgccaaacgcgaaagggagaaagaagaacgcccggaggcggacaaaggcgcaa

SEQ ID NO: 19332 - RNA, 74 nt, Homo sapiens
cgagccggaccggagacggggccaacaggacaagcccccacgaggaaaacccccccaccgaaggagggccccac

SEQ ID NO: 19333 - RNA, 82 nt, Homo sapiens
ccagccacgcgggcgaggagggcacaaggccaggcccaagagccaggacgcccggccggcgcccagaagggaagacccccag

SEQ ID NO: 19334 - RNA, 81 nt, Homo sapiens
aagagcggagagacgaaagaggcgcagaacaagcaaaagcaagcccagccgagccaaggaccggacgggcaacaaaaaaga

SEQ ID NO: 19335 - RNA, 73 nt, Homo sapiens
cggccgaggggcggacaccagcgagcggagcgggcgacgaagcacagagccagccaccccacccaacccgagc

SEQ ID NO: 19336 - RNA, 67 nt, Homo sapiens
cccagcccccgagggcgggacacagcacggcacaaggggggggggaaagagagaggacgcaggccag

SEQ ID NO: 19337 - RNA, 92 nt, Homo sapiens
caaaccaagaaaccacaacggccacagcggccggagccgggcagagaaaagaacgcgaggagaaccccaggaggaggccagaggggaccgaa

SEQ ID NO: 19338 - RNA, 77 nt, Homo sapiens
gggggacgccccgacggccagaagcgacccaggcgccacaggagccgcagaagcaaaggcaccgccaaaccgaaaac

SEQ ID NO: 19339 - RNA, 69 nt, Homo sapiens
agacgcacgccggaccgagaaaggaaaagcggacccacccaaggagaagaaccggacacagaagggaag

SEQ ID NO: 19340 - RNA, 76 nt, Homo sapiens
gccggacgcccccccgcagcgccgagagacgccccaccaggcacaggcagaaggcggcagggagcacgcaccagga

SEQ ID NO: 19341 - RNA, 74 nt, Homo sapiens
gcgccaaaggaagaaaacgcagacgccagacacacagccccagcaaccaccaaacaggaggagacagaacagcc

SEQ ID NO: 19342 - RNA, 78 nt, Homo sapiens
acaggacccagcgcgggacagccagggaagggaaaacaacagccaaagcaacgaaagaagcagacaaacggagcccag

SEQ ID NO: 19343 - RNA, 78 nt, Homo sapiens
gacacgacaacaccccaaaagccgaccgggccaaggagacaggcccggggaggcaagcaggggggcaaaggaaagaag

SEQ ID NO: 19344 - RNA, 75 nt, Homo sapiens
cccgggcaaggaccccgccgagcccccaagagcaggacaaggaaaaagcagcaaagggagaaaagaaggccaaac

SEQ ID NO: 19345 - RNA, 73 nt, Homo sapiens
ggaaaaaagacagagggaaagcacggaacacggggaagggcccacccaaaaacagcgggcaaagacacaaagc

SEQ ID NO: 19346 - RNA, 87 nt, Homo sapiens
aggaaaagcaggccgaagaaccgagcgacagagacaagcgagcgccgcacaaaaagcagagaggaggaccaaagacacgcaccagca

SEQ ID NO: 19347 - RNA, 71 nt, Homo sapiens
cgacaggagacgaaccaggccacccaagaaacaaacaggggccgaaaagaaggacccaacaccgccccaag

SEQ ID NO: 19348 - RNA, 41 nt, Homo sapiens
acaggaacagggaccacggggagcaaacagaacaaaaacaa

SEQ ID NO: 19349 - RNA, 73 nt, Homo sapiens
ggacccagcgaggagggcgaagcacacagcagaggcggaccagacgggaagagcccaccccggagccaaggag

SEQ ID NO: 19350 - RNA, 61 nt, Homo sapiens
cgcacccgaggaggagccgaggggagcccaaaagcacgaagcgccagaggacaccgcggcc

SEQ ID NO: 19351 - RNA, 80 nt, Homo sapiens
ggacacggacggcgcgccgcgaccccagccggcgccgagggcggaaccgagcgggaaaaggaccggggcccaagagggga

SEQ ID NO: 19352 - RNA, 82 nt, Homo sapiens
ccaagagacaccaaggagacgcccaaggaaccccgccggccaccggcgagaagaccccaacgacaaaagccgcagaccacag

SEQ ID NO: 19353 - RNA, 74 nt, Homo sapiens
aaagaagccacccagagagaaccagaaccagaagagggaagcacagagaagccgaggcggcacgacagggcgga

SEQ ID NO: 19354 - RNA, 70 nt, Homo sapiens
gagagggcggcaggaaaggaagacagcaacccccagccacaacgcgaaccgggcggacgaaggaggcggc

SEQ ID NO: 19355 - RNA, 75 nt, Homo sapiens
caacaccaaggcacaccaccccagggaaaagccgggccacagaagcaccaccacaagccacaccaacaaacgacc

SEQ ID NO: 19356 - RNA, 75 nt, Homo sapiens
ccacaagcccaggccaggccgggcgcgaggaggcggggccggccgcgggccccccgggagaccggcgggggccca

SEQ ID NO: 19357 - RNA, 71 nt, Homo sapiens
gccacccgcgaaaagagccacggggccaagaaggggccccagacacgacgcccccggccggcccgggccgc

SEQ ID NO: 19358 - RNA, 80 nt, Homo sapiens
cacaacaccacccccgcccgggccgggggccgccgggacccggccaccagcaagccggcccgagaagcaggggaaacaga

SEQ ID NO: 19359 - RNA, 63 nt, Homo sapiens
ggcaaacgggccaggcaggcggaagggcacagaggacacaaaaacaagcgagagggacagcag

SEQ ID NO: 19360 - RNA, 83 nt, Homo sapiens
gcgggcagcggcgccgggcacaggagggaagagcaagaccgagacaggggcccggcaccgcgcccgagcccacccacagacag

SEQ ID NO: 19361 - RNA, 52 nt, Homo sapiens
gagacggcggaaaacggagagacggggagaaaagcagaccccacgagcgaaa

SEQ ID NO: 19362 - RNA, 82 nt, Homo sapiens
ggaccaggagaacggcggcgggaagaaaacaccggagcccaagacaccaaaacagacgcaggcaagaggcagaaggacaaag

SEQ ID NO: 19363 - RNA, 69 nt, Homo sapiens
aaaacagagggacggcagcggaccgggcccaaggaaaaagaagagcacaagaccagcagacgaccacag

SEQ ID NO: 19364 - RNA, 71 nt, Homo sapiens
gcgcggccgccgcccccccagggcaaacaacccccagggggccacccaccgaggaaccaaaccacagacaa

SEQ ID NO: 19365 - RNA, 71 nt, Homo sapiens
gagcccagagcaggcgccaaccaagagccaagccagcagaaaagcccaggaaccgggagggagaagaaagg

SEQ ID NO: 19366 - RNA, 85 nt, Homo sapiens
gcccgcaaggccaaggagaggacaagcgacgcgggcccaccgggcgccacaggccccgagccccggccccaaagacccaaaacag

SEQ ID NO: 19367 - RNA, 70 nt, Homo sapiens
gcgccggggcggcccaggcgagcgggacgcagacaccgcagcgagggacccagggcacccccaccccccc

SEQ ID NO: 19368 - RNA, 61 nt, Homo sapiens
gccgggggcgacccccccgcgcccccccccccgccagaaggggggagaaggaacaagccgc

SEQ ID NO: 19369 - RNA, 68 nt, Homo sapiens
acagaaaaacaaaagaaaggcaagagaaacacagaaagcgcgcaacaccagaaaggaaggggcagcga

SEQ ID NO: 19370 - RNA, 74 nt, Homo sapiens
aggcgccgaaggaccgacgcccggaagccaacaaaaccgcaccagcacccggggccccgaagagcggcgcccac

SEQ ID NO: 19371 - RNA, 67 nt, Homo sapiens
agccggaaacggacaaacaggagcagacggcccccccagacgacaaggccggaacagacgagccggg

SEQ ID NO: 19372 - RNA, 59 nt, Homo sapiens
gaacagcaggcgccaccagcccggagccacggagacacggaagggaagcgggagagaga

SEQ ID NO: 19373 - RNA, 55 nt, Homo sapiens
aagacaccggacaccgagggcccccaaaaggcccccagaccccaccaggcgcgca

SEQ ID NO: 19374 - RNA, 66 nt, Homo sapiens
gcgcgagcgccgcaccacacacgccaggcgggcaccacggcaggggcgagcaccccaggaagggag

SEQ ID NO: 19375 - RNA, 67 nt, Homo sapiens
gccacgaagggaaaaacacaccacaagacgaaaagccccggcgcgccaaccagaggagccccgcacc

SEQ ID NO: 19376 - RNA, 79 nt, Homo sapiens
aagagggccccgcccagagaggcaccggagacgcgggcagaaaaaggaaaggaaggcggcgggggagcacgaggagccg

SEQ ID NO: 19377 - RNA, 71 nt, Homo sapiens
ggaggagccggaccggaaccagaccaagggaacggaagccccagcccgcgcgagccaggcgcccacaggag

SEQ ID NO: 19378 - RNA, 59 nt, Homo sapiens
gccccaggaccagcgccggagcggacgaggcgaggaaccaaaggccaccccgccgagcc

SEQ ID NO: 19379 - RNA, 56 nt, Homo sapiens
aggagcaacgagagaggcccccgccgagcacggaaagacaacaggaagcgaacaag

SEQ ID NO: 19380 - RNA, 68 nt, Homo sapiens
accagacaaggaaacagcagaaaccggaaccacacacaccacaggaagccaggacgaaacgcccaccc

SEQ ID NO: 19381 - RNA, 70 nt, Homo sapiens
caggcgaccccaagagcgaccgggagaccaaaacagggcagcacaagaggagaacgccccaggggccccc

SEQ ID NO: 19382 - RNA, 69 nt, Homo sapiens
ccacccccgggggaaaagaacgagggaaggagaacagagggaaaaagaccagagaaagggggggaggaa

SEQ ID NO: 19383 - RNA, 123 nt, Homo sapiens
cgcgaacggagaaggaaaaagaaacggaaccccaacagagaaaaaacacaaccaaagagcgggaggaaacaaggagaggagaagcgcacagaagccgagggaggcgcggagaagcacggcgag

SEQ ID NO: 19384 - RNA, 106 nt, Homo sapiens
accacaccaacaggcggacaggaggagcagaggacacgaaaagaagcaagaagaccaaaagaaggggagcccagaagcgagaggaaaaggcaaacgacgcagacag

SEQ ID NO: 19385 - RNA, 77 nt, Homo sapiens
ccagaccagccggcaccggacgaggaagggaagacacaggaagcgccgaggaaggaaaccagcccagaaccgcaacc

SEQ ID NO: 19386 - RNA, 51 nt, Homo sapiens
accgaccaccaaaagaagacccgcggaaggcacacaagacacagccaacac

SEQ ID NO: 19387 - RNA, 67 nt, Homo sapiens
aaccagacacccagaaaaccacacaagacccggcgacacagcaggacgaacagcccgagaaaagaac

SEQ ID NO: 19388 - RNA, 81 nt, Homo sapiens
aaggaaagccggcccagaaacacacaaaccggcagagaaaaggaaaaggcgcaagggaaaggaaaagcccagccacagcac

SEQ ID NO: 19389 - RNA, 62 nt, Homo sapiens
ccggccgggcccccagaggcgggagcgcggaacagaaggagcggcggacacacagaccccca

SEQ ID NO: 19390 - RNA, 83 nt, Homo sapiens
agaaacaccaagcagggcagacccccaaagaacaaggggcaaagaaaaaggagagaaaaagaggcaaaacaacaagaagaaaa

SEQ ID NO: 19391 - RNA, 75 nt, Homo sapiens
cccagcaggaaggccaccgagggaacccgaccggacccagccccagaagccaaagagaagcaggagaaggaacgg

SEQ ID NO: 19392 - RNA, 79 nt, Homo sapiens
aggaacggagaagaggaggacagcaacgcaagaagcagcagcagagagagacagggaaggaagggaacacggacgacga

SEQ ID NO: 19393 - RNA, 83 nt, Homo sapiens
accagagcggcccccagcaccacagcccgcagccccgccagccacccccagggaaagcaacggcgcaagcggcggcggcgggc

SEQ ID NO: 19394 - RNA, 78 nt, Homo sapiens
gcggcgcacgccggagggccggcggccggcagcgcgcacgccgcaaggaccggaagaagccaagcgccccccccagac

SEQ ID NO: 19395 - RNA, 53 nt, Homo sapiens
aaggaccaagaaccaggcacaggcccaaagaccccaaaaggagacaaagacaa

SEQ ID NO: 19396 - RNA, 83 nt, Homo sapiens
ccggcccgagagaaccgcggcagaagccgagcaacaccccggccaccgacccacaagaccaacgggacccacccccaccacgg

SEQ ID NO: 19397 - RNA, 52 nt, Homo sapiens
cgccagcggaaacaggcagaaacccgcagacagcccccacccaggaaggaac

SEQ ID NO: 19398 - RNA, 84 nt, Homo sapiens
cgggagcacaccggcggagacgggcggccggccgacccccgcgcgacggcgacgcgggaggccagacaggaagggaaggggcgg

SEQ ID NO: 19399 - RNA, 79 nt, Homo sapiens
aggaagaaaaacgaggacaagacgagaggaagaaacaagcgagaggaagcacagcagaggagggagcacaagccggggg

SEQ ID NO: 19400 - RNA, 81 nt, Homo sapiens
gccggaagcagaccccagcagcaggcacggaccggccacaggggccaccgcacagggcgccaccagcgggaacccaccgga

SEQ ID NO: 19401 - RNA, 75 nt, Homo sapiens
caagggcgaaggagccggcccaaggaaaccacacagcggccgaccccggagaccaccacccgacggcgccaacca

SEQ ID NO: 19402 - RNA, 85 nt, Homo sapiens
caggcaggaggacgggaggaccaagagagggggaggagcgggcagggggcagcggcgacgcggaggggggaagaacggaagcgac

SEQ ID NO: 19403 - RNA, 81 nt, Homo sapiens
gccagccggcccgaggacaccgacaccagcagggaccggagggccggaagcgggccgggacaacgggcaggagccggaagg

SEQ ID NO: 19404 - RNA, 88 nt, Homo sapiens
gcggaagcggccggcaggggaaggacgagggaaggaggagacgcgaaggaaagacccgcaggagcggaggaggcagaagaccggaggc

SEQ ID NO: 19405 - RNA, 86 nt, Homo sapiens
gggggcggccgggacggaggacgcgcaggccacccagaggagaaggccaccccgccggaggcacaggccagaggggcccaggaggg

SEQ ID NO: 19406 - RNA, 75 nt, Homo sapiens
cgccagcggccgggagaccgcgcacacgcagacacccacaagcacaagggcaccaagggcaggagaagggccaga

SEQ ID NO: 19407 - RNA, 39 nt, Homo sapiens
gaaccacaaacaaggcgcagagcaccacaagaagccaaa

SEQ ID NO: 19408 - RNA, 76 nt, Homo sapiens
aggagaggggagcggagacaaagccgccaggagccagcgggcgacagacagaagaggaaagacccaaaaaagcgag

SEQ ID NO: 19409 - RNA, 73 nt, Homo sapiens
gagcacccaaggcaaaggcggcaggcacagaggcaagcggaacagagggacaaaaggacgacacccacggaag

SEQ ID NO: 19410 - RNA, 59 nt, Homo sapiens
cggaagaaggcggagaaaaagccaacgcagggaagcaaggcaccggacaagagcagaga

SEQ ID NO: 19411 - RNA, 67 nt, Homo sapiens
gaccaaaagaacaaacgccaaaaagccaggaaaagaaggcgagcaggagaagcaacaggacagagaa

SEQ ID NO: 19412 - RNA, 73 nt, Homo sapiens
ggaagggagagggaagaccagagcgaaacgaagggaccaagaaaggcccagggaccaaagcccggacaaggcc

SEQ ID NO: 19413 - RNA, 58 nt, Homo sapiens
ggacgcaccggcacgcaacaagcccaagaccgcaaaaacagagcgccccggccggagc

SEQ ID NO: 19414 - RNA, 80 nt, Homo sapiens
cgggccagcgacccgcgccagcgcccagggggggaaaccaccgaaacgaaggaggcccaaccacaaaaggagccgacgga

SEQ ID NO: 19415 - RNA, 52 nt, Homo sapiens
aagaggccagacagagcagggcaccggcagacaaacaacgggacacaggagg

SEQ ID NO: 19416 - RNA, 69 nt, Homo sapiens
acccgcaacagggcacccaccagcccgcccgacgagagagaagcccggacagaagcgagcagcagagga

SEQ ID NO: 19417 - RNA, 76 nt, Homo sapiens
cggggaacagccggaagggcggggggcgggccggaggggagacgggaggcaggaaggcaaacagggggcaccgacc

SEQ ID NO: 19418 - RNA, 82 nt, Homo sapiens
accaaacaggacacaccaccaagagaggacgagagaacggaacaccagaggcaccaccgcgaaacagcccgaacgcacagaa

SEQ ID NO: 19419 - RNA, 76 nt, Homo sapiens
gaagagaccgaaaaaccagccaaaaccaggggaaccaaacaaggcagacacacaggaaaaacaggcaaaacaggaa

SEQ ID NO: 19420 - RNA, 79 nt, Homo sapiens
gaagccagagcagccgcccaaccgcgggaccaaccacccgagcggcgcggacgaagggcagaaaagagcccgccagaga

SEQ ID NO: 19421 - RNA, 69 nt, Homo sapiens
agcgcccagagaggccggagcgcgaagacgcagggaaagcggcacacgaaaggggcacggcaggacgag

SEQ ID NO: 19422 - RNA, 85 nt, Homo sapiens
cagcgggccggaggagccagagcgcagaaagagagaaaggcagaaggaacgacaccacagaagaaaagaagaaaagaaccaggaa

SEQ ID NO: 19423 - RNA, 42 nt, Homo sapiens
ggcgaagccgcgccgggaaagaaagagccgcagacgcacagc

SEQ ID NO: 19424 - RNA, 56 nt, Homo sapiens
cagaaaaggagagagagaaggcaacacacagagcccccgaaggaaggcgcacgcgg

SEQ ID NO: 19425 - RNA, 72 nt, Homo sapiens
cacccaaaagaccaggagccacaaaggagggcgccacggggaaacaacaaaggagggaacaagaacgaaaag

SEQ ID NO: 19426 - RNA, 73 nt, Homo sapiens
acccaccgcacacggggccaagcagggcagcggaccacacaagcaggccgcgacccgagccggaagaggaccg

SEQ ID NO: 19427 - RNA, 81 nt, Homo sapiens
ccgggacagcaggagggggccacggccaaggagcaagaacgcggcaaaaagcaaagaaagagaaaaaagaaacagaacaag

SEQ ID NO: 19428 - RNA, 118 nt, Homo sapiens
ccaaggcaccaagacgcgagggcagcaagccccaaggacgcggccggcacccgcaggccacagagacgccggcccaccagccagcggggagccgcccaccccacaagggaggacccag

SEQ ID NO: 19429 - RNA, 112 nt, Homo sapiens
cgggaaaacacaccggagacggggggaaacaggcgaggcggcggcgcccggagggcagcgagacaagcggagaaaggcacagcagaagaagaaacagaagaagaagagcaga

SEQ ID NO: 19430 - RNA, 68 nt, Homo sapiens
gcaggccaccaaaaagaacaggccggaacagaacaaggcacggcccggcagcccaggcgcacgcagca

SEQ ID NO: 19431 - RNA, 72 nt, Homo sapiens
aggggacacgggcggaaccccggaaccaggacacggagaaggcaagagaccaaggggagagcgcgggggaga

SEQ ID NO: 19432 - RNA, 50 nt, Homo sapiens
cgagcgggaggaagagacggagcgcccagaacaccacgccacccaagaga

SEQ ID NO: 19433 - RNA, 91 nt, Homo sapiens
agggcgcaaccaaagcaccagaccccaccagcaacgggccgccccccgggcgaggcagagacgccaggggcaaagcgcgggaagcggggcc

SEQ ID NO: 19434 - RNA, 56 nt, Homo sapiens
cccccaagggcggaaacaggcccagacaagaaacaccaaacgcaacaagaaccgag

SEQ ID NO: 19435 - RNA, 76 nt, Homo sapiens
acgacaagaacggggaggggggacaggagagaaggggacaagagcaaggaccaaggggaaggcaagaccaacaaag

SEQ ID NO: 19436 - RNA, 78 nt, Homo sapiens
ggaagcggacgggggaggaggcaacgccgcggacggccagcagaagcaggcgagccccccgagaaaaagaagaaacgc

SEQ ID NO: 19437 - RNA, 79 nt, Homo sapiens
aacgaccccggccgagcgaggaggcaacaacaccgagagaacaggaaaagagaaacggagaacggcaccaacgagcgaa

SEQ ID NO: 19438 - RNA, 58 nt, Homo sapiens
gcaacacgaagaccgaggaaaagcgcggagaaacgccaggagaacggggaaagcacga

SEQ ID NO: 19439 - RNA, 83 nt, Homo sapiens
gcgcacaacgcaggaacaccgcacgcgcggaggaggaaagaacaagcaccggagagagagcaccagcggcaagcgcccaccca

SEQ ID NO: 19440 - RNA, 76 nt, Homo sapiens
ccagccagggccgggccgcgaccggccccggagcacagagaaggaaggcagcaccgaaggcaccggcagaccagcc

SEQ ID NO: 19441 - RNA, 68 nt, Homo sapiens
gcgcacaggacggagaacgccccgaaccccgcacacgaggaagaggcggagaacggaaaagcaccagg

SEQ ID NO: 19442 - RNA, 83 nt, Homo sapiens
agcgagcgagggggggcgcgccggaaaccggagcgcgcagcagaccgcgaccgcacaagcagccgccagcggaaccaagcggc

SEQ ID NO: 19443 - RNA, 81 nt, Homo sapiens
accagagccgcggccgaccgccgggcagcccccagcagggcacaccgaagggaccgacacaaggacagagcaccaagaccg

SEQ ID NO: 19444 - RNA, 34 nt, Homo sapiens
cccagaaccacgaacagccccagcgcagacagca

SEQ ID NO: 19445 - RNA, 72 nt, Homo sapiens
aaagagccggccgcgcacaagccggagaagagcaggcagccacgcaagaacacagcgaggagcgggaacaag

SEQ ID NO: 19446 - RNA, 78 nt, Homo sapiens
cggcccccccagcacgcacgcaggagaaccaccaaagcccaaaccacccagcggaaggaaaaaggaacacacggaagg

SEQ ID NO: 19447 - RNA, 66 nt, Homo sapiens
gaaacacccgaacagcgaccggaaaaggagacgaagaaggaacccccacggcgaagccagcggacg

SEQ ID NO: 19448 - RNA, 75 nt, Homo sapiens
cagagaaaaaacacaaccaaagcggagaccaccaggcccacgggacaccagcaaagccccgagccagaggaccca

SEQ ID NO: 19449 - RNA, 55 nt, Homo sapiens
cgggcagaacgaacaaccacaccagccaggacacaggccccacgggcccagaggg

SEQ ID NO: 19450 - RNA, 80 nt, Homo sapiens
cgcggcgagggccgacaccaccgcgcgaccgcaaccggccagggcggaacccaccagccaagcaaggcaggagaaagaca

SEQ ID NO: 19451 - RNA, 75 nt, Homo sapiens
ggaagcagggaaaacaggaaggaaccagccaaaaagcaagaaaagaagaggagcacaggcagccaaggcaagcaa

SEQ ID NO: 19452 - RNA, 91 nt, Homo sapiens
gaagaggggagccaaagaccaagcaccagagaagaggaggaagaaggcgagaagcacagaagccgaacggggaggaggcaagaaagggggg

SEQ ID NO: 19453 - RNA, 80 nt, Homo sapiens
gacacgcggcaggaacggcaccgcagcagcagagaggggagaagggagagcgcacaccacgcgcggcaacacccaccaag

SEQ ID NO: 19454 - RNA, 71 nt, Homo sapiens
caccaaccacaccggagcaggacaagcgaacagcagcgccacgcagagccccgccaggaagacacgccggg

SEQ ID NO: 19455 - RNA, 55 nt, Homo sapiens
cacccaaggcagccggaaacgaggaaaccacagccccagggagcagccagggcca

SEQ ID NO: 19456 - RNA, 54 nt, Homo sapiens
caaaaggagagagaagggccaaagccagaacacccggaacacagcaaggcagag

SEQ ID NO: 19457 - RNA, 73 nt, Homo sapiens
agcaggggccgcgggaaggcgaagaaagggaggcaccaggcacggggaggccaacaaaggggagccgcagaaa

SEQ ID NO: 19458 - RNA, 84 nt, Homo sapiens
cacaagagaccacaagaccgaccaggaaaagcccacaccgcggacagagcaaacagcaacaaggagcggggggaccaggagcag

SEQ ID NO: 19459 - RNA, 57 nt, Homo sapiens
gcaacagcccccgcccaaggagaaaaaacccgccggagaagagaacccaaaggccaa

SEQ ID NO: 19460 - RNA, 37 nt, Homo sapiens
gagacacggcaaagggccaccaggggaggcacaggag

SEQ ID NO: 19461 - RNA, 72 nt, Homo sapiens
ccaaaccgaaagggagcaagaacgcagacccccaaaggagacagaccccacagagaaacacgagcacaagag

SEQ ID NO: 19462 - RNA, 90 nt, Homo sapiens
ccggaccgggagggaacgccgcggacccggagccgcacaaaccagggccgccagaagccagaaaaccacagcggacccaaaaggcggaga

SEQ ID NO: 19463 - RNA, 75 nt, Homo sapiens
agccgacaggcgcggcacgggaggcggaggcgccccgccaggaaaaggagcgaacaggggccacagcggaagaag

SEQ ID NO: 19464 - RNA, 43 nt, Homo sapiens
aggcacgcgaggagacacagcagagaaaaaagaggccggcggg

SEQ ID NO: 19465 - RNA, 79 nt, Homo sapiens
cggcaacagaggccgacccaggcaggaccagaagaacccaggagaagcgagcaccaaggagaaggcgcgccaggaaaaa

SEQ ID NO: 19466 - RNA, 76 nt, Homo sapiens
ggcggggggaggccacaggcgcaagcaggaaaaccaggccggacagaaaagcaaacgaaacaagaaacaagcagaa

SEQ ID NO: 19467 - RNA, 79 nt, Homo sapiens
aacacgggcaccaaggcccgggaaggccgccaccacccacacaggagaagaccccccagacgggggggcagggcccagc

SEQ ID NO: 19468 - RNA, 77 nt, Homo sapiens
cgcagcgaccggaagacgaggcggcgggggacaagcggcgccccagagcggacgagacacagaccagcgcgagagaa

SEQ ID NO: 19469 - RNA, 76 nt, Homo sapiens
caagaaggcccggacacagcaaaccgggccacaggaccacagccagagaccacagacggcaccagggaagcagagg

SEQ ID NO: 19470 - RNA, 41 nt, Homo sapiens
gagcccacccaggaaaagaaagcagcccccgcgacgagccc

SEQ ID NO: 19471 - RNA, 84 nt, Homo sapiens
gagacgggcggagaggagaagggcggcgacggcggcgcgaggaccgaccgggcccgcggacgaagaaggcacccccccgccggc

SEQ ID NO: 19472 - RNA, 79 nt, Homo sapiens
ggccgacgggagcagaggaagccgaggaccaccacagaaggaagaagggaaacacccggcaacaagggcaaccaagaca

SEQ ID NO: 19473 - RNA, 74 nt, Homo sapiens
cacaaccagcgggaaaaggggggagaaaaggccaagggcaggagacacgagacgcaggaagcagcgaaagagca

SEQ ID NO: 19474 - RNA, 87 nt, Homo sapiens
aggccggaccagcgaacgacaccggcggccaggaggaaaggacgcgaggcacaggcaaaaacaccaaaaagaagggcggagcacaca

SEQ ID NO: 19475 - RNA, 75 nt, Homo sapiens
caacagaagagcagagggaccaccccagaacccggagaacaacagagaacgaacaccaccgcaaaacaacaaaca

SEQ ID NO: 19476 - RNA, 83 nt, Homo sapiens
agagaacagagcccaggaggcgggccagggccaggcgaagggaaagaggcagacaccggggaccagcgccagccagccagggg

SEQ ID NO: 19477 - RNA, 66 nt, Homo sapiens
cagccggagcccagaacagagcggccacacgcaggacagggaagcaacggggcggcacacaaggag

SEQ ID NO: 19478 - RNA, 69 nt, Homo sapiens
caaaggccgagacccgccggaagggacaaaggcccggcgagcagccaaggaggccaaggaggccccgcc

SEQ ID NO: 19479 - RNA, 43 nt, Homo sapiens
ccggaacaagcggagggccgcaggagacgaagagccaagagag

SEQ ID NO: 19480 - RNA, 61 nt, Homo sapiens
ggccagcacgggaacgcgaagcgccaaagccagacaagccggggggggcacagagccccgg

SEQ ID NO: 19481 - RNA, 79 nt, Homo sapiens
cggggccggggccgcgcgcccacccaacccgagaaacgggagcaggagaagaagccaggggcagagcgggcgccaccag

SEQ ID NO: 19482 - RNA, 80 nt, Homo sapiens
caggccaccaccccccggcaccgcaccaacgaccgaagcaccaggcacacccacaagccgagcgcccagggacaccaccc

SEQ ID NO: 19483 - RNA, 68 nt, Homo sapiens
aagacgaaagccgacaaagaggagcagagacgggaagaagaaccaaaggcaagaaccggagcaggaga

SEQ ID NO: 19484 - RNA, 63 nt, Homo sapiens
aaaaggaaaaaaccaaacaagcaggaaaagggcaagaagaccggaaggagagaaagccagacc

SEQ ID NO: 19485 - RNA, 85 nt, Homo sapiens
gagcagcaggacgaccgaacgccacgaacgggaagcgggcagcacaaaacaaggccggacgaaagaaccagcacacgcccgcccc

SEQ ID NO: 19486 - RNA, 75 nt, Homo sapiens
gggacgaccccccagagccaacacacagaagccaccaggacacccggaaagaacaggccaggcccagaccggcca

SEQ ID NO: 19487 - RNA, 77 nt, Homo sapiens
ccgccccagcgcccgccgcaaggcgggggaggcggcggcccagccacgagacaacgaagaaaggagcacaaaagaac

SEQ ID NO: 19488 - RNA, 86 nt, Homo sapiens
caaagcacgcgacaggaaccagagagggaaggaaggaacagcagcgcaaaaagagcagcagagacgaggaccccaaggacgaccag

SEQ ID NO: 19489 - RNA, 82 nt, Homo sapiens
gagcgcggggccgcgcgggaccgggccgcgcgggccaagcagaaaccgcccaggaggaagagagaagggcacagaccaagac

SEQ ID NO: 19490 - RNA, 58 nt, Homo sapiens
cggcaggaggaaaggacgaccagcggacacgaacagcacaccgacagagaacccaggc

SEQ ID NO: 19491 - RNA, 58 nt, Homo sapiens
gacacgcggacaggaggcaccgcgagcgaggcaggggaggcagaagagagccggagga

SEQ ID NO: 19492 - RNA, 83 nt, Homo sapiens
gaccgaccgcaaacaaggagagccacgagcagccgaggggcagaagccccagaggagcccgaaacccccaggcgggcaggaag

SEQ ID NO: 19493 - RNA, 76 nt, Homo sapiens
ggcaaggagccacaaagaagaaaacacaaaaacgggaaaggagaccaggcccaggaaggaacgaggaagggccaga

SEQ ID NO: 19494 - RNA, 68 nt, Homo sapiens
gaagaaaaaggcaaaaacccggagagcaaacaacacgacggacagggcccaaaaaggcaacaaacgga

SEQ ID NO: 19495 - RNA, 70 nt, Homo sapiens
gacagcagggcccaaggcagcaggcacaaaaaagggacaccacaccgcccaccgggaacagggcaacaca

SEQ ID NO: 19496 - RNA, 80 nt, Homo sapiens
ccgcgcccccagaccccaccccgaagaccgccacggcaagggcggagaacggaaaagcaccaggaagcagagaggaccgc

SEQ ID NO: 19497 - RNA, 71 nt, Homo sapiens
agaaaacgaaaaggagaaagaagagagacaacaagacgcaaaggcaccggaacagacccacaagcgaaacg

SEQ ID NO: 19498 - RNA, 78 nt, Homo sapiens
gccacaaagggaagcaagagaaaaagaacaacgcgaggagacacgaaagcccacgaggaagagaggaaaaaaacacca

SEQ ID NO: 19499 - RNA, 62 nt, Homo sapiens
acaggacgccagagacggaacagagaagcaacccaacagacaggcaaaagaaacagggaaga

SEQ ID NO: 19500 - RNA, 43 nt, Homo sapiens
gaaggaggagaggcacagaagcgggcgccggacacagaagggg

SEQ ID NO: 19501 - RNA, 85 nt, Homo sapiens
ccagacacaggcgaggcggaggccgaggacccggggccgaggagcgggaagaggcgggacccaacagaggaagccgcaagaaacg

SEQ ID NO: 19502 - RNA, 73 nt, Homo sapiens
cagaaacgacaaagccccagagaagagaacgagaccccacacgccaccgaaaaggaagagccaaagcagaccc

SEQ ID NO: 19503 - RNA, 75 nt, Homo sapiens
gccaaagaggaggcgcgccggcacggagacaccccgacagcagaccacagcccggcaggcccaaaaacccaaagg

SEQ ID NO: 19504 - RNA, 72 nt, Homo sapiens
ggcccaggacgaacaaagccagccagcgaaaggaacaacagcgaagagacaaccggcaaggagaaaaaagca

SEQ ID NO: 19505 - RNA, 68 nt, Homo sapiens
aacaacagaggcgaagaagggccagcgagacagaccgaaacccaaagaaaaggagcgcgcccaacgag

SEQ ID NO: 19506 - RNA, 75 nt, Homo sapiens
agagcagcgccaggaagaagagaggaagagaccggaacagaagcgaaacaggcgcagccagaccaagcaaaacgg

SEQ ID NO: 19507 - RNA, 79 nt, Homo sapiens
ggcggaggagcgcgcccgccgagaaggagcccccgcagcccggcccagcccacccaggaaccgacacggcaccaggggg

SEQ ID NO: 19508 - RNA, 76 nt, Homo sapiens
gccaaaaaagcccaggaagaagacgaggagccggcacagccacaccgagaagaccggcccaagaaccccaccgccc

SEQ ID NO: 19509 - RNA, 72 nt, Homo sapiens
gcggccccaacccaaaagcaggaaaacggggaaccagaaccaagggggcgggggcggagggcaagacgacga

SEQ ID NO: 19510 - RNA, 53 nt, Homo sapiens
gaagcgaaccaggcccgccgagcggcagggggcacccgaggaggaagagggca

SEQ ID NO: 19511 - RNA, 65 nt, Homo sapiens
agcgaaggcaaaagcgcaagaagaaaccaacccggacacaagagggcaagaaaggcgcgacgggc

SEQ ID NO: 19512 - RNA, 71 nt, Homo sapiens
gcacccccggcggcagcacgaaagaccagaaggagggccggccagggaagggaacgcccaacgcaaaaagg

SEQ ID NO: 19513 - RNA, 90 nt, Homo sapiens
gagcaagaaggcgcccaaagggcagcgccaggccagaaccaaagggaaaagcaaacaagggacaggagaggacgcaaaaaaagaagaacg

SEQ ID NO: 19514 - RNA, 53 nt, Homo sapiens
gacgcccgaaccagggcagaagcaggggaaccacaaaaccaagaaacaaaaag

SEQ ID NO: 19515 - RNA, 68 nt, Homo sapiens
gcaagacccccacagacgagcgggggagagcagcggcgccagcccgggccacaccgggacgcaccccc

SEQ ID NO: 19516 - RNA, 48 nt, Homo sapiens
gcacgccgcccagacaaccgcccgagagcacccagccccagcgagcga

SEQ ID NO: 19517 - RNA, 73 nt, Homo sapiens
aacggaaaaccccaacccgcgcccaggaggaaaagcccacacggaccaccccgccggaagggggccacccacc

SEQ ID NO: 19518 - RNA, 70 nt, Homo sapiens
accagaaaccacaacagacagggggaggggaccccaacgaccgagcggcgccggggagccgggcgcggag

SEQ ID NO: 19519 - RNA, 79 nt, Homo sapiens
cgggaggagcgcgagcaggagacgagggcacgcaagaacaggcggaggaaaaggccggccagggaaagccgaaggcaag

SEQ ID NO: 19520 - RNA, 80 nt, Homo sapiens
gagagggagaggaggcagggcccggggaagacgcagaaagaaccggaagacagaggcggagcggggccccgcacggggcc

SEQ ID NO: 19521 - RNA, 57 nt, Homo sapiens
caaggaaaaacggagagccacaaaaaaggaagcgaaagccagaacacaaaccaccag

SEQ ID NO: 19522 - RNA, 73 nt, Homo sapiens
cggggcggccggagacgggagcccagcaaccaacccgcagaagaccagagagagaacccccggaagacacggg

SEQ ID NO: 19523 - RNA, 78 nt, Homo sapiens
agcagcaggaaggggggccaacaccaaaggcacccccacagaaaaaccaccagaccccaaccccggggccccggacca

SEQ ID NO: 19524 - RNA, 69 nt, Homo sapiens
acacccaggagagcgacaagacccggaagaaccacaacacaggcccgggccagacagccagacgaagac

SEQ ID NO: 19525 - RNA, 97 nt, Homo sapiens
aggcggaggcgacgaggaggcggacccccggcgcagagcgaagaagcaggggagaggccgagcgaagaaccagcggccaaggaggccagaccaagac

SEQ ID NO: 19526 - RNA, 75 nt, Homo sapiens
gggagagcccagcgggaggcacaacccaagaagcagggaagaaccccaccaacacacaggggccgaacaggggcc

SEQ ID NO: 19527 - RNA, 69 nt, Homo sapiens
ccggcagagacccgccgccacccagggacgaaccaaagcaaaccacgggacgggggacccggaagaccc

SEQ ID NO: 19528 - RNA, 81 nt, Homo sapiens
gcgagcgcagcaaagcgcccagccgccgcccgcgcccgcggccggggaagccacgggaaggaccgggaagcgagccgacgc

SEQ ID NO: 19529 - RNA, 73 nt, Homo sapiens
ggcgccgaccagcaccaggggaagcgggacaacggggggaccaggaggagaagcaaccagagaggaagcgaga

SEQ ID NO: 19530 - RNA, 80 nt, Homo sapiens
cagcaaccgaaaggcgagggaaaaagacggaggagagcagaaagacgagccgccggggaaaaagcgcagcaaagagacaa

SEQ ID NO: 19531 - RNA, 62 nt, Homo sapiens
caacaccaagaaaggagcagggcggacaagcaccacggaaacaaacagcccagacagggaga

SEQ ID NO: 19532 - RNA, 78 nt, Homo sapiens
gcaggagaccagaggcaaacgcgacgccggaccgcgaagagacgagaggggcacggaaggggagagggacggggaagg

SEQ ID NO: 19533 - RNA, 62 nt, Homo sapiens
gccaaggacgcaagagagagaaaacccgcagcccaaagggcagaagaagaagaagacgcaag

SEQ ID NO: 19534 - RNA, 80 nt, Homo sapiens
ggagccagccagagggcaaagcggcgaccagggaaccacggaaggagggggcgacacacaagcaggggggaccgacgagc

SEQ ID NO: 19535 - RNA, 82 nt, Homo sapiens
acagggggcagaaacacgagcacagcaagggcgcacgaggcggggcaccaggcccagacggcgaacccgagcaagcaaccac

SEQ ID NO: 19536 - RNA, 80 nt, Homo sapiens
gacccgccgcgagggacccggccgggcccacgcaccgggagcggcaagaacggaacaagcagaaagcacgaacaacgaga

SEQ ID NO: 19537 - RNA, 115 nt, Homo sapiens
acaaagcacaacgccaggcggagggggcgcggccggacaccagagaggcacggcgcagaagaacacggcggagccggcccccaggggcagcccgccggccagcccagagaacgca

SEQ ID NO: 19538 - RNA, 76 nt, Homo sapiens
gaagaagagggaacggaaccaaaccaccaaggacagggaagaaggaaccagcaaagcgccacgaagcacaagcaag

SEQ ID NO: 19539 - RNA, 75 nt, Homo sapiens
aggagcgggccgggacaagcacccgcagcaacagcccagcagaagccaggacggagaaggccagaaagccacaca

SEQ ID NO: 19540 - RNA, 74 nt, Homo sapiens
gaagcgggaggggacaccaaaaccagagggccgggaagcggaaccagagggcccgaagaaaacagggacaccgg

SEQ ID NO: 19541 - RNA, 77 nt, Homo sapiens
gcccaggcccaccccagcgaccggaagcgagcagcagcgccgccagaagaccaccccacacagaccgcgccccaggc

SEQ ID NO: 19542 - RNA, 79 nt, Homo sapiens
accggcccgacggggaggagacccgggcagaagaacaccggcggcggccagcccgacacaggcagaaaaccgcgcggga

SEQ ID NO: 19543 - RNA, 73 nt, Homo sapiens
ccacaccgggccgggagcaaccacggaagaggaaacgaggcgggaagacgaaacgccaaaacacacaacgaaa

SEQ ID NO: 19544 - RNA, 74 nt, Homo sapiens
aaaaagagagaaaaacgggggagggaccaaagcacagcagacacgggagcggcggaagcaaggccaaggaaacc

SEQ ID NO: 19545 - RNA, 67 nt, Homo sapiens
cccgcacggcggccaggacacggaaacagcacaggaaagagaggagaggagcgccggggcgcacgca

SEQ ID NO: 19546 - RNA, 69 nt, Homo sapiens
gggaacaagcaacgaggaggcggacgcgccgcaaacccgaaaggccgcagcaacgggggggggagacca

SEQ ID NO: 19547 - RNA, 81 nt, Homo sapiens
ccacggggcagcggacaaaaaggccaggcgccagcagaaaccgaacgggaaggagacccgcgacaaaccgaccagaccccc

SEQ ID NO: 19548 - RNA, 86 nt, Homo sapiens
agcgcgaggcgcggagagcaacgccgggacagcgcaagggcggaaaacaccccaaaagccaaaagggaaaggaaaagaccaacaac

SEQ ID NO: 19549 - RNA, 64 nt, Homo sapiens
acccgcccagaagccagaccccagagagaccgaaaggcccaaccgacagccccacccagagcag

SEQ ID NO: 19550 - RNA, 73 nt, Homo sapiens
gccggcgcagggagaagcccgaagaccggagcagggcagcagagcgcgagggaacggagaaggagacccaaca

SEQ ID NO: 19551 - RNA, 78 nt, Homo sapiens
gcacgcgaccacaaggaacgaggggccccaagagcacagaccagcagccgccaaagcgcccgggggcggagaaggcca

SEQ ID NO: 19552 - RNA, 76 nt, Homo sapiens
cggagcaaccccccaggacgggcggaggcggggggaccggcgggcggggcccagagagcagccagcgccccgcaga

SEQ ID NO: 19553 - RNA, 73 nt, Homo sapiens
aaacacacacacacaagcaaggcagcaccccgacgacaagacaccccgagacaagacagccaccagaagacag

SEQ ID NO: 19554 - RNA, 57 nt, Homo sapiens
agcagcaagcagggagcaagaccccaggacaccgccgaagcgaaagggacaaggccc

SEQ ID NO: 19555 - RNA, 81 nt, Homo sapiens
cacagagagagagagggagggaaacaagggacgaacaaaacaccgaggaaggacacacacaacacgaaaccaaacagcacc

SEQ ID NO: 19556 - RNA, 77 nt, Homo sapiens
gggcaagcgggccacgcacccgcaccaaggccaagggggggccccagcccggccgaacgggcgcacgacacaaacac

SEQ ID NO: 19557 - RNA, 67 nt, Homo sapiens
accgaggaccggaaaaaaacgggagggaacaaaggacagcagcagaaaaagcaaaggggaaaaccaa

SEQ ID NO: 19558 - RNA, 75 nt, Homo sapiens
cagagcggagacacccaggaggcagaagccagagagaaaggccagcacgggggaacaaagggaccggaaaggaga

SEQ ID NO: 19559 - RNA, 57 nt, Homo sapiens
aaagcacaccacgagcgacccgggccggggggggcacagagccccggaagacagccc

SEQ ID NO: 19560 - RNA, 89 nt, Homo sapiens
gaagaaaagacaaaggagaaaggaggggaggacaccggcaagggacaggccaacgcagagagccaacagcagagagaacaacggaacgc

SEQ ID NO: 19561 - RNA, 64 nt, Homo sapiens
gagcgccgaggccgggaacgggggccgacgacgagccccgcgaggagcgcagcggagaggccag

SEQ ID NO: 19562 - RNA, 79 nt, Homo sapiens
ggggcagacaagaaggggaggaacagccagaaggaagcaaagaccaaggccgcacccggagcgaagaacaccacaggga

SEQ ID NO: 19563 - RNA, 87 nt, Homo sapiens
ccgcgcaccgacccgacgcgccggcccacgcgcggccaagaagacgaccccgacgcaggccaggagccgcggacagaagccgagcac

SEQ ID NO: 19564 - RNA, 76 nt, Homo sapiens
aaaagacaaccccagggaaggggcagcacaggacccagggcgagggcaacgaggcgccgccgaggacaagagaccg

SEQ ID NO: 19565 - RNA, 73 nt, Homo sapiens
ggccgccacgccgcgccacagaccccagccaggcaccaagaagagagaaagagaccaagcaagcagagagggc

SEQ ID NO: 19566 - RNA, 55 nt, Homo sapiens
cccgccggccaggccgacgggcaccccgagagagaaccccacccaagagacaaag

SEQ ID NO: 19567 - RNA, 81 nt, Homo sapiens
gcagcacccgccaccgcgccggccgcccgcacgccgccggcaccaccgggagagcgggaccggccgggggcgacgccagca

SEQ ID NO: 19568 - RNA, 82 nt, Homo sapiens
gcggaggggcgagccagcggccaggcccggaggccggggacgcccagaagggagacaagccaagggagcagaggaccagcca

SEQ ID NO: 19569 - RNA, 76 nt, Homo sapiens
ccggaggaggaggagaggagaggaccgagaagacagggacaggcggagaacggaaaagcaccaggaagcagagagg

SEQ ID NO: 19570 - RNA, 68 nt, Homo sapiens
gcgccggccgagaaggcagaggcgcaggcgaccccaagaagggacagcgacggaaaacagagagaaag

SEQ ID NO: 19571 - RNA, 71 nt, Homo sapiens
caggcgcaccaccaaagaacccggaccaacgaccgcacggaaacgaagcgacacagacggggcgccagggc

SEQ ID NO: 19572 - RNA, 89 nt, Homo sapiens
acacaccggcagccacagcccgaagcggcaagaaggggcgggaagaagcccgccgccaccaccccaccaccagcgcagcagagaagaaa

SEQ ID NO: 19573 - RNA, 73 nt, Homo sapiens
cggggccggcagcaccgcggccgcagggaggcagaagaacaaaaacgaagaaggaccagccaacaacccgggc

SEQ ID NO: 19574 - RNA, 72 nt, Homo sapiens
gagaagaaacgccccaacaggagacaccgccggagacagccccagcacagaggaaagagaaagagccagcaa

SEQ ID NO: 19575 - RNA, 70 nt, Homo sapiens
agcccagcgggacaggcaaaacggaggaggcagggagagagcaccggacacagccagcaggacgacgaga

SEQ ID NO: 19576 - RNA, 87 nt, Homo sapiens
ggacagaaggagacggaacgcacagaggaacgagcgagcggcagagcgagaaagacagcaaagaaaaggagaagaaaggaaaaaaac

SEQ ID NO: 19577 - RNA, 57 nt, Homo sapiens
agcgccagcaaggagaccaacacacgaacaggcgggcacacaaacaccagccgccca

SEQ ID NO: 19578 - RNA, 74 nt, Homo sapiens
ccaccccgcagaccccccggcccagcagcgcaagacgcgagcaaaaagagaaaacaaagaagcaaagcccgacc

SEQ ID NO: 19579 - RNA, 55 nt, Homo sapiens
cacccaccagcaaagaaagggaagcagcgggagaggagagggaaaagaggacgag

SEQ ID NO: 19580 - RNA, 60 nt, Homo sapiens
aggcacaagacacgcggaggcagcagagccagcagcagcgcagggcacaacacgaaggag

SEQ ID NO: 19581 - RNA, 76 nt, Homo sapiens
agcgccccaggccaagagggacccacccggcgccaccggggaccgcaaggccgcggggcccaacaaggcaagacac

SEQ ID NO: 19582 - RNA, 74 nt, Homo sapiens
cggacaagcaaggcaaaggaagccggacccggccacaagaccagcacaaggacagagcccaaaaggcagagcga

SEQ ID NO: 19583 - RNA, 83 nt, Homo sapiens
gaggcagaagacggccagggagagaggaacccaagacaccaccagcagccgaagacgacccagccaggacaggaggacaggac

SEQ ID NO: 19584 - RNA, 75 nt, Homo sapiens
cacccgcgaagaggcgcccaggagcacagcggcacggccagcggcccggacccagacccaagcgccgcagcaaca

SEQ ID NO: 19585 - RNA, 57 nt, Homo sapiens
caaagcaaccggaaagggcccacgccaaaaagggaaaaaagagagccacgacgaaag

SEQ ID NO: 19586 - RNA, 60 nt, Homo sapiens
ccacccggcaggaacccaagccccacaggagcggaagaagccggacaccagaaggccaga

SEQ ID NO: 19587 - RNA, 80 nt, Homo sapiens
ccaaaccagaagaggagggcccagaagaaaaagagggacaacacaagcggaagaccgaccaacgaaaacagcaagggagc

SEQ ID NO: 19588 - RNA, 81 nt, Homo sapiens
ccagaggcagccagcagggggagccggagcgggcagggcacacaaccgggcagcggacacggagcagggccgcccggggag

SEQ ID NO: 19589 - RNA, 79 nt, Homo sapiens
agagccccccgcagccgggccgaggagggacagccacgccgaggcccaccggccacggggagagagccacacagccagc

SEQ ID NO: 19590 - RNA, 70 nt, Homo sapiens
cggcaggcgcacaggcccggccaggcacaagggcaccacaaagcgcagaacaaaaaaggaaacaaaaaag

SEQ ID NO: 19591 - RNA, 81 nt, Homo sapiens
gaagccggaggagccgccagcacagccaaggaacagaaagaagaaaaggaacccggccgagacgagaaaacaagggagagg

SEQ ID NO: 19592 - RNA, 69 nt, Homo sapiens
aggcccgggcgaaggggccacgcgaggaagcccagaggcacggggcagaacaccaacagagggccgacc

SEQ ID NO: 19593 - RNA, 69 nt, Homo sapiens
cagaacagaggcccccggcgaagaagacagcagggggcacaaacagcagaaacaccagaagggaggaag

SEQ ID NO: 19594 - RNA, 34 nt, Homo sapiens
gaagcagaaaagaagagcagggggaaaccacacc

SEQ ID NO: 19595 - RNA, 65 nt, Homo sapiens
gacccgccaccgccaggccaggaccgggcaaaccagaacaagaccgaaccgggccagcaggagcc

SEQ ID NO: 19596 - RNA, 58 nt, Homo sapiens
gggggacgggcaccgggccgcgggacagagcagccaggccacgagccagaaccgagac

SEQ ID NO: 19597 - RNA, 50 nt, Homo sapiens
aaggaaaacgcggaaaaccgacacaacagaagccgaggccgccagcgcca

SEQ ID NO: 19598 - RNA, 69 nt, Homo sapiens
gcccggcacggacccacacgcgagagccacgaaaacgaagcaaggaaggaagcaaccaggaaaaaaaga

SEQ ID NO: 19599 - RNA, 52 nt, Homo sapiens
ggagaaggcaaagaaggcacacaacaaagaagaaaagggggaaaagagaaac

SEQ ID NO: 19600 - RNA, 71 nt, Homo sapiens
cacgacccacggccgcccagcgccaggccgccagacccaacccagcaaacacggcggagaggaacaaggac

SEQ ID NO: 19601 - RNA, 68 nt, Homo sapiens
gagagaacaaaacagcgaaggaagccacagggaggaggaccagcgggagggccacggaacgccacacc

SEQ ID NO: 19602 - RNA, 71 nt, Homo sapiens
gaagaaagagccaaacgccaaggcggcaggaagaacagacacagcaccgacacgcgcaaaagcacgacagg

SEQ ID NO: 19603 - RNA, 72 nt, Homo sapiens
aacaagcacgcagacgcccacccggccagcgacacaggagagcacaaaagggacaaggcccaggaggccacc

SEQ ID NO: 19604 - RNA, 85 nt, Homo sapiens
cgaagagagacacgcaggaaagccccagccacccacaaacagagagaaggaaccacccacgcaggcaggagccggaccagaccgc

SEQ ID NO: 19605 - RNA, 74 nt, Homo sapiens
gcccaccaaacagaaacgaggcaccggagagcgaagcaccagaaggacacagaggaaagaacacacacgcaaaa

SEQ ID NO: 19606 - RNA, 57 nt, Homo sapiens
cgaacgggcgcgggccaagcacgccacccggaaggggcgaggaagcgccccgaaacc

SEQ ID NO: 19607 - RNA, 75 nt, Homo sapiens
acaggggcgccccgaagaagccacaagagccagggagaaaacaagggcagcaccaccgccaaaaagggagaacag

SEQ ID NO: 19608 - RNA, 79 nt, Homo sapiens
gggagggccacaggaggcggcgggccccgcccgccgaaggacaacaggcacaaagagagaaggaacacccacagggcag

SEQ ID NO: 19609 - RNA, 71 nt, Homo sapiens
agccaaacacagaagcagagcccgggagacacacccggaacaggcagacagccacacacacccccgccggc

SEQ ID NO: 19610 - RNA, 80 nt, Homo sapiens
aaaacgaggaaagcccaggagacacggcaagaaggagggccccggagcagccacaccaccgaggccccacccagcacgag

SEQ ID NO: 19611 - RNA, 44 nt, Homo sapiens
aagcacgggggcaacagaggacacgcaaacaaggaggccggcag

SEQ ID NO: 19612 - RNA, 85 nt, Homo sapiens
ccacagcaagagcaccggcgaccgcaccacaagggacgagaccaaacggaagaggagcggaggacaccccggagaggacgggagg

SEQ ID NO: 19613 - RNA, 61 nt, Homo sapiens
caagcaagcagcgcgccggccccaacacggaccggggcacaaaccaggaaggggaaacggg

SEQ ID NO: 19614 - RNA, 70 nt, Homo sapiens
acacccaaacagggcacacagggaccccagaacaggacaaagggaagcgaagggaagcacgaaccccagg

SEQ ID NO: 19615 - RNA, 41 nt, Homo sapiens
aaggcagcgcccagcagcgcaggacggggggcccgggcgaa

SEQ ID NO: 19616 - RNA, 69 nt, Homo sapiens
gaacaagcagcagaggaaacacaaggaagcaagaacgaagggacaagagaaaaaaagggcgggcgaaca

SEQ ID NO: 19617 - RNA, 71 nt, Homo sapiens
gccccaaaaggaaacaagggggacgggaaagagcggccgagggacagcgaacagaacagggaagacggggc

SEQ ID NO: 19618 - RNA, 91 nt, Homo sapiens
agccaagcccaagcaaaagccaacagagcagcagcacgggcagcagaggaagaaggagaaagggccaaccccgaagaagcaaacagaaacg

SEQ ID NO: 19619 - RNA, 69 nt, Homo sapiens
ggacagcgagccagcaagaaagagggaggacagcagagcagcaaacacgacaggaaaaggacacagacc

SEQ ID NO: 19620 - RNA, 59 nt, Homo sapiens
agacgacaggcagggacccggaaggacgagcgggcacgggacgaggagacggcagaggg

SEQ ID NO: 19621 - RNA, 66 nt, Homo sapiens
gcgagagcgaggaggcaaaaaggcggcaaacgccaaggccaagaaagccggacagggccagcaaac

SEQ ID NO: 19622 - RNA, 78 nt, Homo sapiens
gaaacaccaggcgcggcggcccagccccgacacaggaagacccgcggaaggcacacaagacacagccaacaccgaacc

SEQ ID NO: 19623 - RNA, 78 nt, Homo sapiens
aacccaggagcagacagagaagcgcgcagcagccgggaccagcggagaacaccaccaaacaaacacaaggaacccgag

SEQ ID NO: 19624 - RNA, 121 nt, Homo sapiens
agagagggccggcccggccggcgaacacggaagggaaagcacagcccacgggcaggcccaggaccgacagcagaggagcgcaagaacggagaacaccgacggagaaaacaggagcgcggcg

SEQ ID NO: 19625 - RNA, 74 nt, Homo sapiens
ggaccagaccgaccaccaaaagaaagaccacagcaagaccacgcccccagccgggggaccaggccgaacgaccc

SEQ ID NO: 19626 - RNA, 84 nt, Homo sapiens
ggacgaaccggaaaagagccgcgcaaaccaacgggacacaaaggacggcaacgagggagaaggacagaagaaagccaaagagca

SEQ ID NO: 19627 - RNA, 65 nt, Homo sapiens
acggagccagccgcaggggcgaacgaccagccaacaacgggaccaggggagagacagaggacaag

SEQ ID NO: 19628 - RNA, 76 nt, Homo sapiens
ccggacgcgggaaggaaaggccagggggcagcaacagcagggaccggaggggggagaagaaaaacaaaagggaaag

SEQ ID NO: 19629 - RNA, 78 nt, Homo sapiens
ggaaaaagcgacggagcccccccccggggagcccggggacgcagcgagcaaagcagcaagcgggggcggaggcgagcc

SEQ ID NO: 19630 - RNA, 75 nt, Homo sapiens
aggagggcgaagaaaaaagagggcccaaggagaaaaagcgaggcggagagccaaccaggacggagcccccagccc

SEQ ID NO: 19631 - RNA, 62 nt, Homo sapiens
gcggagcacagaagaagcaacacgagaaccaccccgacacaacaccaccaggcaacgcgggg

SEQ ID NO: 19632 - RNA, 40 nt, Homo sapiens
gcgcgccccggccgccaccggcaaaagagccaacacccag

SEQ ID NO: 19633 - RNA, 40 nt, Homo sapiens
aacaagagcgccgacaggaaaagagacgaggacgcgcaca

SEQ ID NO: 19634 - RNA, 57 nt, Homo sapiens
acgaggcgcgggcgcgcacccgagccgcaagcagggagaaagaggggcacccaccag

SEQ ID NO: 19635 - RNA, 76 nt, Homo sapiens
gagcaagaagcgggaccaaaccagaagagccaaaccaggggaagagcaggcgcaaccagaggcacaggccagacga

SEQ ID NO: 19636 - RNA, 59 nt, Homo sapiens
aaggagaccgaacaccaaagacagagcgggagccaccagcgccaaagggaagccaggag

SEQ ID NO: 19637 - RNA, 81 nt, Homo sapiens
ggacaaacagaagacggacaaggaagaaaacaacggcgaaagaacaggcaggaccggaaggaacaacaccaaacccaagag

SEQ ID NO: 19638 - RNA, 84 nt, Homo sapiens
ggaaggagaagaggccgccgcgccaacgcgagcggcgacggcgaggagacaaacaagaagcgaccccgcaacaggcagaggaac

SEQ ID NO: 19639 - RNA, 75 nt, Homo sapiens
ccaagcagggcgaagggaacgcaaggcccccgaccacacgcccgcgcgagagggcgcgccgggcaccaaagcgaa

SEQ ID NO: 19640 - RNA, 78 nt, Homo sapiens
ggccgcgccaccaagccaccgcccccacccccgggcagaaggcggcagcggagcacgcaccaggagcccgcggcccac

SEQ ID NO: 19641 - RNA, 81 nt, Homo sapiens
ccggggcgccgagccggaggaaggaggggaagagccaagaaaaaaaagagcaagggccggacaaaaggagacaaagggaac

SEQ ID NO: 19642 - RNA, 67 nt, Homo sapiens
gggaaaaaaaaaagacacgcagacgacgggggcagaagcgcgccaagaggccgaccagacaagaaca

SEQ ID NO: 19643 - RNA, 77 nt, Homo sapiens
cggcccccgcgcgcacgccccgacgcaagacgcccggcccgggacagaagagaacaaaacaacgggaacccaggaag

SEQ ID NO: 19644 - RNA, 76 nt, Homo sapiens
ccacaggcgggccacggaacagagcgagccaagggacggacgaagaagccaaacagaggacgcagccaggccacgg

SEQ ID NO: 19645 - RNA, 69 nt, Homo sapiens
gaagacagccacagaagcggagcaaaaagaaaagccaccagaaagcacaagaggaagagaacgcccaag

SEQ ID NO: 19646 - RNA, 73 nt, Homo sapiens
gccgagacagaaccgcagacgccgcaggggccgcaaggccaggcgcgcagaggcacccaacggcacagacccc

SEQ ID NO: 19647 - RNA, 75 nt, Homo sapiens
acaagagcaccacgggcaggaaggcagcgcacgacagcaaaaggccccagggaaaggaccgaggcaggaaagagg

SEQ ID NO: 19648 - RNA, 74 nt, Homo sapiens
gccgcagagcgcgcagaccccggaggcagcacggagagggaggaaccagagggagcacaccggagcagggaccc

SEQ ID NO: 19649 - RNA, 54 nt, Homo sapiens
gggccgggcgcgacacagagaagaaagagcgcacacaagagggaagcgcaaacg

SEQ ID NO: 19650 - RNA, 50 nt, Homo sapiens
agcccgggcacagccaagccggcaagaaagcacagagaaaaagacagcac

SEQ ID NO: 19651 - RNA, 84 nt, Homo sapiens
ggcccgggcgccccgcagccccccaacaccgcccgccaggacgacaaacagcagacaaggagccgccacccgccagggaaggag

SEQ ID NO: 19652 - RNA, 90 nt, Homo sapiens
ggcgaaccgacagccccagaagcccaaaccccagaaaacaaggagagacgagcacggcagccaccgacagaaggaaggcaccggggccgg

SEQ ID NO: 19653 - RNA, 77 nt, Homo sapiens
cgaaccaggccccagacagcgcaagcgagcaacagcagaaaagagaagagacccacgcaacgaagcagcccccaccg

SEQ ID NO: 19654 - RNA, 66 nt, Homo sapiens
gcccggcgccggccgagaaggcagaggcgaagccagccgggagccaccgacagaaagaaacgcagg

SEQ ID NO: 19655 - RNA, 92 nt, Homo sapiens
cgacgggacgcgccccgcagacccccggaggcgaagcgacgccggaggcagaccaagagaagcagcggaagcggaggcgaggagcggcgccg

SEQ ID NO: 19656 - RNA, 70 nt, Homo sapiens
cgcccgcagaaaaagaggcccccccccccgcgacgggccggcgcggcccagcaagccgaaagcagaagcc

SEQ ID NO: 19657 - RNA, 83 nt, Homo sapiens
gacaaggggacccgggacgacgagacgacaccacaaagaaggaagacagccccccaggagcacacccgacccgcaccgaccaa

SEQ ID NO: 19658 - RNA, 62 nt, Homo sapiens
agcacccggcggccaaaggccaggacaccaacgggaccagaaggcaaggacggggacacaag

SEQ ID NO: 19659 - RNA, 70 nt, Homo sapiens
agaggcgaaagagaggacgaacaggaggcagcccaaccagggcgagggcacgccagaccacccacagaag

SEQ ID NO: 19660 - RNA, 68 nt, Homo sapiens
gcaagccggccaccacaaagacaagcagcccacgggaagcccagcccagaaggcggcggccccaccca

SEQ ID NO: 19661 - RNA, 107 nt, Homo sapiens
cggagcagagccgcgggcgccggagccgaggcgagcgccgcgcgcaccacgcccgacagggcgccacgggcacaccagcagaaccccggagccggagcccccaggac

SEQ ID NO: 19662 - RNA, 62 nt, Homo sapiens
cgacagggacccagcaggaacggaccaaagaaagggcccgacaacaagccaaaacgcaccaa

SEQ ID NO: 19663 - RNA, 81 nt, Homo sapiens
aaaaggaaacgagacaaggaacccacagagaacaggaagacaaaggaacgcacagaagacgccacaggggaaaagaaacgg

SEQ ID NO: 19664 - RNA, 73 nt, Homo sapiens
ggagcgacgccaggaaaccgccggcacaccaaacggcagagaggcagcgagaagaaaaagaagagagagacac

SEQ ID NO: 19665 - RNA, 76 nt, Homo sapiens
gacaaaggaacagcacagggcgcaacaagagcgacaaacgcaggacaccgcgaccagcaccacccaaacaagacca

SEQ ID NO: 19666 - RNA, 69 nt, Homo sapiens
caccggggcccggcgcccgggcccgccccggaggaacggccgagcgaccaggagaggagcccccgcccg

SEQ ID NO: 19667 - RNA, 83 nt, Homo sapiens
gccaaccgcgagaagagacccaggaagcgacacagaacggggaggggccacccagagcacaacaggacacggacacagcgggg

SEQ ID NO: 19668 - RNA, 82 nt, Homo sapiens
cccggagaacaccgggccggcgagaaaggcgaccccgcacacacacccaccagccacggcagcccagcggggacccagccgc

SEQ ID NO: 19669 - RNA, 71 nt, Homo sapiens
caggaggaggcccaaggagccgccccaggcgaaccgcaaagaggagacagaaaagaagaaagaaggacacc

SEQ ID NO: 19670 - RNA, 104 nt, Homo sapiens
caaggagcggaaggacaggaaccagaacccaggcccacggaggaagagccgggcagcccggagcgggccagggacgaacagcggggacgccccagcagaccgcc

SEQ ID NO: 19671 - RNA, 65 nt, Homo sapiens
agaacagcaggagacagaggccccaagagcccagaccaggacaaggacacaccagcacacaccca

SEQ ID NO: 19672 - RNA, 67 nt, Homo sapiens
agcccaggagccagccccgacagcgaagacccgaaacagggacccggcagcaaccccaacaaacgcc

SEQ ID NO: 19673 - RNA, 72 nt, Homo sapiens
ggccaggggaccggacaaaggaggcagcggccacaaaagccacagcggaaccggaaagaagcacaccacgca

SEQ ID NO: 19674 - RNA, 63 nt, Homo sapiens
cccaaggaccagcagcaggaaccagcgagagaacaaaacaggaaaaagaaagaagaacaaaac

SEQ ID NO: 19675 - RNA, 74 nt, Homo sapiens
cgcaaagcaaccgcaggacgcagcggaggagcggacaacccagagagaaacgccagaccacagcggagagagga

SEQ ID NO: 19676 - RNA, 69 nt, Homo sapiens
ccagggcaggaaggaaagccaagcgcagaagcaagggagaacaaggaaaaagccaggaagagagagaga

SEQ ID NO: 19677 - RNA, 65 nt, Homo sapiens
ccggggggcggcgcccacccgggaggacagcggccagcgagggcgcgacgcgggcccccagccag

SEQ ID NO: 19678 - RNA, 84 nt, Homo sapiens
gaggaagagaagagaaggaagacgcgccgagccacggcccacaggacagcaagccacagaaaagggccaaaggcaaagcgggac

SEQ ID NO: 19679 - RNA, 69 nt, Homo sapiens
cggagccgcacaaaccagggccgccagaagccagggcaccagccggggaaaggagcgcagcgcccgggc

SEQ ID NO: 19680 - RNA, 84 nt, Homo sapiens
cgcggccccgccagcgccccaccgagccggccccccaggccacccaggaccagcggcacacccccccgcggcccaaaaagcccg

SEQ ID NO: 19681 - RNA, 76 nt, Homo sapiens
aaaaggcaaggcacaacgccacgaggcacaccccagcaagagggaggaaagggggacggcggggggagacccaggg

SEQ ID NO: 19682 - RNA, 70 nt, Homo sapiens
cacccgcccccgaaacacaggcagaaagcaacagaagcagaagaaaggcggaccacaaggaaaagaaaaa

SEQ ID NO: 19683 - RNA, 81 nt, Homo sapiens
gcgagacggcacgaggccgggccagcgagggcacaccaggccgaggggaagacccagcaggaagaagacaaaggggacggc

SEQ ID NO: 19684 - RNA, 52 nt, Homo sapiens
cgccgcccgcgaagccggaaagacacgccgagagacggaaaagaacaaacaa

SEQ ID NO: 19685 - RNA, 69 nt, Homo sapiens
ccaagcggccgcgagaagcagcgggggggcaggcgacgaaggccccgggaccaaggacacgcagacccg

SEQ ID NO: 19686 - RNA, 48 nt, Homo sapiens
caccaggcacccggaagagcgcggccgaagaccgaagccccgccgccc

SEQ ID NO: 19687 - RNA, 80 nt, Homo sapiens
cgcggacgacggaccagaagcccgccgcaaagggccaacagagagagaaacacagaaggacgaacacgaaacccaaaaaa

SEQ ID NO: 19688 - RNA, 79 nt, Homo sapiens
aagcagcagaggagcacgaggacggggagcaagaaggcacaaaaccgccccagccaggaggcagcagccaaggaaagcc

SEQ ID NO: 19689 - RNA, 54 nt, Homo sapiens
cccaaaccagccgaaagcgaaagcaaccaagcggagcgaggaaagaagcggaaa

SEQ ID NO: 19690 - RNA, 85 nt, Homo sapiens
cgaaccccaggaacaaggccaggccacagggcaccacaacacgcccacccaggaggcggccggccaagcccagccaggcgcccac

SEQ ID NO: 19691 - RNA, 55 nt, Homo sapiens
aggccgggacaagcagacccgaccacagccccagccgggaggcagaagagagccg

SEQ ID NO: 19692 - RNA, 63 nt, Homo sapiens
gagcaggagcccgcggccggccagccgaagaggggcggcacccccgacggcccgccacgggcc

SEQ ID NO: 19693 - RNA, 91 nt, Homo sapiens
cagcaccaaaaccaggagaaaccaaggcccgaaaaagcccaagacagcagaagcagacaccccaggaacagcaaagaaaagcaaagaagac

SEQ ID NO: 19694 - RNA, 58 nt, Homo sapiens
cccgcccagcccccaagcagcgggcacagacccacagcggggccgggccccgaccacc

SEQ ID NO: 19695 - RNA, 40 nt, Homo sapiens
gcggacaagcgaggaagcaagaccggacaaacaccagacc

SEQ ID NO: 19696 - RNA, 63 nt, Homo sapiens
caagaccggccccagggcaacagcccggcgagccagagaaaaaaggacaagagaccaggacaa

SEQ ID NO: 19697 - RNA, 55 nt, Homo sapiens
caggcggaacgcccgccccgcagagagaagagaccgacccaaacccacccaaggg

SEQ ID NO: 19698 - RNA, 81 nt, Homo sapiens
cggccagaaaaaggcgcggaaaaaggaacgaaccagaagccgaagccggagaaccaagaaggagcacaacaggcagacaga

SEQ ID NO: 19699 - RNA, 79 nt, Homo sapiens
gagcggagagcgagcggcaacccggagggggaggaacagcaaaaaagagggaacacgccacaccagcccgaaccagagg

SEQ ID NO: 19700 - RNA, 80 nt, Homo sapiens
ggagcggagcgcgggcgccggggagccagccggggggaaagacagcccgcagccaacgcaccccagaggccgcggcgaag

SEQ ID NO: 19701 - RNA, 74 nt, Homo sapiens
cagcaggcagcaaccggcccaaggccacgggagggcaacccaagcagggggcaacagaccaaagacagccaccg

SEQ ID NO: 19702 - RNA, 77 nt, Homo sapiens
ggagggaagaaggagggaacaagaggcccagcccgaaccagcaggcgaagacgcaggagagcacagacggacccgca

SEQ ID NO: 19703 - RNA, 114 nt, Homo sapiens
caaaaaggcaaaagacgcaggcaaaggcacaccaccacaaacgaagagggaaaaaaaggaggcccccgggaggcaggcacagaccggccgcagaaggcccacacaacggccaac

SEQ ID NO: 19704 - RNA, 78 nt, Homo sapiens
ggccgagaaggaccgccgacccgcccaccacgccagcagcgcgacggcagaaccagggaaagaacggagaagcggccc

SEQ ID NO: 19705 - RNA, 35 nt, Homo sapiens
gaaaagaaaccacagggagcaacagcgcgaagcag

SEQ ID NO: 19706 - RNA, 64 nt, Homo sapiens
gggacggaggacgcgcagagccccccaagagaacccagggggagccacgccggagcgggcaccg

SEQ ID NO: 19707 - RNA, 70 nt, Homo sapiens
gagaagaaagcggaagccccaccaaagccaccaagccaagaccagcagccaaaggaagaaggacagcgcc

SEQ ID NO: 19708 - RNA, 84 nt, Homo sapiens
agaaggcgcagcagaggggccacgcgggcccgaggcgcaccaagggcgaaggagccggcccaagggaccccaggggaagaaaag

SEQ ID NO: 19709 - RNA, 79 nt, Homo sapiens
aaagagaccggacgcagccgccaccgagacgaggaccaagaacgcccagcccgcgggcaccggcagaaaggaggaggaa

SEQ ID NO: 19710 - RNA, 72 nt, Homo sapiens
agggagaagaagaaaagcacggaaacgcgcaacggcggaagacccaaaagcgagccgaacaggaagcaaagg

SEQ ID NO: 19711 - RNA, 78 nt, Homo sapiens
ccacacaaggcaaacacacaaaagagaaaaacaaccagcaagggacgcgaaaaagacaagacgggcccgaaggcccgg

SEQ ID NO: 19712 - RNA, 41 nt, Homo sapiens
accgaccaggcaaccacgggagcccccagaaaagccagcca

SEQ ID NO: 19713 - RNA, 72 nt, Homo sapiens
caagaaaacagaaacgacggagagaaaccacaagggagggaagcgcgcaggagcggagagggaggggaacgg

SEQ ID NO: 19714 - RNA, 73 nt, Homo sapiens
ggggcgggcacccgaccggagcgggccaggcgcggagcgccagaggacccggcgccgacgcaaggaacgagcc

SEQ ID NO: 19715 - RNA, 69 nt, Homo sapiens
agagggggaaaaaggaaggccgccggacagcgcagagccaagacggagaaacaagccccgagcgcgccg

SEQ ID NO: 19716 - RNA, 87 nt, Homo sapiens
agcgccgaagcagccgggagccggagcgggcgcggacgccgaggcaccgaggcaccagaggaggccccagggagcgccaggcccgcg

SEQ ID NO: 19717 - RNA, 66 nt, Homo sapiens
agacacaccggaggcgacggccaggccacaggccccagaccgccggagaagcagagcgagcccaag

SEQ ID NO: 19718 - RNA, 78 nt, Homo sapiens
gcggcgccgcggccgcgcggacggacgccgccgccggcgaggcacggagaaagcgcagaaacagaagaggggaaggaa

SEQ ID NO: 19719 - RNA, 62 nt, Homo sapiens
caacagccaacgcaaaaggagaaaacacaaggagcccaaaaggcagagcgaggagagaagaa

SEQ ID NO: 19720 - RNA, 76 nt, Homo sapiens
cacagcagcccagagcaaaagagggcgcacccagacaacaaacgcccgggaaaggaaagccagggcagcccacagg

SEQ ID NO: 19721 - RNA, 76 nt, Homo sapiens
agagacaagagccgccagagcgcggccgccaagggacccaagagcgaagaagacaaagaaccagaaccgcgcaaac

SEQ ID NO: 19722 - RNA, 80 nt, Homo sapiens
ggagcggaggagcagaacccaacgcaggaagggagaacagagaaaagggcaaggccccgagcgcccaaccaacagaacgg

SEQ ID NO: 19723 - RNA, 50 nt, Homo sapiens
gagggcaaggagaaacgaagggaggcacccaagacagaggaaggaaagga

SEQ ID NO: 19724 - RNA, 75 nt, Homo sapiens
gccacaggaggcggcgggccccgcccgccgaagggacagaacgacacaaaagggaagggagccggcagaagggac

SEQ ID NO: 19725 - RNA, 73 nt, Homo sapiens
aaggagaagggagaagaaacagcagccgcagggcaaacgaagaaaacgacccagccagaggacaaaggaccga

SEQ ID NO: 19726 - RNA, 60 nt, Homo sapiens
cggaaaaagccgccacacgccaaagggcggaggcgcgcgccgcgaagggccagaggagcg

SEQ ID NO: 19727 - RNA, 78 nt, Homo sapiens
aggaggcaccccagcaccagagccgcacgggggcaccaaacagaggagaccggcaggaaacagaccacccccaaacgg

SEQ ID NO: 19728 - RNA, 77 nt, Homo sapiens
gaaaagagacagaggccaccagacccccggaccaaagagaagacacaaaccagacaaagggagccaaaggaaaaaag

SEQ ID NO: 19729 - RNA, 60 nt, Homo sapiens
cgccgagcccgccgcgcgggcccgcccgacgcggaaggcccgccaagcgcccccgggcac

SEQ ID NO: 19730 - RNA, 79 nt, Homo sapiens
gagccgccgccaagagccggccacagaggccggaaaagccccaaacgcgccaacgacagcccgggcccgaccccaaacc

SEQ ID NO: 19731 - RNA, 75 nt, Homo sapiens
ggaaaccagccggaccccagcgggggaagaaggacaagaggccagggcaggaggcccgcgggcaccaggaccaac

SEQ ID NO: 19732 - RNA, 76 nt, Homo sapiens
ggggcggagccaggaagcaaaggaagcacacacccgccccccccgcaggaggaaccggagaagaaacccagaggaa

SEQ ID NO: 19733 - RNA, 79 nt, Homo sapiens
caaagccaagaggcggacaaaacgccaggcggaccagaaggccagcaaagggaagcaaggaccagaagcgccaacgcaa

SEQ ID NO: 19734 - RNA, 97 nt, Homo sapiens
acagcgaagaaagagaaagggaaaaggaccacgcaaacagaggcgagacaaagaggcacccccacggcggaccagcacagaacagaaacccggccgg

SEQ ID NO: 19735 - RNA, 78 nt, Homo sapiens
cgggagcgaacgaggaggcggccagaagcccgcggcaagacaagcacaaggcaccaaaaagggaaccaaagcgaagcg

SEQ ID NO: 19736 - RNA, 79 nt, Homo sapiens
agccaggggcagggccccaggacagcaagaaccaggacccaccgcacaggcgagcacgggccaggaggcgagcaggaca

SEQ ID NO: 19737 - RNA, 78 nt, Homo sapiens
ggggggggcacgcccgcgggcagcagcagcgggagcaccacagcaccccccagcaaggggccaggcaccgggcagggg

SEQ ID NO: 19738 - RNA, 77 nt, Homo sapiens
acaggcgacagcgaccgcggcagagccaaagaaaacagaaaccacaagacccaacggaaagaacgccaaacgaccca

SEQ ID NO: 19739 - RNA, 78 nt, Homo sapiens
gggagagcggccgccgccgcgccgcccaccacaggcacccacccgcgagacccccaagagacaaaagaagggagaacg

SEQ ID NO: 19740 - RNA, 79 nt, Homo sapiens
gacaaggaggcagggacccggagccacccacaggacccgccaccaaagccaggcccaaggccggaacagccggagcaag

SEQ ID NO: 19741 - RNA, 87 nt, Homo sapiens
gcgaaagcgcaggccccgaggacccgccgcacgacaggccccgagccccggccccaaagacccaaaacagagacaccccccagcccc

SEQ ID NO: 19742 - RNA, 73 nt, Homo sapiens
aagcacccaaccggcccacgagacaagaggaagcagcaggacgggaaaaacaccggcacgagccggcagccag

SEQ ID NO: 19743 - RNA, 83 nt, Homo sapiens
gaggagagcaccggccacggaaaagcaaagcccgggcgcgccaggcacagccaagagcggaccggcagcggccagcgcagcgg

SEQ ID NO: 19744 - RNA, 73 nt, Homo sapiens
ggaagccacggcagacacacaacccgacccgacgagggaggcaagcaggggggcaaaggaaagaaggcagaaa

SEQ ID NO: 19745 - RNA, 63 nt, Homo sapiens
aaaaacccgaccccccaagcaggggagaagcagaccgcaccaggcgggaccccgaaaaagccc

SEQ ID NO: 19746 - RNA, 75 nt, Homo sapiens
agaacacagcaacacccacgggaaagcgagagcccacggcccaggacacaaccgaacggaccccccgaacaaagc

SEQ ID NO: 19747 - RNA, 79 nt, Homo sapiens
ccccgggccgcggcccacgcccgcggagcagccggacaggacagccaggagggggcgcacaccgccgcgaaacggagca

SEQ ID NO: 19748 - RNA, 80 nt, Homo sapiens
aaagccagggaggccgcgaagcgcagacccaggggagcccaccagccagcaacaggcccggaagacagccaagcggcaga

SEQ ID NO: 19749 - RNA, 75 nt, Homo sapiens
gggaaacaggcaaaggaagaagccagcgagcggggcgcgcggccgagaccggaaaccgagagaaacgaagacgaa

SEQ ID NO: 19750 - RNA, 75 nt, Homo sapiens
cggcccacggacaacacgcacccaggccaacagagcacaggcaaggcaccgagggggggcaacaccaaaacaaac

SEQ ID NO: 19751 - RNA, 74 nt, Homo sapiens
cgaccagccccaccaaggcacccaaaagcaagcgcgggaagcgacacccagaccccacgggagaagcaggagag

SEQ ID NO: 19752 - RNA, 84 nt, Homo sapiens
cacccgcgccagcaccacgcccgcgccgcgccgccgccaccagcccaagagaaagggcagcgggggcagagacggggaacaggg

SEQ ID NO: 19753 - RNA, 79 nt, Homo sapiens
ccgcgccacccggggccgccgcgcaggagcccccggagcggccccgagccccggccccaaagacccaaaacagagacac

SEQ ID NO: 19754 - RNA, 84 nt, Homo sapiens
aggaaagcaccagacgccaccacgggcacccgcgccgggcaccgaggaccagccaagacagaccacaggaagaggaggcccgag

SEQ ID NO: 19755 - RNA, 75 nt, Homo sapiens
ggagcacgacggcaggaaggaggagacgaagaaaggaggcagagaggagggcaaaaagacaaacaccaccggagc

SEQ ID NO: 19756 - RNA, 66 nt, Homo sapiens
acaaacccagaccacacaagggcaggggggaaagacaacggcaagcggagaagagcaaggccgaac

SEQ ID NO: 19757 - RNA, 59 nt, Homo sapiens
ccaacagaccaagaacggaacgaaaccaaagcacaaaccagcgggccaaaagcagagaa

SEQ ID NO: 19758 - RNA, 75 nt, Homo sapiens
ccacccacacccaccaacaacaccacaaaaccacagccaagcccagacaccagggcaccgaaaggagggggaggg

SEQ ID NO: 19759 - RNA, 75 nt, Homo sapiens
ggagaccaagaagaacaagcggccccgggacagacagggaagacagagaccccaccccgcggccaccaccgcgcc

SEQ ID NO: 19760 - RNA, 70 nt, Homo sapiens
gaagcccacagaacagacagcaaagaagggagccaccacccacgagaggccaaacgacagagaaccagca

SEQ ID NO: 19761 - RNA, 73 nt, Homo sapiens
ggcgagagggcggcgaaggaggcagaggcacagcgcagggaacagaaaggagagaccacaaggaaaaccaaga

SEQ ID NO: 19762 - RNA, 78 nt, Homo sapiens
gaggaaaaggaacgacgagccgcaccagaaccccacccggaacccacccagcggggacccagaagaggcccgcagcca

SEQ ID NO: 19763 - RNA, 109 nt, Homo sapiens
ggcggagcaaagaaaacacaggagaaggaaaggcaaaacggaggcgggaacgccacccaagcagccgggacagcagcaccacaaggccacgcagcaacagccgccccag

SEQ ID NO: 19764 - RNA, 74 nt, Homo sapiens
cagagagagccaaacccccagaggcacccggagaagagggagccaagagcaaagaccaagccaaagcgagaaga

SEQ ID NO: 19765 - RNA, 72 nt, Homo sapiens
acggcccaaggccagcccgcaggaaccagcggcccagaaacgggagacacccaaggagggacgggccagaac

SEQ ID NO: 19766 - RNA, 75 nt, Homo sapiens
cagccgcgagccccccggggcgccaaaacgcccccaacccagcgcaaaggaagaggaaggaaaagcagcagcaac

SEQ ID NO: 19767 - RNA, 52 nt, Homo sapiens
gacggaccagccccagaacaaagagaaggaaagcggcaacgacaaagcagac

SEQ ID NO: 19768 - RNA, 67 nt, Homo sapiens
aggaacccacgaaaaggagggagccaaagggcgccgaaaagcgaaaagaaacaagccgcggcaacag

SEQ ID NO: 19769 - RNA, 74 nt, Homo sapiens
gccgcccgcggagccaggccaggcccaagccaccgccgggcacaaccagcccgacaagcagcagacagggcaaa

SEQ ID NO: 19770 - RNA, 76 nt, Homo sapiens
gagaaaaaggagaaaacaagacaagcccacacagagcaagcaagggacgcacgggagacaggcaaagagcgaacca

SEQ ID NO: 19771 - RNA, 77 nt, Homo sapiens
cggccaagaacgcaaggagcagcagcaaaagccagggcaggagaacccccagcccagcaggcgggccggagcccacg

SEQ ID NO: 19772 - RNA, 89 nt, Homo sapiens
agaagagaggaagccaacccacaggcagcagacacccaggacccggaagaggccaacacacggagcacagagagacccaagagaagggc

SEQ ID NO: 19773 - RNA, 36 nt, Homo sapiens
accggagagccagccaagagagccccagcaggggga

SEQ ID NO: 19774 - RNA, 72 nt, Homo sapiens
aggcccagaggaggaagccgcagccaagagagggaaagggcgggggcaagacccagagaagacaaaacaaca

SEQ ID NO: 19775 - RNA, 71 nt, Homo sapiens
cggaacccgcgcgcgcccacgacgccgagcgagcaggcgacccaaaagagcgaaggaaaaccagcaacaaa

SEQ ID NO: 19776 - RNA, 76 nt, Homo sapiens
gggcagaaacacgagcacagcaagggcgcacggaagaccgccggaccaaacagagggccccacgccaccaccagag

SEQ ID NO: 19777 - RNA, 73 nt, Homo sapiens
gcggggacaggaccccggacgagcccggcgagggagaccgaggagcccaggaggaggaacccacagaccccca

SEQ ID NO: 19778 - RNA, 79 nt, Homo sapiens
aagacccaacaccccggccaagaaaaagcacagaacgaggagcagagaggagacggccgcaccgaagagagaagaaagc

SEQ ID NO: 19779 - RNA, 39 nt, Homo sapiens
ccccgcgcaccaccagcacaggcggggcaggccccacac

SEQ ID NO: 19780 - RNA, 101 nt, Homo sapiens
gcccgagccccggcccagaaccccagcccacccccagccggcaaaggagacagggaaacgaaaaccaccgggcaccacgagcccacgagagaggacagccc

SEQ ID NO: 19781 - RNA, 80 nt, Homo sapiens
ggaaggaaacacaggggagagccgaccaccaccggaaccccaacaccagcgcccgcacagaggaacaaccaagcacggac

SEQ ID NO: 19782 - RNA, 78 nt, Homo sapiens
acaggcccagggcccggcccggacgcagccaggccacaggcagcgaacgggaaagagcacaagacccagaaaaaaagg

SEQ ID NO: 19783 - RNA, 79 nt, Homo sapiens
ggcgagaacgcacaggccgcgcagagcgggaccacccgggcacagcaggcacggagaaaacagaaacgccggagaggaa

SEQ ID NO: 19784 - RNA, 79 nt, Homo sapiens
aaggcaacaggaacccagcaacaagaccaaaagaaagaaagaagagaggaaccccaaacgacaccagaaaaccaagcgg

SEQ ID NO: 19785 - RNA, 70 nt, Homo sapiens
ccagcccccaagaggggacacagggaggacaacaaaaggagagaaaagggagaaaagaaggcaacagaaa

SEQ ID NO: 19786 - RNA, 74 nt, Homo sapiens
agcgagagcacacaaagaaggggaagagagacaagggcagagaacggggagacacagcaaagagcccaggccac

SEQ ID NO: 19787 - RNA, 84 nt, Homo sapiens
aacaaccagagacggcgaaaaaccaaaaagccagggcgcacccacgacgcgcacaccaccggcagaccggcgccacagcaccac

SEQ ID NO: 19788 - RNA, 70 nt, Homo sapiens
gggagacccgacggagcagacagaagaaaaaaggggccagggacacggagcgaggaaagagaaggcgcac

SEQ ID NO: 19789 - RNA, 44 nt, Homo sapiens
aagccaaagaacccagggccagcgcagaagcagaaaacccagag

SEQ ID NO: 19790 - RNA, 74 nt, Homo sapiens
gcggggcccaaggcgccacaagccggagacgggaagcccaacgcgaagaaaagaagccagcggaggggcgcaca

SEQ ID NO: 19791 - RNA, 70 nt, Homo sapiens
gaaaaaagacagaacgaggaaggagaacgaacagacagggcgcaggagcgcgcaccgccaagacaccgcg

SEQ ID NO: 19792 - RNA, 79 nt, Homo sapiens
cgcccagaaaccagcagaaccgcgggacaagaacagggccacagcgaacgaggacagggggccagaggcagggaggggc

SEQ ID NO: 19793 - RNA, 71 nt, Homo sapiens
cagccacgccaaggaagcggaaccccagaacacagggcagacgcgaggggacccaggcaaagcccagacac

SEQ ID NO: 19794 - RNA, 79 nt, Homo sapiens
gcggcgcgccgccccgggcggccgcgggcggggggagccccccagacccgaaaggagacaagaggacagccgcacggaa

SEQ ID NO: 19795 - RNA, 70 nt, Homo sapiens
aagccagaccagagccccagccgaaagccccccaaagcaagaaggggcagccgcgcccgggccggccggg

SEQ ID NO: 19796 - RNA, 41 nt, Homo sapiens
aacccagcacggggaggccgagccaggaggccgacccgacc

SEQ ID NO: 19797 - RNA, 68 nt, Homo sapiens
agcgcaaacccagcgccggagaggaacaagcgcccgaccagaagggggcagaggcaaggaaaggcaca

SEQ ID NO: 19798 - RNA, 76 nt, Homo sapiens
gaaaaagggacgagagcacggagggaaggagggcagccaaaaagaggagcgaaaacgccacaacagagggggccag

SEQ ID NO: 19799 - RNA, 71 nt, Homo sapiens
ccacccagcacaacaaaccccgcgccccagaagggaaggcaggacccaggaccacccccacccccaacagg

SEQ ID NO: 19800 - RNA, 75 nt, Homo sapiens
gccgcccgggcgcagcaaccaggcgcccccaagaagaaaaccgggaggagacaggaagccagccggccccaaccc

SEQ ID NO: 19801 - RNA, 66 nt, Homo sapiens
gacgcagggcgcccccgaccacaggacagacagagaaagggaagaacaaagcccccagacagggga

SEQ ID NO: 19802 - RNA, 76 nt, Homo sapiens
ccgggccggggagcaagcgccagagggccaggccgcagcggcccaagaccacccccagagcgccaccaggggaagc

SEQ ID NO: 19803 - RNA, 80 nt, Homo sapiens
ggcggagcgccacagccaggagacacggggccaggcccccggcccgcaccggcgcggcacgccggccggcgacggccccg

SEQ ID NO: 19804 - RNA, 81 nt, Homo sapiens
gcaaggacccaccgacccgcgagcgcccaggacccgccaccaaaccgcccgagggaccagccgcgccaggcccagacacgc

SEQ ID NO: 19805 - RNA, 55 nt, Homo sapiens
ggcggccaagcgaggggaaaccgcgccagagacacagaagcgccagcaacgaggg

SEQ ID NO: 19806 - RNA, 73 nt, Homo sapiens
ggggacagacaggagggcaggcacgagcaaggaggagccccgaaaagcaaagaaaaaggaaggacgaacgcac

SEQ ID NO: 19807 - RNA, 42 nt, Homo sapiens
acaacaccgcgccccagggcagggaccaaaagagcgcccgac

SEQ ID NO: 19808 - RNA, 75 nt, Homo sapiens
agggccaggggccccccacccccagcagaagccaggcccagcagggcggagggaccccgagccaccaaacaccag

SEQ ID NO: 19809 - RNA, 54 nt, Homo sapiens
ggaagcccccaagacacgggcagcgaacggaagcgacagcagaccacagcccgg

SEQ ID NO: 19810 - RNA, 101 nt, Homo sapiens
agggccggaaaccggaggcaggaaacgcagcaaagccacgggggagaagggagaagaaaaagcagaaaggaacagaaaacaaaagaacaaggcacaacgga

SEQ ID NO: 19811 - RNA, 56 nt, Homo sapiens
aaagaccaaggggggggcacccccacaacggccacgagcggcacaggacagaaccg

SEQ ID NO: 19812 - RNA, 76 nt, Homo sapiens
gaaaaaacagcagagggacacagccccagaaaggggcaaaaggaagaagcggggaacaacgagccgccggcccggg

SEQ ID NO: 19813 - RNA, 88 nt, Homo sapiens
agaaaacaagggaggagaagacaagcaaaaagacgggaaacggcaaagacagagcgccgccaccgccgccaccacggagcgagaagcc

SEQ ID NO: 19814 - RNA, 81 nt, Homo sapiens
acccacaccccgacccccgaacccccagcccaaacccggaaacccagcggcccagccggggcacgcagacgcagcaggagg

SEQ ID NO: 19815 - RNA, 69 nt, Homo sapiens
aaaagcaaacggaccagaccgaccaccaaaagggcaaagagaaccaggagaccccaccaccacagaaaa

SEQ ID NO: 19816 - RNA, 76 nt, Homo sapiens
caaagcagagggcggaagggacgcccagggcacccgcagcaaacaaggcgccaccggaagaaacgggaggggagga

SEQ ID NO: 19817 - RNA, 71 nt, Homo sapiens
agaaaggggaaccccggagaaaaggccaagaaggcagcagaaacccacgagcgaacaccggagccccgcag

SEQ ID NO: 19818 - RNA, 75 nt, Homo sapiens
gaccccccaacagaggaacgaggaaacagaaagaagacggacccacggggaacaacaagacaacaagaggagcaa

SEQ ID NO: 19819 - RNA, 74 nt, Homo sapiens
gagcccccacggcgcggggacacccgacaagaacaggacaccaggccgagcacgaaccgaccaacaggcgagag

SEQ ID NO: 19820 - RNA, 56 nt, Homo sapiens
gcaccccccaaacgacgcagccacggagaggggcacaaggaccacaaacgcagagg

SEQ ID NO: 19821 - RNA, 79 nt, Homo sapiens
cccccggaaacccagaagcagaaagacagcagaagagaagccagagcaacccaaaaagcaagcaagacaaacagagaac

SEQ ID NO: 19822 - RNA, 81 nt, Homo sapiens
cgcaagcacgaagagcgaggaacccgacccagaaaaccagcgggaaaacacagaggaagccaccagggggaaggggcccac

SEQ ID NO: 19823 - RNA, 82 nt, Homo sapiens
ccacaaaggcccaccagaggaccacacagggcccgaagccagcagagagcggaggcgcaaaccgagccacagagaaaacccg

SEQ ID NO: 19824 - RNA, 75 nt, Homo sapiens
gccgcgggagggcagacgcccgagacacacagcgccgggggccgggagcccaagggaaacaggccagccacgcag

SEQ ID NO: 19825 - RNA, 78 nt, Homo sapiens
ggaacgggaaaggcgcagagaagcacagacacaaaagccaggaagacaagagcagaagaaacagaccgaaagacaaca

SEQ ID NO: 19826 - RNA, 75 nt, Homo sapiens
agcaggaagaacacaaccacagaacgaacagcgcaacagaaaccaggcgggaggccgaaggcaccaaccaaaacc

SEQ ID NO: 19827 - RNA, 81 nt, Homo sapiens
agcgaggagcggcaggagcaagccaagaaagaaccgaagacagaaacggggagccagcagaagaaaaacgcacaggcaccg

SEQ ID NO: 19828 - RNA, 76 nt, Homo sapiens
aggaacaaggcggaggaacgagacgcgaaccagaccacgagaaggaaagagcgcccggcagcgcggcccagcggcc

SEQ ID NO: 19829 - RNA, 85 nt, Homo sapiens
agaagaggcgggagagcccgccgacagcgcgaggaggacaaacccacgcaagcagagggccagcgccgagcagcgcagaaacagg

SEQ ID NO: 19830 - RNA, 70 nt, Homo sapiens
ccgggcccggaaagcgccgcccagcagccgcagagcccaaaaggcagagcgaggagagaagaaggaggga

SEQ ID NO: 19831 - RNA, 72 nt, Homo sapiens
cagcaaaaacggagcagaaaggaggccagcaagagaaacgggcccgacagcagaaagaaagggacagcagaa

SEQ ID NO: 19832 - RNA, 82 nt, Homo sapiens
ccgcacacaccacgccgcaaggaccggcacaaggacgccaagggggcgagagacaaaccccagggaaccggcggcagaaggg

SEQ ID NO: 19833 - RNA, 58 nt, Homo sapiens
gcggccaaccgcacagacgaccacgcccaccccacgggaggccgggacgggacaacga

SEQ ID NO: 19834 - RNA, 73 nt, Homo sapiens
aagacaggagcaaggagaccgaacccgggccacccaggacaagggaacacaaaccagacaggagaggcacccc

SEQ ID NO: 19835 - RNA, 72 nt, Homo sapiens
cagcccccgagggcgggacacagaaaaggcaaggaaggagcaccgcgcccacacaagcaacacccagagcac

SEQ ID NO: 19836 - RNA, 76 nt, Homo sapiens
gacgccccgcgggaccccccgccggaccccacagcaacaagcgggaagagggcagcagaagacaggccggaaccga

SEQ ID NO: 19837 - RNA, 37 nt, Homo sapiens
gccgccagacacacaagacgaaacaccgcacccagaa

SEQ ID NO: 19838 - RNA, 74 nt, Homo sapiens
gagacgcacaagaaaagcgcaagaagaggaggaagccagcgaggacaagaaaaaggcgcagcccaacagaaccc

SEQ ID NO: 19839 - RNA, 60 nt, Homo sapiens
ggcagacacacaacccgacccgacgaagaggcgagggagccgaccacagcgaagcagaag

SEQ ID NO: 19840 - RNA, 72 nt, Homo sapiens
cccagcgcgggaggccgaggaaggaccacgagaccgcgaaacacgacggcggggagagaaaacccagcgcca

SEQ ID NO: 19841 - RNA, 74 nt, Homo sapiens
cgcaaaccacaaccggagcagaggagcacggcacccaggcggaggcagggcacgaccagccaagcaacccgccc

SEQ ID NO: 19842 - RNA, 67 nt, Homo sapiens
caaagaaagggaagagacacaaggagagaaagagacccacagggacgaaacacggagaaggaaaaca

SEQ ID NO: 19843 - RNA, 79 nt, Homo sapiens
acgaaggggcagaggccaagagcccaacaccacccgagagccccaagaacgccaaaagacgaacacaaagggaaagagg

SEQ ID NO: 19844 - RNA, 48 nt, Homo sapiens
cagaacagaaaacccagacagggggcccaggaaaccccccccaccgga

SEQ ID NO: 19845 - RNA, 77 nt, Homo sapiens
cgaccgggcgccagcccccggacagccgcccggaccaagacacccaggagaaagacagcggggaaaagaaaaaggag

SEQ ID NO: 19846 - RNA, 63 nt, Homo sapiens
gcccgggcccgggcggcggcccaccgcccacggggcgaaaagccaggagcaaaagacgagcgc

SEQ ID NO: 19847 - RNA, 49 nt, Homo sapiens
gggagagacaagagaggagacccaacagacgcacaacacgaaaggagaa

SEQ ID NO: 19848 - RNA, 90 nt, Homo sapiens
gcgggcacagggcaaggcggcggacggcgcgcgcccgaggcgaggaggagcgcggcggaaccagccacacgaggaagcagcagcgcagca

SEQ ID NO: 19849 - RNA, 69 nt, Homo sapiens
ccggaacgcgcgcggagggggcggcgcggcaggagcgcggagggacggcccacaggccacccgccagac

SEQ ID NO: 19850 - RNA, 50 nt, Homo sapiens
cacggcccgagcgggggcagccgcagaggcgcggacaaaggccgagaacc

SEQ ID NO: 19851 - RNA, 80 nt, Homo sapiens
cagaccggacaagagggaaaagcgcggcggcaagaccgccagagaacgaccgaaggaggaggaagccaagaacgggagcg

SEQ ID NO: 19852 - RNA, 77 nt, Homo sapiens
ccacagagacccacagggcaaccacgcaagaagcgaagccgcggaaaaagccagagggaagcccgagaaacacagga

SEQ ID NO: 19853 - RNA, 78 nt, Homo sapiens
ggaagcgcgggaagggaaaccacagaccggcccacaaaaagccgccaggagaaagaaaggagccggaaccaggaacac

SEQ ID NO: 19854 - RNA, 63 nt, Homo sapiens
cgagggacccgcagggagccaccgagaaccccagacgcacgggccggcgcgcgccgggcaccc

SEQ ID NO: 19855 - RNA, 68 nt, Homo sapiens
ggaccagaccgaccaccaaaagggaaaaaagcagcggaggagaaaaaaaagaagaccgcagcaaggaa

SEQ ID NO: 19856 - RNA, 75 nt, Homo sapiens
ggaacaaagaaaaccaaaacgcaacagaaacaacaggaaagaccagcacaggcaagaaacggaaaacacgaaaag

SEQ ID NO: 19857 - RNA, 83 nt, Homo sapiens
cggaggaccacaggcccagacgagcggaggaggcacagggcgcggaccgcacgagcgcgcaaacggggacagcgccgaccgga

SEQ ID NO: 19858 - RNA, 81 nt, Homo sapiens
ccgccgggggagacgacccccgccaggggaggggcgaccccggggcccggccagcacgaccgaggaggggcggacagcgga

SEQ ID NO: 19859 - RNA, 72 nt, Homo sapiens
ggacgcgccagaaggacaacagagagaagaggagaacacagcagccggccacaggccccagccgggggcccg

SEQ ID NO: 19860 - RNA, 62 nt, Homo sapiens
aacgcgcagggcaaccgaaaggcaagcagacccgcgaaagaaagaagacggaagaggaaagg

SEQ ID NO: 19861 - RNA, 77 nt, Homo sapiens
aaggcgagaagaaagaggccagacaggaggagcccccaggacaggcacacccgggaaaaccgaacacccagcccaga

SEQ ID NO: 19862 - RNA, 75 nt, Homo sapiens
caccaaggacgaacaaccaccaaggagggaaccacgcagaaaaggggcaaaagaacaagcccccccaaagagacc

SEQ ID NO: 19863 - RNA, 60 nt, Homo sapiens
gcacccccagacgggagacaccgaggccgccggcagcacccaaggagcaacacagaaacg

SEQ ID NO: 19864 - RNA, 82 nt, Homo sapiens
accacacccacaggcgacagagggcgggaggacaaagggagaaggcagagacgaaggaacaggagacagcggagaaagagcc

SEQ ID NO: 19865 - RNA, 86 nt, Homo sapiens
aagaccaccaaaaagccaccgcgcgcgcccgaccgcgcggagaccggaccgcgccacaaggagaggccagcacccgcccgaggaca

SEQ ID NO: 19866 - RNA, 78 nt, Homo sapiens
gaaagaacagagaggcacgagacggaaccccccggccagaaaaccagacgagagacagaagacgaaagggcaagaaag

SEQ ID NO: 19867 - RNA, 71 nt, Homo sapiens
gcgcagccgcgaggaccggcgggagagagagcgcccagaaagccaggccaaacccagacgcaaccaccccc

SEQ ID NO: 19868 - RNA, 66 nt, Homo sapiens
agaagcagcccagccagaagcagccccaggcccacagagccccagggagccagcgacagcgagagg

SEQ ID NO: 19869 - RNA, 68 nt, Homo sapiens
cccagggagagcaggggggaaaaagacccgaacggaccagcagggagaaaagaagcagcccacgaacc

SEQ ID NO: 19870 - RNA, 75 nt, Homo sapiens
cgcgcaggccggggagcgccagaacgcaaggagggacaggacggaaggagcggaggaagacacaagagcgagcga

SEQ ID NO: 19871 - RNA, 80 nt, Homo sapiens
caccacgaggccagcacgggaacgcgaagcgccaaagccagacaagaccgcacggaccggccgcccaggccaaccaccca

SEQ ID NO: 19872 - RNA, 86 nt, Homo sapiens
cgcccggaaaggggacaccgggcacagccgcagcgagcagggcagcaggcgagaccgcccagaggagaccgaggggccagacggaa

SEQ ID NO: 19873 - RNA, 69 nt, Homo sapiens
gcccgagggacacacaaaggaaaacccgagacaagggaaaaagcgcggcaggcaaggccacggaaagag

SEQ ID NO: 19874 - RNA, 81 nt, Homo sapiens
aggcggggccgccggggccgccaggagcccgaccgggagaggacaagaccacgagccagagcggagccaggggaccaggag

SEQ ID NO: 19875 - RNA, 75 nt, Homo sapiens
ggggcccggggggaggaggggcaggcccggcggagaaggaagccaacaccggagccagaaagccgaacccacggc

SEQ ID NO: 19876 - RNA, 77 nt, Homo sapiens
ccgagcagccaggcagcagcgcggagaagggaacagcagacagcgaccaaagcacaagaaagcagagagcaggccaa

SEQ ID NO: 19877 - RNA, 73 nt, Homo sapiens
gaagagagaagccaccagcaaaaaaagacgagaaccaggacgaacgaccccaccgaggacaccggacaggccg

SEQ ID NO: 19878 - RNA, 79 nt, Homo sapiens
gccgcaccacaggcgggccgcaaggagcggacccaccggccaccggcggagcgagcgggaggccaccgccccaccagca

SEQ ID NO: 19879 - RNA, 82 nt, Homo sapiens
gaccgggaccgccgccgccgccgccaccaggccggggggggcacagagccccggaagacagcccccagcgaccagacccagg

SEQ ID NO: 19880 - RNA, 40 nt, Homo sapiens
gcacacagcacgaagggggacaaacacgcagcgaaggagc

SEQ ID NO: 19881 - RNA, 72 nt, Homo sapiens
agccgcgccggagcggagcgcgggcgccggggagccaggaaacacccaaggaaccaaagcaggccagcagaa

SEQ ID NO: 19882 - RNA, 77 nt, Homo sapiens
cacacagcgaccgggagaacaagacgcgccaccccaagcaccggcacagcaaaagaagggaaagaggaaaacccggg

SEQ ID NO: 19883 - RNA, 71 nt, Homo sapiens
cgaaaacagagaagaaaacgccacaacaccggggaagacagggggggcagaacaccaaaaggacagacgca

SEQ ID NO: 19884 - RNA, 69 nt, Homo sapiens
aaaggcccagggcgacagccacccggccggacacggcagcggcccccgggacaaaacccagagaaccac

SEQ ID NO: 19885 - RNA, 81 nt, Homo sapiens
gaccgggagacacggccagacgcccccagaaagcagcaaaaacagagaaacacgaagaaggcaaccaccccccaagacaag

SEQ ID NO: 19886 - RNA, 76 nt, Homo sapiens
cgcccggcgcccgagaggccaccgcggcagaggcaaacgccccggaaagaagggggcgaaaggaagcccagaaggc

SEQ ID NO: 19887 - RNA, 71 nt, Homo sapiens
agaaggcgccgaagagggcccggcccaccaagccgagaacaccaggaaacagcccaggggaaggccacgga

SEQ ID NO: 19888 - RNA, 71 nt, Homo sapiens
gaagagaaaggggcaacaagaaaggaaggaacggccaggagaacaaccagcaccgggacccaaacagcccg

SEQ ID NO: 19889 - RNA, 75 nt, Homo sapiens
gaaaaagaaacagggaagaaaggagacaccacggaacccgccacccagagagccgcacccgaaggaccaccccag

SEQ ID NO: 19890 - RNA, 51 nt, Homo sapiens
ggaaagccaaacaacggacaaagaccagggaaggcgagaacaagagaggga

SEQ ID NO: 19891 - RNA, 76 nt, Homo sapiens
agggcaggacagcgccagaagcagaggcgcaaagaagcgaaggccggacacggggaggagcgaagcacaacgccaa

SEQ ID NO: 19892 - RNA, 76 nt, Homo sapiens
aggcgcccccgcgcgagaaaaccacccgcgccgaagaaaacaggagccccaagaacccccaccccgcccagccgcc

SEQ ID NO: 19893 - RNA, 62 nt, Homo sapiens
ggcaaccgaaagccagcagcggggaaaggagagacaagaggaagaacaagaaaggaaaaggg

SEQ ID NO: 19894 - RNA, 78 nt, Homo sapiens
accagcaaagaaccaggaacaccacccgcagccacccacacagaaagccagggccggagggagaacagagcggccccc

SEQ ID NO: 19895 - RNA, 72 nt, Homo sapiens
ccgccaaccggcgccgggggacggcgcggaagaagcgcgcggagcgcgggaggaacaccaaacgggcaaccc

SEQ ID NO: 19896 - RNA, 78 nt, Homo sapiens
aaagaagaggcaaccacgcccaagcaagcggcccgaacacagaacccaagaaggagaaaccaaagagccaggcgaccc

SEQ ID NO: 19897 - RNA, 102 nt, Homo sapiens
gcggcgcacggcggcgaaggggcgagcagggagcagcgcagcgcgcgcagagcgcgccagacaaacgagggagcaggagacacccccgacaccgacacgaga

SEQ ID NO: 19898 - RNA, 78 nt, Homo sapiens
caagcacgccggagggaagagcgagggagaggggaccccacaccacaaaccgaggaaagaagggacagcagaaaacgc

SEQ ID NO: 19899 - RNA, 80 nt, Homo sapiens
cgcggggacgccgcggccccaacgcgccccgggacgcacacggcaccaaacgccccggggcagaagagcggcgccgagga

SEQ ID NO: 19900 - RNA, 64 nt, Homo sapiens
cgcgagaccaagggcaaagcgggagggccgcagaagaacagaccgccgaagaaacgaagcggca

SEQ ID NO: 19901 - RNA, 79 nt, Homo sapiens
acgaaaaaagcccgggcaaggggacgcgcagcgaacaccacgacagcgaggcagccagcagcagccaccagagcccaag

SEQ ID NO: 19902 - RNA, 72 nt, Homo sapiens
aaagacacaaacaaacaacagaagcggacgcacggcagggaagaacggaaaccagagaaagaaacgccccca

SEQ ID NO: 19903 - RNA, 68 nt, Homo sapiens
aggaaaccaggaaaacaaagcagccaacagacaccaggaaggccaccgggagcaggagagggccagaa

SEQ ID NO: 19904 - RNA, 67 nt, Homo sapiens
aaggagcgaacaggaggcaccggggggaccagggcggaggagacagccacgacagagacgcagccag

SEQ ID NO: 19905 - RNA, 104 nt, Homo sapiens
agggaacagagggaccagacgaaagcaaccagcaagagcgagaagcacgagaaagaccgacaagacggaaaccgggagggggaaaagcgagaaaaagacccaag

SEQ ID NO: 19906 - RNA, 72 nt, Homo sapiens
gcaaagccccagacggacgaacggaagggccagccagaaccaagacacacagggagccagcaccgagccccc

SEQ ID NO: 19907 - RNA, 64 nt, Homo sapiens
agccaaagcaacagaccaaaaacaggcccggcgagccccgcaggcgggaacacaagcaagggag

SEQ ID NO: 19908 - RNA, 55 nt, Homo sapiens
gacaggcaaagacgccggccagcagagagacggggcaccggagccaggaggccga

SEQ ID NO: 19909 - RNA, 77 nt, Homo sapiens
aaacaaaggaggcgaacccagagaggggaagacgccaagaagggggagaacagaaaggaagcaccgagagaaaaaaa

SEQ ID NO: 19910 - RNA, 92 nt, Homo sapiens
cgggaggggacggccgccggagccgcgaggccaacccgccaggagcccggaaggggccgcacgagacagaaagacacaccaaacccagggga

SEQ ID NO: 19911 - RNA, 71 nt, Homo sapiens
gcacggaggcccgccgccggagccgcgggcaaagccagaggccccccaaggggaaggcaggaccggcccgc

SEQ ID NO: 19912 - RNA, 53 nt, Homo sapiens
gagaccaggaaaaggagcccggaggaaggcggagaacggaaaagcaccaggaa

SEQ ID NO: 19913 - RNA, 83 nt, Homo sapiens
agcacaacaaacaagaggaaaaaaacaaggcaaccgcaggcaaagagagccgacaacaagaacgcaaacgagaaggagaccca

SEQ ID NO: 19914 - RNA, 78 nt, Homo sapiens
agaccagcccaagggggcccccacacaggcaccccaaacccagggacaaaaaggaccagaagaaaggcgcacaaaacc

SEQ ID NO: 19915 - RNA, 70 nt, Homo sapiens
gcaggccgcgccagggggacgcagaagagcggcaggaccaggaacaggaggcccggacccccagcacaag

SEQ ID NO: 19916 - RNA, 81 nt, Homo sapiens
acagagcacggggcggagcagcagcacccaccccgaagaacagaaaaagcagggcacaagacacgggaccaccacccaagg

SEQ ID NO: 19917 - RNA, 83 nt, Homo sapiens
ggggcgcagcgcaggggcgagcggcgggcaagcgcgggccgcggaggaggccaggggaaagaaaggcaaagcgagcaagaggg

SEQ ID NO: 19918 - RNA, 82 nt, Homo sapiens
cacaaggagcgccaagagcagagcagaccagaagagccaccagggagcgaaaccaaaaggagcccgcagggccgccaccagc

SEQ ID NO: 19919 - RNA, 76 nt, Homo sapiens
gcgccgggagagaaggaaacaaggacacaaccagagggaagcacgcccgggcacagcggaagagacgacggaacag

SEQ ID NO: 19920 - RNA, 70 nt, Homo sapiens
agccggggggggagaggccgccagacggccaacacaggcaggaagagaaggcggggcgcggcggcacacc

SEQ ID NO: 19921 - RNA, 74 nt, Homo sapiens
cgggccagcgacccgcgccagcgcccagggggggaaaccaccgcacagacaacagcagcgccgagaaaccggca

SEQ ID NO: 19922 - RNA, 60 nt, Homo sapiens
aacgggccccgcgccaggaggcccaccccgccgggaaaggagggcgacagaaggacgaag

SEQ ID NO: 19923 - RNA, 88 nt, Homo sapiens
ccagccccaacccagccagcccagccggaaagagagccaccgccaggcggacaagaaccgcaagagcgaggacccagcacacaccaca

SEQ ID NO: 19924 - RNA, 74 nt, Homo sapiens
ggacgcagagaggggcaggcagacaaacgagcgagcaacagcagaaaagagaagagacccacgcaacgaagcag

SEQ ID NO: 19925 - RNA, 83 nt, Homo sapiens
gccggagcgcgaaggccgggacccggccccggcccacaggggggggcaaacccgagagaacggcacggcggggaacgccggaa

SEQ ID NO: 19926 - RNA, 84 nt, Homo sapiens
gggcggaaaggaagaggagacagagggccgagaaggacaggacaggccccccccgcgggcaaccgcccccgggacacccgccag

SEQ ID NO: 19927 - RNA, 79 nt, Homo sapiens
ggagaggagcaggaggcgccgcgcgaccacaagccgaaccggaacgggaagaggacacggagcgccgcccggcgggcgc

SEQ ID NO: 19928 - RNA, 63 nt, Homo sapiens
acagccggcccgccgccccgcaacagcacacacgggcccccacgggacagaggacgcagaaaa

SEQ ID NO: 19929 - RNA, 84 nt, Homo sapiens
cccgcgcccgggcccggagcgcagcgcggccgcacagaaaagaaagccgagggaaaaaccggagaagagaaacaaaaggacaga

SEQ ID NO: 19930 - RNA, 125 nt, Homo sapiens
ggggccggggccggggccggcgccggggacaggcagggccgggcgcgggccgcgcgcccccaggccggaggccccgcgagggggccaagcgccaggagcaccacccgaccagccgacccagcaaa

SEQ ID NO: 19931 - RNA, 78 nt, Homo sapiens
ggaaacaaagcagaacaggcacaagcaggacaagcaaagaggcaaagaggcgaccagaagaagccgagaagcaaaaaa

SEQ ID NO: 19932 - RNA, 67 nt, Homo sapiens
ccccacacggggacccagcgacaagcccacgagacgaacccccagccagcacacgcgagacagcgaa

SEQ ID NO: 19933 - RNA, 72 nt, Homo sapiens
caggcaagagaaccgcaagggcaccaccccgagagaggacgaagaacaagacgcccaaggaggagagaacgg

SEQ ID NO: 19934 - RNA, 73 nt, Homo sapiens
ggaacacccagaggccagcacaacagaggccaggagcacagaaacacccaccaggagccaagcagaagagaaa

SEQ ID NO: 19935 - RNA, 78 nt, Homo sapiens
gacccacacagccaggccgacgccgaacaagaccaggcccgacggccaggaggcgaagagacgaggaagcccaggagc

SEQ ID NO: 19936 - RNA, 96 nt, Homo sapiens
caggagcccgaccgggagaggacaagaccacgagccaggccccccggacaaggggccagcacacagaccgccaaaacgccagcccccgaaaggggc

SEQ ID NO: 19937 - RNA, 75 nt, Homo sapiens
agagaaccgaggaacgaagaaacagacacaacagagcagaagcacaggaagagggcggcacgcggccagagagca

SEQ ID NO: 19938 - RNA, 76 nt, Homo sapiens
acgacgacccgccagacgaggcgacgccgcaaggacggccacggcagcaccaggacaaaagaagggcagcacaaag

SEQ ID NO: 19939 - RNA, 116 nt, Homo sapiens
cgggcccggccaggaacagggacagcacccaccccggagggggaccacaagacccacgacagcaaacaggaggaaaagaaaaagaggaaggaagaaaccccccaggcaacagacag

SEQ ID NO: 19940 - RNA, 76 nt, Homo sapiens
agcaagacccaggaccccggaagccagaaagcgcacacacaccccaagacaagaccgcgagcagagagagacagca

SEQ ID NO: 19941 - RNA, 74 nt, Homo sapiens
gacagaaggccaaaacgccaaaggagaaccgaggggacagaggcgccaacgaagcaaagaagaaagacaagcga

SEQ ID NO: 19942 - RNA, 72 nt, Homo sapiens
cgagacagagaaaggagcgccagcagaggcgggggaccgcgcggagcggaggacaagacgcagaggcaggag

SEQ ID NO: 19943 - RNA, 76 nt, Homo sapiens
acaaggccaagacagcgaaccgaacccacggcaaggcgaccccccaggcgccccgccgccgcacagcccccaagac

SEQ ID NO: 19944 - RNA, 81 nt, Homo sapiens
cggccccgcgcccgcccaggggcgcgcgccgcgcggccccacgagcacgaagaggggaagaccaagaacagaagagaggga

SEQ ID NO: 19945 - RNA, 57 nt, Homo sapiens
caaggcgggcgaacggggcagcccgggaccagccgacacagcccccgaggagcagcc

SEQ ID NO: 19946 - RNA, 76 nt, Homo sapiens
gagggagcaggaagaagccccagcggagccgaaacggcaagaacggaagcacgggcggaggaaagcacaagcagag

SEQ ID NO: 19947 - RNA, 54 nt, Homo sapiens
acccaggacaacgccaacaaaccgcggggcaggaaggacaacggccaacggcgg

SEQ ID NO: 19948 - RNA, 78 nt, Homo sapiens
cggagcagagagcggcgagcaagagggccccggaggccgccagcagagccgagcagcgggagagcggccaaaggagcc

SEQ ID NO: 19949 - RNA, 81 nt, Homo sapiens
ccaacagcacccaagcaagcaacccgcccagaagacaacacaggcgggcggcgacggcggcgcgaggaccgaccgggcccg

SEQ ID NO: 19950 - RNA, 73 nt, Homo sapiens
ggcacaccaaacggcagagaaacaacgaacgagcaaggaagggccaaggcagaccccacaccggagaacgcaa

SEQ ID NO: 19951 - RNA, 73 nt, Homo sapiens
acagagcagagcacccccaaagacagagaagaaagcagagacaggcaaggcacccacccgcgaaccacaaggc

SEQ ID NO: 19952 - RNA, 77 nt, Homo sapiens
aagagcaccggccgcagacaagggaggcgaggacggacaaaaggaaacggacgggaggccagccagcagaaggagga

SEQ ID NO: 19953 - RNA, 61 nt, Homo sapiens
cagcaggccccagcaggggcagagccccgggccagccaggagaagcaaagcggagcggaag

SEQ ID NO: 19954 - RNA, 80 nt, Homo sapiens
cccaaacgaacccaagagaggacaccacacagccaagagcgccgccgaagaccggccggacagaaacggaacacaaccgc

SEQ ID NO: 19955 - RNA, 75 nt, Homo sapiens
aagagcagccgccggaggagaccagagcaaaaaaaggcagagcggaacggagaagaaaccccaagccccagaaaa

SEQ ID NO: 19956 - RNA, 77 nt, Homo sapiens
ccgaaaaaacaaaacaaaagaacagaaagcgagcagagcccgcgaacaagacaagaccggcaaggcagagagaagca

SEQ ID NO: 19957 - RNA, 78 nt, Homo sapiens
agcagcacaaaacgaaaaaaagcggaggggacccgacaggacgccccgaagagggcggaagcccaagaaaagaggaac

SEQ ID NO: 19958 - RNA, 78 nt, Homo sapiens
cggacagcggggcccgcggaaaacagaaacccccaaccaccaagaggccagaccaacccacgccggggcccggggcca

SEQ ID NO: 19959 - RNA, 72 nt, Homo sapiens
cgagagagaggccacaaaccagggaaggccaaggacaaagacagcaaccggaaagggccaaccggcgcacag

SEQ ID NO: 19960 - RNA, 54 nt, Homo sapiens
ccgagaaccgcaggagccagagggaccggagggccaagcccaaccacgcccagc

SEQ ID NO: 19961 - RNA, 75 nt, Homo sapiens
gacggacagaaggcccagaaacagccaggaacgaggcgcgacacaccagcggagcgggggaacccccccgggcag

SEQ ID NO: 19962 - RNA, 56 nt, Homo sapiens
aacgaaccacaggcgagaccgagacaagcaaccacaccacgggcgaccacacaaaa

SEQ ID NO: 19963 - RNA, 80 nt, Homo sapiens
acagggaagggcgcgagcggggacaaagccaagccacacccagaaccagcagcccgcagaagaaaggcaaacccaaggcc

SEQ ID NO: 19964 - RNA, 72 nt, Homo sapiens
agacaaaccgcgagaacaagaggggcgaagagaaaaacaagaagaagggaagcgcaaaagcaaacccgcagc

SEQ ID NO: 19965 - RNA, 79 nt, Homo sapiens
gagaaagcgagaaggacgaagcaaaaagacacgcgaaccacgaagcgcccgagacgccaccacgcgggggagcagagag

SEQ ID NO: 19966 - RNA, 75 nt, Homo sapiens
cccagacaccgacgggccgcgaggggaagaggaagcaaagccaagaagacgaccccgacgcaggccaggagccgc

SEQ ID NO: 19967 - RNA, 79 nt, Homo sapiens
gaagcccagcgcagcaagaccgccagccagagaacgcgagaccggggcgaaacaagaaagaagcggcccagcggcgcag

SEQ ID NO: 19968 - RNA, 78 nt, Homo sapiens
cccagccgcccacagcagcgggaccgacagagaccccccaaaggaggcaggggacagccaccacgcggaagcgggcgc

SEQ ID NO: 19969 - RNA, 77 nt, Homo sapiens
ggcccggccccacccaaggacgcgccgacagaagagccaaacggcaagacgcagcaagaacgggacaacggcagggc

SEQ ID NO: 19970 - RNA, 86 nt, Homo sapiens
aaggacgggaagcaccaaagcgcgccaagacagaagacggccaaggggagagcaaaaaaacacaagaaggaggcacacaaagagac

SEQ ID NO: 19971 - RNA, 55 nt, Homo sapiens
ccagacccacggaaaaggagaacaaccacaaggacccccagcggccgagggcggg

SEQ ID NO: 19972 - RNA, 126 nt, Homo sapiens
accgcgccgccccgcgagcacagagcccgccgccgaccgccgcccgccacacccgccgccagggcgcccgcgccggcagaggaggcgagcacccgccagggagaggaacccccgcgcacccagcgc

SEQ ID NO: 19973 - RNA, 77 nt, Homo sapiens
ggacccgcaccagccgggaaacacacacggaagaggggaaagggaacagaacgaaggcccggagagggaaagcacgg

SEQ ID NO: 19974 - RNA, 76 nt, Homo sapiens
caccccaaccccaacccacgcccgaccgccacccgggaagcacgccacaaaggacagccaggaaggcaggaacaga

SEQ ID NO: 19975 - RNA, 57 nt, Homo sapiens
gaaccgggaaaccccgaaacaagacacaagggcgacaccagaaagcgcgcgaccggg

SEQ ID NO: 19976 - RNA, 68 nt, Homo sapiens
ggcgccggccgacaccgagaaagcacgaccaaccgcaggggacgccacggggacacaggcaaaacgga

SEQ ID NO: 19977 - RNA, 77 nt, Homo sapiens
aagcccaagagcaggcaagcaggagggaccgaggcgggaagaagggggcccagcggaacggggggcaccagggaccc

SEQ ID NO: 19978 - RNA, 82 nt, Homo sapiens
cagaagagacccagcacccagccccgcgggccccgagccggaagggagagaccggagaaaacagggccagacgggaagaaac

SEQ ID NO: 19979 - RNA, 60 nt, Homo sapiens
aagaccaagcccgcggacgccaggggccagacccacggacgccagacgggacacgcacag

SEQ ID NO: 19980 - RNA, 72 nt, Homo sapiens
aggagcaaagcagcggcgcagcccggggcgcaaaaaccagacaccccacaccaccacccagacgaccaaaag

SEQ ID NO: 19981 - RNA, 74 nt, Homo sapiens
gcaccaaaaccgaaccagaacgaagacgccccgcaaacaccaggaaggaacgcggccacgaaaaacgaaaaaag

SEQ ID NO: 19982 - RNA, 69 nt, Homo sapiens
agaggagaccccaggcaccacagcccgaggcccggagcgaccagggagaacagaggcgagagcggcagc

SEQ ID NO: 19983 - RNA, 38 nt, Homo sapiens
ccgacagcacgccgagaaggaccaaaggcgaccaggag

SEQ ID NO: 19984 - RNA, 56 nt, Homo sapiens
ggaaccgaaaaaccaagacacaaccacgaaaagaggaggccggacaagacgcagag

SEQ ID NO: 19985 - RNA, 63 nt, Homo sapiens
ggagccggaaagccgggcgggagcccccggccaggagagagagcggagacaaggccacagcag

SEQ ID NO: 19986 - RNA, 84 nt, Homo sapiens
aagcagacggggcagccgacgaacggcaaaacaggcaggccaaaagggcgcaacaaggcaaggaacgacggggacacacagggg

SEQ ID NO: 19987 - RNA, 58 nt, Homo sapiens
ggcagaacgaggggaggaaagcaggagagcagcgacaagagggacagaaaaggcagga

SEQ ID NO: 19988 - RNA, 60 nt, Homo sapiens
cccggagcgaagcaaaacagagagagcagaagggcaaaccagacagaaccgacggggaaa

SEQ ID NO: 19989 - RNA, 84 nt, Homo sapiens
gcgcgccggaaaccggagcgcgcagcagggagcaccgcggacgccccagggcacaccgcgcaccagcgagaggaggagaaccgg

SEQ ID NO: 19990 - RNA, 79 nt, Homo sapiens
acgcgcgccggagcggagcgacgcgggcaagcggagcaggccgcagccgcgccacaccggagaacccccgccccgcacc

SEQ ID NO: 19991 - RNA, 96 nt, Homo sapiens
gaggccagagaaagagaagcggcacccccaggaagcgcgaggaggggacacaaaggaagaggcagccagacagcaccagcgcccaacgcacacgac

SEQ ID NO: 19992 - RNA, 76 nt, Homo sapiens
ccgggaccggccgggaagcggccaccgacacgcagcagcggccaggaacccagaaccgcgggcagcaagaaccacc

SEQ ID NO: 19993 - RNA, 68 nt, Homo sapiens
acggggggagccgaccaagaccacagagaacaggcggccagcccggaaaaacagacaaggcgggcaac

SEQ ID NO: 19994 - RNA, 74 nt, Homo sapiens
agccgagacggcacgagaacgggacccggccagaggaaagaacccgagggcgcacccacgacgcgcacaccacc

SEQ ID NO: 19995 - RNA, 74 nt, Homo sapiens
ccgggacccggaagaacggggagcaggccgggcccgccagggcacgcgcccgccacgggaagcccgagaagccg

SEQ ID NO: 19996 - RNA, 69 nt, Homo sapiens
cgcgcggcaccccggccaccggcagggaagcccagaggcacggggcagaacaccaacagagggccgacc

SEQ ID NO: 19997 - RNA, 81 nt, Homo sapiens
gcgccagaaggaagaggcggacggaggagcaggcgagaagagaagaacaacagcgaccccaaggaagacaaggagaaccgc

SEQ ID NO: 19998 - RNA, 68 nt, Homo sapiens
agcgaacccagcaccccccggggcaggggagggcgaggaacgaaagcagggggcgaacacgaacagga

SEQ ID NO: 19999 - RNA, 82 nt, Homo sapiens
cggaaacacgacagaagcagggcgaaccagagaaaacggcaaggaagcagggagagacaagccaacgagaagagccccgagc

SEQ ID NO: 20000 - RNA, 75 nt, Homo sapiens
ccgggagcagacaagagggcagaagcggaggcaaggccagcacgaccagaagggccaagacgccccagacagcag

SEQ ID NO: 20001 - RNA, 53 nt, Homo sapiens
cgaccaggacacgagcgggaacgcaaacgaaggccgagggaggaccgggaaca

SEQ ID NO: 20002 - RNA, 71 nt, Homo sapiens
gaagaggcgcgacggaccagagcagggcgcgcacagacggccacagaagcccagccaaggaaacgacacgc

SEQ ID NO: 20003 - RNA, 52 nt, Homo sapiens
gaacacgcaggaggggccggaacgggcggacccagagccagcggaccacaca

SEQ ID NO: 20004 - RNA, 56 nt, Homo sapiens
cccaacacaccagagcagcaaacaggaggcacagcaaggcggggcgggcacagaga

SEQ ID NO: 20005 - RNA, 78 nt, Homo sapiens
ggaggaggcggcaaagaacggaacggacaggaaggagcgacacacagcagcagacagagcggaagcgagggcaccaac

SEQ ID NO: 20006 - RNA, 75 nt, Homo sapiens
aaacaacgcaaaggaggcacagagaaggaagcacccaacagacaaacaccccaaagagcaaaacggagcggcagg

SEQ ID NO: 20007 - RNA, 49 nt, Homo sapiens
gaaagccggacggggaacaccgaaaggacagcagggggccacacagcaa

SEQ ID NO: 20008 - RNA, 65 nt, Homo sapiens
caaaagcaaccaagacgcaaaagccacagaacaagagagaggacgggaaagccaagacaacccaa

SEQ ID NO: 20009 - RNA, 77 nt, Homo sapiens
aagaaggcgcaaagcgccgaagggagaggggaagagagaacgcgaccgaggaggcgccagccagggccaaggggaga

SEQ ID NO: 20010 - RNA, 67 nt, Homo sapiens
caaaaaggcgacggcgccgaaacggaacccgcaccaagagaaagacgaccgccaaccagggagaaca

SEQ ID NO: 20011 - RNA, 78 nt, Homo sapiens
ggaggagccgccagaacgcggaagcgagggcgaaccaagaagaaagagagacgaccgggaacaagaaagcggaagaag

SEQ ID NO: 20012 - RNA, 78 nt, Homo sapiens
gacgcccaagaagaagagacaaggcgcccgaagagagcggcagaagagagcgagaaaccaaagaaggagaagagaaga

SEQ ID NO: 20013 - RNA, 66 nt, Homo sapiens
gacaccacacggccaacaaccaggcaggcacagagagcgggaccagaacggaagaggagaaccgga

SEQ ID NO: 20014 - RNA, 78 nt, Homo sapiens
ccaagcagggcgaagggaacgcaaggcccccgaccacacgcccgcgcgagggaggcccaggacgggagagacaagcag

SEQ ID NO: 20015 - RNA, 82 nt, Homo sapiens
cgcggccgccggcgccccggcccgcccgccaggacaagcagagaagcgacgcgaagggcacaaccaaagcggagaagaaaca

SEQ ID NO: 20016 - RNA, 76 nt, Homo sapiens
cgaggagcccgccaaagccccggaccgccaagaagcgacaaaaccagacccccgacgccgggcagggcgaaggggc

SEQ ID NO: 20017 - RNA, 59 nt, Homo sapiens
gccggaggagacgggagcccgccgcgagagcgcagggagggaaaagaggacgaggcgcg

SEQ ID NO: 20018 - RNA, 68 nt, Homo sapiens
gggaacgggaaagaacagagaaggagacagcacgggaaagaaagcagcccagcaccgacaagacaagc

SEQ ID NO: 20019 - RNA, 78 nt, Homo sapiens
cggaggaggagaacacagaaccaccaggagagcaaggcaggccgcagaccaacaaaggggcgcaggccggccaagaac

SEQ ID NO: 20020 - RNA, 101 nt, Homo sapiens
gaaaaggaacccagcagcagcaggacggcaggagacagaggacagccaaaagaaacccccaaaaccggaagaaagagaaggaacagaggacacgcacacca

SEQ ID NO: 20021 - RNA, 82 nt, Homo sapiens
ggcagccccccaccggggacccccgaaccaggccacacacgcgagcacccagagggccggcccagaacgggacaaaaccggc

SEQ ID NO: 20022 - RNA, 38 nt, Homo sapiens
accaagcagagggacacaggcggaggcagggcggaccg

SEQ ID NO: 20023 - RNA, 73 nt, Homo sapiens
ggcccgcgggccccagcgcgcgaggccccaggacaaggagagcaagccccagggagcccccagaaacccagga

SEQ ID NO: 20024 - RNA, 80 nt, Homo sapiens
gaacagaaaaggcaagaaggaacggaaggcacaacaggagccaaaaaccgaacacccggaaggggacaagggacggcgaa

SEQ ID NO: 20025 - RNA, 81 nt, Homo sapiens
ggaccgacacgggagaccgcgagggaaaggagcgggacccggaccccaggagacacaaagggaggaaaacgaccaaacggg

SEQ ID NO: 20026 - RNA, 73 nt, Homo sapiens
gccacgcagcacagggggccgcccggacaagagacccagggaagcagagccccgggccgggaaggggaaacgg

SEQ ID NO: 20027 - RNA, 69 nt, Homo sapiens
accgaacggaaaaacaaaggaggaaacggaaggaggaggaccaaaccacccaggacacggagcagcggg

SEQ ID NO: 20028 - RNA, 76 nt, Homo sapiens
gccacccccgcacagggggacggggccgagccccgggccccaaagcgcacaaggcacccgagcgaacgggaagcca

SEQ ID NO: 20029 - RNA, 55 nt, Homo sapiens
cggggaggcgggcaaaccccacgaggggaaggcagagaccgcagaaggcccagga

SEQ ID NO: 20030 - RNA, 44 nt, Homo sapiens
gcccaggagcgggcgggacaggccaaggacagcgagagagagag

SEQ ID NO: 20031 - RNA, 76 nt, Homo sapiens
gggaagcgcggccggagagagccgaggcgaggagacaggccgagaccgagggccccgcaccccggagaagagcccc

SEQ ID NO: 20032 - RNA, 117 nt, Homo sapiens
aaggaggcggagagaaggaagcagcgcgccggaggcccccagaccacacagcgacagaagacacgaagcagaggagccagacccaaagcccagacacaagacacggagccccaagaa

SEQ ID NO: 20033 - RNA, 72 nt, Homo sapiens
ccaggggaacaaggcaagggggggcacaaaagcaacacgggaagaaagggaaccaacggaacggaaggcagc

SEQ ID NO: 20034 - RNA, 80 nt, Homo sapiens
gggaggcagccgccgcccggcgccccgccgccggcgcgcgcccgcgccgccgcacgagagaggacggggacgggccccag

SEQ ID NO: 20035 - RNA, 79 nt, Homo sapiens
gagcagaacagccccgcggcccggggagaaggaagcaggagacaccaaaggaaaagacaacacaccaagaaaccaaaga

SEQ ID NO: 20036 - RNA, 78 nt, Homo sapiens
gaccagagaaggaggagggaccacgcgcgagaagacgaccccgacgcaggccaggagccgcggacagaagccgagcac

SEQ ID NO: 20037 - RNA, 76 nt, Homo sapiens
ggggaggccggggcacccacaagcgcacgaccaccaagaaccagcggggggaaaggaacaaagcccagcggaaacc

SEQ ID NO: 20038 - RNA, 79 nt, Homo sapiens
ggggaagaaggaaaaggcgccgaaacaccaagcagagcgccgcagaggaccgggcaagcggaaagccggaagacgccac

SEQ ID NO: 20039 - RNA, 80 nt, Homo sapiens
gaagagggaaggagcggagaagcacggagcgggggaggcacagaagggccgagagacacacaagagcagaaggcgaagga

SEQ ID NO: 20040 - RNA, 70 nt, Homo sapiens
ccaaaaacgagaaacggggagccggacaggagagacaacggaggcaagaaagacggagaagcgagaagag

SEQ ID NO: 20041 - RNA, 72 nt, Homo sapiens
cgaaagcagaaaagggaaacaagcagcagaaacagcggaaagaacagcccaagccgagccaggaaaggaagc

SEQ ID NO: 20042 - RNA, 83 nt, Homo sapiens
acgcaggcccacggagaagaggaggagcaacagaaacagaaagaccccaggagaagacaggggaagaccagcgagacaaggag

SEQ ID NO: 20043 - RNA, 106 nt, Homo sapiens
aaccaccaagagccacaggaaaggggagacacacaccccagggagacagagcggacgcagcaccaagcagccgaagagaaacaagggacagcagacaagccccgcg

SEQ ID NO: 20044 - RNA, 68 nt, Homo sapiens
caaaaaggcacgagggaacgggaaagaacagagaaggaaaaaaagaaggggagcgcgagaaggaaagc

SEQ ID NO: 20045 - RNA, 87 nt, Homo sapiens
gccgcgggaaggccgaccgacgccgcgccagcagaggccagcgacggagccagaggagcgagcccaagcggacgacccgacaggacc

SEQ ID NO: 20046 - RNA, 89 nt, Homo sapiens
cagcaaggcggcagagcaaggggcacgcagaaggaccggccacggggcaaggaggaagagcaggaccgcgggacacggcacagcgaccc

SEQ ID NO: 20047 - RNA, 74 nt, Homo sapiens
gagcccccaaccccgcaggaggccacccccagggcccgagggcaggacagcaggcaccggcgaagcacagagag

SEQ ID NO: 20048 - RNA, 84 nt, Homo sapiens
cccaagccggccaccccagacaccaaaaaagagaagaaggggaaaagaggaaaaccaggcagaaagaagacagcggcagagaga

SEQ ID NO: 20049 - RNA, 74 nt, Homo sapiens
agagccgaacgcagacagcaggcaagaggggagaccaaagagaggagcgcgagcagcgggagcgggagcaacgc

SEQ ID NO: 20050 - RNA, 70 nt, Homo sapiens
aagaaccgggaggagaagaaaccgcagaagcaaaagaagaggccgagagacccgcgaacgagcacaaggg

SEQ ID NO: 20051 - RNA, 67 nt, Homo sapiens
cgcaacccagcgagagaaaggagaaccagccaaaaaagggcagaaccgacaacggggacccgcgcgg

SEQ ID NO: 20052 - RNA, 85 nt, Homo sapiens
gacagccaggcgcaacacacagaaccgggagcccaaaagaaacagggcgcaggaaaagacgagccaggaaaagcaacaaagggag

SEQ ID NO: 20053 - RNA, 106 nt, Homo sapiens
ggcggagggggagggacggaaggcaaccccacagaacacaagggagcaggggcccaggggggcgcagacaagcaaaagaggcggccgaggccagggcagacccggc

SEQ ID NO: 20054 - RNA, 66 nt, Homo sapiens
acgagaggcccgagcacaaagccgacgcaccagcgcggagcggggaagaccgcggagaggaacaag

SEQ ID NO: 20055 - RNA, 74 nt, Homo sapiens
gcgagaaggcccaggacagagcgcgagaaggccagggacggagagagagcagggccggaggggcccccaaaaag

SEQ ID NO: 20056 - RNA, 81 nt, Homo sapiens
ggcaaccgggcagggggcgagcaggccgcccgcgagcccgccgagggccgggaaccgcagagaagagcaggggggccagga

SEQ ID NO: 20057 - RNA, 70 nt, Homo sapiens
ccagcacaagccgacgggccaaaccagccggcgcggggcggacaccccagggcgcagacaccacccgcgg

SEQ ID NO: 20058 - RNA, 78 nt, Homo sapiens
agaagaggcccaacccccaccccgcccaaggaggcccagcgggcggagaacggaaaagcaccaggaagcagagaggac

SEQ ID NO: 20059 - RNA, 38 nt, Homo sapiens
caggaccaaccagacaaggccacgcccagaccaccgcg

SEQ ID NO: 20060 - RNA, 67 nt, Homo sapiens
gaaccgacggcccccgaccccgacggaagaggggaccacagcagccccacggcaccaacacggccca

SEQ ID NO: 20061 - RNA, 70 nt, Homo sapiens
ccggccggagcagcagcccgagaagagcacaacacagaagaaacggcaagcaaggacgaacacacaagcc

SEQ ID NO: 20062 - RNA, 72 nt, Homo sapiens
aaacacggcagaccggagagcccgaaaagaaacagaggaagacacagagggaacggccaggggaagggggag

SEQ ID NO: 20063 - RNA, 75 nt, Homo sapiens
aaagaaaccagcaacaaaaagaaagcgcgaaggcaaagcagaggaagaacagaggggagggacacgccagccgga

SEQ ID NO: 20064 - RNA, 68 nt, Homo sapiens
acaagagcagcaccaagcgcagggaacacacggccggaacgccgccaaagggaggcggagaagcggcg

SEQ ID NO: 20065 - RNA, 49 nt, Homo sapiens
gagaagcgagcacaaaaagaaagaagagaaccaggccggaaaggaaaaa

SEQ ID NO: 20066 - RNA, 64 nt, Homo sapiens
aggacagcaccaaaaaccgagcacggaagggaccacccgacacaggaagcaacgaagacgaaca

SEQ ID NO: 20067 - RNA, 63 nt, Homo sapiens
cacccacagacggcgaaggcagccacagcgcccagagaggacagcagaccacagcccggcagg

SEQ ID NO: 20068 - RNA, 80 nt, Homo sapiens
acagcgggcgggcccggcccgggggccgccccggcgagccgcgacggcgccgcccacggcgaggaccacggcgcgcggac

SEQ ID NO: 20069 - RNA, 79 nt, Homo sapiens
gggccagaaggggaaaggcggaccaagcaacggaccgaccgggcgaggggaggaggcggggaagaaaaggcccaaggga

SEQ ID NO: 20070 - RNA, 74 nt, Homo sapiens
aacgaaacccccccccccacccaccaaaccggagggggaaaaaacccaaggcgcaaagggacaaaggaaaaaga

SEQ ID NO: 20071 - RNA, 69 nt, Homo sapiens
aagccccccggagacgcaaccaaggcagacaggccagaagaaggagagcaaccaacagggcaaggcacc

SEQ ID NO: 20072 - RNA, 77 nt, Homo sapiens
cggcggagcgcgcgagggcgacccggaaaggccggaagcggccgggcggacaggagagaagaagagaacgagccaaa

SEQ ID NO: 20073 - RNA, 95 nt, Homo sapiens
caaaggccggccagaagacgcgagagcaccgaagacggcaagcacggccacgccaaggacaccagaggaccagaacccacgagaaacagacgagc

SEQ ID NO: 20074 - RNA, 82 nt, Homo sapiens
cggacgcgccgcggggcgcgggccggccccgcggggagcgcccccggcgcgagccccaggaaagacagaagcgaaggggaca

SEQ ID NO: 20075 - RNA, 82 nt, Homo sapiens
caaagcaaaccaacgagaagcaggggcaggaacggagaaaaacgagcccccgaccggaacagcagaccgagccgcgcaagac

SEQ ID NO: 20076 - RNA, 81 nt, Homo sapiens
acaacacggaaggcggcacacccagacccagggaaagagacaaggagaaggccaggacacgggggagccggaggagcagcc

SEQ ID NO: 20077 - RNA, 72 nt, Homo sapiens
gcggcagacggaaacgacagaagcagaggccagcaacagaagaaagcaagcaccggggaaagcggcccgaaa

SEQ ID NO: 20078 - RNA, 67 nt, Homo sapiens
ccgcagacgcgaaggaacggcaaagggaagcgagacaacagagggagacgccaaagcacccaaagac

SEQ ID NO: 20079 - RNA, 84 nt, Homo sapiens
cggaaaccccgcccacagcacgaggaggaccgcgccaacaggacgaggagaccgaccaggagaccccagcggagacgaccgcga

SEQ ID NO: 20080 - RNA, 77 nt, Homo sapiens
aagacccaggacaccccgaagccgagaaagaggaagcacccgcgagaaagaagggcacagcgaaacagcccggccaa

SEQ ID NO: 20081 - RNA, 77 nt, Homo sapiens
agagcccaggaccaggccccagcacgccaccgccaagggaaagcaacagccagcacaagcggcgaccagcggaccag

SEQ ID NO: 20082 - RNA, 75 nt, Homo sapiens
caaaacgaaaggaacaggggcagaaaaagcacacaccacgcaacggccaggccccaccgaggcaccaccaaccaa

SEQ ID NO: 20083 - RNA, 65 nt, Homo sapiens
agagcacaaacaacaaggcgaagaacggcccaacaacaggccagcaccaacgaaaccaccaacac

SEQ ID NO: 20084 - RNA, 55 nt, Homo sapiens
cgccgccggacagcagagcccaggacaaaccggcgaccacacacggggacgacgg

SEQ ID NO: 20085 - RNA, 53 nt, Homo sapiens
cccacccccggggccgggggcccagagcacgggaagggccccacaccaaaccg

SEQ ID NO: 20086 - RNA, 72 nt, Homo sapiens
ggacagcccacgggaacaagaggggacagaaagagaaagggcgcaaaaagaaagaaaacaaaagccagccaa

SEQ ID NO: 20087 - RNA, 76 nt, Homo sapiens
gagcggggcgcggaaggaggaagaagagccaggcccaggccacaagccagccccacagcccacggggcagacgcag

SEQ ID NO: 20088 - RNA, 33 nt, Homo sapiens
gacaggacggacccggggggaaaagcccaaagg

SEQ ID NO: 20089 - RNA, 77 nt, Homo sapiens
ggccgggcggacaggagagcaggaaaaccgaaagcgccaggccagcgaaggagagaaggaagagaacagagagggag

SEQ ID NO: 20090 - RNA, 78 nt, Homo sapiens
agaaggaaaggcacaagcgcagggaaaaaaaacagggcgaccagcggaagagcgcaacaagcgaaggacaagagaaaa

SEQ ID NO: 20091 - RNA, 74 nt, Homo sapiens
aggccaacaaggagaagaagaccccgaagaaagggaaggaggagaagcagaagcgggagagaagagcgcgacgc

SEQ ID NO: 20092 - RNA, 84 nt, Homo sapiens
cggacaccggcggccccaccagcagacgcagccgagacaccagcccgaaacaccaccaagaccacacaaagaggggagcgacca

SEQ ID NO: 20093 - RNA, 78 nt, Homo sapiens
gggagcacgaggggaacgcaacccaagcaacgaacaggggaagaacaaaagcgcagagagccgcccccagccggaggc

SEQ ID NO: 20094 - RNA, 48 nt, Homo sapiens
aaaagccaggcagaaaaaggggggcaagaaccgaagcaaaagagcaaa

SEQ ID NO: 20095 - RNA, 65 nt, Homo sapiens
gacccaacaagacagacagccacagagaagacccagacgccacaacccagacacacaaagcccac

SEQ ID NO: 20096 - RNA, 79 nt, Homo sapiens
gaaaacaaagccagaacgcacccccggaggagaaccaggaccaaagcaccagcacagaagggaagaacgccaaaggaga

SEQ ID NO: 20097 - RNA, 64 nt, Homo sapiens
agaaggccggccggcagccagggcagcaggcgggcagaaagggaagggagcccaaaacaggagc

SEQ ID NO: 20098 - RNA, 74 nt, Homo sapiens
gagggaaaaaagagcaggggaaaaggaaagagccccagagcagaccaaggcaagaaagcaaggaccagcgaagg

SEQ ID NO: 20099 - RNA, 71 nt, Homo sapiens
ccgcacccaaacaaacggcacgaagaacacaaagcaaaaaggaaaagaagagaagaagaggcaggagcaca

SEQ ID NO: 20100 - RNA, 58 nt, Homo sapiens
cgcacgccccccaccgccccccacaccccaaggagaggagccaagcccaacgggacgg

SEQ ID NO: 20101 - RNA, 71 nt, Homo sapiens
acgcggggaaaccccaccaaaagcccacaggccaccaaccgagaacagagaaaccccacaaggccaggaag

SEQ ID NO: 20102 - RNA, 80 nt, Homo sapiens
agcgcgccgcccaaggacgcacggaagagccagcaacacgggaaacaaggggcaggcggcaagccagagcacgagaaccg

SEQ ID NO: 20103 - RNA, 76 nt, Homo sapiens
cggaaggcccccggcgcgagacccgccggaggaacccaaaacggacaagccaaggcacgagccaaagaaacaaaca

SEQ ID NO: 20104 - RNA, 75 nt, Homo sapiens
gccaacccagaaggagcaacaaggcacggcaacaagcagagacaaaaccaaaggaggaaggccagcggaagacac

SEQ ID NO: 20105 - RNA, 72 nt, Homo sapiens
ccgccggacggccgcacccccgcccgagacccggcgccgcggcccacggaagaaggacacaagacagggagg

SEQ ID NO: 20106 - RNA, 78 nt, Homo sapiens
gacacaacaggggcgggaagcccagccggcggggccaccccggaaggagacggaaagacagccagggccaccgggaca

SEQ ID NO: 20107 - RNA, 88 nt, Homo sapiens
cggcgcgcgggggcgacgcgcgggaacaacgcgagcggcgcgcgggacgaaggacaagcagaagaacagcagagggccaggacaccac

SEQ ID NO: 20108 - RNA, 68 nt, Homo sapiens
gcccacccggacgaaaccccacacacgccaaagaagggaacacccaccagacgggcaaccccacccag

SEQ ID NO: 20109 - RNA, 73 nt, Homo sapiens
ggagccacaacgaaagcagacaaaggcaggggcacaccagacagacaggaacaggaccaagaccgaggaggcg

SEQ ID NO: 20110 - RNA, 75 nt, Homo sapiens
ggcgagagcggcggcccggggcgcggaagagacccagacgaagagcgcacagaaagagggaaaacaaagaaccaa

SEQ ID NO: 20111 - RNA, 67 nt, Homo sapiens
aggcccccaagccggacacaccgcacgagagccaggcgccgacgacgcgcacccaacggaggacgga

SEQ ID NO: 20112 - RNA, 53 nt, Homo sapiens
gggaaaggcccaggaaaaagaacgaggaaccccagagaggacagaagccaacc

SEQ ID NO: 20113 - RNA, 67 nt, Homo sapiens
ggagcagcgcgcaagggggcccagagagggccgaaccggaggacaagccaggccacaaggaaccaag

SEQ ID NO: 20114 - RNA, 74 nt, Homo sapiens
ccccacaggacggaggcaaaacacccaagaggggaagccagaaccaaagaggggaaggcccaggacagcgggac

SEQ ID NO: 20115 - RNA, 74 nt, Homo sapiens
gccggggggggggagaagagacgacccggaacagggccagagagggacaaggaaagcaaacaaacccagacacc

SEQ ID NO: 20116 - RNA, 72 nt, Homo sapiens
cagaaagccaaaaaggagaaagggcaggagggaacccggcgcaaccgcacccacgaagacacaaagagaaga

SEQ ID NO: 20117 - RNA, 72 nt, Homo sapiens
gagccagcggaccgcggccggggacccccgggaggacaaggaacagaagaggcaagcggcgcagcggcgcac

SEQ ID NO: 20118 - RNA, 63 nt, Homo sapiens
acgacaagaccaagagaaaaaaaaggagcaagaggaaacagggaaagagggaacgagaaaacc

SEQ ID NO: 20119 - RNA, 92 nt, Homo sapiens
cgcgccgccccgcgagcacagagcccgccgccgaccgccgcccgccacacccgccgccaggagcagcaccgaggccccccccaccccccgcc

SEQ ID NO: 20120 - RNA, 71 nt, Homo sapiens
aacccaggcgcggaagcaagcaaaccaggggacagggaaagcagaaccgcgggaaaagaagggagaagcag

SEQ ID NO: 20121 - RNA, 81 nt, Homo sapiens
gaaaccaccaagagcaaggaagagaccaagcaccaagaaaacgccaaggaacggagcacagcaagcgggagcaggcagacc

SEQ ID NO: 20122 - RNA, 83 nt, Homo sapiens
gcccggaccggccgagaggaagacgagccgggaggaacggcccggaaacaggaggacgaccaggccaaccggagcgcacccac

SEQ ID NO: 20123 - RNA, 70 nt, Homo sapiens
caccaccgcccgcccaacagacccaagccgaggaccaacaggagcggacaacgagaacaaaaacaaaacg

SEQ ID NO: 20124 - RNA, 78 nt, Homo sapiens
agggcaaaacagaggaagaaaagaaagagaagaagggagccccgacccacaaaaaaaacagagcggcaaaccgacaag

SEQ ID NO: 20125 - RNA, 74 nt, Homo sapiens
aagggaggcgagaagaaaagcaagaacaagccccaacaaagggagaagaggcaggagggggcaaaacggcaacc

SEQ ID NO: 20126 - RNA, 70 nt, Homo sapiens
aagccaaagcgcaacacccccgcgcaggaccccaagagccggggagcccgggaccagggccagggacgcc

SEQ ID NO: 20127 - RNA, 73 nt, Homo sapiens
gacgcccaacaccgccaaacacgaaacggagaccaccgcccaagaagcaaagaacggagagagagcaggaaaa

SEQ ID NO: 20128 - RNA, 78 nt, Homo sapiens
ggggacggaacacgggaggcgagcaggaccaagcggaggccaagaagaagcaaccggagagaggaaaacagcccaaac

SEQ ID NO: 20129 - RNA, 83 nt, Homo sapiens
aaccacgcaccagacaacacaggaaaaagcggggaaaacaaaaaaaagaaggagggaagagggggccaggaccaggccccacc

SEQ ID NO: 20130 - RNA, 73 nt, Homo sapiens
cgcaccaccccgacgccggacacggggaaagaaccggcaaagaggacggcaaagccagacacagagggacagg

SEQ ID NO: 20131 - RNA, 80 nt, Homo sapiens
gcacccccaggagggcgacaaggagcccagcacccagggcagaaagcagggcaacagggcagcggccaaccgggcgggcc

SEQ ID NO: 20132 - RNA, 59 nt, Homo sapiens
cgggacaaaaaccagaccaggcgcgaacggcggaggcaaaaaaggagaaagaacaccaa

SEQ ID NO: 20133 - RNA, 123 nt, Homo sapiens
gcccagccccccgcccgccacacgaggccgccagcagcgacaaacgcccacaaagcggcagaggggaggagacacgaagcgacgcagagccagaagggaggcagggaacacgcggaacacaga

SEQ ID NO: 20134 - RNA, 83 nt, Homo sapiens
cgacgaagagagggaggccaccgggaggccagcagacaggcacaagaaaaggcgaggggagagaaggagacccaacaccccgg

SEQ ID NO: 20135 - RNA, 75 nt, Homo sapiens
gaaccagaccacagaaggaggggaaaaacaggccaccaaacagaaagcagacaagaggcgccgagcggaagaacc

SEQ ID NO: 20136 - RNA, 82 nt, Homo sapiens
cgccccagagcagcgcggccaggcggaaagaggccggggcggcggaaccacgccaaaggaagcagcgcagcaaagagggagc

SEQ ID NO: 20137 - RNA, 84 nt, Homo sapiens
ggacagaacaccagcacggcgaagaaggacagaaaacgggccccagacacaagccccaccaagaggacaccccaggaacgcgga

SEQ ID NO: 20138 - RNA, 57 nt, Homo sapiens
agaggcagggcgcgagggcgggggcagcggcagaacgaggaaccccagagaggacag

SEQ ID NO: 20139 - RNA, 79 nt, Homo sapiens
gacagccccacaggacacagcagccaccgaaaaagagccaccggaaagcaccccccagacgcggcgcaagcacagcagc

SEQ ID NO: 20140 - RNA, 83 nt, Homo sapiens
ccgggggcgccgggcaagggcggggcgagagggcagaacgccgcccggacagaaacaacgaagcaagcccaagggcgcagggg

SEQ ID NO: 20141 - RNA, 77 nt, Homo sapiens
cagccgggcagagcagcagaggagaaaacggaaaaacgggagcccaagaaaccacacccgacggggacgcaccagag

SEQ ID NO: 20142 - RNA, 76 nt, Homo sapiens
cgggaaaaggggcacaggagccaagaggcccggagagacaaggagaggaacaaaggcggaacagggaagcgaccag

SEQ ID NO: 20143 - RNA, 67 nt, Homo sapiens
agcgggcaaaaaggcccccaagaaacgaggaaccccagagaggacagaagccaaccaggcagcagag

SEQ ID NO: 20144 - RNA, 81 nt, Homo sapiens
gaaggggagcgcccagcgcgcgcgccaaaggacaggcgggcggccccaagcccaagaacaggacacagaacagagaagaag

SEQ ID NO: 20145 - RNA, 63 nt, Homo sapiens
agaaaagcacagggagcgacgcacccccaaggccaaccaaggggcaaaaggaaaaaggaaacc

SEQ ID NO: 20146 - RNA, 78 nt, Homo sapiens
cagacgaaaagccggacccaggagaagaggggagagggaccacacagaaacggggagagcccacaacggaggccggga

SEQ ID NO: 20147 - RNA, 84 nt, Homo sapiens
agggggggcgggcgccgcgccggcacgcgagaggagcgccggggagaccaccgggcccacaggagcgaccagggaagcccacgc

SEQ ID NO: 20148 - RNA, 53 nt, Homo sapiens
ccagagaagaaggaccgaccacagaacacaccaagacagcagaccacagcccg

SEQ ID NO: 20149 - RNA, 73 nt, Homo sapiens
cgcccagggcccagaggacccaacaccagaagacacacagggaaaggcccaaaagggccccccccccaggagc

SEQ ID NO: 20150 - RNA, 60 nt, Homo sapiens
cggggaaaggaccgaaccggagccgcgagaaggaacgcggcggggccccggaagcggaag

SEQ ID NO: 20151 - RNA, 74 nt, Homo sapiens
gcgcaggaggagcaacaaggggacaacgccagcgccgcccggcacacaaccagaacggagacaggaaagaaaac

SEQ ID NO: 20152 - RNA, 57 nt, Homo sapiens
aaccagcgaccacgccacaaccagccccggacagccccgaggaggagaagaggaacc

SEQ ID NO: 20153 - RNA, 73 nt, Homo sapiens
gaaaagacagcgacagccgaaacagcggaacgcaaccgaaccaaccggacggagaaccaagagcccagaaaag

SEQ ID NO: 20154 - RNA, 81 nt, Homo sapiens
agaggaggcgcgcgcgcgccgagccgcgggcccgcaggaacggggcgcgaaagacacggacaacgcaaacccggccccccc

SEQ ID NO: 20155 - RNA, 52 nt, Homo sapiens
cagagcccaaggaggaagacgacacagaggcagccgcaagaccggaccgaca

SEQ ID NO: 20156 - RNA, 74 nt, Homo sapiens
cgagacaggaagggaaaggagagacagcacaagaaaaggaccaagagaagcaaagggagaaacaacgcaaaaac

SEQ ID NO: 20157 - RNA, 77 nt, Homo sapiens
agaacgaagccagcaacgggaacaagaacccacgacaaaaaaaccacacaaggaagccacaccggcccgccaaacca

SEQ ID NO: 20158 - RNA, 65 nt, Homo sapiens
gcggccggagggcggggaggagccgccgcgcccagcccgagacagacaagcccggaacagacccc

SEQ ID NO: 20159 - RNA, 92 nt, Homo sapiens
ggggcaagagcaggagcccggcaccccccgccgacaaggagggcccaggcccaggcccaaggccaaggagagagcccaggccacaggacagc

SEQ ID NO: 20160 - RNA, 76 nt, Homo sapiens
cggggcggcccaccaacaggaacagggcagacgagcggaggacacccaacccggaaaacacccgccggacgaccca

SEQ ID NO: 20161 - RNA, 72 nt, Homo sapiens
aggcagcaccaggaagacaggggaacacccccagagagaggaggccacgcgcagccccggaagagccaccca

SEQ ID NO: 20162 - RNA, 82 nt, Homo sapiens
gagcacagaaaaaccgacaagggcagcccaaggacacaaggaaagacacagggcacgagacaaggaaagcacaaagagccag

SEQ ID NO: 20163 - RNA, 73 nt, Homo sapiens
gccgagagccgcccgggccagcggccgcgcacccccggccggaggcaccagccggagccggagcgaggcgggg

SEQ ID NO: 20164 - RNA, 75 nt, Homo sapiens
gcagccggaggagggcagcccacaggccgccccaggagaagggggagacaggaggcgccaaacaccaccaaaaac

SEQ ID NO: 20165 - RNA, 71 nt, Homo sapiens
caggcgggcagcgaaaaagaaacccccaaagagaaagaagaagaaaacgagacccaaaagggagaaagaag

SEQ ID NO: 20166 - RNA, 72 nt, Homo sapiens
acacaagaaggccacccaacacacagacaccaccaagaggaaggaggccagaccaaggcaacggccgcaagc

SEQ ID NO: 20167 - RNA, 81 nt, Homo sapiens
cgagcgagaggaggagaaaagaccccacgaaaccgaaacaggccaaggcccaagagcgaggaggcacagcagcggccaagg

SEQ ID NO: 20168 - RNA, 59 nt, Homo sapiens
ggggagcgaaggcaggaaccagggcaacaccggccacagccgggaaggccgagggccca

SEQ ID NO: 20169 - RNA, 51 nt, Homo sapiens
caggccagccaacagcacacacccaggggcaaagaccagacccaccgggca

SEQ ID NO: 20170 - RNA, 76 nt, Homo sapiens
ccgaaagcacgccagaggcaagcccagcggcagcgcggaaggcaggcaggggcagaaggcgacccagcgcagagca

SEQ ID NO: 20171 - RNA, 54 nt, Homo sapiens
cgaggcggaacagagaaaagaaaggccggaaaggaaaaacaccagaacggaaac

SEQ ID NO: 20172 - RNA, 39 nt, Homo sapiens
ggcaggggaggaccagcgggaccgcgaagcccagagcac

SEQ ID NO: 20173 - RNA, 68 nt, Homo sapiens
gacagagagggcaccggaagaagggaaagaccaggagcaggccaagggcgcagaaaacgccaacgaag

SEQ ID NO: 20174 - RNA, 60 nt, Homo sapiens
gggccgcgccccaaggcggcgcgaagccacaagaaagggcggagggggcagggcagaagg

SEQ ID NO: 20175 - RNA, 82 nt, Homo sapiens
ccgggggaacgaggaagcgcccaaggcaccggaacagcacaaccgcccggcggaggaacccccgcgcacggggcaggcagca

SEQ ID NO: 20176 - RNA, 71 nt, Homo sapiens
aagaagacaaaaagccaggccaaacaacaaacgcagcacagccaaagcagcggaaccaacaaaaacacagc

SEQ ID NO: 20177 - RNA, 83 nt, Homo sapiens
gcgcgcgggcgaaaaggcgacaccagagccgggaaccaccacccccggccagaggccacccagcccgacaccaaccccggcgc

SEQ ID NO: 20178 - RNA, 82 nt, Homo sapiens
ggcaccgagggcaccacgcgcgggaagaggcagaaaccaggcagaacgaacgggaaagagcagaaaccacaacggagcgaaa

SEQ ID NO: 20179 - RNA, 86 nt, Homo sapiens
cccgaacgaaggcggcccggcgggccaccccacccccgggcggcaggaggcaaagggaccccaagaaaccaaagggcaagagccgc

SEQ ID NO: 20180 - RNA, 83 nt, Homo sapiens
acacagggagccaccccgggcgcagaggccacacccacagagaacccagacaacaggacgccgccaaggagaaggaccaagaa

SEQ ID NO: 20181 - RNA, 70 nt, Homo sapiens
gggaccgccgacaccggagagagacaacggcaagcggagaagagcaaggccgaaccgagaggaagggcaa

SEQ ID NO: 20182 - RNA, 74 nt, Homo sapiens
acgggcaacaggaggaaccagaaagaaagggagagcaagacgacgccaacagaagcgccccccccccacgcccg

SEQ ID NO: 20183 - RNA, 57 nt, Homo sapiens
gaaaacagcggggacaaaagggcgccgcgccccgaagggcaacccaaccgacagcca

SEQ ID NO: 20184 - RNA, 70 nt, Homo sapiens
cggaccgcccccagccgacagcaccaacaagacgcaaaaccagcaggccgcgaagagggagcagccagac

SEQ ID NO: 20185 - RNA, 51 nt, Homo sapiens
gaagccacagaagaaagcgcagcagggcccaggcagaacccgcccacaaga

SEQ ID NO: 20186 - RNA, 81 nt, Homo sapiens
ggccagagcgcccaaggcccaggcgcccggagcaccgaaacgccgaaaacgagccgcgcagaaggccagacacagaaccag

SEQ ID NO: 20187 - RNA, 72 nt, Homo sapiens
aaaaggaaaccgcccgcccccagaaccgcaagaaaggcgaaggagaggcccgcccaccggcaaagcaggaag

SEQ ID NO: 20188 - RNA, 90 nt, Homo sapiens
ccgcccgggcccgaggaggcagccaagccgagccgccacccggcggaagaaggagaaagggccaaccccgaagaagcaaacagaaacgaa

SEQ ID NO: 20189 - RNA, 76 nt, Homo sapiens
cccaagaggaaaggagcggggacagcaccccgcggacacggagcacggcggagggcccgacccaggcaagcgagca

SEQ ID NO: 20190 - RNA, 75 nt, Homo sapiens
gaagacagggggcccaaacgggagacaacccccgaaggaggcgaagaaacaggggagaaaccccgcggggaagcc

SEQ ID NO: 20191 - RNA, 81 nt, Homo sapiens
gggggagagaacccaaccagggggaaacacagaacgcagggcgcagcggcgaacaccagaaagagacaaggagggcgacgg

SEQ ID NO: 20192 - RNA, 68 nt, Homo sapiens
acccagaggaggcagaacagaagacacaccaacaaggcgaacgagagcccacagacacgacccaacgc

SEQ ID NO: 20193 - RNA, 79 nt, Homo sapiens
acccgcaggaaccggcagaggagaaacagacggccccgaggggggcgaggaagagacaggcgggggagaagaagcaggg

SEQ ID NO: 20194 - RNA, 81 nt, Homo sapiens
aggaacgggacaaagcggccagggagcacagaaacaccggggaacccgaccgcgacagagaaagaaaaggccgaaaaccgc

SEQ ID NO: 20195 - RNA, 95 nt, Homo sapiens
gcgcaggggcgcgagaccgcccggacggcgaagcgcgcgggcggagacagcggaaagacccaggggagcagagcacgcagcagcgcagcaagcgc

SEQ ID NO: 20196 - RNA, 85 nt, Homo sapiens
gcgggggcgccggcagaggaccaggcaccaccggccccggaagacccccaagaagggaccacaggacaaaaccccagccgacgag

SEQ ID NO: 20197 - RNA, 57 nt, Homo sapiens
acgcgaccagagaagcaagccggccagagggacacccccgaggagagggaccccaac

SEQ ID NO: 20198 - RNA, 60 nt, Homo sapiens
gaaaggaaggccccacggcgcgccagccagccgcacagacaaggaggcggaaccgccccc

SEQ ID NO: 20199 - RNA, 82 nt, Homo sapiens
agcacaacggagaaggaaaagaaccagaagcgagagaaaagcccccaaaagcagcacagcggccgggccacgccagggcccc

SEQ ID NO: 20200 - RNA, 86 nt, Homo sapiens
acgcgcaagggcgcggagccgcgggccggcgagcgcgcgccaccaggccccggccccaacaggcccgcgcccagagccccgcaggg

SEQ ID NO: 20201 - RNA, 50 nt, Homo sapiens
cggacgcaagcagcgcaagaccgcgagaccagacccagcggaccagagaa

SEQ ID NO: 20202 - RNA, 84 nt, Homo sapiens
cccggagccacggacaccaggaaacagcaacgccagggcagcaccgcaggaacccaaaaagacgaggaggacgccaccaggagg

SEQ ID NO: 20203 - RNA, 80 nt, Homo sapiens
ccgccgggaagaaagggcagccagagccggaagacagaggccacaccaggccaacggaccacaccaaaagccaccaaagg

SEQ ID NO: 20204 - RNA, 31 nt, Homo sapiens
cacacccaaaccacgagccagcgccacaagg

SEQ ID NO: 20205 - RNA, 46 nt, Homo sapiens
gaggcggggagcgcagagcgggcgagcgcgacaacggcaagcggag

SEQ ID NO: 20206 - RNA, 77 nt, Homo sapiens
gagcgcgaaccgcccgcggaaccacagcccagcacggaaagcagggcgcaggcgaaaccgggccccaacagaggaga

SEQ ID NO: 20207 - RNA, 56 nt, Homo sapiens
ccgagagagaagggccaggcgaaccagccgaaaaaggagaaaccaaaaggaaaagc

SEQ ID NO: 20208 - RNA, 66 nt, Homo sapiens
ccgcggcccgaggcgcagcagcaggaggaggaccgcagcaaggacccagcagccagcgaagcccca

SEQ ID NO: 20209 - RNA, 52 nt, Homo sapiens
cagcccaccacaacacaacaccccaccccaagcccgccggcccggcggagca

SEQ ID NO: 20210 - RNA, 75 nt, Homo sapiens
agagagagaggcagagagggagagagggagaggacagcagcgccgacaccgaaaacgagaaacgaaagagacacg

SEQ ID NO: 20211 - RNA, 77 nt, Homo sapiens
gggcgaggcggcgcggccaggccaccccggggagccaaccaggacacaccgagaagccgaaacagccacaaccagag

SEQ ID NO: 20212 - RNA, 71 nt, Homo sapiens
accgcggcagacgggaccacgaggcaacgccccagaaaggaagcacgcgcgcggacaagaccagaaagaaa

SEQ ID NO: 20213 - RNA, 79 nt, Homo sapiens
ccagcaacagcaaaaccaaagacaagaggagacacgagggaacaaacaccggagcaccaaagaggaagagaacaggaaa

SEQ ID NO: 20214 - RNA, 85 nt, Homo sapiens
cggcagggacggcgggcgacgcgaggagagagcgacgaagccaacgccagggaccaggcagagcacccccaggaaggccacgggc

SEQ ID NO: 20215 - RNA, 71 nt, Homo sapiens
agcccaccccaggcggcagcacacagaagcgacgaaggccacaaagaaggaccaaaggcaaaacacaccga

SEQ ID NO: 20216 - RNA, 82 nt, Homo sapiens
ccgccaagggccccaagagggcacacagcacacaccgacaggagaggaacggaaaaggacagaaccagagcgaaaacgcaag

SEQ ID NO: 20217 - RNA, 51 nt, Homo sapiens
acaacggaccccgaccaggaggacacaaccagagggaagcacgcccgggca

SEQ ID NO: 20218 - RNA, 83 nt, Homo sapiens
gaggagccagacgacaagcacacacaggcgcgaaacggaaaaagagagggcacagacccaggccagcagaacgggcccaaccg

SEQ ID NO: 20219 - RNA, 77 nt, Homo sapiens
ggaaacagagacaaagcggacacccgcccgccgcacgacagccgaaggagaggaggcgacaagcacacagcagggac

SEQ ID NO: 20220 - RNA, 71 nt, Homo sapiens
cgaggagacaacccccacaggcccagagacccacccacgaaacaaacaagggaaccagaagaggccaacca

SEQ ID NO: 20221 - RNA, 95 nt, Homo sapiens
gcagcaccaagcccagggcagccaggaaacagaggcggaaaccggagcccaaccaaacacagggagcaggaccccacccagaaccggaggaagaa

SEQ ID NO: 20222 - RNA, 81 nt, Homo sapiens
gccagacagcagagaggggccaacaagcagaccaggaggagcgaaggaccgcgaaggacgaacgcccaccaaacaagccgc

SEQ ID NO: 20223 - RNA, 59 nt, Homo sapiens
agcaggcccgcgcggcaggcaaccccaaaaagggagccgccaccaaaagcagacggaaa

SEQ ID NO: 20224 - RNA, 69 nt, Homo sapiens
ccgcccccggagagagcacgaaggacccagcagggcaccagcgacgcacaaggaaaaacagagagaaag

SEQ ID NO: 20225 - RNA, 80 nt, Homo sapiens
gcagaagaccccggcggacacagccacacccaccgcccgggcaggccacggcggagagggccgggcgcgcaccccgaacc

SEQ ID NO: 20226 - RNA, 79 nt, Homo sapiens
cacgaggcagcgcccagccgcgagcacggggacggaccgaacccaccggacacccccaggagaaaacacaacacacagg

SEQ ID NO: 20227 - RNA, 80 nt, Homo sapiens
cacaccgacccacaggagcgcccgcggaggagcgcccgggaagaccgccggaccaaacagagggccccacgccaccacca

SEQ ID NO: 20228 - RNA, 78 nt, Homo sapiens
agcccgcagaccgcagaaggccggagacaccagcaggccacggcagagacaacgggaccccaaggcacaggcgaccac

SEQ ID NO: 20229 - RNA, 73 nt, Homo sapiens
gccgagccaggccgggcggaacgacagcgcagcgacagccagacgagcgcaagaaagagaagagagcggagag

SEQ ID NO: 20230 - RNA, 77 nt, Homo sapiens
gaaaaggaaacaaagagacaacaggaccggacccagacgccaccaaagcgagcaagagccaagagaggacccgggac

SEQ ID NO: 20231 - RNA, 89 nt, Homo sapiens
agaggaggcaccgcccagccgaccgaggcgccgccgcgagcgccacgccaaggaggggcagaccccaagaagaagcggaagaggagccg

SEQ ID NO: 20232 - RNA, 64 nt, Homo sapiens
aacgcagacgccagcaccaagccgagaagcaaaaagccacgagggacacaaggccagcagggcc

SEQ ID NO: 20233 - RNA, 81 nt, Homo sapiens
aacagaaaaaggggcagaagaagagcagaaaaagcagccaggaaccaagaaaacgaggcaggaggggcggcaaagggaggc

SEQ ID NO: 20234 - RNA, 110 nt, Homo sapiens
cggggacagcagaaggcagaaaacaagaaaaggggcggacagaaaaggggaccagagacagaggaggagagaaagaacccacgcaggacgacagaagaggccggacaaga

SEQ ID NO: 20235 - RNA, 74 nt, Homo sapiens
ggacgcccccaagggcagagggagcaggaagaagccccagcggagccgaaacggcgacgagaagagcacccccc

SEQ ID NO: 20236 - RNA, 82 nt, Homo sapiens
agacccccaccacccaaccggcggcgcagacccggcacagcggagcaaagcggcaccgaggcagcgcgaaggagcgaaggga

SEQ ID NO: 20237 - RNA, 50 nt, Homo sapiens
agcgcgcagcaacggcggggaaagaagaaagcaccccgcaaaagaaggga

SEQ ID NO: 20238 - RNA, 59 nt, Homo sapiens
agcagccaccaggagcccgagagagaagggggagccacagcgacaagcccacacaccag

SEQ ID NO: 20239 - RNA, 97 nt, Homo sapiens
agcccggagaggaagccgggcgcccggcgaaggagccgcggcggggggaaaaggagccccaccaagagcccaaaaggcagagcgaggagagaagaag

SEQ ID NO: 20240 - RNA, 81 nt, Homo sapiens
agccccggcggagaccacgcaaggccacaggcagaggaaagggcgcaggcagaggagcagccgccaccccccagggggggc

SEQ ID NO: 20241 - RNA, 79 nt, Homo sapiens
cgcccgaaccgccagccccgcagacaccgcaaagcgacggggacgcggggcgggccccccagcccagagaagaagaaaa

SEQ ID NO: 20242 - RNA, 82 nt, Homo sapiens
gggcaggaggaggaggaggggcccggcggcggggagacggacccccgcggagccacagccaagaacccggccagcaggcccc

SEQ ID NO: 20243 - RNA, 52 nt, Homo sapiens
agcgcacacggcaagagacccacggcagggggaggccgggcgggggcagccc

SEQ ID NO: 20244 - RNA, 39 nt, Homo sapiens
ggaaaggcacgaaagccagagaaccaggaggaacacgga

SEQ ID NO: 20245 - RNA, 75 nt, Homo sapiens
ggacaagccgcgcggggacccgacgcccgcacgggcagcaggagcggagggcccccgcccaggggaaggacgagg

SEQ ID NO: 20246 - RNA, 73 nt, Homo sapiens
gacgagagagaagaggagagagaagagagccgcagcccaaagcaagaagagcgaggccccgaaagagaaaaaa

SEQ ID NO: 20247 - RNA, 84 nt, Homo sapiens
cgggggcgcggccagaggccgggcggagcgcccagacgcggggagccgccggagcgagaaggacaggcaccagcgagaacgcga

SEQ ID NO: 20248 - RNA, 32 nt, Homo sapiens
ccaccaacaacagaacaggcggcgagaagagg

SEQ ID NO: 20249 - RNA, 70 nt, Homo sapiens
gcgcggggcgaaggcgcagccgcgaagccgaggccgagccggagaaggggagggcgagaagagcaacaga

SEQ ID NO: 20250 - RNA, 79 nt, Homo sapiens
gaacaaaacgagggccccaggagaagcgggcacaggagaagcggagggagaaggaggaagacagcgaacccccccacca

SEQ ID NO: 20251 - RNA, 58 nt, Homo sapiens
cagggcgccaaagcgagagagggaagcgcccggccggcggagaacggaaaagcaccag

SEQ ID NO: 20252 - RNA, 57 nt, Homo sapiens
cccgaacgccgagcagagagagaggaccagaaccagaccggaaagcaccaggcaaag

SEQ ID NO: 20253 - RNA, 84 nt, Homo sapiens
ccccccaagagacccaggggaagacccaaaggcagcaaaaacaagagccccaaagcagccaaaaggagaggaaaaacgagacgc

SEQ ID NO: 20254 - RNA, 72 nt, Homo sapiens
gcagcgggaaaaggcaaggcacaacgccacgaggcacaccccagcaagggggagcgccgcccgcccggagag

SEQ ID NO: 20255 - RNA, 56 nt, Homo sapiens
agggaaccggcagggcaagcggcgacacacgacggcgccggccggagcaacccccc

SEQ ID NO: 20256 - RNA, 46 nt, Homo sapiens
ccccaagcagccacaagccagcacaacacgaaaggaaaagaaaaac

SEQ ID NO: 20257 - RNA, 41 nt, Homo sapiens
cccgaccggacccaaaacacgcgacacgcacagaacccaaa

SEQ ID NO: 20258 - RNA, 72 nt, Homo sapiens
ccgagccgggagcacagcagaaggagcgagcagcagaagggaggaggaaagccagcaaaccgccaaagccga

SEQ ID NO: 20259 - RNA, 74 nt, Homo sapiens
gaggagggcgcggaggagaggagcgagcccagagggccagcacagggacgcgccccgagacgaggcccgcaccg

SEQ ID NO: 20260 - RNA, 63 nt, Homo sapiens
gggacaccagggcagcaaagaggaaaagcagccaaggaggcagcaacagaggacagcccaaag

SEQ ID NO: 20261 - RNA, 58 nt, Homo sapiens
ccaacggcgggccccggcgaggcagcgcggccgcagcagcccggggagaggcaccagc

SEQ ID NO: 20262 - RNA, 76 nt, Homo sapiens
gagcccaccgggcgggccggccaagacccaacagaggaagccgcaagaaacgggacgacaggaaggccagagaagg

SEQ ID NO: 20263 - RNA, 72 nt, Homo sapiens
ggccggcccccccgagccagagagaaaagcaaccggagccaggcaagacgggcgaagcgagggcccgaggga

SEQ ID NO: 20264 - RNA, 87 nt, Homo sapiens
agcgcagaaaaagccggacacgaccaagaaagacacccagaaagcagagaaaggaaaaccagaagaccaccaggaggaacacagggc

SEQ ID NO: 20265 - RNA, 81 nt, Homo sapiens
aaaacgggagaacacgacaccggcgaggaacggcagaaacgaaggaggcccaaccacaaaaggagccgacggaacccagac

SEQ ID NO: 20266 - RNA, 82 nt, Homo sapiens
aaagccccaagcgacaggggagggacccagagcagacagacagcgaacacggaagccacgaaaagcaaaagcacaggaagcc

SEQ ID NO: 20267 - RNA, 71 nt, Homo sapiens
aaaacccaaacccgccagggccgcggaaggccagaacacaggggggccgaagaagccagggggaggaaagc

SEQ ID NO: 20268 - RNA, 75 nt, Homo sapiens
agggacagagcaacgcaccccacagcaagaaacaacgaacgagcaaggaagggccaaggcagaccccacaccgga

SEQ ID NO: 20269 - RNA, 74 nt, Homo sapiens
gcaaagggagaagaagaacaacacccacaccaaagggggagagggaaaaccagacaaggaaaacagaaggagaa

SEQ ID NO: 20270 - RNA, 77 nt, Homo sapiens
cccgcgcggcgcacagacggcgagggcgaggaccggaggcgggagaagagagggccgaggcagacaagggaaaggcc

SEQ ID NO: 20271 - RNA, 75 nt, Homo sapiens
ccggcgaaaggagcgggccggcaagggagccggcggaagaggaccaagaagggggcagcgcgggaaccagcgaaa

SEQ ID NO: 20272 - RNA, 73 nt, Homo sapiens
accgggaagagaaaagagacgcccccacaacaaagagaaagaggacaggcagcgccaaagccaggacaaggag

SEQ ID NO: 20273 - RNA, 81 nt, Homo sapiens
agagccccagcaagagcacgacgcgcggggcccgcggcccgagccagccagagcaaagaaggaaaccacaaggaccacccc

SEQ ID NO: 20274 - RNA, 83 nt, Homo sapiens
gagcgaagcgaggacacacccaggaaaagaccaggacggacaagcacagccggaagggcaaggaccggccaaggggaaaaggg

SEQ ID NO: 20275 - RNA, 66 nt, Homo sapiens
gcaacgcagcggagaagagacagccagcaggggcagaagcagcagacggaacgagggcaaagaagg

SEQ ID NO: 20276 - RNA, 57 nt, Homo sapiens
agccagaacagaaggagcgaccgccgccagggccgcagacaacaacagcggccagac

SEQ ID NO: 20277 - RNA, 79 nt, Homo sapiens
agaggaaccgaacccaagaggggaggaacaagggcagcggaacgcgccgacgccgcaaccagcaccccgaggagcggaa

SEQ ID NO: 20278 - RNA, 73 nt, Homo sapiens
caagaaaggggcacggcaaaagaccaagagcacagcagaagaggcacagccaagggcggaaaggggaacacag

SEQ ID NO: 20279 - RNA, 83 nt, Homo sapiens
cccagcccagccggaaaacggccgagggggagacgcgaagagaggagaccagacagcaggaaaagacaagaaaaggcgccaac

SEQ ID NO: 20280 - RNA, 87 nt, Homo sapiens
gcaggggagcggagccagggggacgccccagcccgaagagaaacgcaccacacccggaaccgcagggaaggagacacggcgagcaga

SEQ ID NO: 20281 - RNA, 76 nt, Homo sapiens
cacccagcggcacaaaaaggacgccggcaaccaagagccaaaaaccgaacacccggaaggggacaagggacggcga

SEQ ID NO: 20282 - RNA, 84 nt, Homo sapiens
cgagcagcgaacgaggaagcagcgaacgagaaccaaggcggacgcggcgagaaggaaaaaaagcggaaaggacacgacaaccaa

SEQ ID NO: 20283 - RNA, 83 nt, Homo sapiens
cgaccaggaggcggccgccgcagcccaggcgcgggggcgacgacaggaaaccgaagaagaacccgagccaaagggaggaaaac

SEQ ID NO: 20284 - RNA, 73 nt, Homo sapiens
ggaagggaacgcacggcagacaagaaagccaaacgaggagaggaaggagcagaagaggggaagaaagagaccc

SEQ ID NO: 20285 - RNA, 65 nt, Homo sapiens
cggaggaagcccccagggccaggacgcccggaccgaccgagccgcaagggcagcccagcggagcc

SEQ ID NO: 20286 - RNA, 79 nt, Homo sapiens
caggcgcacacggaggaaaaccggcaagcagaagaggaacagaagaagcagagcagagacggagcagcagcccccaaac

SEQ ID NO: 20287 - RNA, 78 nt, Homo sapiens
accgagagcgcgaaacgcacgagaagggagccagagaagaaccaggagaaagcaaaccacaaacagacacggcagaca

SEQ ID NO: 20288 - RNA, 36 nt, Homo sapiens
gaggaggagaaccgccagggaggggaacagaccgag

SEQ ID NO: 20289 - RNA, 81 nt, Homo sapiens
accgggcggcgcggcggccagaggaaccccgaggagcggacccgaggagggcggacaacccaggaggaggggggcagggac

SEQ ID NO: 20290 - RNA, 50 nt, Homo sapiens
gaacagcagaggagaaaacagaagagccaaggaggcccaaaggggcagga

SEQ ID NO: 20291 - RNA, 54 nt, Homo sapiens
caccggacaccgagggcccccaaaagggcggaaagaaaacgccaaaagaaagag

SEQ ID NO: 20292 - RNA, 88 nt, Homo sapiens
ccaccagcagacgcagccgagacaccagcccgaaacaccaccaaggcaacagaggagaagaggaagaggaaaccagcaagaaggcagg

SEQ ID NO: 20293 - RNA, 61 nt, Homo sapiens
ccgcccaaggcaggaagaggggccgcaaagaagacggcaccacagaaaagcaaggcgaagg

SEQ ID NO: 20294 - RNA, 77 nt, Homo sapiens
ccccaccgccgcaccaaacaggccaccccacaggcaaaagcagaccggaaaacccaccggcaagaccacacccgagg

SEQ ID NO: 20295 - RNA, 77 nt, Homo sapiens
aaaaagagaggagggagaacacagaaacccgccccgggagaaaagaagagacagaagaggaagaagaacaagccacc

SEQ ID NO: 20296 - RNA, 74 nt, Homo sapiens
cggggccacccagaacaaaaagggccagccaccagaacaacagcaccaagaaagggaagccggggaaacccagc

SEQ ID NO: 20297 - RNA, 75 nt, Homo sapiens
gcgaccgaggggagcggagcgggacgacacgcaacaggccggaaagagcgaagccaggcgaaaacggcaaaccgc

SEQ ID NO: 20298 - RNA, 73 nt, Homo sapiens
agcccggccgccagaccacagcacagccgggaaggggagccaccagccccccggcgaagccagggcccgcgcc

SEQ ID NO: 20299 - RNA, 75 nt, Homo sapiens
gccaaccccgcaccggcaccagagcagcggacaaaaaaaaaagagaaagcgagccccaagagcaagcagacaaag

SEQ ID NO: 20300 - RNA, 64 nt, Homo sapiens
ggcacggcgccggcagcacccgggacagcgccggaccgccggcggaaaggcgggcgcggacggc

SEQ ID NO: 20301 - RNA, 77 nt, Homo sapiens
caacaagaaccagacgaaccgaggacggccacaggagcaaagccacgcaaccggccgccaccaggccgacccagccc

SEQ ID NO: 20302 - RNA, 82 nt, Homo sapiens
acgcacagcaagagcaggacaccggaagcgggaaaggacagccagcagcccccccaagggggacacagcaggcaccacaaca

SEQ ID NO: 20303 - RNA, 77 nt, Homo sapiens
agggccaaagaagggagagaggagaaagcggaccagcggcaggagcggcccagaaacggggcgcgagcgcaaggcga

SEQ ID NO: 20304 - RNA, 70 nt, Homo sapiens
ggaggaagggcagagaagacgggcggcagagaagagaagagcacagcgggaggaaagggagagacaagag

SEQ ID NO: 20305 - RNA, 86 nt, Homo sapiens
aggcggacgggaaggcgggagacgagaagccgaaaagcgcagcgagcggagccgccggagagccaccacgggcgcccgacccgcac

SEQ ID NO: 20306 - RNA, 82 nt, Homo sapiens
cggcggcgcaaccccggagcccggccccggggaacagggagcgcccggcgcacagcgccaggcagcgagaaggaagaagggg

SEQ ID NO: 20307 - RNA, 76 nt, Homo sapiens
ccacgacaagggggcacccacaaagaccagaagcaacgcgacacagcaaaggcgaaaggggcccagaaaacaagca

SEQ ID NO: 20308 - RNA, 69 nt, Homo sapiens
cgcccagcagcccaggccgagacgaaaggcaggcgaacggccccagcgcggcaaggcgagccccgcgcc

SEQ ID NO: 20309 - RNA, 77 nt, Homo sapiens
gaaaaccaagccggcagacgcgaaggagaaaaagcaggggaagcagcgcacgccagaaaaccagacgagagacagaa

SEQ ID NO: 20310 - RNA, 76 nt, Homo sapiens
caccacgaagagagggaaaaaccgacacacaagaaaccaggagaaccagcagaagggccaagaacagggcacagcc

SEQ ID NO: 20311 - RNA, 76 nt, Homo sapiens
cagaggccagaagaggaaagagagaagggaccagaggagacaacaaagaaacaaacagcacaaggaaccaaaagac

SEQ ID NO: 20312 - RNA, 73 nt, Homo sapiens
aaagggcggagaagggggaaaacccccaaaggagcaaccgacgccgccaagccggcccagacggagcggacag

SEQ ID NO: 20313 - RNA, 59 nt, Homo sapiens
aacaagacaaacgacggaaaaggagagagagaaaaaccagaagagaaaaaacaaagggg

SEQ ID NO: 20314 - RNA, 54 nt, Homo sapiens
agagccccgcagagcaccaaggccccccagagacgagggaggcggaaaggcaaa

SEQ ID NO: 20315 - RNA, 80 nt, Homo sapiens
gaacacagacaacgaacaggcacagaagacgagcacgaggagaggaaccaacgaagaaagaaaagggaaagcagcacaag

SEQ ID NO: 20316 - RNA, 82 nt, Homo sapiens
ggcagcagggcggcagcgcccgagagagagcgaccaaagcagggcacccccgaaggacaggcacccggcccacccgcggagg

SEQ ID NO: 20317 - RNA, 83 nt, Homo sapiens
cggcgcgggagggacacacccggcacacccaaccgagacgccgggagcgcgcccgcagccgcagggccgaggcagccaggcgc

SEQ ID NO: 20318 - RNA, 71 nt, Homo sapiens
gggaccgggacggaccgggaggggacgcgagagcccacgaagagcgacggagcgaacccggacgaagaaac

SEQ ID NO: 20319 - RNA, 76 nt, Homo sapiens
ggagccgcgcaaaggccccggcaagaagaggagaacagaagcggagaacacaaagccacaagccaaacccaaaagg

SEQ ID NO: 20320 - RNA, 80 nt, Homo sapiens
acgccgcgcgcgcaaccccaagagcggagacacggggaaacgcagggccaagcacacagagccacggaaccacaggagcc

SEQ ID NO: 20321 - RNA, 71 nt, Homo sapiens
gcggcccagccccaccacggccaaaacacaaacaagaccgcagccaaaacggacaagccaaggcacgagcc

SEQ ID NO: 20322 - RNA, 73 nt, Homo sapiens
agaccgggcgccagggccgccgccccgcccggggcgagacgcccgggccacacccacagcacgcacgacccag

SEQ ID NO: 20323 - RNA, 85 nt, Homo sapiens
cgaagcacgccaggacggaggacaggaagggaacgggaaagcgcaacaggacccaaacagaggcgagcggcgcagcgcaggagag

SEQ ID NO: 20324 - RNA, 74 nt, Homo sapiens
agaggcgagaaagaagacagagaaggaggagagacccggaacgccggaaggacagaggcagcaccagccccggc

SEQ ID NO: 20325 - RNA, 72 nt, Homo sapiens
gggcgggcggggccaaggcgggggcagggaccgagccccaacacagcagcagcggcgcagcaccgcccgcgg

SEQ ID NO: 20326 - RNA, 88 nt, Homo sapiens
cgcagcccacccaacgcgccgccggcacgggccgccgcaccacagcaccgaggcccacacaccagccagaggaaaaacagaacccaac

SEQ ID NO: 20327 - RNA, 58 nt, Homo sapiens
cgccgccgaccccccggcgccgcgccggcggcgagagcagcaccagcagaagagggcc

SEQ ID NO: 20328 - RNA, 66 nt, Homo sapiens
agaaggacaagaacaccagaccaaggccgcaccaggagagacaaagcgaaagaaacccgcacagag

SEQ ID NO: 20329 - RNA, 39 nt, Homo sapiens
ggggcggggggaacggcggagaagaaggacaggggagag

SEQ ID NO: 20330 - RNA, 76 nt, Homo sapiens
agcccccgcccaggagaaagccagggggaaaccgagggcagacgagaccggagaaggaaagacaagccgagagagg

SEQ ID NO: 20331 - RNA, 111 nt, Homo sapiens
aagagcagaccgggcgaagggagaggacagcagggaggcgggacgcggccggggaaccaggaggagaggggaggaggggcccagcgaggcagaacggacaccggaccccaa

SEQ ID NO: 20332 - RNA, 75 nt, Homo sapiens
cccagcccaggccgcacggacggggggggagaggaaaacccaagacaaggaagggcaaagcccacagcacaagag

SEQ ID NO: 20333 - RNA, 77 nt, Homo sapiens
aaccgccaaccacgcaccgggccagagccagacccgggaggagccccccaaggcgggaacggaggggggcggccgga

SEQ ID NO: 20334 - RNA, 73 nt, Homo sapiens
gaccacaaggaacgaggggccccaagagcacagaccagcagccgccaaaggccagcaggcagggaacgggaga

SEQ ID NO: 20335 - RNA, 78 nt, Homo sapiens
gggaccgcgggcaccagaccgcagcagacgggaagaagagaaagccgaaaaagacaaggggaggacagcggaaaaacc

SEQ ID NO: 20336 - RNA, 52 nt, Homo sapiens
cccgaccacgacaaggagcccgacggagcagcagcgccgggaaggaaagcac

SEQ ID NO: 20337 - RNA, 68 nt, Homo sapiens
ccggccgggccggccagcgccggaaaccaacaagacgagggcgcacagaacgggaagaaagccaaaca

SEQ ID NO: 20338 - RNA, 69 nt, Homo sapiens
aacgcagaagagcgcaggagcaaccaccagggacacaggaaaccacacaacaagaacgcgccagaagac

SEQ ID NO: 20339 - RNA, 67 nt, Homo sapiens
caagagggaaccacccccaacaaccagggcaacagagaagaccacagccaggcccaaaaaccagaac

SEQ ID NO: 20340 - RNA, 61 nt, Homo sapiens
ccaacccaggaggaaaaacgacaagcagaccggaagaccgacggaagaccacaccccgagg

SEQ ID NO: 20341 - RNA, 70 nt, Homo sapiens
gaccagccaggcccagccccgaagggcacaccggagagagaagcccagcccgcggcggcgagaagagggg

SEQ ID NO: 20342 - RNA, 77 nt, Homo sapiens
cagcaggcaaaggaggggagccacaccagcagacccaagcgacaccaaggcggaaaccccccagaccccagagcaga

SEQ ID NO: 20343 - RNA, 57 nt, Homo sapiens
ggaacgaccgacaagcaaaaggaagcagagcgacacccaggaaagacaaggccccag

SEQ ID NO: 20344 - RNA, 89 nt, Homo sapiens
cggggacgggaccagcggagaagggcccgcagcgggagacgacgaggaggaccgggagacgagagccaggccaagcgccaagaccgagg

SEQ ID NO: 20345 - RNA, 81 nt, Homo sapiens
gacacgacgacggaaggagcagaacaaacggccaagaagggccaccccacagacgaaaagggacacagacgccaggcagcc

SEQ ID NO: 20346 - RNA, 71 nt, Homo sapiens
gcacggaaagagcaggcggcggcggcggaacgccaggcagcgcgcaacaccagaaaggaaggggcagcgac

SEQ ID NO: 20347 - RNA, 60 nt, Homo sapiens
aggacacaaggcccagaaacacccgagacggcaagcaggaaacggaggacggggaaaaag

SEQ ID NO: 20348 - RNA, 77 nt, Homo sapiens
ccggcaccgagaaagacaacggagcggcggacaccagaagagaaaagggcaagccagacgcacagggccagcggacc

SEQ ID NO: 20349 - RNA, 78 nt, Homo sapiens
acgagcacccccgaagcacccaggggccagggcgcaacgggcaggccacagggcacagagccggacagcgcaagacaa

SEQ ID NO: 20350 - RNA, 68 nt, Homo sapiens
gaaggaggcccaggcgggaacgggacacacaaagacagacgcgcaaggcagaagacacacccacaggc

SEQ ID NO: 20351 - RNA, 59 nt, Homo sapiens
gcacggcgaccccgagcccacggaaacaagccaggccagccaacacgagaccaccaaag

SEQ ID NO: 20352 - RNA, 80 nt, Homo sapiens
caacaggcagacagacaagaggggaaaggacaaggaaggagcggggaacgacacagcagaaaaagaaggccaaagaaagg

SEQ ID NO: 20353 - RNA, 74 nt, Homo sapiens
gcaggcagccggcgcagccccggcaggaaacgagaagaacgaaagagaaacccaaaaaaaggagcaaaagagcg

SEQ ID NO: 20354 - RNA, 72 nt, Homo sapiens
cggagcgaggaccaggcaaggccgggaacacggggcgcaaagaaggcccaaccaggaaggagacgccaggag

SEQ ID NO: 20355 - RNA, 73 nt, Homo sapiens
ggccgaccacagaaaaccgaaaccagggccgggaagcacacaggaggcgccacgggagcagcggaaggggccc

SEQ ID NO: 20356 - RNA, 71 nt, Homo sapiens
gcgggggaaaggaccaagaagaagaaaagacagaagccgaccggaagcgacacaaacccgccgggcgggca

SEQ ID NO: 20357 - RNA, 80 nt, Homo sapiens
ggacccagacccggagcccagggaagcagccgaccagccgcggagccgggggcaggcgggcacgaaaggaaagccgagaa

SEQ ID NO: 20358 - RNA, 76 nt, Homo sapiens
agcgacaaagaccaagccaacgaggccccgcagcgacgacggacagcaaggaaccccggccaccaaaagaaggcgg

SEQ ID NO: 20359 - RNA, 74 nt, Homo sapiens
ccccccggcccagggaccccgcgcagagggggggccccagcccggccgaacgggcgcacgacacaaacacaacc

SEQ ID NO: 20360 - RNA, 64 nt, Homo sapiens
ccccgccgcgccgcgcccaaccgcccccccccagaacgcggggcggaaacagcagaagagcgcg

SEQ ID NO: 20361 - RNA, 85 nt, Homo sapiens
gagcgagcggcgggaggaggcaccagccacagcggaggaagccgggcacaggagaagcccacagaagaggcccagggagaggaac

SEQ ID NO: 20362 - RNA, 82 nt, Homo sapiens
gaccacacgccgacagcgggccaagcgccggagcacaaagacgaagccgaagccaaggccaccgagccacaagaccacagca

SEQ ID NO: 20363 - RNA, 81 nt, Homo sapiens
cgaaccgaagcgggcgggcccccccacccagagaccaagacacccaggagaaagacagcggggaaaagaaaaaggaggggg

SEQ ID NO: 20364 - RNA, 79 nt, Homo sapiens
accccaagaggaagacaaacaaccagcccaggcagaagaagaagagcggagaaccgaacaggcgcagggagcccccacc

SEQ ID NO: 20365 - RNA, 84 nt, Homo sapiens
cgagccagagcggacccaccagcaagcacccggaggagaagaggcgcggaacaagcgggagagcaaggaaagcgaagagaggac

SEQ ID NO: 20366 - RNA, 87 nt, Homo sapiens
acaggagaagaagagaccgacacaaggaaagcgaagcgggaaaagccagagcaaggaaccagagagaccaccccccaggccgggcag

SEQ ID NO: 20367 - RNA, 76 nt, Homo sapiens
accaggccggcggcagggaccagcaagcgccgaaaggcccacaagaggaccaaaagccagcaaagcgacagaaaca

SEQ ID NO: 20368 - RNA, 78 nt, Homo sapiens
cagcaggccccgggcccggcgccgccgcccgcagaggcccaccacagagccccaacgcagcagcaccgacaaaggcca

SEQ ID NO: 20369 - RNA, 71 nt, Homo sapiens
gaacagggaagaaaagagaaaccacccacgggaaggacacaagacaaagcagagcccacagacaaggccaa

SEQ ID NO: 20370 - RNA, 67 nt, Homo sapiens
gaggacgagagaacggaacaccagaggcaccaccgccaccacaagccaacaaaccgaaaaaagagac

SEQ ID NO: 20371 - RNA, 78 nt, Homo sapiens
agcccccagagcgggaccacaggcagcaaaagaagcaggacccgcccaggacaaaaacacccaccagacaaagccaag

SEQ ID NO: 20372 - RNA, 73 nt, Homo sapiens
cccagccaaaagcaaccaagaacacagacaggaaaggacaaaaaacagaagaccccacgaacgcaaaagaaga

SEQ ID NO: 20373 - RNA, 56 nt, Homo sapiens
acgaacgaaaaaaccagaacacgccaagaggaagacagcccaaggaacccacgacc

SEQ ID NO: 20374 - RNA, 58 nt, Homo sapiens
ccggacaaccagaggcagccagcagggggagacagggccagcacagcaaggggaacag

SEQ ID NO: 20375 - RNA, 83 nt, Homo sapiens
gaccggacccagagaagaggaaaaccaccgggcagaagacgaccccgacgcaggccaggagccgcggacagaagccgagcacg

SEQ ID NO: 20376 - RNA, 72 nt, Homo sapiens
gcacaggaccacaaacagcaacacagaacgcaagaagggccagggaaccggacaagcagaccaaggcccgcc

SEQ ID NO: 20377 - RNA, 85 nt, Homo sapiens
cagcaagcgcagaaaagagaagacccacgaccagcccaagaagacagagacaagaacgagaggagccgcccgccgcccaggcgga

SEQ ID NO: 20378 - RNA, 56 nt, Homo sapiens
cacaacccaaccgggagaggagcagagacaggagcggggagaccagcagaacccaa

SEQ ID NO: 20379 - RNA, 78 nt, Homo sapiens
aaaagcacagagagagggaccggaaggcacgagccacggcaggaagcacagaacccgggccgccagagcccacgcaac

SEQ ID NO: 20380 - RNA, 81 nt, Homo sapiens
cgagcgccgacccggggcgccgcgcgggggcgcgggcgccgcggaaagaagaaaagcgagggcgacggcgaagcgccggca

SEQ ID NO: 20381 - RNA, 86 nt, Homo sapiens
ggggacccgcggccccaccggcagcggggcacacaagagcaccgggcagagaacaccagcccgcgcccccgcagaccggaaagccc

SEQ ID NO: 20382 - RNA, 82 nt, Homo sapiens
aggcgaagccgcggaggacgggggaagaggcggcccccgcccgaacagaccacagaccacagccacagccagaagagcggcg

SEQ ID NO: 20383 - RNA, 81 nt, Homo sapiens
ggacacgccgagagacccaagaaacaggggacaacaggagaagcggaaggagaccacccaccaggcgcaggcccagcagga

SEQ ID NO: 20384 - RNA, 74 nt, Homo sapiens
cgcgccacgcgggagcgagaccagagcgccacggacacggccccccggggggcagcacgccgaaggagagacca

SEQ ID NO: 20385 - RNA, 40 nt, Homo sapiens
ggccacagcacaccgcaaaggccagggcacccccgagagg

SEQ ID NO: 20386 - RNA, 77 nt, Homo sapiens
gaaggaaacagcaagcgaagccgaaaaagcgcccgagacgggcccgccgaaagagggaggaaccgaaaggaaaccga

SEQ ID NO: 20387 - RNA, 56 nt, Homo sapiens
ggaagacgagccgggaggaacggcccggaaacaggaggacgggcgcgacgagagac

SEQ ID NO: 20388 - RNA, 82 nt, Homo sapiens
ggcaggacgcgcggaggaaacacccaggacacggccacaacaccaagagcagcgcacccacaccagaaagcggcgggcacag

SEQ ID NO: 20389 - RNA, 76 nt, Homo sapiens
ggacccggccccggcccacaggggggggcaaacccgagagaacgggggagaaaaagagccggaccacaccggaagc

SEQ ID NO: 20390 - RNA, 73 nt, Homo sapiens
ccacgaccagcaggaagaacaaacgagaaggcagagaggggaagaccaagagcacagacggacagaaccggag

SEQ ID NO: 20391 - RNA, 77 nt, Homo sapiens
agacacacagggagccagcaccgagcccccgggccagcagacagagacaacgcgaacccgccaccccccccccagcc

SEQ ID NO: 20392 - RNA, 83 nt, Homo sapiens
ggccgggaggcccggccggaggcggaagagggcgccccgcaggagagccagcgccggggaggccgggggaccggagcaaagca

SEQ ID NO: 20393 - RNA, 39 nt, Homo sapiens
gaagagaagacgcaagaaggggaagaggaaaaaacgcag

SEQ ID NO: 20394 - RNA, 68 nt, Homo sapiens
ggagagcagcacccagggccgcaaaaacacagggagagacaacgaagagaggaaagaagcggaaagga

SEQ ID NO: 20395 - RNA, 75 nt, Homo sapiens
aggacaaaaagagaggggggggacgggccagggcccggcccacgccacccccccagcaaggcggggcaggagcac

SEQ ID NO: 20396 - RNA, 72 nt, Homo sapiens
ggccggcagaaaagagacaggcggcccacaaaaacagcgacgcgggagccggacaccacgccagggagggcc

SEQ ID NO: 20397 - RNA, 82 nt, Homo sapiens
gcggaaaccacggagacgcagggccagagaggcagcagaagcgcaacaaacgacggagccaccaccaccccgagagacggac

SEQ ID NO: 20398 - RNA, 66 nt, Homo sapiens
cggccgcagaggaccccaccgcagccacccccggaacacgaacccagcccgcgacacacacagagc

SEQ ID NO: 20399 - RNA, 77 nt, Homo sapiens
aaccccagccccgaaagaaacggccagaggacccccaggccaccgggaaaggcaccaaaccccccaccagaacggca

SEQ ID NO: 20400 - RNA, 74 nt, Homo sapiens
cgacaaagcaggcagacgcaaggcagaaaagcaggacgggcaggacgagggccggacagggcccagaccccagc

SEQ ID NO: 20401 - RNA, 83 nt, Homo sapiens
gggccacccccccaggcaagaggcaccccagcaacaccccgccacgccgcccaacccccgagcgcggccagcccaagcccgcg

SEQ ID NO: 20402 - RNA, 56 nt, Homo sapiens
aagaaaccaaacagaaccaggcgccccggcaaggccaccgcagaagccacaggaga

SEQ ID NO: 20403 - RNA, 54 nt, Homo sapiens
gggaggagcccaacgcgggcggagccggagcgaggcgggggaggcagcagaagc

SEQ ID NO: 20404 - RNA, 82 nt, Homo sapiens
agcaccgaccaccgaggcggagggggagaacacccagaaaagacacgaaaccaagcaacagagacaaaagagaccaaaagcg

SEQ ID NO: 20405 - RNA, 69 nt, Homo sapiens
ggagcgggcccggggggacggggggaggcaggaccggaccgcaacaggggcaccaccacgaggcgaggg

SEQ ID NO: 20406 - RNA, 75 nt, Homo sapiens
ggggagcccacaggagcaggcagccgggccaggaagccagaaggagagaagacggagagggcaccagggggggac

SEQ ID NO: 20407 - RNA, 49 nt, Homo sapiens
gccaccccgcccccaagagcaagccggacaagacaggaggacacccgaa

SEQ ID NO: 20408 - RNA, 56 nt, Homo sapiens
ccaaaacgacagcggagaagcagagacacagaagacgcccccagcggcagcagcac

SEQ ID NO: 20409 - RNA, 73 nt, Homo sapiens
gggaaacccaggcgccgcggcccgggcgaaggccagcgagcccgcccaccagccgaaccccccagaaaccggc

SEQ ID NO: 20410 - RNA, 49 nt, Homo sapiens
gaccgacacccaagacaagacagcgcaaggcagccccaaaagcacgcac

SEQ ID NO: 20411 - RNA, 56 nt, Homo sapiens
ccgccggcaggcggccgcagcaacccgccggggaggccaagaggccagggagagcc

SEQ ID NO: 20412 - RNA, 68 nt, Homo sapiens
acacaagaaaaccgaccaaagacaagggcagagccaagcgccgcccgggcccaagcacccgcccagcc

SEQ ID NO: 20413 - RNA, 75 nt, Homo sapiens
aggcgcacaaccaaaccagaccgcagcaggccaagacaacaaaaaagggagaaccacccacgaagagcagaccga

SEQ ID NO: 20414 - RNA, 59 nt, Homo sapiens
caaggggccaccaggaggccagggggcgccaggcgggagggacaagaagaaaggggacc

SEQ ID NO: 20415 - RNA, 70 nt, Homo sapiens
aaaccaccaaaaaagcggaggcgcgcaggagccaagcacgggaccccggcagcccgaggcccggcggggg

SEQ ID NO: 20416 - RNA, 87 nt, Homo sapiens
gacacaggacaccgggaggggagagaggacgggagaccagcaggagaaacgaggaggaagagaaggaccgaacacagaagaaggaac

SEQ ID NO: 20417 - RNA, 82 nt, Homo sapiens
gagcggcagaccgaccaccccccaggaccccggaggaaaagcggaagcggcagcggcgaacgccggaacggaccaacaggag

SEQ ID NO: 20418 - RNA, 74 nt, Homo sapiens
ggaccagaccgaccaccaaaaaacgccaacgaagccaacgcaaagcaaagcgagcccccagaccaggacccaga

SEQ ID NO: 20419 - RNA, 77 nt, Homo sapiens
gagccgacggacggccggcgagggcacgggcccccaacaagcagaaacagcgagcccacccaccgaagagcacgccc

SEQ ID NO: 20420 - RNA, 79 nt, Homo sapiens
ccggcccccgcagcccagacccgcaccgcagaagccagcggcacgccaaggccgggacaggggccgagcagaggcaggc

SEQ ID NO: 20421 - RNA, 81 nt, Homo sapiens
gaccagaccggaacgcccaagccccaccgcgagggaggcacagcgagaagggaaggaagcccaggaggacacgaagaagga

SEQ ID NO: 20422 - RNA, 81 nt, Homo sapiens
aaaaaggcgaagaccagaccaggcaggcaaaacagaacggaagacgcaacgagccgaggaaggcaccaggagaggaggagg

SEQ ID NO: 20423 - RNA, 75 nt, Homo sapiens
acaaacaggccagcagaagagaacccaaagaagggaaccaagaccaggacaaagaagacccggagagacaagccg

SEQ ID NO: 20424 - RNA, 91 nt, Homo sapiens
caacggcaaaagaaagggacagcagccaacaaaagacaggacgcggcggcgcgcgcaaaaccgaggcaggagggcaccccagcagacgagc

SEQ ID NO: 20425 - RNA, 77 nt, Homo sapiens
ccagacgcgcgcaacgacaaacccggcccggggacccacgcggaggccgcaagagcaaacgagacggaagaaaaaac

SEQ ID NO: 20426 - RNA, 74 nt, Homo sapiens
aaaaacgcagcagaagaacgacaaaaggcagaacaggaagacaacaaaggaaaagacgccaggaccaagcaacc

SEQ ID NO: 20427 - RNA, 80 nt, Homo sapiens
acaaaagccaagaggaggacagcgcacacagcaagcacgaggaaaccaggagagcagcggaggggagaaacaaggggaac

SEQ ID NO: 20428 - RNA, 84 nt, Homo sapiens
ggaggacaccggaccccggacgcgggaaagaacggggaagaaaccgaaggggggagaaacccaccaggccaacgggaaagaaga

SEQ ID NO: 20429 - RNA, 76 nt, Homo sapiens
cgccgcccagaggacgcccaacaccacccacccaccacgaagacgaccccgacgcaggccaggagccgcggacaga

SEQ ID NO: 20430 - RNA, 85 nt, Homo sapiens
gacggagcggcgagcccccgcggcgacaggaagcgcacaggggagaagacgacggggcgagccgcgggaagcggccggaaggcgg

SEQ ID NO: 20431 - RNA, 77 nt, Homo sapiens
caaagaaaagaacaggacacaggcgggacaaacaaagaagcaaagccgggagaacgaacagaaaagcggagaacaaa

SEQ ID NO: 20432 - RNA, 78 nt, Homo sapiens
gaaagcaccaacgagacccgccacacgaagacgagagccgaggcgccggaaacaacagccaacaaaaccaagccggga

SEQ ID NO: 20433 - RNA, 73 nt, Homo sapiens
cgacccaacagcaagacaggggcaaggccgaggggaacagcacacagagaggaggcggaagcacgccagcagg

SEQ ID NO: 20434 - RNA, 88 nt, Homo sapiens
agccagcaagcggaagcgccccaccgcgggcgccaaggggagcagaaggaccggacacagggcgaaaccaagaggagggaagcaggca

SEQ ID NO: 20435 - RNA, 70 nt, Homo sapiens
acaaccgcaccaacaaagacaggaggccaagaagaagcaaccggagagaggaaaacagcccaaacaagaa

SEQ ID NO: 20436 - RNA, 67 nt, Homo sapiens
cgggaaggagcacccaggaccaccagaacgggaccaagaaaggcccagggaccaaagcccggacaag

SEQ ID NO: 20437 - RNA, 86 nt, Homo sapiens
ggagcggccggagcagcgagggcccggcgaggagaaccaacggcccgaaagagacaagcagaccggaagaccgacggaagaccaca

SEQ ID NO: 20438 - RNA, 83 nt, Homo sapiens
gagacgggaaagggcaggccccgggcccagccgcccagcccccgggaagagacggcagcccccaggccggccgggcaaaaccc

SEQ ID NO: 20439 - RNA, 74 nt, Homo sapiens
cggcgcagccccagcgagagcaagcggaagagaagaggggcaaggccaggcccgagagacagaggcagccgggg

SEQ ID NO: 20440 - RNA, 62 nt, Homo sapiens
caaagcggaccagagacagagcgccaaacggaggcccgaagaaaaagaaccgaaaaagaaac

SEQ ID NO: 20441 - RNA, 78 nt, Homo sapiens
acaacaagggcagccccaacaaggacagggcccaagggagggacaaaacaaacaggcacgacaaaaaaggaaagaacg

SEQ ID NO: 20442 - RNA, 74 nt, Homo sapiens
gagacgccccgaccacgaaaccccgcggggaaaaggacccaagacaacaacggcaagcggagaagagcaaggcc

SEQ ID NO: 20443 - RNA, 65 nt, Homo sapiens
gagggggaccagggaaggaaccgcaccccgagagcccccggaacagcacaacccaacccaggagc

SEQ ID NO: 20444 - RNA, 74 nt, Homo sapiens
cccggcgcccccgcaagaggacggcgccggcagccgaggaagaaggaacgccaggggggggggaagcccggaaa

SEQ ID NO: 20445 - RNA, 64 nt, Homo sapiens
ccaccccagaagaggcggcccgcagacagaccaaggcccaccgcggaagagcgaaagagagaag

SEQ ID NO: 20446 - RNA, 77 nt, Homo sapiens
gagcgagggggggcgcgccggaaaccggagcgcgcagcagacgcccaggaccacaccgcagcgaacgcaggccccag

SEQ ID NO: 20447 - RNA, 85 nt, Homo sapiens
accaggcggagggcggcagcccagacgggcgggcagggccgggcccgcagaggccgaagaaggagcacgcccccgcccccggagc

SEQ ID NO: 20448 - RNA, 61 nt, Homo sapiens
acagccaccgcaggggacaggcagagcacggcgaggggaggaagagcacacaccgaccgga

SEQ ID NO: 20449 - RNA, 87 nt, Homo sapiens
ccgggaggcccgccagaccagcaagaggaggggcccggagagggggaagggcccaaagccagaagggaccacgacaagggagggcca

SEQ ID NO: 20450 - RNA, 59 nt, Homo sapiens
gcagaaacgcaccaggccaaagaaagagaagagccgaggccagagcagaaaccagccca

SEQ ID NO: 20451 - RNA, 78 nt, Homo sapiens
agcgcaggcagcaagagcaggaggagacgcacagcacaggaccagaggacagaaaagacccacggaaaagaaacagaa

SEQ ID NO: 20452 - RNA, 72 nt, Homo sapiens
agaccccaccgccggcgcgggaaacgggcgaagcgacgagccgcgaggaggagcggcagcccacaagcagga

SEQ ID NO: 20453 - RNA, 85 nt, Homo sapiens
agccggggacgcgagggacacggcggacgcggggcggcgagggcgccacaccggaaccacggagaaccacggggaccaagaagcg

SEQ ID NO: 20454 - RNA, 79 nt, Homo sapiens
agaaaaaagagagagaaaaaggacaaaagccaagaggaggacagcgcacacagcaagcacgaggcaaagccgcagcgca

SEQ ID NO: 20455 - RNA, 58 nt, Homo sapiens
gccgaaggacagaccaagacaaggcaccgggacaggggaaaagcagagcaggaaaaca

SEQ ID NO: 20456 - RNA, 73 nt, Homo sapiens
cacagagacaccgggcccccgcgaggcacacgcgggggggacgggcacgagaagccacagccccccacggagg

SEQ ID NO: 20457 - RNA, 80 nt, Homo sapiens
ggggaccaggagcccacaggggcgagccgcgaagagcaagcagagggcccaaccgccgcgacaaagacggccagcaccac

SEQ ID NO: 20458 - RNA, 53 nt, Homo sapiens
gggaccggggaaaaggcgcgccgagggccgccaggccaagagccccaaaggcg

SEQ ID NO: 20459 - RNA, 82 nt, Homo sapiens
gcacacacccacccagaagaagccgccagcaaagagaggcccggagcagacagccaagcaagcagaacaagggcacccgcac

SEQ ID NO: 20460 - RNA, 76 nt, Homo sapiens
gaaccagcaaccagcaggcagggagagaggggcggaaaggcacagggcgggcagccccaggcccagagacggcgcc

SEQ ID NO: 20461 - RNA, 52 nt, Homo sapiens
caacagacaggggacagagggcagagccagaaggagagccaagcgccagaga

SEQ ID NO: 20462 - RNA, 64 nt, Homo sapiens
agaaggaccaagaaccagacgccaacgaaccacccaccccagaacaccgaccagggaacgcaac

SEQ ID NO: 20463 - RNA, 84 nt, Homo sapiens
aacacggcggccagggccgcggggaccgaaaggacagaacaggaccggaaaggggccaccacagagcccgcagggacacagcag

SEQ ID NO: 20464 - RNA, 94 nt, Homo sapiens
caaagcccccacgcccagccaggagcaccgccgaggacccagcacaccgagggccaccaacggcggggggcgaggagcgagcaggagccgggcg

SEQ ID NO: 20465 - RNA, 73 nt, Homo sapiens
cagcagcaaggaacgcgcagccagcaccacccaaacagacaaagccaaacaggaggcacaagaccacgagaga

SEQ ID NO: 20466 - RNA, 74 nt, Homo sapiens
cccgccccgcggccacccaaggcccggccggaagacaaaaccacggagcgggggaaaaccagcccccggaacgg

SEQ ID NO: 20467 - RNA, 66 nt, Homo sapiens
agcagcgaggaaggaaacagcggagaaagacagcaaagaaaaggagaagaaaggaaaaaaacaacc

SEQ ID NO: 20468 - RNA, 85 nt, Homo sapiens
agagagagaaagaggaggggaggaggaggaggacagggaaaggagcggggagccccgcgccacagaacgaggaaccccagagagg

SEQ ID NO: 20469 - RNA, 79 nt, Homo sapiens
cagaacgccgccccaccacgacggaaccagccgggacaaaagacccaggaccgcacaggacgagcgaagacagggaaaa

SEQ ID NO: 20470 - RNA, 69 nt, Homo sapiens
ccccgcgaagcgccgggcagccgggaacaggcccggagcggccgccggcccaaaggccacaaaaccgag

SEQ ID NO: 20471 - RNA, 46 nt, Homo sapiens
aagccaggccacgaaacaacgagaagacgacccggccggaggcacc

SEQ ID NO: 20472 - RNA, 65 nt, Homo sapiens
aaagcacagccgaggaacggccgcccagaacccaggcccggggacagggcgcaggaagagccagc

SEQ ID NO: 20473 - RNA, 55 nt, Homo sapiens
cccagaaaggacacgcagaacaggcaaaacgggcgggggcaaagaaccacaagaa

SEQ ID NO: 20474 - RNA, 74 nt, Homo sapiens
ggaaaagagcccagaaggaaagcacgcagacagccgaaccaccgggcagggggaaaacaggcgagggaagggcg

SEQ ID NO: 20475 - RNA, 108 nt, Homo sapiens
accacgccagccgcaccagccgcccaagccgcacagccgcggcggcagcagcaggagaggggagaaccgccagcgacgggaaggcaggacccacgcacgagcaacgag

SEQ ID NO: 20476 - RNA, 51 nt, Homo sapiens
gaacagaccccgccccagcagaagagggcgcccaccacggggaaggcgaca

SEQ ID NO: 20477 - RNA, 79 nt, Homo sapiens
agacagaacagcagcccggaggcacagcgccgaggcccagagagaccccagaaggaaggacggcaggagaagaacacca

SEQ ID NO: 20478 - RNA, 77 nt, Homo sapiens
ggagggcggcgcgccgagcgacggcccgccacgggccccgcagccgcgcccgagcgcccgagcagggacagcgacca

SEQ ID NO: 20479 - RNA, 83 nt, Homo sapiens
gaagaagagggagaccagaaaacagggacccccagcgcagacccaggggagcccaccagccagcaacaggcccggaagacagc

SEQ ID NO: 20480 - RNA, 71 nt, Homo sapiens
ccacacccccgggggcacgaagacagagagacgccacggggcccagacggcaaggggaggaagcacaagac

SEQ ID NO: 20481 - RNA, 62 nt, Homo sapiens
agaacccagccgggcccacaaagggcgcgggcggagaacggaaaagcaccaggaagcagaga

SEQ ID NO: 20482 - RNA, 85 nt, Homo sapiens
ggaaacgggcgaagcgacgagccgcgaggagccccgacgaagacccacagagcaaccacacagcacgcacacgaaccgcccgcgc

SEQ ID NO: 20483 - RNA, 79 nt, Homo sapiens
gccacaggagggaccagcaccggaggaaccgcaccccagagaagcaaaagaaacaaggcaagacggaagcaagaagaaa

SEQ ID NO: 20484 - RNA, 78 nt, Homo sapiens
gcccgaggacagagaggcgagcgcccggaggggagagagcggaggacagccgagaggaggacaccagaggaccagaac

SEQ ID NO: 20485 - RNA, 74 nt, Homo sapiens
ccccggccggggcgcagcggaggcaggccgacgcccgccgcggccggggaacaggccacagccaggagcgcaca

SEQ ID NO: 20486 - RNA, 84 nt, Homo sapiens
gcaagcagcgcggcccggccagcgaccggggcgccggcgcggccgccggagaggcagcccaagagaacgaaagcaaaaagcgcc

SEQ ID NO: 20487 - RNA, 55 nt, Homo sapiens
agcgccagcaggccgggcgcagggaaacaacacgaggaggacggcacaaaaagca

SEQ ID NO: 20488 - RNA, 69 nt, Homo sapiens
cgcccgcggcggacaagcgaggaagcaaggacaaaccggcgaccacacacggggacgacggggaagccg

SEQ ID NO: 20489 - RNA, 73 nt, Homo sapiens
aaagaaaaggagccagggggcccccagggaaaaaacggccaccccaagagacagaaagcgaggacggggccag

SEQ ID NO: 20490 - RNA, 70 nt, Homo sapiens
cagagggggaaagccaaggaaaaacggagagccacaaaaaaggaagcgaaaaaccccagccccacaccga

SEQ ID NO: 20491 - RNA, 72 nt, Homo sapiens
aggaaaagagaagaggaagaaaaaaggagaggacagaaagcgcaaaggaagcgaaagggggcagacagaaga

SEQ ID NO: 20492 - RNA, 71 nt, Homo sapiens
aagccggcagcgcgaaaggagggccgcaaacaagaacgacccacacccgcccacaggggaaaaacaacacc

SEQ ID NO: 20493 - RNA, 86 nt, Homo sapiens
gggggagccccgggagccgcacggcgcccgaccagcgcagaagacaggcagcgcggcaggagcccaagccacacgcagaagaagcg

SEQ ID NO: 20494 - RNA, 81 nt, Homo sapiens
gcgccagcgcacagggacagggggcggccgggaacccggccccgcggcgccgcccaacgcccaagaccggaggacacgaac

SEQ ID NO: 20495 - RNA, 61 nt, Homo sapiens
agcgcgcgccgcgcccggaccccaggacccagcagccagcgaagccccaaggaagccggga

SEQ ID NO: 20496 - RNA, 76 nt, Homo sapiens
ccaggcccagagagcgcggcgcggagcgagaaccagcagacacggagagaagacaaaggacgacgggggacagaag

SEQ ID NO: 20497 - RNA, 82 nt, Homo sapiens
ccaaggaaacaagcccacacaggaagagcaggcagaagagccgagagaggcccagccagggagacaaagcaacaggcagagg

SEQ ID NO: 20498 - RNA, 66 nt, Homo sapiens
gaacagagcgagggaggagagagggagagccaaagaaggcaaaagggaaagcaaggggaagggccc

SEQ ID NO: 20499 - RNA, 51 nt, Homo sapiens
acggagacagaaagcacaaagagacccccacccagaagaccagcgggacag

SEQ ID NO: 20500 - RNA, 81 nt, Homo sapiens
cacacagcaaggagaagagaaagcacaaagcaggagaccccccccagcggccaagaagaaaaagcgggaagaacagaaaac

SEQ ID NO: 20501 - RNA, 78 nt, Homo sapiens
agccagcaagggagccagagagcagcgaccggcacaccagcaagagcgagggaagagccagggacggagagaaaaaca

SEQ ID NO: 20502 - RNA, 70 nt, Homo sapiens
ccgccggaggcgaacacagacacaaggcaagcggcgcggagcagcagcagcacgcaaacagcagacggaa

SEQ ID NO: 20503 - RNA, 90 nt, Homo sapiens
cggcagcgcggggcgcgagagcgagcgggcccgggaacggcgcgggggagaggaggagccgcgggccgcagagcccggagcagcagagga

SEQ ID NO: 20504 - RNA, 75 nt, Homo sapiens
ccgaccgggacggccggcaggccgccgccgagcgaccgccgggcgaagggggggcagagccgggccccagccagg

SEQ ID NO: 20505 - RNA, 74 nt, Homo sapiens
ccgggaaggagggggcccggaccgccgccccgccccgcggccccacgaagcgcgcaagacgcaacacaaacgag

SEQ ID NO: 20506 - RNA, 73 nt, Homo sapiens
cgaccaggaagaacaaaggagacaagaaggagagaccgcgccgcagagggggagcacgagacagcgccggccc

SEQ ID NO: 20507 - RNA, 72 nt, Homo sapiens
accggaaccacacacaccacaggaagccagaccaaggcagaagcagacgcaggcaagagccaagggcgcaaa

SEQ ID NO: 20508 - RNA, 82 nt, Homo sapiens
caccgcggcgcggcagcgcgcccgagagacaccaggcgccgagaaggccagcagagaaacaggcaggagaggcccacaggcg

SEQ ID NO: 20509 - RNA, 50 nt, Homo sapiens
cgggcgaagcgacgagccgcgaggagggaccaggaggagaagcaaccaga

SEQ ID NO: 20510 - RNA, 76 nt, Homo sapiens
gaaaggagaaaacacccaaacggaaggacacagagccaacccagaagagccaaggagggccaaacaggggcaaccc

SEQ ID NO: 20511 - RNA, 63 nt, Homo sapiens
cgcgaggcgcccggagccggaaagccgggcgggagcccccggccagaacagagagaagggcgg

SEQ ID NO: 20512 - RNA, 57 nt, Homo sapiens
caccagccccagaacgggcgcagaagcaggaacagcagggagccagagaagaaccag

SEQ ID NO: 20513 - RNA, 74 nt, Homo sapiens
cagacagacaaacggaagaggcagccggcacccgcacaacccagggggccgaacccagaccaacaaaaggaccc

SEQ ID NO: 20514 - RNA, 61 nt, Homo sapiens
caaacgacgagaaagcccacagccaaagccgggcggacgcgacgccagcagcccggacgcc

SEQ ID NO: 20515 - RNA, 74 nt, Homo sapiens
ggcaccagggaccagcggcgggccaccagcccaacgccgggcccagggccgacacaagggaagggcacccaccc

SEQ ID NO: 20516 - RNA, 59 nt, Homo sapiens
gacccggggaggcgcacacacaccaaagcgaaacgagaaagggcagccaggaacccaag

SEQ ID NO: 20517 - RNA, 75 nt, Homo sapiens
gggccaccgaacgcgcacgccggcagcaccgaggagcaacacccccagggagcccagaccgacaggacgcaaggg

SEQ ID NO: 20518 - RNA, 86 nt, Homo sapiens
cgaaggggcgccagcagcagcgcgcaagcggaagacccgaagacccgcgggaccaagggagaaagcacggccgggcgcgcgggaga

SEQ ID NO: 20519 - RNA, 64 nt, Homo sapiens
caggaaacaagggcggacacaacgaacaacgcgacacaacaaacaccggaacgggaaaagaacg

SEQ ID NO: 20520 - RNA, 81 nt, Homo sapiens
ggcccagcgcagggagaacaaagacacgccaacgcgcccaacaggaagaggagcaggacggagggagaaggggccacacgg

SEQ ID NO: 20521 - RNA, 42 nt, Homo sapiens
acaccccggaccgagggacgcgggaccgacaggagcggaccc

SEQ ID NO: 20522 - RNA, 77 nt, Homo sapiens
ccggggcccggcgcccgggcccgccccggagggcccggaggccgggcagggcccacggaaggggcccccagcacacg

SEQ ID NO: 20523 - RNA, 78 nt, Homo sapiens
ccgacaccggcacccacagacacaggcacacggaggggacagcacaccaagcaggcaaaaggaagcaggccagccacc

SEQ ID NO: 20524 - RNA, 65 nt, Homo sapiens
gccccaccgcgccccagcggccacggagggcacagaagagaccccgaagaagccaaaaacgggac

SEQ ID NO: 20525 - RNA, 55 nt, Homo sapiens
ccaccagccccaaaaggcggcaacaggcaccagccggcaaacaccaggcgccaca

SEQ ID NO: 20526 - RNA, 77 nt, Homo sapiens
caccgggggcggccgcagcacaggccgacccgcaggccccggagaaggaagccaacaccggagccagaaagccgaac

SEQ ID NO: 20527 - RNA, 35 nt, Homo sapiens
gagcaggcgagaagagaaggacaagcccccacgag

SEQ ID NO: 20528 - RNA, 67 nt, Homo sapiens
agacgagcaaaaccacggagcaaaacacaacccagacacccacgaccgaccagacgcccccccagag

SEQ ID NO: 20529 - RNA, 79 nt, Homo sapiens
cagcaccacgaagacacgaccagaaacacagggcgcggggcgaggccccgggaaaaggcgaagggagggccgccccaac

SEQ ID NO: 20530 - RNA, 75 nt, Homo sapiens
accgggagcgaggaaccagaacgaaaagcgccagaaagcagcaggaggaccaggacacaccccagaagaagccca

SEQ ID NO: 20531 - RNA, 80 nt, Homo sapiens
gcggcgacaagacacgccaagcagggagaagacacggcggacgcgggagcacggcccaggcagccaagaaggcagagaga

SEQ ID NO: 20532 - RNA, 87 nt, Homo sapiens
ggacgaaaaaagggcaagaagccagaagggagagaggcagaacagaacaaacggagaaacaccggagagcccaaaacaaggaccaac

SEQ ID NO: 20533 - RNA, 58 nt, Homo sapiens
cgacgacacggccaggcgccgcgcccggggagacagaaacgaggcgcccccagcagca

SEQ ID NO: 20534 - RNA, 73 nt, Homo sapiens
aagaccacaacgcagaagacaagaaagagaaaccgaaccagaaggggccggagagggcggagggacaagaagg

SEQ ID NO: 20535 - RNA, 80 nt, Homo sapiens
ccaggacgccaacacgggggcgccgacacaccagcgcccaaacgcgaggggaacgcagcacggaacggaaacagaggcgg

SEQ ID NO: 20536 - RNA, 82 nt, Homo sapiens
cgggcagggccgcgggaggcagcggcggacgccgagcaagcacagcgagagccagacaagccagacaccaagaccccacgaa

SEQ ID NO: 20537 - RNA, 86 nt, Homo sapiens
gccagacacgaagaagccaaagaaaaaacaggacaccaaacacaaggacagaacaaggccgaaaagcaccggaagaaaagagccaa

SEQ ID NO: 20538 - RNA, 69 nt, Homo sapiens
gcaccacgccaaaagcagccacagaaaggcggcaggaaagcagaacggcgccaggggagaggaggcaga

SEQ ID NO: 20539 - RNA, 89 nt, Homo sapiens
agcgccgaggggacaggccgagcgcggggcgccggaggcaggaggagcagcacgacccacgagaacgccggacgcgccgcggacgaccg

SEQ ID NO: 20540 - RNA, 109 nt, Homo sapiens
ggaaggcaaccaaccagccgccgaaacaccacgccacacaccagcggaggaacacaagggcaagacagccgggaaccccaccccaccccacagcacagaaaaaacaagg

SEQ ID NO: 20541 - RNA, 75 nt, Homo sapiens
aacagccggaaaagcgaccgcgagccaagaaaaaaagagcggcgggaaaagaaaggaagccaaaggcagagaagc

SEQ ID NO: 20542 - RNA, 58 nt, Homo sapiens
cagaaccgcaaaggcaagccgggggaagcgaagacacagccacgaaacacagaagcaa

SEQ ID NO: 20543 - RNA, 82 nt, Homo sapiens
cgcacgagcaccggaccgcagcagcagacgaccgcagggccagcccacgaagagccaccggcaagggagagccccagccgcc

SEQ ID NO: 20544 - RNA, 78 nt, Homo sapiens
ccagaggcgcgaagcacagcagagcacgccaccgaccagccaaaagcaggaaacaacgcacacccgggcaagcaaggg

SEQ ID NO: 20545 - RNA, 72 nt, Homo sapiens
cggaaacagcgcgaaaacacgacgccaggcaggaggacacaaggaaagagagcccagcagcacacagacaac

SEQ ID NO: 20546 - RNA, 84 nt, Homo sapiens
ccaagaccgcaaggccgcccgggaacgcgacgcgagagaaggacccacggcgcgcgaaggcgggacgcagagaccggcagcgac

SEQ ID NO: 20547 - RNA, 57 nt, Homo sapiens
agccacacggcagaaaaagagaaggacaaaggaccaaacagaaaaggaaaagagaaa

SEQ ID NO: 20548 - RNA, 87 nt, Homo sapiens
ccgccggggccggcccggccgccgcgccagacccaaggagggcagaacgcagaaagacgccccagacggaggccagaccggaagagc

SEQ ID NO: 20549 - RNA, 68 nt, Homo sapiens
gaccaacgaaggacacacccgaggcaacagagcgaagggaccaccagcgccgcaggcgccaaaaggaa

SEQ ID NO: 20550 - RNA, 71 nt, Homo sapiens
gccagggggacccagcacagaggaaccgaacaagacagaaagcgggacgcgcaaccccaggccagacccca

SEQ ID NO: 20551 - RNA, 68 nt, Homo sapiens
cgagccccgaaaccaggaacgaaagaaaggagaccaaccaccagacaacagagcaccaacaaaaagca

SEQ ID NO: 20552 - RNA, 76 nt, Homo sapiens
cggagaaggagcccacaacaaccacaggggccggaggacgcggggaaccagaccgggccagaccccacgggacaga

SEQ ID NO: 20553 - RNA, 51 nt, Homo sapiens
agcgaaagggaagaaagacagaggaggccaaggaagcgacagccaggacca

SEQ ID NO: 20554 - RNA, 82 nt, Homo sapiens
acccaacccagcaacagcagacacgggaggggagaaggagagggagagcacgccgaaagaaggagaacaggagggggggaga

SEQ ID NO: 20555 - RNA, 59 nt, Homo sapiens
cacggaggggaaggcacggacgcaacacggaacagacgcaggaagaccacaacaagcaa

SEQ ID NO: 20556 - RNA, 71 nt, Homo sapiens
cacagcgcggccgccagggaaaagagcaaacgagccgaccagacagaggaccagcacacagagacagcgca

SEQ ID NO: 20557 - RNA, 80 nt, Homo sapiens
gagcggggccggcggccaccggaaccgcaacaggaaacgcaagcaaggcggacagaagcggggaaggccaggagaagcgc

SEQ ID NO: 20558 - RNA, 80 nt, Homo sapiens
gaaacgaaacaacagcagaccaggaaggaagagaagaggacgacaacaacgacccagaaacgcacaccagcgaagcccgg

SEQ ID NO: 20559 - RNA, 63 nt, Homo sapiens
ccccgcaaaagggaagcgaagccgaaaaaggcagcagcgaagaaggcggcacccccacaagcg

SEQ ID NO: 20560 - RNA, 76 nt, Homo sapiens
ccaacaccgcagacgaaggcaaggccacaaccggggcgaggccaagccagggagacccagagaagaccgcaggagc

SEQ ID NO: 20561 - RNA, 61 nt, Homo sapiens
cacagcaagagccaggaccaccggaagccagaaagggagcaggaagaagagagccaagcga

SEQ ID NO: 20562 - RNA, 74 nt, Homo sapiens
ggaaaaaaagggcggcccgaaggcaagacgacgcaagaacagccaacacagaagacaccgccacgaggccacca

SEQ ID NO: 20563 - RNA, 80 nt, Homo sapiens
gaggccacccgcaccgaaggaaggaaaggaggagggagcaccgaaccaggccagcgaggagacaaccaggggaacacagc

SEQ ID NO: 20564 - RNA, 76 nt, Homo sapiens
gagccaagggggaccacagcagcacccccagcagcacacaggcaaaccgccaaaagcccgaggaccagacgggcgc

SEQ ID NO: 20565 - RNA, 81 nt, Homo sapiens
agcaaccaaggcaggccggagggggacagagcggcccgggcgcacaaggagcccacgcagagagacaaaacggccgcaccc

SEQ ID NO: 20566 - RNA, 75 nt, Homo sapiens
gagaaggcaagaggggaccggcgcgacacgaaccggagagcaagggagcacggggaggagagcgaggacgccgcc

SEQ ID NO: 20567 - RNA, 76 nt, Homo sapiens
gagcccaccggggagccgcgggggcacagaacagccgagcggaaagggagagagcgaacgagagcacgaaagagag

SEQ ID NO: 20568 - RNA, 70 nt, Homo sapiens
cgggacccggccagaggaaagaacccgaggaacaccccggcacggcagccgggaagagaccaccgggaac

SEQ ID NO: 20569 - RNA, 78 nt, Homo sapiens
gaggaaaacaaccgagggcagagaagccagcagagcagggaggaaaaccaaggcaacgccagcacaccaggcgaagag

SEQ ID NO: 20570 - RNA, 78 nt, Homo sapiens
cccagacaagagcaccacgggcaggaaggcagcgcacgacagcaaaaggagggacaggcaagaaggaagaaggcagag

SEQ ID NO: 20571 - RNA, 64 nt, Homo sapiens
ccggcaccgcacaccggaccaggaaacggaggcgggggccaaaaacagaaggcgaggcaaggag

SEQ ID NO: 20572 - RNA, 72 nt, Homo sapiens
gcgaggacacccggcgcagccccacccaggcacggcacgggaggacccagcccacggaaagaggcgagggga

SEQ ID NO: 20573 - RNA, 87 nt, Homo sapiens
gaagccacgcccggaggaaaacgggacggaaggaggaaggcaggacgaagaccccagggccggcggcagagaccacgcccagcagga

SEQ ID NO: 20574 - RNA, 74 nt, Homo sapiens
ggaggaaaggaggacgaggaaaccaaccgaacaaaggacacaagggcaaaagaaacagcggaaaaacaggccga

SEQ ID NO: 20575 - RNA, 73 nt, Homo sapiens
cccacggccacacaggaaaaaagaaggcacgaaggccagaaccaagaaccagaaacacaaacccagcccggcc

SEQ ID NO: 20576 - RNA, 82 nt, Homo sapiens
gcgccagcagcacacagccggaaaaccagggcgacaagaacagaggcacaggaagggcaccacgccggcgcaacccccagcg

SEQ ID NO: 20577 - RNA, 74 nt, Homo sapiens
gaacagcgagcaaagccaaaagaaacagaaacaacgaaaagaacagaaaaacaaccaccagcgagcaaaaaggc

SEQ ID NO: 20578 - RNA, 53 nt, Homo sapiens
accggacggcaagcacaacgaaccagcccacgaaggaccaagccaaccagaag

SEQ ID NO: 20579 - RNA, 95 nt, Homo sapiens
acgcacgaaccgcggcgggacagacaccgggaacccgaggcggaccgggcgacgagccccgggcaaggggagcagacaacaaaacgagcaagcag

SEQ ID NO: 20580 - RNA, 82 nt, Homo sapiens
gacccagaacagagcgacagaggcgacgcaaccgcgggagaggcgcgccaaagaaaaggagaagcaggaaacacaggaggcg

SEQ ID NO: 20581 - RNA, 53 nt, Homo sapiens
gccgaagagaaaacccaccagagcacaaagcacaaggaccgaggaaccacgcc

SEQ ID NO: 20582 - RNA, 73 nt, Homo sapiens
caccaggagcccagcgcacagacaaggagcgcaccagaggagcgccccagaggggcagcaccggaagggagag

SEQ ID NO: 20583 - RNA, 79 nt, Homo sapiens
gaccaaaggaacgggcacaaccacggggcaggggagccgccaccaaaagcagacggaaaacccacggggaagaccacac

SEQ ID NO: 20584 - RNA, 65 nt, Homo sapiens
gcaccgcaggcagacaaaagggccaaagaagggagagaggagggccagacaaggggaacacaaga

SEQ ID NO: 20585 - RNA, 80 nt, Homo sapiens
gacacacgaggccgacagaggagagcagagacagacacaagcgggccaacaaaagcaacccgcagagaccccagccagcg

SEQ ID NO: 20586 - RNA, 49 nt, Homo sapiens
gaggggaccagccacaggaggcggccgcacaaaggggaaaaccaaaaga

SEQ ID NO: 20587 - RNA, 73 nt, Homo sapiens
acgggagacacacacaaacggcaagccagcagaagccgcagcaggcccagaagccacaggaaaggcagaaagc

SEQ ID NO: 20588 - RNA, 65 nt, Homo sapiens
ggccagagcaccacacaaccgggaccaagggagaaacgaagagaagcccagacacgaagaagaga

SEQ ID NO: 20589 - RNA, 60 nt, Homo sapiens
cgcagcagcagggacacgaagcgagcgccgaggcgcccacagcggcagaacagcgccacg

SEQ ID NO: 20590 - RNA, 76 nt, Homo sapiens
gaaaaagagaaccaagcacccaccaaggagaggaaacccccagaaagacaccgccagaccaacacaagacaacaca

SEQ ID NO: 20591 - RNA, 83 nt, Homo sapiens
gcccgaaccaaggagcggagcagcgggggaccgcacgcgagaccgggccccggacccccgggagacgacaccggggccccgcc

SEQ ID NO: 20592 - RNA, 59 nt, Homo sapiens
cgccggcccacacccccaggcacgcgggacaagaggaggcgcacgcgcagaagaggcac

SEQ ID NO: 20593 - RNA, 77 nt, Homo sapiens
ccccagccgcagccacaacaccggcaggaaccaccaggacagacagggagaaggaagggaaaacgaagaaagaaacc

SEQ ID NO: 20594 - RNA, 71 nt, Homo sapiens
aggaagagcccccgccaccagaggcgcacacaacaccaggaagaagagaggccaagaagcaacagccaccg

SEQ ID NO: 20595 - RNA, 64 nt, Homo sapiens
gcagacaagacgagcccaccacggacagcaaacaggccacccgccggaagacaaggagcgcaga

SEQ ID NO: 20596 - RNA, 61 nt, Homo sapiens
gagaaacagcccaaagaccgaccacaagacggcacccagcgcacggcagcgagacaaacag

SEQ ID NO: 20597 - RNA, 72 nt, Homo sapiens
cacgagcccgcacagccacccagcgggacccagggggacccaccgacacggaccaccgcagcagggggcacc

SEQ ID NO: 20598 - RNA, 69 nt, Homo sapiens
gccggcgcggaggaggggagcagcgcgcaagggacagagcgaagaaccccccaagaagacgaaaccccc

SEQ ID NO: 20599 - RNA, 81 nt, Homo sapiens
ggcgacgcaagcccaagcagcgcacacagcgggagcaggagcggaggacgggcaccccgggaggagagggagcagaaccgc

SEQ ID NO: 20600 - RNA, 78 nt, Homo sapiens
ggagaacgggacaggaccagaggaccacgccccagaccggaccggacaggccagaccgcggagggagaaaggagagcc

SEQ ID NO: 20601 - RNA, 75 nt, Homo sapiens
ggaggcgcggagcgcgcggggccgcgccgcgaccccacggccgggcaccgaaagagggcaggcacgagcaaggag

SEQ ID NO: 20602 - RNA, 50 nt, Homo sapiens
cacggccgcacgacgcgcgggcaccgcgcgcgggaccagcaccgccgaag

SEQ ID NO: 20603 - RNA, 65 nt, Homo sapiens
accaagaaccaggacgcggaagaagaagaggcaccacaacgcaagagaaaacaccaggaccccgg

SEQ ID NO: 20604 - RNA, 77 nt, Homo sapiens
ggggagcggggccccacacccccccgggggggcggcgcgagggcggcccgcagaagagcacagaaggagaaggccag

SEQ ID NO: 20605 - RNA, 73 nt, Homo sapiens
ggacagcgcgaggccgcaggagacaccgccgccggcaccaccccagaggcaccacgaagaccccgcccagccc

SEQ ID NO: 20606 - RNA, 73 nt, Homo sapiens
ccaggcggccgggggggggcgaggggaaaggcaaagccgcgagagggaaggggaacaggaccggccacagaca

SEQ ID NO: 20607 - RNA, 70 nt, Homo sapiens
gaaacaacagggcacagaagccaccaagggccagaagcaaccaggaggagagaaagaacccacgcaggac

SEQ ID NO: 20608 - RNA, 75 nt, Homo sapiens
acacccaccgagagagaggacacgaaacagagaggggaaggagcccagcgacacgagaacagagcagagaaacgg

SEQ ID NO: 20609 - RNA, 69 nt, Homo sapiens
gcgagacgcaaagccgcgacaagaagagaaagaacaagaccgggacacaggaaagagaaaagaaaacca

SEQ ID NO: 20610 - RNA, 73 nt, Homo sapiens
agagcgcagaacccgagcaagagaaaggagagaggagaagacagaggagccagaccaagagacagcacaggcg

SEQ ID NO: 20611 - RNA, 75 nt, Homo sapiens
cggaccacaccggaggcaggaccggggccaaaagccaaggacacgggacccaggccacgggccggggcccccacc

SEQ ID NO: 20612 - RNA, 82 nt, Homo sapiens
aacgaagcacccacagcaacaagacaagggaggcgaggacggacaaaaggaaacggacgggaggccagccagcagaaggagg

SEQ ID NO: 20613 - RNA, 35 nt, Homo sapiens
gcagggcgcccccggggaaaggcgcagaggaccgg

SEQ ID NO: 20614 - RNA, 71 nt, Homo sapiens
caaccaggaggaccggaagggacccccccgaaagcccggccaggaccaggagcgcaacacagacaaacgaa

SEQ ID NO: 20615 - RNA, 108 nt, Homo sapiens
ccagccgcggagccaccaccaccagcagcgccccacggccaccaacaggcccagacccagagacacacccgacgagaggccgggacaccagaggaagaaagcaggcgg

SEQ ID NO: 20616 - RNA, 59 nt, Homo sapiens
aaacagaaaacgacacacagcgcaagcgccaaaaggaaacacggaagaccacaacacac

SEQ ID NO: 20617 - RNA, 73 nt, Homo sapiens
caggccgccaccgaccagaacccgccccaccccacagggggaaaacccaaacaagggggagggaggcagcggc

SEQ ID NO: 20618 - RNA, 58 nt, Homo sapiens
gaggcacgccggggcgccgaccagccggagacggaccgcagcaggcccgcgcgggagc

SEQ ID NO: 20619 - RNA, 73 nt, Homo sapiens
acaaccaaacaaaccggcaacacaaacaaaagaaccagagcgaaaaagaaaagcagcaccgcagaaacaaaga

SEQ ID NO: 20620 - RNA, 66 nt, Homo sapiens
gagaaggcagccaaacagaaggagcgaccacacagacaggaaaggccgcaggagggagagacagag

SEQ ID NO: 20621 - RNA, 69 nt, Homo sapiens
caacccccacagaagggagacagggagaccaccaaaaaacgagcaagaagacaaacaagggaaggccgc

SEQ ID NO: 20622 - RNA, 77 nt, Homo sapiens
cgccgcggaagcagaggggggacgagggccagagcccaaagcacccagggggcgggaagcgccgacagacaaggacg

SEQ ID NO: 20623 - RNA, 69 nt, Homo sapiens
cagaacgaggcgccccaggacagccagccgcggccggaaacacccaaggaaccaaagcaggccagcaga

SEQ ID NO: 20624 - RNA, 58 nt, Homo sapiens
gagggacccacccggcgaagccgggagcaccgacgccgcggggccagccggaaacagc

SEQ ID NO: 20625 - RNA, 73 nt, Homo sapiens
cggaagaaacgcacacgaagaacaagaaaaagcacaagagcaccaacgaggcacagcagagacaaccaggccc

SEQ ID NO: 20626 - RNA, 63 nt, Homo sapiens
ggagagagaacggcgagggggaacaacaaggcgacgcaagagacaggagcacccacgggagac

SEQ ID NO: 20627 - RNA, 88 nt, Homo sapiens
cgcggaggcagagaagggaacgcccggcccagccccgcccagaagaggccacaaggaagaagcagcagcgccaaggacccgcaagcgc

SEQ ID NO: 20628 - RNA, 86 nt, Homo sapiens
caagcagccaccgccgcccaacgccgcccgccaccaccggagccagggcccaaaagcacaagaacggaggcagaagacgaggcaga

SEQ ID NO: 20629 - RNA, 77 nt, Homo sapiens
aaaagagacacaagaggaagcacgcaggacacgcagcggccgaggcaggggaagagagcggccccggacacgcgagc

SEQ ID NO: 20630 - RNA, 119 nt, Homo sapiens
cgccccgcgagcacagagcccgccgccgaccgccgcccgccacacccgccgccagggcagcgggggcagagacggggaacagggccacccacacggacgccaacgcgggggcagaaccg

SEQ ID NO: 20631 - RNA, 69 nt, Homo sapiens
caccggcaagcccggggcacgcgaaggaaagagaccaaccgccacaagcaccacgcaaaaggccaaaac

SEQ ID NO: 20632 - RNA, 60 nt, Homo sapiens
cagcccccagagcggaacacagaaagcccaacagaacccccaaaggggcgaaggacaaag

SEQ ID NO: 20633 - RNA, 67 nt, Homo sapiens
ggagccgcagagggcccacggggaagcgagagaggaggggcgagacccagaaggaacggcgcaccac

SEQ ID NO: 20634 - RNA, 78 nt, Homo sapiens
ggcgcagaccgagacccggacagggcaggaaacaggagaaaaggacgacggaaccaccacgaaaaaaagcacacccaa

SEQ ID NO: 20635 - RNA, 56 nt, Homo sapiens
gccaaggaaaaacggagagccacaaaaaaggaagcgaaaaaaaagagcgggacccc

SEQ ID NO: 20636 - RNA, 80 nt, Homo sapiens
gcggccaaaggggacccggcgcagaagcaacaggcgggcaccgagaaacaccccacagaggaggccgagcagaaagacag

SEQ ID NO: 20637 - RNA, 82 nt, Homo sapiens
gcggagggcaaggcccagggggggagaaccaggggcaacaccggaggacagcaacccccaccgaacaaagaaggaaaaagcg

SEQ ID NO: 20638 - RNA, 75 nt, Homo sapiens
gcaaagcccagcagcacaagcaccacggaggccaccaggcaccggacagggaggaaccggccagcgggaggacag

SEQ ID NO: 20639 - RNA, 58 nt, Homo sapiens
cagcccggcacggcggaggagcgcgggcccgcccgaggcgggacaccacaagcccagc

SEQ ID NO: 20640 - RNA, 63 nt, Homo sapiens
ccgggcagccgccacacaaccgagcaaaggaaccccgagagccagccagacgccaggacccac

SEQ ID NO: 20641 - RNA, 57 nt, Homo sapiens
ggaaacaccacgaagcagccaagaacgccagaacaaacagcgagaaaaccgacccgc

SEQ ID NO: 20642 - RNA, 84 nt, Homo sapiens
gcgggaagaggcggcgccgccacccccccccagcaggaaccagaggacccacaggagggcagacagcgaggagacaaaagagaa

SEQ ID NO: 20643 - RNA, 84 nt, Homo sapiens
cgagcgagcgcgcgcgcgaaaacccgggcaggcccaccacaaccaagcgagaggacccacgcccccagccgaggagcccccccg

SEQ ID NO: 20644 - RNA, 70 nt, Homo sapiens
gccgagcggggaccagcagacaagagaaacaggccgaaaagaaacccagaccaggacccgaaaagccagc

SEQ ID NO: 20645 - RNA, 73 nt, Homo sapiens
cggcgcgccgcggcccggagcgcggcccgaggcccgcccagagccaggaagacggccgcccccgaccccacca

SEQ ID NO: 20646 - RNA, 46 nt, Homo sapiens
gagaaggaccaagaaccaggaccgcccccaaaccccccgaaccgag

SEQ ID NO: 20647 - RNA, 63 nt, Homo sapiens
ccgacaccagccaggagacgccgcaaggcaggacaaagaaggagagaaaggagcaacaaggag

SEQ ID NO: 20648 - RNA, 76 nt, Homo sapiens
gaccgcacgggccacccaaaacagaggaagaggcaaagcagacacccggaccaggacaacccccaggcggggcccg

SEQ ID NO: 20649 - RNA, 70 nt, Homo sapiens
cagcagaagggggacgcccaacaacacaagaggcagcagagagcacaaagacaagcaggcgcggcaggac

SEQ ID NO: 20650 - RNA, 73 nt, Homo sapiens
acggcacaccgaccgacggacccccagaggaccccaacacccacccccgccgggaccccgcggacacgggaca

SEQ ID NO: 20651 - RNA, 78 nt, Homo sapiens
agccacaaaggaaagggaggaggcggcgggacgagaaggagaaaacccccgaaacagagaaaccagccagagggacca

SEQ ID NO: 20652 - RNA, 67 nt, Homo sapiens
agcgcagaccaccaaacccaggaggagacccccggaaaaccccccccgccaaggacgacagaggggg

SEQ ID NO: 20653 - RNA, 82 nt, Homo sapiens
gagggcacgcgaggagcagcccaggaggaaaggaggaggccccagggagcgagccgcacaagggaaggggaacggcgaggga

SEQ ID NO: 20654 - RNA, 74 nt, Homo sapiens
cacaaggcccagccacccccggccaagccagaaggggaaaagccgagaaaaagcgaacaaggggccgaagacaa

SEQ ID NO: 20655 - RNA, 61 nt, Homo sapiens
ccaacacagagccaagcgccaagggaggacgcgagcggaagagaagcaaaaagacaaggag

SEQ ID NO: 20656 - RNA, 103 nt, Homo sapiens
aggccgccgcgcgcgcgcgccggacccgcgccccgccggcccggccgggcgggcggcccagaacaagcacaagcccggcggagcccaccaccacggcaagcac

SEQ ID NO: 20657 - RNA, 70 nt, Homo sapiens
gcaaggcccacccccacaaggagggcaaggcccaaggacacagcggggagaacagagaagcacaaagacg

SEQ ID NO: 20658 - RNA, 57 nt, Homo sapiens
ggaccgagagcggaccgagagcgcgaaacgcacgagaagagggcagaaaggacagga

SEQ ID NO: 20659 - RNA, 77 nt, Homo sapiens
gggaggcacagaaacgacgggcacacggagggagaacgaggaccgggcaaggagggacagcccgaccaagcccggag

SEQ ID NO: 20660 - RNA, 84 nt, Homo sapiens
gcgaggaggaaaggaggacgagagccaggacaaaaccaggcagaaccaacacgaacccaagcacaaacaagaaaacgagcaggc

SEQ ID NO: 20661 - RNA, 78 nt, Homo sapiens
ggcccggaggcggcgggacagagcgccgcgaccccagcgggcccggggaggcaccgacgaggaggacacgggaggaga

SEQ ID NO: 20662 - RNA, 81 nt, Homo sapiens
cgccgcgccccgcaccccccgagcagcccggggaccagcacgcagacgaacggcgcgcccaaaggaaaccccaaggccgcc

SEQ ID NO: 20663 - RNA, 72 nt, Homo sapiens
cagacggcagagcacagacgaggccaacgcggcgaccggcccgaggaccgccgcacgaccaaacgcagaacc

SEQ ID NO: 20664 - RNA, 78 nt, Homo sapiens
gacacgcggaaggcaaccaacacggggcaggaagagacgaagagacccaaaggggaaagaaccagacgacaggaaggc

SEQ ID NO: 20665 - RNA, 70 nt, Homo sapiens
acacaggcacaccgcacaagaaagcggcagcccagaaccggaagcgaccacggacacaaacgccagagaa

SEQ ID NO: 20666 - RNA, 70 nt, Homo sapiens
ccggcgcggagaggaagccagccaccagccaggagcccaaaaggcagagcgaggagagaagaaggaggga

SEQ ID NO: 20667 - RNA, 55 nt, Homo sapiens
gggcccgacaacggcacgcaaggaggcggaaaaaacaaagagagggggcccaaaa

SEQ ID NO: 20668 - RNA, 86 nt, Homo sapiens
ccgcccgccacacccgccgccagccacacccaccgcccgggcaggccacggcggagagggccgggcgcgcaccccgaacccggccg

SEQ ID NO: 20669 - RNA, 78 nt, Homo sapiens
ccccgcgcgaccaggcacgccggagccggccgaccgcaccacaagggcaaggacaaaccggcgaccacacacggggac

SEQ ID NO: 20670 - RNA, 55 nt, Homo sapiens
agcaaaaggaagccaggaacagaacgaacagggaacaggcaggacgaaggccaac

SEQ ID NO: 20671 - RNA, 85 nt, Homo sapiens
cacaaagccccccggagacgcaaccaaggagggggaagacagagaagaccacacaaccgaaggggccgggcaggacggcccgggg

SEQ ID NO: 20672 - RNA, 70 nt, Homo sapiens
cggccccagccaccccccccagcgccagaaccacggcgggcagacgagccccgacacacaaccaagacgc

SEQ ID NO: 20673 - RNA, 76 nt, Homo sapiens
cgaacgggaccagagggggacagcaaaacgggcaggaggccacaaaggaggaaggaggaaaaaaccccagggggga

SEQ ID NO: 20674 - RNA, 74 nt, Homo sapiens
ggcagaacgagcccaggccacagacccacacgccggcggccaagaagaagaggaagccgaggaaagacaggaag

SEQ ID NO: 20675 - RNA, 75 nt, Homo sapiens
gccgcgccccaccgcaaccggaggcaagcaccaagggcagggcgaggaaaggagacggcaccaaccaaagggagg

SEQ ID NO: 20676 - RNA, 78 nt, Homo sapiens
cggcgggcggggcaccccaggggcaagccgggagaggaagacacagagaaaccaaagccacaaagacagacaacccac

SEQ ID NO: 20677 - RNA, 52 nt, Homo sapiens
cggaccccagcgccgggcagcgacccaagcccaggaagaggaaaaaccccgc

SEQ ID NO: 20678 - RNA, 73 nt, Homo sapiens
ggaaaggaggccggaccgaggaaccaccaagaggcaacaaccgaagcggcagccaaaaccgggcaccgagagc

SEQ ID NO: 20679 - RNA, 85 nt, Homo sapiens
cccgaccagcagcccccaaagccgggcccccaggccggccgcagcgcagcccggggagccagggcagaaacggaagagaccaccg

SEQ ID NO: 20680 - RNA, 73 nt, Homo sapiens
gcggcgcggacggggcgggccccccaccgaagacaagcgagagcggcaccaaaggcgacacaagcccgggcgg

SEQ ID NO: 20681 - RNA, 67 nt, Homo sapiens
agaaacaggaagagccaggggcaccaccgcaccaccccggaaaggcagccggccggcccagagaaga

SEQ ID NO: 20682 - RNA, 75 nt, Homo sapiens
gcggagagagaggcaaaaaaagggcacagagcacacagggcaagccagccagggcagcagcaaggagaacaccag

SEQ ID NO: 20683 - RNA, 81 nt, Homo sapiens
aagagggaaaaggcaaccgccaagaccaggcaccccagccgcggccaggcaggggcaggagccacgacgccccagcggcgc

SEQ ID NO: 20684 - RNA, 78 nt, Homo sapiens
acaaggacagagcacccaccacaggagcggcggaggcaggacccagaccggacgggaacggggaccgggacagccacg

SEQ ID NO: 20685 - RNA, 78 nt, Homo sapiens
cggcaccaacacgcggagcggaagacggcaacccagggaaaaaacagcgggccacacaaagccgggagcccacaggac

SEQ ID NO: 20686 - RNA, 69 nt, Homo sapiens
gcacaggccagggaccaagagaccggggagcgacagagacaacgacagagcacgagccacgaccaggcg

SEQ ID NO: 20687 - RNA, 53 nt, Homo sapiens
aaagaggaggccagagcggcaacagcgcgaagcggacaagcacaaaacacaag

SEQ ID NO: 20688 - RNA, 72 nt, Homo sapiens
cgagagccgcccgggccagcggccgcgcacccccggccggaggcaccagcccgaacggaagagggcagagag

SEQ ID NO: 20689 - RNA, 88 nt, Homo sapiens
cccgccccaagccccaccacccgcagccggggaggcaacggagcgaaaccagcgacagcggccaagcggacccggaaggacaacggcc

SEQ ID NO: 20690 - RNA, 74 nt, Homo sapiens
ccaacgcacgcgccggagacagggagaccaagagacagacaccgccccgagacgaggagcagaaaagcccaaaa

SEQ ID NO: 20691 - RNA, 81 nt, Homo sapiens
cggagccgccggcccggggccccacaccaacggcagcaagccaacacgagggagcggcaagggagaaaagagacacaaggc

SEQ ID NO: 20692 - RNA, 92 nt, Homo sapiens
cagagggacccggacaaccagaggcagccagcagggggagccgccaggagcaaggcagcgacccagggcacagcggggcacagcccccagac

SEQ ID NO: 20693 - RNA, 68 nt, Homo sapiens
gggagagggaagaaccccagagcccaccaacagcaccaggaagcgggaggcggagagcaaggaaagag

SEQ ID NO: 20694 - RNA, 85 nt, Homo sapiens
cagaccgaagaagcaagccaagacggcccacgagaaccgaagcaccagccgggaggcgggaagacaacgaagagaggaaagaagc

SEQ ID NO: 20695 - RNA, 71 nt, Homo sapiens
agccgcagcggaaagcaggagcacagcgccccacacccacgcggggcaccgggacgaggcggaggcacagg

SEQ ID NO: 20696 - RNA, 58 nt, Homo sapiens
gacgaggagggagacggcggacacacggaggcgcggggccaggcgcgggccaccccac

SEQ ID NO: 20697 - RNA, 79 nt, Homo sapiens
gccgggggccaaccgaggagccacgcagcagaacaccgagcagaggcaaccaaaggggagggaaccgaagggcacggag

SEQ ID NO: 20698 - RNA, 66 nt, Homo sapiens
caaagggagaaacagcgaagaagcgaaagaacggggcagaaagcggaagcgaaggagaggaggcgc

SEQ ID NO: 20699 - RNA, 68 nt, Homo sapiens
gccaaaaggcagcaaaggcgagcaaaacaagagaacacacggaccaaaggcgcacccgagacgcccac

SEQ ID NO: 20700 - RNA, 39 nt, Homo sapiens
ggggccgggagggcgccaggaaggaaaacacccggcagg

SEQ ID NO: 20701 - RNA, 43 nt, Homo sapiens
cgcgccgcgcccggaccccaggccgggagagagcgcgaaccgg

SEQ ID NO: 20702 - RNA, 80 nt, Homo sapiens
cggccgcacgcggggcgcgcccaagggcaacaacacggcaccacacaagcgaagaagccgagaaaccagccacgcagaag

SEQ ID NO: 20703 - RNA, 67 nt, Homo sapiens
agagcaggcgaagacaacaggaaggaaaacagaacccacgcggaggaaagaaaaacccggcgggagc

SEQ ID NO: 20704 - RNA, 94 nt, Homo sapiens
cgaaggggcagaggccaagagcccaacaccacccgagagccccaaggaaaaccagagacccagacacgcgaaggaacgaaaggccaaaaggcaa

SEQ ID NO: 20705 - RNA, 59 nt, Homo sapiens
gccggggaagaggcccgcccagcgaccaggagaccagcacccaaagacagacgaggcca

SEQ ID NO: 20706 - RNA, 71 nt, Homo sapiens
aacggaaagcgaaggaaagagccaaagagggaagcccaacccagaaaggcggagcaggagcaaaggagcaa

SEQ ID NO: 20707 - RNA, 75 nt, Homo sapiens
cgcgcgaaagcaaccagaaaagagacccggcagacaagacgccggcaagagaggaggggacacaaaggaagaggc

SEQ ID NO: 20708 - RNA, 56 nt, Homo sapiens
cgagaacggagccagcaggaaaggggcagcaagcacaaccaagcagaagagagagg

SEQ ID NO: 20709 - RNA, 86 nt, Homo sapiens
agcacgaggggcgaaccacggaaaggaggaagaagacaccggggacagacagggccggggggggcacagagccccggaagacagcc

SEQ ID NO: 20710 - RNA, 68 nt, Homo sapiens
acacccaaaagagcacagaaccaagggaagagaacacacggaccgagagagacaaacagcaagccgcc

SEQ ID NO: 20711 - RNA, 80 nt, Homo sapiens
gaaaaaaaccccgaagaagaggggaaggggagagcccagggaaggcgacgaggcaccaaaaaggcccacccacccaagaa

SEQ ID NO: 20712 - RNA, 64 nt, Homo sapiens
ggaggaccgcccacagagaagccgcacccggaggggagccacggaccagggggacggcgacagc

SEQ ID NO: 20713 - RNA, 61 nt, Homo sapiens
gccaaccaccccaggcgcaggcccggccaacgcaacagggagcccacgcaagaggggccgg

SEQ ID NO: 20714 - RNA, 81 nt, Homo sapiens
cgagggaagggaggcggcggccccaaaaacaccgggaacgacgaggggagagaaggaggagaccgcgacggcccaacggag

SEQ ID NO: 20715 - RNA, 51 nt, Homo sapiens
gaaggaccaagaaccaggccgagacgcaacagagaaacgagaagagacaga

SEQ ID NO: 20716 - RNA, 67 nt, Homo sapiens
gaacaaaacagaagaaagcagaaaaacaaaaggagcagcagaagccgaccagaaaggccacccacaa

SEQ ID NO: 20717 - RNA, 63 nt, Homo sapiens
cgcagccagcaccagcgccaggacacagaaagggcagcaagacacgaagccgagaaagagcag

SEQ ID NO: 20718 - RNA, 70 nt, Homo sapiens
gccaagcgggaaacgggcgcagagcaaccagcccgccgaaagcaaggcagcagacaaccaccggaaagcg

SEQ ID NO: 20719 - RNA, 83 nt, Homo sapiens
aagaagaaccggaggaggaagagcgcacaaccaagagggcaaaaacgaaagcaacggagccagcggggaggggagaggcacac

SEQ ID NO: 20720 - RNA, 55 nt, Homo sapiens
ggggcggggggaacgaaggggcagaccaacaccacccagcaaaaaccccgacgaa

SEQ ID NO: 20721 - RNA, 81 nt, Homo sapiens
gcccaggcggggccgagcgacacgcagcgaggagccacgaggaaccaaaagaacagaagagaagaaccacccacagaacaa

SEQ ID NO: 20722 - RNA, 86 nt, Homo sapiens
accacgacgaggccggggcacgaaggcggcaagaggagaagacagagaaaggaaggcggagacaggcagaagagcagaaagaggga

SEQ ID NO: 20723 - RNA, 72 nt, Homo sapiens
gacggcggagggcccgggccccagcgcaaagcccaaggccacaccaggacccagcacgccccgggggcaaga

SEQ ID NO: 20724 - RNA, 82 nt, Homo sapiens
gaaggggagggccagcccgcgaaccggccggaggccacaagggagcaccagccgaagcagaagcgcccagacccaagggacc

SEQ ID NO: 20725 - RNA, 78 nt, Homo sapiens
cgagcccgaagcacgggcagccagcccaagacggacacaaccccgaggggcaagaccggcagagccaagcacagacaa

SEQ ID NO: 20726 - RNA, 77 nt, Homo sapiens
ggagggcacacgggggggccgggcacccccagggggccacagcgcccagccaaagaaagagaccaagcgagacggcc

SEQ ID NO: 20727 - RNA, 60 nt, Homo sapiens
cgccgcgcccagcagccgacagaccaggaccgccgggcaggacacgccccgacaggccag

SEQ ID NO: 20728 - RNA, 81 nt, Homo sapiens
cggagccccggcgggaggccagcccaagcggccaggcgagggaccagcgaggagccgcaccgacacagaaacgaaggagaa

SEQ ID NO: 20729 - RNA, 114 nt, Homo sapiens
gcgggcggcccccgcgcacaagccaagaggaacacacgggcgcagggaccgcgggcagcagaagcaaacgcaccaaaaccaccacgggggagaagcacgcaccagagaaccaca

SEQ ID NO: 20730 - RNA, 63 nt, Homo sapiens
cggcgagagaggcaggcggagccgaccgggccaggggggcgcacacgcagaaagaacagcgaa

SEQ ID NO: 20731 - RNA, 77 nt, Homo sapiens
cagaacagacaaggggacacgggcaaggggggccacaccgaaccagcacgggaggcgaggcagaagaacacgaggaa

SEQ ID NO: 20732 - RNA, 79 nt, Homo sapiens
ggccagcgcgccggagggcgggccggcccgcgacacggacacgagaaagggaaagggagcagcaccggccacacccaca

SEQ ID NO: 20733 - RNA, 39 nt, Homo sapiens
ccacacccccccgggggggaggccaacacaaaggaggag

SEQ ID NO: 20734 - RNA, 67 nt, Homo sapiens
ccaagaccgcagagaagaacaaacagcgcaaacggagggcacaggaaaagaccccacaagcaaggac

SEQ ID NO: 20735 - RNA, 74 nt, Homo sapiens
gaagaaagagccaaacgccaaggcggcagggggcaagccgagcggcaacgaaacaggagccacccaaacagcaa

SEQ ID NO: 20736 - RNA, 78 nt, Homo sapiens
acgcaggaaccgggcgcgaagcagcagaccgacccgaacaaggccaacaccagcaggggagaagccgaggacgggcca

SEQ ID NO: 20737 - RNA, 89 nt, Homo sapiens
caaaaagcggagaagaggggccaggaagaacacgggcacacagggaccaagaagccccggggacacgcgagaaaagacgccgaagggaa

SEQ ID NO: 20738 - RNA, 69 nt, Homo sapiens
gagaggaggcggagaccacccaaaccccccaagaagacgaccaagcgggcacaggccagcacaagaccc

SEQ ID NO: 20739 - RNA, 77 nt, Homo sapiens
caagccagaaaacagaaacgaaacagaacagagagaagcccagcccacacagcccagaggaggggggaagcccaggg

SEQ ID NO: 20740 - RNA, 34 nt, Homo sapiens
accaagggaaacacacggagacaagcaccggcac

SEQ ID NO: 20741 - RNA, 53 nt, Homo sapiens
acggacagacccacaacaccaggcgccagggacaaaaacgaacagaagaggac

SEQ ID NO: 20742 - RNA, 78 nt, Homo sapiens
ggaccaggcccgggggcggcggccacgccaaggacggaaagggccgaccacccaggcggacaggcgcggaagggacac

SEQ ID NO: 20743 - RNA, 82 nt, Homo sapiens
aaccagaagcgagagaaaagcccccaaaagcagcacagcccccacccaggaaggaacaaccccacaccaccacacagcacca

SEQ ID NO: 20744 - RNA, 75 nt, Homo sapiens
gccgcgcgaggccggcacggggccacgcggagaagacccagggcccccagccggaaaacgaggccgaaagacggg

SEQ ID NO: 20745 - RNA, 76 nt, Homo sapiens
aagagacaacaaacagagagaagagagacacacaaagagccagaaggcagacaccccagcgcaacaaaagagcgga

SEQ ID NO: 20746 - RNA, 81 nt, Homo sapiens
ccccggaccacaaggcagggagaggaggaaagagccaaccagacagccaggaagacccccgagaagacaaaaaaacaggaa

SEQ ID NO: 20747 - RNA, 74 nt, Homo sapiens
ccagcgaagaagaaaaccaggaaaaaaggcagcaaacgcagaaaacagacaccaagaggggaaccacccaaaga

SEQ ID NO: 20748 - RNA, 59 nt, Homo sapiens
aaaggcgagaagcagaccacgcaacaagccacaaggaagggagcccggaaagcacacaa

SEQ ID NO: 20749 - RNA, 80 nt, Homo sapiens
ggggccgagggcagggacggggacacgcgacgaggcccgccaagaggcgccgcaggaggacgaaaaacggaaacgccgga

SEQ ID NO: 20750 - RNA, 72 nt, Homo sapiens
ccggcccccgccccagcccgccggcggcggcggacggcccgccacgggccccgcagccgcgcccgagcgccc

SEQ ID NO: 20751 - RNA, 77 nt, Homo sapiens
ggcccggcccgacaccgcgggccgccagacgggaaggcacgagccagggagccgccgggaccggcccgggagacgac

SEQ ID NO: 20752 - RNA, 72 nt, Homo sapiens
cgagccagagcaaaaccagcccagagaacaagagcggccaccacgaccagagggccgaccagccggaaaacc

SEQ ID NO: 20753 - RNA, 86 nt, Homo sapiens
accagccgcggagccgggggcagggaggggggaagacagggcccagcaccacaggacgggccgggaagccgccagcagggacagcc

SEQ ID NO: 20754 - RNA, 66 nt, Homo sapiens
accagaagcccccagcgggaaaagagcacccaaggacgcgggaagggggggagggggacaagccga

SEQ ID NO: 20755 - RNA, 74 nt, Homo sapiens
aacgccacgccccccgcccaggccagcaacacacgggcaccagggacggagcaggcgggccacgggagaccacc

SEQ ID NO: 20756 - RNA, 75 nt, Homo sapiens
agaaaaccagaagccccggaacacaagcaagcgagcaggcagcagcaaagagagacacggccaaaagaagaccca

SEQ ID NO: 20757 - RNA, 75 nt, Homo sapiens
gccggggccagggcgcccccgcaggggacggggcccgggcgcaaggacagcccaaggaggcccgggggaggcggc

SEQ ID NO: 20758 - RNA, 57 nt, Homo sapiens
cgccaagcacggggggcaggccaccgggccagcaccccaagccaggccagcccaggg

SEQ ID NO: 20759 - RNA, 80 nt, Homo sapiens
gacggcggacgcagcggcgggggcgcggcaggagggaaagcaaggaaacgcccccccagaggcccagacggccaaaggag

SEQ ID NO: 20760 - RNA, 84 nt, Homo sapiens
acagcggccagcgcgggcgcggccggagaccgggggcccccgggccgccccccgggccaagaccacagccgggaccgcggcacg

SEQ ID NO: 20761 - RNA, 82 nt, Homo sapiens
acaacggagaccagaccacgcagccacgcgggcgagcggcggggagcggcgaagccgcgggcgagaaaaaggcacaaaccca

SEQ ID NO: 20762 - RNA, 73 nt, Homo sapiens
agcaggaggggggagcggccaacccaagggccccagcccgggcccccaacgaggaagaagagagggcgaagga

SEQ ID NO: 20763 - RNA, 73 nt, Homo sapiens
cacgcggaaccgaaaaacaagaaggaaaaacgccacgcaccggagagagcacagcagggccgggaccgaagcg

SEQ ID NO: 20764 - RNA, 81 nt, Homo sapiens
gcagcacgggcccaggacacagagccaggcaggcacggcaaccaggaggaacagcacagcagcgggccggaaaagcgagcg

SEQ ID NO: 20765 - RNA, 72 nt, Homo sapiens
aagaagccagcgagcggggcgcgcggccagaacagacagccacgcagacggaaacaaggcaacagaaagagc

SEQ ID NO: 20766 - RNA, 74 nt, Homo sapiens
gggaaggccagcagcgcgcggagaagaacggggagccagggggggccccagcccggccgaacgggcgcacgaca

SEQ ID NO: 20767 - RNA, 81 nt, Homo sapiens
cccgcccagcaggcccggaggacccaagcccggcgggcagacaagcgccggaggacaccacggagaggagaacgagcaagc

SEQ ID NO: 20768 - RNA, 79 nt, Homo sapiens
aacgaacgaaaaaaccagaacacgccaagcggcggagaaaccaccacaaacacgaggccagcaacgaccaacaagacag

SEQ ID NO: 20769 - RNA, 44 nt, Homo sapiens
ggccaccacgagacccggcgagccccccacacgcgcgcgggaac

SEQ ID NO: 20770 - RNA, 70 nt, Homo sapiens
acacaccgccccagagaccccggaaaaaaccaaaacagccacgagaacaccccagccaccaggacaggaa

SEQ ID NO: 20771 - RNA, 67 nt, Homo sapiens
ccaagccggaagaaccgcagccgagcggggccggccacaggggaggccaggggagagaacagaccac

SEQ ID NO: 20772 - RNA, 68 nt, Homo sapiens
acaggcaacacaaaaagaccaaagacaccccagcaagcagaagagacggcaagcaggaaacggaggac

SEQ ID NO: 20773 - RNA, 68 nt, Homo sapiens
agagaaagggcaacacagagacaaaaacaggagaaggaacacaaagggacgaaacaacaacaggccca

SEQ ID NO: 20774 - RNA, 73 nt, Homo sapiens
cgccagccccccggaacccgcacaaagaaggagccaccgccaagcgaagggcggacaagcggagaaaggcaca

SEQ ID NO: 20775 - RNA, 102 nt, Homo sapiens
cacaggaggcgcggaggacgccccaccgccgacgcccccagccaccagaccccgaccggagcagcggagccgcggaagagggaaagcagaagagacccgcag

SEQ ID NO: 20776 - RNA, 63 nt, Homo sapiens
cccggggaacaaagcgggaaagccaagagcacaggacccgaaggcaccgccccaggacaacgg

SEQ ID NO: 20777 - RNA, 75 nt, Homo sapiens
gaaggcaggcaccacaaaaaggacagagggcccagaccgaagccaaccccgcccacagaagccaagcccagggcg

SEQ ID NO: 20778 - RNA, 91 nt, Homo sapiens
caggggcagggcgggaaggaagaccggcgcggggcacaggaccggagcggagcccccaggaggaccgcgccaacaggacgaggagaccgac

SEQ ID NO: 20779 - RNA, 65 nt, Homo sapiens
agccaccaggagaagcaaaagagggggcagacccaaaggaaacgcacgaaagaaacaggagagcg

SEQ ID NO: 20780 - RNA, 85 nt, Homo sapiens
gccgggaccaagaggcgacaggaggaagaccaccggcccgacagacccccagggaaagcgcaagacggagccaaaggaacaccgg

SEQ ID NO: 20781 - RNA, 82 nt, Homo sapiens
ccagcaccacagcccgcagccccgccagccacccccaggacgaccacgagcagagcgagaaaagaccagaagacacaagaca

SEQ ID NO: 20782 - RNA, 63 nt, Homo sapiens
gggcgccgcaaaaggaggccacaaaaccgaggggaaagagaccgggccgacgggcgggaaaga

SEQ ID NO: 20783 - RNA, 36 nt, Homo sapiens
cggaagccagcaccaggagcgacacacgaagagaag

SEQ ID NO: 20784 - RNA, 35 nt, Homo sapiens
agacagggaggaagcggcggaggcagggggacccg

SEQ ID NO: 20785 - RNA, 32 nt, Homo sapiens
agcggacccggaccggggacggagcaccgcgc

SEQ ID NO: 20786 - RNA, 55 nt, Homo sapiens
gcaacagccagcaacacagaaacaggaagcgccaaaaggcagggaaagcacgacg

SEQ ID NO: 20787 - RNA, 79 nt, Homo sapiens
ggaggaggaggaggggaggcgcccccggagccgccccggaggagaagacacccagaaagcagagaaaggaaaaccagaa

SEQ ID NO: 20788 - RNA, 65 nt, Homo sapiens
acaccagcgcaaaggggaggacagacaaacagaacgagagccacaggagcacagaccaacagaaa

SEQ ID NO: 20789 - RNA, 81 nt, Homo sapiens
gcggggaggccgcccggcgcagcggggaccggcggcggcgcccaggcacccggcccgggcgcgagaaaggaccaacgaccc

SEQ ID NO: 20790 - RNA, 84 nt, Homo sapiens
ccaaggcgcgccaccccccggaggcgacaggggcacccgggaccgcggcgagaagccccagcgcacacgcggcaagacagccgc

SEQ ID NO: 20791 - RNA, 84 nt, Homo sapiens
ggcccccagcgcgccgcagaagaaagggcaacagcccggcggaggccggaccaaccgcgaaaagaaccacaacagcacaagcca

SEQ ID NO: 20792 - RNA, 76 nt, Homo sapiens
cgggggcacaccggagcacggacaaggcagcaagaccagacgcaaggaggggcaaaggcaccagcgaccgagggcg

SEQ ID NO: 20793 - RNA, 81 nt, Homo sapiens
ccgagggcgggacacagaagaaagcgacacggcgcgcagcggcgccaaagaaccacaaccggggacaagccaccagaaccg

SEQ ID NO: 20794 - RNA, 62 nt, Homo sapiens
gcacaccccggagaaaccagaggccaaggacaagggcccacgacgaaagggaaagaaaagcc

SEQ ID NO: 20795 - RNA, 110 nt, Homo sapiens
caggaagagggacggaaccaccagaagccagcccccaggcggaacgcccgccccgcagagaggggaagcacgaaaggccagaagaacagcacccgaagaagaagaaggca

SEQ ID NO: 20796 - RNA, 67 nt, Homo sapiens
gcgccgcgccccggccggcacaggggaggccgaagacagcaccacaccagcggcgaaagacgaggac

SEQ ID NO: 20797 - RNA, 71 nt, Homo sapiens
gacccaaacggaaggaacggaggcggaaaagcagaacagccgcggcccaagaacggacgcacacagaggca

SEQ ID NO: 20798 - RNA, 60 nt, Homo sapiens
ggggaacgcacaacggcaaaaggacggccagcagaagcaggcgagccccccgagaaaaag

SEQ ID NO: 20799 - RNA, 72 nt, Homo sapiens
gccagcccccccaccaacgaccagacacggaccggcaccgccgcgacgcagagggacaggagagacaacgga

SEQ ID NO: 20800 - RNA, 81 nt, Homo sapiens
aaaaccccgaggagcccgccaaagccccggaccgccaagaagacgcccccgggccaaacggcagcaaaaacagacagaaag

SEQ ID NO: 20801 - RNA, 71 nt, Homo sapiens
ccgccagggcccacacccccccccccgacaggcaagaagcagagcgcagaggaccaagacacaaaagagaa

SEQ ID NO: 20802 - RNA, 52 nt, Homo sapiens
caggaggacgagcaccaggacacgggcggagccaggcaacgagggccaaccg

SEQ ID NO: 20803 - RNA, 59 nt, Homo sapiens
ggaccacaagacaacgcggagcggcgaagagcaaccagaaagggacagaagacaacaga

SEQ ID NO: 20804 - RNA, 73 nt, Homo sapiens
gcaggaggcaagaaaggggaaccccggagaaaaggccaagaaggcaggggcagcgccccccgaaacaagacgc

SEQ ID NO: 20805 - RNA, 70 nt, Homo sapiens
gccgccgggagccagaagcacaggcccgggcgaaggggccacgcgagacaaggccgcagcacagccacca

SEQ ID NO: 20806 - RNA, 69 nt, Homo sapiens
ccgcccaagcagcccaaccccagaggccaagggaggaccacaaccagcgcgaggggcccggggcgcccc

SEQ ID NO: 20807 - RNA, 45 nt, Homo sapiens
ggaaggcaacggcagagacacacgccagacacgacccccaggcgg

SEQ ID NO: 20808 - RNA, 85 nt, Homo sapiens
ggcagacaaaagggccaaagaagggagagaggacggaaggcgaccacaccaccccagacacggccgaccgccaagcacaacgcca

SEQ ID NO: 20809 - RNA, 37 nt, Homo sapiens
ccagccccgagagcagaacacagagacagagcgcagg

SEQ ID NO: 20810 - RNA, 87 nt, Homo sapiens
ggaaaggaccgccaccccccgcgcggcgggggacgcggaaccagcggagaaacgcgagagagcagcaagagggcaggaggcgggagg

SEQ ID NO: 20811 - RNA, 54 nt, Homo sapiens
gaaagagagagacagaagccacagagggaacaggcacgccccacccgccagccg

SEQ ID NO: 20812 - RNA, 38 nt, Homo sapiens
ccccccccgcccccacaagcacggggcgggaggcggac

SEQ ID NO: 20813 - RNA, 64 nt, Homo sapiens
ggccacaggaggcagaaggaaccgaagaagacaggaaaacgcagcgcgcacaggagggaaaaag

SEQ ID NO: 20814 - RNA, 83 nt, Homo sapiens
ccggccagcccccggccgcggcgggacccgaggagccagcagcgaccacccgagaacggaagggaaaggcagaggccagcagc

SEQ ID NO: 20815 - RNA, 80 nt, Homo sapiens
ccccgcgcccccgggaccggcagcaagccgcacaggaggagagaagaacgggagaggggagggggaccaggggcagaggc

SEQ ID NO: 20816 - RNA, 77 nt, Homo sapiens
caggagccgaccgaaccggccaagagacacggaagccggcccaagggggagcacaaagagcccggcccgccaccacc

SEQ ID NO: 20817 - RNA, 72 nt, Homo sapiens
cccaacaccagaagacacacagggcacaccaaggcaggaaccaacgacaagagcagcaggggcgcacccaaa

SEQ ID NO: 20818 - RNA, 73 nt, Homo sapiens
cgcgccaagcagccacccaccccaagggccgccagccaggcaaagaagaggacccagccaggaaggacaccca

SEQ ID NO: 20819 - RNA, 79 nt, Homo sapiens
gcagcggccaaggcaagaacgaaaaccgaggagcagaaggcagagaaaaggcccccacgagacagcccaggcaaaaaag

SEQ ID NO: 20820 - RNA, 77 nt, Homo sapiens
gacacaggggcccacaacagagccccaaggcagcgaaaccaaagaagaaggcagaagccagccaccacaaaaaggca

SEQ ID NO: 20821 - RNA, 53 nt, Homo sapiens
gcgggagaccggggggcggacgcgcgcggggcaggaagcggaagaaagaagag

SEQ ID NO: 20822 - RNA, 74 nt, Homo sapiens
ccccagcccaccccaggcggcagcacacagaagcgacgaaggcaaacccagaaaagcaagccggggccgacccg

SEQ ID NO: 20823 - RNA, 69 nt, Homo sapiens
agcgggagcggacggcgagcgcgagcggcgcgagaaacagggccgaacccacggccaggcccgggccag

SEQ ID NO: 20824 - RNA, 86 nt, Homo sapiens
gaagaagagcccagcagcacccgccccccagccaggaccaccgagacaggggcccggcaccgcgcccgagcccacccacagacaga

SEQ ID NO: 20825 - RNA, 63 nt, Homo sapiens
aaggaccaagaaccaggggccacacgcggacccggagggaccagacgggcgccacaggcgacg

SEQ ID NO: 20826 - RNA, 50 nt, Homo sapiens
acgcagggcgcccccggggggacacaccaccgggaacaagccgccgggcc

SEQ ID NO: 20827 - RNA, 65 nt, Homo sapiens
caaaaccacccgcacaaaccggagagcaccaccgacaccgagaagcagagagggcgcggccccaa

SEQ ID NO: 20828 - RNA, 83 nt, Homo sapiens
gacgacaagcacacacaggcgcgaaacggaaaaaggcccagaaggggaagacccccagcgaacagagacccaaaaagaagaag

SEQ ID NO: 20829 - RNA, 83 nt, Homo sapiens
ggcagaaaaggggacacggcgggcagggcggcgacggcggcgcgaggaccgaccgggcccgcggacgaagaaggcaccccccc

SEQ ID NO: 20830 - RNA, 95 nt, Homo sapiens
aggggcgcccgagaaggggacggcgggcgagggaggggaccgccgcggccaagaccggcccagacaggagggcggcagggggggcagggccgcac

SEQ ID NO: 20831 - RNA, 81 nt, Homo sapiens
agagcagccggaacggcggaccgggacgcacgccagcgaggaggacccccaaagaagaggccccaggaccggcgaggcccc

SEQ ID NO: 20832 - RNA, 76 nt, Homo sapiens
gaaaacagagcgacgagcaagaagcagcccaaagcgaagacagacgcaagaagcgacaggaagcgacagcagaagg

SEQ ID NO: 20833 - RNA, 81 nt, Homo sapiens
cccaccgcaacccgccgggaagcagccgccaaaaaccggacagccaagcaacagcccagcaaggcgccacccgacagagaa

SEQ ID NO: 20834 - RNA, 56 nt, Homo sapiens
cagcgacagagccgaccagcaccccgcccagccagagaaacggcaaaggggccagg

SEQ ID NO: 20835 - RNA, 73 nt, Homo sapiens
gcgagagggccggcaggcccgggaaggggcagcacccggggagggaggcgagcacaagaaggacaacaggcca

SEQ ID NO: 20836 - RNA, 87 nt, Homo sapiens
gcgggaggaggaggaacaacccccaggacggccagacagagccggacgagcgggagaggacaccacacaaaaaacaggaaaagagaa

SEQ ID NO: 20837 - RNA, 76 nt, Homo sapiens
cacgaggcaacgccccaggcgccgcgcccggggagacagaaacgaggcgcccccagcagcaggaggacgacgacaa

SEQ ID NO: 20838 - RNA, 72 nt, Homo sapiens
agaaccgaaggccgcgccggggccagccagaagaagggcaggccagaagggcggaggcagggcggaccggcc

SEQ ID NO: 20839 - RNA, 60 nt, Homo sapiens
ggccacaggcagacggcagggccggacacgaggaggggacggcccgccacaggcacagac

SEQ ID NO: 20840 - RNA, 53 nt, Homo sapiens
gcgcccccccggaaacagaacagcagagaacaaaggaccgcaaacgaagacgg

SEQ ID NO: 20841 - RNA, 73 nt, Homo sapiens
agcgggcaggaaacaagaaaagcaccgcagacaccgggaagagggccggagccgcaccaggccacggcgcgcc

SEQ ID NO: 20842 - RNA, 69 nt, Homo sapiens
cggggggcgcggagggaccagcgagcggagggaaaagaggacgaggcgcgaaaaggcaaaggcaagaaa

SEQ ID NO: 20843 - RNA, 83 nt, Homo sapiens
ccaccggcacggggcgggcagcggcgccgggcacaggagggaagagcaagggaaggaagagaaccgaagaagaaaaccaaaaa

SEQ ID NO: 20844 - RNA, 64 nt, Homo sapiens
ggaacagagcgagggaggagagagggagagccaaagaaggaccgacaagacggaaaccgggagg

SEQ ID NO: 20845 - RNA, 69 nt, Homo sapiens
gaccaggggcggaacaacgccaacgacagaggcggagaagaacccaaccaaaaccaggcggcaaccccg

SEQ ID NO: 20846 - RNA, 79 nt, Homo sapiens
gccaaagaaacaagccgggaaagggacaagaagggcaaagccgaagggcgcggggggccaccaacacccccggaacacc

SEQ ID NO: 20847 - RNA, 74 nt, Homo sapiens
aggcaaccgcgcccccagagcccaggcggggccggggagcccgggccagaccccccagacccagcccaccccgg

SEQ ID NO: 20848 - RNA, 53 nt, Homo sapiens
caaaaaggccagaaagaggagcagagacgccggacagcgccgcacacaggcgg

SEQ ID NO: 20849 - RNA, 53 nt, Homo sapiens
aagcggggcgcacaccaccggacaaccgacaaaaggaaaaaagacgacaagaa

SEQ ID NO: 20850 - RNA, 68 nt, Homo sapiens
acaaaaacggagcacacgccccaaggagggaccaagaggggaggcaagcaggggggcaaaggaaagaa

SEQ ID NO: 20851 - RNA, 78 nt, Homo sapiens
aaacggcccaccgccccgggggagagggcagcgcaagccacaggaacgagccacgagaagccccaacaaaacaagacc

SEQ ID NO: 20852 - RNA, 39 nt, Homo sapiens
caggcaccaccggccccggaagcaggacgggcaggacga

SEQ ID NO: 20853 - RNA, 84 nt, Homo sapiens
cagaggaccaccgacccaaagagagcgcccagccgaaagagggcagggaaagggagcagcaccggccacacccacagcacgacc

SEQ ID NO: 20854 - RNA, 81 nt, Homo sapiens
aacagagccgcagggacggagcagaagacagagggaggagggccacggacaaacacgggcccggcccagcagagcgaggaa

SEQ ID NO: 20855 - RNA, 84 nt, Homo sapiens
aacacaggaacaggcgcggcagcagccagaaagacccagagaagcgagaagcagagacaaaggaaccaaaagaggagacaacaa

SEQ ID NO: 20856 - RNA, 73 nt, Homo sapiens
cggccgcgagacaccggcagaaggaacacaaagcgccccagcaccgcgcaccaaggaagacacaagaacaagg

SEQ ID NO: 20857 - RNA, 81 nt, Homo sapiens
gcggggcggcccaccaacaggaacagggcagacgagcggaggacacccaacccgggacgccaggaaagcaggcagagcaac

SEQ ID NO: 20858 - RNA, 77 nt, Homo sapiens
cagggcgaggaaccagcccaccccgaccgcccccgcgaggacagcagcggacggccggaccaagaggcgccgccccc

SEQ ID NO: 20859 - RNA, 68 nt, Homo sapiens
gccacccggaacgcgcgcacccaccgggcccgcgggccgccccaccccacagagaccgcagcccacac

SEQ ID NO: 20860 - RNA, 70 nt, Homo sapiens
acaccacaggaacagccaaagggagcagcaaaccagaaaaggaacccagcagcagcaggacggcaggaga

SEQ ID NO: 20861 - RNA, 77 nt, Homo sapiens
gaagcgccaaagccagacaaggccacaagaacaccgagacgacacaagaacaaagacgggccacaaacacgacaagc

SEQ ID NO: 20862 - RNA, 77 nt, Homo sapiens
agggagcaggcagggccagggagacgaggcccggacaggcccgccgggacccaccaagggcccccacgacgcaggcg

SEQ ID NO: 20863 - RNA, 57 nt, Homo sapiens
ggaggagagcggagggaagcccccccaccccccggggaacgaagagccggccgcgac

SEQ ID NO: 20864 - RNA, 82 nt, Homo sapiens
cgcgcggccaagcagaaaggaacagaacgcggccccagccacaccaagcagaccggccaaggagcaaggcagcagaagacgg

SEQ ID NO: 20865 - RNA, 70 nt, Homo sapiens
aagcacacggaaaggagccgcaaggcacgaagcacgaagaggcaaccaacacaaggacagagacggaaag

SEQ ID NO: 20866 - RNA, 73 nt, Homo sapiens
cagaaaaacaaaaggagcagcagaagccgaccaggcggccagcacagagcccaccagaccgccacagagccca

SEQ ID NO: 20867 - RNA, 87 nt, Homo sapiens
gcagagggcgcaccgcccgggacggccacagacccacagaggcaccccagacacagcagcgggccccaggccggggcgagcgggccc

SEQ ID NO: 20868 - RNA, 83 nt, Homo sapiens
gcagagaaccgcgaagggagcggccccgagacgcgccggcgcgggaacaccaggaggcacgcccgccgccgcccgagacgggc

SEQ ID NO: 20869 - RNA, 54 nt, Homo sapiens
gcagaaacgcaccaggccaaagaaagagaaagaaagcaaaacagagaaacagga

SEQ ID NO: 20870 - RNA, 80 nt, Homo sapiens
cggggcagccgagcacagcacgggaagaaggagagacgaccacgcaacagaaaaagagcgcacccaagggaagagcgaaa

SEQ ID NO: 20871 - RNA, 77 nt, Homo sapiens
gcagcaagaagagcaccaaacggcaagaagagaaccgacagcacaaggaaaggaggaaagagaaagaagaaagcaca

SEQ ID NO: 20872 - RNA, 88 nt, Homo sapiens
ggggggagagccacgacgccgggaccgggaccgccgccgccgccgccaccagggcggagaacggaaaagcaccaggaagcagagagga

SEQ ID NO: 20873 - RNA, 73 nt, Homo sapiens
cccaacacaacacgcaggaaaacagaagacaccccggaagacgaaagaagacggagcggaccaacaacagcag

SEQ ID NO: 20874 - RNA, 77 nt, Homo sapiens
gaagaacaggcacagggcgcacacgggaggagcaggcagaggccccaccgcagcggcggacgagcaggacaggccgc

SEQ ID NO: 20875 - RNA, 33 nt, Homo sapiens
ccccgagggcgggaacagggaacccgacggcca

SEQ ID NO: 20876 - RNA, 78 nt, Homo sapiens
gacggagagggagaaggaggcacaggcagggcacgcgcacccgaaaacccggaacgggggggagcaagggagaggggc

SEQ ID NO: 20877 - RNA, 82 nt, Homo sapiens
agcaagggagcccagccggagccaggaccacaccaaggagaagaagacccgggcagagacggggagcccccagaaaacagca

SEQ ID NO: 20878 - RNA, 72 nt, Homo sapiens
aggaacacaaacggcgcacaggagagggaaggcgggacaagggcgcaccggggcgcagcgagggaggacaac

SEQ ID NO: 20879 - RNA, 56 nt, Homo sapiens
cacaggagagaccagcagcaaagggcaccacaagccgaacagccagccagcaaaag

SEQ ID NO: 20880 - RNA, 70 nt, Homo sapiens
ggggccccgagcagggggggggggaagccgcagcggaaagcaggagcacagacggcaaccgacccggggg

SEQ ID NO: 20881 - RNA, 55 nt, Homo sapiens
agaagcacacacgaagccagaaaaacggcgaagcggagcagggagagcaggacca

SEQ ID NO: 20882 - RNA, 82 nt, Homo sapiens
agacaacgcggagcggcgaagagcaaccagacggaaggaaaaggacaggaggacccagacccagcaagcagaccgaaacagg

SEQ ID NO: 20883 - RNA, 72 nt, Homo sapiens
gccacagcaaggcaggggagcaaaccgacaccagcgacacaagcgcgagggaaccacagaggacaggcgagg

SEQ ID NO: 20884 - RNA, 84 nt, Homo sapiens
cagccggccccgccgcggccccaccccagcagcccagcacgcggcgacacgaagggccgaccaggcaggaggccgccgccgagc

SEQ ID NO: 20885 - RNA, 72 nt, Homo sapiens
gccaaaacgcagggacgcggccccccccgggggaggagaaggaaagagagcccccagcgccccgcccagagg

SEQ ID NO: 20886 - RNA, 71 nt, Homo sapiens
accacgggcggcgccaggccggcccaagccccccccagcgccgaaggcccgacccagcagcccggcccggc

SEQ ID NO: 20887 - RNA, 80 nt, Homo sapiens
ccgaggcaccggcagggcacaaggaaaacgagacacgagaccagaagccaagaaacgaggagagccaccaccaaggagac

SEQ ID NO: 20888 - RNA, 62 nt, Homo sapiens
acagaaccagccaacaaaagacaggaaccaggcggacggaggaagccccaagaccacaaaga

SEQ ID NO: 20889 - RNA, 77 nt, Homo sapiens
cccgcaggccgccgagcccgggcccacgccagcccccgcaccagccggcgcacacccagcgggaacagagcaaggaa

SEQ ID NO: 20890 - RNA, 77 nt, Homo sapiens
gcccccgcccaggagaaagccagggggaaaccgaggagccaaaaggagaagcgaacaaaaaaaaccccaaagaaccc

SEQ ID NO: 20891 - RNA, 71 nt, Homo sapiens
ggaaaagccccgcagacaaaagaagggagaggagcgaaagaacgagagagggccgggccccgaggaagcga

SEQ ID NO: 20892 - RNA, 52 nt, Homo sapiens
gaaggaagagagacagagaagacgcaggaccccgacggccccgaggaagcac

SEQ ID NO: 20893 - RNA, 82 nt, Homo sapiens
ccagcacccacccagccccccgaagcgcgcccagagggggcaccagccagcccgaaggccagggagaccgccacgacgagcg

SEQ ID NO: 20894 - RNA, 79 nt, Homo sapiens
ggcgcgcgcgcacgggcggcgcggcggcggcagacgcagacaaacaaaacaagaagccgaagaagaccggggaggcgaa

SEQ ID NO: 20895 - RNA, 49 nt, Homo sapiens
gggccacccgaaacggagcgacggcccgccacgggccccgcagccgcgc

SEQ ID NO: 20896 - RNA, 77 nt, Homo sapiens
cggcggcggcggcggcggcggcgcaggccagcaaaagaacgcagacggcaagcaacaagggggagcaaaggaccaaa

SEQ ID NO: 20897 - RNA, 96 nt, Homo sapiens
gacggaagcaaggaacaaaccgaagaacagcgggaaagaaggcaaaacacggacaagagagggcggcagaaggaacaccgagaaaccgcacaccgg

SEQ ID NO: 20898 - RNA, 105 nt, Homo sapiens
ggccggagagcccggcgaacccggcaccgggcccgcggggaggccgaagggggcccgaccacagcaagggccgccagcgcagcagacgaggagccggccgcgggg

SEQ ID NO: 20899 - RNA, 74 nt, Homo sapiens
gaagacacgcaccagcggaaaggagcccgccggcccaaacgcggacacagcaacaagaggagccgccggcccag

SEQ ID NO: 20900 - RNA, 77 nt, Homo sapiens
gacccgccacgcagcaccagcaaaacaagcacgacagggaagacccagaaaagaaacacaaaacaagcgggaaagaa

SEQ ID NO: 20901 - RNA, 83 nt, Homo sapiens
aaaggcagcagcacagaccaccgccaggaagaggaaagcgaacgcgaaaagaaaagccgagagcagccagaccggcgaagaaa

SEQ ID NO: 20902 - RNA, 72 nt, Homo sapiens
aggaagaggaccacgagacaagcggcagcgccaacgccgcacgcgcacccgacaacaaaccccaccacgcgg

SEQ ID NO: 20903 - RNA, 73 nt, Homo sapiens
accccaggcacacgacgaccgagcgaacccagacaaccagccaaacaaagacggaaaagagaagacacggccc

SEQ ID NO: 20904 - RNA, 75 nt, Homo sapiens
acccgggcaagggagcacacagccgcggcagggaaaggacaagaagacacaaggcagaagcccaggcgagagccc

SEQ ID NO: 20905 - RNA, 58 nt, Homo sapiens
ccgccaggccaagaacaacccaggccgggcccaagaagcacgaagcgggggcagccca

SEQ ID NO: 20906 - RNA, 66 nt, Homo sapiens
ccggagcacagggcagcggagaccgggaaccgggcccaaacaaaagggggaccgacagacccaacc

SEQ ID NO: 20907 - RNA, 74 nt, Homo sapiens
ccagcccggggcgcacgccacccgggcaaccgccaggcacaacaaccaacaagacaccaagaaaaacaaaaaaa

SEQ ID NO: 20908 - RNA, 56 nt, Homo sapiens
gggacggacaaggcaacacccgaagaaacaagcacagagagaagaaaaaggaccag

SEQ ID NO: 20909 - RNA, 102 nt, Homo sapiens
cccgccgagccgccaccgcaggcgaggacggcggaccccgcggcgggaggagccgccccgagaaaaacaaccaccagcgagcaaaaaggcaaagaccaagac

SEQ ID NO: 20910 - RNA, 77 nt, Homo sapiens
gcgccgcgcaacaccgggaggcaaggagcaccggcggcaggagcaaacagcaagagggaaacagaaaaaggacaagg

SEQ ID NO: 20911 - RNA, 81 nt, Homo sapiens
ccacagacaggacaagaaaccgagccacgaccgccgagaggccaggaaacagagaaagagagggggcacagaaggggacag

SEQ ID NO: 20912 - RNA, 73 nt, Homo sapiens
agagccaagaagaacagacagacaggcccaggacccccgccagcagggaacccaggagcaggagagaagaggc

SEQ ID NO: 20913 - RNA, 83 nt, Homo sapiens
cgggacggaccgagaccggaccgagagcggaccgagagcgcgaaacgcacgagaaggaacacaagggcaagacagccgggaac

SEQ ID NO: 20914 - RNA, 56 nt, Homo sapiens
aacccagcacgggaagccaaggagagcacaacaaggcaggaaccaaagggacaagg

SEQ ID NO: 20915 - RNA, 71 nt, Homo sapiens
gagcacagagcgagaccaggaaagaagggggcagaagagggaaccaagccgccacagggagaaaagagcag

SEQ ID NO: 20916 - RNA, 76 nt, Homo sapiens
acgaggcagcgaggagcagcagccgagcgccggaaaccagcccggccacagaaaccagaccagaaagaaaacccag

SEQ ID NO: 20917 - RNA, 111 nt, Homo sapiens
caccggcggagacgggcggccggccgacccccgcgcgacggcgacgcgggaggccaggagcagaagcagcggacaagaccgggggacgacacggccgggcgccacccacgc

SEQ ID NO: 20918 - RNA, 87 nt, Homo sapiens
cgagagaggcaccgggacggaccgagaccggaccgagagcggaccgagagcgcgaaacgcacgagaaggaagggaccacagaccagc

SEQ ID NO: 20919 - RNA, 73 nt, Homo sapiens
agaagaaaaggcgccaacaggagcccaccacaacccgcgccaacagcagagaggccgccggaaacaccaggag

SEQ ID NO: 20920 - RNA, 79 nt, Homo sapiens
gggccacagccaacaaaggaaggaggggaccgggacacgaaaacccagaggacgacgaacagaacaacccacgagggag

SEQ ID NO: 20921 - RNA, 86 nt, Homo sapiens
gaacccggaggaggcgaccgcggcgcagcgacccccgccaggcaaaaggaaggcgggagaccagggccagcccggccacaccccag

SEQ ID NO: 20922 - RNA, 79 nt, Homo sapiens
ccaccgggccccacgggccgaccaccgagcccaggaaacagaggagagcagagggcggagcgcagaagcgagagaaagg

SEQ ID NO: 20923 - RNA, 57 nt, Homo sapiens
aacgccgggccaagaccccgagcagcagcagaggaaaaaagagaccgagagaaagca

SEQ ID NO: 20924 - RNA, 77 nt, Homo sapiens
gcagaagaaagcagcgaagcacacacagacggaacagcaggaacagcggcacagacagaaagaacggcgaacaggag

SEQ ID NO: 20925 - RNA, 68 nt, Homo sapiens
ggagagagcgggcgagcagaaacccggaaggcagaaaggcgggacgggagaagcgccacccaccagaa

SEQ ID NO: 20926 - RNA, 85 nt, Homo sapiens
caacaacaacgcgacaaaggagagaaacagccaaaacagcacaacagcggaccaaacaaacaacaccgaaacgagaacgcaccga

SEQ ID NO: 20927 - RNA, 81 nt, Homo sapiens
ggcgacggccacaggggcggcgacggcgcaggcgaagcgaaacaggcagaagacagccacacaggcacccacccaggccaa

SEQ ID NO: 20928 - RNA, 77 nt, Homo sapiens
gagccaggcgggagcagccgggggaagccaagggcgccacaggacgcgcggagccggacacgccacaagaaaagcca

SEQ ID NO: 20929 - RNA, 69 nt, Homo sapiens
cggcccaaaaccagccgacaaagagggggcccaagaaggccggagggaagaaccacggacacgcagaca

SEQ ID NO: 20930 - RNA, 85 nt, Homo sapiens
cccggcgccgcccgcgggagccgccgccggccacccggggccagacagcaccggcagcccaagccagcgcagaggcagaacgcgg

SEQ ID NO: 20931 - RNA, 83 nt, Homo sapiens
gacaccaaccagggaacgaccaacaacaaaaggaacgcccagaccaccacgagcaaaagcagccgcagcccagcccagaaccg

SEQ ID NO: 20932 - RNA, 85 nt, Homo sapiens
cgggcgcagcgagaggaggcaccgcggcacgccccccgggccgggcgacacccagaccaggccgaagaagggccggcagccaaaa

SEQ ID NO: 20933 - RNA, 64 nt, Homo sapiens
gacccagaacaccaagcaaagaagaggagcacaacagggagaggaacaaagagcgcagaacagc

SEQ ID NO: 20934 - RNA, 70 nt, Homo sapiens
ccgccccagacgaccgggacaagacggaaccgccgagacaacaaagggcaaaggacacaccgcacaaacg

SEQ ID NO: 20935 - RNA, 58 nt, Homo sapiens
gacgggccccaacacccagagacgaaaggcaaaagcagaccggaaaacccaccggcaa

SEQ ID NO: 20936 - RNA, 77 nt, Homo sapiens
acgccggggcccaaccacaagacgaccaaaggaggaagagagggcaaaaaacacagacaccggcgaacaacaagaac

SEQ ID NO: 20937 - RNA, 52 nt, Homo sapiens
cccgagaacaccaggagacacaagaacacagaagagaacccgaacacagcag

SEQ ID NO: 20938 - RNA, 76 nt, Homo sapiens
aagaaagagcccccagcgcacaagaccaaaggaacgggcacaaccacggggcagaggaagcccagacccacgcccc

SEQ ID NO: 20939 - RNA, 75 nt, Homo sapiens
cccggcgcggagcggcgcccaagacagcaagggacagacgggaaaaaagagcaccagaacaagcacaaggaagag

SEQ ID NO: 20940 - RNA, 97 nt, Homo sapiens
gcaaccaaaaacgagcagaagaaacacaagcaaggaaggaaagcagaagggagaaccaaacgcaccaagcagccacgggggagagaccacgcccccg

SEQ ID NO: 20941 - RNA, 76 nt, Homo sapiens
aggccccaaagcgggaaagcgcaaagggcagagccagaaggagagccaagcgccagagaacaggaggaggcaggcg

SEQ ID NO: 20942 - RNA, 84 nt, Homo sapiens
gggccaggccgccgccgagccgagaaggaagcccgggccagccagccccgaaagaccaagcccgcgccaccggcccccagggac

SEQ ID NO: 20943 - RNA, 72 nt, Homo sapiens
gggggacgggccgaccacccagacagaggcgaggaaagaaaaagagaccagacaagccacagagcagaccgc

SEQ ID NO: 20944 - RNA, 78 nt, Homo sapiens
ggacgaaccgaggaggcccggacggaaacgaggaggagcggccaggaaagccaagacagagcgcggcgcccaggcgga

SEQ ID NO: 20945 - RNA, 87 nt, Homo sapiens
ccgaggcgacagcggccccgccgcaccagagcagcaaagaaagcagcggcggcgaaagaagacagaaaaagaagggcaggccaaaag

SEQ ID NO: 20946 - RNA, 54 nt, Homo sapiens
cgggaggacaccacccacagacagaggcacaaaaggagaaagcagaagaaacag

SEQ ID NO: 20947 - RNA, 54 nt, Homo sapiens
cccccccgaaccccgcagcgacaccaagggagcgccaagggcggcgggggagga

SEQ ID NO: 20948 - RNA, 79 nt, Homo sapiens
aggggagcacagagcgagaccaggaaagaagggggcagaagagggcccagggccgaaaagaaaacaggagaaccacccg

SEQ ID NO: 20949 - RNA, 70 nt, Homo sapiens
ccgaggcgccgcacggggccgagcggagaagagcacaggcgcaaagaagcagggcagaggcgggcaagcc

SEQ ID NO: 20950 - RNA, 62 nt, Homo sapiens
accccgcggcgggaggagccgccccgaggcagagaccaacagaccagcaacaggccggcagg

SEQ ID NO: 20951 - RNA, 79 nt, Homo sapiens
aacaccggaggcgggaaagccacaggaagaaggagaaaaacagaacaaacgaggccgcaaaaagcgcagagaacgcccc

SEQ ID NO: 20952 - RNA, 77 nt, Homo sapiens
ccgaagcaggggcccccgacccgcgagcccccccaggagcgaaagggaagaagaaggggcaccccccaccccgggac

SEQ ID NO: 20953 - RNA, 77 nt, Homo sapiens
aggaaaggcccgagaaccggccagaacggccaagcggaccggcgggggccgcccacccggccccccacgacgccgag

SEQ ID NO: 20954 - RNA, 74 nt, Homo sapiens
cccaacaccagccgccgccccgcagccccccgcagcacccagccggccacgaacagccagcaaagacaagagca

SEQ ID NO: 20955 - RNA, 73 nt, Homo sapiens
acgcagagagcgcggagagccccgagggcccagacgagagcacacagacgaacaggacaaggaacggagcccc

SEQ ID NO: 20956 - RNA, 75 nt, Homo sapiens
ccagcgcgcggccccgcccggcggccgggcccagacgaagaacggaagcgccccagaggagagggcggagagacg

SEQ ID NO: 20957 - RNA, 83 nt, Homo sapiens
ggaacaggcacgaaccccacacgggacagagcgggcagaccgggcgcgccaaaaccagggcgagcgggagagaccggagcacg

SEQ ID NO: 20958 - RNA, 88 nt, Homo sapiens
ggccggggccgaggagcgggcacagggcaaggcggcggacggcgcgcgcccgaggcgaggaggagcgcggcggaggccaaacacagcc

SEQ ID NO: 20959 - RNA, 69 nt, Homo sapiens
agaagggacgggcagaagccaaccaacacacaccccggagacaacaggcacaaagagagaaggaacacc

SEQ ID NO: 20960 - RNA, 74 nt, Homo sapiens
gggagacaacgcagggcgaacaccgggaaggaacaggcacggagccggacagaaacggaaagcaggaaaacggc

SEQ ID NO: 20961 - RNA, 48 nt, Homo sapiens
cggcggagcccccggacgcccccccgcaaccccgccgagaagaaaccg

SEQ ID NO: 20962 - RNA, 54 nt, Homo sapiens
agaggccggggaccgccaaccccccaagaagcagagcccacacaggaaggcacc

SEQ ID NO: 20963 - RNA, 61 nt, Homo sapiens
aacaaccaccgcagccggccaagaggcccacccacagagcgcggaggagaaggaccggaga

SEQ ID NO: 20964 - RNA, 33 nt, Homo sapiens
gcaggagccccgcgggacagacagagcgcccgc

SEQ ID NO: 20965 - RNA, 83 nt, Homo sapiens
gcggcacggggcaaccgggcggccacgcccgcgcagccacagaaagcccgccccagacagggccccggcccgcccggaagcgc

SEQ ID NO: 20966 - RNA, 73 nt, Homo sapiens
caggaccccgacagcccgcaagaaccgcagcaagcagagagaacccagccagaaaagaaaagacagaagaagg

SEQ ID NO: 20967 - RNA, 76 nt, Homo sapiens
aacaacgagaaggcggaaacagcccgcaaagggacaaaaggaaaggccaacccacagcgaggagaagccaggaacc

SEQ ID NO: 20968 - RNA, 79 nt, Homo sapiens
aaggaccaagaaccagagagaagaagaaggaggccgcggccagaaacccaagaaaaagcgaaggaacgcagagcgaaga

SEQ ID NO: 20969 - RNA, 67 nt, Homo sapiens
ccacaccaaaccagacccaagacagagggaacaggcagcgggagagaggagagcagagagcagaaac

SEQ ID NO: 20970 - RNA, 77 nt, Homo sapiens
acaagcacgcaaagaaagaccaggaggaggagaaggaggccgcggggggcagacaaccacgcgcggcaagccacccc

SEQ ID NO: 20971 - RNA, 67 nt, Homo sapiens
gcagcgcccgagagagaacaccgacagccacaagccgcagagccaacacaggagaagcaaccaacgc

SEQ ID NO: 20972 - RNA, 71 nt, Homo sapiens
cagaacgggcggacgggcgcccagccaggaaaaaccagaagagaaaaaacaaaggggagaggcaccccgcg

SEQ ID NO: 20973 - RNA, 79 nt, Homo sapiens
gccaacccaggaggaaaaacgaacggccgagcgaccaggagaggagcccccgcccgaagaccggggagggccccccagc

SEQ ID NO: 20974 - RNA, 79 nt, Homo sapiens
aacgcaacagaacagagcgagcgcagcagcagcccaggcccgaacaggggccgagaaacagggacccggacccaagaca

SEQ ID NO: 20975 - RNA, 81 nt, Homo sapiens
ggccagagaaggagaacaagaggaagcacacggaagagcgaaaaagagaaagcaacaccaggagagagggccggcacaaag

SEQ ID NO: 20976 - RNA, 79 nt, Homo sapiens
cgagagcaccaacagaaagaagcagaaaggagcgcagcacacagagaccccacagccaggaccccacccgcggacagaa

SEQ ID NO: 20977 - RNA, 74 nt, Homo sapiens
gcagcggaacagaacagggaccccacggccgaaggacccggggaggaagaaagcagccaagaagagggaaagaa

SEQ ID NO: 20978 - RNA, 69 nt, Homo sapiens
caccccagaacgccaaagacccccagcacagaagagcaacaagcggaagaccacaacgacgggggcacg

SEQ ID NO: 20979 - RNA, 63 nt, Homo sapiens
cgaagaagccccgccccaaagcccccacgcaacaaaaggagagagcccaccaaggaaccacga

SEQ ID NO: 20980 - RNA, 89 nt, Homo sapiens
ggagccaggggcccgagggcggggaccggcggcgcggaggagcgaggcagcgacaggacgggaacggaaaccaagaagcacgaagagag

SEQ ID NO: 20981 - RNA, 51 nt, Homo sapiens
gaggggcaggaggcgcggacacgcaaaccacacaagaaccgagggggcacg

SEQ ID NO: 20982 - RNA, 81 nt, Homo sapiens
aaggcacgaagcccacgagacacaccgccggcccggggcggcgccgaggggaggaggcggaaagcccacccacgggaggac

SEQ ID NO: 20983 - RNA, 79 nt, Homo sapiens
agcggcaccggccgagcgggaagagaccgcccagaagccgcgcccagacaccggacccccgcaaaacgcccagggaaga

SEQ ID NO: 20984 - RNA, 80 nt, Homo sapiens
aggaggagaagaacacacagcgccgcgccaggcccagacacgcagaggagacccgaaccggcaacagcaccggaggccca

SEQ ID NO: 20985 - RNA, 68 nt, Homo sapiens
gaaagggaacaggggaggaaacggggacagaagaacgaagaacaaggacaaggaaaacaggagagaag

SEQ ID NO: 20986 - RNA, 66 nt, Homo sapiens
gccgacagccgcgacggcgagcccgggccgcgcccgaggcggcggggccaggcagccaggggacac

SEQ ID NO: 20987 - RNA, 78 nt, Homo sapiens
aagaaccaacgggaggcaagcagacaagacggaggagcgcccggagcgagagcgagagaagggaccagccagaagaaa

SEQ ID NO: 20988 - RNA, 74 nt, Homo sapiens
caacagaacaacacaacggcaagacgaaagaggcggacgaacccaaggaggcaggaggaggcccagcccacggc

SEQ ID NO: 20989 - RNA, 70 nt, Homo sapiens
cacaccaacaaggcacacacagcagacgccaaagagaaacacagagaggccggcacggagcagaccacag

SEQ ID NO: 20990 - RNA, 77 nt, Homo sapiens
gagagagcgagcgagggggggcgcgccggaaaccggagcgcgcagcagggacaccacaccgcccaccgggaacaggg

SEQ ID NO: 20991 - RNA, 43 nt, Homo sapiens
aagacaccggccaacgaaggggacggccacccacggaccgcac

SEQ ID NO: 20992 - RNA, 75 nt, Homo sapiens
ggagccgcggcagaccgaggggcaccgaccgcacgggccacccaaaacagagccgaggcaaggagccggacagaa

SEQ ID NO: 20993 - RNA, 72 nt, Homo sapiens
aaaaccccccgcagcaaagcacacaacaggcccagcacgacagagacccggaaagcgagcagcaaagaccca

SEQ ID NO: 20994 - RNA, 62 nt, Homo sapiens
cgccaggcgacaggggaacagacagaaggagcaggaaccaaaggagcagaggccaggagggg

SEQ ID NO: 20995 - RNA, 84 nt, Homo sapiens
gagccggcgcggcgcagcccacggcgcaggcccacggagcgcagccgccgagggcaaagagagaacgcagcgacccggagcacg

SEQ ID NO: 20996 - RNA, 84 nt, Homo sapiens
cccgcgcccgcgcgccccagagaggcacggggaaacaaagaggagcgcagaggcggagacagaggggccaacccgcgagcgcgg

SEQ ID NO: 20997 - RNA, 69 nt, Homo sapiens
gaagacaggcacgaaacccaaaaagcaaaaaacgcccacaccagagaaagcaccgggaggaaagagagc

SEQ ID NO: 20998 - RNA, 70 nt, Homo sapiens
cagcagagaggaaaaacacaacccaagaaacggcaacacagaagcggagcccaggcaccccccagcgcca

SEQ ID NO: 20999 - RNA, 65 nt, Homo sapiens
ccggggcgaggggccacggcccggcggcggcggccggggagcagcagaaggagcacaacaggcag

SEQ ID NO: 21000 - RNA, 79 nt, Homo sapiens
aaggagcgaccgcgccggcagcgccgcgaaggcgggccgggccagcccccgccgcccgggaggcgaagacaagacccaa

SEQ ID NO: 21001 - RNA, 92 nt, Homo sapiens
gcgcgcccgggaggaaggaacgaggcaaggagcaaagcagcggcgcagcccgggagaaggagggggcagagcacggcaggcagaaggggcca

SEQ ID NO: 21002 - RNA, 64 nt, Homo sapiens
acccgccgggccgaaccggaagggcaaggccgcaacccggccagcggcaagcagagaccggcgc

SEQ ID NO: 21003 - RNA, 86 nt, Homo sapiens
gcaggcaaaaagaaccaagaaaaacaaacgcacacagaagaacacacagcggggaaaagaaacgaaggaggcccaaccacaaaagg

SEQ ID NO: 21004 - RNA, 55 nt, Homo sapiens
cgcaaaaacaacagacagcccagcgcaggaaagcaggcacgggaacgaggaaaca

SEQ ID NO: 21005 - RNA, 73 nt, Homo sapiens
gggagggggacacacaaccgcccagccggcgagggacgccgcagccacaaaagaagacccaaagcaccaacaa

SEQ ID NO: 21006 - RNA, 40 nt, Homo sapiens
caccacacaccgccggggaccggcacagaacagcgggaag

SEQ ID NO: 21007 - RNA, 77 nt, Homo sapiens
cgaaaccccaggaggagacaaggagacaagagccaggaggcccaggcgaacaacaagagggacccgaacaaagaggc

SEQ ID NO: 21008 - RNA, 71 nt, Homo sapiens
gaaaaacaagaaggaaaaacgccacgcaccggagagagcacaggaaggacacagacaaaagaccaggagag

SEQ ID NO: 21009 - RNA, 79 nt, Homo sapiens
gggggcagcacaggaggggacacccagacagcccgaacacggaaaccgacgacggccacagcccagcgaaggcccgcag

SEQ ID NO: 21010 - RNA, 73 nt, Homo sapiens
cgaaagcgaccaaggcccggaggaaagcaccacccacagagacagccccaacagagcagacagaacggagcag

SEQ ID NO: 21011 - RNA, 80 nt, Homo sapiens
cccgcgccaggagcacccaggaaaagagcagaaccggaaagagcgaggccccgagaccccggagagcagcaggacagcga

SEQ ID NO: 21012 - RNA, 69 nt, Homo sapiens
aagccggacacgaccaagaaagggagaagagaagaccagagaaagaacaaccccgcgcacaagacaaag

SEQ ID NO: 21013 - RNA, 72 nt, Homo sapiens
gcgggaggaaagggagagacaagagaggagacccaacagacggggcgaaagacggaaaggcccagaggacga

SEQ ID NO: 21014 - RNA, 69 nt, Homo sapiens
aagagcaacagcagggcaacaggaaggagggaagacggccggagacaaggcgcacagcgacaccgacaa

SEQ ID NO: 21015 - RNA, 78 nt, Homo sapiens
agaacccaccccaaggcaaaggacaagcccgacggccaggaggcgaagagacgaggaagcccaggagcccgaacacaa

SEQ ID NO: 21016 - RNA, 71 nt, Homo sapiens
ggggacccacgagaagagccgcgaaacacaccagaagaaggacgggacggcaaaacagaagcgcagcgaac

SEQ ID NO: 21017 - RNA, 74 nt, Homo sapiens
gaccagaaacggaggagcccgccgaagcaggaggaaaagcgggcgcagcgcgcggacagcgaccgcgaggaacc

SEQ ID NO: 21018 - RNA, 66 nt, Homo sapiens
accccgcgcgagcaggcgcgcccagggagcccgccccagggggcaggaaaagacaccggagaacaa

SEQ ID NO: 21019 - RNA, 55 nt, Homo sapiens
gaggccgcgacaggggacgcagcgaggaacaacgaggacagaaccgcgacacacc

SEQ ID NO: 21020 - RNA, 57 nt, Homo sapiens
ggcaagcgaaagcacacagaggagaacagggggcccccaaagggaagccaaacacaa

SEQ ID NO: 21021 - RNA, 52 nt, Homo sapiens
agggccaaagaagggagagaggcaagggacagggaaacccagacggagccga

SEQ ID NO: 21022 - RNA, 83 nt, Homo sapiens
ggccacgaaggaaagaggccgggagcgcccccacccgcccgagccgggagcacagcagaagcacaagggaaggcgccgcgcac

SEQ ID NO: 21023 - RNA, 76 nt, Homo sapiens
accggcaaaagcccacacgcaaaaaaaaggaacccaaagcggacaaggaaaccaaaaaaaaggaaaccgccaacca

SEQ ID NO: 21024 - RNA, 75 nt, Homo sapiens
ccggagagcacaagccggccacgggcggagaacggaaaagcaccaggaagcagagaggaccgcagaagggaagga

SEQ ID NO: 21025 - RNA, 89 nt, Homo sapiens
cgcggagccaggccgaggggcggacgcggccgggcaaaggcggcaccaagacccgagaacaccacagcagcgcggaagacgcaaccacc

SEQ ID NO: 21026 - RNA, 82 nt, Homo sapiens
gccacagaccacaacaccaggaggaccagcggacgacccccgggacaggggcgaacggaaaaaagaggcagagcgaagagga

SEQ ID NO: 21027 - RNA, 77 nt, Homo sapiens
cggagaccccaccgccggcgcgggaaacgggcgaagcgacgagccgcgaggagagaaggagaacagggggaagagcc

SEQ ID NO: 21028 - RNA, 50 nt, Homo sapiens
ggcggggcagagcagcccccagccagccgcgaggagagagagagagagag

SEQ ID NO: 21029 - RNA, 71 nt, Homo sapiens
gcgaggaacaggagagcggccgcagacaacgagaaccagccaaaacacacgaacagggaacaagaaacacc

SEQ ID NO: 21030 - RNA, 86 nt, Homo sapiens
gcggcggcggcggcagcggcggcggcggcggcggcccggccccagccaccccccccagcgccagagagaagaagaaggaggccgcg

SEQ ID NO: 21031 - RNA, 75 nt, Homo sapiens
gaggaagcaaacgcggaaaggaccacccggaacacacaacggagccagaagagcaaaaaaacagaaaagcaggac

SEQ ID NO: 21032 - RNA, 66 nt, Homo sapiens
ccgcaggagggagaacggaaaacgaggaacacgggagcagcgacaggaggacggggacaaagaccg

SEQ ID NO: 21033 - RNA, 84 nt, Homo sapiens
cagccagggcacggccgggacgcgcgccgggggcccggaaagggacgcgcgcccagggagcgagaagcagccagggcccccaag

SEQ ID NO: 21034 - RNA, 90 nt, Homo sapiens
ggacgggaccgggaccgcccggacccggccgggagaagcagcagagaaagaggcgaggggacggcggggagcgcaggacagacgcccccg

SEQ ID NO: 21035 - RNA, 88 nt, Homo sapiens
accgagaccggaccgagagcggaccgagagcgcgaaacgcacgagaaggcccgggaggagcggggacacgaggaccccccaaaggccc

SEQ ID NO: 21036 - RNA, 79 nt, Homo sapiens
ccgccggcaaccaccccgcgagaagggaccagaagccaggagaggcgccgggacgggcgcacgccacgcaagaccaaca

SEQ ID NO: 21037 - RNA, 75 nt, Homo sapiens
acagcggacaagacgaggaagagaaggagcggagcgccaagcccggccaaaaagccccgggaccaaggacacgca

SEQ ID NO: 21038 - RNA, 84 nt, Homo sapiens
cgggggcgggggggcgccggggcagcggcagacaggcagcccggaagaagaagccgcgcacggccagcaccagccaggagcgca

SEQ ID NO: 21039 - RNA, 70 nt, Homo sapiens
agccggggcaccacaacgacacacccagcccaggacacggcgcagcaacaaacagcggcgacaaaccgag

SEQ ID NO: 21040 - RNA, 62 nt, Homo sapiens
gggcagggccagggcgcaggggagaaacaaggcgccggagcaggccccgggggcgccgaggg

SEQ ID NO: 21041 - RNA, 62 nt, Homo sapiens
ccgaagccgaccgggcaaccacaaggaaggaaaacacccggcagggaaggaaggaacgcaac

SEQ ID NO: 21042 - RNA, 45 nt, Homo sapiens
gcaccccccggacccagccccgggcagccagacaggccaggacag

SEQ ID NO: 21043 - RNA, 99 nt, Homo sapiens
aggcccaaaagcgcaaaccaccaaaaacaacacccagaaagaggaaagaccacagcaagaccacgcccccagccgggggaccaggccgaacgacccgga

SEQ ID NO: 21044 - RNA, 67 nt, Homo sapiens
gaggcagacagggacagcaccgcgcgaggcaccagccaacaaagaaagagcaaaaagccaaagcagg

SEQ ID NO: 21045 - RNA, 69 nt, Homo sapiens
aaaccacaacgaaagaggggacgcaggaggcaaccaggaagacacccgaagacaagaggaccaagaaga

SEQ ID NO: 21046 - RNA, 73 nt, Homo sapiens
gaggagaccggacagaaaggcgggccaaaggagaaacaagaaggagacaacaacggccaccgggcgaagaagg

SEQ ID NO: 21047 - RNA, 74 nt, Homo sapiens
cggagacacagaaggggcaggcaggaaagcacagagagcaggaacaaggcagccaagcacaaggacgagaccca

SEQ ID NO: 21048 - RNA, 74 nt, Homo sapiens
gggaaaggaaaacggaagccgcaaagaccacgccccacaaccaggaaagcccgagaaaggaggagaaacaagca

SEQ ID NO: 21049 - RNA, 78 nt, Homo sapiens
agagcacaggcagaaggcacaagggcagaccagggacccgggagcgggggccaacagcagggcggggcggaacgcggg

SEQ ID NO: 21050 - RNA, 67 nt, Homo sapiens
gcgcagccgggggccagaaagccccacgaagagagaagcgcggaccaaagcagaaagggagaacaga

SEQ ID NO: 21051 - RNA, 61 nt, Homo sapiens
cggcgcaggcgggcaagcagggcaaaggacagcccgagcaacccaaacgggcagaagggga

SEQ ID NO: 21052 - RNA, 91 nt, Homo sapiens
gaaaaaagggacccacccagggcgcccgcgccggcagaggaggcgagcacccgccagggagaggaacccccgcgcacccagcgcagaaggc

SEQ ID NO: 21053 - RNA, 56 nt, Homo sapiens
gcgcgccgcgcggccccggccgaccaggacaggacagggacaagcgcacagcggag

SEQ ID NO: 21054 - RNA, 81 nt, Homo sapiens
gagaaaggaaacgacagacgaacacgaaccccggacgggagagcgccggcggagaaaaagcggaacacgggcaacggggga

SEQ ID NO: 21055 - RNA, 74 nt, Homo sapiens
acaggagaaccgaccacaggacccagcagccagcgaagccccaaggaagccgggacgcccacagacccagcagc

SEQ ID NO: 21056 - RNA, 78 nt, Homo sapiens
gcggggcggcgggagagcccggcggcggagcggacccgggcccgcccagagcccagaggcaggagggacaggagcccg

SEQ ID NO: 21057 - RNA, 78 nt, Homo sapiens
cagcccgggcagccggcaaggggacggacccaggagccgaccgaaccggccaaggccgaccaagaagacaggagcaca

SEQ ID NO: 21058 - RNA, 82 nt, Homo sapiens
agccgccccccaccgcccgggcccgaggaggcagccaagccgggccgcccgcggcaaggccgggacagcagaaaacagccag

SEQ ID NO: 21059 - RNA, 72 nt, Homo sapiens
ggccccgccggccgggcggaggcaaagaagaggacacagagggagacccacggaccagaaaggaacggcacc

SEQ ID NO: 21060 - RNA, 86 nt, Homo sapiens
aagaggcggccaagcagggggcaagaggagcaagaggggggggcccccccgaagaaaggaaccggggagcggcgaaaaaaaagggg

SEQ ID NO: 21061 - RNA, 80 nt, Homo sapiens
ggcgcgcgcccggacgccacgcacccgcgcgagaagcgcagacaaccgaaaccaacccggaaaagggcaaacagcagaag

SEQ ID NO: 21062 - RNA, 80 nt, Homo sapiens
gcgcggcggcggagcggcggaggaacaacagaagccagcagcacaggcggaagaaggccccaccagaacccaacccggac

SEQ ID NO: 21063 - RNA, 80 nt, Homo sapiens
ggccaggcacggcgccggggggcaaggcgcaaacaaggaggcaacccaggaggcagaagcgggccagccaaaagcaggcc

SEQ ID NO: 21064 - RNA, 79 nt, Homo sapiens
gcccagcccccgcagccaccaagagaggcacaagacgccagcgagcagcaccaaccaggagccgaagccgaaacgaccg

SEQ ID NO: 21065 - RNA, 77 nt, Homo sapiens
cccaacccagagcaaagagacgccggaggcccagagcccccccgaacagagaagaccgcgcggcaccaagacccaga

SEQ ID NO: 21066 - RNA, 74 nt, Homo sapiens
gccaccgggccgcaggaccaccccgcacaccacccaagcaccagcccgaagaagccgggcagaccaggcagcag

SEQ ID NO: 21067 - RNA, 55 nt, Homo sapiens
agaccgggcgaagggagaggacagcagggaggcgggacgcggaaagacccggaag

SEQ ID NO: 21068 - RNA, 76 nt, Homo sapiens
gcagagcgcaggaaagacaagccgggagcagacaagagaggggaagcgagagaaaaacaagcgccacacggcagac

SEQ ID NO: 21069 - RNA, 72 nt, Homo sapiens
ccaacaagaccaagcccgcggacgccaggggccagacccacggggccggcaaccccccaacaccacagccga

SEQ ID NO: 21070 - RNA, 76 nt, Homo sapiens
agaagaaccgagcccagcaagacccccagcgcccgcgccgcgcgccgggagaggcccggggcccgccggcgcccgg

SEQ ID NO: 21071 - RNA, 58 nt, Homo sapiens
gcggcggcggcggcgagccgagagggggaccacaagaaagaggagaggaaagcaccgc

SEQ ID NO: 21072 - RNA, 77 nt, Homo sapiens
gaagaccacagaggagggacaaaggacagaggccacccgcaccgcccgcaggcggggacagagcaggacccacagac

SEQ ID NO: 21073 - RNA, 52 nt, Homo sapiens
acaagccagcgcggagaccggagcaggggagcgcgacaaccggccgaggaca

SEQ ID NO: 21074 - RNA, 70 nt, Homo sapiens
gaagcggcagcccgaagaaaagcgacgcgggagacccccagacaggccacccagaaggccggcagagacc

SEQ ID NO: 21075 - RNA, 95 nt, Homo sapiens
cgaaacagccgagaaaaccagcagccagagacaccccgaaacggagaaagagcaagcacaaccaagcagaagagagaggagggcacaaaggaggg

SEQ ID NO: 21076 - RNA, 115 nt, Homo sapiens
cgccgccgcgccgcgcagaaggccggggccggccagaagcgggcggcgcgggggagagagacacgcggaacaagacaggccccccaaccacagcgcccccgcgccacccagcccc

SEQ ID NO: 21077 - RNA, 54 nt, Homo sapiens
gcagcccccagcccggacgccgggcccgggagagagggacaaaggaaaaagagg

SEQ ID NO: 21078 - RNA, 86 nt, Homo sapiens
agagcccaggacggccgaggaggggggaacaagcaagaggaaggggaggagggccaagagccacggaggagacaccagcgcacacg

SEQ ID NO: 21079 - RNA, 77 nt, Homo sapiens
agcgggaaacgggagggaaccagcaacaagccgggggccacggacggggccgagcacaaccacccaccggacgggac

SEQ ID NO: 21080 - RNA, 74 nt, Homo sapiens
agcggaggccccagggggagagaccgccgcgaaggcccccaaaacagcccaaagcaggccgggagaagacggga

SEQ ID NO: 21081 - RNA, 75 nt, Homo sapiens
aaaaagaagccccgcaaaggaacaagaaccggcaagccaaggccgggaagagagagacaagcaagccgacgagca

SEQ ID NO: 21082 - RNA, 58 nt, Homo sapiens
gggcaagagaagaacagaagaaacaaaaggccaccgaagaggaagcgacacaaacccg

SEQ ID NO: 21083 - RNA, 88 nt, Homo sapiens
ggagggagccgcgggaggaccgcaggggcgggagcccgagccccacaccgccgggcagcagggcggacgcgacagcgccggaccaccg

SEQ ID NO: 21084 - RNA, 72 nt, Homo sapiens
caggagaaaagaaaacacagcgcaggaaaagacccaccccaaggacagcaaggcggcaaggcgggagaccag

SEQ ID NO: 21085 - RNA, 73 nt, Homo sapiens
gaccgagagcggaccgagagcgcgaaacgcacgagaagcaagggggaaagcggaccaagaggaaacccgaaga

SEQ ID NO: 21086 - RNA, 74 nt, Homo sapiens
cagcgagacccgccaggagcaaagggcggaaaacaccccaaaagccaaaagggaaaggaaaagaccaacaacag

SEQ ID NO: 21087 - RNA, 57 nt, Homo sapiens
cgcagggcgcccccggcagcggacggagcaggaacgacagcaggagagccaagaggg

SEQ ID NO: 21088 - RNA, 66 nt, Homo sapiens
caggcagacaggccgaaaggaggagggagacaggggcaaaaaacggcagggaagaggcgagacaga

SEQ ID NO: 21089 - RNA, 76 nt, Homo sapiens
gacgcgcgccgcacggaggcaagaagaaacccaccgcaaagagggcccagaaacacgcaaaacacaagaagaagag

SEQ ID NO: 21090 - RNA, 73 nt, Homo sapiens
ccaggagacccgaccccaagggcccggggacacgagcggccccagcgcccgcacaaggcacaccccgccggcc

SEQ ID NO: 21091 - RNA, 78 nt, Homo sapiens
gaacccgcacagagggcaacagggccggagggagaacacaggaaccggagcgggcaagacaagccgccgggagggagg

SEQ ID NO: 21092 - RNA, 64 nt, Homo sapiens
acaagcaaaaaaaaccgccccgccagcagaaggagaacgccaaaagacgaacacaaagggaaag

SEQ ID NO: 21093 - RNA, 60 nt, Homo sapiens
ccgaccccccggcgccgcgccggcggcgcccgggaccgggagcccgggaccgggagccgg

SEQ ID NO: 21094 - RNA, 88 nt, Homo sapiens
cagccaaggcaacggggacggaagggccgaggaacaggaaacgaccacagaacagacaggcccagacacccaagcggcgaaggaagaa

SEQ ID NO: 21095 - RNA, 76 nt, Homo sapiens
ggaaggccaccgagggaacccgaccggacccagccccagaaggggaaggaacaaagcagagaaaccaaaaggccag

SEQ ID NO: 21096 - RNA, 60 nt, Homo sapiens
ccggccgggaggagcagggaagggacgcaaaaaggaagccccacaaggaccaggcaaaac

SEQ ID NO: 21097 - RNA, 73 nt, Homo sapiens
gaccgcgccgagcagagcagcccgcccagcggcgggccacaccaggggaacacggaagaacaggccaaacaga

SEQ ID NO: 21098 - RNA, 78 nt, Homo sapiens
gagcccgggagggcggccgcaggcagccccacccaccacagaagggcagcccgaaccagacggcacgcagggccggag

SEQ ID NO: 21099 - RNA, 95 nt, Homo sapiens
gccggcagcccgggaaaaggagcccggcagagggcccccgagcgcgccccaagagcaaaagaagccagcccaaggacgccacaagaagaagcgac

SEQ ID NO: 21100 - RNA, 75 nt, Homo sapiens
aggaagcaagcagcagaagagccaaggaaaaacagcaagaacccaaaaggaaaaggaaccacagaaggagggagg

SEQ ID NO: 21101 - RNA, 58 nt, Homo sapiens
ccaggccccgacgccccgaggcgacgaggcggagacacggggagaggccggggagaga

SEQ ID NO: 21102 - RNA, 69 nt, Homo sapiens
ggagccccccaggaagcggaccgaacggacagacaagggccaagggcagggagaagggacaacacagaa

SEQ ID NO: 21103 - RNA, 64 nt, Homo sapiens
gacgggcaaccaacaagaaacagacacaccgcacaggacaggagcgaaggaaaaaacagaagac

SEQ ID NO: 21104 - RNA, 68 nt, Homo sapiens
gggaagggaaccggaaaagacaagggggcaaaggaagaccgacaagcaggcagcgggacccgaccaag

SEQ ID NO: 21105 - RNA, 74 nt, Homo sapiens
cccggcccgccaccccacccggcaccgacgagaacccacaggagggccagaggacaaagcacggcggaagagaa

SEQ ID NO: 21106 - RNA, 75 nt, Homo sapiens
caggaagaaagaacgcacaaaacaccaagaacaaagaagcgaagaaggagaagcagcaaaggaacaggccaagga

SEQ ID NO: 21107 - RNA, 62 nt, Homo sapiens
agaagaggacgacgacgacgaggaagaggaggcgagcgccgaacaaagcaagaagcgccggg

SEQ ID NO: 21108 - RNA, 64 nt, Homo sapiens
ccgagaagccgacggagaaagggaagcgagaagagcagaagaggcagacacaagaagaaccgcg

SEQ ID NO: 21109 - RNA, 78 nt, Homo sapiens
caagcgaagcaccgccgcaacccagcacaccgccggcgcggggaggcccagcccgccgcagggccaccccgcggccca

SEQ ID NO: 21110 - RNA, 39 nt, Homo sapiens
gggcagggcccgcagcagcaggggaaggagaaccccgag

SEQ ID NO: 21111 - RNA, 77 nt, Homo sapiens
gcgaccggccccgacccgcccgccgaccccagagaagagggcgccacggagagcgcgggcaacccgggcaggcggcg

SEQ ID NO: 21112 - RNA, 73 nt, Homo sapiens
acagggcaaaaaagaaacgcaagcacaaaaggaggaaggacgcgcgcagaaaaccgaagcccccacaagcaaa

SEQ ID NO: 21113 - RNA, 59 nt, Homo sapiens
ccccagccgcgcgaccgcgccggaaacgaaccaggaacggaggccggaaagagaccgcg

SEQ ID NO: 21114 - RNA, 72 nt, Homo sapiens
acgccgcaacccgcggcagagagaaaaggcaaaaaagaccggagccaaggaagggcacaaaacagggagaaa

SEQ ID NO: 21115 - RNA, 74 nt, Homo sapiens
gagaagacacacaggccacagcggggccacgcggccagagaagggagggcaagcagaaagcagaggaaaacgaa

SEQ ID NO: 21116 - RNA, 72 nt, Homo sapiens
ccgaggaaacagggaaggcaaccacgaacaaagcagcagcaagcgcgcggacacccaccgcgaagaggccgc

SEQ ID NO: 21117 - RNA, 78 nt, Homo sapiens
accccggcggcggcgggcggggcgggggacagaggagacgcccgccccgcccagagaagaccagggaagccaaaaagg

SEQ ID NO: 21118 - RNA, 72 nt, Homo sapiens
cccagaccgcagaaaccaccccaccgaagcaccagcaccaagaccagccagggagacgacccgcgggaaccc

SEQ ID NO: 21119 - RNA, 72 nt, Homo sapiens
cgccccgggcaggcccccaagagccgaggcgcggcgcgccgaggcgcccaccaggccgccaacggaagcaga

SEQ ID NO: 21120 - RNA, 69 nt, Homo sapiens
caggaccagacccacagaagcccacacgggcacaggggccccgccagcaaggggccgaaccccaccgac

SEQ ID NO: 21121 - RNA, 71 nt, Homo sapiens
aggaggccccagcggaccgaacaggagcggcggcagcaggaacaagacagacagaaaagccacgccagcaa

SEQ ID NO: 21122 - RNA, 85 nt, Homo sapiens
caagaggaggacagcgcacacagcaagcacgaggagccccggcacaaaggaagaagaaagaagggagcaagagcaaaaaagaaga

SEQ ID NO: 21123 - RNA, 78 nt, Homo sapiens
acccccccggccagacaggcaccgcgcccacaaagaaaccgcaggaaacgagccggggggacgaaaacgagaaaagga

SEQ ID NO: 21124 - RNA, 86 nt, Homo sapiens
ggccgcagcgggagcggacggcgagcgcgagcggcgcgagaaacccccgccagccgccgcagcgacccgaccagacaagacggccc

SEQ ID NO: 21125 - RNA, 78 nt, Homo sapiens
cgggaggggccgggaggcagaggggcagggggaccacaaccaagagaacgggaccgcagggcggagcgcccgacgggc

SEQ ID NO: 21126 - RNA, 75 nt, Homo sapiens
gaagcgcgacaacacacacacagcgacagcacaagaagcgcggggccacagcaggaggacacagcacacaggagg

SEQ ID NO: 21127 - RNA, 86 nt, Homo sapiens
accccggcggccgaagacacgcgacccggagacagcccaaaacccggaagagcgccccaggagaaacaaagcacacagagaaaaac

SEQ ID NO: 21128 - RNA, 67 nt, Homo sapiens
cgcacacagcaagcacgagagcccaagagaacgaaagcacagaaaacaacgccccaggaccgcagag

SEQ ID NO: 21129 - RNA, 73 nt, Homo sapiens
aaaagaaacaacagaaacggcacccaaaggacccagaagaccccagacggggagcgcagcagagggagcgccg

SEQ ID NO: 21130 - RNA, 75 nt, Homo sapiens
agagacaaaagagggacacgcaggaaaagagcaccgcaaggggcagcgaagcggcagggaggaagcccagggacc

SEQ ID NO: 21131 - RNA, 72 nt, Homo sapiens
aaccgaagaacagcgggaaagaaggcaaaacacggggcgaaagacacacagaagccaggaaaggaacaaaca

SEQ ID NO: 21132 - RNA, 66 nt, Homo sapiens
gccggcagaaaagggaacgaagagacaaggacaagaacgcaaagacggcaacacacacgaaggagc

SEQ ID NO: 21133 - RNA, 66 nt, Homo sapiens
gacagcgagaacaaaggagagaggaccacccagaggagcaacagccaaggacagccgagaaagcaa

SEQ ID NO: 21134 - RNA, 71 nt, Homo sapiens
gcggagaaaaggaaccggccccggccaacaaaaaggagaagaaagagcgcggaaccaaagcccagaacccc

SEQ ID NO: 21135 - RNA, 75 nt, Homo sapiens
gaagacggggcgaggaagacaccacccagccacacccgggaaacacacccaagcacggcgcggaagcaggaaagg

SEQ ID NO: 21136 - RNA, 72 nt, Homo sapiens
cccgggaaagcgccgaggggcccgcaccgcaggggacccccagagagagcaaagagagagaaaggagccgga

SEQ ID NO: 21137 - RNA, 62 nt, Homo sapiens
ggcggagggaaccgggcgcggcggccgaggccgggccagaggagcagccaagaagcccccca

SEQ ID NO: 21138 - RNA, 74 nt, Homo sapiens
ccacacacacaggaaggcagaaagcacagccgagcccacagacaccaaggagaagcagaaggcggaagaaggca

SEQ ID NO: 21139 - RNA, 73 nt, Homo sapiens
acggggggaggacccgaccaggcacaaagaaccccaacacacggagccccaacaccggggagaagggcgcccc

SEQ ID NO: 21140 - RNA, 83 nt, Homo sapiens
ggacagccaagggcggagcacccccaaggacaggccccggggagagccggacgagcgggagaggacaccacacaaaaaacagg

SEQ ID NO: 21141 - RNA, 81 nt, Homo sapiens
gaacgacgccccgcacaccggagcgcccagcgcgaggaggacacggacgacaccgagcccaaccgaccaaccacaacaccc

SEQ ID NO: 21142 - RNA, 77 nt, Homo sapiens
caagaaaagagcccaccaccaccaagcaagcagcgcaagccccggggcagagacacaggacacccacccgccgggga

SEQ ID NO: 21143 - RNA, 75 nt, Homo sapiens
gcgcaggccggaacacgggcggccacgaggagacacaaaaacagacgggaagccaaggaaggccagacacggaaa

SEQ ID NO: 21144 - RNA, 38 nt, Homo sapiens
cgcacgggcccagcaaacaccgagagagaagaaggcac

SEQ ID NO: 21145 - RNA, 61 nt, Homo sapiens
agacacagaggagccacacccccagcgccagcacggacgacagggcggccggaaggaccaa

SEQ ID NO: 21146 - RNA, 84 nt, Homo sapiens
ggaagcgggaggacgggccaccgcggcgcgcgacaaacgggccacaaagcacggaacgaaaacgagggaccacacaaagacagc

SEQ ID NO: 21147 - RNA, 57 nt, Homo sapiens
gaggggagggcacaaccacacagaccaacacaccgaaggaacgggcgcaccacgcca

SEQ ID NO: 21148 - RNA, 73 nt, Homo sapiens
cggaggaagggaagggagaaggcgaacggacaaaacacgaacgagagacacagcaagaaaacccacaccgcca

SEQ ID NO: 21149 - RNA, 77 nt, Homo sapiens
ggaggaaagaccaacagagagaccagaaaagaagggagccgagaacagagggcacaaagcagaagcggcaaagcccc

SEQ ID NO: 21150 - RNA, 75 nt, Homo sapiens
cacagcgaacaaaggaacgaaaaacggagaacaccgcaccaccggggagaacaagaaagccagcgggggagcaca

SEQ ID NO: 21151 - RNA, 86 nt, Homo sapiens
cgcagcggccgccaacagccaggcccccaaaaaccggcagggagacgagaaccccgaaaagcaaaggcccacccaggcacagggag

SEQ ID NO: 21152 - RNA, 81 nt, Homo sapiens
aaggcggcagggcagcagaagcgcaccccgacgccgaggaacgagagcgcgaagcaagagggaagcccacagccgggccca

SEQ ID NO: 21153 - RNA, 81 nt, Homo sapiens
aacaggaaaagccggcagagaacggccccgaagggaggggggaagacagggcccagcaccacaggacgggccgggaagccg

SEQ ID NO: 21154 - RNA, 80 nt, Homo sapiens
gcgacccccggcgagcccacaacccacagacgcaaggcaccagcagaacagacacccccaaagaccagacacgagggcaa

SEQ ID NO: 21155 - RNA, 87 nt, Homo sapiens
aacaacaccgccagcaagcacaagccaggaagcggagagcagcaagaggaagccaaacgacaggaaaagacccacccagccaacaaa

SEQ ID NO: 21156 - RNA, 81 nt, Homo sapiens
ccgcgcccgccgcgggagagaggagaagacagaggagccagaccaagagacagcacaggcgagcgagcagagacaccaggg

SEQ ID NO: 21157 - RNA, 80 nt, Homo sapiens
gggccggccagagcaggaaaaaagcgaaggcaacaggagcgggaaacggggagccgccaccaaaagcagacggaaaaccc

SEQ ID NO: 21158 - RNA, 82 nt, Homo sapiens
aacgagagaggcaccgggacggaccgagaccggaccgagagcggaccgagagcgcgaaacgcacgagaagcccgcaccaacc

SEQ ID NO: 21159 - RNA, 36 nt, Homo sapiens
cgcaagaaagcccgcaacggagacagggccggccgg

SEQ ID NO: 21160 - RNA, 65 nt, Homo sapiens
ccacaggaggcgcggaggacgccccaccgccgacgcccccagccaccagcggaccagcagacaac

SEQ ID NO: 21161 - RNA, 68 nt, Homo sapiens
gcccagcccccgagggcgggaacaggacagacgggccacagccaacgaaaacaaagaagacaaagagg

SEQ ID NO: 21162 - RNA, 70 nt, Homo sapiens
aggaacggggggagagaacccaaccagggggaaacacagaacgcagggcgaacaagaggcgccagcgggc

SEQ ID NO: 21163 - RNA, 80 nt, Homo sapiens
gaaggcgaggcgcgaagaaaagggaaagcacgaagggagcccagcgacacaccagcagcagccaaagaccaaccagcccc

SEQ ID NO: 21164 - RNA, 66 nt, Homo sapiens
caggcgacagaggagaagaagcacaggaggagaggcaaagcaaggcacaaacgcagaaagggaggg

SEQ ID NO: 21165 - RNA, 85 nt, Homo sapiens
gggaacaaagccgaagaccccggagccccagccagggaaccacggagcacgagaaaacggcgggacagaaggagaccggagccgc

SEQ ID NO: 21166 - RNA, 74 nt, Homo sapiens
cccgacaggcggcgcacggaaacagccacagcaggggccgaagagaacaagagcgggcaccccccccggcagac

SEQ ID NO: 21167 - RNA, 58 nt, Homo sapiens
ccacagcaaccagcaccagagaaggagcacccgggagaagccaaaggagcgcggaaga

SEQ ID NO: 21168 - RNA, 54 nt, Homo sapiens
gccagcgaccggaccccaccaagcaaagaggccagacacacgcggccccacaaa

SEQ ID NO: 21169 - RNA, 83 nt, Homo sapiens
cagggcccgcagcgagcccaggaccgacagcagaggagcgcaagaacggagaacaccgacggagaaaacaggagcgcggcgac

SEQ ID NO: 21170 - RNA, 69 nt, Homo sapiens
accaccgcacccgggcccgcaccgccaacagcgccccaaaagagaagccccgggaagaacaacggccag

SEQ ID NO: 21171 - RNA, 77 nt, Homo sapiens
ggcaagaaaacacgcccagacgaacacaaggccaaacgccagggcgaaggaaccacagcacagccacagccccccag

SEQ ID NO: 21172 - RNA, 75 nt, Homo sapiens
cagccaccacggagaacacaccggcacccggcccgcgggggcccgccggcggagcgagagccgggggagcgccgg

SEQ ID NO: 21173 - RNA, 79 nt, Homo sapiens
gaggagcgcacggaccacccacaccgggagcgcgagggccgcacaaggagcagggggagaggcaccagcaacagaccaa

SEQ ID NO: 21174 - RNA, 54 nt, Homo sapiens
ggccaaagaagggagagaggaaacaagaagaggaagaaagccaacaaccccggg

SEQ ID NO: 21175 - RNA, 41 nt, Homo sapiens
ccggaagaccagccaacaggccccgggaccaaggacacgca

SEQ ID NO: 21176 - RNA, 81 nt, Homo sapiens
agaaggcgcccgagagaccgccggggcaccagcaacaggggagcgaacaaggagcggggaggagaaagagggaacccccca

SEQ ID NO: 21177 - RNA, 77 nt, Homo sapiens
cagcgcccagcagcgcaggaaaaacacaccgacccaccgggcgccgggaagcgaaaagaccaagacaaaaaagcggg

SEQ ID NO: 21178 - RNA, 66 nt, Homo sapiens
gccagaggaccccaaacgggccacaaaccggcccaacaaccacaagggaaaagggggccaggaagc

SEQ ID NO: 21179 - RNA, 70 nt, Homo sapiens
gaccacacgggcgccaccagcggccggaacacggagggaccagcagccaggaccgaaacgaagccacggg

SEQ ID NO: 21180 - RNA, 81 nt, Homo sapiens
ccagacccggagacgacccgacgaagcccacgccgggacccagcgcagacaaaggaacgcagagacaggaagcggacccag

SEQ ID NO: 21181 - RNA, 75 nt, Homo sapiens
cgacaccaccgcgcgaccgcaaccggccagggcggaacccaccaggaccccgcaggccaggcgcaggccccgccg

SEQ ID NO: 21182 - RNA, 75 nt, Homo sapiens
cacaccagccggacggcggggccgggcccccggccgcaagcagggagaagaaaagcaacacagcgaccagaaaaa

SEQ ID NO: 21183 - RNA, 78 nt, Homo sapiens
ggcgccggccccaaggaggagcgagacacccccagaccaggggacacccaacagcaggaggcagaaacagaccggaga

SEQ ID NO: 21184 - RNA, 70 nt, Homo sapiens
cgaagaggcgaggagcaacccaacccaagaagcacagagagagggcaggagccgcggcccaacagcggaa

SEQ ID NO: 21185 - RNA, 78 nt, Homo sapiens
cggccggcagcaagcagccaccgccgcccaacgccgcccgccaccaccggagccgaggcagcacggcaggagacgagg

SEQ ID NO: 21186 - RNA, 81 nt, Homo sapiens
cacccccaccgcccaggcaacaaagggggaccagagacacccgacccgaccacagcggaggagagagacgacagcccaaaa

SEQ ID NO: 21187 - RNA, 77 nt, Homo sapiens
acaggacagccagagaccgaacagagagaacaagagacgcagccgcacagagcaagcaagaagacacgaaagcagaa

SEQ ID NO: 21188 - RNA, 44 nt, Homo sapiens
ggaccgcaggaggacgcagacggagccaagaagcgagagaagaa

SEQ ID NO: 21189 - RNA, 71 nt, Homo sapiens
aggaagaggcgagcaggggccaccacgagcagcggcaaagaccaggaagaccagcggacaacggccagacc

SEQ ID NO: 21190 - RNA, 84 nt, Homo sapiens
aagcaagacaccacagacccaggcaacgaagaacaggcaagaacgcgcaacacagcgaccgacgggaccggcgcaagcagcgga

SEQ ID NO: 21191 - RNA, 77 nt, Homo sapiens
caagggcgcggagccgcgggccggcgagcgcgcgccaccaggccccgggggcgccgagggcacaagggcaacgacag

SEQ ID NO: 21192 - RNA, 71 nt, Homo sapiens
aaggccaagaaggcaggcccaaaggacgccaggcaaaagaaggcacgaaggagcgaaggaagagacgggcc

SEQ ID NO: 21193 - RNA, 84 nt, Homo sapiens
agagaagggcaacaggcccccgagagagcagcagcgcagaggagggccccccacacaccaaccaggcccacaaaggccgcgcaa

SEQ ID NO: 21194 - RNA, 79 nt, Homo sapiens
ggaaaaaaagcagacaacgaggagaggacggggaccaaaggcacagacaagaaagaaaggccaaggggagagcccgagc

SEQ ID NO: 21195 - RNA, 72 nt, Homo sapiens
aacaggaacaaagccagacggcgcgagccggcacgaaacaaaggagcgagacagaagagaaccggaagggga

SEQ ID NO: 21196 - RNA, 61 nt, Homo sapiens
cacaggaccccagagcgacagcccgggacaccaagaaagaacgaacacgaaacccgaagaa

SEQ ID NO: 21197 - RNA, 73 nt, Homo sapiens
aagaagccccaagagaaaggaccagaaccaaggaagaaaccggcagaggaacaggggggagccgaaacccagg

SEQ ID NO: 21198 - RNA, 78 nt, Homo sapiens
cgcccagccccgagcagcgggaacagacgccaagaaggccagaggcacacacaagcaaggacccaagaacaacccaaa

SEQ ID NO: 21199 - RNA, 86 nt, Homo sapiens
ggccaccgcccagcgggagaggagcccaccaggacgaccgcgccgcccagcacgccagccagccgaggagccggacacagcgcgcg

SEQ ID NO: 21200 - RNA, 79 nt, Homo sapiens
cagagaagaacccccccgaggcaggggcccagggcccggcccacagggacagagagggaaagccggcccacgagacccc

SEQ ID NO: 21201 - RNA, 70 nt, Homo sapiens
cgccggacaacaccgcccccagccgggcgaggcccacgcggaccggcagcgccaccggaccaccagacaa

SEQ ID NO: 21202 - RNA, 78 nt, Homo sapiens
cagaacggcagcggacaacgacaaaaccggacagcagaaccccccgaaccaagcccaaccaccccccgccacggccca

SEQ ID NO: 21203 - RNA, 74 nt, Homo sapiens
gggaaacacagcgcaggccaccggcagccgggagcgcaaacgggcaccgggccgcaagcagggggaacacccgc

SEQ ID NO: 21204 - RNA, 83 nt, Homo sapiens
aggcccggcccagagggacaagagcccccaaaggaccgccgagacagcgccccccgcaccaggcggaaagagccagaacaagc

SEQ ID NO: 21205 - RNA, 83 nt, Homo sapiens
caccagaggaaacccagcaaaacaaaccgagggcggcgacggcggcgcgaggaccgaccgggcccgcggacgaagaaggcacc

SEQ ID NO: 21206 - RNA, 79 nt, Homo sapiens
aaccaccgggggccaggacagagacaccacgggcagaccacggaggaagacgaagggccggaaaggggaaagaggccgg

SEQ ID NO: 21207 - RNA, 71 nt, Homo sapiens
caacaccgccgccacggacgcagcacaccaaccacaaaaagcgcggggaccacgagccaggacccagcgcc

SEQ ID NO: 21208 - RNA, 72 nt, Homo sapiens
agcaaggggcaagagccacgcgcaacgagaggagaggggcgccccccccggaagacagcccaccccccacac

SEQ ID NO: 21209 - RNA, 85 nt, Homo sapiens
gaggagcaacagaaacagaaagaccccaggagaagacaggggaagggagcagaagggcagcaaaccgaagagagaggccggagaa

SEQ ID NO: 21210 - RNA, 76 nt, Homo sapiens
caccacggcacgcacaaggcgaggcggaaagagggcggcaccaggacgccgaaaagcgaccggacgcaggcacagg

SEQ ID NO: 21211 - RNA, 78 nt, Homo sapiens
gaagagaggccccccaaagcaccgcgcaggacacgcccaccaagaaagaaccggaaaggggaccgggccaggaaagca

SEQ ID NO: 21212 - RNA, 46 nt, Homo sapiens
cgaggcgaaccagaagaggcacacccagaagccacaggagaagcaa

SEQ ID NO: 21213 - RNA, 70 nt, Homo sapiens
agacgacgcaccgcaggcagacaaaagggccaaagaagggagagaggccccccggaggccagccccccgc

SEQ ID NO: 21214 - RNA, 82 nt, Homo sapiens
aaacgacggagacgcagagggacgaaagaagcgcagcggaggaaggcgagaacccccccaccaccggaaggcccgggcagag

SEQ ID NO: 21215 - RNA, 38 nt, Homo sapiens
ggaaaaaggcccccaagccgagacggggcacagggcca

SEQ ID NO: 21216 - RNA, 73 nt, Homo sapiens
ccccccggaccaccgcgcgccggggcccaggaaacaccagaaacaggaagaaaaaaaggccacgggcacgaaa

SEQ ID NO: 21217 - RNA, 72 nt, Homo sapiens
gccggggggccggaggcgccccacggaagaagagcaagaccaggccaggacaaacgcaggaacggaacagag

SEQ ID NO: 21218 - RNA, 72 nt, Homo sapiens
gagcggagagaaaagaacaggggggcgagagcgggaaaaggccacggccaaccacaggagcacagacacagc

SEQ ID NO: 21219 - RNA, 76 nt, Homo sapiens
agcaccggacacgaggagaaacagcagaaacgcaccaggccaaagaaagagaaaagaaccggaagcccagccaggg

SEQ ID NO: 21220 - RNA, 83 nt, Homo sapiens
gaggcgcggccaagcgcaaagcgggagagacggaccagaccagggccgagcacaggacagcccagagcaagcacacggaggcc

SEQ ID NO: 21221 - RNA, 52 nt, Homo sapiens
ccggcaggccggcccacacaccaaaagagccccgcccagaggccaccaaccc

SEQ ID NO: 21222 - RNA, 82 nt, Homo sapiens
aaagaacgacagagcaaccaggaaagaagaggaggccacaacagagaaggaaccagggacccaaagcaacggagccacagag

SEQ ID NO: 21223 - RNA, 65 nt, Homo sapiens
gcggaccaccacagcagacagcaagggaagaaaagggaaccagcggagcgggacaacgcagcaac

SEQ ID NO: 21224 - RNA, 72 nt, Homo sapiens
aacaaagcacgaggagcagacccagaaaaaagccgaggcgcagaagaaagggaaggacagaaggaagacgag

SEQ ID NO: 21225 - RNA, 80 nt, Homo sapiens
aagcagcggcccaggcgccagcagcccaagagcccaaaacccgccgggcaggaggagggaagccgggcgaggccggcggg

SEQ ID NO: 21226 - RNA, 79 nt, Homo sapiens
accaaagacgggcagaagcggcgagccgcccgagccagagggacaaagacgccaacgacacagcgggccccgcggacca

SEQ ID NO: 21227 - RNA, 85 nt, Homo sapiens
gacggaggagcgaccaccggaagaggaggcgcaaaagggcccgggaagaagaagaagcccagcgcgaagaggagaaccggcgcgg

SEQ ID NO: 21228 - RNA, 56 nt, Homo sapiens
aagggaggcgcgcgaccagagagcaaagccgaggccagcaacagaagaaagcaagc

SEQ ID NO: 21229 - RNA, 71 nt, Homo sapiens
ccacacgcccagacggggcagaaagaagagaaaagcagcaaaaagaagcagacaccagacagcaaccagcc

SEQ ID NO: 21230 - RNA, 85 nt, Homo sapiens
gaaaggaaggagcacaagccaaggacgcagggcaagacggaagcaaggcaaaggaaagaccgagcggcgggagcgaagcgcaagg

SEQ ID NO: 21231 - RNA, 59 nt, Homo sapiens
gagaaacgcgggggaccgaggcaccaaaacgggacagaagaccacagacacaaaaggag

SEQ ID NO: 21232 - RNA, 76 nt, Homo sapiens
ggaaggagcaccccacgcccaaaagggagagcagggacgaaaacccgaggcaccggacagaagggaggaagaccca

SEQ ID NO: 21233 - RNA, 77 nt, Homo sapiens
ggcccgaccagcacgcgaaagaagccgaggccgccagcgccaagaaaaaaacaaggccaaagccagccccagaaaca

SEQ ID NO: 21234 - RNA, 63 nt, Homo sapiens
ccccccacacggacggggaagggaagcagcacgccagaaagaaacgaaggacgcggggcgaac

SEQ ID NO: 21235 - RNA, 75 nt, Homo sapiens
accccaggaacggggaccacggcaacagaagcggcccaacgagaaaaaggccacacgaaaagcagcacgacaccg

SEQ ID NO: 21236 - RNA, 61 nt, Homo sapiens
aaaaacaaaacgaaccaggacggcaagccacacacccccacggcgagacccagagagccaa

SEQ ID NO: 21237 - RNA, 57 nt, Homo sapiens
aaacaagaccagaggaagaagcaaaacgcagcccagcgacaggcgccacccgacaaa

SEQ ID NO: 21238 - RNA, 106 nt, Homo sapiens
aggacgcaagaaccagcggccgggaagcaagacccaaccagagccgcaacagcaacggggcggcacacaaggagcgaagggcagggagaacgccaggcacagcacg

SEQ ID NO: 21239 - RNA, 59 nt, Homo sapiens
gcacacagcagcaagagcccaaacgcgaaggaacggccaggagaacaaccagcaccggg

SEQ ID NO: 21240 - RNA, 70 nt, Homo sapiens
gaaacgcgaagaaaaacgcgggggacacccagccacacgcggagaagagggcggcgacggcggcgcgagg

SEQ ID NO: 21241 - RNA, 80 nt, Homo sapiens
cggaacgaaaggaacaggagccgccaggcgacacaccggaagcagcggaggggggcaaaccggccggggagcgcggggca

SEQ ID NO: 21242 - RNA, 86 nt, Homo sapiens
gagagcacaaccacgcagggaagcccaggggcaggaaggcccgaacaagacaggaacgccggcccggacgggagcggcagggagga

SEQ ID NO: 21243 - RNA, 75 nt, Homo sapiens
ggaaacgaaggacaacgagaagaaccggaagccgacccggagccgagcaaccagggccccgggcgcgggagccag

SEQ ID NO: 21244 - RNA, 77 nt, Homo sapiens
gacagaacagaagaaagcaaacaagcaggaaaaaaccgccagggccccggaagcacggacagagccgcaggcaggaa

SEQ ID NO: 21245 - RNA, 98 nt, Homo sapiens
gagcgggggaggaggagacgaaggggcaaaggggacgcggcaccacggcacgcacaaggcgaggcggaaagagggggcaaagaaaaaggagagaaaaa

SEQ ID NO: 21246 - RNA, 49 nt, Homo sapiens
gagcccgcggccgcgccgagcgggggcaagaagacagaccggcgcggcc

SEQ ID NO: 21247 - RNA, 81 nt, Homo sapiens
cccaggaagcagggcggccccacaagaagaacgaaaacaaacggaagagagggcagcaagaaagaacaagaaagcgaacgg

SEQ ID NO: 21248 - RNA, 69 nt, Homo sapiens
acaagcacgccgcccagacaaccgcgcgagaaacccaggccgcgcacaagaaccggcagcgaacaagga

SEQ ID NO: 21249 - RNA, 99 nt, Homo sapiens
ggacacgaggcgcacaagcaggacgaccgcggccggaccacgggaaggggcccgagaagggagccccggggaaggacggcacaagcgcccaaggcgagc

SEQ ID NO: 21250 - RNA, 73 nt, Homo sapiens
gacgaaggcggacgcgaggaggggaccgaaacaagaccccagccgggaacccgaagaggcaaacaccgcagag

SEQ ID NO: 21251 - RNA, 59 nt, Homo sapiens
ggaaggaagcaaaagaggcccccggccccaagacccgcccaccagagggggaggggagc

SEQ ID NO: 21252 - RNA, 59 nt, Homo sapiens
ccgagagcgcgaaacgcacgagaagggacaacacaggcacaagccagaagcggaagccg

SEQ ID NO: 21253 - RNA, 81 nt, Homo sapiens
cccaccgccggcgcgggaaacgggcgaagcgacgagccgcgaggagacaggacccagaccagccaaagagaagaagaaagg

SEQ ID NO: 21254 - RNA, 69 nt, Homo sapiens
accgggccccgagaacgacgacacacacgaaccagggacacagcaaggccagccccaggggcaggacag

SEQ ID NO: 21255 - RNA, 78 nt, Homo sapiens
aacgggccaaaaggaagacccagccagaccagggacaaagagcaaacagacagggccgcagggcagaaacccaaccaa

SEQ ID NO: 21256 - RNA, 69 nt, Homo sapiens
agcacagacggaaaccgcgcgaccacagccagcgacagaccccaacaccaacaagacgaaaaacggaag

SEQ ID NO: 21257 - RNA, 80 nt, Homo sapiens
cgcagggcgaagcggcggcggcggggggacgcacgagcccggcgccggcaggccccgggccggcgcgggacaaccaacac

SEQ ID NO: 21258 - RNA, 79 nt, Homo sapiens
agacggcgggggcacgacagcgcaaggaggccgcacccaaggccgcagacaagggccaccagagagagagggcccagca

SEQ ID NO: 21259 - RNA, 38 nt, Homo sapiens
ggcgacaagaccggaccgcgcgccccagaccaccggca

SEQ ID NO: 21260 - RNA, 81 nt, Homo sapiens
gagacaaaacggcaacaaacccacaacagacaaagagagacgacggggggaccaacaagaggaaagaaccacgcaggaccc

SEQ ID NO: 21261 - RNA, 71 nt, Homo sapiens
gagcacaggaagccgcaaggcaccaagaggacaacaaggcaaaggccagccgaacaaaaggccgaagggag

SEQ ID NO: 21262 - RNA, 74 nt, Homo sapiens
acacaacgaggagaacaggcaacacacaggcaacggagaagggcgaagagaaacaaagaagagaccagccagag

SEQ ID NO: 21263 - RNA, 67 nt, Homo sapiens
gacggcacaagaccccacccaaaagaccaaacacaagaagccagccaccggccggagcgaccgggga

SEQ ID NO: 21264 - RNA, 82 nt, Homo sapiens
acgacggacgaggacgaggaggcagccacggggccccgggcggggcggcaccaccgagcccacgggcacggcacccggcacc

SEQ ID NO: 21265 - RNA, 72 nt, Homo sapiens
cgaaggaggacaggagacgaccgagcagaacccccgaacagaacggaggcacgagcgagaaggccggaagcg

SEQ ID NO: 21266 - RNA, 74 nt, Homo sapiens
acgagagccaccaagcggaccagaacagaaggaaaacacccggcagggaaggaaggaacgcaaccgaagacgca

SEQ ID NO: 21267 - RNA, 81 nt, Homo sapiens
acgccaaaagccagaagagaaaggcagaggcccaaaaagaaaagagagagagaccaccccccaagccggggggggcacaga

SEQ ID NO: 21268 - RNA, 78 nt, Homo sapiens
gggcacgaagcagggccgacacaagcccgcagcgccaaccgaagaacagggacacaaacggccagacgagaaccccac

SEQ ID NO: 21269 - RNA, 85 nt, Homo sapiens
acagaccccaaaacacgagacgcgcagaacgcgggcagcggcgccagcccgggaggacgggccgcagggcagaaggagaagagga

SEQ ID NO: 21270 - RNA, 75 nt, Homo sapiens
gaaaagaagcgcagaagaaagacgcaagcaacacgaagaagagacgaagaagggcaagggcaaacgcgagacaac

SEQ ID NO: 21271 - RNA, 84 nt, Homo sapiens
ccgggccaggccgccgccgagccgaggcccagcccccggacacgggcggccggaaggcgaggccccgccagcccgccggcccca

SEQ ID NO: 21272 - RNA, 83 nt, Homo sapiens
ccaagaggggggagacggggaggacaggccagcgcggccaagacccgccgcaaggcccagcgcggcgcaggagaaccgagaga

SEQ ID NO: 21273 - RNA, 66 nt, Homo sapiens
gaaagaaagggagaagcccagcagagacaagagagggccccgcagaggcggaaaggacaaagagaa

SEQ ID NO: 21274 - RNA, 72 nt, Homo sapiens
cacaccccggaagcacacaggcgcggggagcgccacagggcacagccggggaggagaggggaagcaagggga

SEQ ID NO: 21275 - RNA, 77 nt, Homo sapiens
gggcgggccaagcagagccacaccaccgaagcggcagaagcagcgcggaggaagaagacgcgaccagggacgaacac

SEQ ID NO: 21276 - RNA, 57 nt, Homo sapiens
ggagaggcaagaacgccaaagacgcaagaaggagccaaaaaggggagaggaagaaag

SEQ ID NO: 21277 - RNA, 73 nt, Homo sapiens
ggaaaccaggcagccaaggcaggacaagcacacaaaaccggggccgcccaccggggggacccgggccgcagca

SEQ ID NO: 21278 - RNA, 76 nt, Homo sapiens
cgcccgccggaccgcgcccaggccccccagagccgcccacgaggacgcgggcccagggcgggcgggccccccaaca

SEQ ID NO: 21279 - RNA, 90 nt, Homo sapiens
cggaagggggcggccacgagcagaagaagcgcagaccccgcaaccgccagagcggaacgaccccagagcgagcccgcagcagcccagaaa

SEQ ID NO: 21280 - RNA, 77 nt, Homo sapiens
gagaggagcaggagaacagaagcagggggccaccgggcacagagagggcccgccaacgggaaaagaacgcaaaacgg

SEQ ID NO: 21281 - RNA, 74 nt, Homo sapiens
aggcagccagcagggggagaacggcgcacgaccccagagccgcccaacagggaaggagacccacccccaccccg

SEQ ID NO: 21282 - RNA, 70 nt, Homo sapiens
acaggacacggagggaacaagaccagagcacgggagggcagggagaggaagggagacggcaacggaagaa

SEQ ID NO: 21283 - RNA, 83 nt, Homo sapiens
caacggggcaagccccccacaaccccccggaggcagcacccaggaaaggagagagagcggagacaaggccacagcaggccacg

SEQ ID NO: 21284 - RNA, 77 nt, Homo sapiens
aagcacgaaagccccacccgccgcagcaagcagagagacaggggccaggccaggggcaggggaagcacccaaccaac

SEQ ID NO: 21285 - RNA, 78 nt, Homo sapiens
ccccccaccgcccgggcccgaggaggcagccaagccgagccgccacccggcagccgccggccgacgagacacgccgga

SEQ ID NO: 21286 - RNA, 55 nt, Homo sapiens
gccggaaagcccagaacagcacgagccccgcccggcccccacgacacaccgaaga

SEQ ID NO: 21287 - RNA, 86 nt, Homo sapiens
gcaagaccgggcccacgagccccaacaccacacaagcaaagcgggccacagagaagaggagcaagaagaccgacaaaggacaggac

SEQ ID NO: 21288 - RNA, 82 nt, Homo sapiens
ccccccaccaccaccacccacacccaccaacaacaccacaaaaccacagccaaggggacaggcaaagcccgggagaaacaga

SEQ ID NO: 21289 - RNA, 73 nt, Homo sapiens
aacaaggaagacaggagcacaaaggaaggaaggaaaaaaaccgaggaaaaagcaaagaaaagaaggaaaaaca

SEQ ID NO: 21290 - RNA, 82 nt, Homo sapiens
gcccgccagcgaaagaccgggggaggccgagggagcccccggaggcgcggaggggagccgcagcggcaagaacaagaaaaga

SEQ ID NO: 21291 - RNA, 60 nt, Homo sapiens
aggcggagggggagaacacccagggacaaaaccaggcggaggagggcccaggacagaacg

SEQ ID NO: 21292 - RNA, 76 nt, Homo sapiens
aggccgacagcagaccaccaccaccccagaaacagacagaagaaggaaccagcaaagcgccacgaagcacaagcaa

SEQ ID NO: 21293 - RNA, 81 nt, Homo sapiens
gcccacaacgagcccaacagccaggggagcagaaggcacaaagagcacacggaacgccagggaaggaccaggacaaacccc

SEQ ID NO: 21294 - RNA, 63 nt, Homo sapiens
ccgggaaaccgccgaagacgaagcccccccgcccccgcgggggcgggagccccagagaacaga

SEQ ID NO: 21295 - RNA, 82 nt, Homo sapiens
cacccacgcaggccagagagccccggaaagccagcgccacagcagcggccacagcagcagccccagggccggaggagggaca

SEQ ID NO: 21296 - RNA, 72 nt, Homo sapiens
aacaacggaaacgacacaaccaggcaaagcacaggcagacacaaggaacagccagccaggagaaaaacgaac

SEQ ID NO: 21297 - RNA, 50 nt, Homo sapiens
gcgacgggcgcggcagggaagcccacgcgagagacggggcggaagcacgg

SEQ ID NO: 21298 - RNA, 73 nt, Homo sapiens
gggcggacacgggcggcgcggaagggagcgccagcaggccgggcgcagaagaaccgcgggggcgaaccgacga

SEQ ID NO: 21299 - RNA, 63 nt, Homo sapiens
ggcccaacgcagaccgaggcgaagcgcgcagcgccgggcggcaggaccacaccccaagccaag

SEQ ID NO: 21300 - RNA, 69 nt, Homo sapiens
aaaggccagaccaagagaacagagaagagccaaacaaccaaggagccccagaaaaagaccagggaaaag

SEQ ID NO: 21301 - RNA, 79 nt, Homo sapiens
agccgccaccgggagaagcggccgggccaaggggagagccaaaaacacaaccagaccggagaaaaggccagaggggaag

SEQ ID NO: 21302 - RNA, 73 nt, Homo sapiens
gcaagaacgagagcagcagagaaggcgagaacgcggacaagcaaacaaagaggaaaaagagggcaacagcgaa

SEQ ID NO: 21303 - RNA, 53 nt, Homo sapiens
caagccccccaaagggcagagcccaaaaggcagagcgaggagagaagaaggag

SEQ ID NO: 21304 - RNA, 54 nt, Homo sapiens
aaccgcgacacaaaaacacgcaggaaaccaacaggagaaggcccaagacccaca

SEQ ID NO: 21305 - RNA, 83 nt, Homo sapiens
caagacaccccgagcgcagccacccccccaccccagcccaccccagcaaggagcaaagccacacgagagagcgacaacacgcg

SEQ ID NO: 21306 - RNA, 69 nt, Homo sapiens
agaaacccccagccgacgcccgcgccccccagcaagggccggcgcacaaaccagcaagagccagccccg

SEQ ID NO: 21307 - RNA, 80 nt, Homo sapiens
gacccccgcgggcgacgcgagcccagacagaaacagcccgccagcaagaaaccccaaaagagccaggaaagaagagaaga

SEQ ID NO: 21308 - RNA, 46 nt, Homo sapiens
agaaggaccaagaaccagagccgaagacacaaagcgcaagaggcag

SEQ ID NO: 21309 - RNA, 81 nt, Homo sapiens
caccgagcgcgaggcgcggagagcaacgccgggacagcgcaagcggagaggagcgaagagcgaagccagccagccgccgaa

SEQ ID NO: 21310 - RNA, 50 nt, Homo sapiens
gggagcaaaagcaccccgcaccaacgagaagaggaaggagggccccggag

SEQ ID NO: 21311 - RNA, 84 nt, Homo sapiens
agcgagcgagggggggcgcgccggaaaccggagcgcgcagcagacagagcgccgccaccgccgccaccacggagcgagaagccc

SEQ ID NO: 21312 - RNA, 58 nt, Homo sapiens
aaaaggcggcacaacacaaggacaaccaccaccagcgagcaaaagaacaaagaccaag

SEQ ID NO: 21313 - RNA, 79 nt, Homo sapiens
acccagcaaagagcccacacaggggaaccgcccaccgcgcccccagaacaggagagagaaggagagaagaggcagagga

SEQ ID NO: 21314 - RNA, 81 nt, Homo sapiens
gggggcggccggggccgccaccacacgaaacagggcaaggggagaacagccgacaccaacccacacagagcagagacaaac

SEQ ID NO: 21315 - RNA, 78 nt, Homo sapiens
gaagacacaccccacaggaccccagagcgacagcccgggacaccaagaaagaaccggggaccagagacgagggaagac

SEQ ID NO: 21316 - RNA, 68 nt, Homo sapiens
gagaccgagagcggaaacggccacacggccaggcaggagggaccaaggaacagaagacgcccgaaacg

SEQ ID NO: 21317 - RNA, 78 nt, Homo sapiens
gccgagacaaaggcaccaggccaccacagaaacaaaagcaacaaagaggagccaaggagcaaaacgaacgaagaagcc

SEQ ID NO: 21318 - RNA, 72 nt, Homo sapiens
acagcaaacggaacaagagaccagcagaagagacacgggagcaccagggcggcagaaggaggagacgggcag

SEQ ID NO: 21319 - RNA, 72 nt, Homo sapiens
gggcgggcgggccccccggcaacgcggcaagccaaagcgccacagggcagcgcgagagaagaaaggaagaaa

SEQ ID NO: 21320 - RNA, 76 nt, Homo sapiens
cccgagcgccgagaaagccccgggagaagcagcgccgcccggggcagaccaggcaggccccgggggcgccgagggc

SEQ ID NO: 21321 - RNA, 62 nt, Homo sapiens
gaggggacaaggagaagaaaggccccccccgagcccacacaaagcgaggggaagcggcaaca

SEQ ID NO: 21322 - RNA, 60 nt, Homo sapiens
ccggcacgaagccccgagccaaagcggacgccggccaccacgaaggcgacacagaagacg

SEQ ID NO: 21323 - RNA, 72 nt, Homo sapiens
agggaaggccacccaggaagaagcgcaaccacccaaaaggccgggcccaaagaggcaccagacacgaaagag

SEQ ID NO: 21324 - RNA, 56 nt, Homo sapiens
aggaaagcagcccgaaaaagacgcgagaagccacacggaagaaagagggccacgga

SEQ ID NO: 21325 - RNA, 61 nt, Homo sapiens
ccgagagcggaccgagagcgcgaaacgcacgagaagagcccagcaagaccacgacacgaga

SEQ ID NO: 21326 - RNA, 78 nt, Homo sapiens
acgaaggccgggcggcgaagggcgacggcccaggcagggcacacaacgagcagaaggaagaaagggcaggcgagagag

SEQ ID NO: 21327 - RNA, 77 nt, Homo sapiens
gaggccggaggacaccaacagggagaccgaaggaccaccggcagcgggaaaaaacgaccaagacaaacaaaagcagg

SEQ ID NO: 21328 - RNA, 76 nt, Homo sapiens
agacgagcagacgccccaggacgcggcagcgcgcgagggcagggaaggagaccacggagggacgccaagagggcaa

SEQ ID NO: 21329 - RNA, 74 nt, Homo sapiens
ccagcgcagcggggccgcgccagaacaggaacagagcacgggagacaccgcggacgcgggccgcgcagcccgga

SEQ ID NO: 21330 - RNA, 62 nt, Homo sapiens
ccgggggcccggaccccggcgcagcggaagccgcagaaggaccggccagaagcaagccggag

SEQ ID NO: 21331 - RNA, 73 nt, Homo sapiens
ggaaccgccgggccgaacagcagacgccgcggagaacacacaaccccgaagcggaaaccccgaaacagaagag

SEQ ID NO: 21332 - RNA, 77 nt, Homo sapiens
acgccgaagaggagggacccaagggagagagggaacggcgaaagggcagcccggaaggagcaccaccaccggaacgg

SEQ ID NO: 21333 - RNA, 76 nt, Homo sapiens
aaggaccaagaaccagggggagcgggccggagagaagagaggggcgcgaggagaaggaaacaggcccggaggcccc

SEQ ID NO: 21334 - RNA, 76 nt, Homo sapiens
ggcacccagcggccacacccgccacccacaggaccaggaggaaagaaagaaagaacgaacagcagaaaggaaagag

SEQ ID NO: 21335 - RNA, 75 nt, Homo sapiens
ggagaacggcaccaggacacacacaaccgggccccccagcgacacccagggccggaaggaggcccgaaaaacaac

SEQ ID NO: 21336 - RNA, 76 nt, Homo sapiens
agccaagaaaggaagaaaagccagaggaagagaccggagaccgggcccaaacaacaagaagagcccccagagccga

SEQ ID NO: 21337 - RNA, 38 nt, Homo sapiens
agagaaggacaacaccacaggaaagaccacagcaagac

SEQ ID NO: 21338 - RNA, 86 nt, Homo sapiens
aaaaagagccaagacaaaggcaaaccgaagaaaaaaaccagaagcggaacacaggaggcaagaccaaccgagagaagacccagaag

SEQ ID NO: 21339 - RNA, 82 nt, Homo sapiens
cgccgccagcaggggcgccccggacgagagcccggcgggggcgcaggcggacaacgcaggcccgggagaaccaggaaacggc

SEQ ID NO: 21340 - RNA, 55 nt, Homo sapiens
ggacgggaccaagacaccggccaacgaaggaaaaacaccagcaaccgacggcagc

SEQ ID NO: 21341 - RNA, 78 nt, Homo sapiens
cagagcagcgaccaggaagccgcggagcgccggagcaggcaaaagaaaccggaagagcaacggccgagagcacagcga

SEQ ID NO: 21342 - RNA, 61 nt, Homo sapiens
gggcacaaaaagaacccaccaggcaggagaccaacggggggcagaggaaaaggaccccggc

SEQ ID NO: 21343 - RNA, 61 nt, Homo sapiens
agaggaacgcaggagagcagcgaaggaggccaagcaaacgcagaaacgccagccaaggcag

SEQ ID NO: 21344 - RNA, 67 nt, Homo sapiens
ccgcacgcgcacggacggcacagcccgccgaacccgaaaggagaagacaaaggacagacccgcgagg

SEQ ID NO: 21345 - RNA, 55 nt, Homo sapiens
aacaacaaacgagcacgagaacacacaagaaaaacccggggaaggcaagacgggg

SEQ ID NO: 21346 - RNA, 74 nt, Homo sapiens
aacccagaacacaaaaacaccccacagaacaggagggcaaaacacagaagaagcaggccgcacgaacgcaagaa

SEQ ID NO: 21347 - RNA, 78 nt, Homo sapiens
cgggagcagcagagaggagcagcggaagccgggcgcgcccccccgcgggcgccgcccagggcagggaccaaccagcag

SEQ ID NO: 21348 - RNA, 82 nt, Homo sapiens
cgccccgccgccgccgaggaggcgagcagccgggagacaccgccaccgccaggagagggggcagggcaacaccggacccaag

SEQ ID NO: 21349 - RNA, 80 nt, Homo sapiens
ggaggaggacggccggcacgcgcccaaaggccaacggaccacaccaaaagccaccaaaggaacacgccaggaaaccagag

SEQ ID NO: 21350 - RNA, 51 nt, Homo sapiens
gagagaacaggaagcaaagggacaaaaggagagcaggaccccgcacagcaa

SEQ ID NO: 21351 - RNA, 72 nt, Homo sapiens
ccacacagaccccaggaaggcacacaggcagagacaagcccccccaaggagggggacgaaccaaaagccacc

SEQ ID NO: 21352 - RNA, 87 nt, Homo sapiens
aggaaggagcacgaacaacagccgcccccaccccacccagccggaggacaaggaaaaagaggaaagcagaaagaaacccgcggaaag

SEQ ID NO: 21353 - RNA, 85 nt, Homo sapiens
cagaccaacaagaggacccaggagaaacgccccaaaggaaagggagcagcaccggccacacccacagcacgaccggaacccagcg

SEQ ID NO: 21354 - RNA, 64 nt, Homo sapiens
aggagcagggcaccagccgccacaagaagaccaccggacaaggccagggaagaacaggcaaacc

SEQ ID NO: 21355 - RNA, 77 nt, Homo sapiens
agaagagcacccaaagcaaacaggcccgcgcggcagcggaaaaggcagagacgaagagagagaaacgaaaaagagga

SEQ ID NO: 21356 - RNA, 33 nt, Homo sapiens
ccgacccgcaggccagggaaaccaagccccagg

SEQ ID NO: 21357 - RNA, 67 nt, Homo sapiens
gccccacaacacgacgaacagcgggacaacccacggccgggcgccaaggccgggaacccaagacaga

SEQ ID NO: 21358 - RNA, 72 nt, Homo sapiens
cagagacaaagaacaggagacaccgcaaaacacaagaagaaagaaaacaggcaaagagagacggggcgccag

SEQ ID NO: 21359 - RNA, 58 nt, Homo sapiens
gaaagaaacagacaacccaaggcccaaaagggggccagagaagggcaccagacccgag

SEQ ID NO: 21360 - RNA, 53 nt, Homo sapiens
acggagcaaggaggaaaacacacggaaacgaaccaccaacacccgaaggaccc

SEQ ID NO: 21361 - RNA, 72 nt, Homo sapiens
aaggagacaggacgaagcccaaaccacaagccacaaaagcggagcggaggcagacacacacggggggagagg

SEQ ID NO: 21362 - RNA, 68 nt, Homo sapiens
aacacacacaggacaaaaagcacgaaggaaccaggagacgagggccgggcggagaaaggaaggccaca

SEQ ID NO: 21363 - RNA, 82 nt, Homo sapiens
agaagaccaagacccacagccccaggcccaggaggggcaggagaggaagggaaacaaggaagagccaggagagcccaaggaa

SEQ ID NO: 21364 - RNA, 78 nt, Homo sapiens
accccgccaaggcacggccaaacgaagaagaaccggcagacagccgggacacgaggaggccagagaaacaagcaagcg

SEQ ID NO: 21365 - RNA, 106 nt, Homo sapiens
caacagggacagcaggcaaggaagaacagaaaccgggaacacaaaaaccagcaagaaggaagagcaagcacaacaaaaggagcagaacaaaaggagcagaggaaga

SEQ ID NO: 21366 - RNA, 70 nt, Homo sapiens
acggaggagaggaccagagggagggaccaaaacaggaccggcgagcacagagcacaggagaagcaagcaa

SEQ ID NO: 21367 - RNA, 77 nt, Homo sapiens
aagagcgggagcccgaagaagggagcagacccccaggcccggccgggccaaggaaagacaaggagccgggccgagaa

SEQ ID NO: 21368 - RNA, 68 nt, Homo sapiens
caacgaaaagacagcaagcagaacgccaagagacgccaccggaaccacacaaccccaagggggccagc

SEQ ID NO: 21369 - RNA, 79 nt, Homo sapiens
gggggacacaggcgagagccgagcgcaggaggagggaagaacgccacaaccgcccccagcccaacccgagcggaccccg

SEQ ID NO: 21370 - RNA, 76 nt, Homo sapiens
cgaggccacgggacccggccaacgacacagacagaccgaggggacgggcccccaagccggcaggggaacgaggagg

SEQ ID NO: 21371 - RNA, 80 nt, Homo sapiens
ggacgccggcggagacgcgggcgagcaccaagaaggcggagaggaaagagagggaccaccgaaaaaccccaaacccacaa

SEQ ID NO: 21372 - RNA, 80 nt, Homo sapiens
ggaggggcgcggaggcgaccgccaggcgcccaaacccggaccagcaggccgaaaagaggaagaccaggcgggaggaggga

SEQ ID NO: 21373 - RNA, 81 nt, Homo sapiens
gacccggggcgcggagcgagcagaggcaaggccagcggggcgcccaggaggcaccacagggaacccgagcgcagaggggaa

SEQ ID NO: 21374 - RNA, 79 nt, Homo sapiens
ggacagcgagcgcagcaggacggcgaggaggccgaggaacagcgaacgggacccagccgagagaggggacgcaagaagg

SEQ ID NO: 21375 - RNA, 75 nt, Homo sapiens
caaagagagcagacccgaggagcccgcagacgaagaagacacgaacaggggacgaaaaacgagccgggggcaaaa

SEQ ID NO: 21376 - RNA, 82 nt, Homo sapiens
ggcgacgccaggagaccccaagcgcacgccgaggggaaacaagaagaggaagaaagccaacaaccccggggacacggcacag

SEQ ID NO: 21377 - RNA, 74 nt, Homo sapiens
gcaacgagagaggcccccgccgagcacggaccggcaccacgcagcaaaccggaaaagggccaggagcgggcggc

SEQ ID NO: 21378 - RNA, 77 nt, Homo sapiens
aggaaggcacacggaagacaagacccagaaacagaaagacacaccaacccgagggaggcgaggacgacgggcagacg

SEQ ID NO: 21379 - RNA, 72 nt, Homo sapiens
cggggggggacagcaggcgagggaaagacaaggagccgggccgagaaaccgaaccagagaccagagaagaaa

SEQ ID NO: 21380 - RNA, 72 nt, Homo sapiens
agaccgccgcgaaggcccccaaaacagcccaaagcaggacagagacaacggcccaacaacagaagacacacc

SEQ ID NO: 21381 - RNA, 70 nt, Homo sapiens
ccacagacgacacaaaacaggagaaacagaaacggaaaccacgcccaaccagagcaagagcaaagaggga

SEQ ID NO: 21382 - RNA, 76 nt, Homo sapiens
acccagggccggagaagcgcacccgagccggaaaaggggcaaaggacaaccaaaagggacgcaccaaagaagacag

SEQ ID NO: 21383 - RNA, 72 nt, Homo sapiens
ccaaaaccagccgacaaagagggggcccaagaaggggccggaagcccccggccgcccaccgccaggaggagg

SEQ ID NO: 21384 - RNA, 53 nt, Homo sapiens
cggggccggggaacacacaggacccccagcaacccagaagccagacgggaggg

SEQ ID NO: 21385 - RNA, 76 nt, Homo sapiens
gcgaggcccacagaaaagccacaacccagaaaagacccgaggggccgccccgcagaagcacgaagagaggcagacg

SEQ ID NO: 21386 - RNA, 67 nt, Homo sapiens
gcagccaggcccccacagcccgcagggcaacaaggacccagacaaggcggggcccgccgcccggaga

SEQ ID NO: 21387 - RNA, 38 nt, Homo sapiens
gggaccacaggaccagcagggaaaagagccgccaccag

SEQ ID NO: 21388 - RNA, 55 nt, Homo sapiens
gccgcacgcggggcagcccgaggcgcaccaggggacccaagggagagagggaacg

SEQ ID NO: 21389 - RNA, 78 nt, Homo sapiens
ccaacccacccggcgccgcggcccaaaagagaaggaagaaccccaggaaggccgacaaggagagaggagacccacaga

SEQ ID NO: 21390 - RNA, 66 nt, Homo sapiens
cacaggagcgagagaggaccccggacacgaaagccgggaaagcccaggacacgcgcgccccgagcc

SEQ ID NO: 21391 - RNA, 87 nt, Homo sapiens
gcggaggacgagggccagcgacggagagggcagaagaggaggaggccacagcacagcaaagccacaacacccaggaggcccccggaa

SEQ ID NO: 21392 - RNA, 86 nt, Homo sapiens
gcaggaagagcgggaggaagaacagcaagggccaacggaagccagagaaagggagaagaaaaagcagaaaggaacagaaaacaaaa

SEQ ID NO: 21393 - RNA, 83 nt, Homo sapiens
cccgcagccccgccagccacccccagcaccaggagacaaagccacaaaaacaccagaaaaaccaagcagaaaaggagcggcag

SEQ ID NO: 21394 - RNA, 57 nt, Homo sapiens
acggcagacacacaacccgacccgacgaggagccagagaagaaccaggagaaagcaa

SEQ ID NO: 21395 - RNA, 60 nt, Homo sapiens
ccggcggccaggacagagacaccacgggaggaccacgcgagggcaaggccagagaaggcg

SEQ ID NO: 21396 - RNA, 73 nt, Homo sapiens
ggaccgagggggacgaaagcggaaaaccgcaacagcaaagggaaccaaggaggggggaggcgcgcgacccggc

SEQ ID NO: 21397 - RNA, 58 nt, Homo sapiens
aggaggaaggagggaccggcccccagcaagccccagaacgaggaaccccagagaggac

SEQ ID NO: 21398 - RNA, 51 nt, Homo sapiens
gcagaagaacccaagggagcccagagaacgacagaacccaccgccacaacc

SEQ ID NO: 21399 - RNA, 57 nt, Homo sapiens
cacacgccaaggaggccgcaggagcacggaagcccgcacgcaggcccgccaaaccca

SEQ ID NO: 21400 - RNA, 71 nt, Homo sapiens
aacggaacagggagggaagaagccccaaccacacccccagggaaccacgggaccgaccagaccccaggggc

SEQ ID NO: 21401 - RNA, 79 nt, Homo sapiens
aaaacaacccacaggcgcgcacaacaacaaaaccagagaaaacggggagcgggagaggagcgcggcggcaggcccggag

SEQ ID NO: 21402 - RNA, 71 nt, Homo sapiens
cccagccggcgagggacgccgcagccaaaagcgagacaagacgaaaggacgccacaaggagcaaagaagaa

SEQ ID NO: 21403 - RNA, 71 nt, Homo sapiens
ggaggaagggcggcggaccggagaaaaccggaagagaaaggccgggaagcaggaaagaaaaaaacaacaga

SEQ ID NO: 21404 - RNA, 74 nt, Homo sapiens
gaaaaaaaagacccgaccaagccagaggacagaagaagaaagaacaagaggcagaaacaacagcaagaaagagg

SEQ ID NO: 21405 - RNA, 79 nt, Homo sapiens
gaagcagaccccgaaccagcccaaaaccggaagcagggacccagggccggcacgggcagcgagcagccacccggaggag

SEQ ID NO: 21406 - RNA, 71 nt, Homo sapiens
cccccccaccgaacagaaaacgcagacaaggcccaccaagccgagaacaccaggaaacagcccaggggaag

SEQ ID NO: 21407 - RNA, 65 nt, Homo sapiens
gcagggaggagcgggacaccccggaagcgggaaagggcggggacagcgcggaggaggggccccgc

SEQ ID NO: 21408 - RNA, 77 nt, Homo sapiens
ggcccggagaagccaagcacaaaggcacgaaccagccagcaagagccaggcacaacagagaaggagggaaggaacag

SEQ ID NO: 21409 - RNA, 86 nt, Homo sapiens
agccagcgcccggagcaagcggagccccccaagagccggaaaggagcaagagccccacccccgggggcaccccagcccaacagcac

SEQ ID NO: 21410 - RNA, 71 nt, Homo sapiens
caggaagaccaacaacaggccacccaaccgaaaacggaccagaacccagggaggcaagcaggggggcaaag

SEQ ID NO: 21411 - RNA, 59 nt, Homo sapiens
ccgacgcgccggcaggagcgccgaccgcagggcccacggacaacggcaagcggagaaga

SEQ ID NO: 21412 - RNA, 90 nt, Homo sapiens
gccacccgagaagggagacgacgcgcgggccgcgagcggggcgacccgagcccgagaacacgaaacaaggaagaaagaagcaagaaaaac

SEQ ID NO: 21413 - RNA, 76 nt, Homo sapiens
gaacaggccgaaagggccacaaacccaagggcggagaacggaaaagcaccaggaagcagagaggaccgcagaaggg

SEQ ID NO: 21414 - RNA, 61 nt, Homo sapiens
ggcggcaagggggcgaccaccggaggacccgaaaaccccgagaggcaaccaaaaaaacgga

SEQ ID NO: 21415 - RNA, 60 nt, Homo sapiens
ccaagacaggccggaacccgaaaggggggacccacaaggccgcaaaaggacccagagggc

SEQ ID NO: 21416 - RNA, 83 nt, Homo sapiens
gggccgggacgcagcccggcggcagcagagggcgaagacaggacggcccaggcagacacggaggaggaggaagaggaggaggg

SEQ ID NO: 21417 - RNA, 75 nt, Homo sapiens
gggaggaacagacaccgagccagcaagcccccaacggcaccggaaaagacccggacgacaaaacgaacgaggcga

SEQ ID NO: 21418 - RNA, 77 nt, Homo sapiens
aggggaagaaaagaaggggcagagaaagcagggaaaggagagcaccacacaagccccgagaggggagccggggacac

SEQ ID NO: 21419 - RNA, 60 nt, Homo sapiens
aagacaaacgacggaaaaggagagagaggggcgagaccaccgcacagaacagaaaacagg

SEQ ID NO: 21420 - RNA, 68 nt, Homo sapiens
cggaaagaagaaggagaggggagaaccccagagaccagagccccgacccaggacgaaccggaaaagag

SEQ ID NO: 21421 - RNA, 54 nt, Homo sapiens
ggggggggcggcccgcagcgaaggaccggcgcaggccaaccaccaccgggaaga

SEQ ID NO: 21422 - RNA, 80 nt, Homo sapiens
ggaaacgggacaaacggcgggcccgggaagcgggccggcagcgcccggacgaggagaaaaaccagacaccaaaggaagca

SEQ ID NO: 21423 - RNA, 78 nt, Homo sapiens
caagagcgacaggaggagacaggcgagagaggaggacacgaccgagcacagcaaggaggaaacagcaagggaacaaca

SEQ ID NO: 21424 - RNA, 86 nt, Homo sapiens
ggagcggacgccagcgccggccccccggcggagaagaagcgcggccgcaccggccaaggagcgacagacagcaccaagaagaagca

SEQ ID NO: 21425 - RNA, 72 nt, Homo sapiens
gagggacggccaaagggaagagcacgcacagcaacccgcaagagccccggggggagaggaggcaagaaaaga

SEQ ID NO: 21426 - RNA, 83 nt, Homo sapiens
cgcccgaaagaagaaaaacccaagaaagagcgcagcgggagaaggcagaagagacaacacagaaaccagggcggaggcaggaa

SEQ ID NO: 21427 - RNA, 82 nt, Homo sapiens
cgcagaagggggaaagagaccgggacagaacaggaagaaagagggccacggacagaggcgcagcagaggaaccgcagaagaa

SEQ ID NO: 21428 - RNA, 75 nt, Homo sapiens
gagggccgggggacaccggcagggcaggcgccccaacccaagccagaggaggcacccaggacgcgggcaagggag

SEQ ID NO: 21429 - RNA, 33 nt, Homo sapiens
cgggccagccggaaccggacaaaacagggcgac

SEQ ID NO: 21430 - RNA, 76 nt, Homo sapiens
agaccgacgaggaaaaaccaaaaaccgagaaacaagcaacgacaaagccaaacacaaggaccacaacagcagcggg

SEQ ID NO: 21431 - RNA, 76 nt, Homo sapiens
gacaaccgagcagcagaagcggggaccagaacacccccaccgagcaggcaccgggaaaacgcagaggaacgagggg

SEQ ID NO: 21432 - RNA, 79 nt, Homo sapiens
gccccaggacagcaccagcgggccggaggagccagagcgcagaaagaagaaagaagccaaagagaaggcaaagcaggcg

SEQ ID NO: 21433 - RNA, 77 nt, Homo sapiens
ggggacacccggacacggcaagggaagcgcccgggaggcgcaggaagaagaaagaaagcaaagcgaaaacggggcgg

SEQ ID NO: 21434 - RNA, 62 nt, Homo sapiens
cggaaagcaccccggccacagcggaaggacacagacaaaagaccaggagagagcagcaaagc

SEQ ID NO: 21435 - RNA, 74 nt, Homo sapiens
aagcagaagcaaagaaggcacaggaaaccagcggcgagagagagcaacccaacagaggaagccgcaagaaacgg

SEQ ID NO: 21436 - RNA, 49 nt, Homo sapiens
gaagacagggacgacgcggaaccacgggacacgccggcccacggcggcg

SEQ ID NO: 21437 - RNA, 74 nt, Homo sapiens
cccaaaccacccgaagaccaggcccgcacccaggacgacaaaggcacgagacgggggaaacagcagggaagcaa

SEQ ID NO: 21438 - RNA, 76 nt, Homo sapiens
cacagaaacgcgcaggcaggagcagagagacccagcacgaggaacagcagagagcagaaaggcgaagcagaggggc

SEQ ID NO: 21439 - RNA, 59 nt, Homo sapiens
caggagagaggaaagccagccccagaaagaaaaggggaaaaggaacagccgagcaagac

SEQ ID NO: 21440 - RNA, 83 nt, Homo sapiens
ggacccgcgccgcgcccccggcccgcgggcggcccacggcgagcaggcccagaagcacagaaaacggcaacgagagccaaaaa

SEQ ID NO: 21441 - RNA, 78 nt, Homo sapiens
ggacaccccaccccacccaggggccggagggaccccaggacaacagcaccagagcacaagagaagaggggcaaggcca

SEQ ID NO: 21442 - RNA, 62 nt, Homo sapiens
gagaaaaaaggaccaagcagaccagagagagcgccggacgcaaaagccaacccccagaaaac

SEQ ID NO: 21443 - RNA, 76 nt, Homo sapiens
gacccgaggcaagagagaccagaaggggaaaaagaaaagggcgaagacccgaagcagcgcaggaacagaagagaag

SEQ ID NO: 21444 - RNA, 77 nt, Homo sapiens
cgggaccagaggaacccacccccccaaggagaaggacccaaggaccggagagaacagaaaaaaagcggcccgggacc

SEQ ID NO: 21445 - RNA, 66 nt, Homo sapiens
gaagaccacaaaaaagagacccacagccagcaacaccggcaggcagggccaaagacccagggacag

SEQ ID NO: 21446 - RNA, 68 nt, Homo sapiens
gggaacaacccggcagcagacgacagaaagcacgaggccaagggcggggaaggagcgcgagcagaaga

SEQ ID NO: 21447 - RNA, 95 nt, Homo sapiens
gagagacagcgggagccacggccacacgggagagaaagcgcgcgcccaggggaggcagggcacgaccggccaggcaaccccgccccgagcaagga

SEQ ID NO: 21448 - RNA, 77 nt, Homo sapiens
gaaagaacaggccagaaaacagaaggccacgcggaaacaaggcgaccccagaaagaaagccggggaaagaaaagggg

SEQ ID NO: 21449 - RNA, 70 nt, Homo sapiens
gcggaccgcgggggagaacgaagcagaacggaaaaagcaaaagcgagaagaagagaaaaggaagaaccac

SEQ ID NO: 21450 - RNA, 82 nt, Homo sapiens
cggggccgcccccccgcacggacccagaaccagccgggcggcgcggcggcccgcagacgccaggaagccggacgcgcaggga

SEQ ID NO: 21451 - RNA, 107 nt, Homo sapiens
ccagagcagcacgcacagaagagaagaaagccaacgacccagaaaaccgacagggcacaaggccaagacggccaagggagccacagggcccagagcacggaaccggc

SEQ ID NO: 21452 - RNA, 60 nt, Homo sapiens
ccgagcgaaacgaaggagcaggcaagacggcacacagccgggggccgaggccccacggcc

SEQ ID NO: 21453 - RNA, 96 nt, Homo sapiens
gccaccggccgccacgcgacggccaaaaggagcggcgcggccggggcgggcaggacagaacaagcgagggaggcggcgggcgcaggaccgggggaa

SEQ ID NO: 21454 - RNA, 77 nt, Homo sapiens
aaggaccaagaaccagggcggcgaaagagaagggaaggagaaaagcagcgagagcacaggcagaggaacaggcccgc

SEQ ID NO: 21455 - RNA, 67 nt, Homo sapiens
ccggacgcggcggaggcgagcgagaccccaagacagcgggcgcgaccaaggaaacaaaggacaccag

SEQ ID NO: 21456 - RNA, 87 nt, Homo sapiens
ggaggaaaagagcaccagagcgccgggaggacgcaagcggagagccaggcaaggaccacacgcagggacagggaaaccaagagcaga

SEQ ID NO: 21457 - RNA, 57 nt, Homo sapiens
cgcagccccgcacagaacagaggacaccgagaaaaagggccggccgcagacccaaaa

SEQ ID NO: 21458 - RNA, 80 nt, Homo sapiens
aaggggaagaccagagcagaagacagacaaaaaccaagaaacaagcacagacgcagccagcaaggaaggcgggaacgccc

SEQ ID NO: 21459 - RNA, 42 nt, Homo sapiens
aaagggaagaggcccagccagagagaacccccacgaggaaga

SEQ ID NO: 21460 - RNA, 64 nt, Homo sapiens
acacgggccacacgcagcaggcacagcagaggcgggcgcggacggcaggggcgccggggaaccc

SEQ ID NO: 21461 - RNA, 78 nt, Homo sapiens
gcccgccggcacgccgccagccccgggggccacgagcgggggaaaggagacaggaaccaggaccagcagaccccacca

SEQ ID NO: 21462 - RNA, 73 nt, Homo sapiens
agggaccaggaaacagcgaagcgaaggagccaccggagcaacacagggcggggggaacgccaagcacaacggc

SEQ ID NO: 21463 - RNA, 77 nt, Homo sapiens
gcgcagccccgagacacaccgggaaagcccacagcgaagccaagcaaaaggagaagcggcaggcagccccacgaccg

SEQ ID NO: 21464 - RNA, 75 nt, Homo sapiens
cacagaaaacaggggccagagaaagaaaagccccgggaaccggcacaaggaggagagaaagaacccacgcaggac

SEQ ID NO: 21465 - RNA, 48 nt, Homo sapiens
gccgggcgggcgggaggcaggggaagcacaaaagcgcacccgcgccag

SEQ ID NO: 21466 - RNA, 71 nt, Homo sapiens
aaaaccaacgcccccccagcacacagaggagagcgacgagaagaggcgagaggcccgggggccaagccgac

SEQ ID NO: 21467 - RNA, 80 nt, Homo sapiens
ggggcccacagggccccggacaggaaagagggcgggaggaccagccaaggaagcaacacagcagcgagagaagcagaaaa

SEQ ID NO: 21468 - RNA, 62 nt, Homo sapiens
cgagacaccagagccacaagcagcaggaaaaaaccaggaacgccccaaaccaggagaaaaga

SEQ ID NO: 21469 - RNA, 74 nt, Homo sapiens
cgacgggggccgcgcacaccaaccccgacacggcgagggcgccacggcagggggcgaccggcccgaggaccgcc

SEQ ID NO: 21470 - RNA, 78 nt, Homo sapiens
ggggaccaccgccggccaggggcggaaacgggacaccaagcagcccacggccagcgacaacagcgcgccgggacggaa

SEQ ID NO: 21471 - RNA, 77 nt, Homo sapiens
cgggacagcgcacccacacagcccagacaggcagaaacgccaaccgcgccaacccgaggaccagaccgacaaacgag

SEQ ID NO: 21472 - RNA, 81 nt, Homo sapiens
cagagacaaggcacggagagcaacaaagccgacccaacccaagggccaaaggcacgcgagaaggggagggggagaaagaag

SEQ ID NO: 21473 - RNA, 56 nt, Homo sapiens
ggccaaaggcacaccgaaccgcgaacacgcgccggaagaagaggaagccaagccag

SEQ ID NO: 21474 - RNA, 91 nt, Homo sapiens
gcggaccccgcggcgggaggagccgccccgaggggacggcaaaacagaacagaaaggcggagaaaaaagagggggaaaagaccacgagaag

SEQ ID NO: 21475 - RNA, 51 nt, Homo sapiens
cgaggaagcggcaggccaccccaggccccgggaaggagcccccccccgccc

SEQ ID NO: 21476 - RNA, 83 nt, Homo sapiens
ccggcgacggcagggcccacggcacggccccgcggcgcgcagccacaacacagcagcccccaggagagcaggaaaagccggag

SEQ ID NO: 21477 - RNA, 49 nt, Homo sapiens
gacccagccggggggcacagccgggcagcaaagccgaacccagaaggcg

SEQ ID NO: 21478 - RNA, 68 nt, Homo sapiens
agcacacaaggaaccaggagacagaaggacagcagaaagaaccaggaagcacaaaggagaagggacag

SEQ ID NO: 21479 - RNA, 65 nt, Homo sapiens
caaggggcgaaggaaccgaaaggcaacggcagcagcagagaccccaaaggcacccgcgagcgcaa

SEQ ID NO: 21480 - RNA, 68 nt, Homo sapiens
agcaccaagccaggggccccaccaggagccagggaggacgaagaaaggacgaccgcaggcccaaaggg

SEQ ID NO: 21481 - RNA, 79 nt, Homo sapiens
gccgggcgaggcgaggccacccgggccgccggcggccacgggcaaacaggacgacccagccaacggcaagcagcaagca

SEQ ID NO: 21482 - RNA, 57 nt, Homo sapiens
gcacggggaaggaccggacccggcccgggagcaaagggcggagaacggaaaagcacc

SEQ ID NO: 21483 - RNA, 83 nt, Homo sapiens
caagccggcgggcccgagcggccaagcagggcaaccaccaggacggcccgaggaccggaaccagccagacgagacggaggcac

SEQ ID NO: 21484 - RNA, 84 nt, Homo sapiens
agcaggagcagcgaccgcacggaaggaacggaggaaagcgaccaggcggcggaacagcaggcagaagaagaagagcggagaacc

SEQ ID NO: 21485 - RNA, 82 nt, Homo sapiens
agacaacgcggagcggcgaagagcaaccagacacgagaggcgagggacgacagagcaagcggcagagggcaagcgggaaaaa

SEQ ID NO: 21486 - RNA, 70 nt, Homo sapiens
gccaagaacgaaaagcaggaggaggaaaagaaggaagcaagaaacacggaggaaagcagacgaggaacca

SEQ ID NO: 21487 - RNA, 71 nt, Homo sapiens
ggcgggccacgcgcgacgccgcgcgaggggcggcgagaacaggggacccaaaccaacagggccccagaacc

SEQ ID NO: 21488 - RNA, 57 nt, Homo sapiens
gaacgcgccggaacgagggagagacagcgcggagaccacccagccggcgaaacacaa

SEQ ID NO: 21489 - RNA, 76 nt, Homo sapiens
ggggcacgcagccggggaccgcccggccgcgagccggcgcagacgggaagcgagaaccaggaacgaagaacaaagg

SEQ ID NO: 21490 - RNA, 68 nt, Homo sapiens
acaagagccaagaggaagggcgagagagacaagcaccaacacggcaaaggagggagagaaacggcaaa

SEQ ID NO: 21491 - RNA, 55 nt, Homo sapiens
agcgcgagagggaaaaaggcagagccccaggaggaccgacaccaacgaacaggag

SEQ ID NO: 21492 - RNA, 76 nt, Homo sapiens
gcacagccgggccgcgcgaaggccagaaacagcaagaaaaacgcacacaaccaacaacgacgcaagaggacaagac

SEQ ID NO: 21493 - RNA, 77 nt, Homo sapiens
gcccaccacaaaaacgaaggcggcgggcacagccagagaacaacacacacacacaggaaacagggccaggagggggc

SEQ ID NO: 21494 - RNA, 82 nt, Homo sapiens
cggcgcgggagggacacacccggcacacccaaccgagacgccgggagcgcgcccgcagaacgacaccaaaggaacaaaaaga

SEQ ID NO: 21495 - RNA, 79 nt, Homo sapiens
gcagggacccgggacagcggagagaccccaacaagccgaagcacaaggcagccagaaccgcacggaacaggagggaagc

SEQ ID NO: 21496 - RNA, 62 nt, Homo sapiens
ggagccacgggcgccggcaaacacccggcaaggggcggaaaggccccgggaccaaggacacg

SEQ ID NO: 21497 - RNA, 59 nt, Homo sapiens
ccgccggccgacgagggagaaaccgcccccgccgccgaaaaggaaaagagccgcaggcg

SEQ ID NO: 21498 - RNA, 101 nt, Homo sapiens
gggagccggggccggcggggggcgcgcccggcagcccgccacagccacgaggccgcccgccccccaagaaaggccagccgaagaaaagcgaaagggagacg

SEQ ID NO: 21499 - RNA, 54 nt, Homo sapiens
agggcagagaaagagcagcgcccgaagaacagccagcaaagacaagagcagacc

SEQ ID NO: 21500 - RNA, 78 nt, Homo sapiens
ggaagagcaagagagacgggggaggccagccagaccaaggacagccaaggaagccaagaccaggaggggacgggacgg

SEQ ID NO: 21501 - RNA, 88 nt, Homo sapiens
gccgggccccgcggcccgcggacccgcgccgggcgggcgcggccgcgcacaccgacggaaacaaagcagcaggagaggagagccagag

SEQ ID NO: 21502 - RNA, 76 nt, Homo sapiens
cgagcaagcccgccgcaggagggcggcccggacaagccagacaacgccgacagcaagcaaaaaccaggggaagacc

SEQ ID NO: 21503 - RNA, 122 nt, Homo sapiens
ggccaacgaccggagaggggaacagacgcagggcagggccccgcccggcggggaagaggagcaggagcggccgcggagcaggagcgagagcaggaacagaagaaggccaaagccggccaggc

SEQ ID NO: 21504 - RNA, 81 nt, Homo sapiens
gagcaccgggccccgcgaccggggcccggggaaggcccgccgcccgccccaggagagccagggacaaaggagccaaggaag

SEQ ID NO: 21505 - RNA, 74 nt, Homo sapiens
gcggacagcggcgaagcgggcgcagggcagggcccgaagcaggccagcgcacaggacggcgagaagcaaccggg

SEQ ID NO: 21506 - RNA, 77 nt, Homo sapiens
ccaagagcgagaccagcggggcaacaaaggcaaggccagagaaggcgggagaaagacacgaaccacagaacgcaaca

SEQ ID NO: 21507 - RNA, 81 nt, Homo sapiens
gcgaggagaaccaacggcccgaaagaggagacgagacccaacaggcagaagccaaaggaagcagcagaccaaggaaagacc

SEQ ID NO: 21508 - RNA, 69 nt, Homo sapiens
ccaagaggagcagcaaccaaggcagaagggggcggcaccacccgagcggcccacgggacacgggcgggg

SEQ ID NO: 21509 - RNA, 83 nt, Homo sapiens
cccccaccgcccgggcccgaggaggcagccaagccgggccgcccgcggcggacgaacagcggggacgccccagcagaccgccc

SEQ ID NO: 21510 - RNA, 33 nt, Homo sapiens
cgcagaagaacacaagaggaacgacgagaacac

SEQ ID NO: 21511 - RNA, 84 nt, Homo sapiens
gcccgaggaacagcacaagcgcacagcacgcagacccaaagacccggcacagaggaagaaacccagaagaggagagcaaaggag

SEQ ID NO: 21512 - RNA, 80 nt, Homo sapiens
cgcaggcggcggggcagggcagacaacaccgacgagggaagacaaaggcgcggcaagcggggaagcacaggaccaaacaa

SEQ ID NO: 21513 - RNA, 81 nt, Homo sapiens
cgggaccaggcgaagcggccgagcaggcgagcgaacgacggacgggacccggaggacgacgcgcggccgggcgccccccgc

SEQ ID NO: 21514 - RNA, 71 nt, Homo sapiens
acacaaagcacgccgagccagccccggaaaccacaggaccggcaacagaggagccagccccgggcaacaaa

SEQ ID NO: 21515 - RNA, 76 nt, Homo sapiens
cagcggcaacggcacgcagaagagccgggaaagaaaggaaagcgggaggaacaacaaagagaagcaacagacggaa

SEQ ID NO: 21516 - RNA, 79 nt, Homo sapiens
agaacagaaggaacgcagaaacacaggaccccccccaacgaggggacaaccgaggaccccggacgagagccggaagagc

SEQ ID NO: 21517 - RNA, 83 nt, Homo sapiens
accccccacaagcccgaacccgggaggaggaagggacaccgagggaccaaagggcggggcccaccagcacgaagagaaaccag

SEQ ID NO: 21518 - RNA, 74 nt, Homo sapiens
gcgcggccccaacagagggacccacaaggagggagcggagaacaaacagcaggcagggaccgagggcaccgcgc

SEQ ID NO: 21519 - RNA, 48 nt, Homo sapiens
gcgaaaagacaccaaaacaaggaagaaaacagggcgggagacaggaaa

SEQ ID NO: 21520 - RNA, 71 nt, Homo sapiens
ccagcccccaacaccgagccccagaacccaaggaaagaccggaaagaaggaagaaaagacacagcaagagc

SEQ ID NO: 21521 - RNA, 79 nt, Homo sapiens
caaaccggagaaggagccaagaaagagaagagcagccaccccagagccgcagcgagcgacccaaagggacaaggacaac

SEQ ID NO: 21522 - RNA, 73 nt, Homo sapiens
acaagaagccgcaaacaggcgcgcagaccggccgggccaaaccgaacagagccgcagagcacacaacagaccg

SEQ ID NO: 21523 - RNA, 44 nt, Homo sapiens
ccccaagcccaggcaagacgcaaggagaggcgaccaccacagga

SEQ ID NO: 21524 - RNA, 69 nt, Homo sapiens
cagcaggaagaaacaaccagcaggaggagccagaaggaacagcagcagaggacgacagcacgcaggcaa

SEQ ID NO: 21525 - RNA, 80 nt, Homo sapiens
aagcgggaaccaggggccacccgggcggggggggaagacaacccggagaacacccaggggacgcccagaccaaacaacaa

SEQ ID NO: 21526 - RNA, 55 nt, Homo sapiens
gacgccccaacggccaaacaaacccgaccggggaccaggacaaagaccaaacgaa

SEQ ID NO: 21527 - RNA, 89 nt, Homo sapiens
gaagggcccaacccagccagggcccgcagcaaagagaaagggacgcggcacagaacgaagaagaaagcagaagcaagagaaaaaagaaa

SEQ ID NO: 21528 - RNA, 74 nt, Homo sapiens
ggaaagaggagacaaaccccagacgcgccggagggccagacgaggaccaaaacggaaggcaaaacacgcaagcg

SEQ ID NO: 21529 - RNA, 59 nt, Homo sapiens
ccaggagcccgagagagaaggccagccgccgagcggaacgaaccggaagacgcaacggg

SEQ ID NO: 21530 - RNA, 65 nt, Homo sapiens
ccagaagcagcagacggcacacgcagcagaagcccggaagcgagcccagccccgcggaaccaagg

SEQ ID NO: 21531 - RNA, 67 nt, Homo sapiens
cacgacaagaccggaaggcagcgaacaggagaccagcccggaggcccacaagcggcacccaccaaga

SEQ ID NO: 21532 - RNA, 72 nt, Homo sapiens
ggccaaacaagaggcaaggggggaggagcgccgccccccgcacaagccgccgcgccaggcggagccaagcgc

SEQ ID NO: 21533 - RNA, 85 nt, Homo sapiens
cgcaccggcggcgcggacgacagcgagacaccgcaccaccagagagaagaacgagagccaaaggaccgcagacaggaaagcaaca

SEQ ID NO: 21534 - RNA, 34 nt, Homo sapiens
ggcaagggcggggagagaggagcgagaggaagcg

SEQ ID NO: 21535 - RNA, 63 nt, Homo sapiens
caggaaccaacaggagacgcaggagaacaaaaaccacgagaacccagaccccgcgagcaacaa

SEQ ID NO: 21536 - RNA, 71 nt, Homo sapiens
gggacgcggggcgcgcgcgcaccacacaccggcccgggcgcgaacaaaggcaggagagcccagagacaagc

SEQ ID NO: 21537 - RNA, 80 nt, Homo sapiens
ccagggcgaaccagagagaagagacaggaagaagagagcggaacagcagagcgcacaaggaggcaggcgacaacagagga

SEQ ID NO: 21538 - RNA, 90 nt, Homo sapiens
cccccagccaagagcaggcagggagaaggaaggcaggcagcaggcagagaacggagaccaaccgggcgaagaaagaagaaaagcgaaaca

SEQ ID NO: 21539 - RNA, 40 nt, Homo sapiens
cagaccacgaggccaccgagagcgcccccacccccaggcc

SEQ ID NO: 21540 - RNA, 64 nt, Homo sapiens
cgcccgcgccccccagcaaggccccgggggcgccgagggcacaagggcaacgacagaagggcga

SEQ ID NO: 21541 - RNA, 81 nt, Homo sapiens
ggggagaacacaccagcggagggaaccgaagccaagacaccagcccccggacaacccaagggaaaggagcgcgggcaagcg

SEQ ID NO: 21542 - RNA, 82 nt, Homo sapiens
cgcgccggaccgcaggacgacagaccgagggaggacaccggaccccggacgcgggaaaggcaccggcccgaccagccacgac

SEQ ID NO: 21543 - RNA, 79 nt, Homo sapiens
gcgaaaaaaaagggaagaggagacaccccgggggccccgagcaaaccaggaaagccggaaagcggcccgcaggcggcgc

SEQ ID NO: 21544 - RNA, 72 nt, Homo sapiens
ggggccaaccggaggagacgcccagggggccagaggacacagcaggggccagacaaccagacccgggaggca

SEQ ID NO: 21545 - RNA, 74 nt, Homo sapiens
cagcaccgcgggaagaggggcaccccccaccccgggacaccccagggcaccacagagcggcagagcgcaaagcg

SEQ ID NO: 21546 - RNA, 37 nt, Homo sapiens
aaccagcccgcacagggagaaagacagcaaagaaaag

SEQ ID NO: 21547 - RNA, 60 nt, Homo sapiens
agagccgaacaaggacaagaggaagagacccgaggacccaccccaagcgcccggccgagg

SEQ ID NO: 21548 - RNA, 71 nt, Homo sapiens
cgcagccgggcggcagggccccgagccggcccgggcgaggaacgaagccagccgcagagagcagcgagagc

SEQ ID NO: 21549 - RNA, 74 nt, Homo sapiens
cagcaagaacagccaaacagaaacacggccagggagcccaccgccagaaacccaaaggaacagaggaccaaaga

SEQ ID NO: 21550 - RNA, 54 nt, Homo sapiens
gaggggcagccacccccgaaggggaggggccagaaccagcaccagaaagaggaa

SEQ ID NO: 21551 - RNA, 66 nt, Homo sapiens
gccggggaccagaaaggaacggcaagacaacaagggaccccacaccacaaaccgaggaaagaaggg

SEQ ID NO: 21552 - RNA, 76 nt, Homo sapiens
gccagaccaggagccgcccccaacccagggccaagcaaagacagcccgagccaaaccaggagccagcggggcagca

SEQ ID NO: 21553 - RNA, 80 nt, Homo sapiens
agcagccagcacggccaagcagccaccggacggccgaagagggggagacagaggccccccccaccgccaagggagcaccg

SEQ ID NO: 21554 - RNA, 70 nt, Homo sapiens
gaaaaggccccaacagagccccagcaagagcaccacaagcaaggaacaaaagaaagcaaggaaccaaaaa

SEQ ID NO: 21555 - RNA, 71 nt, Homo sapiens
acagagaaggaaagagagcagcaaggggaaaaaccgaagccaaagcagaacgagcagaaaagcaccgaaag

SEQ ID NO: 21556 - RNA, 119 nt, Homo sapiens
ccacagaaccggacagaacaacaggcaccgccgaccggagcagcaaggcaaacgaaacgcccagaagaaaaggaagcaaaaggacagaggcaagccacggacgcgacggcgccggggga

SEQ ID NO: 21557 - RNA, 81 nt, Homo sapiens
accgaaacgggcacgacacgagacgggcacaacgggcgaagggagagggcccaggacgggaaagggagcagcaccggccac

SEQ ID NO: 21558 - RNA, 68 nt, Homo sapiens
agcagggcgagaagggggcacaacagaaaagcagagaccgggaaaccaggggagaaagcaagggcaga

SEQ ID NO: 21559 - RNA, 76 nt, Homo sapiens
cgaaaagggacaagcagagcacgacagccggcgaagaagaagcaggccaggagagcccagaagagaaggaagcgca

SEQ ID NO: 21560 - RNA, 72 nt, Homo sapiens
ccgggccgcgccggggaccggggcaccgagcgccacaccgacaggcccagcaaccccgagggcggcgggacg

SEQ ID NO: 21561 - RNA, 72 nt, Homo sapiens
aggaacacccgaggaagcccaacccagagcccccggcaggaggggaaaacccccccgaaagggcggacaaag

SEQ ID NO: 21562 - RNA, 78 nt, Homo sapiens
cacccccgcagcccccccagaaagcaagaaacccaggacagcagcggacaacaagcagggagacaagggaagaaggcc

SEQ ID NO: 21563 - RNA, 63 nt, Homo sapiens
aagaagacacaaaggacggaggcacggacaccagaggaccagaacccacgagaaacagacgag

SEQ ID NO: 21564 - RNA, 69 nt, Homo sapiens
gagaccacaaaagaagagaagaagagaaacaaagccacaaacacaaagccacggaacccagaacaggcc

SEQ ID NO: 21565 - RNA, 80 nt, Homo sapiens
gaaggagcacggggcacggaccaacgggaacaaaacacacacccgcagacaagaacggagagaagggccaaaagaaacac

SEQ ID NO: 21566 - RNA, 63 nt, Homo sapiens
gccggccggcagccagggcagcaggcgggcagaaagaccagaacacacaagaaccgggagaac

SEQ ID NO: 21567 - RNA, 73 nt, Homo sapiens
ggggccgcggccgggccggcacccaagggccaaccggggcaaggcagccgcggagcccgacacaggcccaccg

SEQ ID NO: 21568 - RNA, 53 nt, Homo sapiens
acgccccaggggaaaacccccgggaccagggggagagagacgcgggaaccgcc

SEQ ID NO: 21569 - RNA, 33 nt, Homo sapiens
ggcacgccacgccccaagccaagaaaaccaggc

SEQ ID NO: 21570 - RNA, 87 nt, Homo sapiens
cgagaggcaggcaggggacccggacagagagcacaaggagagaacaggggggcccacacgcccccagcgcgagaccgagccaaaagc

SEQ ID NO: 21571 - RNA, 95 nt, Homo sapiens
ggaggaggaggggagaggccggaggacaccaacagagcagcaggagagaagaccgagccaggaagaaaaaccgcagggccagcccgaagcagaaa

SEQ ID NO: 21572 - RNA, 64 nt, Homo sapiens
cccgccacaccgggcgccccaggcgcaaaacccgagaaagggcaacccacagggaacaccagag

SEQ ID NO: 21573 - RNA, 73 nt, Homo sapiens
ggagacccagcaaccagacggggccagagcagacgcagcgagagggaccaagaaaggcccagggaccaaagcc

SEQ ID NO: 21574 - RNA, 81 nt, Homo sapiens
cccgcccgagcccgccggaccccccgacccaggcccagcaacggccacccaaagaacaccacgcgaggcaaaaaggagaga

SEQ ID NO: 21575 - RNA, 76 nt, Homo sapiens
ccggagagcagagagaaggcgagaggccagcgaacgaacacgaagaagaccaacaaagacagcaccccacagcagg

SEQ ID NO: 21576 - RNA, 84 nt, Homo sapiens
cggcgcagcccagcccgacccaggggcgggcacaagggaagacagcgcccgggacccaacggaagaggcccaagaagccccgcc

SEQ ID NO: 21577 - RNA, 106 nt, Homo sapiens
gagagaggaaaaagcgaggggaagcaaagaccacaaaaagaaggagaccagaaaggagcgacgagaagcaagaaggagaggaaaacgcggccgcagagcaaacaca

SEQ ID NO: 21578 - RNA, 78 nt, Homo sapiens
accagggggagaaacccgggaccagcgccaggagaggcgcggggccgggcgggccccgcgaaagccgcaggcccagac

SEQ ID NO: 21579 - RNA, 80 nt, Homo sapiens
ggcgacccgcgacgccgagcacccaggcgacgcccaccaaggaaaacaaagagggaaaacggagaaaagcccccccaggc

SEQ ID NO: 21580 - RNA, 78 nt, Homo sapiens
ggacccaaaagccaacacaccgccaccccgggccaggaaggggaacaaagcagaagccagaaaccgcaaaacagaaga

SEQ ID NO: 21581 - RNA, 71 nt, Homo sapiens
aagagggaaccacccccaacaaccagggcaaaacggccgagcgaccaggagaggagcccccgcccgaagac

SEQ ID NO: 21582 - RNA, 68 nt, Homo sapiens
ccaggccccgacgccccgaggagcccagaccgagaaccgggggaacgcgggcgccggaacgaccgggc

SEQ ID NO: 21583 - RNA, 35 nt, Homo sapiens
gaaggagagaacagaaacggggaccacaagaaaga

SEQ ID NO: 21584 - RNA, 80 nt, Homo sapiens
gccgggaccggcgccacagcagggacgaggagcgccgccgccccgagcccgggcggagaacggaaaagcaccaggaagca

SEQ ID NO: 21585 - RNA, 87 nt, Homo sapiens
cggagcgcagaagcggcgcagcagcgccaggcagcgacagcagcggccagcgaccggagaggacaagcaaggggccaaggagccaag

SEQ ID NO: 21586 - RNA, 77 nt, Homo sapiens
aaaagaaagaagagaaccagacaagggaggcgaggacggacaaaaggaaacggacgggaggccagccagcagaagga

SEQ ID NO: 21587 - RNA, 54 nt, Homo sapiens
cgccccccgcggggcaagaaaaaggggacggcaaaaaagaggaccacgaacaaa

SEQ ID NO: 21588 - RNA, 61 nt, Homo sapiens
cacagaaaggagcacgcccaacgaaagggcagacagacggcaggcaaggagagcgaaagga

SEQ ID NO: 21589 - RNA, 78 nt, Homo sapiens
agccaacccaccaacacggaaaaccgacccaaaaagaaaacaccgaaggaccaggggagcaacccaccaacaaacagc

SEQ ID NO: 21590 - RNA, 37 nt, Homo sapiens
accgaaacagcggaccggaggcggagcaggagcaaag

SEQ ID NO: 21591 - RNA, 63 nt, Homo sapiens
gccgcgccgggcacagccggaaagcaggaccgcgacggcagcagagcagccagagaaacacca

SEQ ID NO: 21592 - RNA, 72 nt, Homo sapiens
aaggggagaggcccaggaggacaggaacagagacgcaggcaagagcgcggaggagagagccaaaagaagggg

SEQ ID NO: 21593 - RNA, 89 nt, Homo sapiens
cacaagacaagggccaaaacaggacagaaagaaggaaaaagcagaaagccagaggaagggacaagggagaagaagccacaccaaaccag

SEQ ID NO: 21594 - RNA, 73 nt, Homo sapiens
caggaaaccacccagagacagaagagcaaaaggaaccgaggaaaaggacggaagaagcaagggcgggagccca

SEQ ID NO: 21595 - RNA, 74 nt, Homo sapiens
agacaccaccaacggaaaacaacacagggaacgccgcacaagcacacgacccgcccgacccacgagcgcaacca

SEQ ID NO: 21596 - RNA, 78 nt, Homo sapiens
gaggggcgcccgagaaggggacggcgggcgagggaggggaccgccgcgcaagaggggaaacaacagaagaagcaagga

SEQ ID NO: 21597 - RNA, 71 nt, Homo sapiens
acccaacaccagagaaagggaagaaacaggaacagaaaagaacgagccccacacgcagcagaagaaagccc

SEQ ID NO: 21598 - RNA, 76 nt, Homo sapiens
ggacaaaaacagagcaaagagggcacaaaccagcaccgggagaggcaagcaagaagaaacaaaacggcgaacccgg

SEQ ID NO: 21599 - RNA, 82 nt, Homo sapiens
agggacccggacaaccagaggcagccagcagggggagaccggaccacgccacaagcgaaggcacccgaggccccacgagaaa

SEQ ID NO: 21600 - RNA, 32 nt, Homo sapiens
gaaacacaagagaccagagccaaagaccacgg

SEQ ID NO: 21601 - RNA, 82 nt, Homo sapiens
acggaaacgaaggacaacgagaagaaccggaagccgacccggagccgagcaaccaggcacagccagagaacaacacacacac

SEQ ID NO: 21602 - RNA, 74 nt, Homo sapiens
caccagggagccaggagaggcaagacccagagaaaggaacaagacccgcagacaaccggaggaaaaggagcaga

SEQ ID NO: 21603 - RNA, 70 nt, Homo sapiens
cgacagacagaggaaaaccgcggaaacacacagacagaacggaacaggaaacgcaagcaaaaacccagcc

SEQ ID NO: 21604 - RNA, 93 nt, Homo sapiens
gccgcaaagcggagagcgcgaagcccaccgaaagcccgggcgcgccaggcacagccaagagcggaccggcagcggccagcgcagcggccggag

SEQ ID NO: 21605 - RNA, 70 nt, Homo sapiens
caagaaagcgcagcaaggcgccgcgacccaaccgaggaagcaccagcagaagagggggcaagggagacga

SEQ ID NO: 21606 - RNA, 47 nt, Homo sapiens
ccggagagcaaacaacacgacgggaaggacccaaccaggaaaaggag

SEQ ID NO: 21607 - RNA, 99 nt, Homo sapiens
agacacccgcccccagaggggcagcagagcacagcgcgccggcccccggcccgcgccgcagcagagcgccccggggccaaccaccaccccggaaaggag

SEQ ID NO: 21608 - RNA, 81 nt, Homo sapiens
ccccggccccgcccgccacagagcagaggcggcggccgagcgacggccccggcccagcagggcacgggcagaagagggcgg

SEQ ID NO: 21609 - RNA, 71 nt, Homo sapiens
accgcaggcaaaagaacccgcccacacggccagggggacggagaaaggaaaagccagaacagccggaagaa

SEQ ID NO: 21610 - RNA, 85 nt, Homo sapiens
gccgccagcagaggcggagcccgcagaccgcagaaggccggagacaccagcagaccccaagaagaagcggaagaggagccgcgga

SEQ ID NO: 21611 - RNA, 55 nt, Homo sapiens
agaaggagaagaagggaccaggaccacgagaaaagaccagggggcccgagagacc

SEQ ID NO: 21612 - RNA, 77 nt, Homo sapiens
aaaaggccgaaaaaccaacggggcccaggacagaaggcgggcaaggagcgccccccgagcaccccccacagcccacg

SEQ ID NO: 21613 - RNA, 76 nt, Homo sapiens
agacaggagggaggaacagacaccgagccagcaagcccccaacggcacagagcacaggaaggagcccggcagcgcc

SEQ ID NO: 21614 - RNA, 75 nt, Homo sapiens
aacaagcacagagacacaacccagaggggcgacccgagagaggaccagcaccccgggccgaccagggcagcaagc

SEQ ID NO: 21615 - RNA, 77 nt, Homo sapiens
agacccaccaacaagggcccccagggcccggccgaagcaagaacaagggcggagaacggaaaagcaccaggaagcag

SEQ ID NO: 21616 - RNA, 70 nt, Homo sapiens
cccgaaagggggcaaccagaaagccaggagccacgcaggaggggggcggagaacggaaaagcaccaggaa

SEQ ID NO: 21617 - RNA, 103 nt, Homo sapiens
gaaccgccggcaaacgccgcccccggccacgacccccgaagagccgcgccgccagggggaaaagaaacaaacaacaagaagaaggacaaggaacgaaggcaag

SEQ ID NO: 21618 - RNA, 70 nt, Homo sapiens
acggcaacacggagaaaacaccccggcagacagaaccaaagaacacgaaaagcagagaaacccgaagaag

SEQ ID NO: 21619 - RNA, 89 nt, Homo sapiens
cgccggacggcgggccccgggaccgggcgggaacccgcggggagcgggacacgaacggcgccgggaggaaccgaggccacagagaggca

SEQ ID NO: 21620 - RNA, 69 nt, Homo sapiens
gagcgcggcgccggggcggggcccaggagacggagacgccagcaacccagagggggaaagaccaaccga

SEQ ID NO: 21621 - RNA, 75 nt, Homo sapiens
acagagcaagccaagcaaagcagcggacccggggcacagggaaagggcccccaggggaacaccagcaggaaaaaa

SEQ ID NO: 21622 - RNA, 84 nt, Homo sapiens
caaccccagcaggacgcggcgccggccagaaaccgaccggaccgggccgggggagcggaggcagggagcgggagccaaaaagcc

SEQ ID NO: 21623 - RNA, 80 nt, Homo sapiens
gcagaggagcgccagcccggcgaggagaaggcagagcccccccaggcagaagcccgagcgggaaccagcgaagccagggc

SEQ ID NO: 21624 - RNA, 85 nt, Homo sapiens
ggggaaagccagaaccaaggagcacaacggacacacacagggcggcgacggcggcgcgaggaccgaccgggcccgcggacgaaga

SEQ ID NO: 21625 - RNA, 67 nt, Homo sapiens
agacgcgaccaaagccgacggggcaagcacacaaaagagggacaacacaagccacagcgcccaggcc

SEQ ID NO: 21626 - RNA, 79 nt, Homo sapiens
gaaagacacaagagaccacaagaccgaccaggaaaagaccaaaccaagcacaacccacgacgaggggcacgcccaagcg

SEQ ID NO: 21627 - RNA, 73 nt, Homo sapiens
cagcccccgagagcgggaaagggaccccaccaccccagaccacccagaagacaaagacacgggaaacacagga

SEQ ID NO: 21628 - RNA, 75 nt, Homo sapiens
ggccgccccgcccccaccgccgcagacccccaagcagcagaaggagacccccacagccaccccgcagcaacgaac

SEQ ID NO: 21629 - RNA, 58 nt, Homo sapiens
cgcccagacaccaagggagccagcggaggagcaagaaggaaaggggaagagcgaagac

SEQ ID NO: 21630 - RNA, 37 nt, Homo sapiens
gagagagagcaccgcagagcaagaacggcagaagggg

SEQ ID NO: 21631 - RNA, 91 nt, Homo sapiens
acgaaaaaacccagaacacgggagaaaaaggaaaacgcggaaaaccgacacaacagacaacaggcacaaagagagaaggaacacccacagg

SEQ ID NO: 21632 - RNA, 75 nt, Homo sapiens
ccacgggccacggaaggaaacccaggaacaccagcgaacccagcggacccgaagcccgcccgcggacaggggaac

SEQ ID NO: 21633 - RNA, 77 nt, Homo sapiens
cggcagcgccgcccccgcggcaaagggcggagaacggaaaagcaccaggaagcagagaggaccgcagaagggaagga

SEQ ID NO: 21634 - RNA, 76 nt, Homo sapiens
ggggggcggacagggccaacagggccggccggccggcccccaaacgcgcccgcccccaggggacaggcccagggag

SEQ ID NO: 21635 - RNA, 80 nt, Homo sapiens
ggacaggaacgggacaggaagagaggccccccaaagcaccgcgcagaaggccgaaggaagcacccaagagaggaagcacc

SEQ ID NO: 21636 - RNA, 82 nt, Homo sapiens
gacgcccgccaccgcacccggcggaggaccgcgcaggagcccaggacgcaaagagaaccagggggaagagaaggaaagggcc

SEQ ID NO: 21637 - RNA, 42 nt, Homo sapiens
agacaccccgcccgagggacacacaggaagacgaacacggaa

SEQ ID NO: 21638 - RNA, 83 nt, Homo sapiens
agagaagcgccaaaggaccggacccagagaagaggaaaaccaccgggcagggagaagaaccaacaacggaaaaccagcgggac

SEQ ID NO: 21639 - RNA, 72 nt, Homo sapiens
gcgcaagcggcaacacaggcaggcgaagaagaaggaaaccaaaaccaaggcgcgaagacagggaaacagcag

SEQ ID NO: 21640 - RNA, 54 nt, Homo sapiens
aagcacaacggcccccacacccggggccagcccaggagacaaacgccggacgcc

SEQ ID NO: 21641 - RNA, 83 nt, Homo sapiens
accaccacgccagccgcaccagccgcccaagccgcacagccgcggcggcagcagcaggagaggaccaagaacgcccagcccgc

SEQ ID NO: 21642 - RNA, 62 nt, Homo sapiens
agaggaccccaaacgggccacaaaccggcccaacaaccacaaggggaggcaaggagcacaga

SEQ ID NO: 21643 - RNA, 59 nt, Homo sapiens
agggcgggagcagggcgggcggaacggggagagccgcggagaaccgaaccaacagccag

SEQ ID NO: 21644 - RNA, 66 nt, Homo sapiens
agcacgggacagagcccgccgaagaaaaaggcagacggcagaaaccaagaagcacgaagagaggag

SEQ ID NO: 21645 - RNA, 52 nt, Homo sapiens
acagcggggacccaagcggaaaggaccccagaagggccccgagggaggagaa

SEQ ID NO: 21646 - RNA, 77 nt, Homo sapiens
aaggggcccgaagcccccgcaggaaccacaacccaaccagcacgggagggcagaaaagacagaagcaagcccgcacc

SEQ ID NO: 21647 - RNA, 57 nt, Homo sapiens
caggcggcaagagcgccacccggcggacgcacaacaggcgagaccaagcagaaaccc

SEQ ID NO: 21648 - RNA, 70 nt, Homo sapiens
gagacaccccacaaaaagacccgcccaccacagccgcaaggcccgaggcccaagaagggagagggcaggc

SEQ ID NO: 21649 - RNA, 68 nt, Homo sapiens
acaaagagcgacccgcaggaggaccgggggaaagcaaaaaaaccaccccaaggagcagacaggaggca

SEQ ID NO: 21650 - RNA, 71 nt, Homo sapiens
ggcccacgagccggccggcccccagcgcaccacaagaaaagaagggaagagagacaagaaacccccagcca

SEQ ID NO: 21651 - RNA, 80 nt, Homo sapiens
gggccccagcccacacccaccagcgcggcccgacaccgggagggaacaaggccccgccacgaccacagcaaggagggcgc

SEQ ID NO: 21652 - RNA, 82 nt, Homo sapiens
gggccagcaccaccccacggccagggccaccaaccccaacccggagagcggcgagggaaacgaacagccaagacccaaacaa

SEQ ID NO: 21653 - RNA, 78 nt, Homo sapiens
gagcagcaccacggcagccccacagacacggaggcaggagagcaagcccggaggcacccaagaagcgggcgagggaag

SEQ ID NO: 21654 - RNA, 71 nt, Homo sapiens
ccaaccccagcgggaggacaagcagaaagccggaagagagacgacacggaggacaacagcccaaaaggacg

SEQ ID NO: 21655 - RNA, 71 nt, Homo sapiens
aacagaaccagcggaacacaggccggcacggaagcagacaaaggacccaacagccaagaaaaagaaagaaa

SEQ ID NO: 21656 - RNA, 57 nt, Homo sapiens
aaaagacagcccgcagcacgaccagcaggaacgcgagcacaccagaaaggaccggaa

SEQ ID NO: 21657 - RNA, 79 nt, Homo sapiens
gacgcgaccacaaggagaggcagacgggacaagcggcgagcagacccacaaggaagcgaagcaagcaaaagccacgcaa

SEQ ID NO: 21658 - RNA, 81 nt, Homo sapiens
cccgacgcaaaccaaggacggggaccgcacacccaaggacaacaaaaacacggacccaacccacaaccggcgaaagcaccg

SEQ ID NO: 21659 - RNA, 76 nt, Homo sapiens
gagggcgcggcacgccggcccgcagcagacggcccaaccagagaaaggaaaacccagcgaagcaagagaacagagc

SEQ ID NO: 21660 - RNA, 83 nt, Homo sapiens
cagcccccccagcccagagcccagaaacccaccgcgcacaggaagccgggcaacacccgcgcagccgggaagagacagcggac

SEQ ID NO: 21661 - RNA, 58 nt, Homo sapiens
gaaggcagaggcagaaccacagggggaagggcgagaacggagccaccaaagagaggag

SEQ ID NO: 21662 - RNA, 111 nt, Homo sapiens
cgaggccagagacagagggggcccacgagcaaacaacagaccccaacagaccagacaaggacgaggcccaaggaaacggcggcgccagcaggacgcgcaacacgcggcaga

SEQ ID NO: 21663 - RNA, 76 nt, Homo sapiens
accaaccggcaggcacacgaccagccccgcgaaccgaggcgaggcccagccgcagccacccaaggcgccccgcagc

SEQ ID NO: 21664 - RNA, 84 nt, Homo sapiens
aaccacaaaacccacacaagacacagagccacagaaaggagagaggagggcgggaagaggcaggcgacgggcagaacgaaaagg

SEQ ID NO: 21665 - RNA, 86 nt, Homo sapiens
cgcccaaccggcgacggaaccaagacgcccggcaacgcagaaaaccccgcagaacggaggcacgggccgggcgcagacgcccacag

SEQ ID NO: 21666 - RNA, 69 nt, Homo sapiens
cggggggcgccagagaccagggggacaaacagaggaggcagagcccgcgcggggcagacccacgcggac

SEQ ID NO: 21667 - RNA, 41 nt, Homo sapiens
ggagagcagcaccaagcaaccagagacccagagcagcagcg

SEQ ID NO: 21668 - RNA, 60 nt, Homo sapiens
gaaacaccacgaagcagccaaggaaacccgaccgccccaggggcacagcaggaccagcag

SEQ ID NO: 21669 - RNA, 79 nt, Homo sapiens
cgagccagccgcggccggaggagcccccaggccgccccccgaaaaagccgaggaggagaggagaggccgagggaaccag

SEQ ID NO: 21670 - RNA, 77 nt, Homo sapiens
accggaagagaaaacgaaggaaaccaaggacggcacggccggacaggcagaacggagagacacaggcggggagagcg

SEQ ID NO: 21671 - RNA, 90 nt, Homo sapiens
cgcgagccagcgcgccgcagccccccaagcggccgcgagaagcagcgggggggcaggcgacgaagacgaccaaagcaaaaaaaaggccag

SEQ ID NO: 21672 - RNA, 76 nt, Homo sapiens
gggcaaggacccaacccaggagaaaaaggacccccaggaaccagcccaagcaaagcagacagaagacccggaacac

SEQ ID NO: 21673 - RNA, 76 nt, Homo sapiens
aaagagaaccaaagcgggacacgagaggaaaaaaggggccagggacacggagcgaggaaagagaaggcgcaccgga

SEQ ID NO: 21674 - RNA, 67 nt, Homo sapiens
cagcacccacaaagcaacgcacgaccccagcgccaagggagcccccagccaagaagccagccacacc

SEQ ID NO: 21675 - RNA, 81 nt, Homo sapiens
acaagaccgaccaggaaaaggagccaaaaaccgaacacccggaaggggacaagggacggcgaacagaccccgcgcgggggg

SEQ ID NO: 21676 - RNA, 63 nt, Homo sapiens
cagaaagcagcgaaacaaaacaaggggaagcacacccgccggagagggaagagcaaagcggag

SEQ ID NO: 21677 - RNA, 73 nt, Homo sapiens
cgaagaacacacaacgggaggagaacaccggagcacagcacagcaacagacccggaacagcccagggaaacag

SEQ ID NO: 21678 - RNA, 66 nt, Homo sapiens
gggaagcgaggcaaagcggggaagcagcagagcaccggccagaacaagccaaggagccaagacgag

SEQ ID NO: 21679 - RNA, 73 nt, Homo sapiens
caggccgccgcgagcagccaggcggcgggccaggcccgaggccagaggggggggcaccggaaccccagcagcc

SEQ ID NO: 21680 - RNA, 56 nt, Homo sapiens
ggggacgcagcacacagcaagggcacaacagggacggacaacccccgccccaccca

SEQ ID NO: 21681 - RNA, 78 nt, Homo sapiens
acagaacaacaggagaagccaccagccccagaacgggcgcagaagcaggaacagcaggcaaaaaaccagggaaaaaaa

SEQ ID NO: 21682 - RNA, 89 nt, Homo sapiens
cggggcgcgggggccgcgcgaagacaggaccagggcacggagagacgaggagaggcagaaacggaaggcggacacgagaaagggcgcag

SEQ ID NO: 21683 - RNA, 68 nt, Homo sapiens
ccccacccccaaaaacgcggaagacggggcagcacaaaaagagcccaaaggcaggcccggcaccgagg

SEQ ID NO: 21684 - RNA, 55 nt, Homo sapiens
aagagagacccgacgacggaccgcacacggagaaggaagcagacggggcacggag

SEQ ID NO: 21685 - RNA, 63 nt, Homo sapiens
agaaaacccacccgacccggaagccacagccccggcgcaggaacacaggacggccgaacacga

SEQ ID NO: 21686 - RNA, 42 nt, Homo sapiens
cccgggacagaccagcagaagcagggaggccgggcacacgcc

SEQ ID NO: 21687 - RNA, 79 nt, Homo sapiens
ccggcggcggcgcgggcgagcggcgagccgaaaagcgagcgcgaggaaaaggcggcgggagacgaagaacggaagcgcc

SEQ ID NO: 21688 - RNA, 71 nt, Homo sapiens
gcgaggccaaaaggcacgcccacggcagaagcccccgggcccagaccaggcccccggaagccgggcccaac

SEQ ID NO: 21689 - RNA, 76 nt, Homo sapiens
cggaacaggcacaccccacacaagcacgccaagaagggagggcaagcagaaagcagaggaaaacgaacaacaccca

SEQ ID NO: 21690 - RNA, 98 nt, Homo sapiens
ccggccaagagcgacaggaggagacaggcgagagaggaggacacgaccggggacagagccgaggacacagaccccagaaagaagacagaagcaaaaga

SEQ ID NO: 21691 - RNA, 75 nt, Homo sapiens
caggaacgggccgacgacaccagggaacgacagcgggagagagccaccgaccgacgcagagaggagagaagaggc

SEQ ID NO: 21692 - RNA, 93 nt, Homo sapiens
cgccgcggggccgcggcgcgcccggcccggagacaccaggcgccgagaaggccagcagagaaacaggcaggagaggcccacaggcgcggacgg

SEQ ID NO: 21693 - RNA, 55 nt, Homo sapiens
ggggaggcccaggccaaaagagaggagacacacagccccagacgggaggaaaaaa

SEQ ID NO: 21694 - RNA, 71 nt, Homo sapiens
ggcgcgggcgaggccgggcggcgccgccccaccggacccgcaggaaaagcaaccagcaaccaaaagaaagc

SEQ ID NO: 21695 - RNA, 77 nt, Homo sapiens
gccagggggggaaccagggcgcgcggggaggaacccccccaggagaagaagaagggggacgggggggcccggccacc

SEQ ID NO: 21696 - RNA, 58 nt, Homo sapiens
gaaaagagccgccaggcacgcaccacagaaacagggaccagaacagagaagaaagcag

SEQ ID NO: 21697 - RNA, 54 nt, Homo sapiens
gggccggcacgaggaggggccgcggccaaaacagaagaggcaaagcccagccac

SEQ ID NO: 21698 - RNA, 69 nt, Homo sapiens
aaaaaagaaccccgccaaagccaaacgaaaggccggaggaacgaaacagcaaggagaaccaacaaccgc

SEQ ID NO: 21699 - RNA, 82 nt, Homo sapiens
gacggcaccaagggcacaagaagagcagcgcaccccacgcaggggaagagaaagcgcgccggacccgccagggaagggcggc

SEQ ID NO: 21700 - RNA, 80 nt, Homo sapiens
cccgaccccgcgcgacgacccgccgccgccgggcggaggaaaacaaagagggaaaacggagaaaagcccccccaggccag

SEQ ID NO: 21701 - RNA, 70 nt, Homo sapiens
ccaaggcgacgaccgacaggggggaaagcgggcaacaggggcacacacacgagaaagagccacgcaagca

SEQ ID NO: 21702 - RNA, 83 nt, Homo sapiens
agcagacgaccaaacaggcacgagaaagggcaagaaggaacagacaaaaacggccggaaggaaacacaggacaccagggacag

SEQ ID NO: 21703 - RNA, 75 nt, Homo sapiens
agagagagagcaacgggaccaaaagaagggcaaacgaagaaaacgacccagccagaggacaaaggaccgaggaca

SEQ ID NO: 21704 - RNA, 77 nt, Homo sapiens
cccaccgggcgcacgccccggccaagaccaaagaaaaaagagaaggaaagcggacaaaacgcggaaagaggccggac

SEQ ID NO: 21705 - RNA, 75 nt, Homo sapiens
cagacagagaagcagacggaaggagggaaaaggcagacggaacgcgcgggaagaaagagaacaagaaaaagacaa

SEQ ID NO: 21706 - RNA, 68 nt, Homo sapiens
ccgggcgacccaaccaagggaccagacaaaacaccggggcccacaggacagccgggcgcacacaaccc

SEQ ID NO: 21707 - RNA, 39 nt, Homo sapiens
aaagaaaacagaaagcaacaaagggaaaagagcccagag

SEQ ID NO: 21708 - RNA, 70 nt, Homo sapiens
aggaaagagaagaccaggaacacaccacaacacagcaggggggcaaccacaggaaaagaaggaggccagc

SEQ ID NO: 21709 - RNA, 79 nt, Homo sapiens
gcggcggccaggccccagacacagacgagcaggggaagcccccgaaacaaagagacgcacggcggaccaagagcggagg

SEQ ID NO: 21710 - RNA, 73 nt, Homo sapiens
ggccccaaccaggggcgagccgcgcgggagaagccagccaaacagaggaaagagcggagcccgccagaaacag

SEQ ID NO: 21711 - RNA, 75 nt, Homo sapiens
cacgcagacggaaacaaggcaacagaaagagcaacagcagggcaacagaccggggagcaacgcaggggcaggaaa

SEQ ID NO: 21712 - RNA, 77 nt, Homo sapiens
ggggggaaaaccggagaagccccacccaaaggcgccaggcgcaacgaaacagcggaagaacgcgaggacagaaagcg

SEQ ID NO: 21713 - RNA, 81 nt, Homo sapiens
agaacaagcagagaaagagagggaaaaggaagacacgccgggaacgaggaccgccaaaagcaaagacaacggaaccagcac

SEQ ID NO: 21714 - RNA, 65 nt, Homo sapiens
cagggggggggggaagccgcagcggaaagcaggagcacaggccgaggaaaggagacaccaaggaa

SEQ ID NO: 21715 - RNA, 72 nt, Homo sapiens
gaacacagacccgccaggagagaggaaagccagccccagaaagaaaagaaagcgaggaggccgggcgcaccc

SEQ ID NO: 21716 - RNA, 83 nt, Homo sapiens
caggacaagcaaccggcgacaaagaagagcagcccagagggcggagaaggaacagggagagaaacaacgggaacagaaaggag

SEQ ID NO: 21717 - RNA, 78 nt, Homo sapiens
ggcaaagcccccccgcccaggcacacagacaacagagcaacccaccggacggggcaggggcgaccacacgccgaggcg

SEQ ID NO: 21718 - RNA, 79 nt, Homo sapiens
ccaaggggaaacaaccaagcgaccacagaaggaaacaacagaacagcaaaagcgaagagaccgcggaggagaggaggag

SEQ ID NO: 21719 - RNA, 67 nt, Homo sapiens
ggcggaacgaccccaaacagggggaaggcccccacgcggaaacgccagaggaccccgcccccaacac

SEQ ID NO: 21720 - RNA, 89 nt, Homo sapiens
agggcgagagggcaccgcggacggggccgcccagaccgagcaccagccggcgccagcccccccccagcagccgcagcccggcaaaagag

SEQ ID NO: 21721 - RNA, 80 nt, Homo sapiens
ggcgagcaggggcgggagagccccgcagaagacgccgacgagaaccacagagaagagaggccccggcccggcagaacagc

SEQ ID NO: 21722 - RNA, 53 nt, Homo sapiens
cgaagagcggacagaagacacagcaagcgagggggaacggacacgaaaacagg

SEQ ID NO: 21723 - RNA, 68 nt, Homo sapiens
agacgccacgaggagcgccaagccagcagcgggaacagagccgacaggcacgaagaaaaggaaaaccc

SEQ ID NO: 21724 - RNA, 80 nt, Homo sapiens
ccgcccggaacagccagcagcagagaaggccaaagcgcaaagcagcgggcccaggccaggagggcaagaacacgcagaag

SEQ ID NO: 21725 - RNA, 67 nt, Homo sapiens
cccgaggaggaggacagcgagcgcagcaggacggcgaggaggccgaggcgggggccgggcccaggaa

SEQ ID NO: 21726 - RNA, 81 nt, Homo sapiens
ccgaacaagaagcccgaagccgaccgggcaaccacaagacaaccagaagggagaccagcgggccgccgcgggagacacaag

SEQ ID NO: 21727 - RNA, 79 nt, Homo sapiens
cagaggcaacaaaggcgagacgaggagcgccaggaaagaggcagagacgaagcagaagcgaggcagacaagccgggaga

SEQ ID NO: 21728 - RNA, 49 nt, Homo sapiens
agccagggcggacgggaaagcagaccaaacagaggaaagagcggagccc

SEQ ID NO: 21729 - RNA, 79 nt, Homo sapiens
cgcgccccagcaaaggagaggggaacacgcagaagcacgacagggcagggcagaaagcagggcaggaagcgggagaccg

SEQ ID NO: 21730 - RNA, 79 nt, Homo sapiens
cacgaagaggcaggaagcaaaaagacgggggcagagaagacgaagggcccaaggccggccaccagggcccggcgccccc

SEQ ID NO: 21731 - RNA, 100 nt, Homo sapiens
agaggcagagaccagaggaccggaagcgaaagaaacggacagcccccacaggaaagacacggcgacccgcagggcaggggcaagggagccggagaaaccc

SEQ ID NO: 21732 - RNA, 44 nt, Homo sapiens
ccccaacccagaacggacaacgagggcccaggcagcggcaagac

SEQ ID NO: 21733 - RNA, 76 nt, Homo sapiens
gagaaagcacccaacgacacacagacaagccagaacagcgaaggacagccaaggcaaggccagagaaggcgggaga

SEQ ID NO: 21734 - RNA, 53 nt, Homo sapiens
acagaacgcacgaagcaagcgccagcagcgcaggccgaggcccccgggccacg

SEQ ID NO: 21735 - RNA, 62 nt, Homo sapiens
gcaagggacccagggcccaaaacgacagacgcgaaaggggacgacgaagaggaacagagagg

SEQ ID NO: 21736 - RNA, 77 nt, Homo sapiens
gccagggccagacggaggccacaaacaacccccaccacgccaagagaaggagagagaaaggacaagaaagaggacaa

SEQ ID NO: 21737 - RNA, 83 nt, Homo sapiens
gaggcgccagccgcgaaggggcggcgcgcgccgggcgccggaggcaagaaccggggagaaagcccgagccgggacaacagagg

SEQ ID NO: 21738 - RNA, 73 nt, Homo sapiens
gggcaagaaccaggcccgcccaaggcagagccaaagccggcggacagcagacgaacgaaaggccccagggcgg

SEQ ID NO: 21739 - RNA, 59 nt, Homo sapiens
gcaccggagacccgagcaccccaacgggcagaaggaaagaggcagaaggccagaagggc

SEQ ID NO: 21740 - RNA, 61 nt, Homo sapiens
cgcagccccgccagccacccccagacggaggaaccgaggcccagcacgccgcaccaccagg

SEQ ID NO: 21741 - RNA, 80 nt, Homo sapiens
cggcggagcgcgcgagggcgacccggaaaggccggaagcggccgggcggacaggagagggcgaaccgaccaagaacaaca

SEQ ID NO: 21742 - RNA, 81 nt, Homo sapiens
ccagccgggacggacagcgcgggagggcgccgcggggcagccgccgcccccggggacagaacccaccagacaacacacggg

SEQ ID NO: 21743 - RNA, 80 nt, Homo sapiens
cgacgcggggaaggaaggccggaaccagaaccacccaggaaacagaacgacagcccgcaccgacgccggcggccagccag

SEQ ID NO: 21744 - RNA, 62 nt, Homo sapiens
cgagacacaccaacccgaggccacgagggcaggcagaagggcacggacgaggagccgcgaac

SEQ ID NO: 21745 - RNA, 76 nt, Homo sapiens
ccggcagcagccaggcggagaacaacaaacagcccggaccaagagacgaggaaaaccccacccacaaaggcgagcc

SEQ ID NO: 21746 - RNA, 71 nt, Homo sapiens
gagacggcggcggaaaaccccaaaaggacaaaggggagaagcagaccgcaccaggcgggaccccgaaaaag

SEQ ID NO: 21747 - RNA, 77 nt, Homo sapiens
gacaggccacaccaggacaggccgcgggccacgggccggaaagcacgaagggagcccagcgacacaccagcagcagc

SEQ ID NO: 21748 - RNA, 86 nt, Homo sapiens
cagggaccacaccggacccaacgggaaaggaagcccacggcagacacagcaggccaacccagaaccaccgaagaagaaaagacaaa

SEQ ID NO: 21749 - RNA, 79 nt, Homo sapiens
aagcagcagaagagccaaggaaaaacagcaagaacccaaaaggacacagaaaaggagaccacggaagacggacaggcaa

SEQ ID NO: 21750 - RNA, 78 nt, Homo sapiens
gccgaccaacacccgaggcggacgcagagacaggagcagaacggagcccgcagaggaccggagaaggaggacaaaaga

SEQ ID NO: 21751 - RNA, 79 nt, Homo sapiens
cggaccaacaaccccaaggcagcacagcaccagaagcagcacgagccccaggcagaccaaagacaaagacccgccaccg

SEQ ID NO: 21752 - RNA, 42 nt, Homo sapiens
ggcccgaggcaacggccacaggggagaaagaaccacacgaga

SEQ ID NO: 21753 - RNA, 79 nt, Homo sapiens
caagaagggcggaaagaggaacaaggcggcccagggcagcagcacacaaacaaccacaaacaacagccacaggaggcac

SEQ ID NO: 21754 - RNA, 51 nt, Homo sapiens
ccaagaaccagggggggaccgcccggggacccagccagcgggggccaggca

SEQ ID NO: 21755 - RNA, 66 nt, Homo sapiens
aggcagaaacaggacaaaggggacgaggcccagaccccaaacccccacacccacacgcaccaacgg

SEQ ID NO: 21756 - RNA, 87 nt, Homo sapiens
gaagacagacgcccccaaaacccccgccggccggacccacggagccggcagcccagcacccgcaccagggggagcccgcgggagaga

SEQ ID NO: 21757 - RNA, 59 nt, Homo sapiens
agagagagaaccaaacacaaaagcagcgcagggggggggcggagaagagaaacgagggc

SEQ ID NO: 21758 - RNA, 46 nt, Homo sapiens
accgaagacggaccggccgggaagaggccggcgcggaagaggccgg

SEQ ID NO: 21759 - RNA, 77 nt, Homo sapiens
aacagaccaggagcgcaagaggccgcacccggaggaaagcaggcaagaagccaaaacgagaaggaggagcgaggccc

SEQ ID NO: 21760 - RNA, 84 nt, Homo sapiens
ggaccgcagcacggggaaacgaccgccccaaaacggaacagagacgccaagcccgggcccggaggcacgagacaccagaagaaa

SEQ ID NO: 21761 - RNA, 89 nt, Homo sapiens
gaggagccccacagcgggacacggagcgagaccccgagcagcggggcgcgaagcccggacaccgccagaacccccgggccggagcgcag

SEQ ID NO: 21762 - RNA, 86 nt, Homo sapiens
cggaccggcccgcgaccccagcagggccagacccgggccacgcgccccgcagcccggcagcggggggggaaccccagccaacacga

SEQ ID NO: 21763 - RNA, 68 nt, Homo sapiens
ggggcggacgcgcgcggggcagccagaaaaccagcgacacgaacccccagcgaggaagcagccaagaa

SEQ ID NO: 21764 - RNA, 38 nt, Homo sapiens
acagcccacccgcaaaccagagacgcccgacacccgcg

SEQ ID NO: 21765 - RNA, 82 nt, Homo sapiens
acccggaagccgagggccggaacgggagccaacaggcagcggggcgggcgagcgcaggaaaaagcggggaaggggggcaaaa

SEQ ID NO: 21766 - RNA, 77 nt, Homo sapiens
gggaaagaaggccgaaggacccccacaacgagcgcccggagggagacaaaccaccaggaacccgaaaccaaacacgg

SEQ ID NO: 21767 - RNA, 74 nt, Homo sapiens
gaaagaaaaggccccgaggagcagggacagaggaaaaccagcaggaaaaagacacaccagagccagacaagcag

SEQ ID NO: 21768 - RNA, 53 nt, Homo sapiens
ccgggaaaagaacccgccaaaacacagcgaggagacagagaggaaaggcaagg

SEQ ID NO: 21769 - RNA, 64 nt, Homo sapiens
acgcccccaggaaaaagcaaggcaggaaagaggacggcaccaacgacccagcaggacccggccg

SEQ ID NO: 21770 - RNA, 72 nt, Homo sapiens
ccgcccggaaaggggacaccggaggcacaaagagagacggaacgcagaaagaccacaagggagagaaggaaa

SEQ ID NO: 21771 - RNA, 76 nt, Homo sapiens
ccccgaccggaaacaaccgccagggccgggaacaagcgaggcccccccaccaggccacaccagccaacccgaagcc

SEQ ID NO: 21772 - RNA, 68 nt, Homo sapiens
gcccccaacagcgggagcgcgcgccggcgggcccaggacagagacaagagaccggaaagaagggagac

SEQ ID NO: 21773 - RNA, 118 nt, Homo sapiens
ccgcgcacggcggcacaccccgacgccagggccggggcccggggcccacgcggcggggcagacgccgagaaggccgcgcggacccaccaccccacacgccagcccggagccggccaac

SEQ ID NO: 21774 - RNA, 87 nt, Homo sapiens
agcacgggaacgcgaagcgccaaagccagacaagagcagacgccccgccagaccgaagccaccccaccccaccagacgacaccagag

SEQ ID NO: 21775 - RNA, 69 nt, Homo sapiens
gaaccagagaaacaggcagcaggagcggagggcccccgcccaggggaaggacgaggacccgacagagcc

SEQ ID NO: 21776 - RNA, 76 nt, Homo sapiens
ccaccaaaccggccagaccacgacagagcaaagacccggccccccccaacagaggcagacccagaaaaggaccacc

SEQ ID NO: 21777 - RNA, 76 nt, Homo sapiens
ccgcgaaggcaggaggagcaaggaagaccaaacaacaggcaccccccgaaccaagcccaaccaccccccgccacgg

SEQ ID NO: 21778 - RNA, 86 nt, Homo sapiens
cggaacccgcaccaagccgcccacacgccaaccggccagaggacgaggggggagagaaggcccgggggccacggccaagcggccag

SEQ ID NO: 21779 - RNA, 73 nt, Homo sapiens
gcggcgcgacccccccggccacgggagaagaccgccgcaggacggagcccgaaacacaaagcgcaagcgggcc

SEQ ID NO: 21780 - RNA, 79 nt, Homo sapiens
cagcggccgcgcacccccggccggaggcaccagcccagccaggacggaacccgcaccaccacacaaccaccacgacgca

SEQ ID NO: 21781 - RNA, 76 nt, Homo sapiens
ggccggcccaaagcacgccggccacggagagaagcaggcccaagaccaccaaaccccagaaccggaagaccccgcc

SEQ ID NO: 21782 - RNA, 75 nt, Homo sapiens
aacgcgcagaacaccaaccgccacccgcggggagacacggcaaagggccaccaggaaagagcggaggacccggac

SEQ ID NO: 21783 - RNA, 85 nt, Homo sapiens
caagacaagcgagcaagaaggagcgaaagagcgcgcagacggagcccggcccggagaccaggagaagggcggacaagagaggacg

SEQ ID NO: 21784 - RNA, 73 nt, Homo sapiens
agggcccgcgccgggaccaacaggggcaagacaagccagaacgagaagcgcaccacagaaccaccacgaacgg

SEQ ID NO: 21785 - RNA, 38 nt, Homo sapiens
gaggacggcaccagccaggagaaacagagaagcgagaa

SEQ ID NO: 21786 - RNA, 75 nt, Homo sapiens
ccccccggcacgacaccgccccaacccacgagaggacagcccagaaaagccgccaagcaggaggcccagagaacc

SEQ ID NO: 21787 - RNA, 54 nt, Homo sapiens
ggcaacagaggccgacccaggcagcgcagaccacacagacggaaaagcacaggg

SEQ ID NO: 21788 - RNA, 85 nt, Homo sapiens
cgcgggagccacgcagaggacgccggaacacccggaagccgagaaagcgggcccagcacagggacacagcgggggaccggaccac

SEQ ID NO: 21789 - RNA, 123 nt, Homo sapiens
gggagcaaggaccacagaaacgcagaaaaaggggaaagaaaaggcacccagaagcaaccggcagaggggaggagacacgaagcgacgcagagccagaagggaggcagggaacacgcggaacac

SEQ ID NO: 21790 - RNA, 53 nt, Homo sapiens
cccgacccaggccacggcacagcgggccccagcaggagacaagaacaaacaaa

SEQ ID NO: 21791 - RNA, 109 nt, Homo sapiens
ccaaccacgcggcgcgagccccgcccccgccgccgcgcacaaccgcacggcagagccccccaagagaacccagggggagccacgccggagcgggcaccggcgcggaccc

SEQ ID NO: 21792 - RNA, 77 nt, Homo sapiens
ggaccccagccccgccaagcgcggccgccgcccccgcccagggggggccccagcccggccgaacgggcgcacgacac

SEQ ID NO: 21793 - RNA, 71 nt, Homo sapiens
caaaaagagggaacagcggcccagggcaggcaagcaaaaagacaacggcaagcggagaagagcaaggccga

SEQ ID NO: 21794 - RNA, 74 nt, Homo sapiens
ggccaaaaccacaggaaagaacaagcacaacaacagcaacggaggcgggaccggaacaggcacaccccacacaa

SEQ ID NO: 21795 - RNA, 71 nt, Homo sapiens
ccacccaaccacccggagcgcgccgcaaaggccaaaggaaaggagggagaagcacagaacaaggagagcgg

SEQ ID NO: 21796 - RNA, 68 nt, Homo sapiens
gaccgggggaagggagaagaccaaagggaagagaaacgcaaccggggccaccacagagcccgcaggga

SEQ ID NO: 21797 - RNA, 76 nt, Homo sapiens
ggcggaccgcgggccgccgccggccgcaaggccggggcccccgcgcccgaaaagccgcagccacagcgccggacca

SEQ ID NO: 21798 - RNA, 80 nt, Homo sapiens
aagcggggggcacgcagcgaagccacagaccccagaaacgggcaagcgcgcaaacccagaagccccgagagcagggaccg

SEQ ID NO: 21799 - RNA, 77 nt, Homo sapiens
ccgaaaacacgagcacaacaccagcgcgcaagaagaccacagaggagggacaaagacccccccagcgcccgccccag

SEQ ID NO: 21800 - RNA, 78 nt, Homo sapiens
agaacccacaaaacagggcggagcaggccaccaaagaacggcacagcaaaaaagccaccagcaaaggcaaagccagag

SEQ ID NO: 21801 - RNA, 72 nt, Homo sapiens
ccagagccgggaccccagccaggccaggcacgacgcccccaaaggcaaaccaggaccgcaaacccagaaaca

SEQ ID NO: 21802 - RNA, 79 nt, Homo sapiens
cccgccccgccgaggcaggcgcccaccgccggcgggagcggcggaagcccagcgaaaagggcgaacaaaaaagaaagcc

SEQ ID NO: 21803 - RNA, 80 nt, Homo sapiens
gggccgccgagcggacccggaccggggaggcccccgccgcaccacacagccgggcggggaggaacaagaaaaccggcccg

SEQ ID NO: 21804 - RNA, 71 nt, Homo sapiens
aggaacccgcaggcccaggcgaaaaaacgagaaagaaagcaggagaccaagaaggaaaaaggcaacccagg

SEQ ID NO: 21805 - RNA, 74 nt, Homo sapiens
acaaaggaagccaagcaggaggcggaaaagccgggccacagaagcaccaccacaagccacaccaacaaacgacc

SEQ ID NO: 21806 - RNA, 72 nt, Homo sapiens
ccggaggagaagagagaagcggcaaacaccaacaaagggaaggagaacaaagacgaagacggggcagaccgc

SEQ ID NO: 21807 - RNA, 87 nt, Homo sapiens
gaagcagagagacaagagaggcagagcgaaccagaacaagggaccccccaggacacagcgggacgacccaagcgcacagcggacccg

SEQ ID NO: 21808 - RNA, 90 nt, Homo sapiens
caacccaaacagggaccaaccaaagacgccaaggagaaggcagaccgggaacgcaacaccagaggcacaggaaacagacaaccaccccaa

SEQ ID NO: 21809 - RNA, 38 nt, Homo sapiens
acgagacccaccagaacccaaggcaaaccgacaccagc

SEQ ID NO: 21810 - RNA, 81 nt, Homo sapiens
gccagagccggagcgcgaaggccgggacccggccccggcccacaggggggggcaaacccgagagaacggggagcggcgaca

SEQ ID NO: 21811 - RNA, 86 nt, Homo sapiens
ccaagcaagcaaggacacccacggaccaacaccgcgaccagaggaaaagggggaaaagagcaaagaagaagcagcgagggacaaag

SEQ ID NO: 21812 - RNA, 74 nt, Homo sapiens
gccgcccccaccggacgaggccccccaaccaggcaaaagacgaccccgacgcaggccaggagccgcggacagaa

SEQ ID NO: 21813 - RNA, 68 nt, Homo sapiens
ccacccagaggagcaacagaggagcacggcagccaggaggccgacccgacccggaccgcccgccggcc

SEQ ID NO: 21814 - RNA, 78 nt, Homo sapiens
cagcgcacgggcaaggcgcccaaaacaagcgaagggcaaaggcaaaccaaacgcaagaccagggcggagaaaagcaag

SEQ ID NO: 21815 - RNA, 61 nt, Homo sapiens
ggagaccccgcgagcggcgcgagcggcagcaggacaccccgggagaaagacagcaaagaaa

SEQ ID NO: 21816 - RNA, 64 nt, Homo sapiens
ccggaccgccgcgcagggcagccaccagggcacagcacgaggcggcaaaagcagaccggaaaac

SEQ ID NO: 21817 - RNA, 73 nt, Homo sapiens
cgccagaggaggcagcgggagagggcgcgccccagaggaacccccccacccaccagggagacaggcggcacga

SEQ ID NO: 21818 - RNA, 70 nt, Homo sapiens
cgagccaggcaacagacagagaagcagacggaaggagggaaaagacaaccgagcacaaaaaaggcacccg

SEQ ID NO: 21819 - RNA, 81 nt, Homo sapiens
ggagaaacaggcgccgcgggcccgcgcccggccggacccgggcccgaggcccgggcccgccggccacaccacacgcccccg

SEQ ID NO: 21820 - RNA, 76 nt, Homo sapiens
gcacacaccccgacccgcccccccagaaagaccacacagggaaacgaccagggagagaccaacaggaaccacagcg

SEQ ID NO: 21821 - RNA, 76 nt, Homo sapiens
ggcaggcaggagcggaggaggcgcaggcagagggagccacagcgagacggcacgccagccgggccacggagcagag

SEQ ID NO: 21822 - RNA, 72 nt, Homo sapiens
cggcggcccggggcgcgcccccccggccggggggggcacagagccccggaagacagcccccagcgaccagac

SEQ ID NO: 21823 - RNA, 76 nt, Homo sapiens
cgcgggcgcaagagccggcccggggcccgcagggggcacccggcagaaggagagccgcacccggaagagacaagga

SEQ ID NO: 21824 - RNA, 74 nt, Homo sapiens
gaggagagagaacacagaaaccgacccgggcggcaccccaccgcccagccacagccccccccacaggagcaccg

SEQ ID NO: 21825 - RNA, 57 nt, Homo sapiens
cagcccggaccggcagacccagcaaaagcgccacaggccaaacacacaggaacgcca

SEQ ID NO: 21826 - RNA, 76 nt, Homo sapiens
cgggcgaggaagaggacaacaccggagagcaaacggagaccgggacagaccaaaagcgccgcacagcccaacccac

SEQ ID NO: 21827 - RNA, 78 nt, Homo sapiens
ccgagcagagggagagccgcccacacaaacgaaggagcaaggccaggaccaaagggacacagaagacaaagcaggacg

SEQ ID NO: 21828 - RNA, 81 nt, Homo sapiens
cccacgcagccggcgaaccaacccaccccacaggcccacgacccagcccccagaaacccacaaagccccgaggggcaggga

SEQ ID NO: 21829 - RNA, 74 nt, Homo sapiens
gcacacaaagagggcacccagaccgcaggacacaagaggaagcccacaggcagagagggcagagcgaggagcca

SEQ ID NO: 21830 - RNA, 83 nt, Homo sapiens
cagcaggccagggcagcagcaagggcgacagccggcagaagacccgcgaacgagcacaacagggagaagacagcaagaccccg

SEQ ID NO: 21831 - RNA, 70 nt, Homo sapiens
agccaagcggaacaaacgaccgcgaagcccagagcacccaaggaccacccccacaggccccaggaaccac

SEQ ID NO: 21832 - RNA, 80 nt, Homo sapiens
cgcacccggacggaccgccacgcgcccgggagacgcccgcgccgccggacgagaacccccgcgaaccagaggaacccagc

SEQ ID NO: 21833 - RNA, 80 nt, Homo sapiens
gcagccaggcggcgggccagggggccgcagccggccaggggacccgaagggggcgagacgacacagaaaagacaacagcc

SEQ ID NO: 21834 - RNA, 69 nt, Homo sapiens
caacaggaggccggaagacccaaagcgagcacggaaaggagccaacgcgggcacaggccagggcccaga

SEQ ID NO: 21835 - RNA, 71 nt, Homo sapiens
gaaaaagaaaacaccaaggggagcgggaagaagaagacgcaccagcgcgcagaggcggggggacgggcccg

SEQ ID NO: 21836 - RNA, 75 nt, Homo sapiens
gccacccccggcgggcccgaggcggcgagagaggcaggcggagccgaccgggccagcgacaacagcgagggccag

SEQ ID NO: 21837 - RNA, 77 nt, Homo sapiens
gagaaggcagaggcgaaaaaccaccagaccccaaccccggggccccggaccacaaccccccacccgggcgacagcag

SEQ ID NO: 21838 - RNA, 89 nt, Homo sapiens
cccgccccccccgcgcggcgcgggcgccgggggcaccgagggcgggacaagggcgcaccggggcgcagcgagggaggacaacggggcgg

SEQ ID NO: 21839 - RNA, 77 nt, Homo sapiens
aaggaaagagaggccggggaaagccgggcgaacccaggcacccagagacggagcggaaaccaaggaagaaaagccac

SEQ ID NO: 21840 - RNA, 62 nt, Homo sapiens
gggaagaagcgggcgcgggcagcaaacggggacagcgccgaccggaacagggaccacggaag

SEQ ID NO: 21841 - RNA, 100 nt, Homo sapiens
aaaggccaagcacggcaaagggcagcaaccaaaagccagagccggggccggacgagaaagccgaaggagacgacggaggagaccggcagagggcacgagg

SEQ ID NO: 21842 - RNA, 70 nt, Homo sapiens
gccgcaccagaaggggacgccagacgccaccgcagcaccccagggaggccgcaagggccacgcacccaag

SEQ ID NO: 21843 - RNA, 73 nt, Homo sapiens
gggccggcagggcgggcaggaccagccacaagaagacagacacgaggaaggaaaagaccaccacaagcgggaa

SEQ ID NO: 21844 - RNA, 80 nt, Homo sapiens
cggcggggcaggagcagcccaggaagcgagagcgaagccgccacccaaaccagcaaaccagggcggagaacggaaaagca

SEQ ID NO: 21845 - RNA, 80 nt, Homo sapiens
caacaagaggccggcggggcgacagagccccgggggccacgcaaggccggccccgagagccaaagccgcgggaagcgaag

SEQ ID NO: 21846 - RNA, 76 nt, Homo sapiens
acaaccaacagcaacgggcaccacacacacagcagagcgcaccaccaccgccggcgagcaccaggagagcccccag

SEQ ID NO: 21847 - RNA, 39 nt, Homo sapiens
cgccagcccagcgaccagcagccgcagaacaagaacggc

SEQ ID NO: 21848 - RNA, 79 nt, Homo sapiens
agccccacgccgcggcgcgcccgggccccgcgacccagacaagcagaccggaagaccgacggaagaccacaccccgagg

SEQ ID NO: 21849 - RNA, 77 nt, Homo sapiens
gaccacccagagggaaacacacgcacagaaccggcagccaggcccaccaccagccggacacccagaaaaacaagaaa

SEQ ID NO: 21850 - RNA, 57 nt, Homo sapiens
cgggccacccacaaagaagaagcgaggggcaggcgggcggcaagaggcgcacgagaa

SEQ ID NO: 21851 - RNA, 81 nt, Homo sapiens
ccgggacggcggagaggcgccccccgcagcaggacacggcccccgcacggcaagccgggaccgggccagagagcagccaca

SEQ ID NO: 21852 - RNA, 70 nt, Homo sapiens
aggggcacgggagcggggcgcagagaacggcaaacggagcagagaagggcaccgcccgcgccaggaagaa

SEQ ID NO: 21853 - RNA, 72 nt, Homo sapiens
ccagaacccagggcacgaaccaggaggagaccccacgccggacccaaggcggaccacaggccgcccaaaaac

SEQ ID NO: 21854 - RNA, 48 nt, Homo sapiens
ggggccgacaggcgcccacacccaagcagaccccagccgcgcacacac

SEQ ID NO: 21855 - RNA, 74 nt, Homo sapiens
gcggcaagggggcagggggaggagcagaaacacagcaggacaggaaaagaaggaggccagcgggacacacaaag

SEQ ID NO: 21856 - RNA, 80 nt, Homo sapiens
aaacgaggaaccagcacaagacaagggcgagcaccaaagccaaggaagcccagaagaaagagcaccccccggaagcagca

SEQ ID NO: 21857 - RNA, 75 nt, Homo sapiens
ggcccggaggcgggacccagggcccagggcaccacccacacaaggacgcaaaagccccaaggcgagaagcagggg

SEQ ID NO: 21858 - RNA, 61 nt, Homo sapiens
caaaggacacaaaaagccaccgaaggccaccggaggacacaacagagacggggcgccaggg

SEQ ID NO: 21859 - RNA, 71 nt, Homo sapiens
ccaccaacagcaccagaagcccaggcaggaaccaccaccacagacccagacagaaaacgccccaacaacca

SEQ ID NO: 21860 - RNA, 79 nt, Homo sapiens
gcacgagagccccccacacagccacacagacaccgccacaggagagagcaagcacggaacaagagacccaggcacgagg

SEQ ID NO: 21861 - RNA, 58 nt, Homo sapiens
gcagccgaacggagggcgacggagggagaggagcagccgcgcaagggggaagggccgg

SEQ ID NO: 21862 - RNA, 68 nt, Homo sapiens
acaaaaacggcccggagaggagagaggggaggaccaccgcacagagcccgaacagacacgccgaagcg

SEQ ID NO: 21863 - RNA, 58 nt, Homo sapiens
ggccacaggaggacaccgcaggggcgagcgccgcagggccagaacgaagcacaacagg

SEQ ID NO: 21864 - RNA, 53 nt, Homo sapiens
aagggacccccgggaagaagacacagaaaacagggcggagaacggaaaagcac

SEQ ID NO: 21865 - RNA, 69 nt, Homo sapiens
gacagccggaccgcaacaccgcaacccacgcaggcaaggagaaagcccgaacgcgggaagaacgaagaa

SEQ ID NO: 21866 - RNA, 77 nt, Homo sapiens
gaggggccgacccaagcacaccagaaaggggacccaccacacagaggacacaagaaccacacgagccaacaggccca

SEQ ID NO: 21867 - RNA, 91 nt, Homo sapiens
cgccggacagcagcagaagcgcgcccaccaggcacggccacccacaaaaggaagaccaaccgaagaagacgcgaggggacaaggcagaaaa

SEQ ID NO: 21868 - RNA, 69 nt, Homo sapiens
ggccaggcgcagaagaagcacccagcaagcgagggaccgggacgccacagccagggggacacccacggc

SEQ ID NO: 21869 - RNA, 73 nt, Homo sapiens
cgacacaccaaccgacgggagacgacggcgagaaacacggacacagcaggggccagacaaccagacccgggag

SEQ ID NO: 21870 - RNA, 87 nt, Homo sapiens
cggaggcacgggcggcccgcaggaccggaccgggggagaagagaagcgaaggacgacagccaggggaggacaccacggcaccggagc

SEQ ID NO: 21871 - RNA, 65 nt, Homo sapiens
ggcccgccacccaaagcaccaccgcgccggagcgcaccagagcggcaaaggccccgcaagaaccc

SEQ ID NO: 21872 - RNA, 68 nt, Homo sapiens
agcgcccccaaacgccgaagcgcccaacagccaaacggaacgcgacgcggccaggccggaagcacagc

SEQ ID NO: 21873 - RNA, 81 nt, Homo sapiens
ccggacccgaaaaacgagacgggcggcgaacggcggaggcagggcagagcagagaccaaggagccaggaaggagaagaggg

SEQ ID NO: 21874 - RNA, 51 nt, Homo sapiens
cgaggcgagccagggcccgcagcgaggcgaacaagaggcgccagcgggcgc

SEQ ID NO: 21875 - RNA, 74 nt, Homo sapiens
cgcggaggggcgggaccgcagggccccccccaggaacaaacagccaacccgcaacaacggcagaagaaaagccc

SEQ ID NO: 21876 - RNA, 72 nt, Homo sapiens
caacccccggaggagacagccccccccccgcacccccccagccacagcaccggcagcgacggcgcccgacag

SEQ ID NO: 21877 - RNA, 41 nt, Homo sapiens
ggcggcaagccccagagcccccaggcggaggcggggcggac

SEQ ID NO: 21878 - RNA, 91 nt, Homo sapiens
cgacacaagaagagggcggagcggagacgggagaagaaaagacggaaagacaaggagccgggccgagaaaccgaaccagagaccagagaag

SEQ ID NO: 21879 - RNA, 80 nt, Homo sapiens
ggcggggcccaaaaggcgcggggcgaaggcgcagccgcgaagccgagccgcagaaccaaaacagaggaacagaggagaga

SEQ ID NO: 21880 - RNA, 76 nt, Homo sapiens
caacacagacaggggaaagagaacacaaagacaggaggggagaggaacccgagcagcccagacaggaagacagcag

SEQ ID NO: 21881 - RNA, 84 nt, Homo sapiens
gcgaggggcgacgggggaacaaccccaagaggcagaacgggaaggggccgaagaagggagaagagagccaggaacaaaagggga

SEQ ID NO: 21882 - RNA, 79 nt, Homo sapiens
gccaaagcaacgagaagaccgagagggaccaagaaaggcccagggaccaaagcccggacaaggcccgagcaccaggacc

SEQ ID NO: 21883 - RNA, 89 nt, Homo sapiens
cgggaaagagcagcgacgggagacagccgggcgcgcaaggaacggcccaaaaaggaaggaggaaaaagagaagaaaagacgccgcccga

SEQ ID NO: 21884 - RNA, 90 nt, Homo sapiens
gcgagcccggaggcggcgggaggaggcggcggccgcgagggcggcacgccacaggacggcacccaccgcaaggccacaccaccaacgccc

SEQ ID NO: 21885 - RNA, 56 nt, Homo sapiens
cccgcccgcggccaccgccgaaaccgacaacagagagagagaggggcgccggagcc

SEQ ID NO: 21886 - RNA, 83 nt, Homo sapiens
cggagcgcagccgaaggccaaggaacacgaagacggcgagggaggacagggggcacagggagaggaacagggcgcaccacaga

SEQ ID NO: 21887 - RNA, 75 nt, Homo sapiens
gcgagaggcccacaggcacacagcaggagacgaagaaaacgggagaaccagcagaaaacaccaggacgacagagc

SEQ ID NO: 21888 - RNA, 68 nt, Homo sapiens
gacgcccacgaccccagcaggggaagaggccgcgacagccaccaaagcagcgcggacaagaaaagaca

SEQ ID NO: 21889 - RNA, 60 nt, Homo sapiens
ccgacagccgcagaacgaagaggacgccacaggacacgacggaaggggagagcggaggca

SEQ ID NO: 21890 - RNA, 75 nt, Homo sapiens
gacggggcaaaccgccgccgcccccaccagacagacgcgcaaaacccaggaacagaaaacgacgaaggccaccga

SEQ ID NO: 21891 - RNA, 71 nt, Homo sapiens
cggcgccggccgagaaggcagaggcggaagaaaaccccaggcggacgagccgaaaaagaccaaaaaggaga

SEQ ID NO: 21892 - RNA, 79 nt, Homo sapiens
gcgcacgcccccgacgggagaaggccggggagccccgacaggccaaacacacaggaacgccagaccccagccgagggag

SEQ ID NO: 21893 - RNA, 69 nt, Homo sapiens
acgcagggccgggccagccccacaaaggaaaaacaggcgccgcgacaaggggagggagcggggcccgcg

SEQ ID NO: 21894 - RNA, 81 nt, Homo sapiens
ggcggccgcagcgccacaaaccagggcagcgcaagccacaggaacgagccacgagaagccccaacaaaacaagacccacag

SEQ ID NO: 21895 - RNA, 67 nt, Homo sapiens
ggcgacgaaggacacgcaacccccagcacaggcagcgaaacaagaaagcacagaaccaaaaccaggg

SEQ ID NO: 21896 - RNA, 68 nt, Homo sapiens
cggacccagacccagaagagcagcgcggcaaacggcgggacacgcagccaagcgcgcacccgccggca

SEQ ID NO: 21897 - RNA, 38 nt, Homo sapiens
gaggaaggcacgccgcggcgcgcggaggcaaggcggac

SEQ ID NO: 21898 - RNA, 65 nt, Homo sapiens
ggaagaggagaggacccaggagacacccaaagaagggagagcccgaccagagaaaaggcggaaga

SEQ ID NO: 21899 - RNA, 73 nt, Homo sapiens
cagaaccaacccacaccagaaaggacacacagcccaaccacgaagaagaagcgagcggcgcagaagacagaaa

SEQ ID NO: 21900 - RNA, 88 nt, Homo sapiens
agcaccgcgggcgcgcggcgcaaagccgaaaaacagcagcagaggaaagaaaagaccagagcaagggacccgaacaagcaaggaaaga

SEQ ID NO: 21901 - RNA, 91 nt, Homo sapiens
ggaggccgcgggaagacgcggcggcggcggcggaggagagccgcagagcgcgcagaccccggaccaaccaagaagcgaagaaaagagaaag

SEQ ID NO: 21902 - RNA, 54 nt, Homo sapiens
gaaccagcacgggaggaaggaaagagcccgccagaagggacgacacagaacacg

SEQ ID NO: 21903 - RNA, 72 nt, Homo sapiens
ccgcgcgcgcacgcgccaggggcgcagagcaggacgaaacgcacccgaggagaagcagaccccacgagcgaa

SEQ ID NO: 21904 - RNA, 62 nt, Homo sapiens
accagccggacaaaggagagaagggacccaggaacgaagacacacacgaaaggccaaaagga

SEQ ID NO: 21905 - RNA, 78 nt, Homo sapiens
agcaccaaggaaccggagcaaccagccagacaaaaggaaaggaacggccacgagacaagaggcaacagaggaaggagc

SEQ ID NO: 21906 - RNA, 87 nt, Homo sapiens
agcgcgcccagcggcccaggcgccgcggcgaggagcgagcgcgcgaggggcggccgagggcggagaacggaaaagcaccaggaagca

SEQ ID NO: 21907 - RNA, 33 nt, Homo sapiens
acggaagccccccggaaaagaggaccgcagaga

SEQ ID NO: 21908 - RNA, 72 nt, Homo sapiens
aaacaacaaaaaaacagcagagaggcccgaaccagaagaagccacagggagacggaccggacaggggccaca

SEQ ID NO: 21909 - RNA, 59 nt, Homo sapiens
gccaaaccgagcacagaaagagaccgcccgcccaacgccgcggagcgcgccgccagaga

SEQ ID NO: 21910 - RNA, 60 nt, Homo sapiens
cagcccaccaggccaccacgcggcgggccggggcccccaagccggcaggggaacgaggag

SEQ ID NO: 21911 - RNA, 79 nt, Homo sapiens
ggacagaaacaagccgccaaccccacgcgcagcgcggaggcaaccagcaacagcaggcagaaggaaggcaccagagaga

SEQ ID NO: 21912 - RNA, 81 nt, Homo sapiens
agacagcgcagggccaggcgaggcggccccggccccggccccgagccccggccccaaagacccaaaacagagacacccccc

SEQ ID NO: 21913 - RNA, 74 nt, Homo sapiens
gacaaacaaggaaaaccaacaacagggggaaaaaaaaaagcaccgggaggaaagagagccacacgaagaacacg

SEQ ID NO: 21914 - RNA, 81 nt, Homo sapiens
agcgcaaaccaccaaaaacaacacccagaaagagccccaaggcacaaaagaggaggaaagaagagcagcagagagaccgaa

SEQ ID NO: 21915 - RNA, 88 nt, Homo sapiens
cgcgcggccccgccagcgccccaccgagccgacaaaaggacagcgacagacagcaaacacagccagaacagaggaccggggagaaggg

SEQ ID NO: 21916 - RNA, 72 nt, Homo sapiens
ccccccccccccaaggacagcccagagcaagcacacggaggcccgggagccagaccgggagcccgccccagc

SEQ ID NO: 21917 - RNA, 72 nt, Homo sapiens
ccgagacagagagaacgccagcacgaagacagcagacaagaggagcgaggagacaccaaggaaacggagcgg

SEQ ID NO: 21918 - RNA, 43 nt, Homo sapiens
aacaacaccacaaaaccacagccaagacaagggaggcgaggac

SEQ ID NO: 21919 - RNA, 76 nt, Homo sapiens
aggagaaacagcagaaacgcaccaggccaaagaaagagaaaaaacaagcacgggggccaaggagacaccgaccaaa

SEQ ID NO: 21920 - RNA, 83 nt, Homo sapiens
agaaaccggggaccaacaaccaccaagaaacagagacgacacacaagagccagaacagaaagaaagaaaaccagcagcagcag

SEQ ID NO: 21921 - RNA, 37 nt, Homo sapiens
ggcaggaggcaccagccggaggcccacccgacgcgga

SEQ ID NO: 21922 - RNA, 63 nt, Homo sapiens
ggacggcccccgcagcccaccgcacgaggcggacacgagcgaaccgaaaagagacacggaggg

SEQ ID NO: 21923 - RNA, 54 nt, Homo sapiens
gcgggagccagaggccagggaggacaccgcgagacgacgggaccgaaggacccc

SEQ ID NO: 21924 - RNA, 82 nt, Homo sapiens
gggggccgcccgcccaaggcaggaagaggggccgcaaagaagacgagagcagagcgacacgaaaagacagaccgacaacagc

SEQ ID NO: 21925 - RNA, 71 nt, Homo sapiens
acaacacgcaagaacagcacgacacagacagcccacacagcccggaaaaggggaaagaaccagacgacagg

SEQ ID NO: 21926 - RNA, 70 nt, Homo sapiens
gaagcggcaaacaccaacaaagggaaggagaacaaaggggaacggcgagggaacccaggaaggagggcga

SEQ ID NO: 21927 - RNA, 52 nt, Homo sapiens
ccaagaaaaccaaaacaggaaacacccaacacgccaaggagagaccagaaga

SEQ ID NO: 21928 - RNA, 77 nt, Homo sapiens
gggccagagccagcaccagggcgaaggggcgccgaaccgagcccgaagggaagggccggcgggccaacacaagaacc

SEQ ID NO: 21929 - RNA, 72 nt, Homo sapiens
ggaagaagagcagcaccagccaccaaacgaagaagcccgaaacgaaaaacaaccaacagcgccggcccaggc

SEQ ID NO: 21930 - RNA, 70 nt, Homo sapiens
agcaacaaggggaaggggcaaaagagcaggaacaaaccagcaagaagaaaaaggcagagaagagagaccc

SEQ ID NO: 21931 - RNA, 58 nt, Homo sapiens
ccccagcgcagaacggagaccaagggaacggaagccccagcccgcgcgagccaggcgc

SEQ ID NO: 21932 - RNA, 75 nt, Homo sapiens
agggcaggcgcggagccgggccggcagggagagcccgaccagagaaaaggcggaagaccgccaaaaaggacacgg

SEQ ID NO: 21933 - RNA, 64 nt, Homo sapiens
ggagccgcgaggagacagcgaggcccgcggagaccagggacacccacaacgacccaagccccgc

SEQ ID NO: 21934 - RNA, 77 nt, Homo sapiens
ccccgcgccgcgccgcccaggagacagaacagcaacccgccaggaccacgcagacccaccgggagggccggacaaca

SEQ ID NO: 21935 - RNA, 83 nt, Homo sapiens
ccgcagagcgcagcagcccgccccgcccggcagcgagcggcgccccaacccggcaagcggaaaaggaaaccagaaaaacggag

SEQ ID NO: 21936 - RNA, 61 nt, Homo sapiens
gggaagcggaggcacgggcggcccgcaggaccggaccgggggaggggacggcagcacacga

SEQ ID NO: 21937 - RNA, 70 nt, Homo sapiens
accaagaaccaacaaccaaagaaaacagaacagaaaagaggagggacagcacaacagagcccaacaggaa

SEQ ID NO: 21938 - RNA, 50 nt, Homo sapiens
aaaggagaaccgcagaaaagcagaagacacaggcaacacacagaagcgcc

SEQ ID NO: 21939 - RNA, 76 nt, Homo sapiens
aggcgacgccagaggaggaaaggaagacaaggcagagaaagcaagagacgcaaccgaacgcagagcggagaacggc

SEQ ID NO: 21940 - RNA, 79 nt, Homo sapiens
acaaaggaccagaaggaaacacgaaggcaggaagcgaagaaaaggacccagaaagcaggcagaaccagagaccacagaa

SEQ ID NO: 21941 - RNA, 63 nt, Homo sapiens
gaaaaagcaaagagagagagagaaagaggcacggggaaaaagcgccagaaggcggcccagcaa

SEQ ID NO: 21942 - RNA, 73 nt, Homo sapiens
gccagccaccacacgaccacagcagagacaggacaagggggacgacaaagcgacaacagccgagcggagaggg

SEQ ID NO: 21943 - RNA, 41 nt, Homo sapiens
gacagggcacaccaaacccacgaggggggcgggccgagcac

SEQ ID NO: 21944 - RNA, 82 nt, Homo sapiens
cggcgaccagggcgcccgcccccccaccgaggaaggccgcgccggcccaggcggaggcaggggccacagccaacccgacccc

SEQ ID NO: 21945 - RNA, 103 nt, Homo sapiens
cggcagggaggaaggcagcggaacagccggaacacgaagaaaggcccaaggagcagccccggggcgccaccgggcacggagggggccggccgccgagcccgag

SEQ ID NO: 21946 - RNA, 52 nt, Homo sapiens
aggcacaagccagagagaggagcgcaggaaggaaaacaagccaggaccacga

SEQ ID NO: 21947 - RNA, 58 nt, Homo sapiens
gggcccccgcgccgcaagcagacggcaagacaaccgagcacaaaaaaggcacccggag

SEQ ID NO: 21948 - RNA, 72 nt, Homo sapiens
ggcgcagaaaccccggacaaggcacgccagacgaccggaaacaggcacagaacagaaggaaaggacgaagag

SEQ ID NO: 21949 - RNA, 82 nt, Homo sapiens
acgacagcggcgcgggcggcggcacggccacgccggccggggaggcggggccagggcaagggcgcagcacgcagacccgcaa

SEQ ID NO: 21950 - RNA, 75 nt, Homo sapiens
gcccccagacggacaggaccaaggacgcagggcacagaccacccggagaaaaaccagggagcagcaggagagaag

SEQ ID NO: 21951 - RNA, 79 nt, Homo sapiens
cggcaaacgcaagcgggagagaagaacaaccgccagggaacagcaaaaaacgagagcagcaaagagcaagcccaaaccc

SEQ ID NO: 21952 - RNA, 36 nt, Homo sapiens
gggggggagaaggcaaagggggacagggaagggcgg

SEQ ID NO: 21953 - RNA, 80 nt, Homo sapiens
cgacacccacagccgagccggccgcggcccgccggccggcaacaaaggggacccaacaagccccaggacagaaggaaagc

SEQ ID NO: 21954 - RNA, 76 nt, Homo sapiens
gcccaaaagaagaggcacaggcccaggcagaccgcagcaaagaaaccacgagcggggagaaacagcaaggagaaca

SEQ ID NO: 21955 - RNA, 52 nt, Homo sapiens
acccaccggcacaacacacaaagccccggccccccccccgcaacacccaccc

SEQ ID NO: 21956 - RNA, 76 nt, Homo sapiens
cgaaagcgggagagggaccggaacggcggcgacaaggggcccgaacagaggggaaggagagcaaaacaagagagcg

SEQ ID NO: 21957 - RNA, 96 nt, Homo sapiens
agcgccggagcccgagggacggggacggagagaacacgagcccacaggcagaaggcggcagggagcacgcaccaggagcccacggcccacccacag

SEQ ID NO: 21958 - RNA, 63 nt, Homo sapiens
gcgggacacacccccaggaggcccggcagagcaggccggacccaagccagaagcccgcaaagc

SEQ ID NO: 21959 - RNA, 76 nt, Homo sapiens
cagcgcaccaaggggaacacgaagaggggcaacccaaccaccacaagcaaggggaagccacaccaggcgccgagca

SEQ ID NO: 21960 - RNA, 82 nt, Homo sapiens
cccccagggagccgaagccaagggacggccaccccagacaggacccagaccagccaaagagaagaagaaaggaagcaaaaca

SEQ ID NO: 21961 - RNA, 69 nt, Homo sapiens
ggaaggagcggaaaaggaaagcccaaacgcagcagaaccaagaaaagggcacgacgaacaaacaccagc

SEQ ID NO: 21962 - RNA, 70 nt, Homo sapiens
gagaagacaccaaaaagcaaacggaccagaccgaccaccaaaacagagcaacacaccaggaagcagagcg

SEQ ID NO: 21963 - RNA, 110 nt, Homo sapiens
acgccgcggagggcacgcgacccccaacgccaagcagcccaccgacaggcccggaggcagcagaagacagccagcaggggcagaagcagcagacggaacgagggcaaaga

SEQ ID NO: 21964 - RNA, 83 nt, Homo sapiens
aaacacaagccgccaaacccccagcagaggaaacggaaacgacaaacagcccccgagagccccagcccgcagcccgagcccca

SEQ ID NO: 21965 - RNA, 58 nt, Homo sapiens
caacgaaccacaacaggagccaggcagaaaagaaaagaagaaaagaaagagaaacggg

SEQ ID NO: 21966 - RNA, 49 nt, Homo sapiens
cggacaccaggaacccgagcccggaaaggccagccacagaccagccggg

SEQ ID NO: 21967 - RNA, 63 nt, Homo sapiens
aaaaacgcagcaaaaaggaaagcggcacacccaaccgagcagcggccgagggccaggagaggg

SEQ ID NO: 21968 - RNA, 51 nt, Homo sapiens
gggccccacacccccccgggggggggagaaaagaagcagcccacgaacccc

SEQ ID NO: 21969 - RNA, 79 nt, Homo sapiens
ccgaggagccgcaggggggcgaaaggcggcagccccccggggccccgcgaacgcaagagaacggacggcaggagggcag

SEQ ID NO: 21970 - RNA, 47 nt, Homo sapiens
cgccggagacagggcaacggggacgagagccccggcacaaacggacc

SEQ ID NO: 21971 - RNA, 75 nt, Homo sapiens
cagggcggggaccccaggagagagagggacccagagagcacaggacacgagggccaagaccagcgggaccagaag

SEQ ID NO: 21972 - RNA, 40 nt, Homo sapiens
agccaacccagcaccacaagcaggcagggcccagccccaa

SEQ ID NO: 21973 - RNA, 57 nt, Homo sapiens
gagcaagccaaccaagccaggcacacagcgggcaagagaagaaagaggaaaggggga

SEQ ID NO: 21974 - RNA, 41 nt, Homo sapiens
gagagccaggaagcaaggaggggggcaaaaagccgacggac

SEQ ID NO: 21975 - RNA, 70 nt, Homo sapiens
cgcaaaggaacggaagccgccggcaagaaccaggcgccaaccccacggcaaacagaaaacgcagccgcag

SEQ ID NO: 21976 - RNA, 83 nt, Homo sapiens
gagcggcgggaggccaccgccagcccacggaggaagaagaaagaggggaaaagcgggaagacccacacacacacaaaaaggag

SEQ ID NO: 21977 - RNA, 71 nt, Homo sapiens
ccccgagcccggaggggggagaaaagggcccccaagccggcaggggaacgaggagggagcgcggagcggca

SEQ ID NO: 21978 - RNA, 80 nt, Homo sapiens
gagaggccggcccccaccgaacccaacacagggagggccaagaaccccagaagagggaaagccggacccgcccagcagaa

SEQ ID NO: 21979 - RNA, 43 nt, Homo sapiens
aacaggggggcgagaagagaaacagacagcagggaaaacccgg

SEQ ID NO: 21980 - RNA, 69 nt, Homo sapiens
gggcggcgaaggggcagaggcaaaagacaagaagaagggacagcagggcggcccggaagggaaccacaa

SEQ ID NO: 21981 - RNA, 71 nt, Homo sapiens
gacggcaaggagcaaggaaacgagggagcggccaagaaaccaggaggaacagaaggggcagaccaacacca

SEQ ID NO: 21982 - RNA, 53 nt, Homo sapiens
aaacgcaagaccgaaaaaaaacggcaggcccgcacacaccagaagcaggcagg

SEQ ID NO: 21983 - RNA, 65 nt, Homo sapiens
aggaggacgacggagaagaacacgagacgacgcccaaaagaaaggcccgagccaaaagacccaga

SEQ ID NO: 21984 - RNA, 57 nt, Homo sapiens
ggggggacgcgccaggcacagcagcagacccggccggcccggggaaggcccccgaaa

SEQ ID NO: 21985 - RNA, 72 nt, Homo sapiens
gcgcaacacgaggcgccgcagcacccgcgagcgggaaagaaaaggcacccaaaagcccagagggacaccgaa

SEQ ID NO: 21986 - RNA, 73 nt, Homo sapiens
cccaaccccccgagagggccacgaaaccgccccacacacccggggacaggacccacgcaggcccaggcagcca

SEQ ID NO: 21987 - RNA, 60 nt, Homo sapiens
ggacaggcccacagggagaaaaggagcagacacaggggaagaggaagaacgcgagaaaaa

SEQ ID NO: 21988 - RNA, 72 nt, Homo sapiens
caacacaacaggaggcggaggcgaaagcggaacgaggagagccaggaggggccagagagaaacaagaagaac

SEQ ID NO: 21989 - RNA, 53 nt, Homo sapiens
agagaccaacgagaccgcacagcgaccaaaggaagaagcgaagacggaaacga

SEQ ID NO: 21990 - RNA, 73 nt, Homo sapiens
aaagcggacaccaaaacccgacgagcgcccgaacacaagcgcgaaccacaagcgacggcgagaagaacgacga

SEQ ID NO: 21991 - RNA, 71 nt, Homo sapiens
aaaagaggaagcagcgccagcagcaaaaacggagcagaaaggaggccagcaaggggaggagcagagccaca

SEQ ID NO: 21992 - RNA, 73 nt, Homo sapiens
acaggaacaccaccaaagaaggggcggaggacaagaacggcgggcgagcaccaccccacagacgacacaaacc

SEQ ID NO: 21993 - RNA, 69 nt, Homo sapiens
gacaaaagggccaaagaagggagagaggcaaagaaaaagccagccgaggacgggaaccagaccccgacc

SEQ ID NO: 21994 - RNA, 78 nt, Homo sapiens
accgagcaacaacagccacaggggaagaggaccacacgcccagaggaccgagaagaacgagaggcacaagaccagaag

SEQ ID NO: 21995 - RNA, 75 nt, Homo sapiens
gaaccaacgcacgcaacaggagagaaacgaaagggaagcagaaccaacagacacccccggcaccgaggaaaacaa

SEQ ID NO: 21996 - RNA, 83 nt, Homo sapiens
agcggcgccgcggacaagcacgagggcgcgccgagacgcccgagaaaacaggacaggagaagaacacccccaagagcaacccc

SEQ ID NO: 21997 - RNA, 50 nt, Homo sapiens
cgaacaaaaggaaaagagcagcccagcagaccgacacaggaaacgccagg

SEQ ID NO: 21998 - RNA, 77 nt, Homo sapiens
aaaaaagggccagacagaagagacgaggacgcgcacaggaaaggacgcggaacaagcaggcagccaggcagcagaag

SEQ ID NO: 21999 - RNA, 68 nt, Homo sapiens
agaacccacgcaagcaggggcacacggcgcgaacccacaaggagggaaccgccgccaaggaaaagaag

SEQ ID NO: 22000 - RNA, 84 nt, Homo sapiens
ggcgagccgaaaagcgagcgcgaggaaaaggcggcgggagacacggccaaaagaagacccagacaagaaagaggaagacgaagc

SEQ ID NO: 22001 - RNA, 86 nt, Homo sapiens
ggggagcagcgcgcgccgcggacccaggcccagaggcggccaaggagcgagaacccgagcagcgccagagcaacacaccgcgcccc

SEQ ID NO: 22002 - RNA, 40 nt, Homo sapiens
ccaagaccacagcagcacccagcgcggccaacgcagcacc

SEQ ID NO: 22003 - RNA, 76 nt, Homo sapiens
cgacaacccggcgggggcgcggcgcggccccggcccggcccccgcaggagcaggacgaacagaaagcacgaccgcg

SEQ ID NO: 22004 - RNA, 90 nt, Homo sapiens
ggaggcggcggccgcggcggcgcgcgcgcaggggacaggggcggcgaccggcggcgccgaggagacaagcagaccggaagaccgacggaa

SEQ ID NO: 22005 - RNA, 67 nt, Homo sapiens
gcaaaggcagcccccaaggcaacagggagggacacacccaagcacggaccaaagaaagagcagaacg

SEQ ID NO: 22006 - RNA, 76 nt, Homo sapiens
gacccacaaacagaccaaaaaagcacccaaagagcccgaggaggcccccaaaagcgacgaggaccagccaaggagg

SEQ ID NO: 22007 - RNA, 75 nt, Homo sapiens
caaagcgagaacaacagcagacaagaaaccagccaagagcagcgcaggcaggaagaaccacaagcggacgcagcc

SEQ ID NO: 22008 - RNA, 71 nt, Homo sapiens
cagaaccaaacccaccgcaagacagggaagcgggaggcaagcaggggggcaaaggaaagaaggcagaaagg

SEQ ID NO: 22009 - RNA, 70 nt, Homo sapiens
aaacaggcgaaggagcggggccggacgccagaaagagggcaacggccgacgaacaccgcccaacgcagcc

SEQ ID NO: 22010 - RNA, 75 nt, Homo sapiens
gcaagcggccggagaagaagcggccgggcccaggcgggaacacacacaacccagacgcgcagaagaagcccaccc

SEQ ID NO: 22011 - RNA, 81 nt, Homo sapiens
caccacggcagcggcccaacgccaagaacaacgcgaagagacagagaagacgccggaccgaggaacccccccagcacgagg

SEQ ID NO: 22012 - RNA, 47 nt, Homo sapiens
ccgggcgcccacaggaccaaaggcgggaacaagggccgaggcagcac

SEQ ID NO: 22013 - RNA, 112 nt, Homo sapiens
ccgcccgccaggccgggccgcgggagccgaggcgccgaaggaccgacgcccggaggagagagacgacgacgagacgaggagacagacgagaccacccgggaggagggggcgc

SEQ ID NO: 22014 - RNA, 75 nt, Homo sapiens
agcagacggaaggaacggaggccccggacggagaaaaagagaacagacaccccgaagaaccccaaagaaacccag

SEQ ID NO: 22015 - RNA, 74 nt, Homo sapiens
ccccgcccacgcccacgcccccgcgccggagccccgggccagagcacggaacccgggcacgaagcagaggacga

SEQ ID NO: 22016 - RNA, 82 nt, Homo sapiens
ggcaccagcaggacccgaggccaggagccaggggcccagaagaggagcaagaggggggggcccccccgaagaaaggaaccgg

SEQ ID NO: 22017 - RNA, 69 nt, Homo sapiens
cggcccgcaagggcccgcacaccccagccaggacacggccaaggccggcgagaacgcccgcggcagcga

SEQ ID NO: 22018 - RNA, 80 nt, Homo sapiens
aggcccagacaccagaccccaggggcggcacgaaaaaccagagggccccgagaaaaggaacaaaagggcccggaaacagg

SEQ ID NO: 22019 - RNA, 111 nt, Homo sapiens
aagaccaaaggaggggagagggccacagaaggcacagaaaaggacggcccacacccacgaggcgcagcccccaagacgggcccccccacggcaaggaggcggggagggaaa

SEQ ID NO: 22020 - RNA, 74 nt, Homo sapiens
cacgagcgccgacaacccggcgccagagccgaccaaaccaggcaagaacgcagaacccagaacaggccaagcga

SEQ ID NO: 22021 - RNA, 85 nt, Homo sapiens
ggccgcagccgccggcaagccgcgaaggaagcagaagaggcggccacccacgagccgacggcaaacgccagggagccaccaaggg

SEQ ID NO: 22022 - RNA, 75 nt, Homo sapiens
acagaaacaaggaaaacggcgcgacagacggcaagaaagcaaaccagccagcacgggggcccagccagccagcag

SEQ ID NO: 22023 - RNA, 81 nt, Homo sapiens
cagagggcggagggcgagcagcaaccaaagcaagccaagaggaggaggaggcggaggccaagcggaaagaacaccgaccga

SEQ ID NO: 22024 - RNA, 81 nt, Homo sapiens
gcgaaaggaagcaagcagcagaagagccaaggaaaaacagcaagaacccaaaagggcaaccgccggccagagacacaccaa

SEQ ID NO: 22025 - RNA, 91 nt, Homo sapiens
gccggagggcccgccgacccgggcgccgcgccgcacgagcaccagccagagccagcaggcaccccccgagcccagcccacacaccgccgga

SEQ ID NO: 22026 - RNA, 80 nt, Homo sapiens
gacaacaaaagacaaggaagagagcgcccaggaaggagccaaagcacaagaagaagacgagaggcccaaagagggcagcg

SEQ ID NO: 22027 - RNA, 72 nt, Homo sapiens
agaaaacgaaggaaccagccacacagcgggaagcacgcggaaacagggaaagagaccagccccgcagccgcc

SEQ ID NO: 22028 - RNA, 92 nt, Homo sapiens
aacggagccagcggcgaggaggggccccagcagcccccgaaggcccacaggacaggagagaaagacgcaccagcacaggagcggccccgggc

SEQ ID NO: 22029 - RNA, 82 nt, Homo sapiens
ccagcaccccccgggacgccgaaagcaaggagaggccaccaaggagaagcgcaggcgaaagaccacaaggacaccgaagccc

SEQ ID NO: 22030 - RNA, 54 nt, Homo sapiens
acagaagaaccaggcccccacaaaccgcgaccacgggagagaggaaggaggccg

SEQ ID NO: 22031 - RNA, 81 nt, Homo sapiens
cccagccagggcccgcagcaaagagagaggcagaaacgaagcgaaaggaaaccaaaaggaaaaaacagaagaaccaaagaa

SEQ ID NO: 22032 - RNA, 81 nt, Homo sapiens
cggccgggccagcacccggccgagacggcggcagcagcggcacagcacgagacacgagacaggagagaaaggagagacaaa

SEQ ID NO: 22033 - RNA, 74 nt, Homo sapiens
agggacggaagacaccagcgcagcccgacacacaggcaaacaaggcgcccgcgaagagcccgcggccccaggcc

SEQ ID NO: 22034 - RNA, 74 nt, Homo sapiens
ggagaaacagcagaaacgcaccaggccaaagaaagagaaaaggccggcccacagcccaaaaagaaacaggaccg

SEQ ID NO: 22035 - RNA, 79 nt, Homo sapiens
aacggagggcgcggagacggagcgccgcgcccccaccagagcaaagccccaggaaaaaggggaaaacaccgcgccagcc

SEQ ID NO: 22036 - RNA, 74 nt, Homo sapiens
agcacgcaaagacaaaccaggccgggcaaggaggacgcccggaaaagagaaccgacaaggacaggcggccacga

SEQ ID NO: 22037 - RNA, 58 nt, Homo sapiens
aaccaaggggacaaaccaacagaagggcaaccaggaggcccacccgacgcggagcgac

SEQ ID NO: 22038 - RNA, 47 nt, Homo sapiens
cgaggagcgaagaacaaacacccgagcgcgagcacacgaccgcgaga

SEQ ID NO: 22039 - RNA, 74 nt, Homo sapiens
ggggagccccgcccgcccccccgcccaccacgaggcggggccaggccagcagcagaacggacaccggaccgagc

SEQ ID NO: 22040 - RNA, 72 nt, Homo sapiens
gggcgcgggcagccacgcccgagacgaagaagccaaggaaagacaaagagagaaccaaaaagaagaaaagac

SEQ ID NO: 22041 - RNA, 72 nt, Homo sapiens
acgagaacgcagcgcaccaggcgcggcccagacccgcaggaggcgacgcaccgccgcggaacaggagagcgg

SEQ ID NO: 22042 - RNA, 67 nt, Homo sapiens
acagagagcagaggcgcggcccggagaaaaagaccgcggagaaccgacccagaccgccccacccaga

SEQ ID NO: 22043 - RNA, 78 nt, Homo sapiens
cacgcgccccgagaagagagaaaaaaacccgcagaaggcaggcacaacaacaaagcacaggggcccaacagcagaaag

SEQ ID NO: 22044 - RNA, 74 nt, Homo sapiens
cgaccagcaggaacgggagacccgaccaccggaagccacggcccggacccccgccacgcaagaccgcgcccgcc

SEQ ID NO: 22045 - RNA, 80 nt, Homo sapiens
gggcaggcgaaaaaacagaaggagcagacggcacgccaaggccgggacaggggccgagcagaggcaggcagagggcaaag

SEQ ID NO: 22046 - RNA, 75 nt, Homo sapiens
ccgggcgggccccgggcgagcggggagggccacagaagaagagacgcagaacgggagggccacagcaagagagca

SEQ ID NO: 22047 - RNA, 81 nt, Homo sapiens
ccagccagcaggggcccgcagcgcccgcaaccggggcgaacaggcggccgccaagaaggaaagaggcagaaggccagaagg

SEQ ID NO: 22048 - RNA, 80 nt, Homo sapiens
gaggaggaacccacacccccaaggcacggggccacaccacgaaggacagggcagaccgccagcagcacagcaagccacag

SEQ ID NO: 22049 - RNA, 82 nt, Homo sapiens
accaacaggaacagggcagacgagcggaggacacccaacccggaggcggacaacacgaaaacagaggacagcagcagacccc

SEQ ID NO: 22050 - RNA, 84 nt, Homo sapiens
agcccccaggaacagggcaaaggagagcacaaccacgcagggaagcccaggggcagcccggccccaccccgccacaaacgcagc

SEQ ID NO: 22051 - RNA, 72 nt, Homo sapiens
acggagcagcggcaaagcaacacgcgacagaggaaaggacgcggaaagacaggcaagaacaacccaagaagg

SEQ ID NO: 22052 - RNA, 33 nt, Homo sapiens
ggacacaggcaacccggcacagaggggaagaac

SEQ ID NO: 22053 - RNA, 74 nt, Homo sapiens
gggaaacgaccacaggccaccacccaccaccacgacgaaggagcaagggcaacacccggagagaagagccgcaa

SEQ ID NO: 22054 - RNA, 79 nt, Homo sapiens
aagggaggacggggcccacagcaggagaaagacagcaaagaaaaggagaagaaaggaaaaaaacaaccccgggcacccc

SEQ ID NO: 22055 - RNA, 77 nt, Homo sapiens
cggcacggggcaaccgggcggccacgcccgcgcagccccggcaaaggaaagaagcaggaaggggccagagcaggaac

SEQ ID NO: 22056 - RNA, 56 nt, Homo sapiens
ggccaccgcggcggcgcccgcaccgcgcccgcaaagggcgggacaggccagggaca

SEQ ID NO: 22057 - RNA, 86 nt, Homo sapiens
gggccagacccacgcggcgccagcccggcgggaaggaaaaccgcgcagagagacccaacagaggaagccgcaagaaacgggacgac

SEQ ID NO: 22058 - RNA, 78 nt, Homo sapiens
gaaacgaggggacaaacacaccagaggacaccaggcagaaagagcccacaagacaaaaaagcagacggaaacaggcag

SEQ ID NO: 22059 - RNA, 68 nt, Homo sapiens
cgaaggagccccaagcaggaaaagcgcgggaaccagcagggaaagacgaggccggaagccacaggaga

SEQ ID NO: 22060 - RNA, 72 nt, Homo sapiens
cccccccaccccgcacccacgcccggcccggcccggccccgacacgcaggggaaagcgcgagcgagcacccg

SEQ ID NO: 22061 - RNA, 69 nt, Homo sapiens
cacccggcacgccacggcgccccgcaagagccggcggcacgacagcaaaagccagggcacagggccgca

SEQ ID NO: 22062 - RNA, 77 nt, Homo sapiens
gccacaacccagcggagagcgcaacaagcgaccaggacgaaaagagcccaaaaggcagagcgaggagagaagaagga

SEQ ID NO: 22063 - RNA, 75 nt, Homo sapiens
aaaagaagaagaaaccgaaaacagaaagcccggccagcgccgaaaacaccaccggcggacagagagcacgcaggc

SEQ ID NO: 22064 - RNA, 78 nt, Homo sapiens
caaaaagaaaccagcaacaaaaagaaagcgcgaaggcaaagcagaggaagaacagaggcaggcagccgcccgacgggg

SEQ ID NO: 22065 - RNA, 76 nt, Homo sapiens
ccacacgacaccaccgcgagagaccgcagcagggaggcgaaaccaaccaaacgccccaccagccacagcggcagaa

SEQ ID NO: 22066 - RNA, 49 nt, Homo sapiens
gacgccaggcagcgcccccaaacgaaagagcaaggcacagcgacaacac

SEQ ID NO: 22067 - RNA, 76 nt, Homo sapiens
gcggagggggagacggccgggagggcccgccagccgcgcccgaaggagaaacgcagacaccggaaaggaagaccgc

SEQ ID NO: 22068 - RNA, 79 nt, Homo sapiens
cgaagcaaggaccgggacacccagaggaacgaagacacacacgaaaggccaaaaggagaaggaagggaagagcagaaag

SEQ ID NO: 22069 - RNA, 55 nt, Homo sapiens
cccacgagagacccggagcaggaccccaaacaggcgggacagggagcaacaccgg

SEQ ID NO: 22070 - RNA, 69 nt, Homo sapiens
agaacaaccagcggaaggaagcaaacccgcccgaaccgagaagcccaacaaaccaagggcaaagaggca

SEQ ID NO: 22071 - RNA, 53 nt, Homo sapiens
gaggacaagaggaagaaggcggggaaggaaaacagcaacacagagcgaacaaa

SEQ ID NO: 22072 - RNA, 86 nt, Homo sapiens
ccccccgccccgccagagccccccgccgagggccccggccccggagcacagccccggcgcgacggaaggcacccacaaagggcaga

SEQ ID NO: 22073 - RNA, 56 nt, Homo sapiens
cgcccaggccaaccgggcagacggagcagcaggacggggagcaacacagcaacaaa

SEQ ID NO: 22074 - RNA, 71 nt, Homo sapiens
gggacggggaaggccggggcgcccggcgccggccgagaaggcagaggcggccccagaaacaacggcccaga

SEQ ID NO: 22075 - RNA, 56 nt, Homo sapiens
gacagccaaacgcagcgcagaccgcgcccgccgaggcccaccggcagaaagggaga

SEQ ID NO: 22076 - RNA, 80 nt, Homo sapiens
cagcaaagcagcagaacgagggaacgccgcagaaagaagaaggggcaagaacagccacagcagagacaaaaaaccagccc

SEQ ID NO: 22077 - RNA, 59 nt, Homo sapiens
cgcgaggagaagaggggaggaggcggagcgccggcggagcagcgcagggagaagaaacg

SEQ ID NO: 22078 - RNA, 56 nt, Homo sapiens
ccgcggcccacgcccgcggagcagccgaaacagacaggggcaagcgggagcgccaa

SEQ ID NO: 22079 - RNA, 73 nt, Homo sapiens
caacgcgcccccgagggaaagcaccacaagaaaaccgccggccacccggacgcaccgccgcagcacacggggc

SEQ ID NO: 22080 - RNA, 72 nt, Homo sapiens
agacgcagggcgcccccggccagaccgccccccggagcgggcccgccccagcccacccagagccggacgggg

SEQ ID NO: 22081 - RNA, 73 nt, Homo sapiens
ggcgccgagagacggcgacgaccaggacgagccgaacaaccgcagcagcgaaaccagggagaggaagcccgga

SEQ ID NO: 22082 - RNA, 52 nt, Homo sapiens
ggagaaggagaggacggcacaaacaagcaacgagaaggggaggcccgaacac

SEQ ID NO: 22083 - RNA, 79 nt, Homo sapiens
acggaaccaccagaagccagcccccaggcggaacgcccgccccgcagagagcagaccaggcgaccagaagcaagaacaa

SEQ ID NO: 22084 - RNA, 76 nt, Homo sapiens
cccaaaccccacaagccgcagacaagacccgcaagggagcaagaacaccagccgagagacgggaggcagggcacca

SEQ ID NO: 22085 - RNA, 59 nt, Homo sapiens
ccgcccagaaacggagggggcccggaccggggcgcagaaaaagggacgagaccagagga

SEQ ID NO: 22086 - RNA, 99 nt, Homo sapiens
cgaccccagccggcgccgagggcggaaccgagcgggaaaagccaacagcgggaacaagaggcgggagaagacgggaagccaccagagcccaggcacgag

SEQ ID NO: 22087 - RNA, 75 nt, Homo sapiens
ccaaacggacaggagaacggcgccacaagaaagagcaggacaagagaaagggccggcccagggagaacgcaaaac

SEQ ID NO: 22088 - RNA, 71 nt, Homo sapiens
gaagacaccagccaccgaggggggggagacggcaaccagggcaaccgccgaaggagagcgccagcgaggag

SEQ ID NO: 22089 - RNA, 77 nt, Homo sapiens
caaggcaaaaacaagcaccagaggcccgagcagccagcacggagcacgagccagggagccgccgggaccggcccggg

SEQ ID NO: 22090 - RNA, 77 nt, Homo sapiens
agagaagccaaggacccgaccagaaacccagcggcgagaacaggcaccgaaagggggaaaggcagagccagaaaagc

SEQ ID NO: 22091 - RNA, 69 nt, Homo sapiens
caacacagaccaaagggaacgaaaacagccgagacaggaaagagaagaccacagaaacagccaacccca

SEQ ID NO: 22092 - RNA, 88 nt, Homo sapiens
cagaaagcaggcgaacccgcggcgcaaaacgggaggaccacaggccacccagaagggccccaccccaaggggagggccaaggggagcg

SEQ ID NO: 22093 - RNA, 78 nt, Homo sapiens
cggggggaggcaccgcgccgcacgcgcaggggcgcggcaggaccacccaggccagaggaaggaccgggacggcgagaa

SEQ ID NO: 22094 - RNA, 78 nt, Homo sapiens
ggagccggagaacggccaggcggccccgagcggaacggagaaagcgaggagcggcgggaaaccaccaacaacaccccc

SEQ ID NO: 22095 - RNA, 67 nt, Homo sapiens
gacaggagagagggaagggaaacaacgacggagaggcaggaaccgcagaacgaagccacaaagggac

SEQ ID NO: 22096 - RNA, 72 nt, Homo sapiens
cagggcccgaagcaggccagcgcacagggggcccgcgcagacgcaccgagaaaacgccggacgggccaaaga

SEQ ID NO: 22097 - RNA, 81 nt, Homo sapiens
gcacgggacggacaaggcaacacccgaagaaacaagcacagggaagacacgacaaggggcagaagcgaaaagcaacgggag

SEQ ID NO: 22098 - RNA, 63 nt, Homo sapiens
aggaccggaaaaaggaaaggggagcacaggggagacaagccgcaacaacccgcagacgagagg

SEQ ID NO: 22099 - RNA, 74 nt, Homo sapiens
cccagggccggaaaagccaacgccggcgaaggcacaggcaccgacgacagcagcacaaacagcgccgccaggag

SEQ ID NO: 22100 - RNA, 79 nt, Homo sapiens
agaggacgagacagaccaagaaaaacgcaagggaaaagagaaaaagaaagcgacggaaaaaaacaaaagaacacaacac

SEQ ID NO: 22101 - RNA, 73 nt, Homo sapiens
acaagaagcccgaagccgaccgggcaaccacaagcccaacagcgaccacccacccagggcccaaaaccgcccc

SEQ ID NO: 22102 - RNA, 71 nt, Homo sapiens
gcagccaaaagaaacaggaagaccgcaggaaagcaggaaggcaagaaagccaaggacgaaacccacacgga

SEQ ID NO: 22103 - RNA, 72 nt, Homo sapiens
gaaggcgccgcggcaacgcgcccccagccccgccccccagaccgggacggacagaggagaggcacaaagaag

SEQ ID NO: 22104 - RNA, 72 nt, Homo sapiens
gcagaccgagagggggccagcccagacggggcaggaaggaaaagcaaacacaaggaaccggcaaggcgcaaa

SEQ ID NO: 22105 - RNA, 99 nt, Homo sapiens
agagagcaacggaaacgacgcccagaaaaaggaggaccggacaggacagaaaacagccacgcaaagggaggaggagggagacagaccagaacaccacga

SEQ ID NO: 22106 - RNA, 57 nt, Homo sapiens
ccacccgacgcgaaacgagaggccccggccccaacaggcccgcgcccagagccccgc

SEQ ID NO: 22107 - RNA, 40 nt, Homo sapiens
aagccgagccgccacccggcgaaaagcaacggcgcaagag

SEQ ID NO: 22108 - RNA, 79 nt, Homo sapiens
cacggagcgcgggaccgcgggcagacgcggagaacagcggggccgaaccgcacaagacggcgaccgagcgggcccccca

SEQ ID NO: 22109 - RNA, 46 nt, Homo sapiens
agaaagggccaaggaggcaaagaccgggagaagacaggaagaccgg

SEQ ID NO: 22110 - RNA, 68 nt, Homo sapiens
cagaggagaccccgcgaggaccgggagacaacaaaaaagggagaacgcacaagggaaaacgagacaag

SEQ ID NO: 22111 - RNA, 71 nt, Homo sapiens
acgcaccgcgcgaagacggaagacgcgcccgcgccgaacccaaggaaagaccggaaagaaggaagaaaaga

SEQ ID NO: 22112 - RNA, 60 nt, Homo sapiens
caggcgcgccgcccccaccgcacacggagcgcaccagaccagcgaccagagccaagaccg

SEQ ID NO: 22113 - RNA, 80 nt, Homo sapiens
gcgagccggcggcgggaggagcagggcggagcccccagcccccgcgaaggagaagcaggaaggaaaaaaaccagaagagg

SEQ ID NO: 22114 - RNA, 67 nt, Homo sapiens
agccccacgaaacacggcaagaccggaacgacagaccccgggcacaggaagaccagccagcccgcgc

SEQ ID NO: 22115 - RNA, 76 nt, Homo sapiens
gcccgggccgggggccgccgggacccggccaccagcaagccggagcggagaaaaaaaggcaggaaagagaaagaag

SEQ ID NO: 22116 - RNA, 86 nt, Homo sapiens
aaagaggaggacaaaaccgccaaagccggccccggcaaggaggaaggggcccagcagaggcccggaggggcggggggacccaaccg

SEQ ID NO: 22117 - RNA, 73 nt, Homo sapiens
gacccgcgaacgagcacaagggcaccacgcaaacagggaaacaggagaaaaccggaagagaaaggccgggaag

SEQ ID NO: 22118 - RNA, 78 nt, Homo sapiens
cagagaccaccgggcgcaccccacccgggccgcccgaagggcccaccgaaaagcgagaaaggccccagaccaccaaca

SEQ ID NO: 22119 - RNA, 85 nt, Homo sapiens
caggacgacagcagcagcagcgcgccccaggggcgggacaggccagggacagcccaacccagcgcgaagccagaggccacgaagg

SEQ ID NO: 22120 - RNA, 59 nt, Homo sapiens
gcagcgaccacaccgaaggcaggacggagcccgcgcgcggcgccaccagcggcagaagg

SEQ ID NO: 22121 - RNA, 78 nt, Homo sapiens
ggaacagcgcaaccgaaggcacggggcaggaaacagaagagggggacgaccaccagccaggccggggacaaacaggca

SEQ ID NO: 22122 - RNA, 73 nt, Homo sapiens
agcgcagaagcccgaagaaaacagcgggaagagacagccaagggcggagaacggaaaagcaccaggaagcaga

SEQ ID NO: 22123 - RNA, 69 nt, Homo sapiens
accgggacaagacaccccgcaccagaaacagcgcgagagcagcagcgggacaacgcccaacagcacaac

SEQ ID NO: 22124 - RNA, 74 nt, Homo sapiens
agccagacagagagagaaacccgaagcgcggaaaacccagggggcgaacacggaagaaaaagcggggaaggggg

SEQ ID NO: 22125 - RNA, 60 nt, Homo sapiens
agacccagcacacgccgaccagcagacgaggaagagaacccacaaagaagaaaacaccca

SEQ ID NO: 22126 - RNA, 77 nt, Homo sapiens
agaaggcggcgacaccgggagagcgaccagggacaaaagccacgagagaagaaagaaaaagaaaccgccagcccaga

SEQ ID NO: 22127 - RNA, 69 nt, Homo sapiens
aaccggagcgggagacgggacagacagccgcacgaaccggaccaggaggacgaccgcgcacagaaagcc

SEQ ID NO: 22128 - RNA, 72 nt, Homo sapiens
cgcgccgccacccccgacacgaaagcagacccaacaccgggcagaagcccccggggagagacagacagaggg

SEQ ID NO: 22129 - RNA, 73 nt, Homo sapiens
gaaagaagggggcagaagagggggggagagagacaacaggaaaaaggccgacaacgaaaaacaaaagacaaaa

SEQ ID NO: 22130 - RNA, 81 nt, Homo sapiens
gcgccggcccacgcgcggccaagagccaggccccggggccccagcggcaccagcggagaccacgggagccgcgccggagcc

SEQ ID NO: 22131 - RNA, 50 nt, Homo sapiens
agcagcacgcagaagggaggagcagcccaacagaagggggagccgagggc

SEQ ID NO: 22132 - RNA, 80 nt, Homo sapiens
cgcccagcccccgagggcgggaacagagaccccaggggagcaaaggccggaaaccgagcagaaagaaaaggaaagaaaga

SEQ ID NO: 22133 - RNA, 64 nt, Homo sapiens
gcggcaaagccacccaggaaggcagacaggacgggccaacgcacggcccggcagagccagcacc

SEQ ID NO: 22134 - RNA, 55 nt, Homo sapiens
gagacgagccaacacgaagcagggaacaacggagagaagcaaaagccccaccaca

SEQ ID NO: 22135 - RNA, 75 nt, Homo sapiens
cgcgagagcgcaaacacccccagacaaaggaagggaccacagaccagcacgccggcgccacgaaccgagcgacag

SEQ ID NO: 22136 - RNA, 40 nt, Homo sapiens
gaggggcccagaaaacaagccagcaggacaaggagaggag

SEQ ID NO: 22137 - RNA, 78 nt, Homo sapiens
cgacacaagcacaaaagcggaggaaaagacaacgaagaaaggagcacaaaagaacaaacacacgagccaaaagcacaa

SEQ ID NO: 22138 - RNA, 72 nt, Homo sapiens
gaagcgccgcagcaacggcaccccaccacgcagccgaagccgaaagacacggggacaggacgcggaggaaga

SEQ ID NO: 22139 - RNA, 73 nt, Homo sapiens
acagccacagacgaagaaaagaaaaggaggagcgaaaaagaaaccacggggcccggagaggaacgccggccca

SEQ ID NO: 22140 - RNA, 75 nt, Homo sapiens
acgccaacgacgaggaccgacgcagcggaggcacccaccacgggccaggcgggccagaggcaagccgcgggagcc

SEQ ID NO: 22141 - RNA, 78 nt, Homo sapiens
gaagaagggggccaacaccacaggaggcaacagcacaggagcagcgagggggagaacaaccggaccagaggaggagga

SEQ ID NO: 22142 - RNA, 84 nt, Homo sapiens
cagcaccgacagccgacgcgcagaagcagagccaccggggggaagacccagacacacaccggagaaagccccccagcgagcggg

SEQ ID NO: 22143 - RNA, 69 nt, Homo sapiens
cacagaagaaaaacaaaaagagagagcgaaaaaggaccccgccaggagcgcagcggaacagcaagccgg

SEQ ID NO: 22144 - RNA, 75 nt, Homo sapiens
agaagacaaaaagccaggaaagaccagcacaggcaagaaacggaaaacacgaaaagagaaaaaaagcaagcaaaa

SEQ ID NO: 22145 - RNA, 88 nt, Homo sapiens
agcaccaggcggagcaggagcggcggcgacggccacaggggcggcgacggcgcaggcgaagcgaaacaggagaaagaagacccggaga

SEQ ID NO: 22146 - RNA, 85 nt, Homo sapiens
ccgagccagcgagccagcgagccgccgacccgccgagcaaaagacaacccagaaaagaaaaggccaggggcgccgaaaaacccgg

SEQ ID NO: 22147 - RNA, 93 nt, Homo sapiens
gcggcgggcggcggcgcgcggacccaggcgcggaggcgaggccagcaggccagcacccgcccgaggacagagaggcgagcgcccggaggggag

SEQ ID NO: 22148 - RNA, 52 nt, Homo sapiens
gcagacccaccggcgcacccaaacaacggacaccccccaggcacagccacac

SEQ ID NO: 22149 - RNA, 34 nt, Homo sapiens
ccggcacagcccccggagcgaaaagcaaaccgga

SEQ ID NO: 22150 - RNA, 70 nt, Homo sapiens
cacgaccgggagccccgcacccgcccggccccacgggccgagacacggcaggccacccccgcaggcaagc

SEQ ID NO: 22151 - RNA, 64 nt, Homo sapiens
accaggacagcgacagcggcaacgagaaacggcccaggaggcaggaggaaaaacgcgaaccagc

SEQ ID NO: 22152 - RNA, 75 nt, Homo sapiens
cgggccccgcccaggacccgacggggaagccaggagcagaacgggccaccaggagcacagacaccacacaagaaa

SEQ ID NO: 22153 - RNA, 84 nt, Homo sapiens
ccacgagcggacaccggcaaccggccccggaagaagaagcagagagccaggaaaagaaagagaacccagccgccgacaggcagc

SEQ ID NO: 22154 - RNA, 78 nt, Homo sapiens
acgaagggagcagaggacagaaccggaccggaggcagaaaaacacaccgacagcagaacacacgcgaaaggaaaccaa

SEQ ID NO: 22155 - RNA, 68 nt, Homo sapiens
ccgagcggcgggaagagaagcgaaggagagagaaacagcagacagacaggggaacgaagagcaaggga

SEQ ID NO: 22156 - RNA, 81 nt, Homo sapiens
gaaaaaggagcaaagagcacaacaacaaaagaaaacaccaccggaccacgaccagggcgacgggacaaacacaggaaggaa

SEQ ID NO: 22157 - RNA, 87 nt, Homo sapiens
gagccggagagccgcagggaggcggagggcagggccaggaggaacagaggcagaaggagagcaggggccaggagggccgaagcccac

SEQ ID NO: 22158 - RNA, 72 nt, Homo sapiens
acccacgggacgccccgccagaccgcgaccgcacgccagcccaagccgacagggacaccagcccggggcccc

SEQ ID NO: 22159 - RNA, 87 nt, Homo sapiens
ccgaagcccaccggccccaacgcacagccagggagccaagcgccgcccggccgagcgagaacccgagcagcgccagagcaacacacc

SEQ ID NO: 22160 - RNA, 75 nt, Homo sapiens
aaaccaaagcagaccagaaaaaacagcacaccaggaagcaaggagccggagacccacggccgcggagaagagccc

SEQ ID NO: 22161 - RNA, 77 nt, Homo sapiens
acacagacgggggcgagcggacccgcagccccaaagcagaagaagaagagcggagaaccgaacaggcgcagggagcc

SEQ ID NO: 22162 - RNA, 52 nt, Homo sapiens
aagaggcagaaggcccaaagggccaagcgcgcccggaagggcaggagaaaca

SEQ ID NO: 22163 - RNA, 85 nt, Homo sapiens
aaaggcagccgcggacgccgcgccagcgacaaacaaaaggagaggacggggaggagcgcgccacccgggcgggccaggaccgaga

SEQ ID NO: 22164 - RNA, 81 nt, Homo sapiens
gagcccaggagaaaccggacgcgacggggagcaagaggacacagcagagaggccaaagacgagaagagaaccacacaggaa

SEQ ID NO: 22165 - RNA, 62 nt, Homo sapiens
aggagagcacaagaccagaacacacaagaaccgggagaacgaacaaaccaagccaacaccca

SEQ ID NO: 22166 - RNA, 72 nt, Homo sapiens
gggcagcgaaagaaaagggaggggacagccgaaagccacgaagaacagcagccaaagaaagagcaaaaaagg

SEQ ID NO: 22167 - RNA, 40 nt, Homo sapiens
agccccgagcagcgggaacagacaaaaaccggcccagacg

SEQ ID NO: 22168 - RNA, 64 nt, Homo sapiens
cacgggaaagcccccgcagccggcagacaaagacagcgcccaaaggaacaaagagcagaagacc

SEQ ID NO: 22169 - RNA, 61 nt, Homo sapiens
aggaagagcaaccccagaaggcaacgcgccgcaaaacagaacgcggcggacggcaccagca

SEQ ID NO: 22170 - RNA, 77 nt, Homo sapiens
ccgcgcaccagcaccgggcccgagcgcggaagaaaccgccgagagaccggcaagcgggagcgagagaagcgaggacc

SEQ ID NO: 22171 - RNA, 59 nt, Homo sapiens
ggcaggcaaaggcggaaaaaggcaccagggacaccaacgggccaagagggagcgagcca

SEQ ID NO: 22172 - RNA, 82 nt, Homo sapiens
gccccgaaagacccggcacgggacagacacgcgagagcgggaggcggcaccgccacaggccggcacccgggaagagacaaga

SEQ ID NO: 22173 - RNA, 75 nt, Homo sapiens
ggaaaaacgagcagaaagaagccaggaaaaaccagaagagaaaaaacaaaggggagaggcaccccgcgggacgac

SEQ ID NO: 22174 - RNA, 83 nt, Homo sapiens
cccaaagccgaacaggcagggccagacccagaacagcagagaacacaacacaggacaagcaagcccagagcgccggacgaagc

SEQ ID NO: 22175 - RNA, 51 nt, Homo sapiens
ggaggaagcaggaaggaccacccaaggcacgggccacagagacgagacccc

SEQ ID NO: 22176 - RNA, 47 nt, Homo sapiens
gagagggacgaacagcaaaaggaacgcgaagagacccccaggccaaa

SEQ ID NO: 22177 - RNA, 70 nt, Homo sapiens
ccgcaaggacccaaaggggagaggggggcccagagcgccaacgcagcgcccaacccccaaggcagggcag

SEQ ID NO: 22178 - RNA, 77 nt, Homo sapiens
acagccacaaagggaagcaagagaaaaagaacaacgcggcaccacgccgggagcggcgggggcgggacgggcgccgg

SEQ ID NO: 22179 - RNA, 52 nt, Homo sapiens
agcgcccgcgccgagacaccccagccccccagcaggcaggaaccagcaaccc

SEQ ID NO: 22180 - RNA, 69 nt, Homo sapiens
aacagaaaaagagaggagggagaacacagaaacccgccccgggcccaagggccagcgcgccgccaggac

SEQ ID NO: 22181 - RNA, 75 nt, Homo sapiens
accagacgaaacagaaaccaagaaccaacaaccaaagaaaacagaacagaaaagccaaggccaccgagccacaag

SEQ ID NO: 22182 - RNA, 74 nt, Homo sapiens
ggccagcaggaccaggagacaagagcaaccagaaagagagggacaaggccaagggagcagagaggaacagcacg

SEQ ID NO: 22183 - RNA, 80 nt, Homo sapiens
ggccgggaacccaagagggccaaggggaggccggcaagacgggccggcgagaacgcggacaagcaaacaaagaggaaaaa

SEQ ID NO: 22184 - RNA, 70 nt, Homo sapiens
acggaccaccggaacggaaaaacaccacaggcagcagcagagaaccgggaagcgcgccgaacgggagccc

SEQ ID NO: 22185 - RNA, 74 nt, Homo sapiens
caaggggaaccacaggaacggcaagcgggcaacagagagagccagaagaaaggaacagaacggagcaacacaca

SEQ ID NO: 22186 - RNA, 75 nt, Homo sapiens
agcggacaacgaccggggcaccagggaaaacacacccgagacccagacagagaccccagaagaaaggcggacagg

SEQ ID NO: 22187 - RNA, 82 nt, Homo sapiens
ccccacgcggaaagaagacccgccggcaccggcccgcaggaccagaggacaagacaaagggagcaagacaagccaaagagga

SEQ ID NO: 22188 - RNA, 76 nt, Homo sapiens
gaccacgcacacgggcagcacaagagccgccgagccaggcggaggcagggcacaaccggccacgcaacccaccccg

SEQ ID NO: 22189 - RNA, 79 nt, Homo sapiens
ccaggccgacgcacccacggggccggggaccaggagcccacaggggcgaggcagaaggcggcagggagcacgcaccagg

SEQ ID NO: 22190 - RNA, 49 nt, Homo sapiens
gcggagccaccggcaccacggggagcgagcacccagagccagggaggag

SEQ ID NO: 22191 - RNA, 62 nt, Homo sapiens
gccacgaaagccggccacgccgggccggagccgggacagcaggaagagaacagcaaaaccag

SEQ ID NO: 22192 - RNA, 61 nt, Homo sapiens
cgggggggcggcccggccccgcagaccccgccccccgaggcgcagcccgaacccagcagcc

SEQ ID NO: 22193 - RNA, 53 nt, Homo sapiens
cgccgggcccggaaagcgccgcccagcagccgcagcaaggcaccagcagaaca

SEQ ID NO: 22194 - RNA, 82 nt, Homo sapiens
gcccgccgcacccgggccgcgccggcacgagacggcgaagaacagaggaacaacgccaacgacaagacgaggaccaacgcca

SEQ ID NO: 22195 - RNA, 58 nt, Homo sapiens
cccacccccaacgcgacggaaaggcacgaaagccagacaaagcccgagaggacccggg

SEQ ID NO: 22196 - RNA, 79 nt, Homo sapiens
gagagccaggcgaacagaaagcacaagcagggaggaaaaaggaacaagagcaagaaaaaaacaaaacgcagaagcacgg

SEQ ID NO: 22197 - RNA, 82 nt, Homo sapiens
cgcccgggccagcggccgcgcacccccggccggaggcaccagcgggacggcaaaacagaacagaaaggcggagaaaaaagag

SEQ ID NO: 22198 - RNA, 63 nt, Homo sapiens
aaggagaccgaaaagaccgaagaaacggacgaaagccaagcaacaggcgcacgcggaggaggg

SEQ ID NO: 22199 - RNA, 54 nt, Homo sapiens
gaaagcagaggacccagcaaagccgaagaagacccaggaccacaacccagaagg

SEQ ID NO: 22200 - RNA, 85 nt, Homo sapiens
cagaggagggaggcacaaaaagagagggccacgagagagaaagacacaggggaccaaaacaaaacgagagcaagaggaaagaaaa

SEQ ID NO: 22201 - RNA, 83 nt, Homo sapiens
agccccagggccggaagcaggggggaacgcggacgaccgcccgggagaggcagaagaaaacgaagaagaccacacaggccaaa

SEQ ID NO: 22202 - RNA, 38 nt, Homo sapiens
cccccgagggcgggaacagacacacggcaaagacaggg

SEQ ID NO: 22203 - RNA, 74 nt, Homo sapiens
accacggagcacaaggaagaggacacaccaaggggcacccgccggccaagagaagaacgccaaacggccccaca

SEQ ID NO: 22204 - RNA, 75 nt, Homo sapiens
cgagcgaacagagggccccccggagggcaccagaacaaaagagccaacacagacaagaccgaaccggaaccaagc

SEQ ID NO: 22205 - RNA, 72 nt, Homo sapiens
gacgggggcccaagcccccggaagagggccggagacccagagccggggccaccaaaggaacagaggagagaa

SEQ ID NO: 22206 - RNA, 57 nt, Homo sapiens
cggaccagaagccagagcgaggacgccggcaggaaagaccacagcaagaccacgccc

SEQ ID NO: 22207 - RNA, 76 nt, Homo sapiens
ggccaccgaggcgaggagaggagagccagaacccaggagaaacgagagggacagcaaggaagacgccagagagcgg

SEQ ID NO: 22208 - RNA, 75 nt, Homo sapiens
agacgcggcgggagcagcgaaagaccacggacagcaggcccacacccaggaaagagacggcggcaggccagcccc

SEQ ID NO: 22209 - RNA, 91 nt, Homo sapiens
gccggagcagaggcacccgagcagcgccagcggccgagcgggcggcccggccgggcgcccggggcggcggagcccgcggcgccaggccacg

SEQ ID NO: 22210 - RNA, 79 nt, Homo sapiens
gcccacaccagagcgagggcgcgcaaacgaaggaaaaggaaaaccaacagcgccacaaagaccggacacagacagaccg

SEQ ID NO: 22211 - RNA, 46 nt, Homo sapiens
agaccgagagcagccgccggggcggagccacacccaccgcccgggc

SEQ ID NO: 22212 - RNA, 51 nt, Homo sapiens
gggaacccccacgcggccagcgaaaacgcccagaccccggccgcccccagc

SEQ ID NO: 22213 - RNA, 82 nt, Homo sapiens
cagcagaccccacaacacccgcaaaagacaggaccagaaaagaagaaccagacaaagcagaggaacgcccacgagaagaaca

SEQ ID NO: 22214 - RNA, 72 nt, Homo sapiens
gaaagggaagcagcgggagaggaggaaaaggaaggaggagacgagcggcaaaccggcccaagcaagaggaaa

SEQ ID NO: 22215 - RNA, 35 nt, Homo sapiens
cacacaacggacgagagggcacgccacgcacagcg

SEQ ID NO: 22216 - RNA, 75 nt, Homo sapiens
ccagcggaaccacgaggacccagagagccacggggacaggagaaccagccgaggggaagggcgggacaccgaaaa

SEQ ID NO: 22217 - RNA, 74 nt, Homo sapiens
gcaaagaagcgggagaagccggaaggaagagacgccgggggaacccgcacagcgaacccagccccccggagggg

SEQ ID NO: 22218 - RNA, 80 nt, Homo sapiens
aaagcaagagaggaaaaggccgaagaaaccaaggaggacaggaaagggccgagaaagaagagaggaagaagaggaggagg

SEQ ID NO: 22219 - RNA, 85 nt, Homo sapiens
ccgcgcgagagacgcaccccgagacgaggcggagggagaaacgcagcaccaaccgcggcacggccaggcgacagggaagccagag

SEQ ID NO: 22220 - RNA, 53 nt, Homo sapiens
gcgcgcgggcacgccgcggccacgcgccgaagaagagagggcgaaggaggcca

SEQ ID NO: 22221 - RNA, 77 nt, Homo sapiens
agaaggaacaaagcgggccgaacgcccgacacagccgggacccccgggagaggggcggaacacagcccacagcaaag

SEQ ID NO: 22222 - RNA, 82 nt, Homo sapiens
caaagacggaacccaacaagacccgccccaccaccggagaacaaccgcaacgaacaaacaggagacagagagcaagagcacc

SEQ ID NO: 22223 - RNA, 72 nt, Homo sapiens
gaaggaccaagaaccagaacagcagaccagaggcccaggccccgcacggcagccgccagccagcggaggaac

SEQ ID NO: 22224 - RNA, 54 nt, Homo sapiens
gaccacccagaggagcaacacgagaacacacaagaaaaacccggggaaggcaag

SEQ ID NO: 22225 - RNA, 76 nt, Homo sapiens
gccaccagagcggcccccagcaccacagcccgcagccccgccagccacccccagacccagcagggaggccacagac

SEQ ID NO: 22226 - RNA, 84 nt, Homo sapiens
cagcgaggagacaacccccaggagcgaagaagaagcgcaaacgccggcgggggaacgggagcggcgcgaggcaccgggggcggg

SEQ ID NO: 22227 - RNA, 86 nt, Homo sapiens
cgcacggaggacgggaaaaccagcagcaggaggaggaagccaagaacgggagcgaagccacgcagcggcaccaacgaccgggcccg

SEQ ID NO: 22228 - RNA, 67 nt, Homo sapiens
ccgcaggcagacaaaagggccaaagaagggagagagaagagacacccgacacgagcagagaaacagg

SEQ ID NO: 22229 - RNA, 95 nt, Homo sapiens
agaccggagcgccacggccacgccccccgcaacaacccacaagacagaagaagggggacacaaaaggccgggggaagcccagacacacacccaag

SEQ ID NO: 22230 - RNA, 80 nt, Homo sapiens
gaggagcccagccagaccagaccgggcacagcaaagcgaggaccagaccagccgcaagagaaaaggacaaccggggaagc

SEQ ID NO: 22231 - RNA, 70 nt, Homo sapiens
acagagcagaacaagaccaagcggcagacagagcaagagagaggaggaaaaaaaggagcgacagaagaag

SEQ ID NO: 22232 - RNA, 80 nt, Homo sapiens
ccggcaccgcggagcaaaaaaagagcccgcaagaagaacagagacagcagccaaacccccagaaggagcgagggagggcc

SEQ ID NO: 22233 - RNA, 71 nt, Homo sapiens
aagcaaacggaccagaccgaccaccaaaaggggggccgcccgcccaaggcaggaagaggggccgcaaagaa

SEQ ID NO: 22234 - RNA, 76 nt, Homo sapiens
gggggaagaagggggccagggggagccacaggacccacaccgcaggagggcgaacgagccccgccagagcaagccg

SEQ ID NO: 22235 - RNA, 77 nt, Homo sapiens
acgccgcccgggacagaggggacgacagaaaaggaacgggacaacaccagcggccaaacaggcaccagagaacaacc

SEQ ID NO: 22236 - RNA, 78 nt, Homo sapiens
gggagaaacgcagaccgaaaacagaagacaaacgccaaagcacaagagacagacccgggacagaggcaccgaaggcaa

SEQ ID NO: 22237 - RNA, 77 nt, Homo sapiens
caggacacagcaggacagagggccccgccagcccggggcccgcgccggccccaggaacccaggacaaggacccacga

SEQ ID NO: 22238 - RNA, 111 nt, Homo sapiens
caccaagaaaggcacagagacgaaacagcacccagcaacacgccaaaggcgaaccggcaagacagaagaagcaacccccccgaacaagacaggagccaaaaaacccaagca

SEQ ID NO: 22239 - RNA, 90 nt, Homo sapiens
ggaaggaacggaaccgggacaaaagaggaaggcaacagcccccaggggagcaaccagggagcaaaacacaccggaccagcagaagaggag

SEQ ID NO: 22240 - RNA, 80 nt, Homo sapiens
gcggagaaacaacagaagaacgagcagaaagaacagaccacccgaaacagcagcagcagaggaccgcccgagaccgccaa

SEQ ID NO: 22241 - RNA, 69 nt, Homo sapiens
aaggaacggccaaacaacagggaaccaaggggacaaaccaacagaagggcaaccagaccgccacaggcc

SEQ ID NO: 22242 - RNA, 71 nt, Homo sapiens
aggaccgcggcggcgaacacagcgaccaagaacccaaagaaaaaaaagcaccaggacaagaagaacgacac

SEQ ID NO: 22243 - RNA, 71 nt, Homo sapiens
cgggacaagacagggcaaaggacagaccagggcggaacgaaaggagcgacgagagccgaaagaagcgagga

SEQ ID NO: 22244 - RNA, 70 nt, Homo sapiens
gggcgcagcggggacgcggacgcacgggcaccccaccagcacgaaggagcaccgcgcacggcaacagacc

SEQ ID NO: 22245 - RNA, 60 nt, Homo sapiens
agaggggacaagaccagaaccaggacccaagcaggccggaaggaccaggcagggagcagg

SEQ ID NO: 22246 - RNA, 65 nt, Homo sapiens
ccacaaggccccacgcacgagccggcccaaagaacaagcaggcaggaggcaacggggcccccaca

SEQ ID NO: 22247 - RNA, 75 nt, Homo sapiens
ccccgagccggcccgggcgaggcaacaccaacagcagaagaggaccagcacaagcaacggcagccacaccccgag

SEQ ID NO: 22248 - RNA, 72 nt, Homo sapiens
ccccaagagcgacccacgcagaggcgaagacggggagccacgaggaaagccgcagcggggagaagcccacgc

SEQ ID NO: 22249 - RNA, 88 nt, Homo sapiens
cagccgagcgcaacaccccgagccagcgagccagcgagccgccgacccgccgagcaaaagggcggagaacggaaaagcaccaggaagc

SEQ ID NO: 22250 - RNA, 76 nt, Homo sapiens
caggagagcaggaagaggaaccacaagaaaacaaaagaaacgcccacagaacaccgagacacagaggaaaaagaca

SEQ ID NO: 22251 - RNA, 109 nt, Homo sapiens
cggcaggcagagcgagcgccacccggccgccccgcaccggacccccccgccgcgggagggcgaacccacagaaccacgcccagaccccggggcggccaccagcaggagc

SEQ ID NO: 22252 - RNA, 66 nt, Homo sapiens
acagcagcggggaaaaacaagagccaaaagaagcaagggaaagaccaggagccagaaaccaaccaa

SEQ ID NO: 22253 - RNA, 57 nt, Homo sapiens
ggggcagaaccaggccaaacaagacgaggccccaggcccaggcggcgaaacccgagc

SEQ ID NO: 22254 - RNA, 76 nt, Homo sapiens
accaagcagggcccggcaggaacaaccacggaacccggggggagaagggcaggagccaccacaggaaacaccaggc

SEQ ID NO: 22255 - RNA, 75 nt, Homo sapiens
cgccccacaaggccaccgacagcgccacggggacagggcagaccgccagcagcacagcaagccacagagagggcc

SEQ ID NO: 22256 - RNA, 69 nt, Homo sapiens
gaaaccccagagaaaaagcgggacaaaccagaagacagcccaacaaggcgggacgacaacaccacagac

SEQ ID NO: 22257 - RNA, 74 nt, Homo sapiens
caccaacaccaccagaaaggggcacccaggggagacgaacagccacggcagcaacaacaccaccgaagccccca

SEQ ID NO: 22258 - RNA, 74 nt, Homo sapiens
cagcaggccgaccgcccgccacggacaaccccagaacaagcaggaaaggaaaaggcggagcacccgagagccac

SEQ ID NO: 22259 - RNA, 77 nt, Homo sapiens
cccgagacccaaaagaaagaagaaacaagggaccgaaggccacggaggaaaacaaggagaagcgccacgacacaacc

SEQ ID NO: 22260 - RNA, 44 nt, Homo sapiens
ggcggccccagaacaaaggacagagggagcacccacgggagacc

SEQ ID NO: 22261 - RNA, 79 nt, Homo sapiens
agaggaaaaaaggccaagccacgaggagaaaagagggaaccacaaaaccaagaaacaaaaagcagcaagaagcaaagaa

SEQ ID NO: 22262 - RNA, 76 nt, Homo sapiens
cccccacgcggccagcgaaaacgcccaggccaggagggggccacaccgaacccagccgggaggccaaggccaggga

SEQ ID NO: 22263 - RNA, 79 nt, Homo sapiens
cccacccaagcaacgccgagcccacccgaccgaaacaaccacaaaggacagaacacagaggggccaccaggcaggaaaa

SEQ ID NO: 22264 - RNA, 72 nt, Homo sapiens
ggcggcacagccaagccagccgggaaccagaggcaccgcaagcgggacagccagaacacaaggacagaaaag

SEQ ID NO: 22265 - RNA, 69 nt, Homo sapiens
aaacacagaaggcaagaaccaaaagaagacaaggaagaagaagcggccgcgagaaggagcgccgggaag

SEQ ID NO: 22266 - RNA, 81 nt, Homo sapiens
acacacaaagcaacgaacccacagaaacgccaaacaggaagagcaccacgcccagagcgagccgacgcacagaaccgggag

SEQ ID NO: 22267 - RNA, 79 nt, Homo sapiens
cagaaccgcagccaccggcacggggcgggcagcggcgccgggcacaggagggaagagcaagacccccgagcccccagcc

SEQ ID NO: 22268 - RNA, 86 nt, Homo sapiens
gcagcaggcgcgaggcccggcagacgggccggggcgcagaaacagccaggggaaaggccgagaaggaaaagaccggaaagaacgga

SEQ ID NO: 22269 - RNA, 74 nt, Homo sapiens
ggaccaagaaccagggaccgacacaagaagcagccagaacagacgggaaaagaaacccaccacaaaacaccgca

SEQ ID NO: 22270 - RNA, 55 nt, Homo sapiens
acaaaggccaaggagaaggcgaaagcacaccaaggaaaccgggaacggagccgcc

SEQ ID NO: 22271 - RNA, 55 nt, Homo sapiens
aaccgcccaggacacacacgggcaagggcggaccaacgggccggggggcgaccgg

SEQ ID NO: 22272 - RNA, 79 nt, Homo sapiens
gccccgggagaaacaggccgggagcagcgaggaggcgccagacacgggcgaggcgcggagacccaccaccaggacgcga

SEQ ID NO: 22273 - RNA, 78 nt, Homo sapiens
gcgaccccagacgacgagaccggcgagccaccacgggcgcccgacccgcaccaacggagaaaccagaacagaagacaa

SEQ ID NO: 22274 - RNA, 52 nt, Homo sapiens
cacgaagcgaagaaacgcaaaagcgggccgccgcccggcgaaaagggggccc

SEQ ID NO: 22275 - RNA, 82 nt, Homo sapiens
ggacagccgggccgaacgcggaaaggacccggcaaagagagaggcacacgccgccgaaggccaggagcagaggccaacgccc

SEQ ID NO: 22276 - RNA, 67 nt, Homo sapiens
aggaggcaagacaggaacacgcccggggaaggcccagccggcgggggaagagccaaaaggcgaccgg

SEQ ID NO: 22277 - RNA, 83 nt, Homo sapiens
gccggagaacgccccaaggagcaaggcccaccagaagagccgacaagccggcagaaggcagacacaaacaaaagggcagccac

SEQ ID NO: 22278 - RNA, 91 nt, Homo sapiens
ccggacggcggggccgggcccccggccgcaagcagaaccaaaacccgggcagaagaggagaggaggaagcagcagaagagaagaagaagca

SEQ ID NO: 22279 - RNA, 71 nt, Homo sapiens
aaaggagaaggcagcgggacggacaggcagggaagcaacgcagagaaagcgaggaggccgggcgcaccccg

SEQ ID NO: 22280 - RNA, 70 nt, Homo sapiens
gcaaagggcagagaaaaaagagcagcgaggcgaaagcaaccacagggcacgcaaaaaaaccaagggaaaa

SEQ ID NO: 22281 - RNA, 76 nt, Homo sapiens
aacgggagccgccaccgaggacgggccaaagagaagaggaagcccggaggaggagagagagagagagaggagacca

SEQ ID NO: 22282 - RNA, 80 nt, Homo sapiens
cgaaagagaaacccggagggcgccgggcccagcagagacagacaagacaagaacaggaacaaagccccccgcaaagaagc

SEQ ID NO: 22283 - RNA, 94 nt, Homo sapiens
cgcagccacaacaccggcaggaaccaccaggacagaaggagagaaggcgaggaagcccaagcacaaaggagaagacgcccaagccaagaaaaca

SEQ ID NO: 22284 - RNA, 77 nt, Homo sapiens
ccacgaacagcggagcaaggcgacgaaccggagagaggagaacgaacaccggaccgccagggaggcaagcacgcaag

SEQ ID NO: 22285 - RNA, 80 nt, Homo sapiens
gcccccccgcccaggcacacagacaacagagcaacccaccggacggggcagcggaaacagagagcaaggagaagcgagag

SEQ ID NO: 22286 - RNA, 63 nt, Homo sapiens
cggacgggcccacagcccggagccccacagggccggggcaagaccgccccacagcacaccacc

SEQ ID NO: 22287 - RNA, 64 nt, Homo sapiens
cgaggcagggagcaacgaacaagaacaccgccgggcaaaagcagcagccgagacaagacccacc

SEQ ID NO: 22288 - RNA, 81 nt, Homo sapiens
gccgagacacgcagcggcggccagggaccagggcgaagcgaaccgcgaccgcggcagcgcacaagagagcgagaagacgcc

SEQ ID NO: 22289 - RNA, 50 nt, Homo sapiens
gacgaccgcacaacagaagaagaacgacagaaaagaagccacgaaccacg

SEQ ID NO: 22290 - RNA, 70 nt, Homo sapiens
gaggccgagggcaaggcgccagaccaaggacgccgccagccaccggcgcgaagccagaccagaccagcag

SEQ ID NO: 22291 - RNA, 81 nt, Homo sapiens
agacggacagaccacaaacacaacaacagggaccagaaggaaagaggcagaaggccagaagggcgaagaagaaggaaaaaa

SEQ ID NO: 22292 - RNA, 88 nt, Homo sapiens
gccggcgagccaccggggagccaccgcccagcccaaaccaggagagcgagggagcgagcgggcagcgcggaccgggccgagaggaccc

SEQ ID NO: 22293 - RNA, 52 nt, Homo sapiens
ggccgaagcaacaagggacccccagcaacccagaagccagacgggagggcaa

SEQ ID NO: 22294 - RNA, 77 nt, Homo sapiens
gagaacagcagaaacagcgcccacaggccggaacgaagcaaaacgacccagcaccccccccgagcaaagagccagaa

SEQ ID NO: 22295 - RNA, 66 nt, Homo sapiens
accccacgacccaccccaaagaacacagaccaccaaggagaggcgcccccagagggcccacccagg

SEQ ID NO: 22296 - RNA, 85 nt, Homo sapiens
cccagaggcgagcccggggaggaagagcccgccgcagcaagagagagcaaggagcaggcgcagagcagagcagagcagggcgggg

SEQ ID NO: 22297 - RNA, 76 nt, Homo sapiens
gaggccagcgaccacaagcagaagaggccgcgggagagcgggggcgggaggcgggccccgggggcagcacccccag

SEQ ID NO: 22298 - RNA, 88 nt, Homo sapiens
ccggacgcgaccaggggaggcagaaggagggcgggaccccgcggaacggccgcggggagcggcgcgcgcacaggcacacgacaccgca

SEQ ID NO: 22299 - RNA, 56 nt, Homo sapiens
gaagacgaacccgggaaggaacgcacacaacagcagcagacgacaggacggcagag

SEQ ID NO: 22300 - RNA, 91 nt, Homo sapiens
ggagcggccggggccggggcgccgccgggcggccgggcgcggcgagcccaggcacgcagccagaggggccagaagagagaggaggcacgcc

SEQ ID NO: 22301 - RNA, 54 nt, Homo sapiens
cgagccacgcgaggacgccgagacgacagcagaccacagcccggcaggcccaaa

SEQ ID NO: 22302 - RNA, 54 nt, Homo sapiens
ccacaagcacggaaacgaccacgcaaacgcgggggacaccagccaggagagaac

SEQ ID NO: 22303 - RNA, 75 nt, Homo sapiens
caccacccccggagaaaaagaaggaaagacaaaacagaccggcacagaaagaagagccagagacacaagaccacg

SEQ ID NO: 22304 - RNA, 78 nt, Homo sapiens
ggaaaccggagcgcgcagcaggccgcacgcccaaagcggaaacgcggaagagaccgggagccagcacgaggccacaca

SEQ ID NO: 22305 - RNA, 86 nt, Homo sapiens
cggaagaggacgggcgccgccaggccagacggggcagggaacaacgggcgaaagggcacacacggagggcgcggagcggggacgca

SEQ ID NO: 22306 - RNA, 80 nt, Homo sapiens
ccgccgccgccggcgaggcagaaagaagccggacaccagaccaacacggaaagggagcagcaccggccacacccacagca

SEQ ID NO: 22307 - RNA, 84 nt, Homo sapiens
gagaaaagaaaccagcagacagaagcaggccgcaccgcgaggaacccgagcccaccggcagcaccgcaccggagccccggccca

SEQ ID NO: 22308 - RNA, 79 nt, Homo sapiens
aagagaggcccccaggaccaggccaaggaaaaggaacagagagagcagaaccgaaacggggaaagaccgaagaaagaaa

SEQ ID NO: 22309 - RNA, 97 nt, Homo sapiens
gaaagccagccaaccaaagacgggaacaagggagggggacagaccaaagaggacgggcggcagagaagagaagagcacagcgggaggaaagggagag

SEQ ID NO: 22310 - RNA, 70 nt, Homo sapiens
ccaacaggagcagaaaagcaccccaaaagagacagacacaggaaaggagaccgcagcccgaaaacagacc

SEQ ID NO: 22311 - RNA, 82 nt, Homo sapiens
ggaacgaagaaaagaaaggccaagaccaggaaaggaaggcaaccagcagcaaccagaaccccgaccccacccgaagagagga

SEQ ID NO: 22312 - RNA, 66 nt, Homo sapiens
gaggcacaaaccgaagcagcaacaagccccaagcccccagcccacgacacagcgaccggagggaac

SEQ ID NO: 22313 - RNA, 73 nt, Homo sapiens
gaacaccacccaggcagaagagcaacaaaaccccccaggacgggaggagggacacacgacaggcccgagaggg

SEQ ID NO: 22314 - RNA, 74 nt, Homo sapiens
gccccggccaccccgcgcgcaaggagcccgggacggagaggccgcaggagcacccagaggagcagccaagaagc

SEQ ID NO: 22315 - RNA, 74 nt, Homo sapiens
cgagggagaaggacacacacaagagggagagggcccaaacgacaccccaaggcgcggagcaggccagaaacccc

SEQ ID NO: 22316 - RNA, 44 nt, Homo sapiens
cagaggaacgagcgagcggcagagccaacacaagcgagggagaa

SEQ ID NO: 22317 - RNA, 82 nt, Homo sapiens
gcgccgcgcagcccgcgagcacaggagcgagagaggaccccggacacgaaagccgggaaagcccacagcgcggcaccgaccc

SEQ ID NO: 22318 - RNA, 88 nt, Homo sapiens
ggggcggcagcgaggcggaggcgacgaggaggcggacccccggcgcagggcagccgcaccaccgccgcgcacagaaggcagaagcccg

SEQ ID NO: 22319 - RNA, 70 nt, Homo sapiens
cagaggaaccacacgcgacagggaggaggacaggacggaaagaacaaccaagaagggagagaaacgcagg

SEQ ID NO: 22320 - RNA, 76 nt, Homo sapiens
ggaggggcccaggaaagcgaccccggggccaccgagccaaaaggacgcccacagagccaagggccagaaccacacg

SEQ ID NO: 22321 - RNA, 77 nt, Homo sapiens
cggcgggcggcggcagggacgagccacagacaagagagccccaggccaaccacggacgcaggaccccagcgacacgc

SEQ ID NO: 22322 - RNA, 70 nt, Homo sapiens
acagccccaaaagaaaggcagcggaacgcagggcgcaccaccagagacccaacacacagaagacacaaac

SEQ ID NO: 22323 - RNA, 87 nt, Homo sapiens
ccagcaggggcggacccagaaaaggcggcccagagaaacccaggccacgcggacgagcggagaccaggaggccacggagacacgagg

SEQ ID NO: 22324 - RNA, 59 nt, Homo sapiens
ggaagaaccagagaaagggagcagggacagagccagaggaccccggacaaacacagcgg

SEQ ID NO: 22325 - RNA, 80 nt, Homo sapiens
gcacacgccccggcggggaggacgagaacggggcccaaaggggcaggacaagacagaaggccaagggagggacgggagaa

SEQ ID NO: 22326 - RNA, 78 nt, Homo sapiens
cagaaagccccggaacaaaaagccccagaccagagacagaagcagaggacgccagaggaggcgcggaggaggaggagg

SEQ ID NO: 22327 - RNA, 66 nt, Homo sapiens
gcagcccagcggcccggccagagcaaggaggaggccgaccagaccgggacaggaaggaagaggaga

SEQ ID NO: 22328 - RNA, 61 nt, Homo sapiens
ggaacgcacaccgagcggcaaacaaggaggcagccgccacagaaaccgcagacaaaaggcc

SEQ ID NO: 22329 - RNA, 79 nt, Homo sapiens
cggcggcggcggcgcgcgggggcgacgcgcgggaacaacgcgagcggcgcgcgggacgaagggagcacggcccaggcag

SEQ ID NO: 22330 - RNA, 74 nt, Homo sapiens
ggcacaccgccgacggccacagcccccaccaagagcccccggccagaaggggccaaggagaccgcacgccggac

SEQ ID NO: 22331 - RNA, 71 nt, Homo sapiens
gacgacgcaccgcaggcagacaaaagggccaaagaagggagagagcgggacgacccgggacagcccacggg

SEQ ID NO: 22332 - RNA, 69 nt, Homo sapiens
cgccaggcggcaagggggcaccggcccgcaccaagagaagagaagcccagcagcgagaagaagcccaag

SEQ ID NO: 22333 - RNA, 45 nt, Homo sapiens
agccgcagagcgcgcagaccccggcacaggaggaagccgcggaac

SEQ ID NO: 22334 - RNA, 67 nt, Homo sapiens
ggcgcgcgcgcgcgcgcggggccccgcagcggcgagacacacaagagaacagaacacaccgacacgg

SEQ ID NO: 22335 - RNA, 60 nt, Homo sapiens
ccgaggaaggagagggaccggaccaggacccaaagacaggaccacgcaccagcagagaag

SEQ ID NO: 22336 - RNA, 72 nt, Homo sapiens
gaagaccagcacaggccgaaaaaaaaggccagccaggaaagcgggagcgcgggagcaaaggaaagaagagaa

SEQ ID NO: 22337 - RNA, 77 nt, Homo sapiens
caccccagggggcagaagcgggggccccacccccaaagagcagccccaggacaaaggccacagcggagagcaaagga

SEQ ID NO: 22338 - RNA, 56 nt, Homo sapiens
gcgcccacacacgccccaaccggcccaaggaagaagaacgcaagaaggagaagcgg

SEQ ID NO: 22339 - RNA, 83 nt, Homo sapiens
aagccaaacaggggccagcaggaagcagagagggccagagggggaaaaggcggagcgggagcagaacagagacaacgaagacc

SEQ ID NO: 22340 - RNA, 59 nt, Homo sapiens
acaaacagagagaaggaaccacccacgcaggcaggggcaaagagaaccaggagacccca

SEQ ID NO: 22341 - RNA, 69 nt, Homo sapiens
aggacagcggaccgcaacacgaggagcaaccggaagaagacaccagagagaaaaggaacagccgaagcc

SEQ ID NO: 22342 - RNA, 81 nt, Homo sapiens
cggcccggcccgacaccgcgggccgccagacgggaaggcacgcaccccgcgccgccgccccccaccaaggaagcccaagcc

SEQ ID NO: 22343 - RNA, 95 nt, Homo sapiens
gaagagggggacgccccggcaacccaggggcggccacgaccaccaggcgccagacaagagagggcggcagaaggaacaccgagaaaccgcacacc

SEQ ID NO: 22344 - RNA, 76 nt, Homo sapiens
ggaagcggagccgaaccaggccaacccagaaaggcccgagacaccccgcaacccagccggggacggacagaacgag

SEQ ID NO: 22345 - RNA, 60 nt, Homo sapiens
cccggcggcgcgcggaccagggggcggcgccaggacagggaaggagaagaaccacagaca

SEQ ID NO: 22346 - RNA, 56 nt, Homo sapiens
aggacgcagcaaaccaccagaagaggcagcgagaagaaaaagaagagagagacacg

SEQ ID NO: 22347 - RNA, 74 nt, Homo sapiens
cccacaagaacccagccaaagccccaagaagaacggaaaagccagccaggacagggggggacagccccagagac

SEQ ID NO: 22348 - RNA, 69 nt, Homo sapiens
gaagcacagacgaccaaggcccccagggacaggagaggagcaaccggaagggacaaaagaacaaaaaag

SEQ ID NO: 22349 - RNA, 78 nt, Homo sapiens
agaggacccggcagacggcaaaaggcggaggcacggaaacagaagagacaaacaccgcacagaaagaacacgaaaaac

SEQ ID NO: 22350 - RNA, 78 nt, Homo sapiens
ggcgcagcagcgccaggcagcgacagcagcggccagcgaccggagagacagcagaccacagcccggcaggcccaaaaa

SEQ ID NO: 22351 - RNA, 61 nt, Homo sapiens
ccccaaaaagcggcaaaagcaagagaacagcccgccgcagcaagagagagcaaggagcagg

SEQ ID NO: 22352 - RNA, 83 nt, Homo sapiens
ccaggcccgcaaccgaccgaccgcgcgggcccaagcaccgagaggcgagggaggaagaagacggcacgggacccccagcacag

SEQ ID NO: 22353 - RNA, 110 nt, Homo sapiens
ccaccaccacgccagccgcaccagccgcccaagccgcacagccgcggcggcagcagcaggagaggaacaggacacccaaccgcgagaccagcaaggacgggggaccaacc

SEQ ID NO: 22354 - RNA, 81 nt, Homo sapiens
cgcccgccgcgcggagcgcccccgcgccccgcaccagagcggggcaccgagccggaaagcggggccagagcgggcaaagaa

SEQ ID NO: 22355 - RNA, 46 nt, Homo sapiens
acgaaccagaagagcgcaacaagggaagaagagcccagaccagggg

SEQ ID NO: 22356 - RNA, 72 nt, Homo sapiens
caaagcaaagcaagcagcccggaccgaaacaggaaacaaaggacccacgcaaagccagcgacccaaagggga

SEQ ID NO: 22357 - RNA, 75 nt, Homo sapiens
acagggccggggcacgacgacccaacagcaagcaagaagggagaagacacgcaacacagccaagaaaaggacaag

SEQ ID NO: 22358 - RNA, 37 nt, Homo sapiens
ccccaagagcacaagagagagggccaaggggcaggag

SEQ ID NO: 22359 - RNA, 74 nt, Homo sapiens
aaaaaaaaaaggcagaacccgagacaaccaccgggggccaccaccgaggaccgaccacgacccgcgggagaaca

SEQ ID NO: 22360 - RNA, 53 nt, Homo sapiens
gcaagacacggcagaccaaggaacgaagaagggggggcagcgcagcaggcggg

SEQ ID NO: 22361 - RNA, 80 nt, Homo sapiens
acccgaccagcgcggacagccagccgggcgggggcccgagcaacacgccgggaccagcaacggagaagaccaccagacgg

SEQ ID NO: 22362 - RNA, 75 nt, Homo sapiens
aaaggaagaacaaacagcaagaaggaacagaagaccgccacagaccggaagccaacaaaggagaaacagaggagg

SEQ ID NO: 22363 - RNA, 74 nt, Homo sapiens
ccagcaaccagaaccacgagagaaagacccaccaagaggacaaaggccacagcggagagcaaaggacacccccg

SEQ ID NO: 22364 - RNA, 44 nt, Homo sapiens
caggcacccagggcggacaaagaaggagccaaccggaagcaaga

SEQ ID NO: 22365 - RNA, 71 nt, Homo sapiens
gccaaaaaagacaagaaaccgcacaagaccgggaggggaacgaaccggagaagaaacagaaaaaaaaagaa

SEQ ID NO: 22366 - RNA, 42 nt, Homo sapiens
ggcaaaagacagaccagaagaaggaacgcaggggagcacgcc

SEQ ID NO: 22367 - RNA, 70 nt, Homo sapiens
gaaaagggagggggaacagagggcaagaggacgccacaaacacccaccacagcagaggggaacagaggag

SEQ ID NO: 22368 - RNA, 64 nt, Homo sapiens
accaccagaccagggccaacaggcaacaggaagaagaacccacaggggccaacagaggaaggaa

SEQ ID NO: 22369 - RNA, 83 nt, Homo sapiens
cgccgacggcgacgcggggccgagcaacccggcccggacaagaggaacaccaagggggaccaaaggcaaggccacgacggaag

SEQ ID NO: 22370 - RNA, 78 nt, Homo sapiens
cggcggccgagccaaggccaaacgaccaagaaagcgggacgcggaaaacgggacccgcaggggcccccccggaaaagg

SEQ ID NO: 22371 - RNA, 65 nt, Homo sapiens
cagacgcaaaggagcggaggagcggacaacccagagagaaacgccagaccacagcggagagagga

SEQ ID NO: 22372 - RNA, 81 nt, Homo sapiens
cagccccgagagcgggaacagccagcccgagggagaggagggacaaacacacacaggaagagagccacgcgcaggaaacca

SEQ ID NO: 22373 - RNA, 71 nt, Homo sapiens
accaaaaggcacacacggacacgggaagaagacaagaaggagggccaaaaagccggcagcaccgaaccaaa

SEQ ID NO: 22374 - RNA, 69 nt, Homo sapiens
agcggaccgagagcgcgaaacgcacgagaagcccagagcaccacagagacgggaggcgacgccaaccgc

SEQ ID NO: 22375 - RNA, 91 nt, Homo sapiens
acccccagacaaaaccaccaaagacaacagccaccggaggacaacgccacccagagcagccgaacgccaaagaaaccagcaggcggcagac

SEQ ID NO: 22376 - RNA, 76 nt, Homo sapiens
cagacacccgcaagggcacaaaaggagcgaaggacaggagacggaacggccccgagccggccggagcagacaaggc

SEQ ID NO: 22377 - RNA, 34 nt, Homo sapiens
caggggcgaacaccggaccagggcgaggagggcg

SEQ ID NO: 22378 - RNA, 83 nt, Homo sapiens
cccaccgccggcgcgggaaacgggcgaagcgacgagccgcgaggagacgcccagcggcagcaggagaggcggaggcaagcgcc

SEQ ID NO: 22379 - RNA, 55 nt, Homo sapiens
ccccgagaaacagcaaggcaacggggcccgccggcaaggagaacgaccaaggaga

SEQ ID NO: 22380 - RNA, 68 nt, Homo sapiens
gagggacagccgcacggaggcgaaacacaaaggggaaagacaaggccccagcagcaggcaaagggaag

SEQ ID NO: 22381 - RNA, 72 nt, Homo sapiens
cagccacgggacagccagaacaagcgcagaaccagcacggagcaacagccagaggaaaaacaagacaaggcc

SEQ ID NO: 22382 - RNA, 76 nt, Homo sapiens
acagagaaggaaagagagcagcaaggagcagccccccccgagcaccagagcacggcccggccgagcacgcaggaaa

SEQ ID NO: 22383 - RNA, 70 nt, Homo sapiens
aagggaccacaccgacagcggacgccccagcacccccagcgggcaggaagggggagcaacagacaagccc

SEQ ID NO: 22384 - RNA, 69 nt, Homo sapiens
gccgaccacagaaaaccagaacaagcagaggaaagacacgccagagaagaacaggacacaacaggagac

SEQ ID NO: 22385 - RNA, 75 nt, Homo sapiens
ggaagcacacacagacaggccccgccggcccccggggccccacgcagcgcagcgcccaagccgaacagcccggcc

SEQ ID NO: 22386 - RNA, 74 nt, Homo sapiens
acagcccaccggggccaagcaaccccaccagcccgagagcggaccacagggcaaaggcaaaccaaacgcaagac

SEQ ID NO: 22387 - RNA, 76 nt, Homo sapiens
gggcgcggcccgagcacgaccgcagacacacccaggcgagccgaaaaccagccccgcccacacacaccaacagaac

SEQ ID NO: 22388 - RNA, 57 nt, Homo sapiens
gacaccaccacggcaccggaacaggagaggcaagaagcaaagagccaaccgcaaggg

SEQ ID NO: 22389 - RNA, 73 nt, Homo sapiens
aacgcggcaccgcagaacgccacaaccagcgagaaaccagaggcaagcgacgggaaggaccaccaaacccagc

SEQ ID NO: 22390 - RNA, 133 nt, Homo sapiens
aggcagcagcgcgggccagagcgcagcgccgagcgcggcccgggcgccacgagccggcggcggacggcagggcagcgggggcagagacggggaacagggccacccacacggacgccaacgcgggggcagaacc

SEQ ID NO: 22391 - RNA, 76 nt, Homo sapiens
ggcagaacaacgaacagaagcacaaccagagccggccccggagcaggggaaggagacgggcaggagcgagccaccc

SEQ ID NO: 22392 - RNA, 81 nt, Homo sapiens
gaaaacaaaagaggagaaaggaacgcaacgaaagcgggagaagacacggcgagaacggggccagcacagagaggcgacagc

SEQ ID NO: 22393 - RNA, 60 nt, Homo sapiens
gaggggcgcaggcagaacaccagcacgagcacccagcaagacgcagcagcagaggaaaaa

SEQ ID NO: 22394 - RNA, 80 nt, Homo sapiens
agcaacacgaaacagacaggagcagggacggggggaaaagcgcacccgggcccgggcgagaaagaagacaccaaaggcaa

SEQ ID NO: 22395 - RNA, 50 nt, Homo sapiens
acgcacagaggacacgagaacgcgaagagccaacgacaggcgccacccga

SEQ ID NO: 22396 - RNA, 56 nt, Homo sapiens
gagcccgccgcgcgggcccgcccgacgcggaaggagaaaccagaggcaagcgacgg

SEQ ID NO: 22397 - RNA, 54 nt, Homo sapiens
gcggccgggccaagcagagaacacaggcaaaagcagaccggaaaacccaccggc

SEQ ID NO: 22398 - RNA, 86 nt, Homo sapiens
caaaaggcgaccggcaacacggacacccacagcggggcggcggcggcggcggcgcggcccaaaaggccccgggaccaaggacacgc

SEQ ID NO: 22399 - RNA, 72 nt, Homo sapiens
acagaacacagagaacaacagccaagccggacaaccaaccgcaggaagagaagacggcccagcagagcaccc

SEQ ID NO: 22400 - RNA, 84 nt, Homo sapiens
ccggggccacccggaggagcccacagagcaggaccccccaaaccccccaccgagcggagccgagccggagaagaggggcgcgac

SEQ ID NO: 22401 - RNA, 73 nt, Homo sapiens
caagagccccccccggcaggaacgagagggcgcgaaccaggaaaaaccggagcaacgggaaaggaagaacagg

SEQ ID NO: 22402 - RNA, 86 nt, Homo sapiens
caacccggggaccgagagcaggaacgggaggaaccgccgccccgagcgccgcccgcaagcccccaccaccagacgaagcagccacg

SEQ ID NO: 22403 - RNA, 90 nt, Homo sapiens
acgggacggacaaggcaacacccgaagaaacaagcacagggacacaaaagcaaccgagagggaaacaaccacgcgaaaaggagacacagc

SEQ ID NO: 22404 - RNA, 82 nt, Homo sapiens
gacaggcgccgcgccgccgcacgggaccgccgagccacaccgggcgcagcccagcccgaaagcagaacgacgccggcgagcg

SEQ ID NO: 22405 - RNA, 71 nt, Homo sapiens
ggccacccagcggggagcacggcgagcagccaggccaggagagcacgcggcagggaggaggcaaccggaga

SEQ ID NO: 22406 - RNA, 79 nt, Homo sapiens
ggcaaaaaacagagcgagcagggaagaacacgggaaacacgcaaaacacgagcaaggacaagccagccgaaacaaaaaa

SEQ ID NO: 22407 - RNA, 86 nt, Homo sapiens
cccgggcccgcgggggcaaccgggcgcagacgagacaggaggggcaaaaaagagcgccccgcgcaagagccggaggaggacgagga

SEQ ID NO: 22408 - RNA, 57 nt, Homo sapiens
cgcccccgcaagagcccagaaaaacaggagaaacaggaagaacccgagcgaggagcc

SEQ ID NO: 22409 - RNA, 68 nt, Homo sapiens
agacggcaggaaagagcacgcgcagaacacgaggcgcaagacaaccacccgaacccaccgccaggccg

SEQ ID NO: 22410 - RNA, 41 nt, Homo sapiens
caccggaaggagaaggaagaggagcgacaacaggcacaaag

SEQ ID NO: 22411 - RNA, 59 nt, Homo sapiens
gaaaaccagaccgcgcaacgagcgccaaacaagcagagcggagggaccagagaaagcgc

SEQ ID NO: 22412 - RNA, 76 nt, Homo sapiens
agggcagaaaaacgagccacccgcgaaaagagccacggggccaagaaggcccgcgcccgggggccgccgcccggcc

SEQ ID NO: 22413 - RNA, 78 nt, Homo sapiens
gcgcggcgccggccggcggcgcgcggcgcgagccgcagccggcccgccgagaccgcagcccacaccccgacggaagag

SEQ ID NO: 22414 - RNA, 96 nt, Homo sapiens
cagagacgggggaccacaacccacgggaacagcgaggcagagaggagcccgccggagaacgaggaaaggcggagcagcggaaagaaggaaacgaga

SEQ ID NO: 22415 - RNA, 72 nt, Homo sapiens
ggaagggcgcccagggccagccagaggaagcaccgcccgcaccagggagcccaccaggagccaggcagccag

SEQ ID NO: 22416 - RNA, 36 nt, Homo sapiens
ccccgagagcggaacaggaaggacccacaagaccaa

SEQ ID NO: 22417 - RNA, 40 nt, Homo sapiens
cggccccagcaccaccaagcaaaccggcacgagccaggca

SEQ ID NO: 22418 - RNA, 78 nt, Homo sapiens
acggaggagggcggagacgagaaccaccaccggagagagcgaggacacaggaagagagcacgaaggaagaggcccgga

SEQ ID NO: 22419 - RNA, 82 nt, Homo sapiens
gagggagacggaaaggagggggcggggagaaagggacaacaaggggcaaagagaaccaggagaccccaccaccacagaaaaa

SEQ ID NO: 22420 - RNA, 75 nt, Homo sapiens
ccccgcccaacacgacccagcagccagagagccaagaaaacgcgacaccagacggagcagaaggcgaagagagca

SEQ ID NO: 22421 - RNA, 82 nt, Homo sapiens
agccccggacgagaagcgcagcaacggcgggggaccacgagagcacaccgcaagccccacccggcacagccgcgcagaacgc

SEQ ID NO: 22422 - RNA, 73 nt, Homo sapiens
caagcgaaaaagcgggaacgcaggacccaaagccaccaagaaggcggagaggaaagagagggaccaccgaaaa

SEQ ID NO: 22423 - RNA, 68 nt, Homo sapiens
cagggcaaaacaccacccccccacaggaaacagggggaagaggaagaagcaaagaggcagggcaccgc

SEQ ID NO: 22424 - RNA, 55 nt, Homo sapiens
cggaaggaaacggcgaagaccgccgaaagacaaccggaggacacgaagccaggcg

SEQ ID NO: 22425 - RNA, 76 nt, Homo sapiens
cagcaggcaagccggaggagaagcaagaaggcccggacacagcaaaccgggccacagcgaccaggaagaaacacca

SEQ ID NO: 22426 - RNA, 79 nt, Homo sapiens
gaccgagggaccaggccaccgaccagaggaaagcaaggccacaccgaggagacgcagccaaagcaccaaacaagagagc

SEQ ID NO: 22427 - RNA, 57 nt, Homo sapiens
gagggggcacagcaaagaagagacggcgcaggaccggggaaccgccaaagcccgggc

SEQ ID NO: 22428 - RNA, 66 nt, Homo sapiens
ggaaacagcagaaaccggaaccacacacaccacaggaagccaggaccaaaccacagcaaaaacacc

SEQ ID NO: 22429 - RNA, 69 nt, Homo sapiens
ccggaggcaccgaagaggagagcccaggcacccagcaggcagagcgggaaaggccacagggagaaagaa

SEQ ID NO: 22430 - RNA, 86 nt, Homo sapiens
agacaaacacgggcgacggggcccagcagacagccgaggggagcgcggggcccggcagaaaggcccagagggggaaggagccagga

SEQ ID NO: 22431 - RNA, 75 nt, Homo sapiens
ccaaagaggcgcaagagagaggagggggcaccgagcaacgagggcagacccagaacaggaagcagaacgggccaa

SEQ ID NO: 22432 - RNA, 76 nt, Homo sapiens
agacccccgcaagaggaagacccagcgaaggaaagagccaccacgggcgcccgacccgcaccaacggagaaaccag

SEQ ID NO: 22433 - RNA, 84 nt, Homo sapiens
agcaccaggcccaccggaaagcccgccccccaaagcgaagccaaagcgaaggcaaaggccaagaaggcagggaaagggccacag

SEQ ID NO: 22434 - RNA, 108 nt, Homo sapiens
agaggcaccgggacggaccgagaccggaccgagagcggaccgagagcgcgaaacgcacgagaagggaaagagcaccgaaaccaggcggaaacacggcaggcaacccac

SEQ ID NO: 22435 - RNA, 78 nt, Homo sapiens
cccgcccagaggcagaagccccgacaagggaccgggcgggccccgcaggaaacccccaccggcccacacagacgcagc

SEQ ID NO: 22436 - RNA, 73 nt, Homo sapiens
ccacggacccaaaccagaagaaaaccgaaccgaggaggagaaagcaaggacccagagccacacgaacgccccg

SEQ ID NO: 22437 - RNA, 85 nt, Homo sapiens
accggaccaccccgaagaaagcacagagggggggagggaccccgggcgggccccccaggagcacagagaggcccccgcagagacg

SEQ ID NO: 22438 - RNA, 87 nt, Homo sapiens
caccgagcccacacgagacggagggcagccggggggccggaaggcgcggccggaggacaccccacggcagaaccacgcgagggggga

SEQ ID NO: 22439 - RNA, 74 nt, Homo sapiens
cccaacagggaacagcggggcacacaggcgggaaaacaccgaggggagccgccaccaaaagcagacggaaaacc

SEQ ID NO: 22440 - RNA, 60 nt, Homo sapiens
ccgaaccgcgcgcgcccagggcccggccgacccgcggcccgcgagacgacgggaccgaag

SEQ ID NO: 22441 - RNA, 77 nt, Homo sapiens
accccacaggccgccccaacaccagggaagagacacacccaggagaggagggacagaagaggaaacagcgggaaccg

SEQ ID NO: 22442 - RNA, 78 nt, Homo sapiens
gccggagcgcagcccgagcgcgggggccccagccccgcccgcccccagcccgcggccaagggaggccgccagccgagg

SEQ ID NO: 22443 - RNA, 82 nt, Homo sapiens
agagaagcaaaaaagcagcacaaagcagccagagcagcagggaaacagcagacagcccccccaacagacaggcagacaccac

SEQ ID NO: 22444 - RNA, 75 nt, Homo sapiens
agcaagaagcagcccaaagcgaagacagacgcaagcacccagccaaacccaggcccgagaagaagaggaaaaccc

SEQ ID NO: 22445 - RNA, 76 nt, Homo sapiens
gaagagccgaccacaaggggaggacaaccgcccgggaccagccacggacagacgagcagcccacggagaaagcagc

SEQ ID NO: 22446 - RNA, 62 nt, Homo sapiens
gcaccgcagaacgccacaaccagcgggcaaagagaaccaggagaccccaccaccacagaaaa

SEQ ID NO: 22447 - RNA, 77 nt, Homo sapiens
acgcggcgcaaccccacacacaaccaaagaaccaaacacagccacagcagccacagggacaaacagacacaaaacga

SEQ ID NO: 22448 - RNA, 85 nt, Homo sapiens
agaggagaagagagaagccgaggagaagaagagaacccacagagacaagaagaccagagaaggacccaacaggccacagccacag

SEQ ID NO: 22449 - RNA, 72 nt, Homo sapiens
acagcaaaccgggccacaggcgagacagagggaaagaaccaccaccaacgagacacaaaaagaaaagagagg

SEQ ID NO: 22450 - RNA, 74 nt, Homo sapiens
cacagcgaccgggagcacaccacaggcaagagggaccaaggaccagagagcagaagcgccggaacccaaggaac

SEQ ID NO: 22451 - RNA, 86 nt, Homo sapiens
cggccgccacgcgcccccagccccgcaggcccaaccgccgccagcaccaggccagcaccaccgaacccagcggggccgccccaccc

SEQ ID NO: 22452 - RNA, 75 nt, Homo sapiens
acgcgaaggagaggcccagaaccaggcccacgcggaccggcagcgccaccggaccaccagacaaggacacggccc

SEQ ID NO: 22453 - RNA, 81 nt, Homo sapiens
cggaacggggaacgacggcccagcaggcggggaagagaaagggccgcacggccacaccagaagaaaaggcacgaccaggaa

SEQ ID NO: 22454 - RNA, 77 nt, Homo sapiens
gagcccgccgccgccgccaccacccacccggacacaggccccggggcagaagagcggcgccgaggagaaggaaaaag

SEQ ID NO: 22455 - RNA, 52 nt, Homo sapiens
cggaggaggagggaacacacaggccgccggaacaagacaaggcacgaggcgc

SEQ ID NO: 22456 - RNA, 79 nt, Homo sapiens
gcgggcccggggacacgcgcgggcgggagcggcccacgacgggacacgccccggaggggggcaggaacaaaggaccgga

SEQ ID NO: 22457 - RNA, 74 nt, Homo sapiens
caaaaagcagccaccagcagccaaagagcacagggacagaaaaacagcgcagacgagccgcaaggacaagacgg

SEQ ID NO: 22458 - RNA, 75 nt, Homo sapiens
ggagcccagggaaggagcggagaagaaagacacccagacagagaggcagaagcccccggggagagacagacagag

SEQ ID NO: 22459 - RNA, 63 nt, Homo sapiens
cagacgcagccgagacaccagcccgaaacaccaccaagccagggccccccacgcgagaacccg

SEQ ID NO: 22460 - RNA, 77 nt, Homo sapiens
ccgaccccgcggagacagcgagacccgccaggagcaaagaggacgacccaggggaggagaagggaagaaacagggaa

SEQ ID NO: 22461 - RNA, 40 nt, Homo sapiens
ggcaacaggggcgagaaaggggaagcgagaaccaggaacg

SEQ ID NO: 22462 - RNA, 54 nt, Homo sapiens
ccaggacccaaccgggggcaggcacagaagaaggcgagcgcccaagaaaaaggg

SEQ ID NO: 22463 - RNA, 76 nt, Homo sapiens
cccaggacagcaagaaccaggaaaccgaagaagaacccgagccaaagggaggaaaacagacaaaccaaagcaaaaa

(The sequence listing continues in the following parts.)

1. A method of detecting alternatively spliced transcripts or fusion transcripts in at least one RNA sequence obtained from biochemical analysis of a biological sample from a species or from a database, comprising the steps of:
(a) providing a computer for data identification, aligning, and comparison purposes, wherein the computer has access to predetermined genome data of said species, comprising data of predetermined genomic nucleotide sequences, predetermined splicing junctions, predetermined exons, predetermined introns, and annotated genes;
(b) generating a splicing code table using the predetermined genome data, the splicing code table comprising ordered E5 keys, I5 keys, E3 keys and I3 keys, wherein the E5 keys, the I5 keys, the E3 keys and the I3 keys are subsequences of predetermined 5′ exonic (E5), 5′ intronic (I5), 3′ exonic (E3), and 3′ intronic (I3) splicing sequences for each of the predetermined splicing junctions respectively;
(c) aligning the at least one RNA sequence with each of the E5 keys and each of the E3 keys in the splicing code table; and
(d) determining that the at least one RNA sequence is an alternatively spliced transcriptif:
the at least one RNA sequence contains a first subsequence substantially identical to an E5 key of a first splicing junction and a second subsequence substantially identical to an E3 key of a second splicing junction of the same gene; or
the at least RNA sequence contains a subsequence substantially identical to an E5 key of an annotated gene, but an immediate downstream sequence of said subsequence is mapped to an intron region of the same annotated gene; or
the at least one RNA sequence contains a subsequence substantially identical to an E3 key of a splicing junction, but an immediate upstream sequence of said subsequence is mapped to an intron region of the same annotated gene;
or determining that the at least one RNA sequence is a fusion transcriptif:
the at least one RNA sequence contains a subsequence substantially identical to an E5 key of a first annotated gene, and an immediate downstream sequence of said subsequence is substantially identical to an E3 key of a second annotated gene; or
the at least RNA sequence contains a subsequence substantially identical to an E5 key of a first annotated gene, and an immediate downstream sequence of said subsequence is mapped to a second annotated gene; or
the at least one RNA sequence contains a subsequence substantially identical to an E3 key of a first annotated gene, and an immediate upstream sequence of said subsequence is mapped to a second annotated gene.

2. The method of claim 1, wherein the E5 keys, the I5 keys, the E3 keys and the I3 keys in the splicing code table in step (b) have a length of about 20-50 bp.

3. The method of claim 1, wherein the at least one RNA sequence is obtained from RNA sequencing.

4. The method of claim 1, wherein the at least one RNA sequence is obtained from a biochemical analysis comprising RT-PCR.

5. The method of claim 1, wherein the at least one RNA sequence is obtained from a database.

6. The method of claim 1, further comprising a quality control step between step (b) and step c), wherein the quality control step comprises removing reads from the at least one RNA sequence, wherein the reads have substantially same sequences as at least one of mitochondrial gene sequences, mitochondrial ribosomal RNA sequences, ribosomal RNA sequences, poly (A) sequences, GC-repetitive sequences, AT-rich sequences, and simple and contaminant sequence reads.

7. The method of claim 1, wherein the species is an eukaryotic organism.

8. The method of claim 7, wherein the species is a mammal.

9. The method of claim 8, wherein the species is human.

10. A method of characterizing at least one RNA sequence read in a transcriptome dataset, obtained from a transcriptome sequencing of a biological sample, for fusion transcripts, the method comprising the steps of:
(a) providing a computer for data identification, aligning, comparison and computation purposes, wherein:
the computer has access to the transcriptome dataset, the transcriptome dataset comprising data of genome-wide RNA sequence reads and counts thereof and; and
the computer has access to a predetermined fusion transcript table, the predetermined fusion transcript table comprising data of predetermined E5-E3 keys, wherein:
each of the predetermined E5-E3 keys corresponds to junction sequence of a predetermined fusion transcript, comprising an E5 key and an E3 key, wherein:
the E5 key corresponds to a 5′-end subsequence of the predetermined fusion transcript and is mapped to a first annotated gene;
the E3 key corresponds to a 3′-end subsequence of the predetermined fusion transcript and is mapped to a second annotated gene; and
the E5 key and the E3 key is connected at a junction of the predetermined fusion transcript;
(b) aligning the at least one RNA sequence read with each of the E5-E3 keys in the predetermined fusion transcript table;
(c) determining that the at least one RNA sequence read is mapped to a predetermined fusion transcript if the at least one RNA sequence read contains a subsequence substantially identical to an E5-E3 key in the predetermined fusion transcript table.

11. The method according to claim 10, further comprising, following step (c), a step of determining expression level of the predetermined fusion transcript to which the at least one RNA sequence read is mapped in the biological sample, the step comprising:
(i) determining that E5 key and E3 key of the E5-E3 key, which corresponds to the predetermined fusion transcript, are unique in the transcriptome dataset; and
(ii) determining the expression level of the predetermined fusion transcription the biological sample, by dividing the count of the at least one RNA sequence read by sum of the counts of the genome-wide RNA sequence reads in the transcriptome dataset.

12. A set of isolated, cloned recombinant or synthetic polynucleotides, comprising at least one polynucleotide, wherein:
each of the at least one polynucleotide encodes a fusion transcript, the fusion transcript comprising a 5′ portion from a first gene and a 3′ portion from a second gene, wherein:
the 5′ portion from the first gene and the 3′ portion from the second gene is connected at a junction;
the junction has a flanking sequence, comprising a sequence selected from the group of nucleotide sequences as set forth in SEQ ID NOs: 1-258,853, or from complementary sequences thereof.

13. The set of polynucleotides according to claim 12, wherein the junction has a flanking sequence selected from the group of nucleotide sequences as set forth in SEQ ID NOs: 1-258,077.

14. A composition for detecting, from a biological sample from a subject, the set of polynucleotides as set forth in claim 12, comprising at least one of the following:
(a) at least one probe, wherein each of the at least one probe comprises a sequence that hybridizes specifically to a junction of a fusion transcript encoded by one of the set of polynucleotides;
(b) at least one pair of probes, wherein each of the at least one pair of probes comprises:
a first probe comprising a sequence that hybridizes specifically to a first gene of a fusion transcript encoded by one of the set of polynucleotides; and
a second probe comprising a sequence that hybridizes specifically to a second gene of the fusion transcript; or
(c) at least one pair of amplification primers, wherein each of the at least one pair of amplification primers comprise:
a first amplification primer comprising a sequence that hybridizes specifically to a first gene of a fusion transcript encoded by one of the set of polynucleotides;
a second amplification primer comprising a sequence that hybridizes specifically to a second gene of the fusion transcript; and
a means for detecting an amplified product generated between the first amplification primer and the second amplification primer.

15. The composition according to claim 14, comprising in (a) a plurality of probes, and a substrate on which the plurality of probes are immobilized.

16. The composition according to claim 14, further comprising a means for generating cDNA molecules from mRNA molecules in the biological sample.

17. A method for detecting, from a biological sample from a subject, the presence of at least one of the set of polynucleotides as set forth in claim 12, comprising:
(a) performing a biochemical assay on the biological sample, using at least one gene fusion informative composition for detection of the at least one of the set of polynucleotides; and
(b) determining the presence, or absence, of the at least one of the set of polynucleotides in the biological sample.

18. The method of claim 17, wherein in step (a) the biochemical assay comprises a nucleic acid hybridization technique, selected from the group consisting of: in situ hybridization (ISH), microarray analysis, and Northern blot analysis.

19. The method of claim 18, wherein the nucleic acid hybridization technique is microarray analysis, comprising the sub-steps of:
(i) isolating mRNA molecules from the biological sample;
(ii) converting the mRNA molecules into cDNA molecules, and optionally amplifying the cDNA molecules;
(iii) labeling the cDNA molecules;
(iv) hybridizing the labeled cDNA molecules to a microarray chip, wherein:
the microarray chip comprises a plurality of probes and a substrate;
the plurality of probes are immobilized on the substrate; and
each of the plurality of probes comprises an oligonucleotide sequence that hybridizes specifically to a junction of a fusion transcript encoded by one of the set of polynucleotides; and
(v) detecting a pattern of hybridization for each of the plurality of probes.

20. The method of claim 17, wherein in step (a) the biochemical assay comprises a nucleic acid amplification technique, selected from the group consisting of: polymerase chain reaction (PCR), reverse transcription polymerase chain reaction (RT-PCR), transcription-mediated amplification (TMA), ligase chain reaction (LCR), strand displacement amplification (SDA), and nucleic acid sequence based amplification (NASBA).

21. The method of claim 20, wherein the nucleic acid amplification technique is reverse transcription polymerase chain reaction (RT-PCR), comprising the sub-steps of:
(i) isolating mRNA molecules from the biological sample;
(ii) converting the mRNA molecules into cDNA molecules;
(iii) performing at least one PCR on the cDNA molecules, using at least one pair of amplification primers, wherein each of the at least one pair of amplification primers comprise:
a first amplification primer comprising a sequence that hybridizes specifically to a first gene of a fusion transcript encoded by one of the set of polynucleotides;
a second amplification primer comprising a sequence that hybridizes specifically to a second gene of said fusion transcript encoded by one of the set of polynucleotides; and
(iv) detecting amplification products from the at least one PCR.
